United States Patent Application Publication US 2012/0159672 A1 - sequence listing, part 13

SEQ ID NO: 28746 - protein, 230 aa, Zea mays subsp. mays
  peptide (1)..(230): Ceres Seq. ID no. 12425152
  misc_feature (37)..(91): Pfam Name: Pfam Description:  Homeobox domain
  misc_feature (1)..(156): NCBI GI NO: 5006855 NR Description: homeodomain leucine zipper protein [Oryza sativa]
  misc_feature (177)..(230): NCBI GI NO: 5006855 NR Description: homeodomain leucine zipper protein [Oryza sativa]
  misc_feature (1)..(156): NCBI GI NO: 37573050 NR Description: homeodomain leucine zipper protein
  misc_feature (177)..(230): NCBI GI NO: 37573050 NR Description: homeodomain leucine zipper protein
  misc_feature (1)..(186): NCBI GI NO: 15232122 NR Description: homeobox-leucine zipper protein HAT5
  misc_feature (1)..(218): NCBI GI NO: 18034441 NR Description: homeodomain leucine zipper protein CPHB-5
  misc_feature (3)..(196): NCBI GI NO: 7446244 NR Description: homeotic protein - carrot
  misc_feature (32)..(179): NCBI GI NO: 15148920 NR Description: homeodomain leucine zipper protein HDZ3
  misc_feature (33)..(132): NCBI GI NO: 166754 NR Description: homeobox protein
  misc_feature (11)..(154): NCBI GI NO: 15148918 NR Description: homeodomain leucine zipper protein HDZ2
MAVLAMDDATRVGKRPFFTTHEELLEEEYYDEQAPEKKRRLTAEQVQLLERSFEEENKLEPERKTELARRLGMAPRQVAVWFQNRRARWKTKQLETDYDRLKAAYNALAADHQGLLADNDSLRAQVICLTEKLQGKETSLSATIAAQEVDQPNEHTTGTEKLLAQQLKDDLHSSCGCTGHGALSSEEEDGGVVSDEGCNFDLPDAMFAVGVTNHGAEEAQLANWTSWFWN

SEQ ID NO: 28747 - DNA, 1265 bp, Zea mays subsp. mays
  misc_feature (1)..(1265): Ceres Seq. ID no. 12344227
aacgctcctcctttcaaacccacgccgacaccgatgccgagagccggggtgtccagcagcgagagtagccgccgtggcgccggtgcgttcagaaccctctccgaagatcgccgcatcaccgtattctgctccgacggtcgcctctaccaagtcgattacgcgtggaacgctacgaagctggcgggcgtcacctccgtcggggtgcgtgggaccgactccgtatgcgtcgtcggccagcggagggcgaacacgcacgcgcccaaggacaaattgctggacatgaccagcgtttcgcgcctgttcccgatcaccgaccggctggggttgctcgccacggggatcgcaggtgaggggagagcattggcacatgaggcaaggaatcaaactgcagaatttcgtttcaattggggatatgaaatgcctcctgatgttttggcacaatggattgcagacagagcacagatctggacccagtatgtttccaagagaccttctggagttgttgccatgattctgggcattgatgatgagaaaggaactccacaactctttacatgtgatcctgctgggtattttttcggtcacaaggcagcaagtgctggccaaagagatacggaggctgtcaactttcttgagaagaaaatgaagaacaatccttcactaccatttcaggaaaccattcagatggcaatatcagcattgcagttcgccctgaaggctgacctcaaagcctcggaagtcgaggttggggttgtcaggacggatgatccaactttcagagtgctgacagaagctgaaatcgatgagcatctggaagccatcaacccagagccgcggccactctgaaatgctccccggtttattccgggataaactgacattggagaactgaaaccatggcgacctcagctgcattttgggcaccggaaagtcaaagctttcatgtggttctttacgacggctctatggacattggattagcggtttttgggcggttttttcgttccagtgactagcggttttcagtggaaaaacggtttggtaaacctactgggcacacacgaccggccatccgccaagtcaggcgagccccgcgcggtcagtgcttgacgacgtggtatcacagccgccgtctaccgtccctcagcggacggccgggccaattcatgcatcaccgagcaataccgagcaatactgacatctaaaatgttctttagccgtaccatatccaagcaatgaccatagcactagctatgaacgtggtc

SEQ ID NO: 28748 - protein, 281 aa, Zea mays subsp. mays
  peptide (1)..(281): Ceres Seq. ID no. 12344228
  misc_feature (59)..(252): Pfam Name: Pfam Description:  Proteasome A-type and B-type
  misc_feature (25)..(275): NCBI GI NO: 12229948 NR Description: Proteasome subunit alpha type 6
  misc_feature (25)..(275): NCBI GI NO: 11967891 NR Description: maize 20S proteasome alpha subunit [Zea mays]
  misc_feature (25)..(275): NCBI GI NO: 12229922 NR Description: Proteasome subunit alpha type 6
  misc_feature (25)..(275): NCBI GI NO: 12229897 NR Description: Proteasome subunit alpha type 6
  misc_feature (25)..(275): NCBI GI NO: 15224993 NR Description: 20S proteasome alpha subunit A2
  misc_feature (25)..(275): NCBI GI NO: 2511588 NR Description: multicatalytic endopeptidase complex
  misc_feature (25)..(275): NCBI GI NO: 15238554 NR Description: 20S proteasome alpha subunit A1
  misc_feature (25)..(275): NCBI GI NO: 20260140 NR Description: multicatalytic endopeptidase complex alpha subunit-like
  misc_feature (25)..(275): NCBI GI NO: 3421070 NR Description: 20S proteasome subunit PAA1 [Arabidopsis thaliana]
  misc_feature (12)..(258): NCBI GI NO: 15022420 NR Description: alpha 1-2 subunit of 20S proteasome
NAPPFKPTPTPMPRAGVSSSESSRRGAGAFRTLSEDRRITVFCSDGRLYQVDYAWNATKLAGVTSVGVRGTDSVCVVGQRRANTHAPKDKLLDMTSVSRLFPITDRLGLLATGIAGEGRALAHEARNQTAEFRFNWGYEMPPDVLAQWIADRAQIWTQYVSKRPSGVVAMILGIDDEKGTPQLFTCDPAGYFFGHKAASAGQRDTEAVNFLEKKMKNNPSLPFQETIQMAISALQFALKADLKASEVEVGVVRTDDPTFRVLTEAEIDEHLEAINPEPRPL

SEQ ID NO: 28749 - protein, 270 aa, Zea mays subsp. mays
  peptide (1)..(270): Ceres Seq. ID no. 12344229
  misc_feature (48)..(241): Pfam Name: Pfam Description:  Proteasome A-type and B-type
  misc_feature (14)..(264): NCBI GI NO: 12229948 NR Description: Proteasome subunit alpha type 6
  misc_feature (14)..(264): NCBI GI NO: 11967891 NR Description: maize 20S proteasome alpha subunit [Zea mays]
  misc_feature (14)..(264): NCBI GI NO: 12229922 NR Description: Proteasome subunit alpha type 6
  misc_feature (14)..(264): NCBI GI NO: 12229897 NR Description: Proteasome subunit alpha type 6
  misc_feature (14)..(264): NCBI GI NO: 15224993 NR Description: 20S proteasome alpha subunit A2
  misc_feature (14)..(264): NCBI GI NO: 2511588 NR Description: multicatalytic endopeptidase complex
  misc_feature (14)..(264): NCBI GI NO: 15238554 NR Description: 20S proteasome alpha subunit A1
  misc_feature (14)..(264): NCBI GI NO: 20260140 NR Description: multicatalytic endopeptidase complex alpha subunit-like
  misc_feature (14)..(264): NCBI GI NO: 3421070 NR Description: 20S proteasome subunit PAA1 [Arabidopsis thaliana]
  misc_feature (1)..(247): NCBI GI NO: 15022420 NR Description: alpha 1-2 subunit of 20S proteasome
MPRAGVSSSESSRRGAGAFRTLSEDRRITVFCSDGRLYQVDYAWNATKLAGVTSVGVRGTDSVCVVGQRRANTHAPKDKLLDMTSVSRLFPITDRLGLLATGIAGEGRALAHEARNQTAEFRFNWGYEMPPDVLAQWIADRAQIWTQYVSKRPSGVVAMILGIDDEKGTPQLFTCDPAGYFFGHKAASAGQRDTEAVNFLEKKMKNNPSLPFQETIQMAISALQFALKADLKASEVEVGVVRTDDPTFRVLTEAEIDEHLEAINPEPRPL

SEQ ID NO: 28750 - protein, 188 aa, Zea mays subsp. mays
  peptide (1)..(188): Ceres Seq. ID no. 12344230
  misc_feature (1)..(159): Pfam Name: Pfam Description:  Proteasome A-type and B-type
  misc_feature (1)..(182): NCBI GI NO: 12229948 NR Description: Proteasome subunit alpha type 6
  misc_feature (1)..(182): NCBI GI NO: 11967891 NR Description: maize 20S proteasome alpha subunit [Zea mays]
  misc_feature (1)..(182): NCBI GI NO: 12229922 NR Description: Proteasome subunit alpha type 6
  misc_feature (1)..(182): NCBI GI NO: 12229897 NR Description: Proteasome subunit alpha type 6
  misc_feature (1)..(182): NCBI GI NO: 15224993 NR Description: 20S proteasome alpha subunit A2
  misc_feature (1)..(182): NCBI GI NO: 2511588 NR Description: multicatalytic endopeptidase complex
  misc_feature (1)..(182): NCBI GI NO: 15238554 NR Description: 20S proteasome alpha subunit A1
  misc_feature (1)..(182): NCBI GI NO: 20260140 NR Description: multicatalytic endopeptidase complex alpha subunit-like
  misc_feature (1)..(182): NCBI GI NO: 3421070 NR Description: 20S proteasome subunit PAA1 [Arabidopsis thaliana]
  misc_feature (1)..(165): NCBI GI NO: 15022420 NR Description: alpha 1-2 subunit of 20S proteasome
MTSVSRLFPITDRLGLLATGIAGEGRALAHEARNQTAEFRFNWGYEMPPDVLAQWIADRAQIWTQYVSKRPSGVVAMILGIDDEKGTPQLFTCDPAGYFFGHKAASAGQRDTEAVNFLEKKMKNNPSLPFQETIQMAISALQFALKADLKASEVEVGVVRTDDPTFRVLTEAEIDEHLEAINPEPRPL

SEQ ID NO: 28751 - DNA, 1498 bp, Zea mays subsp. mays
  misc_feature (1)..(1498): Ceres Seq. ID no. 12381221
  misc_feature (750)..(750): n is a, c, t, g, unknown, or other
gcacgagaccattacctagaacatcctaatcgaaaaaaaaaccaaagcaaagcaaacccagggcggccagcggacggaacccaaggcgaaaaggaagccagcggaagcagcgaaaagcccacgccaccttccaatcccccccaaattcccttgcattccattcccttcttcccttcccacacacctcctcctcctcctcctccgcgtctcttccccggcccccacatccgtccccccctctctctctcttcgccggccgccattgcgctcccgcattgcgccgggtcctaccagtccagcgcgggtccgtgccggcggcgggcatgatgccgcggcgcgtggcgtcggtgccggtgcccgactggctggaggcgctgctggccacgcgcttcttcctcgcctgcgccgcgcacccggcgtccccgcgcaacgagtgcaacatgttctgcctcgactgcacgggcgcgccgccgccgccgccgccggccttctgctactactgccgcgcgcaccgacactcgtcgcaccgcgtcatccagataaggcggtcctcctaccacgacgtcgtccgcgtgtcggaggtggaggacgtgctcgacatctccggcgtgcagacctacgtcatcaacagcgcccgggtgctcttcctcaacgagaggccccagccgcgcggcgccggcgcggccgcgggcaaggccgccgcgtccccctacaactgcgagatctgcggccgcgcgctgctcgaccccntccgcttctgctcgctcggatgcaagctggtggacaccaagaggagcaacggccacgcggctagttccgcggacggaggcggcggcggcggcggcgcagccagtggcaatgacgagacgacggaggccggcgggagcaagaacggcccgggggcgcggccgcacggacggcggcggaaggggaccccacaccgcgcgcccttctggtcctgacccaccaccggcaatggcgatcggtcgagttactccactagcgagcatcgaggcaatcaagagatcgataggggaataatggagggaggggacgatcgccgtctctcctccgcgccgccccgcgcttcttcggttcggttcggtttggttgtccttatatatacgtaattagaaacagaaaagcaaaggagagagaaaaagatactgcccgcccaactagagaaaggaaggaaggttatagataaacagatagaaaagcgagctgaggtcggcaccctcgcgcgcatcccccctcaaccaccggagggagggagagagggagccggcccggggccgcgcgctcgctggactgcagtaagcaacttgtctgtccccatccctctctcaccataccatggcgccatttggtacggtaggtgtgcatgatggcatgcctgatcatctcctcctcctcctcctcctagtcatcatattcatagatgatgctggtgaacttgagctagcaggaaatggatttaattctttctttttttttg

SEQ ID NO: 28752 - protein, 212 aa, Zea mays subsp. mays
  peptide (1)..(212): Ceres Seq. ID no. 12381222
  misc_feature (11)..(191): Pfam Name: Pfam Description:  Protein of unknown function, DUF597
  misc_feature (11)..(191): NCBI GI NO: 20805059 NR Description: B1108H10.20
  misc_feature (12)..(212): NCBI GI NO: 37537092 NR Description: unknown protein
  misc_feature (12)..(210): NCBI GI NO: 6714272 NR Description: F6N18.8 [Arabidopsis thaliana]
  misc_feature (12)..(210): NCBI GI NO: 18398555 NR Description: expressed protein; protein id: At1g32700
  misc_feature (12)..(188): NCBI GI NO: 38346725 NR Description: OSJNBa0086O06.23
  misc_feature (12)..(210): NCBI GI NO: 21554139 NR Description: unknown [Arabidopsis thaliana]
  misc_feature (12)..(157): NCBI GI NO: 18411153 NR Description: expressed protein; protein id: At1g76590
  misc_feature (12)..(157): NCBI GI NO: 21536890 NR Description: unknown [Arabidopsis thaliana]
  misc_feature (12)..(157): NCBI GI NO: 25337904 NR Description: unknown protein F14G6.19
  misc_feature (12)..(183): NCBI GI NO: 18394936 NR Description: expressed protein; protein id: At1g21000
  misc_feature (143)..(143): Xaa is any aa, unknown or other
MMPRRVASVPVPDWLEALLATRFFLACAAHPASPRNECNMFCLDCTGAPPPPPPAFCYYCRAHRHSSHRVIQIRRSSYHDVVRVSEVEDVLDISGVQTYVINSARVLFLNERPQPRGAGAAAGKAAASPYNCEICGRALLDPXRFCSLGCKLVDTKRSNGHAASSADGGGGGGGAASGNDETTEAGGSKNGPGARPHGRRRKGTPHRAPFWS

SEQ ID NO: 28753 - protein, 211 aa, Zea mays subsp. mays
  peptide (1)..(211): Ceres Seq. ID no. 12381223
  misc_feature (10)..(190): Pfam Name: Pfam Description:  Protein of unknown function, DUF597
  misc_feature (10)..(190): NCBI GI NO: 20805059 NR Description: B1108H10.20
  misc_feature (11)..(211): NCBI GI NO: 37537092 NR Description: unknown protein
  misc_feature (11)..(209): NCBI GI NO: 6714272 NR Description: F6N18.8 [Arabidopsis thaliana]
  misc_feature (11)..(209): NCBI GI NO: 18398555 NR Description: expressed protein; protein id: At1g32700
  misc_feature (11)..(187): NCBI GI NO: 38346725 NR Description: OSJNBa0086O06.23
  misc_feature (11)..(209): NCBI GI NO: 21554139 NR Description: unknown [Arabidopsis thaliana]
  misc_feature (11)..(156): NCBI GI NO: 18411153 NR Description: expressed protein; protein id: At1g76590
  misc_feature (11)..(156): NCBI GI NO: 21536890 NR Description: unknown [Arabidopsis thaliana]
  misc_feature (11)..(156): NCBI GI NO: 25337904 NR Description: unknown protein F14G6.19
  misc_feature (11)..(182): NCBI GI NO: 18394936 NR Description: expressed protein; protein id: At1g21000
  misc_feature (142)..(142): Xaa is any aa, unknown or other
MPRRVASVPVPDWLEALLATRFFLACAAHPASPRNECNMFCLDCTGAPPPPPPAFCYYCRAHRHSSHRVIQIRRSSYHDVVRVSEVEDVLDISGVQTYVINSARVLFLNERPQPRGAGAAAGKAAASPYNCEICGRALLDPXRFCSLGCKLVDTKRSNGHAASSADGGGGGGGAASGNDETTEAGGSKNGPGARPHGRRRKGTPHRAPFWS

SEQ ID NO: 28754 - protein, 173 aa, Zea mays subsp. mays
  peptide (1)..(173): Ceres Seq. ID no. 12381224
  misc_feature (1)..(152): Pfam Name: Pfam Description:  Protein of unknown function, DUF597
  misc_feature (1)..(152): NCBI GI NO: 20805059 NR Description: B1108H10.20
  misc_feature (1)..(173): NCBI GI NO: 37537092 NR Description: unknown protein
  misc_feature (1)..(171): NCBI GI NO: 6714272 NR Description: F6N18.8 [Arabidopsis thaliana]
  misc_feature (1)..(171): NCBI GI NO: 18398555 NR Description: expressed protein; protein id: At1g32700
  misc_feature (1)..(149): NCBI GI NO: 38346725 NR Description: OSJNBa0086O06.23
  misc_feature (1)..(171): NCBI GI NO: 21554139 NR Description: unknown [Arabidopsis thaliana]
  misc_feature (1)..(118): NCBI GI NO: 18411153 NR Description: expressed protein; protein id: At1g76590
  misc_feature (1)..(118): NCBI GI NO: 25337904 NR Description: unknown protein F14G6.19
  misc_feature (1)..(118): NCBI GI NO: 21536890 NR Description: unknown [Arabidopsis thaliana]
  misc_feature (1)..(144): NCBI GI NO: 18394936 NR Description: expressed protein; protein id: At1g21000
  misc_feature (104)..(104): Xaa is any aa, unknown or other
MFCLDCTGAPPPPPPAFCYYCRAHRHSSHRVIQIRRSSYHDVVRVSEVEDVLDISGVQTYVINSARVLFLNERPQPRGAGAAAGKAAASPYNCEICGRALLDPXRFCSLGCKLVDTKRSNGHAASSADGGGGGGGAASGNDETTEAGGSKNGPGARPHGRRRKGTPHRAPFWS

SEQ ID NO: 28755 - DNA, 1580 bp, Zea mays subsp. mays
  misc_feature (1)..(1580): Ceres Seq. ID no. 13493331
  misc_feature (124)..(124): n is a, c, t, g, unknown, or other
  misc_feature (127)..(127): n is a, c, t, g, unknown, or other
  misc_feature (204)..(204): n is a, c, t, g, unknown, or other
  misc_feature (198)..(198): n is a, c, t, g, unknown, or other
  misc_feature (347)..(347): n is a, c, t, g, unknown, or other
  misc_feature (188)..(188): n is a, c, t, g, unknown, or other
  misc_feature (197)..(197): n is a, c, t, g, unknown, or other
  misc_feature (203)..(203): n is a, c, t, g, unknown, or other
  misc_feature (187)..(187): n is a, c, t, g, unknown, or other
agctccccactctctctccgctgctgcctccgcggacggattccatccccggccctataagtgtggcttcgggacggcgcttcccatccgacaccggcgccttcgcggactgggtcgcctcctncgncgccgcggcgcgcggggacgacctctccctcggcttcaatgccagcgcggcggccgccgnngccgcggcnncctcnngcgcctcgctgggcgcgggcctctggggcccggcgtcctccgcctccgccgccatgcgccaggcggccgccatgaactacgggatggccgacgtggggatggtcgtcgtcgcgcccgccgcctccttccaccacacgcaccancaccaccaccaccacgaggccgccgccgccgccgccgccgcggctgcggcggcctccggcgaccccatcttcccgctgctctccggcggcccctgcgtgcttgatccggacaagtcggcctccgccagcgccatccagttctggcagcagcagcctccgccgccgtcgtcgccggctgctgcagcgggcgctaaccctaaccctagcgccagccccttcgcctacctcaagaagcccctcccgatgctggacgccggcgccggctcctcaggctccggcgccaccacgtgccaggactgcggcaaccaagcgaagaaggactgcggccacaaccggtgccgcacctgctgcaagagccgcggcttcgactgctccacgcacgtcaagagcacctgggtccccgccgcccgccgccgcgagcgccagcagctcgccgcctccggctccgcctcctcctcccccgccaccgcatccgcggcggccgtcgccgcgtccgcgtccaagaagccccgcctcctctcgtcgcagaccaccacctcgcacacgtccacctccaacgccaccacgccccgaagcttcgacaccacgtccagccaccaagacgcgtcgttcagggacagcctcccgaggcaggtgcgcgcgccggcggtgttcaagtgcgtgcgcgtgacgtccatcgaggacggcgaggacgagtacgcgtaccaggcgacggtcaccatcaacggccacctgttcaaggggttcctgtacgaccagggccccgacgacgggcgccacgcggcccaccagcaacgacgactgcacggcccggcgggtgcccaacatctccgagctccatctcggagcggcgtctggttccggcgccggcaccggcacctcgatgtcgatggctcctcccacggggctgtacggtgggggtggcggaggacatcatccgcacattctcggcgggtcgtcgagctacggtaacaccatgaactgatggagtacgttcctcccttctacaccggaagagtcccggcccgttaatttccattccttgttgctcttcattttccacgctatagtagcagagttcaattttctcagccttgtcacccggcgccatagatagcggggcatcaatgcatggcgttattctgttctacctccttcattccatcgtcctactgtgttatttagccattcgttggtgtataataacatcgatgagttgttttttcttcttcc

SEQ ID NO: 28756 - protein, 438 aa, Zea mays subsp. mays
  peptide (1)..(438): Ceres Seq. ID no. 13493332
  misc_feature (203)..(373): Pfam Name: DUF702 Pfam Description: Domain of unknown function
  misc_feature (96)..(377): NCBI GI NO: 34906658 NR Description: putative LRP(lateral root primordia) 1
  misc_feature (95)..(373): NCBI GI NO: 882341 NR Description: LRP1
  misc_feature (199)..(373): NCBI GI NO: 18416839 NR Description: lateral root primordia (LRP1)
  misc_feature (157)..(391): NCBI GI NO: 15234365 NR Description: expressed protein [Arabidopsis thaliana]
  misc_feature (193)..(391): NCBI GI NO: 15223669 NR Description: hypothetical protein [Arabidopsis thaliana]
  misc_feature (164)..(375): NCBI GI NO: 15222285 NR Description: hypothetical protein [Arabidopsis thaliana]
  misc_feature (269)..(374): NCBI GI NO: 15232522 NR Description: expressed protein [Arabidopsis thaliana]
  misc_feature (184)..(254): NCBI GI NO: 15232522 NR Description: expressed protein [Arabidopsis thaliana]
  misc_feature (197)..(262): NCBI GI NO: 15230389 NR Description: expressed protein [Arabidopsis thaliana]
  misc_feature (164)..(263): NCBI GI NO: 15239350 NR Description: zinc finger protein SHI-related
  misc_feature (41)..(41): Xaa is any aa, unknown or other
  misc_feature (42)..(42): Xaa is any aa, unknown or other
  misc_feature (62)..(62): Xaa is any aa, unknown or other
  misc_feature (65)..(65): Xaa is any aa, unknown or other
  misc_feature (66)..(66): Xaa is any aa, unknown or other
  misc_feature (67)..(67): Xaa is any aa, unknown or other
  misc_feature (68)..(68): Xaa is any aa, unknown or other
  misc_feature (115)..(115): Xaa is any aa, unknown or other
LPTLSPLLPPRTDSIPGPISVASGRRFPSDTGAFADWVASXXAAARGDDLSLGFNASAAAAXAAXXXXASLGAGLWGPASSASAAMRQAAAMNYGMADVGMVVVAPAASFHHTHXHHHHHEAAAAAAAAAAAASGDPIFPLLSGGPCVLDPDKSASASAIQFWQQQPPPPSSPAAAAGANPNPSASPFAYLKKPLPMLDAGAGSSGSGATTCQDCGNQAKKDCGHNRCRTCCKSRGFDCSTHVKSTWVPAARRRERQQLAASGSASSSPATASAAAVAASASKKPRLLSSQTTTSHTSTSNATTPRSFDTTSSHQDASFRDSLPRQVRAPAVFKCVRVTSIEDGEDEYAYQATVTINGHLFKGFLYDQGPDDGRHAAHQQRRLHGPAGAQHLRAPSRSGVWFRRRHRHLDVDGSSHGAVRWGWRRTSSAHSRRVVELR

SEQ ID NO: 28757 - protein, 353 aa, Zea mays subsp. mays
  peptide (1)..(353): Ceres Seq. ID no. 13493333
  misc_feature (118)..(288): Pfam Name: DUF702 Pfam Description: Domain of unknown function
  misc_feature (11)..(292): NCBI GI NO: 34906658 NR Description: putative LRP(lateral root primordia) 1
  misc_feature (10)..(288): NCBI GI NO: 882341 NR Description: LRP1
  misc_feature (114)..(288): NCBI GI NO: 18416839 NR Description: lateral root primordia (LRP1)
  misc_feature (72)..(306): NCBI GI NO: 15234365 NR Description: expressed protein [Arabidopsis thaliana]
  misc_feature (108)..(306): NCBI GI NO: 15223669 NR Description: hypothetical protein [Arabidopsis thaliana]
  misc_feature (79)..(290): NCBI GI NO: 15222285 NR Description: hypothetical protein [Arabidopsis thaliana]
  misc_feature (184)..(289): NCBI GI NO: 15232522 NR Description: expressed protein [Arabidopsis thaliana]
  misc_feature (99)..(169): NCBI GI NO: 15232522 NR Description: expressed protein [Arabidopsis thaliana]
  misc_feature (112)..(177): NCBI GI NO: 15230389 NR Description: expressed protein [Arabidopsis thaliana]
  misc_feature (79)..(178): NCBI GI NO: 15239350 NR Description: zinc finger protein SHI-related
  misc_feature (30)..(30): Xaa is any aa, unknown or other
MRQAAAMNYGMADVGMVVVAPAASFHHTHXHHHHHEAAAAAAAAAAAASGDPIFPLLSGGPCVLDPDKSASASAIQFWQQQPPPPSSPAAAAGANPNPSASPFAYLKKPLPMLDAGAGSSGSGATTCQDCGNQAKKDCGHNRCRTCCKSRGFDCSTHVKSTWVPAARRRERQQLAASGSASSSPATASAAAVAASASKKPRLLSSQTTTSHTSTSNATTPRSFDTTSSHQDASFRDSLPRQVRAPAVFKCVRVTSIEDGEDEYAYQATVTINGHLFKGFLYDQGPDDGRHAAHQQRRLHGPAGAQHLRAPSRSGVWFRRRHRHLDVDGSSHGAVRWGWRRTSSAHSRRVVELR

SEQ ID NO: 28758 - protein, 347 aa, Zea mays subsp. mays
  peptide (1)..(347): Ceres Seq. ID no. 13493334
  misc_feature (112)..(282): Pfam Name: DUF702 Pfam Description: Domain of unknown function
  misc_feature (5)..(286): NCBI GI NO: 34906658 NR Description: putative LRP(lateral root primordia) 1
  misc_feature (4)..(282): NCBI GI NO: 882341 NR Description: LRP1
  misc_feature (108)..(282): NCBI GI NO: 18416839 NR Description: lateral root primordia (LRP1)
  misc_feature (66)..(300): NCBI GI NO: 15234365 NR Description: expressed protein [Arabidopsis thaliana]
  misc_feature (102)..(300): NCBI GI NO: 15223669 NR Description: hypothetical protein [Arabidopsis thaliana]
  misc_feature (73)..(284): NCBI GI NO: 15222285 NR Description: hypothetical protein [Arabidopsis thaliana]
  misc_feature (178)..(283): NCBI GI NO: 15232522 NR Description: expressed protein [Arabidopsis thaliana]
  misc_feature (93)..(163): NCBI GI NO: 15232522 NR Description: expressed protein [Arabidopsis thaliana]
  misc_feature (106)..(171): NCBI GI NO: 15230389 NR Description: expressed protein [Arabidopsis thaliana]
  misc_feature (73)..(172): NCBI GI NO: 15239350 NR Description: zinc finger protein SHI-related
  misc_feature (24)..(24): Xaa is any aa, unknown or other
MNYGMADVGMVVVAPAASFHHTHXHHHHHEAAAAAAAAAAAASGDPIFPLLSGGPCVLDPDKSASASAIQFWQQQPPPPSSPAAAAGANPNPSASPFAYLKKPLPMLDAGAGSSGSGATTCQDCGNQAKKDCGHNRCRTCCKSRGFDCSTHVKSTWVPAARRRERQQLAASGSASSSPATASAAAVAASASKKPRLLSSQTTTSHTSTSNATTPRSFDTTSSHQDASFRDSLPRQVRAPAVFKCVRVTSIEDGEDEYAYQATVTINGHLFKGFLYDQGPDDGRHAAHQQRRLHGPAGAQHLRAPSRSGVWFRRRHRHLDVDGSSHGAVRWGWRRTSSAHSRRVVELR

SEQ ID NO: 28759 - DNA, 1430 bp, Zea mays subsp. mays
  misc_feature (1)..(1430): Ceres Seq. ID no. 12408941
accatcatggcagaagcggccggcggcggacccctgctccccgaggaactcattatctgggagatcctaacccgtctgccggcgaagcccctcctccgatgccgcgctgtctgcctctcctggtgccgccgactcacctccgacgccaaattcctcctcgcccaccaccgtcgccagccctcgctcccgctcctcactgaaggggacaggagcaccgaggagaggaggatcgacgccctggactaccgcaccggcgagcggcgccccatcgcgcggacaacaggccggaccgccgccaacggggacgacctgaacgtgctggcttcctgcgaaggcctcctcatcctcctcgccaacggcggcctccagatctgcaacccggcgacccgccagcgcgcgccactcactcttctccacggcgcctattgcatctccgcgctttaccctcacatcccgtccaggtcgtaccgtgtgctctgctgcttcgagagagccgaggacggccacgccgtgtaccacgtgcacaccgtcgggtcgcgcgaactcaggtgcgtcggagaacctcccgcgccgtgggcgtccggggatatggtaatggcgatgccgatgatggtgtaccttcacccgcacgtcgtggcagacagcaggatctactggcagccggtaaagctgcccgtcggcaacggcaaggtcaacaacatgctcgtgttcgacacaatgaccgagtccttccagcaactgctgtcgcccgtggagggcccctttcttgaactgtttcagatgaacagcggcgcccttggattgtaccactgccgcagcggcaaggttgatctttgggtgttacaggatcacgggagctggtcctggtcgatgaaccaccggatcaaattggacgtgatgtttttctccctgctgccggtgctggacccggaaggagatgtgctagtgctttctaaaagaggggaaacaggcatcctgtggcaacatctgcatcacatttctggtgtcaatggcagtttgctgggccctgtatcaatggagcgcttatctgaagcttagcaggcataggctcaaagaaagtctagtccaccatgacttcttctcgatggtaggtaatgagggtggtgtggatgaaaaaccattgttcgatggcttgtcaactgtggcattgcttcgtgatgataattctgagccacattgagaaacaaaggtattactcaagctgtttcatctcatcaggatggagtcactcctgcctagtaataacagcactgcagattagtaataacctgaaactatacctcgagtctgatttttcccttttcacatgagtcataaacactgttatgactggtattttattttcccttttcacgtgagtcatgaacactgttattactggtattttattttccattttcacatgagcc

SEQ ID NO: 28760 - protein, 352 aa, Zea mays subsp. mays
  peptide (1)..(352): Ceres Seq. ID no. 12408942
  misc_feature (9)..(56): Pfam Name: Pfam Description:  F-box domain
  misc_feature (3)..(322): NCBI GI NO: 38346045 NR Description: OSJNBa0059D20.17
  misc_feature (13)..(341): NCBI GI NO: 38346536 NR Description: OSJNBa0040D17.11
  misc_feature (9)..(322): NCBI GI NO: 37533944 NR Description: hypothetical protein
  misc_feature (6)..(299): NCBI GI NO: 38344215 NR Description: OSJNBb0026E15.3
  misc_feature (13)..(317): NCBI GI NO: 38346527 NR Description: OSJNBa0040D17.2
  misc_feature (1)..(316): NCBI GI NO: 37530720 NR Description: unknown protein
  misc_feature (4)..(299): NCBI GI NO: 34905158 NR Description: P0700D12.24
  misc_feature (256)..(326): NCBI GI NO: 25553615 NR Description: OJ1046_F10.9
  misc_feature (12)..(65): NCBI GI NO: 25553615 NR Description: OJ1046_F10.9
TIMAEAAGGGPLLPEELIIWEILTRLPAKPLLRCRAVCLSWCRRLTSDAKFLLAHHRRQPSLPLLTEGDRSTEERRIDALDYRTGERRPIARTTGRTAANGDDLNVLASCEGLLILLANGGLQICNPATRQRAPLTLLHGAYCISALYPHIPSRSYRVLCCFERAEDGHAVYHVHTVGSRELRCVGEPPAPWASGDMVMAMPMMVYLHPHVVADSRIYWQPVKLPVGNGKVNNMLVFDTMTESFQQLLSPVEGPFLELFQMNSGALGLYHCRSGKVDLWVLQDHGSWSWSMNHRIKLDVMFFSLLPVLDPEGDVLVLSKRGETGILWQHLHHISGVNGSLLGPVSMERLSEA

SEQ ID NO: 28761 - protein, 350 aa, Zea mays subsp. mays
  peptide (1)..(350): Ceres Seq. ID no. 12408943
  misc_feature (7)..(54): Pfam Name: Pfam Description:  F-box domain
  misc_feature (1)..(320): NCBI GI NO: 38346045 NR Description: OSJNBa0059D20.17
  misc_feature (11)..(339): NCBI GI NO: 38346536 NR Description: OSJNBa0040D17.11
  misc_feature (7)..(320): NCBI GI NO: 37533944 NR Description: hypothetical protein
  misc_feature (4)..(297): NCBI GI NO: 38344215 NR Description: OSJNBb0026E15.3
  misc_feature (11)..(315): NCBI GI NO: 38346527 NR Description: OSJNBa0040D17.2
  misc_feature (1)..(314): NCBI GI NO: 37530720 NR Description: unknown protein
  misc_feature (2)..(297): NCBI GI NO: 34905158 NR Description: P0700D12.24
  misc_feature (254)..(324): NCBI GI NO: 25553615 NR Description: OJ1046_F10.9
  misc_feature (10)..(63): NCBI GI NO: 25553615 NR Description: OJ1046_F10.9
MAEAAGGGPLLPEELIIWEILTRLPAKPLLRCRAVCLSWCRRLTSDAKFLLAHHRRQPSLPLLTEGDRSTEERRIDALDYRTGERRPIARTTGRTAANGDDLNVLASCEGLLILLANGGLQICNPATRQRAPLTLLHGAYCISALYPHIPSRSYRVLCCFERAEDGHAVYHVHTVGSRELRCVGEPPAPWASGDMVMAMPMMVYLHPHVVADSRIYWQPVKLPVGNGKVNNMLVFDTMTESFQQLLSPVEGPFLELFQMNSGALGLYHCRSGKVDLWVLQDHGSWSWSMNHRIKLDVMFFSLLPVLDPEGDVLVLSKRGETGILWQHLHHISGVNGSLLGPVSMERLSEA

SEQ ID NO: 28762 - DNA, 1815 bp, Zea mays subsp. mays
  misc_feature (1)..(1815): Ceres Seq. ID no. 12408937
aagtatcaagctaggcaggcctggtcccgaagaacacccttctctggtcgtcgcatcgcagggcagctagctaggtagctaacatccgccatggcgcgcgggggagacggcctgcaggtgctgagcgcgctggacgcggcgaagacgcagtggtaccacttcacggccatcatcgtcgccggcatgggcttcttcacggacgcctacgacctcttctgcatctccctcgtcaccaagctgctgggccgcatctactacacggacaccagcaaggacagccccgggtcgctgccgcccaacgtcgcggcggcggtcaacggcgtggccttctgcggcacgctggccggccagctcttcttcggctggctgggcgacaagctggggcgcaagagcgtgtacgggatgacgctcatggtcatggtcatctgctccgtcgcgtcgggcctctcgttcggccacacccccacgggggtcatggccacgctctgcttcttccgcttctggctcggcttcggcatcggcggcgactacccgctgtcggccaccatcatgtccgagtacgccaacaagaggacccgcggcgccttcatcgccgccgtcttcgccatgcagggcttcggcatcctcgccggcggcatcgtcacgctcgtcatctccgccgccttccgcgcggcgtacccgtccccggcgtacagggacgaccacttcacctccaccgtgccgcaggccgacttcgtgtggcgggtcatcctcatgctcggcgccgcgccggcgctgctcacctactactggcggatgaagatgcccgagacggcgcggtacacggcgctggtggccaagaacgccaagcaggccgcggccgacatgtccaaggtgctgcagactgagatcgtggacgagcaggagaagctggacgccgccgagggcgccaacagcttcggcctcttctccagggagttcgcgcgccgccacggcctccacctcgtcggcaccgccaccacctggttcctgctcgacatcgccttctacagccagaacctgttccagaaggacatcttcaccagcatcaactggatccccaaggccaacaccatgagcgcgctggaggaggtgtaccgcatctcccgcgcgcagacgctcatcgcgctctgcggcacagtcccgggctactggttcaccgtcgcgctcatcgacgtcgtcggccgcttcgccatccagctgctgggcttcttcatgatgaccgtcttcatgctcggcctcgccatcccttaccaccactggaccacgccgggcaaccacatcggcttcgtcgtcatgtacgccttcaccttcttcttcgccaacttcgggcccaacagcaccaccttcatcgtgcccgccgagatcttcccggcgcgcctgcgctccacctgccacggcatctccgccgcctcggggaaggccggggccatcatcggcgcgttcggcttcctgtacgcggcgcagaaccaggacaggagcaagacggacgccggctaccccgcgggcatcggcgtgcgcaactcgctcttcgtcctcgccgccagcaacatgctcggcttcgtcctcacgttcctcgtgccggagtccaagggcaagtcgctcgaggagatgtccggtgaggctgaagactcagaggaggagcccgtcggcgcccgtgcggtgcggccgtcggagacccagatggtgtagagaatcgatcgatcgacgcgtgttccttcctgcactgcacatggtgggctatcatgtcctcaattgtttttttccacgttaaagtcaaccctggctgtgttttgc

SEQ ID NO: 28763 - protein, 539 aa, Zea mays subsp. mays
  peptide (1)..(539): Ceres Seq. ID no. 12408938
  misc_feature (25)..(517): Pfam Name: and other Pfam Description: Sugar
  misc_feature (1)..(534): NCBI GI NO: 29367131 NR Description: phosphate transporter HvPT4
  misc_feature (1)..(539): NCBI GI NO: 27261479 NR Description: Putative phosphate transporter OsPT12
  misc_feature (1)..(539): NCBI GI NO: 23600482 NR Description: putative phosphate transporter OsPT12
  misc_feature (8)..(539): NCBI GI NO: 29367127 NR Description: phosphate transporter HvPT5
  misc_feature (1)..(531): NCBI GI NO: 23506605 NR Description: phosphate transporter 6
  misc_feature (8)..(525): NCBI GI NO: 20162455 NR Description: phosphate transporter [Oryza sativa]
  misc_feature (8)..(525): NCBI GI NO: 15983299 NR Description: phosphate transporter [Oryza sativa subsp. indica]
  misc_feature (8)..(530): NCBI GI NO: 7446748 NR Description: phosphate transport protein PT1 - potato
  misc_feature (8)..(530): NCBI GI NO: 7446753 NR Description: probable inorganic phosphate transport protein -tomato
  misc_feature (216)..(517): NCBI GI NO: 14324338 NR Description: metabolite transporter [Thermoplasma volcanium]
MARGGDGLQVLSALDAAKTQWYHFTAIIVAGMGFFTDAYDLFCISLVTKLLGRIYYTDTSKDSPGSLPPNVAAAVNGVAFCGTLAGQLFFGWLGDKLGRKSVYGMTLMVMVICSVASGLSFGHTPTGVMATLCFFRFWLGFGIGGDYPLSATIMSEYANKRTRGAFIAAVFAMQGFGILAGGIVTLVISAAFRAAYPSPAYRDDHFTSTVPQADFVWRVILMLGAAPALLTYYWRMKMPETARYTALVAKNAKQAAADMSKVLQTEIVDEQEKLDAAEGANSFGLFSREFARRHGLHLVGTATTWFLLDIAFYSQNLFQKDIFTSINWIPKANTMSALEEVYRISRAQTLIALCGTVPGYWFTVALIDVVGRFAIQLLGFFMMTVFMLGLAIPYHHWTTPGNHIGFVVMYAFTFFFANFGPNSTTFIVPAEIFPARLRSTCHGISAASGKAGAIIGAFGFLYAAQNQDRSKTDAGYPAGIGVRNSLFVLAASNMLGFVLTFLVPESKGKSLEEMSGEAEDSEEEPVGARAVRPSETQMV

SEQ ID NO: 28764 - protein, 508 aa, Zea mays subsp. mays
  peptide (1)..(508): Ceres Seq. ID no. 12408939
  misc_feature (1)..(486): Pfam Name: and other Pfam Description: Sugar
  misc_feature (1)..(503): NCBI GI NO: 29367131 NR Description: phosphate transporter HvPT4
  misc_feature (1)..(508): NCBI GI NO: 27261479 NR Description: Putative phosphate transporter OsPT12
  misc_feature (1)..(508): NCBI GI NO: 23600482 NR Description: putative phosphate transporter OsPT12
  misc_feature (1)..(508): NCBI GI NO: 29367127 NR Description: phosphate transporter HvPT5
  misc_feature (1)..(500): NCBI GI NO: 23506605 NR Description: phosphate transporter 6
  misc_feature (1)..(494): NCBI GI NO: 20162455 NR Description: phosphate transporter [Oryza sativa]
  misc_feature (1)..(494): NCBI GI NO: 15983299 NR Description: phosphate transporter [Oryza sativa subsp. indica]
  misc_feature (1)..(499): NCBI GI NO: 7446748 NR Description: phosphate transport protein PT1 - potato
  misc_feature (1)..(499): NCBI GI NO: 7446753 NR Description: probable inorganic phosphate transport protein -tomato
  misc_feature (185)..(486): NCBI GI NO: 14324338 NR Description: metabolite transporter [Thermoplasma volcanium]
MGFFTDAYDLFCISLVTKLLGRIYYTDTSKDSPGSLPPNVAAAVNGVAFCGTLAGQLFFGWLGDKLGRKSVYGMTLMVMVICSVASGLSFGHTPTGVMATLCFFRFWLGFGIGGDYPLSATIMSEYANKRTRGAFIAAVFAMQGFGILAGGIVTLVISAAFRAAYPSPAYRDDHFTSTVPQADFVWRVILMLGAAPALLTYYWRMKMPETARYTALVAKNAKQAAADMSKVLQTEIVDEQEKLDAAEGANSFGLFSREFARRHGLHLVGTATTWFLLDIAFYSQNLFQKDIFTSINWIPKANTMSALEEVYRISRAQTLIALCGTVPGYWFTVALIDVVGRFAIQLLGFFMMTVFMLGLAIPYHHWTTPGNHIGFVVMYAFTFFFANFGPNSTTFIVPAEIFPARLRSTCHGISAASGKAGAIIGAFGFLYAAQNQDRSKTDAGYPAGIGVRNSLFVLAASNMLGFVLTFLVPESKGKSLEEMSGEAEDSEEEPVGARAVRPSETQMV

SEQ ID NO: 28765 - protein, 435 aa, Zea mays subsp. mays
  peptide (1)..(435): Ceres Seq. ID no. 12408940
  misc_feature (1)..(413): Pfam Name: and other Pfam Description: Sugar
  misc_feature (1)..(430): NCBI GI NO: 29367131 NR Description: phosphate transporter HvPT4
  misc_feature (1)..(435): NCBI GI NO: 27261479 NR Description: Putative phosphate transporter OsPT12
  misc_feature (1)..(435): NCBI GI NO: 23600482 NR Description: putative phosphate transporter OsPT12
  misc_feature (1)..(435): NCBI GI NO: 29367127 NR Description: phosphate transporter HvPT5
  misc_feature (1)..(427): NCBI GI NO: 23506605 NR Description: phosphate transporter 6
  misc_feature (1)..(421): NCBI GI NO: 20162455 NR Description: phosphate transporter [Oryza sativa]
  misc_feature (1)..(421): NCBI GI NO: 15983299 NR Description: phosphate transporter [Oryza sativa subsp. indica]
  misc_feature (1)..(426): NCBI GI NO: 7446748 NR Description: phosphate transport protein PT1 - potato
  misc_feature (1)..(426): NCBI GI NO: 7446753 NR Description: probable inorganic phosphate transport protein -tomato
  misc_feature (112)..(413): NCBI GI NO: 14324338 NR Description: metabolite transporter [Thermoplasma volcanium]
MTLMVMVICSVASGLSFGHTPTGVMATLCFFRFWLGFGIGGDYPLSATIMSEYANKRTRGAFIAAVFAMQGFGILAGGIVTLVISAAFRAAYPSPAYRDDHFTSTVPQADFVWRVILMLGAAPALLTYYWRMKMPETARYTALVAKNAKQAAADMSKVLQTEIVDEQEKLDAAEGANSFGLFSREFARRHGLHLVGTATTWFLLDIAFYSQNLFQKDIFTSINWIPKANTMSALEEVYRISRAQTLIALCGTVPGYWFTVALIDVVGRFAIQLLGFFMMTVFMLGLAIPYHHWTTPGNHIGFVVMYAFTFFFANFGPNSTTFIVPAEIFPARLRSTCHGISAASGKAGAIIGAFGFLYAAQNQDRSKTDAGYPAGIGVRNSLFVLAASNMLGFVLTFLVPESKGKSLEEMSGEAEDSEEEPVGARAVRPSETQMV

SEQ ID NO: 28766 - DNA, 1448 bp, Zea mays subsp. mays
  misc_feature (1)..(1448): Ceres Seq. ID no. 13494789
  misc_feature (255)..(255): n is a, c, t, g, unknown, or other
  misc_feature (298)..(298): n is a, c, t, g, unknown, or other
  misc_feature (1126)..(1126): n is a, c, t, g, unknown, or other
  misc_feature (879)..(879): n is a, c, t, g, unknown, or other
  misc_feature (178)..(178): n is a, c, t, g, unknown, or other
  misc_feature (311)..(311): n is a, c, t, g, unknown, or other
gactcagtggcacggggcgcggacgctgccgctcgcgatatttgcgagagagagagagagagagagggcccgagagccgaggacgagtgcagtctggctggcgtgatgctgcttcggagcgcgtcctcgccgctgctcaactgcgggcgcgcgccggctgcggcggcgtcggtcgagncacctcgcggtggtttcgccgttgttatcaccggcagtggcggcgctaggcaggggccggtgctgtgccgcgccatntccgagggggacctcgccgcgccgctcgtgcccaagaaggatnatggacacggganggcgccgaggctatcggcgtccttgtcctcgtccgcctccatcttcgtcgaggaggacggcgagggcgaggaggaggaggaggacctggtcgcggtcgcggtcgcgggggccggcgtggacgtgccgctgccgctgcgtcggctgctgacgaacacggggctggacgtgtccgccgccgcggcgctggcgttcgtggagcagggcgtcggcggcagcggcgggggcgggaaggcgtgcggcagcagcggcggcaagggtggggtcggggacggcgacggtggcagcaaccgcgccgccacggacgcccactaccggcagatgatcgaggcggacccgggcaactcgctgctcctggtcaactacgccaggttcctcaaggaggtggcgggggacgcagcaagggcgcaggagtactgcgagcgcgccatcctcgccagtcccggcgacgccgaggcgctgtcgctctacgcgggcctcgtttgggagaccagccgcgacgctggccgcgccgaggactactacagccgcgccgtccaggccgcacccgacgactgctacgtcctgggntcttacgccgggttcctgtgggacgccgaggaggacgaggaagagaactccgagcccttgccacctccttcgctgttccagggggcagctcagcgtccttccatcacagcggcctcttagatgatcgtgaactcgatctagatctcaccaccgcctgtgaacgaagctgaatctggaaccctggagagtggagagtgactgggagtgggagataaccgtgcagaaacccccgacgagtgactcgcantcgccggccggctcctcgccgcttgtgaactgaatcacggcacatgtaaaactgaatctggcagagcacacacgcgccgcgcctaagcctattagcgtctatagactttgcagggctatgtatagtagatatgtagattgagaccctgctgagcttgtacgtgcagtatgttcctagtcacttgtgtatcattactagtaatgcagtatctctcgcaaaataaacgtcaaaaacccttcctgctgcttcatccgagcagagcatcttccaagaagagcagatatcgaactgcaagaactgatgcactgaatcacaaagcttt

SEQ ID NO: 28767 - protein, 332 aa, Zea mays subsp. mays
  peptide (1)..(332): Ceres Seq. ID no. 13494790
  misc_feature (146)..(332): NCBI GI NO: 18412668 NR Description: expressed protein [Arabidopsis thaliana]
  misc_feature (173)..(311): NCBI GI NO: 15241290 NR Description: expressed protein [Arabidopsis thaliana]
  misc_feature (174)..(332): NCBI GI NO: 14532728 NR Description: unknown protein [Arabidopsis thaliana]
  misc_feature (174)..(332): NCBI GI NO: 15236755 NR Description: expressed protein [Arabidopsis thaliana]
  misc_feature (179)..(311): NCBI GI NO: 7487766 NR Description: hypothetical protein T6K21
  misc_feature (179)..(311): NCBI GI NO: 18414994 NR Description: expressed protein [Arabidopsis thaliana]
  misc_feature (179)..(311): NCBI GI NO: 21592868 NR Description: unknown [Arabidopsis thaliana]
  misc_feature (130)..(316): NCBI GI NO: 37537130 NR Description: unknown protein
  misc_feature (123)..(273): NCBI GI NO: 38345382 NR Description: OSJNBa0067K08.11
  misc_feature (207)..(311): NCBI GI NO: 18390404 NR Description: expressed protein [Arabidopsis thaliana]
  misc_feature (60)..(60): Xaa is any aa, unknown or other
  misc_feature (85)..(85): Xaa is any aa, unknown or other
  misc_feature (100)..(100): Xaa is any aa, unknown or other
  misc_feature (104)..(104): Xaa is any aa, unknown or other
  misc_feature (293)..(293): Xaa is any aa, unknown or other
DSVARGADAAARDICEREREREGPRAEDECSLAGVMLLRSASSPLLNCGRAPAAAASVEXPRGGFAVVITGSGGARQGPVLCRAXSEGDLAAPLVPKKDXGHGXAPRLSASLSSSASIFVEEDGEGEEEEEDLVAVAVAGAGVDVPLPLRRLLTNTGLDVSAAAALAFVEQGVGGSGGGGKACGSSGGKGGVGDGDGGSNRAATDAHYRQMIEADPGNSLLLVNYARFLKEVAGDAARAQEYCERAILASPGDAEALSLYAGLVWETSRDAGRAEDYYSRAVQAAPDDCYVLXSYAGFLWDAEEDEEENSEPLPPPSLFQGAAQRPSITAAS

SEQ ID NO: 28768 - protein, 297 aa, Zea mays subsp. mays
  peptide (1)..(297): Ceres Seq. ID no. 13494791
  misc_feature (111)..(297): NCBI GI NO: 18412668 NR Description: expressed protein [Arabidopsis thaliana]
  misc_feature (138)..(276): NCBI GI NO: 15241290 NR Description: expressed protein [Arabidopsis thaliana]
  misc_feature (139)..(297): NCBI GI NO: 14532728 NR Description: unknown protein [Arabidopsis thaliana]
  misc_feature (139)..(297): NCBI GI NO: 15236755 NR Description: expressed protein [Arabidopsis thaliana]
  misc_feature (144)..(276): NCBI GI NO: 7487766 NR Description: hypothetical protein T6K21
  misc_feature (144)..(276): NCBI GI NO: 21592868 NR Description: unknown [Arabidopsis thaliana]
  misc_feature (144)..(276): NCBI GI NO: 18414994 NR Description: expressed protein [Arabidopsis thaliana]
  misc_feature (95)..(281): NCBI GI NO: 37537130 NR Description: unknown protein
  misc_feature (88)..(238): NCBI GI NO: 38345382 NR Description: OSJNBa0067K08.11
  misc_feature (172)..(276): NCBI GI NO: 18390404 NR Description: expressed protein [Arabidopsis thaliana]
  misc_feature (25)..(25): Xaa is any aa, unknown or other
  misc_feature (50)..(50): Xaa is any aa, unknown or other
  misc_feature (65)..(65): Xaa is any aa, unknown or other
  misc_feature (69)..(69): Xaa is any aa, unknown or other
  misc_feature (258)..(258): Xaa is any aa, unknown or other
MLLRSASSPLLNCGRAPAAAASVEXPRGGFAVVITGSGGARQGPVLCRAXSEGDLAAPLVPKKDXGHGXAPRLSASLSSSASIFVEEDGEGEEEEEDLVAVAVAGAGVDVPLPLRRLLTNTGLDVSAAAALAFVEQGVGGSGGGGKACGSSGGKGGVGDGDGGSNRAATDAHYRQMIEADPGNSLLLVNYARFLKEVAGDAARAQEYCERAILASPGDAEALSLYAGLVWETSRDAGRAEDYYSRAVQAAPDDCYVLXSYAGFLWDAEEDEEENSEPLPPPSLFQGAAQRPSITAAS

SEQ ID NO: 28769 - DNA, 1291 bp, Zea mays subsp. mays
  misc_feature (1)..(1291): Ceres Seq. ID no. 12346104
attggcgagcctgcacgcggccttgccctcccaggaagggaggccgaactgagcagttcgaccaggcagccatccacctccaaccccccttcgcctgcgcaaatcgttaccatcccagcgagaaagatggcgcgcgtctccaatgccaagaagcggcagggcgccaagcccgcctccgcgctcagcagcaccgacaccagcaccgccgcaaagaggaaggccgaggacgaccgccccgtgcgcgtctacgccgacggcatcttcgatctcttccacttcggccacgcccgcgccctcgagcaggccaagatgctgttccccaacacctatcttctcgtcggatgctgcaacgacgagctaacctaccgctacaagggcaagaccgtcatgacccaggaagagcgatacgaatccctgcggcactgcaagtgggttgatgaggtcattcctgatgcaccgtgggttctcacacaggagtttattgataagcatcagattgactatgttgctcatgatgcgctgccttatgctgatactagcggaacagcaaatgatgtctatgaatttgttaaaaagattggaaaattcaaggaaacaaaaaggacagacggggtttctacttcagatctcataatgaggatcttgaaggactataaccagtatgtcatgaggaatttagcacggggctactcgaggaaagatcttggtgtgagctatgtcaaggagaaacaattgcaagttaatatgaagatcaataaactgcgggagactgtgaaggcacatcaggaaaagttgcaaacagtggcaaagactgctggtttgaatcatgaagaatggcttgctaatgcggatcgctgggttgctggtttcctagagaagtttgagcaacactgccacaatatggaaactgcgatcaaggatcggatacaggagaggctagggaaacagttgagcaaaggaataatcgctggtcttgtgcaggaaccggtgacagcctaaaacaggtgatgctgtcaatgaaacgcactgatgcttttcagatcatcctcccgatgtggttctggtgcgaggcttgtaagggtgcaacgcggttgctgagacgttttaattttgtggtgcatgtgaactcttcccgtatacaaatgtctataggagaggcgtttggtgttttgggcatcgtcgtgggcgtgtttctttgtatctaacgggttagattaaccttttttttgtatcgagattgatgttctttcgtggttataataataataaataataataatattgtcaaagc

SEQ ID NO: 28770 - protein, 332 aa, Zea mays subsp. mays
  peptide (1)..(332): Ceres Seq. ID no. 12346105
  misc_feature (43)..(332): NCBI GI NO: 37537166 NR Description: putative cholinephosphate cytidylyltransferase
  misc_feature (74)..(319): NCBI GI NO: 21668498 NR Description: CTP:phosphorylcholine cytidylyltransferase
  misc_feature (43)..(319): NCBI GI NO: 7488484 NR Description: probable choline-phosphate cytidylyltransferase
  misc_feature (74)..(319): NCBI GI NO: 30683147 NR Description: cholinephosphate cytidylyltransferase
  misc_feature (43)..(318): NCBI GI NO: 15225218 NR Description: putative phospholipid cytidylyltransferase
  misc_feature (75)..(322): NCBI GI NO: 7488791 NR Description: choline-phosphate cytidylyltransferase (EC2
  misc_feature (74)..(319): NCBI GI NO: 25288640 NR Description: probable phosphocholine cytidylyltransferase
  misc_feature (43)..(319): NCBI GI NO: 7488483 NR Description: probable choline-phosphate cytidylyltransferase
  misc_feature (67)..(322): NCBI GI NO: 7488446 NR Description: choline-phosphate cytidylyltransferase (EC2
  misc_feature (67)..(322): NCBI GI NO: 7488485 NR Description: probable choline-phosphate cytidylyltransferase
IGEPARGLALPGREAELSSSTRQPSTSNPPSPAQIVTIPARKMARVSNAKKRQGAKPASALSSTDTSTAAKRKAEDDRPVRVYADGIFDLFHFGHARALEQAKMLFPNTYLLVGCCNDELTYRYKGKTVMTQEERYESLRHCKWVDEVIPDAPWVLTQEFIDKHQIDYVAHDALPYADTSGTANDVYEFVKKIGKFKETKRTDGVSTSDLIMRILKDYNQYVMRNLARGYSRKDLGVSYVKEKQLQVNMKINKLRETVKAHQEKLQTVAKTAGLNHEEWLANADRWVAGFLEKFEQHCHNMETAIKDRIQERLGKQLSKGIIAGLVQEPVTA

SEQ ID NO: 28771 - protein, 290 aa, Zea mays subsp. mays
  peptide (1)..(290): Ceres Seq. ID no. 12346106
  misc_feature (1)..(290): NCBI GI NO: 37537166 NR Description: putative cholinephosphate cytidylyltransferase
  misc_feature (32)..(277): NCBI GI NO: 21668498 NR Description: CTP:phosphorylcholine cytidylyltransferase
  misc_feature (1)..(277): NCBI GI NO: 7488484 NR Description: probable choline-phosphate cytidylyltransferase
  misc_feature (32)..(277): NCBI GI NO: 30683147 NR Description: cholinephosphate cytidylyltransferase
  misc_feature (1)..(276): NCBI GI NO: 15225218 NR Description: putative phospholipid cytidylyltransferase
  misc_feature (33)..(280): NCBI GI NO: 7488791 NR Description: choline-phosphate cytidylyltransferase (EC2
  misc_feature (32)..(277): NCBI GI NO: 25288640 NR Description: probable phosphocholine cytidylyltransferase
  misc_feature (1)..(277): NCBI GI NO: 7488483 NR Description: probable choline-phosphate cytidylyltransferase
  misc_feature (25)..(280): NCBI GI NO: 7488446 NR Description: choline-phosphate cytidylyltransferase (EC2
  misc_feature (25)..(280): NCBI GI NO: 7488485 NR Description: probable choline-phosphate cytidylyltransferase
MARVSNAKKRQGAKPASALSSTDTSTAAKRKAEDDRPVRVYADGIFDLFHFGHARALEQAKMLFPNTYLLVGCCNDELTYRYKGKTVMTQEERYESLRHCKWVDEVIPDAPWVLTQEFIDKHQIDYVAHDALPYADTSGTANDVYEFVKKIGKFKETKRTDGVSTSDLIMRILKDYNQYVMRNLARGYSRKDLGVSYVKEKQLQVNMKINKLRETVKAHQEKLQTVAKTAGLNHEEWLANADRWVAGFLEKFEQHCHNMETAIKDRIQERLGKQLSKGIIAGLVQEPVTA

SEQ ID NO: 28772 - protein, 229 aa, Zea mays subsp. mays
  peptide (1)..(229): Ceres Seq. ID no. 12346107
  misc_feature (1)..(229): NCBI GI NO: 37537166 NR Description: putative cholinephosphate cytidylyltransferase
  misc_feature (1)..(216): NCBI GI NO: 21668498 NR Description: CTP:phosphorylcholine cytidylyltransferase
  misc_feature (1)..(216): NCBI GI NO: 7488484 NR Description: probable choline-phosphate cytidylyltransferase
  misc_feature (1)..(216): NCBI GI NO: 30683147 NR Description: cholinephosphate cytidylyltransferase
  misc_feature (1)..(215): NCBI GI NO: 15225218 NR Description: putative phospholipid cytidylyltransferase
  misc_feature (1)..(219): NCBI GI NO: 7488791 NR Description: choline-phosphate cytidylyltransferase (EC2
  misc_feature (1)..(216): NCBI GI NO: 25288640 NR Description: probable phosphocholine cytidylyltransferase
  misc_feature (1)..(216): NCBI GI NO: 7488483 NR Description: probable choline-phosphate cytidylyltransferase
  misc_feature (1)..(219): NCBI GI NO: 7488446 NR Description: choline-phosphate cytidylyltransferase (EC2
  misc_feature (1)..(219): NCBI GI NO: 7488485 NR Description: probable choline-phosphate cytidylyltransferase
MLFPNTYLLVGCCNDELTYRYKGKTVMTQEERYESLRHCKWVDEVIPDAPWVLTQEFIDKHQIDYVAHDALPYADTSGTANDVYEFVKKIGKFKETKRTDGVSTSDLIMRILKDYNQYVMRNLARGYSRKDLGVSYVKEKQLQVNMKINKLRETVKAHQEKLQTVAKTAGLNHEEWLANADRWVAGFLEKFEQHCHNMETAIKDRIQERLGKQLSKGIIAGLVQEPVTA

SEQ ID NO: 28773 - DNA, 1600 bp, Zea mays subsp. mays
  misc_feature (1)..(1600): Ceres Seq. ID no. 12566193
acctgttctccacctcgcccccaccttcgtccttctccatctagggttctctctgtttcctcctcatcggaattggagcttcgcatagagtgtccctcgtcatcgccgccggcaccgacgccggcagccatgtccatgctccttatacagaaacaacccctccctctctccgttcgtccccgcacgactctccgccagtgccgtctccccacgactcgattctccgccgccgccgccgactcggctagccgcgctgcccccttcgccgtcgaggactacctcgtcgccgcatgccacctaaccccggcgcaggcgctcaaggcctccaaggtgctctcgcacctcaagtcaccctcccgacccgacgccgtgctagccttcctctcgggcctcggtctctccgacgccgacatcgccgccgccgtcgcctacgaccccaagcttctctgctccgaggtcgagcgcacgctggccccgcgtctcgcggagctccgggatctcggcctctctccgtctcagatcgcccgcctcgcactcgtcgaccccgcgcgcttccgccgccccaccgtcgtctccaagctgcagtattacgtccctctcttcggttccttcgagaacctgctccaggctctcaggaacaacgcctaccttctcagctccgacctcgagcgcgttgtgaagcccaacgtcgcgttcctggtggagtgcgggctagatgcttgtgatattgccaagctgtccatacccgtccctaggctgatcaccaccaacccagaacgcgtccgggcaatggtggagcgagctgaagctgtcggtgtgcctcgtggcactgggatgtttaggcacgcactgctggctgttgcattcctcagcgaggagaagatcaaagctaaggcagagtttttgaagacaacatttcggtggtcggatgctgaggtgggcgttgcggtttccaagctgccattggtgctcaagcactccaaggacaggctgcgccgcatgtcagagttcctgatcaccaaggttgggttggagccagagtacattgctcacaggcctgctctgcttacatatagcttggaacgccgcctcatgccccgacactatgttgtgaattacctgaaggaaaatggattgttggagcaggaccggagctactatactgctgtccagatgagtgagagtgccttcatggataagttcatatgcccctacaaggaagctgcaccaagcctcgccctagattatgctgctgcttgcagaggagaggtgcccactaccttcttggcaaatgtttaacccttcagtgtaaagcaatgttttgacacttagcagtgagctggtaattttgtttctttccttgcctaactgctacatcccgcagctgtgtctttagcaattggctctggtacataagatgtgagccatggttattaccagggctagatttatctttgctctctgttattcaagctgatcaagtattccaatttcacatgtcactgtatggtatggatttagtgggtgagtaccctgtatattgctctgcaactgttatcgatgcaatgtttctgaataaatatgcaggatgcacggttcc

SEQ ID NO: 28774 - protein, 432 aa, Zea mays subsp. mays
  peptide (1)..(432): Ceres Seq. ID no. 12566194
  misc_feature (125)..(399): Pfam Name: Pfam Description:  mTERF
  misc_feature (83)..(402): NCBI GI NO: 39545750 NR Description: OSJNBb0034I13.16
  misc_feature (76)..(425): NCBI GI NO: 34394750 NR Description: unknown protein
  misc_feature (80)..(412): NCBI GI NO: 18415647 NR Description: expressed protein; protein id: At5g07900
  misc_feature (114)..(420): NCBI GI NO: 15238313 NR Description: putative protein; protein id: At5g64950
  misc_feature (114)..(420): NCBI GI NO: 21553423 NR Description: unknown [Arabidopsis thaliana]
  misc_feature (88)..(418): NCBI GI NO: 15218140 NR Description: hypothetical protein; protein id: At1g21150.1
  misc_feature (88)..(418): NCBI GI NO: 25511650 NR Description: T22I11.2 protein - Arabidopsis thaliana
  misc_feature (125)..(412): NCBI GI NO: 18412304 NR Description: expressed protein; protein id: At1g79220
  misc_feature (57)..(365): NCBI GI NO: 15232683 NR Description: putative protein; protein id: At3g46950
TCSPPRPHLRPSPSRVLSVSSSSELELRIECPSSSPPAPTPAAMSMLLIQKQPLPLSVRPRTTLRQCRLPTTRFSAAAADSASRAAPFAVEDYLVAACHLTPAQALKASKVLSHLKSPSRPDAVLAFLSGLGLSDADIAAAVAYDPKLLCSEVERTLAPRLAELRDLGLSPSQIARLALVDPARFRRPTVVSKLQYYVPLFGSFENLLQALRNNAYLLSSDLERVVKPNVAFLVECGLDACDIAKLSIPVPRLITTNPERVRAMVERAEAVGVPRGTGMFRHALLAVAFLSEEKIKAKAEFLKTTFRWSDAEVGVAVSKLPLVLKHSKDRLRRMSEFLITKVGLEPEYIAHRPALLTYSLERRLMPRHYVVNYLKENGLLEQDRSYYTAVQMSESAFMDKFICPYKEAAPSLALDYAAACRGEVPTTFLANV

SEQ ID NO: 28775 - protein, 389 aa, Zea mays subsp. mays
  peptide (1)..(389): Ceres Seq. ID no. 12566195
  misc_feature (82)..(356): Pfam Name: Pfam Description:  mTERF
  misc_feature (40)..(359): NCBI GI NO: 39545750 NR Description: OSJNBb0034I13.16
  misc_feature (33)..(382): NCBI GI NO: 34394750 NR Description: unknown protein
  misc_feature (37)..(369): NCBI GI NO: 18415647 NR Description: expressed protein; protein id: At5g07900
  misc_feature (71)..(377): NCBI GI NO: 15238313 NR Description: putative protein; protein id: At5g64950
  misc_feature (71)..(377): NCBI GI NO: 21553423 NR Description: unknown [Arabidopsis thaliana]
  misc_feature (45)..(375): NCBI GI NO: 15218140 NR Description: hypothetical protein; protein id: At1g21150.1
  misc_feature (45)..(375): NCBI GI NO: 25511650 NR Description: T22I11.2 protein - Arabidopsis thaliana
  misc_feature (82)..(369): NCBI GI NO: 18412304 NR Description: expressed protein; protein id: At1g79220
  misc_feature (14)..(322): NCBI GI NO: 15232683 NR Description: putative protein; protein id: At3g46950
MSMLLIQKQPLPLSVRPRTTLRQCRLPTTRFSAAAADSASRAAPFAVEDYLVAACHLTPAQALKASKVLSHLKSPSRPDAVLAFLSGLGLSDADIAAAVAYDPKLLCSEVERTLAPRLAELRDLGLSPSQIARLALVDPARFRRPTVVSKLQYYVPLFGSFENLLQALRNNAYLLSSDLERVVKPNVAFLVECGLDACDIAKLSIPVPRLITTNPERVRAMVERAEAVGVPRGTGMFRHALLAVAFLSEEKIKAKAEFLKTTFRWSDAEVGVAVSKLPLVLKHSKDRLRRMSEFLITKVGLEPEYIAHRPALLTYSLERRLMPRHYVVNYLKENGLLEQDRSYYTAVQMSESAFMDKFICPYKEAAPSLALDYAAACRGEVPTTFLANV

SEQ ID NO: 28776 - protein, 387 aa, Zea mays subsp. mays
  peptide (1)..(387): Ceres Seq. ID no. 12566196
  misc_feature (80)..(354): Pfam Name: Pfam Description:  mTERF
  misc_feature (38)..(357): NCBI GI NO: 39545750 NR Description: OSJNBb0034I13.16
  misc_feature (31)..(380): NCBI GI NO: 34394750 NR Description: unknown protein
  misc_feature (35)..(367): NCBI GI NO: 18415647 NR Description: expressed protein; protein id: At5g07900
  misc_feature (69)..(375): NCBI GI NO: 15238313 NR Description: putative protein; protein id: At5g64950
  misc_feature (69)..(375): NCBI GI NO: 21553423 NR Description: unknown [Arabidopsis thaliana]
  misc_feature (43)..(373): NCBI GI NO: 15218140 NR Description: hypothetical protein; protein id: At1g21150.1
  misc_feature (43)..(373): NCBI GI NO: 25511650 NR Description: T22I11.2 protein - Arabidopsis thaliana
  misc_feature (80)..(367): NCBI GI NO: 18412304 NR Description: expressed protein; protein id: At1g79220
  misc_feature (12)..(320): NCBI GI NO: 15232683 NR Description: putative protein; protein id: At3g46950
MLLIQKQPLPLSVRPRTTLRQCRLPTTRFSAAAADSASRAAPFAVEDYLVAACHLTPAQALKASKVLSHLKSPSRPDAVLAFLSGLGLSDADIAAAVAYDPKLLCSEVERTLAPRLAELRDLGLSPSQIARLALVDPARFRRPTVVSKLQYYVPLFGSFENLLQALRNNAYLLSSDLERVVKPNVAFLVECGLDACDIAKLSIPVPRLITTNPERVRAMVERAEAVGVPRGTGMFRHALLAVAFLSEEKIKAKAEFLKTTFRWSDAEVGVAVSKLPLVLKHSKDRLRRMSEFLITKVGLEPEYIAHRPALLTYSLERRLMPRHYVVNYLKENGLLEQDRSYYTAVQMSESAFMDKFICPYKEAAPSLALDYAAACRGEVPTTFLANV

SEQ ID NO: 28777 - DNA, 1639 bp, Zea mays subsp. mays
  misc_feature (1)..(1639): Ceres Seq. ID no. 12566830
  misc_feature (1028)..(1028): n is a, c, t, g, unknown, or other
  misc_feature (574)..(574): n is a, c, t, g, unknown, or other
gcacgagaccattacctagaacatcctaatcgaaaattcctcctgttcatttcctcctgctcccccctcctccctcccccccccctcctcgccgctcgccgttgaagaggtaggcccacgggccggcgagaatggaggcggcgacgatggcgtggacggcggcggtggtcggggcggggctggtgtactggttcgtctgggtgatgggcgcggcggaggtgaagggcaagcgggcggtggatctcaagatgggatccatcacgcgggacaaggtgcaggacaagtacacgcagtactggtccttcttccgccgccccaaggagacggccaccacggcggcgtcggcggagaaggtgccggccttcgtcgacaccttctacaacctcgtgaccgacatctacgagtgggggtggggccagtccttccacttctccccgtccctccccggccgctcccaccgcgacgccacgcgcgtccacgaggagcgcgtcgccgacctcctcggcgccaggccgggccaccgcctcctggacgtcggctgcggcgtcggcgggcccatgcgcgccatcgccgngcactcgggatccaacgtcgtcggcatcaccatcaacgagtaccaggtgaaccgcgcccgcgcgcacaaccgcaaggccggcctcgactccccgcgctgcgaggtcgtctgcggcaacttcctctccatgccgttcccggacgcctccttcgacggcgcctactccatcgaggccacctgccacgcgcccaggctgcaggacgtgtacggcgaggtctaccgcgtgctcaagccggggggactctacgtctcctacgagtgggtcaccaccccgctgtaccgcgccgaggacccggaccacgtcgagtgcatccacggcatcgagcgcggcgacgcgctaccggggctccgccgccaggacgagatcgcgtccatcgctaaggaggtcgggttcgaggtgctcaaggagcaggacctggcgctgccccccgcgctgccctggtggacgcgcctnaagatgggccgcatcgcctactggcgcaactccctcgtcgtccgcgtgctcaccatgcttccgggtcgcgcccaagggcgtctccgaggtgcacgagatgctgtacgagaccgcgcagcacctcacccgcggcggcgagaccggcatcttcacgcccatgcacatggtgctcctccgcaagcccgccgccgccgcctccaccgaggaggccaactagtgtaagactacacaccgccaccaatcagttactactcgcccaccgcaagggggagaaaatggggagggaggaaaaagatgcaagcagcagcagcaccagaggtaagaagagcaggctaatcggcgacttgaagaagttacaaattgatctattagagaagaagatactactaggaacgattcttctctccgtttactcttttccctgttcgtagctttgagttttaatttttgttttttggtggacggattgttccggggaggtcgaggttgggatctaaatttattttcaatcggtggagatccatctatctatcagcagcagcagcaggagcaaccatgttttctctccaacaatacattggaattgaattcctaacgggcagattggatcc

SEQ ID NO: 28778 - protein, 372 aa, Zea mays subsp. mays
  peptide (1)..(372): Ceres Seq. ID no. 12566831
  misc_feature (87)..(287): Pfam Name: Pfam Description:  ubiE/COQ5 methyltransferase family
  misc_feature (1)..(319): NCBI GI NO: 3560533 NR Description: 24-methylene lophenol C24(1)methyltransferase
  misc_feature (1)..(319): NCBI GI NO: 7443718 NR Description: probable sterol 24-C-methyltransferase (EC2
  misc_feature (1)..(317): NCBI GI NO: 15217917 NR Description: sterol-C-methyltransferase; protein id:At1g20330
  misc_feature (1)..(317): NCBI GI NO: 22136020 NR Description: 24-sterol C-methyltransferase
  misc_feature (1)..(317): NCBI GI NO: 23397216 NR Description: putative sterol-C-methyltransferase
  misc_feature (1)..(317): NCBI GI NO: 1061040 NR Description: sterol-C-methyltransferase [Arabidopsis thaliana]
  misc_feature (9)..(319): NCBI GI NO: 7443717 NR Description: probable sterol 24-C-methyltransferase (EC2
  misc_feature (1)..(317): NCBI GI NO: 21555010 NR Description: sterol-C-methyltransferase [Arabidopsis thaliana]
  misc_feature (1)..(319): NCBI GI NO: 15222955 NR Description: S-adenosyl-methionine-sterol-C-methyltransferase
  misc_feature (1)..(319): NCBI GI NO: 2246456 NR Description: S-adenosyl-methionine-sterol-C-methyltransferase
  misc_feature (148)..(148): Xaa is any aa, unknown or other
  misc_feature (299)..(299): Xaa is any aa, unknown or other
MEAATMAWTAAVVGAGLVYWFVWVMGAAEVKGKRAVDLKMGSITRDKVQDKYTQYWSFFRRPKETATTAASAEKVPAFVDTFYNLVTDIYEWGWGQSFHFSPSLPGRSHRDATRVHEERVADLLGARPGHRLLDVGCGVGGPMRAIAXHSGSNVVGITINEYQVNRARAHNRKAGLDSPRCEVVCGNFLSMPFPDASFDGAYSIEATCHAPRLQDVYGEVYRVLKPGGLYVSYEWVTTPLYRAEDPDHVECIHGIERGDALPGLRRQDEIASIAKEVGFEVLKEQDLALPPALPWWTRXKMGRIAYWRNSLVVRVLTMLPGRAQGRLRGARDAVRDRAAPHPRRRDRHLHAHAHGAPPQARRRRLHRGGQLV

SEQ ID NO: 28779 - protein, 367 aa, Zea mays subsp. mays
  peptide (1)..(367): Ceres Seq. ID no. 12566832
  misc_feature (82)..(282): Pfam Name: Pfam Description:  ubiE/COQ5 methyltransferase family
  misc_feature (1)..(314): NCBI GI NO: 3560533 NR Description: 24-methylene lophenol C24(1)methyltransferase
  misc_feature (1)..(314): NCBI GI NO: 7443718 NR Description: probable sterol 24-C-methyltransferase (EC2
  misc_feature (1)..(312): NCBI GI NO: 15217917 NR Description: sterol-C-methyltransferase; protein id:At1g20330
  misc_feature (1)..(312): NCBI GI NO: 22136020 NR Description: 24-sterol C-methyltransferase
  misc_feature (1)..(312): NCBI GI NO: 23397216 NR Description: putative sterol-C-methyltransferase
  misc_feature (1)..(312): NCBI GI NO: 1061040 NR Description: sterol-C-methyltransferase [Arabidopsis thaliana]
  misc_feature (4)..(314): NCBI GI NO: 7443717 NR Description: probable sterol 24-C-methyltransferase (EC2
  misc_feature (1)..(312): NCBI GI NO: 21555010 NR Description: sterol-C-methyltransferase [Arabidopsis thaliana]
  misc_feature (1)..(314): NCBI GI NO: 15222955 NR Description: S-adenosyl-methionine-sterol-C-methyltransferase
  misc_feature (1)..(314): NCBI GI NO: 2246456 NR Description: S-adenosyl-methionine-sterol-C-methyltransferase
  misc_feature (143)..(143): Xaa is any aa, unknown or other
  misc_feature (294)..(294): Xaa is any aa, unknown or other
MAWTAAVVGAGLVYWFVWVMGAAEVKGKRAVDLKMGSITRDKVQDKYTQYWSFFRRPKETATTAASAEKVPAFVDTFYNLVTDIYEWGWGQSFHFSPSLPGRSHRDATRVHEERVADLLGARPGHRLLDVGCGVGGPMRAIAXHSGSNVVGITINEYQVNRARAHNRKAGLDSPRCEVVCGNFLSMPFPDASFDGAYSIEATCHAPRLQDVYGEVYRVLKPGGLYVSYEWVTTPLYRAEDPDHVECIHGIERGDALPGLRRQDEIASIAKEVGFEVLKEQDLALPPALPWWTRXKMGRIAYWRNSLVVRVLTMLPGRAQGRLRGARDAVRDRAAPHPRRRDRHLHAHAHGAPPQARRRRLHRGGQLV

SEQ ID NO: 28780 - protein, 348 aa, Zea mays subsp. mays
  peptide (1)..(348): Ceres Seq. ID no. 12566833
  misc_feature (63)..(263): Pfam Name: Pfam Description:  ubiE/COQ5 methyltransferase family
  misc_feature (1)..(295): NCBI GI NO: 3560533 NR Description: 24-methylene lophenol C24(1)methyltransferase
  misc_feature (1)..(295): NCBI GI NO: 7443718 NR Description: probable sterol 24-C-methyltransferase (EC2
  misc_feature (1)..(293): NCBI GI NO: 15217917 NR Description: sterol-C-methyltransferase; protein id:At1g20330
  misc_feature (1)..(293): NCBI GI NO: 22136020 NR Description: 24-sterol C-methyltransferase
  misc_feature (1)..(293): NCBI GI NO: 23397216 NR Description: putative sterol-C-methyltransferase
  misc_feature (1)..(293): NCBI GI NO: 1061040 NR Description: sterol-C-methyltransferase [Arabidopsis thaliana]
  misc_feature (1)..(295): NCBI GI NO: 7443717 NR Description: probable sterol 24-C-methyltransferase (EC2
  misc_feature (1)..(293): NCBI GI NO: 21555010 NR Description: sterol-C-methyltransferase [Arabidopsis thaliana]
  misc_feature (1)..(295): NCBI GI NO: 15222955 NR Description: S-adenosyl-methionine-sterol-C-methyltransferase
  misc_feature (1)..(295): NCBI GI NO: 2246456 NR Description: S-adenosyl-methionine-sterol-C-methyltransferase
  misc_feature (124)..(124): Xaa is any aa, unknown or other
  misc_feature (275)..(275): Xaa is any aa, unknown or other
MGAAEVKGKRAVDLKMGSITRDKVQDKYTQYWSFFRRPKETATTAASAEKVPAFVDTFYNLVTDIYEWGWGQSFHFSPSLPGRSHRDATRVHEERVADLLGARPGHRLLDVGCGVGGPMRAIAXHSGSNVVGITINEYQVNRARAHNRKAGLDSPRCEVVCGNFLSMPFPDASFDGAYSIEATCHAPRLQDVYGEVYRVLKPGGLYVSYEWVTTPLYRAEDPDHVECIHGIERGDALPGLRRQDEIASIAKEVGFEVLKEQDLALPPALPWWTRXKMGRIAYWRNSLVVRVLTMLPGRAQGRLRGARDAVRDRAAPHPRRRDRHLHAHAHGAPPQARRRRLHRGGQLV

SEQ ID NO: 28781 - DNA, 1899 bp, Zea mays subsp. mays
  misc_feature (1)..(1899): Ceres Seq. ID no. 12358625
ctccaccgcgcccacttcttatactgccagcgtctgctccctctcgcggaggcctcgctctggttggaaggtttggagaaactccccggctcgaggagatcgtgacattgagaggacgatgggagggcgcgcgctcctcctcctcctcctggtctcggcgttggtctttcagatccacgcctccgacccgctgctgtacgagccgttcgatgaggactttgaggggagatgggtcgtctccaagaaggatgaataccaaggtgtgtggaggcatgccaagagtgatggtcatgaggactatggcctccttgttagtgagaaggcaaggaaatacgccataatcaaggagcttgatgagccagttaccttgaaggatgggacagtggtcctgcagtttgaagtgagacttcagaatggccttgaatgcggaggtgcctacattaagtacatccgccctcaggatgctggatgggatgccaaggagtttgataatgagactccatacactattatgtttggtccagataagtgtggatcaaccaacaaggttcatttcatccttaagcacaagaatcctaagactggaaagtatgttgagcatcatctcaaattcccaccatctgtcccatatgacaagctctctcatgtctacacggctatcttgaagccagacaatgaggtcaaaattttggtagatggggaagaaaagaagaaggcgaacttcctttctgctgatgattttgagccagcacttatcccatccaagaccattcctgaccctgatgacaagaagccggaggactgggatgagagagctaaaattcctgatccagatgcagtaaagcctgatgactgggatgaggatgccccgatggaaattgtggatgatgaagccaccaagcctgagggatggttggatgatgaacctgaggagattgatgatcctgaggcagccaagcctgaggactgggacgatgaggaggatggtgaatgggaggcgccaaagattgacaaccccaagtgtgaagaggcacctggatgtggcgagtggaagaggccaatgaagcagaatcctgcttacaagggcaagtggcatgcacctatgattgacaaccccaactacaagggaatctggaagcctcaggagatccccaaccctgagtactttgagcttgacaagcctgactttgatccaattgctgctattgggattgagatctggacaatgcaggatggcatcctgtttgacaatatcttgattgctgacgatgagaaggttgccacctccattctggagaagacctggaagcccaagtatgatgttgagaaggaaaaggagaaggctgaggaggaggctgctgctggtgcagatggtctttctgagttccagaagaagatttttgacgtcctgtacaagattgctgatgttccgttcttggcaccctacaaaaccaagatcattgatgttatcgagaagggagagaagcagcccaacatcactattggcattctggtctccgttgtcgtcgtgttcgttaccgttctcttcaagatcctgtttggaggcaagaagccggtggcacctgtgaaacctgcagctgaggcgaagaagcccaaggccacagtgaccgacggtgctggaagcagtggcgacaaggatgagaaagaggacgaaaaggaggagacagcaggcccacgtcggaggacccgaagggagacatagagacctatttttgatgtgtttggatgttctggcgcctgcttattttgaggactcttaatatttctgagtgtataataggaacttgtgtcacctctgcggcttccctgctgcttatttgtttttacatggttagaccaggaaccttcacgagctgtagaatttagttcttgttggct

SEQ ID NO: 28782 - protein, 573 aa, Zea mays subsp. mays
  peptide (1)..(573): Ceres Seq. ID no. 12358626
  misc_feature (64)..(420): Pfam Name: Pfam Description:  Calreticulin family
  misc_feature (40)..(573): NCBI GI NO: 21740628 NR Description: OSJNBb0012E08.10
  misc_feature (32)..(573): NCBI GI NO: 3334138 NR Description: CALNEXIN HOMOLOG PRECURSOR
  misc_feature (46)..(571): NCBI GI NO: 15240353 NR Description: calnexin - like protein; protein id: At5g61790
  misc_feature (146)..(569): NCBI GI NO: 7441503 NR Description: calnexin - maize (fragment)
  misc_feature (34)..(572): NCBI GI NO: 11131469 NR Description: Calnexin homolog precursor
  misc_feature (37)..(573): NCBI GI NO: 15240773 NR Description: calnexin homolog; protein id: At5g07340.1
  misc_feature (37)..(573): NCBI GI NO: 473878 NR Description: calnexin homolog
  misc_feature (49)..(573): NCBI GI NO: 11131766 NR Description: Calnexin homolog precursor
  misc_feature (63)..(562): NCBI GI NO: 38567017 NR Description: probable calcium-binding protein precursor cnx1
  misc_feature (63)..(553): NCBI GI NO: 18564808 NR Description: calnexin [Aspergillus niger]
STAPTSYTASVCSLSRRPRSGWKVWRNSPARGDRDIERTMGGRALLLLLLVSALVFQIHASDPLLYEPFDEDFEGRWVVSKKDEYQGVWRHAKSDGHEDYGLLVSEKARKYAIIKELDEPVTLKDGTVVLQFEVRLQNGLECGGAYIKYIRPQDAGWDAKEFDNETPYTIMFGPDKCGSTNKVHFILKHKNPKTGKYVEHHLKFPPSVPYDKLSHVYTAILKPDNEVKILVDGEEKKKANFLSADDFEPALIPSKTIPDPDDKKPEDWDERAKIPDPDAVKPDDWDEDAPMEIVDDEATKPEGWLDDEPEEIDDPEAAKPEDWDDEEDGEWEAPKIDNPKCEEAPGCGEWKRPMKQNPAYKGKWHAPMIDNPNYKGIWKPQEIPNPEYFELDKPDFDPIAAIGIEIWTMQDGILFDNILIADDEKVATSILEKTWKPKYDVEKEKEKAEEEAAAGADGLSEFQKKIFDVLYKIADVPFLAPYKTKIIDVIEKGEKQPNITIGILVSVVVVFVTVLFKILFGGKKPVAPVKPAAEAKKPKATVTDGAGSSGDKDEKEDEKEETAGPRRRTRRET

SEQ ID NO: 28783 - protein, 534 aa, Zea mays subsp. mays
  peptide (1)..(534): Ceres Seq. ID no. 12358627
  misc_feature (25)..(381): Pfam Name: Pfam Description:  Calreticulin family
  misc_feature (1)..(534): NCBI GI NO: 21740628 NR Description: OSJNBb0012E08.10
  misc_feature (1)..(534): NCBI GI NO: 3334138 NR Description: CALNEXIN HOMOLOG PRECURSOR
  misc_feature (7)..(532): NCBI GI NO: 15240353 NR Description: calnexin - like protein; protein id: At5g61790
  misc_feature (107)..(530): NCBI GI NO: 7441503 NR Description: calnexin - maize (fragment)
  misc_feature (1)..(533): NCBI GI NO: 11131469 NR Description: Calnexin homolog precursor
  misc_feature (1)..(534): NCBI GI NO: 15240773 NR Description: calnexin homolog; protein id: At5g07340.1
  misc_feature (1)..(534): NCBI GI NO: 473878 NR Description: calnexin homolog
  misc_feature (10)..(534): NCBI GI NO: 11131766 NR Description: Calnexin homolog precursor
  misc_feature (24)..(523): NCBI GI NO: 38567017 NR Description: probable calcium-binding protein precursor cnx1
  misc_feature (24)..(514): NCBI GI NO: 18564808 NR Description: calnexin [Aspergillus niger]
MGGRALLLLLLVSALVFQIHASDPLLYEPFDEDFEGRWVVSKKDEYQGVWRHAKSDGHEDYGLLVSEKARKYAIIKELDEPVTLKDGTVVLQFEVRLQNGLECGGAYIKYIRPQDAGWDAKEFDNETPYTIMFGPDKCGSTNKVHFILKHKNPKTGKYVEHHLKFPPSVPYDKLSHVYTAILKPDNEVKILVDGEEKKKANFLSADDFEPALIPSKTIPDPDDKKPEDWDERAKIPDPDAVKPDDWDEDAPMEIVDDEATKPEGWLDDEPEEIDDPEAAKPEDWDDEEDGEWEAPKIDNPKCEEAPGCGEWKRPMKQNPAYKGKWHAPMIDNPNYKGIWKPQEIPNPEYFELDKPDFDPIAAIGIEIWTMQDGILFDNILIADDEKVATSILEKTWKPKYDVEKEKEKAEEEAAAGADGLSEFQKKIFDVLYKIADVPFLAPYKTKIIDVIEKGEKQPNITIGILVSVVVVFVTVLFKILFGGKKPVAPVKPAAEAKKPKATVTDGAGSSGDKDEKEDEKEETAGPRRRTRRET

SEQ ID NO: 28784 - protein, 403 aa, Zea mays subsp. mays
  peptide (1)..(403): Ceres Seq. ID no. 12358628
  misc_feature (1)..(250): Pfam Name: Pfam Description:  Calreticulin family
  misc_feature (1)..(403): NCBI GI NO: 21740628 NR Description: OSJNBb0012E08.10
  misc_feature (1)..(403): NCBI GI NO: 3334138 NR Description: CALNEXIN HOMOLOG PRECURSOR
  misc_feature (1)..(401): NCBI GI NO: 15240353 NR Description: calnexin - like protein; protein id: At5g61790
  misc_feature (1)..(399): NCBI GI NO: 7441503 NR Description: calnexin - maize (fragment)
  misc_feature (1)..(402): NCBI GI NO: 11131469 NR Description: Calnexin homolog precursor
  misc_feature (1)..(403): NCBI GI NO: 15240773 NR Description: calnexin homolog; protein id: At5g07340.1
  misc_feature (1)..(403): NCBI GI NO: 473878 NR Description: calnexin homolog
  misc_feature (1)..(403): NCBI GI NO: 11131766 NR Description: Calnexin homolog precursor
  misc_feature (1)..(392): NCBI GI NO: 38567017 NR Description: probable calcium-binding protein precursor cnx1
  misc_feature (1)..(383): NCBI GI NO: 18564808 NR Description: calnexin [Aspergillus niger]
MFGPDKCGSTNKVHFILKHKNPKTGKYVEHHLKFPPSVPYDKLSHVYTAILKPDNEVKILVDGEEKKKANFLSADDFEPALIPSKTIPDPDDKKPEDWDERAKIPDPDAVKPDDWDEDAPMEIVDDEATKPEGWLDDEPEEIDDPEAAKPEDWDDEEDGEWEAPKIDNPKCEEAPGCGEWKRPMKQNPAYKGKWHAPMIDNPNYKGIWKPQEIPNPEYFELDKPDFDPIAAIGIEIWTMQDGILFDNILIADDEKVATSILEKTWKPKYDVEKEKEKAEEEAAAGADGLSEFQKKIFDVLYKIADVPFLAPYKTKIIDVIEKGEKQPNITIGILVSVVVVFVTVLFKILFGGKKPVAPVKPAAEAKKPKATVTDGAGSSGDKDEKEDEKEETAGPRRRTRRET

SEQ ID NO: 28785 - DNA, 1676 bp, Zea mays subsp. mays
  misc_feature (1)..(1676): Ceres Seq. ID no. 12344231
aggcgatgagcgcctctcgcgacgccagggcggagagctagccggccggagcccacacgcagctggaagcaccagatcaccgatcgtgccggccgagcggcggcgcaggcgcacaggcgcttacatgggagtagaggcgggcgggtgcgggcggagggcggtcgtcaccgggttctacgtctggggctgggagttcctcaccgccctccttctcttctcggccgccgtcgccgccgcagactcctactagcaagctacctaccttctttctttcattcccttaggtagctcagccgtacacacaacagcacacaagtcatcagttactagctagttagtagcctatacaacacatacatatatacatacaaaggtgagtgaggttcgcgtgcaagcagagccaatcgtgccgatcgagctatatacatagccggcggcgagagatgggagaagcggcctcggccgtggcggcgtcgaagaggggcggcggcgggccggcgccgttcctgaccaagacgcaccagatggtggaggagcggggcacggacgaggtgatctcgtgggcggagcagggccgctccttcgtggtgtggaagcccgttgagctggcgcgcgacctcctcccgctccacttcaagcactgcaacttctcctccttcgtccgccagctcaacacctacggtttccggaaggtggtgccggaccggtgggagttcgcgaacgacaacttccgtcgaggcgagcagggtctcctgtccggcatccgccgccgcaagtcaacggcgctgcagatgtccaagtccggatccggcggcagcggcggcgtgaacgccacgttccccccgcctctgccccctccacctcccgcgtcggccaccacgtccggcgtccacgagcgcagctcgtcgtcggcgtcgtcgccaccgcgggcgcccgacctggccagcgagaacgagcagctcaagaaggacaaccacacgctgtccgtcgagctggcgcaggcgcgccggcactgcgaggagctcctgggcttcctctcgcgcttcctcgacgtccggcagctcgacctccggctgctcatgcaggaggacgtgcgagcgggggcaagcgacgacggcgcacagcgccgcgcgcacgcagtggccagccagctggagcgcggcggcggcgaggaggggaagagcgtgaagctgttcggcgtactcttaaaggacgccgcgaggaagaggggccggtgcgaggaagcggcggccagcgagcggcccatcaagatgatcagggtcggcgagccgtgggtcggcgtcccgtcgtcgggcccgggccggtgcggcggcgagaattaactgtcatccaatgtgaggttgatgacaaggacagtttcatccatcatatcgagcaagtaacaaagccagtgctgtggtaaaactgcaaagacagaacacaggacacaggagaaatataggcgtaaggcatgttaattaagaattaattatatatgggatgcttttgaagtagcaagattggaagtagagataagtaaaacgggctagaagcagcgcccatgtgttcagaatggaaaattagcgtttccgtgtgtgtgttaagaaaaacttatatgcgctttctgcgagcacggttgattcttaagagcgacagcaaatgaaaggtgtattatt

SEQ ID NO: 28786 - protein, 299 aa, Zea mays subsp. mays
  peptide (1)..(299): Ceres Seq. ID no. 12344232
  misc_feature (18)..(198): Pfam Name: Pfam Description:  HSF-type DNA-binding
  misc_feature (18)..(293): NCBI GI NO: 5821136 NR Description: heat shock factor [Nicotiana tabacum]
  misc_feature (18)..(289): NCBI GI NO: 123684 NR Description: HEAT SHOCK FACTOR PROTEIN HSF24
  misc_feature (18)..(256): NCBI GI NO: 2129831 NR Description: heat shock transcription factor HSF34 - soybean
  misc_feature (6)..(267): NCBI GI NO: 15234583 NR Description: heat shock transcription factor HSF4
  misc_feature (6)..(267): NCBI GI NO: 2129612 NR Description: heat shock transcription factor HSF4
  misc_feature (17)..(201): NCBI GI NO: 38344369 NR Description: OSJNBb0032E06.3
  misc_feature (5)..(208): NCBI GI NO: 33591098 NR Description: heat shock factor RHSF2
  misc_feature (28)..(201): NCBI GI NO: 33591096 NR Description: heat shock factor RHSF1
  misc_feature (13)..(198): NCBI GI NO: 15220101 NR Description: heat shock transcription factor, putative
  misc_feature (18)..(201): NCBI GI NO: 15227413 NR Description: putative heat shock transcription factor
MGEAASAVAASKRGGGGPAPFLTKTHQMVEERGTDEVISWAEQGRSFVVWKPVELARDLLPLHFKHCNFSSFVRQLNTYGFRKVVPDRWEFANDNFRRGEQGLLSGIRRRKSTALQMSKSGSGGSGGVNATFPPPLPPPPPASATTSGVHERSSSSASSPPRAPDLASENEQLKKDNHTLSVELAQARRHCEELLGFLSRFLDVRQLDLRLLMQEDVRAGASDDGAQRRAHAVASQLERGGGEEGKSVKLFGVLLKDAARKRGRCEEAAASERPIKMIRVGEPWVGVPSSGPGRCGGEN

SEQ ID NO: 28787 - protein, 272 aa, Zea mays subsp. mays
  peptide (1)..(272): Ceres Seq. ID no. 12344233
  misc_feature (1)..(171): Pfam Name: Pfam Description:  HSF-type DNA-binding
  misc_feature (1)..(266): NCBI GI NO: 5821136 NR Description: heat shock factor [Nicotiana tabacum]
  misc_feature (1)..(262): NCBI GI NO: 123684 NR Description: HEAT SHOCK FACTOR PROTEIN HSF24
  misc_feature (1)..(229): NCBI GI NO: 2129831 NR Description: heat shock transcription factor HSF34 - soybean
  misc_feature (1)..(240): NCBI GI NO: 15234583 NR Description: heat shock transcription factor HSF4
  misc_feature (1)..(240): NCBI GI NO: 2129612 NR Description: heat shock transcription factor HSF4
  misc_feature (1)..(174): NCBI GI NO: 38344369 NR Description: OSJNBb0032E06.3
  misc_feature (1)..(181): NCBI GI NO: 33591098 NR Description: heat shock factor RHSF2
  misc_feature (1)..(174): NCBI GI NO: 33591096 NR Description: heat shock factor RHSF1
  misc_feature (1)..(171): NCBI GI NO: 15220101 NR Description: heat shock transcription factor, putative
  misc_feature (1)..(174): NCBI GI NO: 15227413 NR Description: putative heat shock transcription factor
MVEERGTDEVISWAEQGRSFVVWKPVELARDLLPLHFKHCNFSSFVRQLNTYGFRKVVPDRWEFANDNFRRGEQGLLSGIRRRKSTALQMSKSGSGGSGGVNATFPPPLPPPPPASATTSGVHERSSSSASSPPRAPDLASENEQLKKDNHTLSVELAQARRHCEELLGFLSRFLDVRQLDLRLLMQEDVRAGASDDGAQRRAHAVASQLERGGGEEGKSVKLFGVLLKDAARKRGRCEEAAASERPIKMIRVGEPWVGVPSSGPGRCGGEN

SEQ ID NO: 28788 - protein, 183 aa, Zea mays subsp. mays
  peptide (1)..(183): Ceres Seq. ID no. 12344234
  misc_feature (1)..(82): Pfam Name: Pfam Description:  HSF-type DNA-binding
  misc_feature (1)..(177): NCBI GI NO: 5821136 NR Description: heat shock factor [Nicotiana tabacum]
  misc_feature (1)..(173): NCBI GI NO: 123684 NR Description: HEAT SHOCK FACTOR PROTEIN HSF24
  misc_feature (1)..(140): NCBI GI NO: 2129831 NR Description: heat shock transcription factor HSF34 - soybean
  misc_feature (1)..(151): NCBI GI NO: 15234583 NR Description: heat shock transcription factor HSF4
  misc_feature (1)..(151): NCBI GI NO: 2129612 NR Description: heat shock transcription factor HSF4
  misc_feature (1)..(85): NCBI GI NO: 38344369 NR Description: OSJNBb0032E06.3
  misc_feature (1)..(92): NCBI GI NO: 33591098 NR Description: heat shock factor RHSF2
  misc_feature (1)..(85): NCBI GI NO: 33591096 NR Description: heat shock factor RHSF1
  misc_feature (1)..(82): NCBI GI NO: 15220101 NR Description: heat shock transcription factor, putative
  misc_feature (1)..(85): NCBI GI NO: 15227413 NR Description: putative heat shock transcription factor
MSKSGSGGSGGVNATFPPPLPPPPPASATTSGVHERSSSSASSPPRAPDLASENEQLKKDNHTLSVELAQARRHCEELLGFLSRFLDVRQLDLRLLMQEDVRAGASDDGAQRRAHAVASQLERGGGEEGKSVKLFGVLLKDAARKRGRCEEAAASERPIKMIRVGEPWVGVPSSGPGRCGGEN

SEQ ID NO: 28789 - DNA, 732 bp, Zea mays subsp. mays
  misc_feature (1)..(732): Ceres Seq. ID no. 12379156
ggactgaggtgctcagctgacgccggtcgcctcgcagtggcaagtgcccgagcgatgcagcagataatcagcgcctgcaagctgcctcacacgcaacgggccgccgcgctcctgccgcagaggccatcgctcaggcgccttccagtcccaggaggtgcgccgccgccgcggcgattggtagtcaggaggagatgccaggaagaggataagcagcagcaagaggccgaggagggaagcggccctgacgagcaggagcaggagcagcagaagcgaacgttcctgagcctggaggaggccgggctggtggagatgtccggcctcagcacgcacgagcgtttcctctgccgcctcaccatatcgtctctgaacctgctgagagtgatctcggagcaggagggcgtcccgatagaggagctcaacgccggggcgcgtctgcgactggttcctcaaggacaagctcaagagagagcagaacgtcggcaccgccgtcttgcagtgggacgaccctgggcttctagctagttccagcttcgttctgagccaatgatcatgctattctacactgcagcgcacgcaggggctatatatttcagggcttcaggcccttcacgggatgagcaaccaatgccacattccatttatatatatctttcggtttggtttcatctttacaaattttctgtagcgacgaacatttttcctgtgcggaaaatgggaaaggaatttacgggc

SEQ ID NO: 28790 - protein, 173 aa, Zea mays subsp. mays
  peptide (1)..(173): Ceres Seq. ID no. 12379157
  misc_feature (19)..(142): NCBI GI NO: 38344806 NR Description: OSJNBa0043L09.26
  misc_feature (62)..(142): NCBI GI NO: 22328854 NR Description: Expressed protein; protein id: At4g21445
GLRCSADAGRLAVASARAMQQIISACKLPHTQRAAALLPQRPSLRRLPVPGGAPPPRRLVVRRRCQEEDKQQQEAEEGSGPDEQEQEQQKRTFLSLEEAGLVEMSGLSTHERFLCRLTISSLNLLRVISEQEGVPIEELNAGARLRLVPQGQAQERAERRHRRLAVGRPWASS

SEQ ID NO: 28791 - protein, 155 aa, Zea mays subsp. mays
  peptide (1)..(155): Ceres Seq. ID no. 12379158
  misc_feature (1)..(124): NCBI GI NO: 38344806 NR Description: OSJNBa0043L09.26
  misc_feature (44)..(124): NCBI GI NO: 22328854 NR Description: Expressed protein; protein id: At4g21445
MQQIISACKLPHTQRAAALLPQRPSLRRLPVPGGAPPPRRLVVRRRCQEEDKQQQEAEEGSGPDEQEQEQQKRTFLSLEEAGLVEMSGLSTHERFLCRLTISSLNLLRVISEQEGVPIEELNAGARLRLVPQGQAQERAERRHRRLAVGRPWASS

SEQ ID NO: 28792 - DNA, 840 bp, Zea mays subsp. mays
  misc_feature (1)..(840): Ceres Seq. ID no. 12341781
aagcacttcccgagaaaaggaagacagagaaggaaactgcagtgaagtcgccggcgccgccgcgacaggaggaaggagcagcagcggcaggggaggcccggcgatctcttctgctgcgtgcggcgagggagtaaaaggagccgcgacaggatgcactcctttgggcaccgcgccaacgcggtggcaacgttcgcggtcaccatactggccgcgatttgcttcgccgcctccttctccgacaacttcaacaccccaacacccactgcctccgttaagatcttgaatctaaactggttccagaaggaggccaacggcaacgacgaggttagcatgacgctgaacatttcggccgacctttcgtctcttttcacgtggaacacaaaacaggtgtttgtttttgtggcagcagagtatgagactccacagaatgctttgaatcaagtttccctttgggatggcattatacctgcaaaggagcatgccaagtttttgatccataccacaaacaagtacagatttattgaccagggaagcaatctaaagggcaaggaattcaacttgacaatgcactggcacattatgccaaagactggcaaaatgtttgcagataagatagtaatgacaggctatcgtctccctgagctatacagatagtcagatagatcatggacaggactaagtggcctgcaagaagtgttagtggcagtggcataattgatcctgagcgttttgttctaatctaagtggagcatgtaaccttataagcttgtacttaagctgaaccaggcaaaacaaagttgtaatttgagaggatatgtatggttcaattttgatttgcct

SEQ ID NO: 28793 - protein, 167 aa, Zea mays subsp. mays
  peptide (1)..(167): Ceres Seq. ID no. 12341782
  misc_feature (1)..(167): Pfam Name: Pfam Description:  Signal peptidase subunit
  misc_feature (1)..(167): NCBI GI NO: 28558783 NR Description: signal peptidase protein-like protein
  misc_feature (1)..(167): NCBI GI NO: 15240934 NR Description: signal peptidase; protein id: At5g27430
  misc_feature (1)..(167): NCBI GI NO: 18397160 NR Description: expressed protein; protein id: At3g05230
  misc_feature (1)..(166): NCBI GI NO: 34895578 NR Description: unnamed protein product
  misc_feature (1)..(166): NCBI GI NO: 31200695 NR Description: ENSANGP00000018480 [Anopheles gambiae]
  misc_feature (1)..(148): NCBI GI NO: 134791 NR Description: Microsomal signal peptidase 23 kDa subunit
  misc_feature (1)..(148): NCBI GI NO: 11345462 NR Description: hypothetical protein FLJ22649 similar to signalpeptidase SPC22/23
  misc_feature (1)..(148): NCBI GI NO: 26390287 NR Description: unnamed protein product [Mus musculus]
  misc_feature (1)..(148): NCBI GI NO: 26346292 NR Description: unnamed protein product [Mus musculus]
  misc_feature (1)..(148): NCBI GI NO: 39587410 NR Description: Hypothetical protein CBG22979
MHSFGHRANAVATFAVTILAAICFAASFSDNFNTPTPTASVKILNLNWFQKEANGNDEVSMTLNISADLSSLFTWNTKQVFVFVAAEYETPQNALNQVSLWDGIIPAKEHAKFLIHTTNKYRFIDQGSNLKGKEFNLTMHWHIMPKTGKMFADKIVMTGYRLPELYR

SEQ ID NO: 28794 - protein, 107 aa, Zea mays subsp. mays
  peptide (1)..(107): Ceres Seq. ID no. 12341783
  misc_feature (1)..(107): Pfam Name: Pfam Description:  Signal peptidase subunit
  misc_feature (1)..(107): NCBI GI NO: 28558783 NR Description: signal peptidase protein-like protein
  misc_feature (1)..(107): NCBI GI NO: 15240934 NR Description: signal peptidase; protein id: At5g27430
  misc_feature (1)..(107): NCBI GI NO: 18397160 NR Description: expressed protein; protein id: At3g05230
  misc_feature (1)..(106): NCBI GI NO: 34895578 NR Description: unnamed protein product
  misc_feature (1)..(106): NCBI GI NO: 31200695 NR Description: ENSANGP00000018480 [Anopheles gambiae]
  misc_feature (1)..(88): NCBI GI NO: 134791 NR Description: Microsomal signal peptidase 23 kDa subunit
  misc_feature (1)..(88): NCBI GI NO: 11345462 NR Description: hypothetical protein FLJ22649 similar to signalpeptidase SPC22/23
  misc_feature (1)..(88): NCBI GI NO: 26390287 NR Description: unnamed protein product [Mus musculus]
  misc_feature (1)..(88): NCBI GI NO: 26346292 NR Description: unnamed protein product [Mus musculus]
  misc_feature (1)..(88): NCBI GI NO: 39587410 NR Description: Hypothetical protein CBG22979
MTLNISADLSSLFTWNTKQVFVFVAAEYETPQNALNQVSLWDGIIPAKEHAKFLIHTTNKYRFIDQGSNLKGKEFNLTMHWHIMPKTGKMFADKIVMTGYRLPELYR

SEQ ID NO: 28795 - protein, 93 aa, Zea mays subsp. mays
  peptide (1)..(93): Ceres Seq. ID no. 12341784
STSREKEDREGNCSEVAGAAATGGRSSSGRGGPAISSAACGEGVKGAATGCTPLGTAPTRWQRSRSPYWPRFASPPPSPTTSTPQHPLPPLRS

SEQ ID NO: 28796 - DNA, 1035 bp, Zea mays subsp. mays
  misc_feature (1)..(1035): Ceres Seq. ID no. 12386576
aggcctccgcagtccgcacacccctcctgtgctttgagattcgcgcgtcgcgcctgccgacctcgtgcctcccgcggactcgccggcgaacgcctcttggagatgccgcccgccgcggcggcgctcctccggtgcgctccggcggtcccattcgcggcccgcagtagcgctgtttcccgctcaggcatggcgcggcgtctggtggcagcgagcgctgcggccggcaggctggcaccggcgtaccgcgggctgctgctcgacgccggtggcacgctgctgcaggttgcgcggccggtagccgagacgtatgcctccatcggccgacgttacggtgtgacgaagactaagaagagaatcatggaggggttcaagcgggcattctccgcgccatggccgaagacactcaggtaccagggagatgggcggccattctggagaattgtcgtggcagaagcgaccgactgcactgatggtgattatttcgaagaagtgtatcagtattatgcgcatggagatgcttggcgattgcctactggagcagacgcagcactgcgtgagctgaaggatgctggagttaagctcgctgttgtatctaacttcgataccaggctacggaaattgcttaaagaccttaatgtctccgagatgtttgatgccattgtggtgtcatccgaggtcggatatgagaaaccttccccagagatcttcaatatagcattggatcaaattggcgtggaagccagcaaggcaatccatgttggagacgatgaaactgcagacatggcaggtgccaatgctacaggacttgagtgctggctgtggggtaaggatgtgacgacgttttcggaaatacaggagcggattctgacaacagatgatcctcaatgagtgaatttggaatgttgcaaaaaatgatagttgtttcttttttccctcagttccttctttttggtttccttccaactcgtgtgttggcattttcattgtgctttcgtgaaataagctcatgccatggctaggtactgatgttccttc

SEQ ID NO: 28797 - protein, 295 aa, Zea mays subsp. mays
  peptide (1)..(295): Ceres Seq. ID no. 12386577
  misc_feature (81)..(277): Pfam Name: Pfam Description:  haloacid dehalogenase-like hydrolase
  misc_feature (41)..(292): NCBI GI NO: 30683719 NR Description: haloacid dehalogenase-like hydrolase family
  misc_feature (61)..(292): NCBI GI NO: 28393346 NR Description: unknown protein [Arabidopsis thaliana]
  misc_feature (81)..(289): NCBI GI NO: 34899086 NR Description: contains ESTsAU091627
  misc_feature (81)..(288): NCBI GI NO: 15227309 NR Description: hypothetical protein; protein id: At2g41250
  misc_feature (82)..(269): NCBI GI NO: 37520921 NR Description: hypothetical protein gll1352
  misc_feature (82)..(273): NCBI GI NO: 27714603 NR Description: similar to RIKEN cDNA 2810435D12
  misc_feature (82)..(273): NCBI GI NO: 21312204 NR Description: RIKEN cDNA 2810435D12 [Mus musculus]
  misc_feature (82)..(273): NCBI GI NO: 13654294 NR Description: hypothetical protein MGC12904 [Homo sapiens]
  misc_feature (84)..(273): NCBI GI NO: 23041810 NR Description: hypothetical protein
  misc_feature (84)..(273): NCBI GI NO: 23130292 NR Description: hypothetical protein [Nostoc punctiforme]
RPPQSAHPSCALRFARRACRPRASRGLAGERLLEMPPAAAALLRCAPAVPFAARSSAVSRSGMARRLVAASAAAGRLAPAYRGLLLDAGGTLLQVARPVAETYASIGRRYGVTKTKKRIMEGFKRAFSAPWPKTLRYQGDGRPFWRIVVAEATDCTDGDYFEEVYQYYAHGDAWRLPTGADAALRELKDAGVKLAVVSNFDTRLRKLLKDLNVSEMFDAIVVSSEVGYEKPSPEIFNIALDQIGVEASKAIHVGDDETADMAGANATGLECWLWGKDVTTFSEIQERILTTDDPQ

SEQ ID NO: 28798 - protein, 261 aa, Zea mays subsp. mays
  peptide (1)..(261): Ceres Seq. ID no. 12386578
  misc_feature (47)..(243): Pfam Name: Pfam Description:  haloacid dehalogenase-like hydrolase
  misc_feature (7)..(258): NCBI GI NO: 30683719 NR Description: haloacid dehalogenase-like hydrolase family
  misc_feature (27)..(258): NCBI GI NO: 28393346 NR Description: unknown protein [Arabidopsis thaliana]
  misc_feature (47)..(255): NCBI GI NO: 34899086 NR Description: contains ESTsAU091627
  misc_feature (47)..(254): NCBI GI NO: 15227309 NR Description: hypothetical protein; protein id: At2g41250
  misc_feature (48)..(235): NCBI GI NO: 37520921 NR Description: hypothetical protein gll1352
  misc_feature (48)..(239): NCBI GI NO: 27714603 NR Description: similar to RIKEN cDNA 2810435D12
  misc_feature (48)..(239): NCBI GI NO: 21312204 NR Description: RIKEN cDNA 2810435D12 [Mus musculus]
  misc_feature (48)..(239): NCBI GI NO: 13654294 NR Description: hypothetical protein MGC12904 [Homo sapiens]
  misc_feature (50)..(239): NCBI GI NO: 23041810 NR Description: hypothetical protein
  misc_feature (50)..(239): NCBI GI NO: 23130292 NR Description: hypothetical protein [Nostoc punctiforme]
MPPAAAALLRCAPAVPFAARSSAVSRSGMARRLVAASAAAGRLAPAYRGLLLDAGGTLLQVARPVAETYASIGRRYGVTKTKKRIMEGFKRAFSAPWPKTLRYQGDGRPFWRIVVAEATDCTDGDYFEEVYQYYAHGDAWRLPTGADAALRELKDAGVKLAVVSNFDTRLRKLLKDLNVSEMFDAIVVSSEVGYEKPSPEIFNIALDQIGVEASKAIHVGDDETADMAGANATGLECWLWGKDVTTFSEIQERILTTDDPQ

SEQ ID NO: 28799 - protein, 233 aa, Zea mays subsp. mays
  peptide (1)..(233): Ceres Seq. ID no. 12386579
  misc_feature (19)..(215): Pfam Name: Pfam Description:  haloacid dehalogenase-like hydrolase
  misc_feature (1)..(230): NCBI GI NO: 30683719 NR Description: haloacid dehalogenase-like hydrolase family
  misc_feature (1)..(230): NCBI GI NO: 28393346 NR Description: unknown protein [Arabidopsis thaliana]
  misc_feature (19)..(227): NCBI GI NO: 34899086 NR Description: contains ESTsAU091627
  misc_feature (19)..(226): NCBI GI NO: 15227309 NR Description: hypothetical protein; protein id: At2g41250
  misc_feature (20)..(207): NCBI GI NO: 37520921 NR Description: hypothetical protein gll1352
  misc_feature (20)..(211): NCBI GI NO: 27714603 NR Description: similar to RIKEN cDNA 2810435D12
  misc_feature (20)..(211): NCBI GI NO: 21312204 NR Description: RIKEN cDNA 2810435D12 [Mus musculus]
  misc_feature (20)..(211): NCBI GI NO: 13654294 NR Description: hypothetical protein MGC12904 [Homo sapiens]
  misc_feature (22)..(211): NCBI GI NO: 23041810 NR Description: hypothetical protein
  misc_feature (22)..(211): NCBI GI NO: 23130292 NR Description: hypothetical protein [Nostoc punctiforme]
MARRLVAASAAAGRLAPAYRGLLLDAGGTLLQVARPVAETYASIGRRYGVTKTKKRIMEGFKRAFSAPWPKTLRYQGDGRPFWRIVVAEATDCTDGDYFEEVYQYYAHGDAWRLPTGADAALRELKDAGVKLAVVSNFDTRLRKLLKDLNVSEMFDAIVVSSEVGYEKPSPEIFNIALDQIGVEASKAIHVGDDETADMAGANATGLECWLWGKDVTTFSEIQERILTTDDPQ

SEQ ID NO: 28800 - DNA, 763 bp, Zea mays subsp. mays
  misc_feature (1)..(763): Ceres Seq. ID no. 12401201
cattttcctcttctgacctccggcagcaccatggagaacgtcgccgcgaatccttccgctgcggccgccgccgcagggaatggcgtccaagcatcgggggccggaggggagcgcccggaggacgcgtcgaagcagaacctggcgcaggtgacgagctcgatccagaagacgctgggcctgctccaccagctcaacctcaccgtctcctccttcaactctgcctcccagcttcccctcctccagcgcctgaacgcgctcgtggcggagctcgacacgatgcagaaactagccgagggttgtaacatccaggtgccaatggaggtcgtcaatttgatcgacgatgggaagaaccccgacgagtttactagggatgtgctcaacagctgcattgccaagaaccagatcaccaagggcaagactgacgctttcaagagcctacggaagcatctccttgaggagcttgaacaagctttccctgaggacgtagaagcatacagggagatccgtgctacttctgctgctgaggcaaagcggttggctcagtcccatggcaatttgcttaatggagatgtcaaagtgaaagctgagcattgactgaagggtacgactacagagggcaagtttactatctctgtttagtttggggatggctttgttaacgtgaaacgtgcatatctttctagcgcactttcccttcatgtgattgatccgtgaatctgtacatattaatatattatcataacatgtgtggcaattttaatcc

SEQ ID NO: 28801 - protein, 197 aa, Zea mays subsp. mays
  peptide (1)..(197): Ceres Seq. ID no. 12401202
  misc_feature (41)..(196): NCBI GI NO: 18396004 NR Description: Expressed protein; protein id: At1g26665
  misc_feature (41)..(196): NCBI GI NO: 15238215 NR Description: putative protein; protein id: At5g41910.1
  misc_feature (41)..(174): NCBI GI NO: 25403266 NR Description: protein T24P13.4 [imported] - Arabidopsis thaliana
  misc_feature (30)..(169): NCBI GI NO: 29145113 NR Description: similar to DNA segment
  misc_feature (3)..(169): NCBI GI NO: 34873422 NR Description: similar to DNA segment
  misc_feature (54)..(169): NCBI GI NO: 20070410 NR Description: DNA segment
  misc_feature (54)..(169): NCBI GI NO: 13097162 NR Description: Similar to CG5057 gene product [Homo sapiens]
  misc_feature (47)..(172): NCBI GI NO: 9799628 NR Description: Nut2 [Drosophila melanogaster]
  misc_feature (81)..(189): NCBI GI NO: 29841376 NR Description: similar to GenBank Accession Number BC003353 CG5057gene product in Homo sapiens
  misc_feature (47)..(172): NCBI GI NO: 24665095 NR Description: CG5057-PA [Drosophila melanogaster]
HFPLLTSGSTMENVAANPSAAAAAAGNGVQASGAGGERPEDASKQNLAQVTSSIQKTLGLLHQLNLTVSSFNSASQLPLLQRLNALVAELDTMQKLAEGCNIQVPMEVVNLIDDGKNPDEFTRDVLNSCIAKNQITKGKTDAFKSLRKHLLEELEQAFPEDVEAYREIRATSAAEAKRLAQSHGNLLNGDVKVKAEH

SEQ ID NO: 28802 - protein, 187 aa, Zea mays subsp. mays
  peptide (1)..(187): Ceres Seq. ID no. 12401203
  misc_feature (31)..(186): NCBI GI NO: 18396004 NR Description: Expressed protein; protein id: At1g26665
  misc_feature (31)..(186): NCBI GI NO: 15238215 NR Description: putative protein; protein id: At5g41910.1
  misc_feature (31)..(164): NCBI GI NO: 25403266 NR Description: protein T24P13.4 [imported] - Arabidopsis thaliana
  misc_feature (20)..(159): NCBI GI NO: 29145113 NR Description: similar to DNA segment
  misc_feature (1)..(159): NCBI GI NO: 34873422 NR Description: similar to DNA segment
  misc_feature (44)..(159): NCBI GI NO: 20070410 NR Description: DNA segment
  misc_feature (44)..(159): NCBI GI NO: 13097162 NR Description: Similar to CG5057 gene product [Homo sapiens]
  misc_feature (37)..(162): NCBI GI NO: 9799628 NR Description: Nut2 [Drosophila melanogaster]
  misc_feature (71)..(179): NCBI GI NO: 29841376 NR Description: similar to GenBank Accession Number BC003353 CG5057gene product in Homo sapiens
  misc_feature (37)..(162): NCBI GI NO: 24665095 NR Description: CG5057-PA [Drosophila melanogaster]
MENVAANPSAAAAAAGNGVQASGAGGERPEDASKQNLAQVTSSIQKTLGLLHQLNLTVSSFNSASQLPLLQRLNALVAELDTMQKLAEGCNIQVPMEVVNLIDDGKNPDEFTRDVLNSCIAKNQITKGKTDAFKSLRKHLLEELEQAFPEDVEAYREIRATSAAEAKRLAQSHGNLLNGDVKVKAEH

SEQ ID NO: 28803 - protein, 105 aa, Zea mays subsp. mays
  peptide (1)..(105): Ceres Seq. ID no. 12401204
  misc_feature (1)..(104): NCBI GI NO: 18396004 NR Description: Expressed protein; protein id: At1g26665
  misc_feature (1)..(104): NCBI GI NO: 15238215 NR Description: putative protein; protein id: At5g41910.1
  misc_feature (1)..(82): NCBI GI NO: 25403266 NR Description: protein T24P13.4 [imported] - Arabidopsis thaliana
  misc_feature (1)..(77): NCBI GI NO: 29145113 NR Description: similar to DNA segment
  misc_feature (1)..(77): NCBI GI NO: 34873422 NR Description: similar to DNA segment
  misc_feature (1)..(77): NCBI GI NO: 20070410 NR Description: DNA segment
  misc_feature (1)..(77): NCBI GI NO: 13097162 NR Description: Similar to CG5057 gene product [Homo sapiens]
  misc_feature (1)..(80): NCBI GI NO: 9799628 NR Description: Nut2 [Drosophila melanogaster]
  misc_feature (1)..(97): NCBI GI NO: 29841376 NR Description: similar to GenBank Accession Number BC003353 CG5057gene product in Homo sapiens
  misc_feature (1)..(80): NCBI GI NO: 24665095 NR Description: CG5057-PA [Drosophila melanogaster]
MQKLAEGCNIQVPMEVVNLIDDGKNPDEFTRDVLNSCIAKNQITKGKTDAFKSLRKHLLEELEQAFPEDVEAYREIRATSAAEAKRLAQSHGNLLNGDVKVKAEH

SEQ ID NO: 28804 - DNA, 1427 bp, Zea mays subsp. mays
  misc_feature (1)..(1427): Ceres Seq. ID no. 12365626
acaaccggcccccaaggccctctgtaggtgttcaattcctgccactccccgcttccactttggcatcttgctcgcaccggggcaaggcaatggcgccgccgcgtcgctacctggccgcgttgctcgccctgctatgcgcgtgcaccaccacgacggcgccggcgggctccgtcgtcgcggccgcgaacgtaccgatcactacgtgccggtcgttctgcggcaacatcacggtggactacccgttcgcgctgcacgaggggtgcggccacgcggggctgcgggacctgctcttctgcatcaacggcgcgctgatgctccacctcccctcgggctcctaccgcgtggtcgacgtcgactacgcgtaccggggcctgaccctgcacgacccggccatgtccgactgccgcgcgctggacctcgccccggctgggcggggcaacggcttcgtcatcgagccgtggcgggagccgtacctgtcgccggactcggacaacgtgttcctcctcctgggctgccgcgccacctcgccgctgttccagggcttccccgaccgccacctcccctgccggaacgtgtctgggatggggtgcggcgactacctcggctgcctcgcctgggacgactactacgccggcggaggcgggcggcggggcccgtcgtcgggcgacgccgcggggcaaccgcccgagtgctgcgcgctgccctggggtgccatccgggcggtgaacgtcagccggctcgagtgcgaggggtacagcagcgcgtacagcctcgcgcccgtgcgcgccgagggcgccgccgcgggctgggcgtacgggatccgggtgtcgtggacgctgcccgagtccaaccgcggattctgcggcgcgtgccgcgccacgggcggggcgtgtggccatgacacggagagccacgccgacctgtgcctctgcggggactggaactccacctccaactgcgactcctcggccgacgccagcacggtcggtcgccgccacgctgcccgctgtcgccgcgcttcgctgggccatcctcgcctcaggattgacgtcactatggtactacgcgtcgacgacatcaaatatgtgatggacggtggattcatgctgtgatcgacaactgcccttcaaacaacagtacacaccacctagagaaagacgatgcgtttcaggagcttgaaacgatcgaatttcagaacccacgatcactatccatactggtttatgtttacaatcactcgtaatggacaaaaggccaaagacgatcatgtttgttgtagcaaggatatttttcccgtttggatgtatccctttatgtcaacagactcgtttggatgtgagttttgtcgcacattagtagctgcacgatgttgtacgggtcagtcggctgtatactgacgatggtttgatggttgatggacatatggc

SEQ ID NO: 28805 - protein, 369 aa, Zea mays subsp. mays
  peptide (1)..(369): Ceres Seq. ID no. 12365627
  misc_feature (65)..(337): NCBI GI NO: 15240650 NR Description: unknown protein; protein id: At5g50290.1
  misc_feature (42)..(319): NCBI GI NO: 15229029 NR Description: unknown protein; protein id: At3g17350.1
  misc_feature (60)..(319): NCBI GI NO: 18391149 NR Description: Expressed protein; protein id: At1g10380
  misc_feature (60)..(319): NCBI GI NO: 25372857 NR Description: protein F14N23.27
  misc_feature (68)..(319): NCBI GI NO: 18391330 NR Description: Expressed protein; protein id: At1g11915
NRPPRPSVGVQFLPLPASTLASCSHRGKAMAPPRRYLAALLALLCACTTTTAPAGSVVAAANVPITTCRSFCGNITVDYPFALHEGCGHAGLRDLLFCINGALMLHLPSGSYRVVDVDYAYRGLTLHDPAMSDCRALDLAPAGRGNGFVIEPWREPYLSPDSDNVFLLLGCRATSPLFQGFPDRHLPCRNVSGMGCGDYLGCLAWDDYYAGGGGRRGPSSGDAAGQPPECCALPWGAIRAVNVSRLECEGYSSAYSLAPVRAEGAAAGWAYGIRVSWTLPESNRGFCGACRATGGACGHDTESHADLCLCGDWNSTSNCDSSADASTVGRRHAARCRRASLGHPRLRIDVTMVLRVDDIKYVMDGGFML

SEQ ID NO: 28806 - protein, 340 aa, Zea mays subsp. mays
  peptide (1)..(340): Ceres Seq. ID no. 12365628
  misc_feature (36)..(308): NCBI GI NO: 15240650 NR Description: unknown protein; protein id: At5g50290.1
  misc_feature (13)..(290): NCBI GI NO: 15229029 NR Description: unknown protein; protein id: At3g17350.1
  misc_feature (31)..(290): NCBI GI NO: 18391149 NR Description: Expressed protein; protein id: At1g10380
  misc_feature (31)..(290): NCBI GI NO: 25372857 NR Description: protein F14N23.27
  misc_feature (39)..(290): NCBI GI NO: 18391330 NR Description: Expressed protein; protein id: At1g11915
MAPPRRYLAALLALLCACTTTTAPAGSVVAAANVPITTCRSFCGNITVDYPFALHEGCGHAGLRDLLFCINGALMLHLPSGSYRVVDVDYAYRGLTLHDPAMSDCRALDLAPAGRGNGFVIEPWREPYLSPDSDNVFLLLGCRATSPLFQGFPDRHLPCRNVSGMGCGDYLGCLAWDDYYAGGGGRRGPSSGDAAGQPPECCALPWGAIRAVNVSRLECEGYSSAYSLAPVRAEGAAAGWAYGIRVSWTLPESNRGFCGACRATGGACGHDTESHADLCLCGDWNSTSNCDSSADASTVGRRHAARCRRASLGHPRLRIDVTMVLRVDDIKYVMDGGFML

SEQ ID NO: 28807 - protein, 299 aa, Zea mays subsp. mays
  peptide (1)..(299): Ceres Seq. ID no. 12365629
QPAPKALCRCSIPATPRFHFGILLAPGQGNGAAASLPGRVARPAMRVHHHDGAGGLRRRGRERTDHYVPVVLRQHHGGLPVRAARGVRPRGAAGPALLHQRRADAPPPLGLLPRGRRRLRVPGPDPARPGHVRLPRAGPRPGWAGQRLRHRAVAGAVPVAGLGQRVPPPGLPRHLAAVPGLPRPPPPLPERVWDGVRRLPRLPRLGRLLRRRRRAAGPVVGRRRGATARVLRAALGCHPGGERQPARVRGVQQRVQPRARARRGRRRGLGVRDPGVVDAARVQPRILRRVPRHGRGVWP

SEQ ID NO: 28808 - DNA, 1186 bp, Zea mays subsp. mays
  misc_feature (1)..(1186): Ceres Seq. ID no. 12408921
ctcttcttctcgcgcagcatcgcctcccaagtccacaaaccacaacttacgccgccgctcgctccaccgcgcaagagtctgctgctgccgctcacccacccccgctcgcgcagaaggccgccgcagctctcactactggtgccctaaacgccgatatccctcttcgcctccctttccccacccaaaaccccggccttcagggttccggcaccatgccgcagggagatcacatcgagctgcaccagaagcgccatggcaagcgcctggaccacgaagagcgcaagcgcaagcgcgaggcccgcgaggtgcacaggcgctcgaaggatgcccgcaatttgattggtgctaagggcaagaggttcgccaagaaacgctatgctgagaaggcacagatgaagaagaccctgaaaatgcacgacgaatcaaataaacgacagaaggttgatgatgatgtccaagagggtgctcttcctccgtatctgctggatcgtgatcagacacagcgcgctaaggttctcagcaacacaataaagcaaaagaggaaggaaaaggctggcaaatgggatgttcctctgccaaaggtcaggcctgtagctgaagaagaaatgttcaaggttctacgaactggcaagcgaaaaaccaagcagtggaagagaatggttactaaagccacctttgttggagctggatttacaaggaaaccaccaaagtatgaacggttcattcggccaactggtctgcgtttcaccaaagctcatgtgactcacccagagctgaagtgcactttcaaccttgacataatttctgtgaagaaaaacccaaatggtccaatgtacacttctcttggtgttatgacaaggggaacgatcattgaggtaaatgtcagtgagcttggtctggtaactcccgctggaaaagttgtttgggggaaatatgctcaagttacaaacaacccggagaacgatggctgtatcaatgcagttttgctagtgtagagccatagtgagattttgttgatggtggttaatcgtcccatttgtatctgctccgatatgctattttttgaccatgtcatggctaatcccagtagtttgttgtgcaccatgggcataatgagcattctgtattctcgctgtgtgctacaaacatatatggagtaatataaattagcagtatttttttcgcg

SEQ ID NO: 28809 - protein, 330 aa, Zea mays subsp. mays
  peptide (1)..(330): Ceres Seq. ID no. 12408922
  misc_feature (71)..(307): Pfam Name: Pfam Description:  Ribosomal protein S8e
  misc_feature (71)..(330): NCBI GI NO: 33146852 NR Description: putative TGF
  misc_feature (71)..(330): NCBI GI NO: 15240023 NR Description: putative protein; protein id: At5g06360
  misc_feature (71)..(330): NCBI GI NO: 21553587 NR Description: unknown [Arabidopsis thaliana]
  misc_feature (71)..(330): NCBI GI NO: 28278483 NR Description: Similar to RIKEN cDNA 5730427N09 gene
  misc_feature (71)..(330): NCBI GI NO: 7662677 NR Description: hypothetical protein YR-29
  misc_feature (71)..(330): NCBI GI NO: 34925411 NR Description: TGF beta-inducible nuclear protein 1
  misc_feature (71)..(330): NCBI GI NO: 34924868 NR Description: TGF beta-inducible nuclear protein 1
  misc_feature (71)..(330): NCBI GI NO: 12856931 NR Description: unnamed protein product [Mus musculus]
  misc_feature (71)..(330): NCBI GI NO: 9438133 NR Description: unknown [Ochlerotatus triseriatus]
  misc_feature (73)..(330): NCBI GI NO: 34881321 NR Description: similar to TGF beta-inducible nuclear protein 1
LLLAQHRLPSPQTTTYAAARSTAQESAAAAHPPPLAQKAAAALTTGALNADIPLRLPFPTQNPGLQGSGTMPQGDHIELHQKRHGKRLDHEERKRKREAREVHRRSKDARNLIGAKGKRFAKKRYAEKAQMKKTLKMHDESNKRQKVDDDVQEGALPPYLLDRDQTQRAKVLSNTIKQKRKEKAGKWDVPLPKVRPVAEEEMFKVLRTGKRKTKQWKRMVTKATFVGAGFTRKPPKYERFIRPTGLRFTKAHVTHPELKCTFNLDIISVKKNPNGPMYTSLGVMTRGTIIEVNVSELGLVTPAGKVVWGKYAQVTNNPENDGCINAVLLV

SEQ ID NO: 28810 - protein, 260 aa, Zea mays subsp. mays
  peptide (1)..(260): Ceres Seq. ID no. 12408923
  misc_feature (1)..(237): Pfam Name: Pfam Description:  Ribosomal protein S8e
  misc_feature (1)..(260): NCBI GI NO: 33146852 NR Description: putative TGF
  misc_feature (1)..(260): NCBI GI NO: 15240023 NR Description: putative protein; protein id: At5g06360
  misc_feature (1)..(260): NCBI GI NO: 21553587 NR Description: unknown [Arabidopsis thaliana]
  misc_feature (1)..(260): NCBI GI NO: 28278483 NR Description: Similar to RIKEN cDNA 5730427N09 gene
  misc_feature (1)..(260): NCBI GI NO: 7662677 NR Description: hypothetical protein YR-29
  misc_feature (1)..(260): NCBI GI NO: 34925411 NR Description: TGF beta-inducible nuclear protein 1
  misc_feature (1)..(260): NCBI GI NO: 34924868 NR Description: TGF beta-inducible nuclear protein 1
  misc_feature (1)..(260): NCBI GI NO: 12856931 NR Description: unnamed protein product [Mus musculus]
  misc_feature (1)..(260): NCBI GI NO: 9438133 NR Description: unknown [Ochlerotatus triseriatus]
  misc_feature (3)..(260): NCBI GI NO: 34881321 NR Description: similar to TGF beta-inducible nuclear protein 1
MPQGDHIELHQKRHGKRLDHEERKRKREAREVHRRSKDARNLIGAKGKRFAKKRYAEKAQMKKTLKMHDESNKRQKVDDDVQEGALPPYLLDRDQTQRAKVLSNTIKQKRKEKAGKWDVPLPKVRPVAEEEMFKVLRTGKRKTKQWKRMVTKATFVGAGFTRKPPKYERFIRPTGLRFTKAHVTHPELKCTFNLDIISVKKNPNGPMYTSLGVMTRGTIIEVNVSELGLVTPAGKVVWGKYAQVTNNPENDGCINAVLLV

SEQ ID NO: 28811 - protein, 200 aa, Zea mays subsp. mays
  peptide (1)..(200): Ceres Seq. ID no. 12408924
  misc_feature (1)..(177): Pfam Name: Pfam Description:  Ribosomal protein S8e
  misc_feature (1)..(200): NCBI GI NO: 33146852 NR Description: putative TGF
  misc_feature (1)..(200): NCBI GI NO: 15240023 NR Description: putative protein; protein id: At5g06360
  misc_feature (1)..(200): NCBI GI NO: 21553587 NR Description: unknown [Arabidopsis thaliana]
  misc_feature (1)..(200): NCBI GI NO: 28278483 NR Description: Similar to RIKEN cDNA 5730427N09 gene
  misc_feature (1)..(200): NCBI GI NO: 7662677 NR Description: hypothetical protein YR-29
  misc_feature (1)..(200): NCBI GI NO: 34925411 NR Description: TGF beta-inducible nuclear protein 1
  misc_feature (1)..(200): NCBI GI NO: 34924868 NR Description: TGF beta-inducible nuclear protein 1
  misc_feature (1)..(200): NCBI GI NO: 12856931 NR Description: unnamed protein product [Mus musculus]
  misc_feature (1)..(200): NCBI GI NO: 9438133 NR Description: unknown [Ochlerotatus triseriatus]
  misc_feature (1)..(200): NCBI GI NO: 34881321 NR Description: similar to TGF beta-inducible nuclear protein 1
MKKTLKMHDESNKRQKVDDDVQEGALPPYLLDRDQTQRAKVLSNTIKQKRKEKAGKWDVPLPKVRPVAEEEMFKVLRTGKRKTKQWKRMVTKATFVGAGFTRKPPKYERFIRPTGLRFTKAHVTHPELKCTFNLDIISVKKNPNGPMYTSLGVMTRGTIIEVNVSELGLVTPAGKVVWGKYAQVTNNPENDGCINAVLLV

SEQ ID NO: 28812 - DNA, 1319 bp, Zea mays subsp. mays
  misc_feature (1)..(1319): Ceres Seq. ID no. 12435002
agcgccaccgccgttcgcctcctctccacactccgccagatcccatccctctcgcccaccgcgcgggtatcggagtcggagcatggcgtctgcagtggtggtggacgccggcgacgcgccggagcccacggttcgtaacctcctggaccaggagtccctcaagtgggtcttcgtcggcgggaagggcggcgtcggcaagactacctgcagctccatcctctccgtcctcctcgccggggtccgcccgtccgtgctcgtcatctccaccgaccccgcgcacaacctcagcgacgccttccagcagcgcttcaccaagttccccactctcgtccgcggattcaccaacctctacgccatggaaattgacccaaaggtagaaaatgatgatttatccaatgaaggaatggaaggattcctgtcagaactgacaaatgcgattccaggagtagatgaagctatgagttttgctgaaatgctaaaattagtccaaacaatggattactctgttgttgtttttgatactgctcctacagggcatacattacggttgcttcagttcccagcaaccctagagaagggtcttgagaaaatgatggagttgaaaaatagatttggcggtctgttgaatcaggccagtcgcttgtttggtcttggtgatgagctgaacgaggatgcaatgcttgggaaacttgagggtatgaaggatgtgatcgaacaagtgaacaggcaatttaaagatccagacttgacaacttttgtatgtgtttgtatcccggaatttctttcattgtatgaaacagaaagattggtgcaagagttagcgaagtttgagattgattcacacaatattattattaatcaagttatatttgatgaggaagctgtcgagtcaaaactgctaaaagcacggatgaaaatgcaacaaaaatacattgatcagttccatatgttatacgatgacttcaacatcaccaagcttcccttgctttcagaagaggtttgtggtgttcaagctctccaaaacttttcccagcacttccttacaccatacaagtctactcttaaaaggggcaccgtcgaggagctcgaacagagaataactatattaaaatctgcactgcaagaagctgagacagagttagatagggttaggaaagggaagcagtcagtgtgattttttttccacaggtcaagtgtgtaaaaccagagagacgatcaattttttcgtgtcattacactcttgttgatttcactatcatgtttcctcatcgaggagtttagacttgtaatagctatcggtagagaagtgtttgattcac

SEQ ID NO: 28813 - protein, 390 aa, Zea mays subsp. mays
  peptide (1)..(390): Ceres Seq. ID no. 12435003
  misc_feature (53)..(348): Pfam Name: Pfam Description:  Anion-transporting ATPase
  misc_feature (36)..(386): NCBI GI NO: 18378897 NR Description: arsA homolog
  misc_feature (36)..(386): NCBI GI NO: 25290846 NR Description: hypothetical protein F22M8.4
  misc_feature (41)..(350): NCBI GI NO: 24586297 NR Description: CG1598-PA [Drosophila melanogaster]
  misc_feature (36)..(350): NCBI GI NO: 19717679 NR Description: arsenite transport subunit A
  misc_feature (41)..(350): NCBI GI NO: 17945070 NR Description: RE07422p [Drosophila melanogaster]
  misc_feature (35)..(351): NCBI GI NO: 6647417 NR Description: Arsenical pump-driving ATPase
  misc_feature (35)..(351): NCBI GI NO: 12025542 NR Description: arsA
  misc_feature (35)..(351): NCBI GI NO: 2905657 NR Description: arsenite translocating ATPase [Homo sapiens]
  misc_feature (41)..(351): NCBI GI NO: 4757796 NR Description: arsA arsenite transporter, ATP-binding, homolog 1
  misc_feature (139)..(340): NCBI GI NO: 30697424 NR Description: ATPase - like protein [Arabidopsis thaliana]
APPPFASSPHSARSHPSRPPRGYRSRSMASAVVVDAGDAPEPTVRNLLDQESLKWVFVGGKGGVGKTTCSSILSVLLAGVRPSVLVISTDPAHNLSDAFQQRFTKFPTLVRGFTNLYAMEIDPKVENDDLSNEGMEGFLSELTNAIPGVDEAMSFAEMLKLVQTMDYSVVVFDTAPTGHTLRLLQFPATLEKGLEKMMELKNRFGGLLNQASRLFGLGDELNEDAMLGKLEGMKDVIEQVNRQFKDPDLTTFVCVCIPEFLSLYETERLVQELAKFEIDSHNIIINQVIFDEEAVESKLLKARMKMQQKYIDQFHMLYDDFNITKLPLLSEEVCGVQALQNFSQHFLTPYKSTLKRGTVEELEQRITILKSALQEAETELDRVRKGKQSV

SEQ ID NO: 28814 - protein, 363 aa, Zea mays subsp. mays
  peptide (1)..(363): Ceres Seq. ID no. 12435004
  misc_feature (26)..(321): Pfam Name: Pfam Description:  Anion-transporting ATPase
  misc_feature (9)..(359): NCBI GI NO: 18378897 NR Description: arsA homolog
  misc_feature (9)..(359): NCBI GI NO: 25290846 NR Description: hypothetical protein F22M8.4
  misc_feature (14)..(323): NCBI GI NO: 24586297 NR Description: CG1598-PA [Drosophila melanogaster]
  misc_feature (9)..(323): NCBI GI NO: 19717679 NR Description: arsenite transport subunit A
  misc_feature (14)..(323): NCBI GI NO: 17945070 NR Description: RE07422p [Drosophila melanogaster]
  misc_feature (8)..(324): NCBI GI NO: 6647417 NR Description: Arsenical pump-driving ATPase
  misc_feature (8)..(324): NCBI GI NO: 12025542 NR Description: arsA
  misc_feature (8)..(324): NCBI GI NO: 2905657 NR Description: arsenite translocating ATPase [Homo sapiens]
  misc_feature (14)..(324): NCBI GI NO: 4757796 NR Description: arsA arsenite transporter, ATP-binding, homolog 1
  misc_feature (112)..(313): NCBI GI NO: 30697424 NR Description: ATPase - like protein [Arabidopsis thaliana]
MASAVVVDAGDAPEPTVRNLLDQESLKWVFVGGKGGVGKTTCSSILSVLLAGVRPSVLVISTDPAHNLSDAFQQRFTKFPTLVRGFTNLYAMEIDPKVENDDLSNEGMEGFLSELTNAIPGVDEAMSFAEMLKLVQTMDYSVVVFDTAPTGHTLRLLQFPATLEKGLEKMMELKNRFGGLLNQASRLFGLGDELNEDAMLGKLEGMKDVIEQVNRQFKDPDLTTFVCVCIPEFLSLYETERLVQELAKFEIDSHNIIINQVIFDEEAVESKLLKARMKMQQKYIDQFHMLYDDFNITKLPLLSEEVCGVQALQNFSQHFLTPYKSTLKRGTVEELEQRITILKSALQEAETELDRVRKGKQSV

SEQ ID NO: 28815 - protein, 272 aa, Zea mays subsp. mays
  peptide (1)..(272): Ceres Seq. ID no. 12435005
  misc_feature (1)..(230): Pfam Name: Pfam Description:  Anion-transporting ATPase
  misc_feature (1)..(268): NCBI GI NO: 18378897 NR Description: arsA homolog
  misc_feature (1)..(268): NCBI GI NO: 25290846 NR Description: hypothetical protein F22M8.4
  misc_feature (1)..(232): NCBI GI NO: 24586297 NR Description: CG1598-PA [Drosophila melanogaster]
  misc_feature (1)..(232): NCBI GI NO: 19717679 NR Description: arsenite transport subunit A
  misc_feature (1)..(232): NCBI GI NO: 17945070 NR Description: RE07422p [Drosophila melanogaster]
  misc_feature (1)..(233): NCBI GI NO: 6647417 NR Description: Arsenical pump-driving ATPase
  misc_feature (1)..(233): NCBI GI NO: 12025542 NR Description: arsA
  misc_feature (1)..(233): NCBI GI NO: 2905657 NR Description: arsenite translocating ATPase [Homo sapiens]
  misc_feature (1)..(233): NCBI GI NO: 4757796 NR Description: arsA arsenite transporter, ATP-binding, homolog 1
  misc_feature (21)..(222): NCBI GI NO: 30697424 NR Description: ATPase - like protein [Arabidopsis thaliana]
MEIDPKVENDDLSNEGMEGFLSELTNAIPGVDEAMSFAEMLKLVQTMDYSVVVFDTAPTGHTLRLLQFPATLEKGLEKMMELKNRFGGLLNQASRLFGLGDELNEDAMLGKLEGMKDVIEQVNRQFKDPDLTTFVCVCIPEFLSLYETERLVQELAKFEIDSHNIIINQVIFDEEAVESKLLKARMKMQQKYIDQFHMLYDDFNITKLPLLSEEVCGVQALQNFSQHFLTPYKSTLKRGTVEELEQRITILKSALQEAETELDRVRKGKQSV

SEQ ID NO: 28816 - DNA, 1153 bp, Zea mays subsp. mays
  misc_feature (1)..(1153): Ceres Seq. ID no. 12408917
gaccaaccccacccactggaccggcccgcgcccgcttggtccagcgccggccctgcctgcagccagccaccgttgtccgttccctcccgcgatccactcctctcgagctctaggggacggaaggaatccggcgggggtggggtgcgagcagggggagggagaagagcagccgcccgccccgcgagggggcaacagctgcccaagaacctgaccggaagagttgtgggagcggcggcggaaagatggggcaggccctgcgcaggctcttcgactccttcttctccaccagggagatgagggttgtgatgcttggtctggatgcagctggtaaaacaacaatactgtacaggcttcacatgggagaggttctttcaacagtccctacagtcggttttaatgtcgagaaggttcagtataagaatgtggcattcactgtgtgggatgtgggtgggcaagaaaaactcaggtcactgtggaagatgtacctgagtaattctgatgcactgatctatgtcgttgattctctggacagagaaaggatcagagacgcgaggcaagagttccagaccattatcaaggaccctttgatggcaaacagcataatcttggtatttgcaaacaaacaggacctgagaggcacgatgagcacggacgaggtcagcgaagggctggggctgcacgacctcaggaacaggatctggcacatacaggggacctgcgcgctccgcggcgagggcctctacgacgggctcgactggcttgcgtccaccctgaagcagctgcaagaatcgggccacgcgacttcggtcgctggcccttccatctgatccagcgcaagtgagctcagtgcctcagccaactgacagcaagcccacaagaatatgctccagcgcgagcgcattcctttggtgggtgtggctgcccgctggtggtggtggagttccttcggtcggtgttgccgtgttggtatcatatgagccagttgttcatccggcagggactcgcgtacttttttttctctcctgagattgtttgtaaattgttgaacggatgcaatgccggcgatgttgatcttgtgtgctggtggtgcacgtggttgttttgtctacttttttttacaataaaaaagagatcgtctgcggttctggtgatt

SEQ ID NO: 28817 - protein, 194 aa, Zea mays subsp. mays
  peptide (1)..(194): Ceres Seq. ID no. 12408918
  misc_feature (4)..(177): Pfam Name: Pfam Description:  ADP-ribosylation factor family
  misc_feature (1)..(190): NCBI GI NO: 37537196 NR Description: putative ADP-ribosylation factor
  misc_feature (1)..(189): NCBI GI NO: 15237901 NR Description: ADP-ribosylation factor -like protein
  misc_feature (1)..(193): NCBI GI NO: 15228464 NR Description: putative ADP-ribosylation factor
  misc_feature (1)..(189): NCBI GI NO: 34897926 NR Description: Similar to Drosophila melanogaster ADP-ribosylationfactor 1
  misc_feature (1)..(178): NCBI GI NO: 3182915 NR Description: ADP-RIBOSYLATION FACTOR
  misc_feature (1)..(177): NCBI GI NO: 34909214 NR Description: putative ADP-ribosylation factor
  misc_feature (1)..(179): NCBI GI NO: 7025460 NR Description: ADP ribosylation factor 1 [Toxoplasma gondii]
  misc_feature (1)..(178): NCBI GI NO: 17551730 NR Description: ADP-Ribosylation Factor related ARF-1 (20
  misc_feature (1)..(178): NCBI GI NO: 17136866 NR Description: ADP ribosylation factor 79F CG8385-PB
  misc_feature (1)..(178): NCBI GI NO: 39584902 NR Description: Hypothetical protein CBG09004
MGQALRRLFDSFFSTREMRVVMLGLDAAGKTTILYRLHMGEVLSTVPTVGFNVEKVQYKNVAFTVWDVGGQEKLRSLWKMYLSNSDALIYVVDSLDRERIRDARQEFQTIIKDPLMANSIILVFANKQDLRGTMSTDEVSEGLGLHDLRNRIWHIQGTCALRGEGLYDGLDWLASTLKQLQESGHATSVAGPSI

SEQ ID NO: 28818 - protein, 177 aa, Zea mays subsp. mays
  peptide (1)..(177): Ceres Seq. ID no. 12408919
  misc_feature (1)..(160): Pfam Name: Pfam Description:  ADP-ribosylation factor family
  misc_feature (1)..(173): NCBI GI NO: 37537196 NR Description: putative ADP-ribosylation factor
  misc_feature (1)..(172): NCBI GI NO: 15237901 NR Description: ADP-ribosylation factor -like protein
  misc_feature (1)..(176): NCBI GI NO: 15228464 NR Description: putative ADP-ribosylation factor
  misc_feature (1)..(172): NCBI GI NO: 34897926 NR Description: Similar to Drosophila melanogaster ADP-ribosylationfactor 1
  misc_feature (1)..(161): NCBI GI NO: 3182915 NR Description: ADP-RIBOSYLATION FACTOR
  misc_feature (1)..(160): NCBI GI NO: 34909214 NR Description: putative ADP-ribosylation factor
  misc_feature (1)..(162): NCBI GI NO: 7025460 NR Description: ADP ribosylation factor 1 [Toxoplasma gondii]
  misc_feature (1)..(161): NCBI GI NO: 17551730 NR Description: ADP-Ribosylation Factor related ARF-1 (20
  misc_feature (1)..(161): NCBI GI NO: 17136866 NR Description: ADP ribosylation factor 79F CG8385-PB
  misc_feature (1)..(161): NCBI GI NO: 39584902 NR Description: Hypothetical protein CBG09004
MRVVMLGLDAAGKTTILYRLHMGEVLSTVPTVGFNVEKVQYKNVAFTVWDVGGQEKLRSLWKMYLSNSDALIYVVDSLDRERIRDARQEFQTIIKDPLMANSIILVFANKQDLRGTMSTDEVSEGLGLHDLRNRIWHIQGTCALRGEGLYDGLDWLASTLKQLQESGHATSVAGPSI

SEQ ID NO: 28819 - protein, 173 aa, Zea mays subsp. mays
  peptide (1)..(173): Ceres Seq. ID no. 12408920
  misc_feature (1)..(156): Pfam Name: Pfam Description:  ADP-ribosylation factor family
  misc_feature (1)..(169): NCBI GI NO: 37537196 NR Description: putative ADP-ribosylation factor
  misc_feature (1)..(168): NCBI GI NO: 15237901 NR Description: ADP-ribosylation factor -like protein
  misc_feature (1)..(172): NCBI GI NO: 15228464 NR Description: putative ADP-ribosylation factor
  misc_feature (1)..(168): NCBI GI NO: 34897926 NR Description: Similar to Drosophila melanogaster ADP-ribosylationfactor 1
  misc_feature (1)..(157): NCBI GI NO: 3182915 NR Description: ADP-RIBOSYLATION FACTOR
  misc_feature (1)..(156): NCBI GI NO: 34909214 NR Description: putative ADP-ribosylation factor
  misc_feature (1)..(158): NCBI GI NO: 7025460 NR Description: ADP ribosylation factor 1 [Toxoplasma gondii]
  misc_feature (1)..(157): NCBI GI NO: 17551730 NR Description: ADP-Ribosylation Factor related ARF-1 (20
  misc_feature (1)..(157): NCBI GI NO: 17136866 NR Description: ADP ribosylation factor 79F CG8385-PB
  misc_feature (1)..(157): NCBI GI NO: 39584902 NR Description: Hypothetical protein CBG09004
MLGLDAAGKTTILYRLHMGEVLSTVPTVGFNVEKVQYKNVAFTVWDVGGQEKLRSLWKMYLSNSDALIYVVDSLDRERIRDARQEFQTIIKDPLMANSIILVFANKQDLRGTMSTDEVSEGLGLHDLRNRIWHIQGTCALRGEGLYDGLDWLASTLKQLQESGHATSVAGPSI

SEQ ID NO: 28820 - DNA, 1315 bp, Zea mays subsp. mays
  misc_feature (1)..(1315): Ceres Seq. ID no. 12408914
gtatagccagcggttgacctggcttcttcacatacactattatacgtacattgatatatacgaaccgtcctggttcttgcaccaccgccgcaccgattcgcgcgaaagcgaactccgtgccttagggccgaatcatcaccgtcgtccgatcgatccgggaccgggactcgggaagcatgttgttaaatggcgacagcaggcgggccgcggcgacagcagcagcgctgctggctctcgccgcctgcttctgcgcagctactggagacggggatatggcgggcctgcggccgctcgtcctcgtggttgaccagtccggcaagggcgaccacaggaggattcaggacgccatcgatgcggcgccggcgagcaaccgctccgccggcggccgcggcagcgtcgtcatccggatcaagcccggagtgtacagagagaaagtggtggtggacaagccttgcataactctcgtcggcgcgaccgccgccagctcgaccgtcgtcatcacctggaacgagtcctgggtcgccgccgacagcccgacagtctccgtgctggcctccgacttcgtcgcgaagcgcatagcgttccagaacacgttcgggactagcgggccggcggtcgccgtgagggtggccggagacagggcggcgttctacgggtgcaggttcacgtcgttccaggacacgctcctggacgacacgggtcgccactactaccgtggctgctacgtccagggaggcaccgacttcgtcttcggcaatggcaaggctctgttcgataagtgccacctccactccgtctcgccggccggcggcgcgttcacggcgcacagacggtcgtcggagtcggaggacactgggttcagcttcgtcgggtgcaagctgacggggctcggggccggcacgtccgtcctcgggagaccctggggtccctactcccgcgtcgtctttgcgctcagctacatgtccggcacggtgaggccccagggctggggacgactgggagcgactcctccagacagagcaggagcaggacagcgttctacgggcagtaccagtgctacggggaaggctccagaactgacgggagagttgcgtggtctcacgacctgtcgcaggctgaagccgcgccgttcatcaccaaagtttgggtcgggggacaggagtggcttcggtaggaaacactagctagctgtgtgtgctctgtttggttcgtcaacagtgacgctgggaataataagctagagctgcagacgcgttatggccggttggtgccgagaatacgcttgccctgaaaaaggcgagcaatgcaagcaatg

SEQ ID NO: 28821 - protein, 335 aa, Zea mays subsp. mays
  peptide (1)..(335): Ceres Seq. ID no. 12408915
  misc_feature (40)..(295): Pfam Name: Pfam Description:  Pectinesterase
  misc_feature (39)..(295): NCBI GI NO: 34913006 NR Description: pectin methylesterase-like protein
  misc_feature (39)..(275): NCBI GI NO: 15226598 NR Description: pectinesterase family; protein id: At2g21610.1
  misc_feature (40)..(271): NCBI GI NO: 15240781 NR Description: pectinesterase family; protein id: At5g07420
  misc_feature (40)..(271): NCBI GI NO: 15238111 NR Description: pectinesterase family; protein id: At5g47500
  misc_feature (39)..(275): NCBI GI NO: 15228022 NR Description: pectinesterase family; protein id: At2g36700.1
  misc_feature (39)..(281): NCBI GI NO: 15228023 NR Description: pectinesterase family; protein id: At2g36710.1
  misc_feature (39)..(281): NCBI GI NO: 27754550 NR Description: putative pectinesterase family protein
  misc_feature (40)..(271): NCBI GI NO: 9758778 NR Description: pectin methylesterase-like [Arabidopsis thaliana]
  misc_feature (40)..(271): NCBI GI NO: 15240792 NR Description: pectinesterase family; protein id: At5g07430.1
  misc_feature (41)..(271): NCBI GI NO: 38345478 NR Description: OSJNBa0010H02.16
MLLNGDSRRAAATAAALLALAACFCAATGDGDMAGLRPLVLVVDQSGKGDHRRIQDAIDAAPASNRSAGGRGSVVIRIKPGVYREKVVVDKPCITLVGATAASSTVVITWNESWVAADSPTVSVLASDFVAKRIAFQNTFGTSGPAVAVRVAGDRAAFYGCRFTSFQDTLLDDTGRHYYRGCYVQGGTDFVFGNGKALFDKCHLHSVSPAGGAFTAHRRSSESEDTGFSFVGCKLTGLGAGTSVLGRPWGPYSRVVFALSYMSGTVRPQGWGRLGATPPDRAGAGQRSTGSTSATGKAPELTGELRGLTTCRRLKPRRSSPKFGSGDRSGFGRKH

SEQ ID NO: 28822 - protein, 303 aa, Zea mays subsp. mays
  peptide (1)..(303): Ceres Seq. ID no. 12408916
  misc_feature (8)..(263): Pfam Name: Pfam Description:  Pectinesterase
  misc_feature (7)..(263): NCBI GI NO: 34913006 NR Description: pectin methylesterase-like protein
  misc_feature (7)..(243): NCBI GI NO: 15226598 NR Description: pectinesterase family; protein id: At2g21610.1
  misc_feature (8)..(239): NCBI GI NO: 15240781 NR Description: pectinesterase family; protein id: At5g07420
  misc_feature (8)..(239): NCBI GI NO: 15238111 NR Description: pectinesterase family; protein id: At5g47500
  misc_feature (7)..(243): NCBI GI NO: 15228022 NR Description: pectinesterase family; protein id: At2g36700.1
  misc_feature (7)..(249): NCBI GI NO: 15228023 NR Description: pectinesterase family; protein id: At2g36710.1
  misc_feature (7)..(249): NCBI GI NO: 27754550 NR Description: putative pectinesterase family protein
  misc_feature (8)..(239): NCBI GI NO: 9758778 NR Description: pectin methylesterase-like [Arabidopsis thaliana]
  misc_feature (8)..(239): NCBI GI NO: 15240792 NR Description: pectinesterase family; protein id: At5g07430.1
  misc_feature (9)..(239): NCBI GI NO: 38345478 NR Description: OSJNBa0010H02.16
MAGLRPLVLVVDQSGKGDHRRIQDAIDAAPASNRSAGGRGSVVIRIKPGVYREKVVVDKPCITLVGATAASSTVVITWNESWVAADSPTVSVLASDFVAKRIAFQNTFGTSGPAVAVRVAGDRAAFYGCRFTSFQDTLLDDTGRHYYRGCYVQGGTDFVFGNGKALFDKCHLHSVSPAGGAFTAHRRSSESEDTGFSFVGCKLTGLGAGTSVLGRPWGPYSRVVFALSYMSGTVRPQGWGRLGATPPDRAGAGQRSTGSTSATGKAPELTGELRGLTTCRRLKPRRSSPKFGSGDRSGFGRKH

SEQ ID NO: 28823 - DNA, 1037 bp, Zea mays subsp. mays
  misc_feature (1)..(1037): Ceres Seq. ID no. 12357350
ccccgttcccctcgtcgacacctgcagtgccaagttgcatcgactcctccccggtcctccaccgcccgccgccgatggatgtggatgtggacgaggccaccgccacccctgcctccgcctctgccaagcccgcttccaacggcgaggccccctccggcgcccgcgaggtggatgtcggcgaggagtacacgctcgccggcgttctgcgcagcttcgtcgacggcgtctggtacccggacgagccgctgctccggcggctccgggcggcgtcctgcgaggccgcgccgcggctgaagggggcgtctcggaactcagcgcgggatctgctcgagtggacaaggcagggcagcggcctccgcgccatcctcgtcatctcggtcgggacaatcatgcctatagcattgactggccttttaatcttcatgttctttctgctaattgccactgctaatgcgatcatcgtctcagccctgatgtcactggccgctgctggcggattcttggctatcttctttgcttgcttggttgcagtgtatattggagcagtaggagttgctatctttgccatttctgccattgtcatctcatcagttgttggagttatgattactactggttgggttgggttcttctggatgatctggttcaccgcaaggaagagcatggacctgacgaagcattccatcagcatgacgagctcggcagtccaatcctattccgcgtcccgccaagtgaagcagaagcatgtcgactgaggctagttggttgcgtcttgcgtcctgtatgaagaagccctcgggtcgatctgggtgaattacggtagacgacatgcttgttttggcagttctgtttttcacggacactaggtgcataaatactagctctgaacttcggcagcgtgtacgtttgtcacggcggccaatgctgttctgtatggtatagtgatcagatgattgtacattgtgcaggtatgcagtatgtacatgccgattcatgagttgataataaaactatcactatattttttttccttttcc

SEQ ID NO: 28824 - protein, 250 aa, Zea mays subsp. mays
  peptide (1)..(250): Ceres Seq. ID no. 12357351
  misc_feature (29)..(250): NCBI GI NO: 34905012 NR Description: P0456B03.14
  misc_feature (46)..(246): NCBI GI NO: 14423560 NR Description: Unknown protein [Arabidopsis thaliana]
  misc_feature (46)..(246): NCBI GI NO: 18418008 NR Description: expressed protein; protein id: At5g16550
PFPSSTPAVPSCIDSSPVLHRPPPMDVDVDEATATPASASAKPASNGEAPSGAREVDVGEEYTLAGVLRSFVDGVWYPDEPLLRRLRAASCEAAPRLKGASRNSARDLLEWTRQGSGLRAILVISVGTIMPIALTGLLIFMFFLLIATANAIIVSALMSLAAAGGFLAIFFACLVAVYIGAVGVAIFAISAIVISSVVGVMITTGWVGFFWMIWFTARKSMDLTKHSISMTSSAVQSYSASRQVKQKHVD

SEQ ID NO: 28825 - protein, 226 aa, Zea mays subsp. mays
  peptide (1)..(226): Ceres Seq. ID no. 12357352
  misc_feature (5)..(226): NCBI GI NO: 34905012 NR Description: P0456B03.14
  misc_feature (22)..(222): NCBI GI NO: 14423560 NR Description: Unknown protein [Arabidopsis thaliana]
  misc_feature (22)..(222): NCBI GI NO: 18418008 NR Description: expressed protein; protein id: At5g16550
MDVDVDEATATPASASAKPASNGEAPSGAREVDVGEEYTLAGVLRSFVDGVWYPDEPLLRRLRAASCEAAPRLKGASRNSARDLLEWTRQGSGLRAILVISVGTIMPIALTGLLIFMFFLLIATANAIIVSALMSLAAAGGFLAIFFACLVAVYIGAVGVAIFAISAIVISSVVGVMITTGWVGFFWMIWFTARKSMDLTKHSISMTSSAVQSYSASRQVKQKHVD

SEQ ID NO: 28826 - protein, 149 aa, Zea mays subsp. mays
  peptide (1)..(149): Ceres Seq. ID no. 12357353
PVPLVDTCSAKLHRLLPGPPPPAADGCGCGRGHRHPCLRLCQARFQRRGPLRRPRGGCRRGVHARRRSAQLRRRRLVPGRAAAPAAPGGVLRGRAAAEGGVSELSAGSARVDKAGQRPPRHPRHLGRDNHAYSIDWPFNLHVLSANCHC

SEQ ID NO: 28827 - DNA, 990 bp, Zea mays subsp. mays
  misc_feature (1)..(990): Ceres Seq. ID no. 12350350
aaaaatcgaatcgagcccatccatctccatttccgccgccgccgccgccgagagaccccaaccccacccatccaccaccatgtggcgccgcctccacaccctagcccccgccttgcgcagggctaccgccgccgccgccggggcccctgcggcgtccgcctcctctgcagcccgcgccgccccgctctcctcggcggccgccgctttccgccgcaccagcccgctcctctcaggggacaagccggcgagtgtggaggacgtcatgcccatcgccacggggctcgagcgggaggagctggaggccgagctcaaggggaagaagcggtttgacatggatcccctggtcggccccttcggtaccaaggaggaaccatctgtagttgagtcctactataacaagcggatagtcggctgccctggtggtgagggagaggatgaacacgatgttgtatggttctggttgaaaaaagatgagccgcatgagtgtccagtctgctcgcaatactttgtgcttaaggtcattggtgatggtggtgatccagatggtcatgacgatgaagatgatggacatcactaaggatgccttgtggttctgaaaataagaatttggtgaggcagatgaatccaatacacttctttttctagaaccagactgctccacggcatccttgtttatgaaaagacagttggccatcaagcaggtggtagttttcacctaggtattttgtccaaacaaaagctgtttgagatttgacccttgcgtttctttaagagcatcgtcgaataaaagatgactgcagtcagattgctttcttttgatacctcatattggcccatcgggtgtgatggacatgtaatattcagtaatggaacagccccatttctatgcttagcgtgctgggaattttgcaaaaggcctcctatatcattgacgagttttaagccagagtttgatgatccaacatgtttatgaccattgttttaatagcc

SEQ ID NO: 28828 - protein, 191 aa, Zea mays subsp. mays
  peptide (1)..(191): Ceres Seq. ID no. 12350351
  misc_feature (75)..(177): Pfam Name: Pfam Description:  Cytochrome c oxidase subunit Vb
  misc_feature (27)..(191): NCBI GI NO: 34912592 NR Description: cytochrome c oxidase subunit Vb precursor
  misc_feature (27)..(191): NCBI GI NO: 5803264 NR Description: ESTs AU057456
  misc_feature (27)..(191): NCBI GI NO: 15232644 NR Description: putative cytochrome c oxidase subunit Vb
  misc_feature (27)..(191): NCBI GI NO: 15220092 NR Description: cytochrome c oxidase subunit, putative
  misc_feature (27)..(191): NCBI GI NO: 21592567 NR Description: cytochrome c oxidase subunit, putative
  misc_feature (56)..(171): NCBI GI NO: 6753500 NR Description: cytochrome c oxidase, subunit Vb [Mus musculus]
  misc_feature (41)..(171): NCBI GI NO: 17017988 NR Description: cytochrome c oxidase subunit Vb precursor
  misc_feature (41)..(171): NCBI GI NO: 30584725 NR Description: Homo sapiens cytochrome c oxidase subunit Vb
  misc_feature (41)..(171): NCBI GI NO: 2144362 NR Description: cytochrome-c oxidase (EC 1
  misc_feature (51)..(171): NCBI GI NO: 12842467 NR Description: unnamed protein product [Mus musculus]
KIESSPSISISAAAAAERPQPHPSTTMWRRLHTLAPALRRATAAAAGAPAASASSAARAAPLSSAAAAFRRTSPLLSGDKPASVEDVMPIATGLEREELEAELKGKKRFDMDPLVGPFGTKEEPSVVESYYNKRIVGCPGGEGEDEHDVVWFWLKKDEPHECPVCSQYFVLKVIGDGGDPDGHDDEDDGHH

SEQ ID NO: 28829 - protein, 165 aa, Zea mays subsp. mays
  peptide (1)..(165): Ceres Seq. ID no. 12350352
  misc_feature (49)..(151): Pfam Name: Pfam Description:  Cytochrome c oxidase subunit Vb
  misc_feature (1)..(165): NCBI GI NO: 34912592 NR Description: cytochrome c oxidase subunit Vb precursor
  misc_feature (1)..(165): NCBI GI NO: 5803264 NR Description: ESTs AU057456
  misc_feature (1)..(165): NCBI GI NO: 15232644 NR Description: putative cytochrome c oxidase subunit Vb
  misc_feature (1)..(165): NCBI GI NO: 15220092 NR Description: cytochrome c oxidase subunit, putative
  misc_feature (1)..(165): NCBI GI NO: 21592567 NR Description: cytochrome c oxidase subunit, putative
  misc_feature (30)..(145): NCBI GI NO: 6753500 NR Description: cytochrome c oxidase, subunit Vb [Mus musculus]
  misc_feature (15)..(145): NCBI GI NO: 17017988 NR Description: cytochrome c oxidase subunit Vb precursor
  misc_feature (15)..(145): NCBI GI NO: 30584725 NR Description: Homo sapiens cytochrome c oxidase subunit Vb
  misc_feature (15)..(145): NCBI GI NO: 2144362 NR Description: cytochrome-c oxidase (EC 1
  misc_feature (25)..(145): NCBI GI NO: 12842467 NR Description: unnamed protein product [Mus musculus]
MWRRLHTLAPALRRATAAAAGAPAASASSAARAAPLSSAAAAFRRTSPLLSGDKPASVEDVMPIATGLEREELEAELKGKKRFDMDPLVGPFGTKEEPSVVESYYNKRIVGCPGGEGEDEHDVVWFWLKKDEPHECPVCSQYFVLKVIGDGGDPDGHDDEDDGHH

SEQ ID NO: 28830 - protein, 109 aa, Zea mays subsp. mays
  peptide (1)..(109): Ceres Seq. ID no. 12350353
KNRIEPIHLHFRRRRRRETPTPPIHHHVAPPPHPSPRLAQGYRRRRRGPCGVRLLCSPRRPALLGGRRFPPHQPAPLRGQAGECGGRHAHRHGARAGGAGGRAQGEEAV

SEQ ID NO: 28831 - DNA, 1706 bp, Zea mays subsp. mays
  misc_feature (1)..(1706): Ceres Seq. ID no. 13498597
agccagacgcagaccccctgcctgttgccctgtcgcagtctagcatcaggcatccatcggcgagagcgagagcgagagcgtttcgcagcaagcctacctcacctcaccttgcctgcctgtctgtctgtctccagagctgctcttgtccggagacggagccgactgaacatggccggagacccgggggacgcgccggaggtgggaggcggcggcatacgctccgtgctcaccacggcctcgctcgtcgctccctccggggacgaggttcagtttcgggagatcgacggcaagatcatcggcctctacttcgcggcaaactggtatccgaaatgcgaggctttcaccccggtgctggccgcggcgtacgagcagctcaaggagcgcggcgccggcttcgaggtcgtgctggtgtcgtgcgacgaggaccggccgtcgttcgagcggttccacggaaccatgccgtggccagcggtgcctttcggcgacctcagctgcaagaagcgcctcagcgagaggttccaggtggagggcatcccgcgcctggtggtgctcgctccggacggcggcgcggtggtacacccggacgccgccgacctcgtgcaccgctacggcgagagggcgttcccgttcacggccgcgagggtggcggagctggaggcggatgaccagcgcaagtacgcgtcccagacgctggagaagctcttctccgtcagcgggaaagagtacgtgatgaacagtggtaataatgaaaaggttccggtctcgagcctggtggggaagacggtggggctctacttctcggctaaccattgcgcgccgtgtatcaagttcacgacgaagctggcggccatctacagcagcctcaggggcaaggcggaggacttcgagatcgtgtacgtccccatggacagggaggaggacgggtacctgcgctcctgcggcgacatgccgtggctggcgctcccctacgacggcgcgccgtcgcgcgcgctggcgaggtacttcgacgtgcgggagatcccgacgctggtggtggtcgggcccgacggcaggacggtgacgcgggacggccggaacctggtgaacctctacttcgacatggccttcccgttcacggacgcgcagatcaggctgctgcaggaggcggaggacgaggcggccaaggagtacccgcggtcgctgcgccaccggggccaccgccacgagctcagcatcgtgtcggagaagtccgggggagggccctacatctgctgcgagtgcgaggagcagggactcggctgggcgtaccagtgcatcgcctgcggctacgagatacacctcaggtgcggccagaatgcggagggcggcagcgcaggaactgcttagctagctaggcgacggcagcataacagcatcactggagtactggtgtctacctactagactgctgcatgcgtattggacttgtgcatggtctgtgtttgatcccaacaaacgtcagcttgctaagtctgatgctaaagtagtcaaatagatagatgagaaatgcatggccttccttgtaaggcttagtaggtggttagatgagtgaacaacaaaatgaagctgcagcaatcaatctactgtggcaggtgttatgcaaatcttgctgcactgcccaaccaaactactgcattttccagtgcgccttcttcgagcctaatttgacaccactgaaattaggcttt

SEQ ID NO: 28832 - protein, 454 aa, Zea mays subsp. mays
  peptide (1)..(454): Ceres Seq. ID no. 13498598
  misc_feature (99)..(135): Pfam Name: Pfam Description:  Thioredoxin
  misc_feature (252)..(448): NCBI GI NO: 34908848 NR Description: PDI-like protein
  misc_feature (69)..(447): NCBI GI NO: 18406743 NR Description: expressed protein [Arabidopsis thaliana]
  misc_feature (72)..(445): NCBI GI NO: 21592996 NR Description: PDI-like protein [Arabidopsis thaliana]
  misc_feature (72)..(447): NCBI GI NO: 4056568 NR Description: PDI-like protein [Zea mays]
  misc_feature (88)..(254): NCBI GI NO: 34908844 NR Description: PDI-like protein
  misc_feature (65)..(447): NCBI GI NO: 18417767 NR Description: receptor kinase -related [Arabidopsis thaliana]
  misc_feature (63)..(411): NCBI GI NO: 4056568 NR Description: PDI-like protein [Zea mays]
  misc_feature (81)..(389): NCBI GI NO: 23304737 NR Description: PDI-like protein [Quercus suber]
  misc_feature (59)..(410): NCBI GI NO: 38567893 NR Description: OSJNBa0060N03.13
  misc_feature (81)..(411): NCBI GI NO: 18406743 NR Description: expressed protein [Arabidopsis thaliana]
SQTQTPCLLPCRSLASGIHRRERERERFAASLPHLTLPACLSVSRAALVRRRSRLNMAGDPGDAPEVGGGGIRSVLTTASLVAPSGDEVQFREIDGKIIGLYFAANWYPKCEAFTPVLAAAYEQLKERGAGFEVVLVSCDEDRPSFERFHGTMPWPAVPFGDLSCKKRLSERFQVEGIPRLVVLAPDGGAVVHPDAADLVHRYGERAFPFTAARVAELEADDQRKYASQTLEKLFSVSGKEYVMNSGNNEKVPVSSLVGKTVGLYFSANHCAPCIKFTTKLAAIYSSLRGKAEDFEIVYVPMDREEDGYLRSCGDMPWLALPYDGAPSRALARYFDVREIPTLVVVGPDGRTVTRDGRNLVNLYFDMAFPFTDAQIRLLQEAEDEAAKEYPRSLRHRGHRHELSIVSEKSGGGPYICCECEEQGLGWAYQCIACGYEIHLRCGQNAEGGSAGTA

SEQ ID NO: 28833 - protein, 398 aa, Zea mays subsp. mays
  peptide (1)..(398): Ceres Seq. ID no. 13498599
  misc_feature (43)..(79): Pfam Name: Pfam Description:  Thioredoxin
  misc_feature (196)..(392): NCBI GI NO: 34908848 NR Description: PDI-like protein
  misc_feature (13)..(391): NCBI GI NO: 18406743 NR Description: expressed protein [Arabidopsis thaliana]
  misc_feature (16)..(389): NCBI GI NO: 21592996 NR Description: PDI-like protein [Arabidopsis thaliana]
  misc_feature (16)..(391): NCBI GI NO: 4056568 NR Description: PDI-like protein [Zea mays]
  misc_feature (32)..(198): NCBI GI NO: 34908844 NR Description: PDI-like protein
  misc_feature (9)..(391): NCBI GI NO: 18417767 NR Description: receptor kinase -related [Arabidopsis thaliana]
  misc_feature (7)..(355): NCBI GI NO: 4056568 NR Description: PDI-like protein [Zea mays]
  misc_feature (25)..(333): NCBI GI NO: 23304737 NR Description: PDI-like protein [Quercus suber]
  misc_feature (3)..(354): NCBI GI NO: 38567893 NR Description: OSJNBa0060N03.13
  misc_feature (25)..(355): NCBI GI NO: 18406743 NR Description: expressed protein [Arabidopsis thaliana]
MAGDPGDAPEVGGGGIRSVLTTASLVAPSGDEVQFREIDGKIIGLYFAANWYPKCEAFTPVLAAAYEQLKERGAGFEVVLVSCDEDRPSFERFHGTMPWPAVPFGDLSCKKRLSERFQVEGIPRLVVLAPDGGAVVHPDAADLVHRYGERAFPFTAARVAELEADDQRKYASQTLEKLFSVSGKEYVMNSGNNEKVPVSSLVGKTVGLYFSANHCAPCIKFTTKLAAIYSSLRGKAEDFEIVYVPMDREEDGYLRSCGDMPWLALPYDGAPSRALARYFDVREIPTLVVVGPDGRTVTRDGRNLVNLYFDMAFPFTDAQIRLLQEAEDEAAKEYPRSLRHRGHRHELSIVSEKSGGGPYICCECEEQGLGWAYQCIACGYEIHLRCGQNAEGGSAGTA

SEQ ID NO: 28834 - protein, 302 aa, Zea mays subsp. mays
  peptide (1)..(302): Ceres Seq. ID no. 13498600
  misc_feature (110)..(147): Pfam Name: Pfam Description:  Thioredoxin
  misc_feature (100)..(296): NCBI GI NO: 34908848 NR Description: PDI-like protein
  misc_feature (1)..(295): NCBI GI NO: 18406743 NR Description: expressed protein [Arabidopsis thaliana]
  misc_feature (1)..(293): NCBI GI NO: 21592996 NR Description: PDI-like protein [Arabidopsis thaliana]
  misc_feature (1)..(295): NCBI GI NO: 4056568 NR Description: PDI-like protein [Zea mays]
  misc_feature (1)..(102): NCBI GI NO: 34908844 NR Description: PDI-like protein
  misc_feature (1)..(295): NCBI GI NO: 18417767 NR Description: receptor kinase -related [Arabidopsis thaliana]
  misc_feature (1)..(259): NCBI GI NO: 4056568 NR Description: PDI-like protein [Zea mays]
  misc_feature (1)..(237): NCBI GI NO: 23304737 NR Description: PDI-like protein [Quercus suber]
  misc_feature (1)..(258): NCBI GI NO: 38567893 NR Description: OSJNBa0060N03.13
  misc_feature (1)..(259): NCBI GI NO: 18406743 NR Description: expressed protein [Arabidopsis thaliana]
MPWPAVPFGDLSCKKRLSERFQVEGIPRLVVLAPDGGAVVHPDAADLVHRYGERAFPFTAARVAELEADDQRKYASQTLEKLFSVSGKEYVMNSGNNEKVPVSSLVGKTVGLYFSANHCAPCIKFTTKLAAIYSSLRGKAEDFEIVYVPMDREEDGYLRSCGDMPWLALPYDGAPSRALARYFDVREIPTLVVVGPDGRTVTRDGRNLVNLYFDMAFPFTDAQIRLLQEAEDEAAKEYPRSLRHRGHRHELSIVSEKSGGGPYICCECEEQGLGWAYQCIACGYEIHLRCGQNAEGGSAGTA

SEQ ID NO: 28835 - DNA, 929 bp, Zea mays subsp. mays
  misc_feature (1)..(929): Ceres Seq. ID no. 12345359
atactcaaggcaaggaattaggagcagaccggagacttgggggcttcacctgctgtatctcattaccatctgcatctggttgcccgttgattgagaaggaggagctgagggccatggcgaccgagaagcccatcctgtacaacgcctggatcagctcctgctcccaccgtgttcgcatcgcactcaacctcaaaggtgtggattacgagtacaagtcggtaaaccctaggacagatccagattatgaaaaaatcaatccaatcaaatatattccagcattagtagatggggacatagtcgtttctgattctcttgccatctcattgtatttggaagataagtatcctgagcatccactcctgcctaaagatctcaagaggaaagctcttaatcttcagattgcaaacattgtttgttcaagcattcaacctcttcaaggctatgctgttattggtctgcacgagggtaggatgagcccagatgagggccttcatattgttcaaagttatattgacaagggattcagagcgatcgaaaagctgttggaaggatgtgagagtaaatatgctactggagatgatgtccaattggcagatgtgttccttgaaccacagatacatgccggcataaatcgcttccaaatcgatatgtcgatgtacccaatcttggagaggctccatgatgcatacatgcaaattcccgcattccaagccgcgcttcctaaaaatcaaccagacgcaccttcatcataatcatcaagattatctcaataatttgcatgtcattttgtaataatttggatagggagccactgcttcctccatcccgttgtggatcaaaagggtgaacgattggcacttacctgcatggtccaatacctattatatttcttaaacagatactatttacggctattgtaatttaagccc

SEQ ID NO: 28836 - protein, 249 aa, Zea mays subsp. mays
  peptide (1)..(249): Ceres Seq. ID no. 12345360
  misc_feature (38)..(249): NCBI GI NO: 11385487 NR Description: glutathione S-transferase GST 18 [Zea mays]
  misc_feature (38)..(248): NCBI GI NO: 15430707 NR Description: putative glutathione S-transferase OsGSTZ2
  misc_feature (38)..(249): NCBI GI NO: 11132027 NR Description: Glutathione S-transferase (GST class-zeta)
  misc_feature (35)..(249): NCBI GI NO: 11177839 NR Description: putative glutathione S-transferase OsGSTZ1
  misc_feature (45)..(249): NCBI GI NO: 29420155 NR Description: glutathione S-transferase Z1 [Malva pusilla]
  misc_feature (44)..(249): NCBI GI NO: 11385485 NR Description: glutathione S-transferase GST 17 [Zea mays]
  misc_feature (45)..(248): NCBI GI NO: 11132235 NR Description: Glutathione S-transferase zeta class
  misc_feature (41)..(249): NCBI GI NO: 15226952 NR Description: glutathione transferase, putative
  misc_feature (41)..(249): NCBI GI NO: 28932694 NR Description: glutathione S-transferase zeta [Brassica napus]
  misc_feature (40)..(248): NCBI GI NO: 24061762 NR Description: glutathione S-transferase [Capsicum annuum]
TQGKELGADRRLGGFTCCISLPSASGCPLIEKEELRAMATEKPILYNAWISSCSHRVRIALNLKGVDYEYKSVNPRTDPDYEKINPIKYIPALVDGDIVVSDSLAISLYLEDKYPEHPLLPKDLKRKALNLQIANIVCSSIQPLQGYAVIGLHEGRMSPDEGLHIVQSYIDKGFRAIEKLLEGCESKYATGDDVQLADVFLEPQIHAGINRFQIDMSMYPILERLHDAYMQIPAFQAALPKNQPDAPSS

SEQ ID NO: 28837 - protein, 212 aa, Zea mays subsp. mays
  peptide (1)..(212): Ceres Seq. ID no. 12345361
  misc_feature (1)..(212): NCBI GI NO: 11385487 NR Description: glutathione S-transferase GST 18 [Zea mays]
  misc_feature (1)..(211): NCBI GI NO: 15430707 NR Description: putative glutathione S-transferase OsGSTZ2
  misc_feature (1)..(212): NCBI GI NO: 11132027 NR Description: Glutathione S-transferase (GST class-zeta)
  misc_feature (1)..(212): NCBI GI NO: 11177839 NR Description: putative glutathione S-transferase OsGSTZ1
  misc_feature (8)..(212): NCBI GI NO: 29420155 NR Description: glutathione S-transferase Z1 [Malva pusilla]
  misc_feature (7)..(212): NCBI GI NO: 11385485 NR Description: glutathione S-transferase GST 17 [Zea mays]
  misc_feature (8)..(211): NCBI GI NO: 11132235 NR Description: Glutathione S-transferase zeta class
  misc_feature (4)..(212): NCBI GI NO: 15226952 NR Description: glutathione transferase, putative
  misc_feature (4)..(212): NCBI GI NO: 28932694 NR Description: glutathione S-transferase zeta [Brassica napus]
  misc_feature (3)..(211): NCBI GI NO: 24061762 NR Description: glutathione S-transferase [Capsicum annuum]
MATEKPILYNAWISSCSHRVRIALNLKGVDYEYKSVNPRTDPDYEKINPIKYIPALVDGDIVVSDSLAISLYLEDKYPEHPLLPKDLKRKALNLQIANIVCSSIQPLQGYAVIGLHEGRMSPDEGLHIVQSYIDKGFRAIEKLLEGCESKYATGDDVQLADVFLEPQIHAGINRFQIDMSMYPILERLHDAYMQIPAFQAALPKNQPDAPSS

SEQ ID NO: 28838 - DNA, 994 bp, Zea mays subsp. mays
  misc_feature (1)..(994): Ceres Seq. ID no. 12435085
atctacacacgccgttcccaagtcccaaccgaacacacacagcaacagcggccacctgccgctcagtgcgtgcgccgtgccatgaccatgaagctcgatgccccggcgaggcagaagagccaggacgcagagcagaacggcaggacagcggccgcgggcgtcctcggcattgacgagccgtggagccagccgaaactccgtctcaccggccacgcgcaggccgacgccgacgccctggtgccgccgctcaacttcgccatggtcgacgacggcatcttccgctcgggcctcccggacgccggcagcttccgcttcctgctctccctcaatctgcgctccgtcgtgtacctgtgcccggagccgtacccggaggagaacgcgcggttcctgcagcagaacgggatccagcttcaccagttcggcatcgaagggagcaagagtggttcgacagtgccggatgccatggtggtgcaggaaccattcgtctacatccctgaagagaccatccgagaggcgctcaaagttattcttgacgcaagaaaccagccggtgctcatccactgcaagagaggcaagcatcgcactggctgcgtcgtcgggtgcctgaggaagctgcagaagtggtgcctgtcttcggtgttcgacgagtacctgcacttcgcggcggcgaaggcgaggagcactgaccagaggttcatggagctgttcgacgcttcgagcttgacgcacctggcggcctcacagtattgagcgctgaccagagcgagtggctcccgaccggtcccgatcctgcaaccatgctgcatcaagcaagcgattttcccctgctgtttccgaagcaactcggccgagaataatgctgctggaaccatgagtgtgtccgcgagaattgataggcaatggccttaggttttgttgtgtgagtgctgtggttgcttcgtgtgcaactgatttcagattctgaattggtgatggctgtgattggtgatggccg

SEQ ID NO: 28839 - protein, 249 aa, Zea mays subsp. mays
  peptide (1)..(249): Ceres Seq. ID no. 12435086
  misc_feature (79)..(247): Pfam Name: Pfam Description:  Tyrosine phosphatase family
  misc_feature (79)..(247): NCBI GI NO: 15220383 NR Description: unkown protein; protein id: At1g05000.1
  misc_feature (24)..(147): NCBI GI NO: 30102538 NR Description: At2g32960 [Arabidopsis thaliana]
  misc_feature (132)..(247): NCBI GI NO: 30102538 NR Description: At2g32960 [Arabidopsis thaliana]
  misc_feature (79)..(247): NCBI GI NO: 15225761 NR Description: unknown protein; protein id: At2g32960.1
  misc_feature (77)..(247): NCBI GI NO: 18412419 NR Description: putative protein; protein id: At4g03960
  misc_feature (75)..(241): NCBI GI NO: 15232985 NR Description: unknown protein; protein id: At3g02800.1
  misc_feature (77)..(174): NCBI GI NO: 7487406 NR Description: hypothetical protein T24M8
  misc_feature (192)..(247): NCBI GI NO: 7487406 NR Description: hypothetical protein T24M8
  misc_feature (75)..(241): NCBI GI NO: 21553927 NR Description: unknown [Arabidopsis thaliana]
  misc_feature (75)..(241): NCBI GI NO: 15237359 NR Description: putative protein; protein id: At5g16480
IYTRRSQVPTEHTQQQRPPAAQCVRRAMTMKLDAPARQKSQDAEQNGRTAAAGVLGIDEPWSQPKLRLTGHAQADADALVPPLNFAMVDDGIFRSGLPDAGSFRFLLSLNLRSVVYLCPEPYPEENARFLQQNGIQLHQFGIEGSKSGSTVPDAMVVQEPFVYIPEETIREALKVILDARNQPVLIHCKRGKHRTGCVVGCLRKLQKWCLSSVFDEYLHFAAAKARSTDQRFMELFDASSLTHLAASQY

SEQ ID NO: 28840 - protein, 222 aa, Zea mays subsp. mays
  peptide (1)..(222): Ceres Seq. ID no. 12435087
  misc_feature (52)..(220): Pfam Name: Pfam Description:  Tyrosine phosphatase family
  misc_feature (52)..(220): NCBI GI NO: 15220383 NR Description: unkown protein; protein id: At1g05000.1
  misc_feature (1)..(120): NCBI GI NO: 30102538 NR Description: At2g32960 [Arabidopsis thaliana]
  misc_feature (105)..(220): NCBI GI NO: 30102538 NR Description: At2g32960 [Arabidopsis thaliana]
  misc_feature (52)..(220): NCBI GI NO: 15225761 NR Description: unknown protein; protein id: At2g32960.1
  misc_feature (50)..(220): NCBI GI NO: 18412419 NR Description: putative protein; protein id: At4g03960
  misc_feature (48)..(214): NCBI GI NO: 15232985 NR Description: unknown protein; protein id: At3g02800.1
  misc_feature (50)..(147): NCBI GI NO: 7487406 NR Description: hypothetical protein T24M8
  misc_feature (165)..(220): NCBI GI NO: 7487406 NR Description: hypothetical protein T24M8
  misc_feature (48)..(214): NCBI GI NO: 21553927 NR Description: unknown [Arabidopsis thaliana]
  misc_feature (48)..(214): NCBI GI NO: 15237359 NR Description: putative protein; protein id: At5g16480
MTMKLDAPARQKSQDAEQNGRTAAAGVLGIDEPWSQPKLRLTGHAQADADALVPPLNFAMVDDGIFRSGLPDAGSFRFLLSLNLRSVVYLCPEPYPEENARFLQQNGIQLHQFGIEGSKSGSTVPDAMVVQEPFVYIPEETIREALKVILDARNQPVLIHCKRGKHRTGCVVGCLRKLQKWCLSSVFDEYLHFAAAKARSTDQRFMELFDASSLTHLAASQY

SEQ ID NO: 28841 - protein, 220 aa, Zea mays subsp. mays
  peptide (1)..(220): Ceres Seq. ID no. 12435088
  misc_feature (50)..(218): Pfam Name: Pfam Description:  Tyrosine phosphatase family
  misc_feature (50)..(218): NCBI GI NO: 15220383 NR Description: unkown protein; protein id: At1g05000.1
  misc_feature (1)..(118): NCBI GI NO: 30102538 NR Description: At2g32960 [Arabidopsis thaliana]
  misc_feature (103)..(218): NCBI GI NO: 30102538 NR Description: At2g32960 [Arabidopsis thaliana]
  misc_feature (50)..(218): NCBI GI NO: 15225761 NR Description: unknown protein; protein id: At2g32960.1
  misc_feature (48)..(218): NCBI GI NO: 18412419 NR Description: putative protein; protein id: At4g03960
  misc_feature (46)..(212): NCBI GI NO: 15232985 NR Description: unknown protein; protein id: At3g02800.1
  misc_feature (48)..(145): NCBI GI NO: 7487406 NR Description: hypothetical protein T24M8
  misc_feature (163)..(218): NCBI GI NO: 7487406 NR Description: hypothetical protein T24M8
  misc_feature (46)..(212): NCBI GI NO: 21553927 NR Description: unknown [Arabidopsis thaliana]
  misc_feature (46)..(212): NCBI GI NO: 15237359 NR Description: putative protein; protein id: At5g16480
MKLDAPARQKSQDAEQNGRTAAAGVLGIDEPWSQPKLRLTGHAQADADALVPPLNFAMVDDGIFRSGLPDAGSFRFLLSLNLRSVVYLCPEPYPEENARFLQQNGIQLHQFGIEGSKSGSTVPDAMVVQEPFVYIPEETIREALKVILDARNQPVLIHCKRGKHRTGCVVGCLRKLQKWCLSSVFDEYLHFAAAKARSTDQRFMELFDASSLTHLAASQY

SEQ ID NO: 28842 - DNA, 1453 bp, Zea mays subsp. mays
  misc_feature (1)..(1453): Ceres Seq. ID no. 12407236
gcacgagaccattacctagaacatcctaatcgaaaaaagaaacattgagaacaacgagctgccctctctgcctgcagctacacgcactggaatcatcgtgcggcgcagcgagcgagaggagtggagaggatgacggcgcccaagcctggcgggggagcggcggccgcggcgagggcggcggcggcggggcccaggacggtgctcatcacgggggtcagcagggggctgggccgggccctggcgctcgagctcgcgcgtcgcgggcactcggtggtcggctgcggccgctccgccgagcacctccgctcccttgaggaagagatcacgtcgccatcgcgccacttcttcaccgtcgccgacgttaggtctgacagcagtgtggccgagctggcaaagactgttgtagaaaagaagcaagttccagatattatagtaaacaacgctggtacgataaacaagaataacaagacatggaatgttccagcggaagattttgatatggtggtcgatacaaatatcaagggaacagcaaatgtgcttcgccattttgtaccacttatgatagagaagagacatgggattataatcaatctatcctctggttggggaagatctgctgctgcagaggttgctccatattgtgcttcgaagtgggcgattgagggcttgacacgctcgttagctaaagagctacctcctggattggcagccattgctcttagccctggtgttgtgaatactgacatgcttaattcatgctttggaagctctgccgcattatatcaaacaactgaaacatgggcacccaaggcagctacaatgatactaagcctttcactggacgataacggtgcttccttgactgtatgaagtcgtgaaattctgtgctcaactgattgctgatgggttatcttcatctcttgtagcctgatgtgtagatttttgcgagattatggtgatgtaaaatagtactgataatgcgtgcctgcactctgatgtccctagctgctgtctgaacgttgttgtttagcattacctctatggcctattcatatgctcatatggtgagaactgaggagtgaggacaggagcggtaggtatgccatccgctgagcagtagaaattaaaaggttggctgcaccagaatcagcatgcgcggcggtggagatagagcagaggcaatgcatttgttgaaggttaaatggtggactggacacagagctgtcacgtcagattttgaataagtttaggttaggagcagtcgtggtcgaggatggtgtgaaagcgacaatgacgcatcgggagccgagaagggtgggtgccagtggcgaaaggccgcagcgaagatgagagggggagaagactaggcacgtggagagaaaaggaaacatgtactacccattgtctagtaatatactttttactgatatttatttaaaacaatattattatt

SEQ ID NO: 28843 - protein, 246 aa, Zea mays subsp. mays
  peptide (1)..(246): Ceres Seq. ID no. 12407237
  misc_feature (1)..(246): NCBI GI NO: 18391139 NR Description: expressed protein; protein id: At1g10310
  misc_feature (6)..(246): NCBI GI NO: 21593553 NR Description: unknown [Arabidopsis thaliana]
  misc_feature (22)..(246): NCBI GI NO: 17229376 NR Description: probable short-chain dehydrogenase
  misc_feature (22)..(246): NCBI GI NO: 23042686 NR Description: hypothetical protein
  misc_feature (22)..(245): NCBI GI NO: 30020410 NR Description: Short chain dehydrogenase
  misc_feature (22)..(209): NCBI GI NO: 27467824 NR Description: 3-oxoacyl-(acyl-carrier protein) reductase
  misc_feature (22)..(209): NCBI GI NO: 28209901 NR Description: 3-oxoacyl-
  misc_feature (22)..(206): NCBI GI NO: 23056407 NR Description: hypothetical protein [Geobacter metallireducens]
  misc_feature (22)..(209): NCBI GI NO: 18310052 NR Description: 3-oxoacyl-
  misc_feature (22)..(217): NCBI GI NO: 20091507 NR Description: 3-oxoacyl-
MTAPKPGGGAAAAARAAAAGPRTVLITGVSRGLGRALALELARRGHSVVGCGRSAEHLRSLEEEITSPSRHFFTVADVRSDSSVAELAKTVVEKKQVPDIIVNNAGTINKNNKTWNVPAEDFDMVVDTNIKGTANVLRHFVPLMIEKRHGIIINLSSGWGRSAAAEVAPYCASKWAIEGLTRSLAKELPPGLAAIALSPGVVNTDMLNSCFGSSAALYQTTETWAPKAATMILSLSLDDNGASLTV

SEQ ID NO: 28844 - protein, 123 aa, Zea mays subsp. mays
  peptide (1)..(123): Ceres Seq. ID no. 12407238
  misc_feature (1)..(123): NCBI GI NO: 18391139 NR Description: expressed protein; protein id: At1g10310
  misc_feature (1)..(123): NCBI GI NO: 21593553 NR Description: unknown [Arabidopsis thaliana]
  misc_feature (1)..(123): NCBI GI NO: 17229376 NR Description: probable short-chain dehydrogenase
  misc_feature (1)..(123): NCBI GI NO: 23042686 NR Description: hypothetical protein
  misc_feature (1)..(122): NCBI GI NO: 30020410 NR Description: Short chain dehydrogenase
  misc_feature (1)..(86): NCBI GI NO: 27467824 NR Description: 3-oxoacyl-(acyl-carrier protein) reductase
  misc_feature (1)..(86): NCBI GI NO: 28209901 NR Description: 3-oxoacyl-
  misc_feature (1)..(83): NCBI GI NO: 23056407 NR Description: hypothetical protein [Geobacter metallireducens]
  misc_feature (1)..(86): NCBI GI NO: 18310052 NR Description: 3-oxoacyl-
  misc_feature (1)..(94): NCBI GI NO: 20091507 NR Description: 3-oxoacyl-
MVVDTNIKGTANVLRHFVPLMIEKRHGIIINLSSGWGRSAAAEVAPYCASKWAIEGLTRSLAKELPPGLAAIALSPGVVNTDMLNSCFGSSAALYQTTETWAPKAATMILSLSLDDNGASLTV

SEQ ID NO: 28845 - DNA, 1482 bp, Zea mays subsp. mays
  misc_feature (1)..(1482): Ceres Seq. ID no. 12408899
gctccttgctcgcctccacccgcggccaccaccgccctgcggcccccgccgcttgctagcctccaccgcgccgcgagtcacaccgttcatgcaccggctggtcctggagcacgggaggacgagcatgtcctggttcggccccagccccaaggtgaccatcgtcgacccggacctggccaaggacgtgctgtccaacaagttcggccacttcgagaagctcaaggtcccggcgctgtccaagatgctgggctccggcgtggccagccacgagggcgagaagtgggtcaagcaccggaggatcctcaaccatgcgttccatcttgagaagctcaagcgcatgctgccggcgttttctacgtgctgcgaggagctggtgagcaggtgggcggcggagtcccttggctccgacggctcgtgcgagctggacgtctggccggagctgcagaacctgacgggagacatcatttctcgcaccgcgttcagcagcagctacagcgaagggagaaggatcttccagctacaggtcgagcaagcttcgcttgtcatgaccaacattcggaagatcatgatccccggctacatgtacttgcctaccgcgaacaacaggaagatgcgcaggaacaacagggaggtggagtcaatcctgcgagagataatcgggaagaggatccaggcgatggaacaaggcgagggcaccaaagacgacctggtgggtctactgctggagacaaacatgagagacgacatggggatgacgatcgaagacatgatcgaggagtgcaaggtgttctacttcgtcgggatggagaccacgttggtgctgctcatgtggacgatggtggtgctcagcatgcacccggagtggcaggaccgcgcgagggaggaggtgacggctctgttcggcagggacggcaagcccgagtatgacggcctaagccacctcaaagttgtgaccatggtgctctacgaggtgctccgactgtacccgccggccacctccgtcgtccgacaaacgtacaaggagatggaggtcggaggcgtcacctaccccgccggcgtgatcctggagctgcccgtgctgctcatccaccacgacccggacatctggggaggcgacgcgcgtgagtttaggcccgataggttctccgagggcgtgtccagggcctccaaggaccccggcgcgttcctcccgttcggttggggcccgcgcatctgcatcggccagaacttcgcgctgctggaggccaagatggcgctctgcatgatcctccagcggtttgagttcgggctcgcgccatcctatgctcatgcgccgcataccgtgataaccttgcatcctatgcacggtgcgcagcttaagctcagagcaatatgatctcgacatgatgggtgtcccatcgttgatgccattgttatgtataaccttacaattcagataggcattcggccctgttaatgtctgaaataagtatcttcgcgttg

SEQ ID NO: 28846 - protein, 457 aa, Zea mays subsp. mays
  peptide (1)..(457): Ceres Seq. ID no. 12408900
  misc_feature (23)..(457): NCBI GI NO: 21842136 NR Description: cytochrome P450 monooxygenase CYP72A27
  misc_feature (22)..(457): NCBI GI NO: 21805634 NR Description: cytochrome P450 monooxygenase CYP72A26
  misc_feature (24)..(457): NCBI GI NO: 34912898 NR Description: putative cytochrome P450
  misc_feature (23)..(457): NCBI GI NO: 34912894 NR Description: putative cytochrome P450
  misc_feature (23)..(457): NCBI GI NO: 19909879 NR Description: cytochrome P450 [Oryza sativa]
  misc_feature (23)..(457): NCBI GI NO: 34912896 NR Description: putative cytochrome P450
  misc_feature (23)..(457): NCBI GI NO: 34912888 NR Description: putative cytochrome P450
  misc_feature (23)..(457): NCBI GI NO: 34912380 NR Description: putative cytochrome P450
  misc_feature (8)..(457): NCBI GI NO: 34912882 NR Description: putative cytochrome P450
  misc_feature (8)..(457): NCBI GI NO: 21805645 NR Description: cytochrome P450 monooxygenase CYP72A5
LLARLHPRPPPPCGPRRLLASTAPRVTPFMHRLVLEHGRTSMSWFGPSPKVTIVDPDLAKDVLSNKFGHFEKLKVPALSKMLGSGVASHEGEKWVKHRRILNHAFHLEKLKRMLPAFSTCCEELVSRWAAESLGSDGSCELDVWPELQNLTGDIISRTAFSSSYSEGRRIFQLQVEQASLVMTNIRKIMIPGYMYLPTANNRKMRRNNREVESILREIIGKRIQAMEQGEGTKDDLVGLLLETNMRDDMGMTIEDMIEECKVFYFVGMETTLVLLMWTMVVLSMHPEWQDRAREEVTALFGRDGKPEYDGLSHLKVVTMVLYEVLRLYPPATSVVRQTYKEMEVGGVTYPAGVILELPVLLIHHDPDIWGGDAREFRPDRFSEGVSRASKDPGAFLPFGWGPRICIGQNFALLEAKMALCMILQRFEFGLAPSYAHAPHTVITLHPMHGAQLKLRAI

SEQ ID NO: 28847 - protein, 428 aa, Zea mays subsp. mays
  peptide (1)..(428): Ceres Seq. ID no. 12408901
  misc_feature (1)..(428): NCBI GI NO: 21842136 NR Description: cytochrome P450 monooxygenase CYP72A27
  misc_feature (1)..(428): NCBI GI NO: 21805634 NR Description: cytochrome P450 monooxygenase CYP72A26
  misc_feature (1)..(428): NCBI GI NO: 34912898 NR Description: putative cytochrome P450
  misc_feature (1)..(428): NCBI GI NO: 34912894 NR Description: putative cytochrome P450
  misc_feature (1)..(428): NCBI GI NO: 19909879 NR Description: cytochrome P450 [Oryza sativa]
  misc_feature (1)..(428): NCBI GI NO: 34912896 NR Description: putative cytochrome P450
  misc_feature (1)..(428): NCBI GI NO: 34912888 NR Description: putative cytochrome P450
  misc_feature (1)..(428): NCBI GI NO: 34912380 NR Description: putative cytochrome P450
  misc_feature (1)..(428): NCBI GI NO: 34912882 NR Description: putative cytochrome P450
  misc_feature (1)..(428): NCBI GI NO: 21805645 NR Description: cytochrome P450 monooxygenase CYP72A5
MHRLVLEHGRTSMSWFGPSPKVTIVDPDLAKDVLSNKFGHFEKLKVPALSKMLGSGVASHEGEKWVKHRRILNHAFHLEKLKRMLPAFSTCCEELVSRWAAESLGSDGSCELDVWPELQNLTGDIISRTAFSSSYSEGRRIFQLQVEQASLVMTNIRKIMIPGYMYLPTANNRKMRRNNREVESILREIIGKRIQAMEQGEGTKDDLVGLLLETNMRDDMGMTIEDMIEECKVFYFVGMETTLVLLMWTMVVLSMHPEWQDRAREEVTALFGRDGKPEYDGLSHLKVVTMVLYEVLRLYPPATSVVRQTYKEMEVGGVTYPAGVILELPVLLIHHDPDIWGGDAREFRPDRFSEGVSRASKDPGAFLPFGWGPRICIGQNFALLEAKMALCMILQRFEFGLAPSYAHAPHTVITLHPMHGAQLKLRAI

SEQ ID NO: 28848 - protein, 416 aa, Zea mays subsp. mays
  peptide (1)..(416): Ceres Seq. ID no. 12408902
  misc_feature (1)..(416): NCBI GI NO: 21842136 NR Description: cytochrome P450 monooxygenase CYP72A27
  misc_feature (1)..(416): NCBI GI NO: 21805634 NR Description: cytochrome P450 monooxygenase CYP72A26
  misc_feature (1)..(416): NCBI GI NO: 34912898 NR Description: putative cytochrome P450
  misc_feature (1)..(416): NCBI GI NO: 34912894 NR Description: putative cytochrome P450
  misc_feature (1)..(416): NCBI GI NO: 19909879 NR Description: cytochrome P450 [Oryza sativa]
  misc_feature (1)..(416): NCBI GI NO: 34912896 NR Description: putative cytochrome P450
  misc_feature (1)..(416): NCBI GI NO: 34912888 NR Description: putative cytochrome P450
  misc_feature (1)..(416): NCBI GI NO: 34912380 NR Description: putative cytochrome P450
  misc_feature (1)..(416): NCBI GI NO: 34912882 NR Description: putative cytochrome P450
  misc_feature (1)..(416): NCBI GI NO: 21805645 NR Description: cytochrome P450 monooxygenase CYP72A5
MSWFGPSPKVTIVDPDLAKDVLSNKFGHFEKLKVPALSKMLGSGVASHEGEKWVKHRRILNHAFHLEKLKRMLPAFSTCCEELVSRWAAESLGSDGSCELDVWPELQNLTGDIISRTAFSSSYSEGRRIFQLQVEQASLVMTNIRKIMIPGYMYLPTANNRKMRRNNREVESILREIIGKRIQAMEQGEGTKDDLVGLLLETNMRDDMGMTIEDMIEECKVFYFVGMETTLVLLMWTMVVLSMHPEWQDRAREEVTALFGRDGKPEYDGLSHLKVVTMVLYEVLRLYPPATSVVRQTYKEMEVGGVTYPAGVILELPVLLIHHDPDIWGGDAREFRPDRFSEGVSRASKDPGAFLPFGWGPRICIGQNFALLEAKMALCMILQRFEFGLAPSYAHAPHTVITLHPMHGAQLKLRAI

SEQ ID NO: 28849 - DNA, 1422 bp, Zea mays subsp. mays
  misc_feature (1)..(1422): Ceres Seq. ID no. 13493622
agaccattacctagaacatcctaatcgaaaaagaatctctctttaagagggatacagagtaggaaagagacagagggggcaaagagcgatggacgccgcggtgcggaaggccgcgggcgccggcatcgcgcgcgcgccggcgctggtgctagcgctggtggcggcgggggcgttcctgatctcctacaacttcttcaccatgctgttccacggcggcggcggaataggcgcggcggccgaccgctgggacgagggaccctgtggtggccatgccagcgtggatgcgcgcggcggcggacaccgaggcgcggcggcggcccgttccatgtggcgctcacggccacggacgcgccctacagccggtggcagtgccgggtcatgtacttctggtacaagcggatgcaggcgcggccgggcggagaggccatgggcgggttcacgcgcgtgctgcactcggggaagcccgacgggctcatggacgagatccccaccttcgtcgtcgacccgctgcccgctggcaaggaccacggatatgtggtcctaaataggccgtgggcatttgtgcagtggcttcagaaagcaaagattgaagaagagtatatactaatggcagaaccagaccatatatttgtgaaacctctaccaaatttggcccatgacgatgatccggcagcatttcccttcttttacattacaccatcagaacatgaaaaaattatcaggaaatactatgctaaagaaagaggtcctgtcacagatatcgatccgattgggaattctcctgtgataattaagaagacaattcttgagaagattgcccccacatggatgaatgtgtcaattcaaatgaaagaggatgaagaaacagataaagtttttggatgggtgttggaaatgtatgcatacgctgttgctagcgcattgcatggagttcatcatatccttcgtaaagatttcatgatccagccaccttttgatacaaagctccagaatacatttataatccacttcacttatggatgtgactactcactaaagggtgaactgacctatggtaaagttggtgaatggcgatttgacaaaagatcattcccagataggccaccaccaagaaatcttacattgccccctcctggagtaccagaaagtgtggttactctagtgaaaatggtcaatgaagctagtgcaaaccttcctcggtgggatgatggaatataaactttggatgatatcaattatatcttaggttcctttgatctgcccttgtatatggggaatatcaaagtatcaggtgcagtcggttgtttggtttacatccaaaatagctgcttgcacttgcacaccatacctgatagaagaagatacataattttctcagtgtactttttatgaaaagaaaagaaatgaaagtaaaagttagct

SEQ ID NO: 28850 - protein, 279 aa, Zea mays subsp. mays
  peptide (1)..(279): Ceres Seq. ID no. 13493623
  misc_feature (1)..(276): NCBI GI NO: 15240642 NR Description: expressed protein [Arabidopsis thaliana]
  misc_feature (1)..(275): NCBI GI NO: 22327055 NR Description: expressed protein [Arabidopsis thaliana]
  misc_feature (1)..(276): NCBI GI NO: 24413996 NR Description: hypothetical protein~similar to Arabidopsisthaliana chromosome 5
  misc_feature (109)..(276): NCBI GI NO: 30682704 NR Description: expressed protein [Arabidopsis thaliana]
  misc_feature (1)..(52): NCBI GI NO: 30682704 NR Description: expressed protein [Arabidopsis thaliana]
  misc_feature (109)..(273): NCBI GI NO: 25371351 NR Description: hypothetical protein At2g25260
  misc_feature (1)..(52): NCBI GI NO: 25371351 NR Description: hypothetical protein At2g25260
  misc_feature (1)..(76): NCBI GI NO: 34903224 NR Description: unnamed protein product
  misc_feature (1)..(244): NCBI GI NO: 22330795 NR Description: expressed protein [Arabidopsis thaliana]
MYFWYKRMQARPGGEAMGGFTRVLHSGKPDGLMDEIPTFVVDPLPAGKDHGYVVLNRPWAFVQWLQKAKIEEEYILMAEPDHIFVKPLPNLAHDDDPAAFPFFYITPSEHEKIIRKYYAKERGPVTDIDPIGNSPVIIKKTILEKIAPTWMNVSIQMKEDEETDKVFGWVLEMYAYAVASALHGVHHILRKDFMIQPPFDTKLQNTFIIHFTYGCDYSLKGELTYGKVGEWRFDKRSFPDRPPPRNLTLPPPGVPESVVTLVKMVNEASANLPRWDDGI

SEQ ID NO: 28851 - protein, 272 aa, Zea mays subsp. mays
  peptide (1)..(272): Ceres Seq. ID no. 13493624
  misc_feature (1)..(269): NCBI GI NO: 15240642 NR Description: expressed protein [Arabidopsis thaliana]
  misc_feature (1)..(268): NCBI GI NO: 22327055 NR Description: expressed protein [Arabidopsis thaliana]
  misc_feature (1)..(269): NCBI GI NO: 24413996 NR Description: hypothetical protein~similar to Arabidopsisthaliana chromosome 5
  misc_feature (102)..(269): NCBI GI NO: 30682704 NR Description: expressed protein [Arabidopsis thaliana]
  misc_feature (1)..(45): NCBI GI NO: 30682704 NR Description: expressed protein [Arabidopsis thaliana]
  misc_feature (102)..(266): NCBI GI NO: 25371351 NR Description: hypothetical protein At2g25260
  misc_feature (1)..(45): NCBI GI NO: 25371351 NR Description: hypothetical protein At2g25260
  misc_feature (1)..(69): NCBI GI NO: 34903224 NR Description: unnamed protein product
  misc_feature (1)..(237): NCBI GI NO: 22330795 NR Description: expressed protein [Arabidopsis thaliana]
MQARPGGEAMGGFTRVLHSGKPDGLMDEIPTFVVDPLPAGKDHGYVVLNRPWAFVQWLQKAKIEEEYILMAEPDHIFVKPLPNLAHDDDPAAFPFFYITPSEHEKIIRKYYAKERGPVTDIDPIGNSPVIIKKTILEKIAPTWMNVSIQMKEDEETDKVFGWVLEMYAYAVASALHGVHHILRKDFMIQPPFDTKLQNTFIIHFTYGCDYSLKGELTYGKVGEWRFDKRSFPDRPPPRNLTLPPPGVPESVVTLVKMVNEASANLPRWDDGI

SEQ ID NO: 28852 - protein, 263 aa, Zea mays subsp. mays
  peptide (1)..(263): Ceres Seq. ID no. 13493625
  misc_feature (1)..(260): NCBI GI NO: 15240642 NR Description: expressed protein [Arabidopsis thaliana]
  misc_feature (1)..(259): NCBI GI NO: 22327055 NR Description: expressed protein [Arabidopsis thaliana]
  misc_feature (1)..(260): NCBI GI NO: 24413996 NR Description: hypothetical protein~similar to Arabidopsisthaliana chromosome 5
  misc_feature (93)..(260): NCBI GI NO: 30682704 NR Description: expressed protein [Arabidopsis thaliana]
  misc_feature (1)..(36): NCBI GI NO: 30682704 NR Description: expressed protein [Arabidopsis thaliana]
  misc_feature (93)..(257): NCBI GI NO: 25371351 NR Description: hypothetical protein At2g25260
  misc_feature (1)..(36): NCBI GI NO: 25371351 NR Description: hypothetical protein At2g25260
  misc_feature (1)..(60): NCBI GI NO: 34903224 NR Description: unnamed protein product
  misc_feature (1)..(228): NCBI GI NO: 22330795 NR Description: expressed protein [Arabidopsis thaliana]
MGGFTRVLHSGKPDGLMDEIPTFVVDPLPAGKDHGYVVLNRPWAFVQWLQKAKIEEEYILMAEPDHIFVKPLPNLAHDDDPAAFPFFYITPSEHEKIIRKYYAKERGPVTDIDPIGNSPVIIKKTILEKIAPTWMNVSIQMKEDEETDKVFGWVLEMYAYAVASALHGVHHILRKDFMIQPPFDTKLQNTFIIHFTYGCDYSLKGELTYGKVGEWRFDKRSFPDRPPPRNLTLPPPGVPESVVTLVKMVNEASANLPRWDDGI

SEQ ID NO: 28853 - DNA, 1749 bp, Zea mays subsp. mays
  misc_feature (1)..(1749): Ceres Seq. ID no. 12484025
gcacgagaccattacctagaacatcctaatcgaaaactgttctataaagcgagacgagtgggagcaggcgtaaccctaattgagcatcgcagagataggcgtcttcgtactcgcctacctccgcggctcaaacctttcccccttctcccaattccttccgccggccgccgctccacccgtacgacgacaccatgagggagtgcatttcgatccacatcggccaggccggtatccatgtcggaaacgcgtgctgggagctgtactgccttgagcatggcattcaggctgacggtcagatcccggtgacaagaccattgggggaggtgatgatgctttcaacaccttcttcagtgagactggtgctgggaagcacgtgccccgtgctgtttttgttgaccttgaacccactgtcatcgatgaggtgagaactggcacctaccgccagctcttccaccctgagcagctcatcagtgggaaggaggatgcagccaacaactttgcccgtggtcactacaccattggcaaggagattgttgacctgtgccttgatcgcatcaggaagcttgccgacaactgcactggtctccagggcttcctcgtcttcaacgctgttggtggaggaacgggctctggccttggttccctcctcctagagcgcctgtctgttgactacggcaagaaatccaagcttgggttcactgtgtacccttccccccaagtttctacttcggtagttgagccatacaacagtgtactgtccacccactccctcctcgagcacactgatgtggctatactgctggacaatgaggccatctacgacatctgccgccgatcccttgacattgagcgcccaacctacaccaacctcaacaggcttgtgtcccaggtcatctcatcccttactgcctccctgaggttcgatggtgctctgaacgtggatgttaacgagttccagaccaacctggtaccctacccgaggatccacttcatgctttcttcgtacgctccagtcatctctgctgagaaggcctaccacgagcagctctctgtggctgagatcaccaacagtgccttcgagccatcttccatgatggccaagtgcgacccacgccatggcaagtacatggcctgctgcctcatgtaccgtggtgatgtggtccccaaggatgtgaatgctgctgtggccaccatcaagaccaaacgcaccatccagttcgtggattggtgcccgactggcttcaagtgcggcatcaactaccagcctcctagcgttgtgcctggtggcgacctggccaaggtgcagcgtgccgtgtgcatgatctccaactccaccagtgttgtggaggtgttctcccgcatcgaccacaagttcgacctcatgtacgccaagcgtgccttcgtgcactggtacgtcggtgagggtatggaggaaggtgagttctctgaggcccgtgaggacctggcggcgctcgagaaggactacgaggaggtcggtgctgagttcgatgagggcgaggatggcgacgagggtgacgagtactagagaagtttgctgatgacgcagcatcaggccagtgtgctgcccttatcccgtgatctgccgagagttgctcctgctatcgtgttatgtgtgtctgttctgaagtattgtgtggtttacaacacctgatgttgtaagagttgttaattcccctgcattgctaccgggttattgagaataattatggctgtttacgttgttgcttc

SEQ ID NO: 28854 - protein, 184 aa, Zea mays subsp. mays
  peptide (1)..(184): Ceres Seq. ID no. 12484026
  misc_feature (1)..(126): Pfam Name: Pfam Description:  Tubulin/FtsZ family, C-terminal domain
  misc_feature (1)..(184): NCBI GI NO: 135398 NR Description: Tubulin alpha-1 chain (Alpha-1 tubulin)
  misc_feature (1)..(184): NCBI GI NO: 6094429 NR Description: Tubulin alpha-1 chain (Alpha-1 tubulin)
  misc_feature (1)..(184): NCBI GI NO: 135411 NR Description: Tubulin alpha-2 chain (Alpha-2 tubulin)
  misc_feature (1)..(184): NCBI GI NO: 8928432 NR Description: Tubulin alpha-3 chain
  misc_feature (1)..(184): NCBI GI NO: 3163946 NR Description: alpha-tubulin 1 [Eleusine indica]
  misc_feature (1)..(184): NCBI GI NO: 8928408 NR Description: Tubulin alpha chain
  misc_feature (1)..(184): NCBI GI NO: 8928422 NR Description: Tubulin alpha-2 chain
  misc_feature (1)..(184): NCBI GI NO: 10441016 NR Description: alpha-tubulin [Oryza sativa]
  misc_feature (1)..(184): NCBI GI NO: 17402469 NR Description: alpha-tubulin [Nicotiana tabacum]
  misc_feature (1)..(184): NCBI GI NO: 29124983 NR Description: alpha-tubulin 1 [Populus tremuloides]
MLSSYAPVISAEKAYHEQLSVAEITNSAFEPSSMMAKCDPRHGKYMACCLMYRGDVVPKDVNAAVATIKTKRTIQFVDWCPTGFKCGINYQPPSVVPGGDLAKVQRAVCMISNSTSVVEVFSRIDHKFDLMYAKRAFVHWYVGEGMEEGEFSEAREDLAALEKDYEEVGAEFDEGEDGDEGDEY

SEQ ID NO: 28855 - protein, 151 aa, Zea mays subsp. mays
  peptide (1)..(151): Ceres Seq. ID no. 12484027
  misc_feature (1)..(93): Pfam Name: Pfam Description:  Tubulin/FtsZ family, C-terminal domain
  misc_feature (1)..(151): NCBI GI NO: 135398 NR Description: Tubulin alpha-1 chain (Alpha-1 tubulin)
  misc_feature (1)..(151): NCBI GI NO: 6094429 NR Description: Tubulin alpha-1 chain (Alpha-1 tubulin)
  misc_feature (1)..(151): NCBI GI NO: 135411 NR Description: Tubulin alpha-2 chain (Alpha-2 tubulin)
  misc_feature (1)..(151): NCBI GI NO: 8928432 NR Description: Tubulin alpha-3 chain
  misc_feature (1)..(151): NCBI GI NO: 3163946 NR Description: alpha-tubulin 1 [Eleusine indica]
  misc_feature (1)..(151): NCBI GI NO: 8928408 NR Description: Tubulin alpha chain
  misc_feature (1)..(151): NCBI GI NO: 8928422 NR Description: Tubulin alpha-2 chain
  misc_feature (1)..(151): NCBI GI NO: 10441016 NR Description: alpha-tubulin [Oryza sativa]
  misc_feature (1)..(151): NCBI GI NO: 17402469 NR Description: alpha-tubulin [Nicotiana tabacum]
  misc_feature (1)..(151): NCBI GI NO: 29124983 NR Description: alpha-tubulin 1 [Populus tremuloides]
MMAKCDPRHGKYMACCLMYRGDVVPKDVNAAVATIKTKRTIQFVDWCPTGFKCGINYQPPSVVPGGDLAKVQRAVCMISNSTSVVEVFSRIDHKFDLMYAKRAFVHWYVGEGMEEGEFSEAREDLAALEKDYEEVGAEFDEGEDGDEGDEY

SEQ ID NO: 28856 - protein, 150 aa, Zea mays subsp. mays
  peptide (1)..(150): Ceres Seq. ID no. 12484028
  misc_feature (1)..(92): Pfam Name: Pfam Description:  Tubulin/FtsZ family, C-terminal domain
  misc_feature (1)..(150): NCBI GI NO: 135398 NR Description: Tubulin alpha-1 chain (Alpha-1 tubulin)
  misc_feature (1)..(150): NCBI GI NO: 6094429 NR Description: Tubulin alpha-1 chain (Alpha-1 tubulin)
  misc_feature (1)..(150): NCBI GI NO: 135411 NR Description: Tubulin alpha-2 chain (Alpha-2 tubulin)
  misc_feature (1)..(150): NCBI GI NO: 8928432 NR Description: Tubulin alpha-3 chain
  misc_feature (1)..(150): NCBI GI NO: 3163946 NR Description: alpha-tubulin 1 [Eleusine indica]
  misc_feature (1)..(150): NCBI GI NO: 8928408 NR Description: Tubulin alpha chain
  misc_feature (1)..(150): NCBI GI NO: 8928422 NR Description: Tubulin alpha-2 chain
  misc_feature (1)..(150): NCBI GI NO: 10441016 NR Description: alpha-tubulin [Oryza sativa]
  misc_feature (1)..(150): NCBI GI NO: 17402469 NR Description: alpha-tubulin [Nicotiana tabacum]
  misc_feature (1)..(150): NCBI GI NO: 29124983 NR Description: alpha-tubulin 1 [Populus tremuloides]
MAKCDPRHGKYMACCLMYRGDVVPKDVNAAVATIKTKRTIQFVDWCPTGFKCGINYQPPSVVPGGDLAKVQRAVCMISNSTSVVEVFSRIDHKFDLMYAKRAFVHWYVGEGMEEGEFSEAREDLAALEKDYEEVGAEFDEGEDGDEGDEY

SEQ ID NO: 28857 - DNA, 1676 bp, Zea mays subsp. mays
  misc_feature (1)..(1676): Ceres Seq. ID no. 12352494
aactcactgcatatctgacatctcagttgctgaacgcctgaaccgcaagtcatccatgacctcttctattccgaagctgcttctcctcctcttctttctcagccatcgctctcccattgctcgcgcaggcgatgatggcagctacaaggttctgtccatgggctctccgagaactgactccgtctgttcccagtccaaagcggttccttcgtcgtccgccggtgccgccacggtgcccttgcatcaccgtcacggcccatgctcgccgttgccgaccaagaagatgccgacgttggaggagacgctccaccgcgatcagctccgagctgcctacatccagcggaagttctcaggcggcggtggcgctggtggtgacgtccagcgatcggacgccaccgtgccgacggccctgggcacctccctgaacacgctggagtacctgatcaccgtaggcctgggctcgccggccacgtcccagaccatgctcatccgacaccggcagcgacgtgtcgtgggtgcagtgcaagccgtgctcgcagtgccactcccaggcggacccactcttcgaccccagctcgtcgagcacgtactccccgttctcctgcggctccgccgcctgcgcgcagctcggccaggaaggcaacggctgctcctccagctcccagtgccagtacattgtcacgtacggcgacggctccagcaccacggggacctacagctccgacacgctcgcgctgggctccagcgccgtcaagagcttccagttcgggtgcagcaacgtggagtcgggcttcaacgaccagaccgacgggctcatggggctcggcggcggcgcgcagtcgctggtgtcacagacggcggggacgctcggcagggccttctcgtactgcctcccgccgacgccgagctcctccgggttcctcacgctcggcgctgctggcggtagcggaacctcgggcttcgtcaagacgccgatgctcaggagcagccaggtccccacgttctacggcgtgcgcctccaggccatccgggtgggcgggaggcagctcagcatacccgcctcggtcttctccgctgggacggtcatggactcgggcacggtcatcacgcggctgccgccgaccgcctactcggcgctgtcgtcggcgttcaaggccgggatgaagcagtacccgccggcgcagccgagcggcatcctcgacacctgctttgacttcagcggccagtccagcgtcagcataccgtccgtcgcgctagtcttctccgggggcgccgttgtcagcctcgacgccagcggcatcatcctcagcaactgcctcgccttcgcggccaacagcgacgacagctccttgggcatcatcggcaacgtgcagcagcggacgttcgaggtgctgtacgacgttggccggggcgtcgtggggttcagggctggggcgtgctgatcgatcgtgatcggcgcaaggacattgacaataccggccgggagtacgtactgtgctcgtttgggttgcgagtgcaacgtaaatggaagaagtgcaaaacatatacatactacttcgattttaattatctttgcgatagcatgcaataacgtcatgcatgcaagtgtgcaaactactaaaagctaaaagataatcttaatgtcacctgattgatgactataaaagattaatgat

SEQ ID NO: 28858 - protein, 314 aa, Zea mays subsp. mays
  peptide (1)..(314): Ceres Seq. ID no. 12352495
  misc_feature (97)..(163): Pfam Name: Pfam Description:  Eukaryotic aspartyl protease
  misc_feature (74)..(163): NCBI GI NO: 34912520 NR Description: chloroplast nucleoid DNA-binding protein cnd41-like
THCISDISVAERLNRKSSMTSSIPKLLLLLFFLSHRSPIARAGDDGSYKVLSMGSPRTDSVCSQSKAVPSSSAGAATVPLHHRHGPCSPLPTKKMPTLEETLHRDQLRAAYIQRKFSGGGGAGGDVQRSDATVPTALGTSLNTLEYLITVGLGSPATSQTMLIRHRQRRVVGAVQAVLAVPLPGGPTLRPQLVEHVLPVLLRLRRLRAARPGRQRLLLQLPVPVHCHVRRRLQHHGDLQLRHARAGLQRRQELPVRVQQRGVGLQRPDRRAHGARRRRAVAGVTDGGDARQGLLVLPPADAELLRVPHARRCWR

SEQ ID NO: 28859 - protein, 296 aa, Zea mays subsp. mays
  peptide (1)..(296): Ceres Seq. ID no. 12352496
  misc_feature (79)..(145): Pfam Name: Pfam Description:  Eukaryotic aspartyl protease
  misc_feature (56)..(145): NCBI GI NO: 34912520 NR Description: chloroplast nucleoid DNA-binding protein cnd41-like
MTSSIPKLLLLLFFLSHRSPIARAGDDGSYKVLSMGSPRTDSVCSQSKAVPSSSAGAATVPLHHRHGPCSPLPTKKMPTLEETLHRDQLRAAYIQRKFSGGGGAGGDVQRSDATVPTALGTSLNTLEYLITVGLGSPATSQTMLIRHRQRRVVGAVQAVLAVPLPGGPTLRPQLVEHVLPVLLRLRRLRAARPGRQRLLLQLPVPVHCHVRRRLQHHGDLQLRHARAGLQRRQELPVRVQQRGVGLQRPDRRAHGARRRRAVAGVTDGGDARQGLLVLPPADAELLRVPHARRCWR

SEQ ID NO: 28860 - protein, 262 aa, Zea mays subsp. mays
  peptide (1)..(262): Ceres Seq. ID no. 12352497
  misc_feature (45)..(111): Pfam Name: Pfam Description:  Eukaryotic aspartyl protease
  misc_feature (22)..(111): NCBI GI NO: 34912520 NR Description: chloroplast nucleoid DNA-binding protein cnd41-like
MGSPRTDSVCSQSKAVPSSSAGAATVPLHHRHGPCSPLPTKKMPTLEETLHRDQLRAAYIQRKFSGGGGAGGDVQRSDATVPTALGTSLNTLEYLITVGLGSPATSQTMLIRHRQRRVVGAVQAVLAVPLPGGPTLRPQLVEHVLPVLLRLRRLRAARPGRQRLLLQLPVPVHCHVRRRLQHHGDLQLRHARAGLQRRQELPVRVQQRGVGLQRPDRRAHGARRRRAVAGVTDGGDARQGLLVLPPADAELLRVPHARRCWR

SEQ ID NO: 28861 - DNA, 1650 bp, Zea mays subsp. mays
  misc_feature (1)..(1650): Ceres Seq. ID no. 12373548
aaagaaaaattagaaaccctagcgatgctgcagatccgcctgagcaagattggctcgtcggactccggcgctgccgccaccggctcggcagccgccgccggtgccgccgccgctgtggggtcggctgcggcgctgggcggcggcatcccggaatcggtcaccgtggcatgccccgaccacctggtgatcgcggacctacccgtcgcgaagagcctcggtgccgtcacgacctccgctgccgccgccacgcgcgccatcggccgtcgctcccgtcgcccgctcggggagcgcgtccacatctgctcccgctgcgagttccccatcgccatctacggccgcctcatcccttgtgaacatgccttttgtttaacctgtgcaagaagtgattccagctgctatctttgtgatgagcgcattcagaagatacaaagtgtgaaaatgatggaggggattttcatctgtgctgcaccgatgtgtctcaagtcattccttaagaaagcagattttgagtttcatgttcccgatgtccatgccaacctcctgcaaactaatctagagaaggaagaagaacgcaatgagccagatgctcctaacatctcccgtgcttctgcaggggatacacaaagacaatctcaaatgcctgaaatgtctactgcacgggctccttcaaggccaggtgtttcacaagatcgtgatgaacgctctcgctaccaccagtccagggagcaaacaccactgaggcccccaaccctttcaaaaccaccttcattccatggtcggcattcgtacccaccaggggatactcaggccgagaacaatccacctcaaggattcgaccgggcctacaactgggcttctcaatcacggcaagagagcccaggtgcggcgactccacttcgccaagaatctgaccaaagtattcaggacaagcagcaattgatggctaatgcaccttttatgtttccgccgattcctcctcaccagggaaactttatgatgcctatgaatatgaatcagcctttgattcctaatgcaccattcaattatcctctccagcaagatggaaaccctcagtacttctctgcccctttccagatgcagctaccagatactggatcagaacaaggttccatgtcaaatgtcccagcctccagctggtcctatgagtttccctgaggggcctcagcgcccatggggtatgaggctgatgagtaatccatttcaatcgatggcccttggtcagggaatgattgatggtgcgggtgatcctcaaggtggtggtggccttgccttcatgcaagctggttttgggggcatgcctgatggctccatgaatacaggcatgcccgatagaggtgatggaaggggtattctagcacagatgcatatgcaaatgcagatgtcacttcccccacctccgcctacacaacctcctccaggttcacagcaaacgtttaacaggacttgatatttttttttgtacgaattgatggcaactcccagaattgcatgtcaattcattgagcaaattgtaattttgtcgtttttggcatgtaacctgtggactagatggctcagttctgttccctggttggataggagcctgtattatgctataactcctgtttgaatgaaatgttccgaaatttc

SEQ ID NO: 28862 - protein, 391 aa, Zea mays subsp. mays
  peptide (1)..(391): Ceres Seq. ID no. 12373549
  misc_feature (9)..(391): NCBI GI NO: 37535662 NR Description: hypothetical protein
  misc_feature (51)..(266): NCBI GI NO: 15240902 NR Description: putative protein; protein id: At5g01160
  misc_feature (51)..(266): NCBI GI NO: 21536615 NR Description: unknown [Arabidopsis thaliana]
  misc_feature (94)..(379): NCBI GI NO: 26339810 NR Description: unnamed protein product [Mus musculus]
  misc_feature (94)..(363): NCBI GI NO: 13376204 NR Description: E-cadherin binding protein E7 [Homo sapiens]
  misc_feature (94)..(363): NCBI GI NO: 34785057 NR Description: E-cadherin binding protein E7 [Homo sapiens]
  misc_feature (94)..(363): NCBI GI NO: 34864203 NR Description: similar to Casitas B-lineage lymphoma-like 1
  misc_feature (94)..(363): NCBI GI NO: 9622093 NR Description: E-cadherin binding protein E7 [Mus musculus]
  misc_feature (94)..(363): NCBI GI NO: 19527264 NR Description: E-cadherin binding protein E7 [Mus musculus]
  misc_feature (86)..(229): NCBI GI NO: 28574352 NR Description: CG10263-PD [Drosophila melanogaster]
KEKLETLAMLQIRLSKIGSSDSGAAATGSAAAAGAAAAVGSAAALGGGIPESVTVACPDHLVIADLPVAKSLGAVTTSAAAATRAIGRRSRRPLGERVHICSRCEFPIAIYGRLIPCEHAFCLTCARSDSSCYLCDERIQKIQSVKMMEGIFICAAPMCLKSFLKKADFEFHVPDVHANLLQTNLEKEEERNEPDAPNISRASAGDTQRQSQMPEMSTARAPSRPGVSQDRDERSRYHQSREQTPLRPPTLSKPPSFHGRHSYPPGDTQAENNPPQGFDRAYNWASQSRQESPGAATPLRQESDQSIQDKQQLMANAPFMFPPIPPHQGNFMMPMNMNQPLIPNAPFNYPLQQDGNPQYFSAPFQMQLPDTGSEQGSMSNVPASSWSYEFP

SEQ ID NO: 28863 - protein, 383 aa, Zea mays subsp. mays
  peptide (1)..(383): Ceres Seq. ID no. 12373550
  misc_feature (1)..(383): NCBI GI NO: 37535662 NR Description: hypothetical protein
  misc_feature (43)..(258): NCBI GI NO: 15240902 NR Description: putative protein; protein id: At5g01160
  misc_feature (43)..(258): NCBI GI NO: 21536615 NR Description: unknown [Arabidopsis thaliana]
  misc_feature (86)..(371): NCBI GI NO: 26339810 NR Description: unnamed protein product [Mus musculus]
  misc_feature (86)..(355): NCBI GI NO: 13376204 NR Description: E-cadherin binding protein E7 [Homo sapiens]
  misc_feature (86)..(355): NCBI GI NO: 34785057 NR Description: E-cadherin binding protein E7 [Homo sapiens]
  misc_feature (86)..(355): NCBI GI NO: 34864203 NR Description: similar to Casitas B-lineage lymphoma-like 1
  misc_feature (86)..(355): NCBI GI NO: 9622093 NR Description: E-cadherin binding protein E7 [Mus musculus]
  misc_feature (86)..(355): NCBI GI NO: 19527264 NR Description: E-cadherin binding protein E7 [Mus musculus]
  misc_feature (78)..(221): NCBI GI NO: 28574352 NR Description: CG10263-PD [Drosophila melanogaster]
MLQIRLSKIGSSDSGAAATGSAAAAGAAAAVGSAAALGGGIPESVTVACPDHLVIADLPVAKSLGAVTTSAAAATRAIGRRSRRPLGERVHICSRCEFPIAIYGRLIPCEHAFCLTCARSDSSCYLCDERIQKIQSVKMMEGIFICAAPMCLKSFLKKADFEFHVPDVHANLLQTNLEKEEERNEPDAPNISRASAGDTQRQSQMPEMSTARAPSRPGVSQDRDERSRYHQSREQTPLRPPTLSKPPSFHGRHSYPPGDTQAENNPPQGFDRAYNWASQSRQESPGAATPLRQESDQSIQDKQQLMANAPFMFPPIPPHQGNFMMPMNMNQPLIPNAPFNYPLQQDGNPQYFSAPFQMQLPDTGSEQGSMSNVPASSWSYEFP

SEQ ID NO: 28864 - protein, 245 aa, Zea mays subsp. mays
  peptide (1)..(245): Ceres Seq. ID no. 12373551
  misc_feature (1)..(245): NCBI GI NO: 37535662 NR Description: hypothetical protein
  misc_feature (1)..(120): NCBI GI NO: 15240902 NR Description: putative protein; protein id: At5g01160
  misc_feature (1)..(120): NCBI GI NO: 21536615 NR Description: unknown [Arabidopsis thaliana]
  misc_feature (1)..(233): NCBI GI NO: 26339810 NR Description: unnamed protein product [Mus musculus]
  misc_feature (1)..(217): NCBI GI NO: 13376204 NR Description: E-cadherin binding protein E7 [Homo sapiens]
  misc_feature (1)..(217): NCBI GI NO: 34785057 NR Description: E-cadherin binding protein E7 [Homo sapiens]
  misc_feature (1)..(217): NCBI GI NO: 34864203 NR Description: similar to Casitas B-lineage lymphoma-like 1
  misc_feature (1)..(217): NCBI GI NO: 9622093 NR Description: E-cadherin binding protein E7 [Mus musculus]
  misc_feature (1)..(217): NCBI GI NO: 19527264 NR Description: E-cadherin binding protein E7 [Mus musculus]
  misc_feature (1)..(83): NCBI GI NO: 28574352 NR Description: CG10263-PD [Drosophila melanogaster]
MMEGIFICAAPMCLKSFLKKADFEFHVPDVHANLLQTNLEKEEERNEPDAPNISRASAGDTQRQSQMPEMSTARAPSRPGVSQDRDERSRYHQSREQTPLRPPTLSKPPSFHGRHSYPPGDTQAENNPPQGFDRAYNWASQSRQESPGAATPLRQESDQSIQDKQQLMANAPFMFPPIPPHQGNFMMPMNMNQPLIPNAPFNYPLQQDGNPQYFSAPFQMQLPDTGSEQGSMSNVPASSWSYEFP

SEQ ID NO: 28865 - DNA, 1346 bp, Zea mays subsp. mays
  misc_feature (1)..(1346): Ceres Seq. ID no. 12412964
agcgccggcgctgtagtgtgcagccctcgctccttctggatctctgcacccttcgccacacttcgggggcgcgcgcgcggacatggaggtcgaataccacgaggagtacgtgcggagctcgagaggcgtgcagctcttcacctgcggctggctgcccgctgccgcatcgcccaaggcgctcgtcttcctctgccacggctacggcatggagtgcagtggcttcatgagagaatgcggcgtgcggctggcggcggccgggtacggcgtgttcgggatggactacgagggccacggcaagtcgatgggcgcgcgctgctacatccgcagtttccgccgcctcgtcgacgactgcggccatttcttcaagtccgtctgcgagcttgaggagtaccggggcaagagccggttcctgtacggcgagtccatgggtggcgcggtggcgctggctgctgcacaccgaggaccccgccttctgggacggcgccgtcctcgtggcgcccatgtgcaagatatcggagaaggtgaagccgcaccctctggtgatcacgctcctgacgcaggtggaggacgtgatccccaggtggaagatcgtgcccaccaagcaggacgtcatcgacgccgccttcaaggaccccgtcaagcgtgaaaagatcaggaggaaccagctgatctaccaggacaagccgcggctcaagactgcgttggagatgctcaggaccagcatgtacatagaagacagcttgtcacaggtgacgctgccgttcttcgtcctgcacggcgaggccgacacggtgacggacccggaggtgagccgcgcgctgtacgagcgttcggccagcgccgacaagaccatcaagctgtacccggggatgtggcacggcctcaccgccggggagcccgacgagaacgtggaggccatcttctccgacatcgtgtcctggctcaaccaccgcagccggagctgggccgtggaggaacgccatatgaccaggaagctggcgccagctccggccaagtccatcgaaggccacggcaccgtggacggcaaagtgcacacacaacaagggcgccctcggcggcgccagggcttcctctgcgggcttgccggccggacgcatcaccacgcggagatgtgaaagatagaatcgccgtctcggtcccggatcagatgggcgcctgctttcttcaaccatggcaaataaaggaatgatgacctgcggtttgtaatatagaggtcttattatgcttgtcaaagttatgtatgaccaatcattcccgtctggtgcagattcgaactcatgctcagatatatgtaatgtaagattataacgctattagcattctgg

SEQ ID NO: 28866 - protein, 211 aa, Zea mays subsp. mays
  peptide (1)..(211): Ceres Seq. ID no. 12412965
  misc_feature (1)..(142): Pfam Name: Pfam Description:  alpha/beta hydrolase fold
  misc_feature (1)..(211): NCBI GI NO: 34894592 NR Description: phospholipase-like protein
  misc_feature (1)..(211): NCBI GI NO: 30695682 NR Description: esterase/lipase/thioesterase family
  misc_feature (1)..(204): NCBI GI NO: 18407407 NR Description: putative phospholipase; protein id: At2g47630
  misc_feature (1)..(204): NCBI GI NO: 21592863 NR Description: putative phospholipase [Arabidopsis thaliana]
  misc_feature (1)..(204): NCBI GI NO: 7487574 NR Description: probable phospholipase
  misc_feature (1)..(151): NCBI GI NO: 7487948 NR Description: lysophospholipase homolog F12L6
  misc_feature (1)..(151): NCBI GI NO: 30687883 NR Description: esterase/lipase/thioesterase family
  misc_feature (1)..(152): NCBI GI NO: 30687879 NR Description: hydrolase, alpha/beta fold family
  misc_feature (1)..(152): NCBI GI NO: 15233200 NR Description: lipase -like protein; protein id: At3g55180.1
  misc_feature (1)..(152): NCBI GI NO: 7487947 NR Description: lysophospholipase homolog F12L6
MCKISEKVKPHPLVITLLTQVEDVIPRWKIVPTKQDVIDAAFKDPVKREKIRRNQLIYQDKPRLKTALEMLRTSMYIEDSLSQVTLPFFVLHGEADTVTDPEVSRALYERSASADKTIKLYPGMWHGLTAGEPDENVEAIFSDIVSWLNHRSRSWAVEERHMTRKLAPAPAKSIEGHGTVDGKVHTQQGRPRRRQGFLCGLAGRTHHHAEM

SEQ ID NO: 28867 - protein, 187 aa, Zea mays subsp. mays
  peptide (1)..(187): Ceres Seq. ID no. 12412966
  misc_feature (60)..(128): Pfam Name: Pfam Description:  alpha/beta hydrolase fold
  misc_feature (7)..(128): NCBI GI NO: 34894592 NR Description: phospholipase-like protein
  misc_feature (4)..(128): NCBI GI NO: 30695682 NR Description: esterase/lipase/thioesterase family
  misc_feature (2)..(128): NCBI GI NO: 18407407 NR Description: putative phospholipase; protein id: At2g47630
  misc_feature (42)..(128): NCBI GI NO: 21592863 NR Description: putative phospholipase [Arabidopsis thaliana]
  misc_feature (50)..(128): NCBI GI NO: 7487574 NR Description: probable phospholipase
  misc_feature (3)..(129): NCBI GI NO: 7487948 NR Description: lysophospholipase homolog F12L6
  misc_feature (3)..(129): NCBI GI NO: 30687883 NR Description: esterase/lipase/thioesterase family
  misc_feature (2)..(128): NCBI GI NO: 30687879 NR Description: hydrolase, alpha/beta fold family
  misc_feature (3)..(128): NCBI GI NO: 15233200 NR Description: lipase -like protein; protein id: At3g55180.1
  misc_feature (9)..(128): NCBI GI NO: 7487947 NR Description: lysophospholipase homolog F12L6
MEVEYHEEYVRSSRGVQLFTCGWLPAAASPKALVFLCHGYGMECSGFMRECGVRLAAAGYGVFGMDYEGHGKSMGARCYIRSFRRLVDDCGHFFKSVCELEEYRGKSRFLYGESMGGAVALAAAHRGPRLLGRRRPRGAHVQDIGEGEAAPSGDHAPDAGGGRDPQVEDRAHQAGRHRRRLQGPRQA

SEQ ID NO: 28868 - protein, 146 aa, Zea mays subsp. mays
  peptide (1)..(146): Ceres Seq. ID no. 12412967
  misc_feature (19)..(87): Pfam Name: Pfam Description:  alpha/beta hydrolase fold
  misc_feature (1)..(87): NCBI GI NO: 34894592 NR Description: phospholipase-like protein
  misc_feature (1)..(87): NCBI GI NO: 30695682 NR Description: esterase/lipase/thioesterase family
  misc_feature (1)..(87): NCBI GI NO: 18407407 NR Description: putative phospholipase; protein id: At2g47630
  misc_feature (1)..(87): NCBI GI NO: 21592863 NR Description: putative phospholipase [Arabidopsis thaliana]
  misc_feature (9)..(87): NCBI GI NO: 7487574 NR Description: probable phospholipase
  misc_feature (1)..(88): NCBI GI NO: 7487948 NR Description: lysophospholipase homolog F12L6
  misc_feature (1)..(88): NCBI GI NO: 30687883 NR Description: esterase/lipase/thioesterase family
  misc_feature (1)..(87): NCBI GI NO: 30687879 NR Description: hydrolase, alpha/beta fold family
  misc_feature (1)..(87): NCBI GI NO: 15233200 NR Description: lipase -like protein; protein id: At3g55180.1
  misc_feature (1)..(87): NCBI GI NO: 7487947 NR Description: lysophospholipase homolog F12L6
MECSGFMRECGVRLAAAGYGVFGMDYEGHGKSMGARCYIRSFRRLVDDCGHFFKSVCELEEYRGKSRFLYGESMGGAVALAAAHRGPRLLGRRRPRGAHVQDIGEGEAAPSGDHAPDAGGGRDPQVEDRAHQAGRHRRRLQGPRQA

SEQ ID NO: 28869 - DNA, 1463 bp, Zea mays subsp. mays
  misc_feature (1)..(1463): Ceres Seq. ID no. 12405475
agcgtgaggagttcgaaagaaagggagaaaatgttatgcttgcttgccttgagggaagcgtcgccgtctgcccacacccgcaccgcacccaaccgcagcggagccgggagccgaaggccgagggtattcttccttcgccgctaagcacgcctcctctccacaggcagccgacccaggggaagcgtcgccgtctgcccccaccccgaatctgatgcttcatcgattggttctaatcctcactacctccatattcatgcacgagattgcgggtgattaggagcagggaccaatcatattgaactcagatttggagcggagcaggaggggagccattgcccgtgttctgattgctgctagaggtcgagggatggtaggggtgctgtcgaatcgcgtggatcgggacgacctcaaggccggggatcacatctacacttggcgggccgcctacatctacgcccaccacggaatatatgctggagatggcatggttatccattttacaagggcagctggacatgagattggaacaggaacattcttggactggttcctttatagctcctctccggcagcaactgagggtcctccctgccagaaatgtgggcacctagtcaagtccgatggggtcatcacctcttgcctcgattgcttcttagatgggggcagcctgtacctctttgactacgctgtgtcgcctgctttcttcctcgccaaagcacggggaggaacgtgcaccctggctgcctctgaccccagtgacgttgtgatccaccgtgcacggtacctcctggacaatgggtttggcatgtactccctgttcaagaacaactgcgaggacttcgccatatactgcaagactgggctgcttgtggagaccgctttcagtgttggccgtagcgggcaactttcgtctctgactgctgccttcagcgccgtggcctcgtcccccttgcgtttcctgacaaccagtgctggtggcctggcaattgtgaccagcggcatgtactgtttcgggcggtatgtgtcggatattggtgtccggcgtgatgttgtcaaggtccctgtcgaaaggcttgtggagcagaatgttacttggattcctcagtgtgtggctacagagacagatatcgcggcaggagcaccgcagcagcagttggaggttccttgtgcggttgccgaggaagcatccgttatacagcccgcggcaccgtgatccattgctgaaatgtcatcatgtaccaggtgttggcatgagacaggacaactggaactacgtacttgtgtggaattacatgtaatgatgtatctggtggtgttatgcaatccattgctgctgctgctgctaatggtgcaagcaatgatgatgatgatggatgtggttccatgaccactattaattattacagaattgagaagacctgtatttgcccttgatgattaatgatttctgttataccgttgcc

SEQ ID NO: 28870 - protein, 281 aa, Zea mays subsp. mays
  peptide (1)..(281): Ceres Seq. ID no. 12405476
  misc_feature (102)..(183): Pfam Name: Pfam Description:  NC domain
  misc_feature (2)..(237): NCBI GI NO: 18396282 NR Description: expressed protein; protein id: At3g02700
  misc_feature (2)..(237): NCBI GI NO: 21594170 NR Description: unknown [Arabidopsis thaliana]
  misc_feature (2)..(239): NCBI GI NO: 18415178 NR Description: putative protein; protein id: At5g06370
  misc_feature (2)..(191): NCBI GI NO: 15237330 NR Description: putative protein; protein id: At5g16360.1
  misc_feature (182)..(237): NCBI GI NO: 15237330 NR Description: putative protein; protein id: At5g16360.1
  misc_feature (2)..(253): NCBI GI NO: 18378812 NR Description: Expressed protein; protein id: At1g01225
  misc_feature (2)..(253): NCBI GI NO: 21592684 NR Description: unknown [Arabidopsis thaliana]
  misc_feature (2)..(236): NCBI GI NO: 22328196 NR Description: unknown protein; protein id: At4g00905.1
  misc_feature (2)..(237): NCBI GI NO: 15237327 NR Description: putative protein; protein id: At5g16330.1
  misc_feature (33)..(239): NCBI GI NO: 9758417 NR Description: gb|AAF32477
MVGVLSNRVDRDDLKAGDHIYTWRAAYIYAHHGIYAGDGMVIHFTRAAGHEIGTGTFLDWFLYSSSPAATEGPPCQKCGHLVKSDGVITSCLDCFLDGGSLYLFDYAVSPAFFLAKARGGTCTLAASDPSDVVIHRARYLLDNGFGMYSLFKNNCEDFAIYCKTGLLVETAFSVGRSGQLSSLTAAFSAVASSPLRFLTTSAGGLAIVTSGMYCFGRYVSDIGVRRDVVKVPVERLVEQNVTWIPQCVATETDIAAGAPQQQLEVPCAVAEEASVIQPAAP

SEQ ID NO: 28871 - protein, 242 aa, Zea mays subsp. mays
  peptide (1)..(242): Ceres Seq. ID no. 12405477
  misc_feature (63)..(144): Pfam Name: Pfam Description:  NC domain
  misc_feature (1)..(198): NCBI GI NO: 18396282 NR Description: expressed protein; protein id: At3g02700
  misc_feature (1)..(198): NCBI GI NO: 21594170 NR Description: unknown [Arabidopsis thaliana]
  misc_feature (1)..(200): NCBI GI NO: 18415178 NR Description: putative protein; protein id: At5g06370
  misc_feature (1)..(152): NCBI GI NO: 15237330 NR Description: putative protein; protein id: At5g16360.1
  misc_feature (143)..(198): NCBI GI NO: 15237330 NR Description: putative protein; protein id: At5g16360.1
  misc_feature (1)..(214): NCBI GI NO: 18378812 NR Description: Expressed protein; protein id: At1g01225
  misc_feature (1)..(214): NCBI GI NO: 21592684 NR Description: unknown [Arabidopsis thaliana]
  misc_feature (1)..(197): NCBI GI NO: 22328196 NR Description: unknown protein; protein id: At4g00905.1
  misc_feature (1)..(198): NCBI GI NO: 15237327 NR Description: putative protein; protein id: At5g16330.1
  misc_feature (1)..(200): NCBI GI NO: 9758417 NR Description: gb|AAF32477
MVIHFTRAAGHEIGTGTFLDWFLYSSSPAATEGPPCQKCGHLVKSDGVITSCLDCFLDGGSLYLFDYAVSPAFFLAKARGGTCTLAASDPSDVVIHRARYLLDNGFGMYSLFKNNCEDFAIYCKTGLLVETAFSVGRSGQLSSLTAAFSAVASSPLRFLTTSAGGLAIVTSGMYCFGRYVSDIGVRRDVVKVPVERLVEQNVTWIPQCVATETDIAAGAPQQQLEVPCAVAEEASVIQPAAP

SEQ ID NO: 28872 - DNA, 1428 bp, Zea mays subsp. mays
  misc_feature (1)..(1428): Ceres Seq. ID no. 12356422
acgcagggtggctaggagttgagtcgtgcagaagagacaaaggtcctcacttggctaagctagacacgtacgagtgcaggaaacaagataagtcgcggtttgcgacggcgagaagcgccggatgagtgtccactgtccacaagtccagattccaattccagtccgatcgtgagctcagctcagctccgctagtcctctccccgcacgcaccaccaccagcagcagtccagcaccatgggcggcgccctgctcctcacgctgctcctcgcggccgtgcccctctccttgggcggcggcggcggcgcgcacccgggctactccgacgacgacgagagcgcctgcacggtggacgcgggcgcggagctgctgcggcggatggaggagcgcgggcccgacaggcgcatcatcgacatcacgcacgcggtcgtgccggacctgccggcgttcgccacgggggcggtcgcggggcccatgctgcgcctcagggagtccatggcggacgggtccgagtacaacctgtcggagctgcggatggagtgccacaccggcacgcacgtcgacgcgcctggccacatcaaccaggcccacttcgccgcctgcctcgacgtcgacacgctcgacctccacgtcctcaacggacctgcattgctagttgatgtgccaagaaacacaaatataacagctgaagcgatggaattcctaaacatcccgagaggggttcgccgagttctgttcagaacactgaacactgacaggaagttgatgtggaggaagggaggtgacatgagctacgttgggtttacagaggatggcgcgcagtggttagtcgacaacaccgacataaagctagttggagttgacggtctgtcagtggcatcatttgatcacctgatctctgcccacgtggtctttttcaaaaccccggatataatccctgttgagagcctgaatctggacgacatcgaggcggggatatacatgctgcactgtctacctctcaggctggtcggagccgagggtgcaccgaccagatgcatcctcatcaagtgatcgttcctcggccggcctgctcttgctgccttgctggaggtggcgacactggaccatgccagctgagctggtgctccgtcgtgggtcgcgtggccaatatttggctcgcatgcagtcgtcgatctatatggaacagaacactgcatgcctatgtagatacgcttgtatggacaataaaggaaccgcagtacttctgtcgatgaaatacttttgggtgagccggtaatctaaaacaccaggcctacaggttaagctgggaggccctggaaggctgaggctagcggctggggatggatccagatttttattcgaatgctatttttttggtcatatttctttgattgtaaacaaataacatatatgattttctatatctct

SEQ ID NO: 28873 - protein, 271 aa, Zea mays subsp. mays
  peptide (1)..(271): Ceres Seq. ID no. 12356423
  misc_feature (57)..(257): Pfam Name: Pfam Description:  Putative cyclase
  misc_feature (5)..(271): NCBI GI NO: 35215089 NR Description: hypothetical protein
  misc_feature (54)..(271): NCBI GI NO: 15219416 NR Description: hypothetical protein; protein id: At1g44542.1
  misc_feature (6)..(270): NCBI GI NO: 18418598 NR Description: putative protein; protein id: At4g35220
  misc_feature (34)..(271): NCBI GI NO: 18418393 NR Description: putative protein; protein id: At4g34180
  misc_feature (34)..(228): NCBI GI NO: 7486287 NR Description: hypothetical protein F28A23
  misc_feature (57)..(269): NCBI GI NO: 16330650 NR Description: hypothetical protein [Synechocystis sp. PCC 6803]
  misc_feature (56)..(269): NCBI GI NO: 39998438 NR Description: cyclase, putative [Geobacter sulfurreducens PCA]
  misc_feature (56)..(271): NCBI GI NO: 23016903 NR Description: hypothetical protein
  misc_feature (57)..(269): NCBI GI NO: 23056289 NR Description: hypothetical protein [Geobacter metallireducens]
  misc_feature (6)..(149): NCBI GI NO: 7486023 NR Description: hypothetical protein F23E12
MGGALLLTLLLAAVPLSLGGGGGAHPGYSDDDESACTVDAGAELLRRMEERGPDRRIIDITHAVVPDLPAFATGAVAGPMLRLRESMADGSEYNLSELRMECHTGTHVDAPGHINQAHFAACLDVDTLDLHVLNGPALLVDVPRNTNITAEAMEFLNIPRGVRRVLFRTLNTDRKLMWRKGGDMSYVGFTEDGAQWLVDNTDIKLVGVDGLSVASFDHLISAHVVFFKTPDIIPVESLNLDDIEAGIYMLHCLPLRLVGAEGAPTRCILIK

SEQ ID NO: 28874 - protein, 224 aa, Zea mays subsp. mays
  peptide (1)..(224): Ceres Seq. ID no. 12356424
  misc_feature (10)..(210): Pfam Name: Pfam Description:  Putative cyclase
  misc_feature (1)..(224): NCBI GI NO: 35215089 NR Description: hypothetical protein
  misc_feature (7)..(224): NCBI GI NO: 15219416 NR Description: hypothetical protein; protein id: At1g44542.1
  misc_feature (1)..(223): NCBI GI NO: 18418598 NR Description: putative protein; protein id: At4g35220
  misc_feature (1)..(224): NCBI GI NO: 18418393 NR Description: putative protein; protein id: At4g34180
  misc_feature (1)..(181): NCBI GI NO: 7486287 NR Description: hypothetical protein F28A23
  misc_feature (10)..(222): NCBI GI NO: 16330650 NR Description: hypothetical protein [Synechocystis sp. PCC 6803]
  misc_feature (9)..(222): NCBI GI NO: 39998438 NR Description: cyclase, putative [Geobacter sulfurreducens PCA]
  misc_feature (9)..(224): NCBI GI NO: 23016903 NR Description: hypothetical protein
  misc_feature (10)..(222): NCBI GI NO: 23056289 NR Description: hypothetical protein [Geobacter metallireducens]
  misc_feature (1)..(102): NCBI GI NO: 7486023 NR Description: hypothetical protein F23E12
MEERGPDRRIIDITHAVVPDLPAFATGAVAGPMLRLRESMADGSEYNLSELRMECHTGTHVDAPGHINQAHFAACLDVDTLDLHVLNGPALLVDVPRNTNITAEAMEFLNIPRGVRRVLFRTLNTDRKLMWRKGGDMSYVGFTEDGAQWLVDNTDIKLVGVDGLSVASFDHLISAHVVFFKTPDIIPVESLNLDDIEAGIYMLHCLPLRLVGAEGAPTRCILIK

SEQ ID NO: 28875 - protein, 192 aa, Zea mays subsp. mays
  peptide (1)..(192): Ceres Seq. ID no. 12356425
  misc_feature (1)..(178): Pfam Name: Pfam Description:  Putative cyclase
  misc_feature (1)..(192): NCBI GI NO: 35215089 NR Description: hypothetical protein
  misc_feature (1)..(192): NCBI GI NO: 15219416 NR Description: hypothetical protein; protein id: At1g44542.1
  misc_feature (1)..(191): NCBI GI NO: 18418598 NR Description: putative protein; protein id: At4g35220
  misc_feature (1)..(192): NCBI GI NO: 18418393 NR Description: putative protein; protein id: At4g34180
  misc_feature (1)..(149): NCBI GI NO: 7486287 NR Description: hypothetical protein F28A23
  misc_feature (1)..(190): NCBI GI NO: 16330650 NR Description: hypothetical protein [Synechocystis sp. PCC 6803]
  misc_feature (1)..(190): NCBI GI NO: 39998438 NR Description: cyclase, putative [Geobacter sulfurreducens PCA]
  misc_feature (1)..(192): NCBI GI NO: 23016903 NR Description: hypothetical protein
  misc_feature (1)..(190): NCBI GI NO: 23056289 NR Description: hypothetical protein [Geobacter metallireducens]
  misc_feature (1)..(70): NCBI GI NO: 7486023 NR Description: hypothetical protein F23E12
MLRLRESMADGSEYNLSELRMECHTGTHVDAPGHINQAHFAACLDVDTLDLHVLNGPALLVDVPRNTNITAEAMEFLNIPRGVRRVLFRTLNTDRKLMWRKGGDMSYVGFTEDGAQWLVDNTDIKLVGVDGLSVASFDHLISAHVVFFKTPDIIPVESLNLDDIEAGIYMLHCLPLRLVGAEGAPTRCILIK

SEQ ID NO: 28876 - DNA, 1811 bp, Zea mays subsp. mays
  misc_feature (1)..(1811): Ceres Seq. ID no. 12379731
gataataaagccctacctctcacatcggcaacaggacgaggccagggcatccacgaccacgacacggacacagggagccgcccgccatgccaccgcacggcggcatgctcgcgtacgccgccctcgcgctcgcggcgctgcggctgctgctgtcctacaagtcggcgctctacgcgctgcgccgcctgtggcggtgcgccgacgagtgggcgcaggcgtaccagtaccacgaggtgccgcgcttcgccggggcccagtgcgggtgcgacggcgcagagaacccgctgttccgcaaggtcgccgcgtacgtggcggcgctgccgtcgctggaggacgccgacgctgcgtgcgtggtgtcgtcggcgtcaaggaccaacggcgggctgtccctgcagctcggcccgggccacaccgcgagggacacgtaccttggcgcgcgcctcgcgtggaccagcgcgggcggcgagcgcctggtgctgcgcgtgcgccgccacgaccgctcccgcgtgctgcgaccttacctgcagcacgtggagtccgtggcagaggagatggagcagcgccgccgcgagctgcgcctcttcgccaacaccgccgtggacgcgaccacgggcgcgccgcgctgggcgtcggcgcccttcacccacccggccacgctcgacgccgtggccatggacccggacctcaaggcccgcgtccgcgccgacctcgagagcttcctcaagggccgcgcctactaccaccgcctcggccgcgtctggcgccggagctacctcctctacggcccgccgggcaccggcaagtccacgttcgcggcggccatggccaggttcctgggctacgacgtctacgacgtcgacctgtctcgcgccgacgccgccggcgacgacctccgcgcgctgctcctgcacaccaccccgcgctcgctcgtcctcgtcgaggacctggaccggtacctgcagggcggcggcggggacgcggaggcgcgcgcggccagggtgctgagcttcatggacggcatcgcgtcgtgctgcggcgaggagcgtgtcatggtgttcaccatgcgcgggggcaaggacgccgtggacgccgcggtggtgcgcccgggccggctggacgtgcacatccagttcacgctctgcgacttcgaggccttcaaggcgctggccagcaactacctggggctcaaggaccacaagctgtacccgcaggtggaggaggggttccacgccgccggcgcccgcctcagcccgggccgagcttggcgagatcatgctggccaaccgcgcgtccccgagccgcgcgctccgcagcgtgatcaccaagctccagcgcgtcgcgtccggaggcgccgcgccgccgcggaacccggcgcacaggcggaacacgagctggtccggcgcctggaccggacagcagtgggaggaccaggcccagccggcgcgagccagcgcggtctccgtggaggtcgacgagacggccgccggggcaccggcgacgtgcggcggggtgttcggaaaggaggcgcccatgagggagttcaagaagctgtacgggctgatcaaggtcaggagccggagggagggcgccggcgccgtgccactggaaggcgacgcgcacgggccgccgacgccgggcaaccatgacagggagcggtgatcgccgtggatggtagaattgtagtggtgtgcaaaaagaaagcatttttatttctttctctttttttttcttgttattgttacagtttatcacactactctactaatgtgtcagtgactgcaagtaggaatggcaatagatgaattggatgg

SEQ ID NO: 28877 - protein, 519 aa, Zea mays subsp. mays
  peptide (1)..(519): Ceres Seq. ID no. 12379732
  misc_feature (228)..(389): Pfam Name: AAA Pfam Description: ATPase family associated with various cellular activities
  misc_feature (8)..(448): NCBI GI NO: 34902172 NR Description: Hypothetical protein
  misc_feature (6)..(503): NCBI GI NO: 37536122 NR Description: hypothetical protein
  misc_feature (7)..(479): NCBI GI NO: 30690453 NR Description: AAA-type ATPase family [Arabidopsis thaliana]
  misc_feature (33)..(479): NCBI GI NO: 25354579 NR Description: hypothetical protein At2g46620
  misc_feature (130)..(288): NCBI GI NO: 15233037 NR Description: hypothetical protein; protein id: At3g28580
  misc_feature (292)..(389): NCBI GI NO: 15233037 NR Description: hypothetical protein; protein id: At3g28580
  misc_feature (65)..(334): NCBI GI NO: 9294274 NR Description: mitochondrial protein-like [Arabidopsis thaliana]
  misc_feature (65)..(334): NCBI GI NO: 15233040 NR Description: unknown protein; protein id: At3g28610.1
  misc_feature (305)..(377): NCBI GI NO: 9294274 NR Description: mitochondrial protein-like [Arabidopsis thaliana]
  misc_feature (305)..(377): NCBI GI NO: 15233040 NR Description: unknown protein; protein id: At3g28610.1
MPPHGGMLAYAALALAALRLLLSYKSALYALRRLWRCADEWAQAYQYHEVPRFAGAQCGCDGAENPLFRKVAAYVAALPSLEDADAACVVSSASRTNGGLSLQLGPGHTARDTYLGARLAWTSAGGERLVLRVRRHDRSRVLRPYLQHVESVAEEMEQRRRELRLFANTAVDATTGAPRWASAPFTHPATLDAVAMDPDLKARVRADLESFLKGRAYYHRLGRVWRRSYLLYGPPGTGKSTFAAAMARFLGYDVYDVDLSRADAAGDDLRALLLHTTPRSLVLVEDLDRYLQGGGGDAEARAARVLSFMDGIASCCGEERVMVFTMRGGKDAVDAAVVRPGRLDVHIQFTLCDFEAFKALASNYLGLKDHKLYPQVEEGFHAAGARLSPGRAWRDHAGQPRVPEPRAPQRDHQAPARRVRRRRAAAEPGAQAEHELVRRLDRTAVGGPGPAGASQRGLRGGRRDGRRGTGDVRRGVRKGGAHEGVQEAVRADQGQEPEGGRRRRATGRRRARAADAGQP

SEQ ID NO: 28878 - protein, 513 aa, Zea mays subsp. mays
  peptide (1)..(513): Ceres Seq. ID no. 12379733
  misc_feature (222)..(383): Pfam Name: AAA Pfam Description: ATPase family associated with various cellular activities
  misc_feature (2)..(442): NCBI GI NO: 34902172 NR Description: Hypothetical protein
  misc_feature (1)..(497): NCBI GI NO: 37536122 NR Description: hypothetical protein
  misc_feature (1)..(473): NCBI GI NO: 30690453 NR Description: AAA-type ATPase family [Arabidopsis thaliana]
  misc_feature (27)..(473): NCBI GI NO: 25354579 NR Description: hypothetical protein At2g46620
  misc_feature (124)..(282): NCBI GI NO: 15233037 NR Description: hypothetical protein; protein id: At3g28580
  misc_feature (286)..(383): NCBI GI NO: 15233037 NR Description: hypothetical protein; protein id: At3g28580
  misc_feature (59)..(328): NCBI GI NO: 9294274 NR Description: mitochondrial protein-like [Arabidopsis thaliana]
  misc_feature (59)..(328): NCBI GI NO: 15233040 NR Description: unknown protein; protein id: At3g28610.1
  misc_feature (299)..(371): NCBI GI NO: 9294274 NR Description: mitochondrial protein-like [Arabidopsis thaliana]
  misc_feature (299)..(371): NCBI GI NO: 15233040 NR Description: unknown protein; protein id: At3g28610.1
MLAYAALALAALRLLLSYKSALYALRRLWRCADEWAQAYQYHEVPRFAGAQCGCDGAENPLFRKVAAYVAALPSLEDADAACVVSSASRTNGGLSLQLGPGHTARDTYLGARLAWTSAGGERLVLRVRRHDRSRVLRPYLQHVESVAEEMEQRRRELRLFANTAVDATTGAPRWASAPFTHPATLDAVAMDPDLKARVRADLESFLKGRAYYHRLGRVWRRSYLLYGPPGTGKSTFAAAMARFLGYDVYDVDLSRADAAGDDLRALLLHTTPRSLVLVEDLDRYLQGGGGDAEARAARVLSFMDGIASCCGEERVMVFTMRGGKDAVDAAVVRPGRLDVHIQFTLCDFEAFKALASNYLGLKDHKLYPQVEEGFHAAGARLSPGRAWRDHAGQPRVPEPRAPQRDHQAPARRVRRRRAAAEPGAQAEHELVRRLDRTAVGGPGPAGASQRGLRGGRRDGRRGTGDVRRGVRKGGAHEGVQEAVRADQGQEPEGGRRRRATGRRRARAADAGQP

SEQ ID NO: 28879 - protein, 438 aa, Zea mays subsp. mays
  peptide (1)..(438): Ceres Seq. ID no. 12379734
  misc_feature (125)..(438): Pfam Name: Pfam Description:  High molecular weight glutenin subunit
  misc_feature (40)..(438): NCBI GI NO: 29247944 NR Description: GLP_26_54603_52153 [Giardia lamblia ATCC 50803]
  misc_feature (169)..(438): NCBI GI NO: 5821145 NR Description: RNA binding protein [Homo sapiens]
  misc_feature (213)..(438): NCBI GI NO: 23103907 NR Description: hypothetical protein [Azotobacter vinelandii]
IIKPYLSHRQQDEARASTTTTRTQGAARHATARRHARVRRPRARGAAAAAVLQVGALRAAPPVAVRRRVGAGVPVPRGAALRRGPVRVRRRREPAVPQGRRVRGGAAVAGGRRRCVRGVVGVKDQRRAVPAARPGPHREGHVPWRAPRVDQRGRRAPGAARAPPRPLPRAATLPAARGVRGRGDGAAPPRAAPLRQHRRGRDHGRAALGVGALHPPGHARRRGHGPGPQGPRPRRPRELPQGPRLLPPPRPRLAPELPPLRPAGHRQVHVRGGHGQVPGLRRLRRRPVSRRRRRRRPPRAAPAHHPALARPRRGPGPVPAGRRRGRGGARGQGAELHGRHRVVLRRGACHGVHHARGQGRRGRRGGAPGPAGRAHPVHALRLRGLQGAGQQLPGAQGPQAVPAGGGGVPRRRRPPQPGPSLARSCWPTARPRAARSAA

SEQ ID NO: 28880 - DNA, 1412 bp, Zea mays subsp. mays
  misc_feature (1)..(1412): Ceres Seq. ID no. 12556700
cgaaaaaaccatttcttcttcctttttctatatcgcgttacgtccctacccagcgatctaggccgccgcctctcctactgcatctccctcgctctcgtcgcctcgttcgcttcgcctccgccccgccccgccccgagcagagcgcagccctatccggagctgggatggcggacgcgaagcagccagcagcagcagcagcagccacagcaggcggcagcggcagccaccggcgtgtggaagacggtcaagcccttcgttaacggcggggcctctgggatgctcgcgacctgcgtcatccagcctatcgacatggtcaaggtgaggatccagttgggtgagggctctgctggtcaggtcacaaggaacatgcttgcaaatgagggtgtccgttctttctacaagggtttgtccgccggattgctgaggcaagcgacgtacacgactgctcgtcttggatcctttagggttctaactaacaaagcagttgaaaagaatgaagggaagccattgcctctatttcagaaagcttttattggtctgactgctggtgcaattggtgcttgtgttggtagtcctgctgatctggcactcattagaatgcaagccgattcgaccctgccagttgcacaacgacgcaactataagaatgctttccatgcactctaccgtatcagtggtgatgagggagtccttgcgctttggaagggtgcaggtccaactgtggtgagagctatggcactcaatatgggtatgcttgcttcctatgaccagagtgtcgagctatttagggacaaatttggcgcaggagaaatttctactgttgttggagccagcgctgtttctggattctttgcctcagcatgcagtttgccctttgactatgtgaagacacagattcagaagatgcaacctgatgcgaatggcaagtacccatacacagggtctttggactgtgctgtgaagaccttcaagagcggtggcccattcaagttctacactggtttcccggtgtactgcgtcaggattgcaccccatgtcatgatgacctggatattcttgaatcagatccagaagtttgagaagaagatcggcatataggattcccatgggacggatacagggttgacagttctatgctattactgcttgactctgtaataacattccagctgctttcgcaccatggtagttggttttggtagagacaagtctgttacaattttttaccttagctttccaattattgtgttgcaataatcgaattaattgttgctgggggatttttttggggggttgggagggtggcatgcttttgttggctgggatgtagccataaggagagggggatactgcctagttatgtcattgaatggaattggaccatattttatacagatttttaccttcagttc

SEQ ID NO: 28881 - protein, 365 aa, Zea mays subsp. mays
  peptide (1)..(365): Ceres Seq. ID no. 12556701
  misc_feature (69)..(365): NCBI GI NO: 2130089 NR Description: 2-oxoglutarate/malate translocator
  misc_feature (69)..(365): NCBI GI NO: 2130090 NR Description: 2-oxoglutarate/malate translocator
  misc_feature (72)..(365): NCBI GI NO: 19913109 NR Description: dicarboxylate/tricarboxylate carrier
  misc_feature (77)..(365): NCBI GI NO: 7489246 NR Description: oxoglutarate/malate translocator - potato
  misc_feature (74)..(365): NCBI GI NO: 15241167 NR Description: mitochondrial 2-oxoglutarate/malate translocator
  misc_feature (77)..(365): NCBI GI NO: 10798640 NR Description: mitochondrial 2-oxoglutarate/malate carrier
  misc_feature (77)..(365): NCBI GI NO: 19913105 NR Description: dicarboxylate/tricarboxylate carrier
  misc_feature (77)..(365): NCBI GI NO: 19913107 NR Description: dicarboxylate/tricarboxylate carrier
  misc_feature (141)..(365): NCBI GI NO: 19913111 NR Description: dicarboxylate/tricarboxylate carrier
  misc_feature (148)..(365): NCBI GI NO: 2331139 NR Description: 2-oxoglutarate/malate translocator [Oryza sativa]
RKNHFFFLFLYRVTSLPSDLGRRLSYCISLALVASFASPPPRPAPSRAQPYPELGWRTRSSQQQQQQPQQAAAAATGVWKTVKPFVNGGASGMLATCVIQPIDMVKVRIQLGEGSAGQVTRNMLANEGVRSFYKGLSAGLLRQATYTTARLGSFRVLTNKAVEKNEGKPLPLFQKAFIGLTAGAIGACVGSPADLALIRMQADSTLPVAQRRNYKNAFHALYRISGDEGVLALWKGAGPTVVRAMALNMGMLASYDQSVELFRDKFGAGEISTVVGASAVSGFFASACSLPFDYVKTQIQKMQPDANGKYPYTGSLDCAVKTFKSGGPFKFYTGFPVYCVRIAPHVMMTWIFLNQIQKFEKKIGI

SEQ ID NO: 28882 - protein, 273 aa, Zea mays subsp. mays
  peptide (1)..(273): Ceres Seq. ID no. 12556702
  misc_feature (1)..(273): NCBI GI NO: 2130089 NR Description: 2-oxoglutarate/malate translocator
  misc_feature (1)..(273): NCBI GI NO: 2130090 NR Description: 2-oxoglutarate/malate translocator
  misc_feature (1)..(273): NCBI GI NO: 19913109 NR Description: dicarboxylate/tricarboxylate carrier
  misc_feature (1)..(273): NCBI GI NO: 7489246 NR Description: oxoglutarate/malate translocator - potato
  misc_feature (1)..(273): NCBI GI NO: 15241167 NR Description: mitochondrial 2-oxoglutarate/malate translocator
  misc_feature (1)..(273): NCBI GI NO: 10798640 NR Description: mitochondrial 2-oxoglutarate/malate carrier
  misc_feature (1)..(273): NCBI GI NO: 19913105 NR Description: dicarboxylate/tricarboxylate carrier
  misc_feature (1)..(273): NCBI GI NO: 19913107 NR Description: dicarboxylate/tricarboxylate carrier
  misc_feature (49)..(273): NCBI GI NO: 19913111 NR Description: dicarboxylate/tricarboxylate carrier
  misc_feature (56)..(273): NCBI GI NO: 2331139 NR Description: 2-oxoglutarate/malate translocator [Oryza sativa]
MLATCVIQPIDMVKVRIQLGEGSAGQVTRNMLANEGVRSFYKGLSAGLLRQATYTTARLGSFRVLTNKAVEKNEGKPLPLFQKAFIGLTAGAIGACVGSPADLALIRMQADSTLPVAQRRNYKNAFHALYRISGDEGVLALWKGAGPTVVRAMALNMGMLASYDQSVELFRDKFGAGEISTVVGASAVSGFFASACSLPFDYVKTQIQKMQPDANGKYPYTGSLDCAVKTFKSGGPFKFYTGFPVYCVRIAPHVMMTWIFLNQIQKFEKKIGI

SEQ ID NO: 28883 - protein, 262 aa, Zea mays subsp. mays
  peptide (1)..(262): Ceres Seq. ID no. 12556703
  misc_feature (1)..(262): NCBI GI NO: 2130089 NR Description: 2-oxoglutarate/malate translocator
  misc_feature (1)..(262): NCBI GI NO: 2130090 NR Description: 2-oxoglutarate/malate translocator
  misc_feature (1)..(262): NCBI GI NO: 19913109 NR Description: dicarboxylate/tricarboxylate carrier
  misc_feature (1)..(262): NCBI GI NO: 7489246 NR Description: oxoglutarate/malate translocator - potato
  misc_feature (1)..(262): NCBI GI NO: 15241167 NR Description: mitochondrial 2-oxoglutarate/malate translocator
  misc_feature (1)..(262): NCBI GI NO: 10798640 NR Description: mitochondrial 2-oxoglutarate/malate carrier
  misc_feature (1)..(262): NCBI GI NO: 19913105 NR Description: dicarboxylate/tricarboxylate carrier
  misc_feature (1)..(262): NCBI GI NO: 19913107 NR Description: dicarboxylate/tricarboxylate carrier
  misc_feature (38)..(262): NCBI GI NO: 19913111 NR Description: dicarboxylate/tricarboxylate carrier
  misc_feature (45)..(262): NCBI GI NO: 2331139 NR Description: 2-oxoglutarate/malate translocator [Oryza sativa]
MVKVRIQLGEGSAGQVTRNMLANEGVRSFYKGLSAGLLRQATYTTARLGSFRVLTNKAVEKNEGKPLPLFQKAFIGLTAGAIGACVGSPADLALIRMQADSTLPVAQRRNYKNAFHALYRISGDEGVLALWKGAGPTVVRAMALNMGMLASYDQSVELFRDKFGAGEISTVVGASAVSGFFASACSLPFDYVKTQIQKMQPDANGKYPYTGSLDCAVKTFKSGGPFKFYTGFPVYCVRIAPHVMMTWIFLNQIQKFEKKIGI

SEQ ID NO: 28884 - DNA, 1521 bp, Zea mays subsp. mays
  misc_feature (1)..(1521): Ceres Seq. ID no. 12367423
aattggccgttattattgtactccccttctccattccactcgtccccttcctccccttccgtctcgcaacaggcgaggcgagagaactcgtcgtcgaagcgaaatatagccagcgcaccaatcccaattcccaacccgacgcaacgcaacgcaacgcaacgcacctcatcccggttgcttgcgccaacgtaggggatcgcctcgccccgccccgccccgccccgccccgcttcgcgctcctccttcctgcctgccgtaaccgcgccgtgcagctgtgcaagggcatttctgcattcatgtgggcaagctggatgattcaaagttgttgatatgtggtggttcagtaggttgttgagtctagataccagatgatggacctgtccacgacttcagtgctggcagctaaagcttacaaatacaaagcagaatcacttgttaaggagtaccttcttgcagattcgtatgtttcatacactgctgtacttggtgggatcctgatgtgcaagatggcttatgacataacaagcataatcagctcattgtactacaagggttatggttcacttacaaaaacccaaaagcttgagtggaacaacaggggcatgtccactatccatgcgatattcatcacagtggtgtcagtgtacctggttttcttctccaacctattctctgatgagctggatggactagtaacttatcggagttcaaatctatccaatttcactttgggggtttctgttgggtatttcatcactgaccttgctatgatattatgggcttatccttctcttggtggaatggagtatgtccttcaccatatgctgtcgcttatttctatagtctatgctatgtattctggggaaggacagttgtacacatacatggttctcatctctgaaacaaccacacctggaatcaacctccgatggttccttgataccgctggactgaaaaaatccaaggcctatcttgtcaatggtgttacgatgtttattgcatggctggtggcacggatcattttgttcgtctacttgttttaccacatttacttccactatgatcaggtcaagcagatgcatacgtttagctgcattctgatatttgctgtgcctacaatactgctcgtcatgaacacaatgtggtttgccaagatcttgagaggccttaaaaagacgctagccaagaggcagtgaaaagaagaatggtaaaacaagctcaaggacatcgatagccaaaatccatcccctcgtacagtcactttacagttacatgcacttcccgagtaaagccgtcagtgcagctcgccgtcagtaaagcccttgtacatgatcctgaaatacgctaaacacagctcatttttttccctggatgctctgccttgtacatacggccgtctgtattgggtgcttacaccttgagggatcatttggtgaccagaaaaatagatgggaaagaaatccctttgttacggcctcgttcgtaatatttttttctgaataataattcacatttttttct

SEQ ID NO: 28885 - protein, 275 aa, Zea mays subsp. mays
  peptide (1)..(275): Ceres Seq. ID no. 12367424
  misc_feature (35)..(275): Pfam Name: DUF887 Pfam Description: Eukaryotic protein of unknown function
  misc_feature (10)..(273): NCBI GI NO: 40538924 NR Description: expressed protein
  misc_feature (4)..(274): NCBI GI NO: 18397885 NR Description: expressed protein; protein id: At1g31300
  misc_feature (13)..(275): NCBI GI NO: 22328807 NR Description: unknown protein; protein id: At4g19645.1
  misc_feature (37)..(275): NCBI GI NO: 34909246 NR Description: B1148D12.11
  misc_feature (37)..(273): NCBI GI NO: 18413327 NR Description: expressed protein; protein id: At4g10360
  misc_feature (41)..(273): NCBI GI NO: 21537382 NR Description: unknown [Arabidopsis thaliana]
  misc_feature (4)..(214): NCBI GI NO: 25403400 NR Description: protein T19E23.9 [imported] - Arabidopsis thaliana
  misc_feature (216)..(274): NCBI GI NO: 25403400 NR Description: protein T19E23.9 [imported] - Arabidopsis thaliana
  misc_feature (37)..(273): NCBI GI NO: 7486070 NR Description: hypothetical protein F24G24
  misc_feature (2)..(272): NCBI GI NO: 30725869 NR Description: RIKEN cDNA C730036B01 [Mus musculus]
MMDLSTTSVLAAKAYKYKAESLVKEYLLADSYVSYTAVLGGILMCKMAYDITSIISSLYYKGYGSLTKTQKLEWNNRGMSTIHAIFITVVSVYLVFFSNLFSDELDGLVTYRSSNLSNFTLGVSVGYFITDLAMILWAYPSLGGMEYVLHHMLSLISIVYAMYSGEGQLYTYMVLISETTTPGINLRWFLDTAGLKKSKAYLVNGVTMFIAWLVARIILFVYLFYHIYFHYDQVKQMHTFSCILIFAVPTILLVMNTMWFAKILRGLKKTLAKRQ

SEQ ID NO: 28886 - protein, 274 aa, Zea mays subsp. mays
  peptide (1)..(274): Ceres Seq. ID no. 12367425
  misc_feature (34)..(274): Pfam Name: DUF887 Pfam Description: Eukaryotic protein of unknown function
  misc_feature (9)..(272): NCBI GI NO: 40538924 NR Description: expressed protein
  misc_feature (3)..(273): NCBI GI NO: 18397885 NR Description: expressed protein; protein id: At1g31300
  misc_feature (12)..(274): NCBI GI NO: 22328807 NR Description: unknown protein; protein id: At4g19645.1
  misc_feature (36)..(274): NCBI GI NO: 34909246 NR Description: B1148D12.11
  misc_feature (36)..(272): NCBI GI NO: 18413327 NR Description: expressed protein; protein id: At4g10360
  misc_feature (40)..(272): NCBI GI NO: 21537382 NR Description: unknown [Arabidopsis thaliana]
  misc_feature (3)..(213): NCBI GI NO: 25403400 NR Description: protein T19E23.9 [imported] - Arabidopsis thaliana
  misc_feature (215)..(273): NCBI GI NO: 25403400 NR Description: protein T19E23.9 [imported] - Arabidopsis thaliana
  misc_feature (36)..(272): NCBI GI NO: 7486070 NR Description: hypothetical protein F24G24
  misc_feature (1)..(271): NCBI GI NO: 30725869 NR Description: RIKEN cDNA C730036B01 [Mus musculus]
MDLSTTSVLAAKAYKYKAESLVKEYLLADSYVSYTAVLGGILMCKMAYDITSIISSLYYKGYGSLTKTQKLEWNNRGMSTIHAIFITVVSVYLVFFSNLFSDELDGLVTYRSSNLSNFTLGVSVGYFITDLAMILWAYPSLGGMEYVLHHMLSLISIVYAMYSGEGQLYTYMVLISETTTPGINLRWFLDTAGLKKSKAYLVNGVTMFIAWLVARIILFVYLFYHIYFHYDQVKQMHTFSCILIFAVPTILLVMNTMWFAKILRGLKKTLAKRQ

SEQ ID NO: 28887 - protein, 232 aa, Zea mays subsp. mays
  peptide (1)..(232): Ceres Seq. ID no. 12367426
  misc_feature (1)..(232): Pfam Name: DUF887 Pfam Description: Eukaryotic protein of unknown function
  misc_feature (1)..(230): NCBI GI NO: 40538924 NR Description: expressed protein
  misc_feature (1)..(231): NCBI GI NO: 18397885 NR Description: expressed protein; protein id: At1g31300
  misc_feature (1)..(232): NCBI GI NO: 22328807 NR Description: unknown protein; protein id: At4g19645.1
  misc_feature (1)..(232): NCBI GI NO: 34909246 NR Description: B1148D12.11
  misc_feature (1)..(230): NCBI GI NO: 18413327 NR Description: expressed protein; protein id: At4g10360
  misc_feature (1)..(230): NCBI GI NO: 21537382 NR Description: unknown [Arabidopsis thaliana]
  misc_feature (1)..(171): NCBI GI NO: 25403400 NR Description: protein T19E23.9 [imported] - Arabidopsis thaliana
  misc_feature (173)..(231): NCBI GI NO: 25403400 NR Description: protein T19E23.9 [imported] - Arabidopsis thaliana
  misc_feature (1)..(230): NCBI GI NO: 7486070 NR Description: hypothetical protein F24G24
  misc_feature (1)..(229): NCBI GI NO: 30725869 NR Description: RIKEN cDNA C730036B01 [Mus musculus]
MCKMAYDITSIISSLYYKGYGSLTKTQKLEWNNRGMSTIHAIFITVVSVYLVFFSNLFSDELDGLVTYRSSNLSNFTLGVSVGYFITDLAMILWAYPSLGGMEYVLHHMLSLISIVYAMYSGEGQLYTYMVLISETTTPGINLRWFLDTAGLKKSKAYLVNGVTMFIAWLVARIILFVYLFYHIYFHYDQVKQMHTFSCILIFAVPTILLVMNTMWFAKILRGLKKTLAKRQ

SEQ ID NO: 28888 - DNA, 1965 bp, Zea mays subsp. mays
  misc_feature (1)..(1965): Ceres Seq. ID no. 12406856
gtaggatcgtcacatgtttaccaactaataactagttaactactctcggtaccacgggtccacggcgggccgaactcgagcccctacgccgatcttatggagcttctctaatctaaaatatatacgatgtaaccttttctaatctaaaatatatacaatgtaacgtagaagtagattacatactgcagagtttagttcaattcctcgtaaactttttttatgcctccatccctgtttgcaaaaggtgcatcacttcgatcggcttcaagctccatgtctaagattcatggacatggatgaacatgaacgtgagatgacagatgaggtagaggcgtagggctcatgtgcgcacgcacgacaaccaccagctcatggatgaagcagctgatgaacgcttcccggcaaggccgccacggccgcgtcctccaccttctcttcacccacctacgacgcggcgacagaggggcgtggtagagctgcaccgcgcggccgtccccacggcactccgcgcctgcgcgcgcctcggaaacgcctcttccggccgcctaatccacgcgctcgtcctcacccggttcccgtccctcgcctccgacgccgtcgccgccaccgcgcttctcgacatgtacgccaaatgtggccttgtcgcgagtgcccagagggtgttcgacgaaatgccgagtagggatgacctcgtcgcctggaacgcgctggtcgcatgctacgcgcgccacgccctcccggagcgcgcactggtgctggctatcaaaatgcggggccagtgcctgtgccccgacctggtgacatggaacgccgtcgtctccggttttgcactggccggcgacgaccaaatggccacaaaattggtcggcgccatggaggtggacgggttccagccggacgtggtcacttggacatcgcttgtatccggctcggtgctgaacttccagtatgccagggcgcgcgtgctgttccggagaatgatgaccactgccaaccctgtcctgccgagctcggccacgattgccagcatcctgcctgcgttcgccaatgttgctgacgtgaagcgtggcaaggaagtccacgcctacgccgtggtgaccggcgtcgaacaggagctcaatgtgagcagtgctctagtagatatgtacacgaagagcgggtttgtggtcgaagcccgcaggctgtttgacaagatgtcggaaagaagcacggtgacatggaattccatgatcttcgggctggcgaattccggtcactgccaagaagccatcggtctcttcaaccggatgctgtgcgacggagcaaggccggatcacctgacgttcaccgccgctctgacggtttgcagctacgccggcatggtggagctcgggaagggcctgtaccgcgccatgcaggaagaacacggcatcgagccgaggctggagcattgtgcatgcatggtgcatttgcttggccgagccggctggctcgccgaggcttatgatttcatcaaagccatgcccctggggcctgactgcttcgtttggggggcgttgctgggggcatgccggagccatggcgacatcaagcttgccgagctggctgcgtcccacctgctaaccgtcgagccggccaatgcagcaagttgcctcctactctcggactcgctggcaagtgtaggcagacaagatgatgttatgaagatgaagaggctggcaaagagacggcgcatgaagaagctgcatggctgcagctggttagagtgagtctacataatcgagagcgatatatggtctgagatcaaaggaacagaattgattgatcacagattcatagttgcccagatttgcagaagcaaacatccaagagtttcctacaaatgcatgtgttggtctatttgatgctaccatgaaagtagaaatgttgtgctacttagatttaatggatgtaatgtttagcattcacactgtttactcaacgtcg

SEQ ID NO: 28889 - protein, 458 aa, Zea mays subsp. mays
  peptide (1)..(458): Ceres Seq. ID no. 12406857
  misc_feature (352)..(386): Pfam Name: Pfam Description:  PPR repeat
  misc_feature (31)..(458): NCBI GI NO: 34902102 NR Description: chloroplast import-associated channel proteinhomolog
  misc_feature (34)..(458): NCBI GI NO: 15238469 NR Description: putative protein; protein id: At5g59600.1
  misc_feature (176)..(458): NCBI GI NO: 34912348 NR Description: P0518F01.9
  misc_feature (1)..(188): NCBI GI NO: 34912348 NR Description: P0518F01.9
  misc_feature (35)..(173): NCBI GI NO: 34912348 NR Description: P0518F01.9
  misc_feature (84)..(458): NCBI GI NO: 15234045 NR Description: putative protein (fragment); protein id:At4g01030
  misc_feature (176)..(458): NCBI GI NO: 15237421 NR Description: putative protein; protein id: At5g16860.1
  misc_feature (45)..(186): NCBI GI NO: 15237421 NR Description: putative protein; protein id: At5g16860.1
  misc_feature (29)..(458): NCBI GI NO: 8671867 NR Description: Contains similarity to glycerine-rich protein fromNicotiana glauca gb|AF151215 and
  misc_feature (29)..(458): NCBI GI NO: 15220869 NR Description: hypothetical protein; protein id: At1g53600.1
MDEAADERFPARPPRPRPPPSLHPPTTRRQRGVVELHRAAVPTALRACARLGNASSGRLIHALVLTRFPSLASDAVAATALLDMYAKCGLVASAQRVFDEMPSRDDLVAWNALVACYARHALPERALVLAIKMRGQCLCPDLVTWNAVVSGFALAGDDQMATKLVGAMEVDGFQPDVVTWTSLVSGSVLNFQYARARVLFRRMMTTANPVLPSSATIASILPAFANVADVKRGKEVHAYAVVTGVEQELNVSSALVDMYTKSGFVVEARRLFDKMSERSTVTWNSMIFGLANSGHCQEAIGLFNRMLCDGARPDHLTFTAALTVCSYAGMVELGKGLYRAMQEEHGIEPRLEHCACMVHLLGRAGWLAEAYDFIKAMPLGPDCFVWGALLGACRSHGDIKLAELAASHLLTVEPANAASCLLLSDSLASVGRQDDVMKMKRLAKRRRMKKLHGCSWLE

SEQ ID NO: 28890 - protein, 375 aa, Zea mays subsp. mays
  peptide (1)..(375): Ceres Seq. ID no. 12406858
  misc_feature (269)..(303): Pfam Name: Pfam Description:  PPR repeat
  misc_feature (1)..(375): NCBI GI NO: 34902102 NR Description: chloroplast import-associated channel proteinhomolog
  misc_feature (1)..(375): NCBI GI NO: 15238469 NR Description: putative protein; protein id: At5g59600.1
  misc_feature (93)..(375): NCBI GI NO: 34912348 NR Description: P0518F01.9
  misc_feature (1)..(105): NCBI GI NO: 34912348 NR Description: P0518F01.9
  misc_feature (1)..(90): NCBI GI NO: 34912348 NR Description: P0518F01.9
  misc_feature (1)..(375): NCBI GI NO: 15234045 NR Description: putative protein (fragment); protein id:At4g01030
  misc_feature (93)..(375): NCBI GI NO: 15237421 NR Description: putative protein; protein id: At5g16860.1
  misc_feature (1)..(103): NCBI GI NO: 15237421 NR Description: putative protein; protein id: At5g16860.1
  misc_feature (1)..(375): NCBI GI NO: 8671867 NR Description: Contains similarity to glycerine-rich protein fromNicotiana glauca gb|AF151215 and
  misc_feature (1)..(375): NCBI GI NO: 15220869 NR Description: hypothetical protein; protein id: At1g53600.1
MYAKCGLVASAQRVFDEMPSRDDLVAWNALVACYARHALPERALVLAIKMRGQCLCPDLVTWNAVVSGFALAGDDQMATKLVGAMEVDGFQPDVVTWTSLVSGSVLNFQYARARVLFRRMMTTANPVLPSSATIASILPAFANVADVKRGKEVHAYAVVTGVEQELNVSSALVDMYTKSGFVVEARRLFDKMSERSTVTWNSMIFGLANSGHCQEAIGLFNRMLCDGARPDHLTFTAALTVCSYAGMVELGKGLYRAMQEEHGIEPRLEHCACMVHLLGRAGWLAEAYDFIKAMPLGPDCFVWGALLGACRSHGDIKLAELAASHLLTVEPANAASCLLLSDSLASVGRQDDVMKMKRLAKRRRMKKLHGCSWLE

SEQ ID NO: 28891 - protein, 358 aa, Zea mays subsp. mays
  peptide (1)..(358): Ceres Seq. ID no. 12406859
  misc_feature (252)..(286): Pfam Name: Pfam Description:  PPR repeat
  misc_feature (1)..(358): NCBI GI NO: 34902102 NR Description: chloroplast import-associated channel proteinhomolog
  misc_feature (1)..(358): NCBI GI NO: 15238469 NR Description: putative protein; protein id: At5g59600.1
  misc_feature (76)..(358): NCBI GI NO: 34912348 NR Description: P0518F01.9
  misc_feature (1)..(88): NCBI GI NO: 34912348 NR Description: P0518F01.9
  misc_feature (1)..(73): NCBI GI NO: 34912348 NR Description: P0518F01.9
  misc_feature (1)..(358): NCBI GI NO: 15234045 NR Description: putative protein (fragment); protein id:At4g01030
  misc_feature (76)..(358): NCBI GI NO: 15237421 NR Description: putative protein; protein id: At5g16860.1
  misc_feature (1)..(86): NCBI GI NO: 15237421 NR Description: putative protein; protein id: At5g16860.1
  misc_feature (1)..(358): NCBI GI NO: 8671867 NR Description: Contains similarity to glycerine-rich protein fromNicotiana glauca gb|AF151215 and
  misc_feature (1)..(358): NCBI GI NO: 15220869 NR Description: hypothetical protein; protein id: At1g53600.1
MPSRDDLVAWNALVACYARHALPERALVLAIKMRGQCLCPDLVTWNAVVSGFALAGDDQMATKLVGAMEVDGFQPDVVTWTSLVSGSVLNFQYARARVLFRRMMTTANPVLPSSATIASILPAFANVADVKRGKEVHAYAVVTGVEQELNVSSALVDMYTKSGFVVEARRLFDKMSERSTVTWNSMIFGLANSGHCQEAIGLFNRMLCDGARPDHLTFTAALTVCSYAGMVELGKGLYRAMQEEHGIEPRLEHCACMVHLLGRAGWLAEAYDFIKAMPLGPDCFVWGALLGACRSHGDIKLAELAASHLLTVEPANAASCLLLSDSLASVGRQDDVMKMKRLAKRRRMKKLHGCSWLE

SEQ ID NO: 28892 - DNA, 1868 bp, Zea mays subsp. mays
  misc_feature (1)..(1868): Ceres Seq. ID no. 12404960
cccgtcactcttgtgtcctcctaaaaccctaaccctccgccgcccctcggacccccaaccagcagctgccgcggccatccgccggcgagatggcgctgtacctgctgttcgagtcggcgtccggctacggtctattccacgcgtacggcatcgatgagatcgggcagagcgtggaggccgttcgctcctccgtgctggacctcgatcgcttcggcaaggccgtcaagctcaccgccttcaaccctttctcctctgccgtcgatgcactcaatcagtgcaacgcttatatccgaaggatcatgaccgatgaactgaggagtttcctggagctgaacctgccgaagcccaaggaggggaagaaggccaaatacagcctcggggtcgtcgagcccaaggtcggttctcacatctccgaggtcaccggcattccctgccagagcaacgaattcgtccaggagctgctccgcggtgtccgcctccacttcgaccgtttcatcaacgagcttaaggattctgacttggagaaggcccagcttggcctggggcatagctacagcagggccaaggtgaagttcaatgtgaatcgtgttgacaacatggtgatccaggcaatctttctattggatacgcttgacaaggacatcaattccttctccatgagagtcagggaatggttctcatggcacttccctgagcttgtcaagattgtgaacgacaattacctatatgccaagcttgctaagtttatcgtgaacaaatctgatttgacggaaaaagatattcctgctttggctgatatagttggcgacgaggacaaggctaaagaaattgttgaagcagcaaaggcttcaatgggccaggatctgtcaccagttgatttgatcaatgtccagcaatttgcccaaagggttatgaatctctctgagtatcgcaaaaacctttatgagtatcttgtgactaagatgaatgatattgcacccaacctgacatcgttgattggtgaagtagttggagctcgcctaatctctcatgctggcagtctttcaaaccttgctaagtgtgcagcctccacccttcaaatacttggtgctgagaaggccctattcagagcactgaaaactcgagggaacacaccaaagtatgggcttatattccactcctcctttattggccgtgcttcaactaagaacaagggcagaatggctcgttacctggcaaacaaatgctcgattgcttcacgcattgactgctactcggaggctagcacctctgtctttgggcaaaagttgcgtgagcaagtcgaggagagactggaattctatgacaagggtgttgcgcctcgtaaaaaccttgatgtgatgaaagccgctattgacagcatggtcaatggcacctcaatggatgatgatgatatcgagaagaccgatgcatctcccaagaaaagcaagaaaaagaagaccaaaaccaaggctgatggtgatgcaatggacgtggataaaccctccaacgttgctggtggagaagctgagcctggaactgagaagaagaagaagaaaaagaagcataagctggaggaggaggcacaggaggagaacggtgcagcagatactacccctaagaaaaagaaaaagaagagccgtgaagcttccgaagaagctgaacctaagaccgccaccgatggtaagaagaagaaaaagaaggctaaggccgaggatgatgagtagccaagttatttgttgtatggcgtatgaatccgagagtatttgttgaaaaacagagatgaacgcctgcctaactcaactagcttgtagttcatgaggcgtttgatgcaaacccaactcaaagtacgaagttttcctatcgtcttt

SEQ ID NO: 28893 - protein, 544 aa, Zea mays subsp. mays
  peptide (1)..(544): Ceres Seq. ID no. 12404961
  misc_feature (266)..(414): Pfam Name: Pfam Description:  Putative snoRNA binding domain
  misc_feature (1)..(537): NCBI GI NO: 34899158 NR Description: putative nucleolar protein
  misc_feature (1)..(519): NCBI GI NO: 15223458 NR Description: SAR DNA binding protein, putative
  misc_feature (1)..(466): NCBI GI NO: 15230621 NR Description: nucleolar protein, putative; protein id:At3g12860
  misc_feature (486)..(544): NCBI GI NO: 15230621 NR Description: nucleolar protein, putative; protein id:At3g12860
  misc_feature (466)..(522): NCBI GI NO: 15230621 NR Description: nucleolar protein, putative; protein id:At3g12860
  misc_feature (1)..(497): NCBI GI NO: 11994428 NR Description: nucleolar protein [Arabidopsis thaliana]
  misc_feature (72)..(517): NCBI GI NO: 3860319 NR Description: nucleolar protein [Cicer arietinum]
  misc_feature (3)..(543): NCBI GI NO: 14799394 NR Description: XNop56 protein [Xenopus laevis]
  misc_feature (1)..(308): NCBI GI NO: 34395308 NR Description: putative nucleolar protein
  misc_feature (3)..(542): NCBI GI NO: 15021886 NR Description: hypothetical protein [Macaca fascicularis]
MALYLLFESASGYGLFHAYGIDEIGQSVEAVRSSVLDLDRFGKAVKLTAFNPFSSAVDALNQCNAYIRRIMTDELRSFLELNLPKPKEGKKAKYSLGVVEPKVGSHISEVTGIPCQSNEFVQELLRGVRLHFDRFINELKDSDLEKAQLGLGHSYSRAKVKFNVNRVDNMVIQAIFLLDTLDKDINSFSMRVREWFSWHFPELVKIVNDNYLYAKLAKFIVNKSDLTEKDIPALADIVGDEDKAKEIVEAAKASMGQDLSPVDLINVQQFAQRVMNLSEYRKNLYEYLVTKMNDIAPNLTSLIGEVVGARLISHAGSLSNLAKCAASTLQILGAEKALFRALKTRGNTPKYGLIFHSSFIGRASTKNKGRMARYLANKCSIASRIDCYSEASTSVFGQKLREQVEERLEFYDKGVAPRKNLDVMKAAIDSMVNGTSMDDDDIEKTDASPKKSKKKKTKTKADGDAMDVDKPSNVAGGEAEPGTEKKKKKKKHKLEEEAQEENGAADTTPKKKKKKSREASEEAEPKTATDGKKKKKKAKAEDDE

SEQ ID NO: 28894 - protein, 474 aa, Zea mays subsp. mays
  peptide (1)..(474): Ceres Seq. ID no. 12404962
  misc_feature (196)..(344): Pfam Name: Pfam Description:  Putative snoRNA binding domain
  misc_feature (1)..(467): NCBI GI NO: 34899158 NR Description: putative nucleolar protein
  misc_feature (1)..(449): NCBI GI NO: 15223458 NR Description: SAR DNA binding protein, putative
  misc_feature (1)..(396): NCBI GI NO: 15230621 NR Description: nucleolar protein, putative; protein id:At3g12860
  misc_feature (416)..(474): NCBI GI NO: 15230621 NR Description: nucleolar protein, putative; protein id:At3g12860
  misc_feature (396)..(452): NCBI GI NO: 15230621 NR Description: nucleolar protein, putative; protein id:At3g12860
  misc_feature (1)..(427): NCBI GI NO: 11994428 NR Description: nucleolar protein [Arabidopsis thaliana]
  misc_feature (2)..(447): NCBI GI NO: 3860319 NR Description: nucleolar protein [Cicer arietinum]
  misc_feature (1)..(473): NCBI GI NO: 14799394 NR Description: XNop56 protein [Xenopus laevis]
  misc_feature (1)..(238): NCBI GI NO: 34395308 NR Description: putative nucleolar protein
  misc_feature (1)..(472): NCBI GI NO: 15021886 NR Description: hypothetical protein [Macaca fascicularis]
MTDELRSFLELNLPKPKEGKKAKYSLGVVEPKVGSHISEVTGIPCQSNEFVQELLRGVRLHFDRFINELKDSDLEKAQLGLGHSYSRAKVKFNVNRVDNMVIQAIFLLDTLDKDINSFSMRVREWFSWHFPELVKIVNDNYLYAKLAKFIVNKSDLTEKDIPALADIVGDEDKAKEIVEAAKASMGQDLSPVDLINVQQFAQRVMNLSEYRKNLYEYLVTKMNDIAPNLTSLIGEVVGARLISHAGSLSNLAKCAASTLQILGAEKALFRALKTRGNTPKYGLIFHSSFIGRASTKNKGRMARYLANKCSIASRIDCYSEASTSVFGQKLREQVEERLEFYDKGVAPRKNLDVMKAAIDSMVNGTSMDDDDIEKTDASPKKSKKKKTKTKADGDAMDVDKPSNVAGGEAEPGTEKKKKKKKHKLEEEAQEENGAADTTPKKKKKKSREASEEAEPKTATDGKKKKKKAKAEDDE

SEQ ID NO: 28895 - protein, 375 aa, Zea mays subsp. mays
  peptide (1)..(375): Ceres Seq. ID no. 12404963
  misc_feature (97)..(245): Pfam Name: Pfam Description:  Putative snoRNA binding domain
  misc_feature (1)..(368): NCBI GI NO: 34899158 NR Description: putative nucleolar protein
  misc_feature (1)..(350): NCBI GI NO: 15223458 NR Description: SAR DNA binding protein, putative
  misc_feature (1)..(297): NCBI GI NO: 15230621 NR Description: nucleolar protein, putative; protein id:At3g12860
  misc_feature (317)..(375): NCBI GI NO: 15230621 NR Description: nucleolar protein, putative; protein id:At3g12860
  misc_feature (297)..(353): NCBI GI NO: 15230621 NR Description: nucleolar protein, putative; protein id:At3g12860
  misc_feature (1)..(328): NCBI GI NO: 11994428 NR Description: nucleolar protein [Arabidopsis thaliana]
  misc_feature (1)..(348): NCBI GI NO: 3860319 NR Description: nucleolar protein [Cicer arietinum]
  misc_feature (1)..(374): NCBI GI NO: 14799394 NR Description: XNop56 protein [Xenopus laevis]
  misc_feature (1)..(139): NCBI GI NO: 34395308 NR Description: putative nucleolar protein
  misc_feature (1)..(373): NCBI GI NO: 15021886 NR Description: hypothetical protein [Macaca fascicularis]
MVIQAIFLLDTLDKDINSFSMRVREWFSWHFPELVKIVNDNYLYAKLAKFIVNKSDLTEKDIPALADIVGDEDKAKEIVEAAKASMGQDLSPVDLINVQQFAQRVMNLSEYRKNLYEYLVTKMNDIAPNLTSLIGEVVGARLISHAGSLSNLAKCAASTLQILGAEKALFRALKTRGNTPKYGLIFHSSFIGRASTKNKGRMARYLANKCSIASRIDCYSEASTSVFGQKLREQVEERLEFYDKGVAPRKNLDVMKAAIDSMVNGTSMDDDDIEKTDASPKKSKKKKTKTKADGDAMDVDKPSNVAGGEAEPGTEKKKKKKKHKLEEEAQEENGAADTTPKKKKKKSREASEEAEPKTATDGKKKKKKAKAEDDE

SEQ ID NO: 28896 - DNA, 1275 bp, Zea mays subsp. mays
  misc_feature (1)..(1275): Ceres Seq. ID no. 12366288
aaactatccgctgctgtagtagagatgctctcgatgcggccacccagcaccaccttgtcgcgccccttgatttggccgagacggggtcgcctcgggggagccgccgcgccgcaatatgttagcgccgcggcaccggcgcccgctctggagccagctgcgcctccggagagcgtctcctttccgattctggtgaatggctgcactggtaacatggggttatctgtcgctgaggctgctgctctgaggggccttcacctagtccctgtttcattcagtagtagagagaaggttgaaaaaacaatacaagttggacaaacagacattcaaatatatggtccttctaaaagagaagatgttgtttcatctattgctgatgaattcccagatgtcattgttgtggactacacaggacccaattctgtgaactctaatgctgagctctattgcaagcttggcttgccatttgtgatgggcacaactggtgggaacaagcatttgctctacaagtcagtgcaagattcaaaaaattatgcactaatatctccacagatgggcaaacaagtggttgcatttgttgctgctatgaaaatcatggctgagcagtttccaggggccttttcaggttatcatttagaggttttagaatcccatcaagctggcaagctggatacatctggtacagctaaagacgtgattgcttgttttgagaaactaggtgtgtcatatgatatgaaccggatggttaagattagagatccagaacagcagcttgagatggtgggtgtccctgaagaacacatccaagggcatgcattccatctgtatcatctcacttctcctgatgacagtgtttcatttgagttccagcacaatgtttgtggccgttcaatctatgccgaaggaactattgacgcggcaatgtttctgcataggaaggtgcaatcaaaggattctaagagaatatataatatggatgatgtcctgcgagaagaaacttgccataaagcctactgattagctgctgataaataatactccctccgttcttttttatttttcgctgtttagttcaaaaataaactagcgagcgacaaatattcaaggatggaggcaatattaagcacagcgctgttgtttttaccgttttttgttagaataatgcactgcgcaccttcacccattttagacttttgtgtaattgggttgaatatgagaggttcaataggaaaaaaatgacatgcttctagtgatggcaatcataatttaatattctcg

SEQ ID NO: 28897 - protein, 337 aa, Zea mays subsp. mays
  peptide (1)..(337): Ceres Seq. ID no. 12366289
  misc_feature (187)..(329): Pfam Name: Pfam Description:  Dihydrodipicolinate reductase, C-terminus
  misc_feature (53)..(330): NCBI GI NO: 18411368 NR Description: putative protein; protein id: At3g59890
  misc_feature (31)..(330): NCBI GI NO: 18406430 NR Description: expressed protein; protein id: At2g44040
  misc_feature (53)..(312): NCBI GI NO: 11357603 NR Description: hypothetical protein F24G16
  misc_feature (31)..(313): NCBI GI NO: 7486478 NR Description: hypothetical protein At2g44040
  misc_feature (96)..(228): NCBI GI NO: 282117 NR Description: dipicolinate reductase homolog - Coxiella burnetii
KLSAAVVEMLSMRPPSTTLSRPLIWPRRGRLGGAAAPQYVSAAAPAPALEPAAPPESVSFPILVNGCTGNMGLSVAEAAALRGLHLVPVSFSSREKVEKTIQVGQTDIQIYGPSKREDVVSSIADEFPDVIVVDYTGPNSVNSNAELYCKLGLPFVMGTTGGNKHLLYKSVQDSKNYALISPQMGKQVVAFVAAMKIMAEQFPGAFSGYHLEVLESHQAGKLDTSGTAKDVIACFEKLGVSYDMNRMVKIRDPEQQLEMVGVPEEHIQGHAFHLYHLTSPDDSVSFEFQHNVCGRSIYAEGTIDAAMFLHRKVQSKDSKRIYNMDDVLREETCHKAY

SEQ ID NO: 28898 - protein, 329 aa, Zea mays subsp. mays
  peptide (1)..(329): Ceres Seq. ID no. 12366290
  misc_feature (179)..(321): Pfam Name: Pfam Description:  Dihydrodipicolinate reductase, C-terminus
  misc_feature (45)..(322): NCBI GI NO: 18411368 NR Description: putative protein; protein id: At3g59890
  misc_feature (23)..(322): NCBI GI NO: 18406430 NR Description: expressed protein; protein id: At2g44040
  misc_feature (45)..(304): NCBI GI NO: 11357603 NR Description: hypothetical protein F24G16
  misc_feature (23)..(305): NCBI GI NO: 7486478 NR Description: hypothetical protein At2g44040
  misc_feature (88)..(220): NCBI GI NO: 282117 NR Description: dipicolinate reductase homolog - Coxiella burnetii
MLSMRPPSTTLSRPLIWPRRGRLGGAAAPQYVSAAAPAPALEPAAPPESVSFPILVNGCTGNMGLSVAEAAALRGLHLVPVSFSSREKVEKTIQVGQTDIQIYGPSKREDVVSSIADEFPDVIVVDYTGPNSVNSNAELYCKLGLPFVMGTTGGNKHLLYKSVQDSKNYALISPQMGKQVVAFVAAMKIMAEQFPGAFSGYHLEVLESHQAGKLDTSGTAKDVIACFEKLGVSYDMNRMVKIRDPEQQLEMVGVPEEHIQGHAFHLYHLTSPDDSVSFEFQHNVCGRSIYAEGTIDAAMFLHRKVQSKDSKRIYNMDDVLREETCHKAY

SEQ ID NO: 28899 - protein, 326 aa, Zea mays subsp. mays
  peptide (1)..(326): Ceres Seq. ID no. 12366291
  misc_feature (176)..(318): Pfam Name: Pfam Description:  Dihydrodipicolinate reductase, C-terminus
  misc_feature (42)..(319): NCBI GI NO: 18411368 NR Description: putative protein; protein id: At3g59890
  misc_feature (20)..(319): NCBI GI NO: 18406430 NR Description: expressed protein; protein id: At2g44040
  misc_feature (42)..(301): NCBI GI NO: 11357603 NR Description: hypothetical protein F24G16
  misc_feature (20)..(302): NCBI GI NO: 7486478 NR Description: hypothetical protein At2g44040
  misc_feature (85)..(217): NCBI GI NO: 282117 NR Description: dipicolinate reductase homolog - Coxiella burnetii
MRPPSTTLSRPLIWPRRGRLGGAAAPQYVSAAAPAPALEPAAPPESVSFPILVNGCTGNMGLSVAEAAALRGLHLVPVSFSSREKVEKTIQVGQTDIQIYGPSKREDVVSSIADEFPDVIVVDYTGPNSVNSNAELYCKLGLPFVMGTTGGNKHLLYKSVQDSKNYALISPQMGKQVVAFVAAMKIMAEQFPGAFSGYHLEVLESHQAGKLDTSGTAKDVIACFEKLGVSYDMNRMVKIRDPEQQLEMVGVPEEHIQGHAFHLYHLTSPDDSVSFEFQHNVCGRSIYAEGTIDAAMFLHRKVQSKDSKRIYNMDDVLREETCHKAY

SEQ ID NO: 28900 - DNA, 1706 bp, Zea mays subsp. mays
  misc_feature (1)..(1706): Ceres Seq. ID no. 12386684
agtcggtctctctcactctctcttgtctccaagtttgtaaccctagccgccaagcttgaagctccagccgtgctcgtgtagggccgcaggccatccgggctccggcttccagcatctaccaggcgtccttagaatacggtgcagcgagcagcaagtcgccgagcagccgagccaccgccgaacacagggcgccgccgagcagccgagccgccgccgagcgccgagtcttctctgagtgacttcggtacagacgacaaactttctccacacataccgcgccactccgccactcactgtgctgacggatggggtggtgctccccgtccacttcccggcagcttctctccacgacctcactcttcaccttcggcgcgggtctccttaccttcggcatccacctctcctacgtccacatcgagccccagcgcgctcgcacgctcgctcgggaccaattcgtccgtgactacctccgcaagaagcacgacaagtagcccgccttctgcggtccccaggtgattgcttggtagtcggagacgatggccctggtcccatcgaggtccgacagcgaggccttgatcccggaggtggagatgaatgccggcgccgaccagaccgcaacaacggcgcgggtcaccgtcgttcaggcgtcgtccgtgttctacgacacccctgcgactctcgataaagcggagaaattggtagcagaagcagctgggtatggttcacagttggttttgtttccggaagtctttgttggtggctacccacatggatctacctttggactggttgtcggcaatcgcactgccaagggaaaggaagactttcagaagtatcacgcatctgccatagatgtgcctggtccagaagtgtcccgcttatctgcattagctggaaaatataaggtgtttctggtgataggggtggttgagagggcaggatatacactttacaacacggtgctctccttcgatccactgggaaaatacctagggaagcaccgcaaggtcatgcctactgcactagaacgtgtattctgggggtttggagatggatctacaatacctgtctacgatactccgattggaaaaatgggtgctctcatttgctgggaaaacagaatgccacttctcaggacggccatgtatgccaaaggtattgagatatattgtgctcccacggttgattgcatgccaacttggctgtcttctatgacacatatcgcccttgaagggggatgctttgtgctgtcagcgtgccagttctgtcgtagaaagaactaccctccccctcccgagtacacattttgtggcctagaggaagagccatccccggaatccgttgtttgttctggagggagtgtcatcatctcaccattgggaacagtgttggcgggtcccaactacgaaagtgaggcccttctcactgctgacctggaccttggagagattgttcgagccaagtttgattttgacgtggtgggccactactcgcgacctgaggtgctgagtttagtggtgaagagcgatccaaagcccgccgtctctttcatctcagccgctggtagggatgatgactatgtgcagacctaatgacaaacatatctttggtctttagcttccttatacggcaatcgcatgcatctgtataattgtgggtttccggaacgttgcacgttccgtcagaataataataaactgttatgt

SEQ ID NO: 28901 - protein, 351 aa, Zea mays subsp. mays
  peptide (1)..(351): Ceres Seq. ID no. 12386685
  misc_feature (1)..(351): NCBI GI NO: 37654216 NR Description: nitrilase 1 [Zea mays]
  misc_feature (1)..(342): NCBI GI NO: 25290269 NR Description: nitrilase-like protein [imported] - rice
  misc_feature (1)..(344): NCBI GI NO: 37654214 NR Description: nitrilase 2 [Zea mays]
  misc_feature (1)..(344): NCBI GI NO: 7435980 NR Description: nitrilase (EC 3.5.5.1) 4B - common tobacco
  misc_feature (1)..(344): NCBI GI NO: 3914163 NR Description: NITRILASE 4
  misc_feature (1)..(349): NCBI GI NO: 15242205 NR Description: Nitrilase 4 (sp P46011); protein id: At5g22300
  misc_feature (1)..(349): NCBI GI NO: 21593970 NR Description: Nitrilase 4 (sp P46011) [Arabidopsis thaliana]
  misc_feature (26)..(347): NCBI GI NO: 25290266 NR Description: nitrilase (EC 3.5.5.1) 2
  misc_feature (26)..(347): NCBI GI NO: 15229932 NR Description: nitrilase 2; protein id: At3g44300
  misc_feature (26)..(347): NCBI GI NO: 25290267 NR Description: nitrilase (EC 3.5.5.1) 2
MALVPSRSDSEALIPEVEMNAGADQTATTARVTVVQASSVFYDTPATLDKAEKLVAEAAGYGSQLVLFPEVFVGGYPHGSTFGLVVGNRTAKGKEDFQKYHASAIDVPGPEVSRLSALAGKYKVFLVIGVVERAGYTLYNTVLSFDPLGKYLGKHRKVMPTALERVFWGFGDGSTIPVYDTPIGKMGALICWENRMPLLRTAMYAKGIEIYCAPTVDCMPTWLSSMTHIALEGGCFVLSACQFCRRKNYPPPPEYTFCGLEEEPSPESVVCSGGSVIISPLGTVLAGPNYESEALLTADLDLGEIVRAKFDFDVVGHYSRPEVLSLVVKSDPKPAVSFISAAGRDDDYVQT

SEQ ID NO: 28902 - protein, 333 aa, Zea mays subsp. mays
  peptide (1)..(333): Ceres Seq. ID no. 12386686
  misc_feature (1)..(333): NCBI GI NO: 37654216 NR Description: nitrilase 1 [Zea mays]
  misc_feature (1)..(324): NCBI GI NO: 25290269 NR Description: nitrilase-like protein [imported] - rice
  misc_feature (1)..(326): NCBI GI NO: 37654214 NR Description: nitrilase 2 [Zea mays]
  misc_feature (1)..(326): NCBI GI NO: 7435980 NR Description: nitrilase (EC 3.5.5.1) 4B - common tobacco
  misc_feature (1)..(326): NCBI GI NO: 3914163 NR Description: NITRILASE 4
  misc_feature (1)..(331): NCBI GI NO: 15242205 NR Description: Nitrilase 4 (sp P46011); protein id: At5g22300
  misc_feature (1)..(331): NCBI GI NO: 21593970 NR Description: Nitrilase 4 (sp P46011) [Arabidopsis thaliana]
  misc_feature (8)..(329): NCBI GI NO: 25290266 NR Description: nitrilase (EC 3.5.5.1) 2
  misc_feature (8)..(329): NCBI GI NO: 15229932 NR Description: nitrilase 2; protein id: At3g44300
  misc_feature (8)..(329): NCBI GI NO: 25290267 NR Description: nitrilase (EC 3.5.5.1) 2
MNAGADQTATTARVTVVQASSVFYDTPATLDKAEKLVAEAAGYGSQLVLFPEVFVGGYPHGSTFGLVVGNRTAKGKEDFQKYHASAIDVPGPEVSRLSALAGKYKVFLVIGVVERAGYTLYNTVLSFDPLGKYLGKHRKVMPTALERVFWGFGDGSTIPVYDTPIGKMGALICWENRMPLLRTAMYAKGIEIYCAPTVDCMPTWLSSMTHIALEGGCFVLSACQFCRRKNYPPPPEYTFCGLEEEPSPESVVCSGGSVIISPLGTVLAGPNYESEALLTADLDLGEIVRAKFDFDVVGHYSRPEVLSLVVKSDPKPAVSFISAAGRDDDYVQT

SEQ ID NO: 28903 - protein, 193 aa, Zea mays subsp. mays
  peptide (1)..(193): Ceres Seq. ID no. 12386687
  misc_feature (1)..(193): NCBI GI NO: 37654216 NR Description: nitrilase 1 [Zea mays]
  misc_feature (1)..(184): NCBI GI NO: 25290269 NR Description: nitrilase-like protein [imported] - rice
  misc_feature (1)..(186): NCBI GI NO: 37654214 NR Description: nitrilase 2 [Zea mays]
  misc_feature (1)..(186): NCBI GI NO: 7435980 NR Description: nitrilase (EC 3.5.5.1) 4B - common tobacco
  misc_feature (1)..(186): NCBI GI NO: 3914163 NR Description: NITRILASE 4
  misc_feature (1)..(191): NCBI GI NO: 15242205 NR Description: Nitrilase 4 (sp P46011); protein id: At5g22300
  misc_feature (1)..(191): NCBI GI NO: 21593970 NR Description: Nitrilase 4 (sp P46011) [Arabidopsis thaliana]
  misc_feature (1)..(189): NCBI GI NO: 25290266 NR Description: nitrilase (EC 3.5.5.1) 2
  misc_feature (1)..(189): NCBI GI NO: 15229932 NR Description: nitrilase 2; protein id: At3g44300
  misc_feature (1)..(189): NCBI GI NO: 25290267 NR Description: nitrilase (EC 3.5.5.1) 2
MPTALERVFWGFGDGSTIPVYDTPIGKMGALICWENRMPLLRTAMYAKGIEIYCAPTVDCMPTWLSSMTHIALEGGCFVLSACQFCRRKNYPPPPEYTFCGLEEEPSPESVVCSGGSVIISPLGTVLAGPNYESEALLTADLDLGEIVRAKFDFDVVGHYSRPEVLSLVVKSDPKPAVSFISAAGRDDDYVQT

SEQ ID NO: 28904 - DNA, 1437 bp, Zea mays subsp. mays
  misc_feature (1)..(1437): Ceres Seq. ID no. 12387026
aatcgaagcaaatacaagcagagagttttttttggagaggcgtgtaagcataggcagaagatacacagtagcctcttgttgaacacggggatggcaaggcagagtgcagcctccatgttggctactacgacgccgttgcttctcagcgtcttggccaacatcgccgtggtggagtccatcggggtgtcctacggcatgagcggcgacaacctgccgccggcgagcaccgtcatcggcatgtacaaggacaacggcatcccgctgatgcggatctacgcgccggaccaggcggctctccaggccgtgggcggcacgggcatccgcgtcgtggccggcgcgcccaatgacgtgctgtccagcctcgccgccagccccgccgcggccgcgtcgtgggtccgcaacaacatccaggcctaccccaaggtcgccttccgctgcgtctgcgtgggcaacgaggtggaaggcggcgcggcgcagagcctggtcccggccatggagaacgtccgcgccgcgctggtcgccgccgggctggacggcatcaaggtcaccacgtccgtgtcgcaggccatcctcggcggctacaagccgccgtccgccgccgagttcacggacgaggcgcaggggttcatgggccccgtcctcaggttcctggcgcgcaccggcgcgcctctcatggccagcgtctacccctacttcacctacgccaccaacccggctgccatggacctcagctacgcgctcttcaccgctccgggcaccgttctccaggacggcgcctacgagtaccagaacctcttcgacgccaccgtcgactccttctacgtggcgatggccaaccacgggggctccggcgtcacccttgtggtgtcggagagcgggtggccgtccgctggcggcgtcgcggcgtcacccgagaatgcggccatctacaaccagaacctgatcaaccacgtcggccggggaacgccgcgccacccgggcgccatcgagaccatcctcttctccatgttcaacgagaacctcaagcagagcggcgtggagcagaactgggggctcttctaccctaacatgcagcgcgtctaccccatcaagttcaactgaagctagctcaatcgaggtgcacgtccacgtaccctacagtctacacacatcaatcaataggtatatatgtatcactgcatgcaacctgtatacttatgcatcccagctgcaggcgatcatgtattgctttgcgaccaccaccgggagtgtctaaggaggctactctcagatgagtatgccatgaggattcttatacgtcgagtcgtcgagagaccaacgcatgggcaacgcgtgtgaagtgtgatcaatatttttctttgatttttttttgtgttttcactgaaattgaacttcgaataaaaaaaggcagctcttcggagggctgagggatttgtc

SEQ ID NO: 28905 - protein, 366 aa, Zea mays subsp. mays
  peptide (1)..(366): Ceres Seq. ID no. 12387027
  misc_feature (60)..(365): Pfam Name: Pfam Description:  Glycosyl hydrolases family 17
  misc_feature (31)..(365): NCBI GI NO: 100591 NR Description: licheninase (EC 3
  misc_feature (31)..(365): NCBI GI NO: 486849 NR Description: licheninase (EC 3.2.1.73) precursor - wheat
  misc_feature (31)..(365): NCBI GI NO: 13249140 NR Description: glucanase [Oryza sativa]
  misc_feature (31)..(365): NCBI GI NO: 288654 NR Description: (1-3, 1-4)-beta-glucanase [Avena sativa]
  misc_feature (31)..(365): NCBI GI NO: 100664 NR Description: beta-glucanase - rice
  misc_feature (31)..(365): NCBI GI NO: 854361 NR Description: beta-glucanase
  misc_feature (57)..(365): NCBI GI NO: 100592 NR Description: licheninase (EC 3
  misc_feature (57)..(365): NCBI GI NO: 840908 NR Description: beta glucanase [Triticum aestivum]
  misc_feature (31)..(365): NCBI GI NO: 228411 NR Description: beta glucanase:ISOTYPE=II
  misc_feature (57)..(365): NCBI GI NO: 121773 NR Description: LICHENASE II PRECURSOR
NRSKYKQRVFFGEACKHRQKIHSSLLLNTGMARQSAASMLATTTPLLLSVLANIAVVESIGVSYGMSGDNLPPASTVIGMYKDNGIPLMRIYAPDQAALQAVGGTGIRVVAGAPNDVLSSLAASPAAAASWVRNNIQAYPKVAFRCVCVGNEVEGGAAQSLVPAMENVRAALVAAGLDGIKVTTSVSQAILGGYKPPSAAEFTDEAQGFMGPVLRFLARTGAPLMASVYPYFTYATNPAAMDLSYALFTAPGTVLQDGAYEYQNLFDATVDSFYVAMANHGGSGVTLVVSESGWPSAGGVAASPENAAIYNQNLINHVGRGTPRHPGAIETILFSMFNENLKQSGVEQNWGLFYPNMQRVYPIKFN

SEQ ID NO: 28906 - protein, 336 aa, Zea mays subsp. mays
  peptide (1)..(336): Ceres Seq. ID no. 12387028
  misc_feature (30)..(335): Pfam Name: Pfam Description:  Glycosyl hydrolases family 17
  misc_feature (1)..(335): NCBI GI NO: 100591 NR Description: licheninase (EC 3
  misc_feature (1)..(335): NCBI GI NO: 486849 NR Description: licheninase (EC 3.2.1.73) precursor - wheat
  misc_feature (1)..(335): NCBI GI NO: 13249140 NR Description: glucanase [Oryza sativa]
  misc_feature (1)..(335): NCBI GI NO: 288654 NR Description: (1-3, 1-4)-beta-glucanase [Avena sativa]
  misc_feature (1)..(335): NCBI GI NO: 100664 NR Description: beta-glucanase - rice
  misc_feature (1)..(335): NCBI GI NO: 854361 NR Description: beta-glucanase
  misc_feature (27)..(335): NCBI GI NO: 100592 NR Description: licheninase (EC 3
  misc_feature (27)..(335): NCBI GI NO: 840908 NR Description: beta glucanase [Triticum aestivum]
  misc_feature (1)..(335): NCBI GI NO: 228411 NR Description: beta glucanase:ISOTYPE=II
  misc_feature (27)..(335): NCBI GI NO: 121773 NR Description: LICHENASE II PRECURSOR
MARQSAASMLATTTPLLLSVLANIAVVESIGVSYGMSGDNLPPASTVIGMYKDNGIPLMRIYAPDQAALQAVGGTGIRVVAGAPNDVLSSLAASPAAAASWVRNNIQAYPKVAFRCVCVGNEVEGGAAQSLVPAMENVRAALVAAGLDGIKVTTSVSQAILGGYKPPSAAEFTDEAQGFMGPVLRFLARTGAPLMASVYPYFTYATNPAAMDLSYALFTAPGTVLQDGAYEYQNLFDATVDSFYVAMANHGGSGVTLVVSESGWPSAGGVAASPENAAIYNQNLINHVGRGTPRHPGAIETILFSMFNENLKQSGVEQNWGLFYPNMQRVYPIKFN

SEQ ID NO: 28907 - protein, 328 aa, Zea mays subsp. mays
  peptide (1)..(328): Ceres Seq. ID no. 12387029
  misc_feature (22)..(327): Pfam Name: Pfam Description:  Glycosyl hydrolases family 17
  misc_feature (1)..(327): NCBI GI NO: 100591 NR Description: licheninase (EC 3
  misc_feature (1)..(327): NCBI GI NO: 486849 NR Description: licheninase (EC 3.2.1.73) precursor - wheat
  misc_feature (1)..(327): NCBI GI NO: 13249140 NR Description: glucanase [Oryza sativa]
  misc_feature (1)..(327): NCBI GI NO: 288654 NR Description: (1-3, 1-4)-beta-glucanase [Avena sativa]
  misc_feature (1)..(327): NCBI GI NO: 100664 NR Description: beta-glucanase - rice
  misc_feature (1)..(327): NCBI GI NO: 854361 NR Description: beta-glucanase
  misc_feature (19)..(327): NCBI GI NO: 100592 NR Description: licheninase (EC 3
  misc_feature (19)..(327): NCBI GI NO: 840908 NR Description: beta glucanase [Triticum aestivum]
  misc_feature (1)..(327): NCBI GI NO: 228411 NR Description: beta glucanase:ISOTYPE=II
  misc_feature (19)..(327): NCBI GI NO: 121773 NR Description: LICHENASE II PRECURSOR
MLATTTPLLLSVLANIAVVESIGVSYGMSGDNLPPASTVIGMYKDNGIPLMRIYAPDQAALQAVGGTGIRVVAGAPNDVLSSLAASPAAAASWVRNNIQAYPKVAFRCVCVGNEVEGGAAQSLVPAMENVRAALVAAGLDGIKVTTSVSQAILGGYKPPSAAEFTDEAQGFMGPVLRFLARTGAPLMASVYPYFTYATNPAAMDLSYALFTAPGTVLQDGAYEYQNLFDATVDSFYVAMANHGGSGVTLVVSESGWPSAGGVAASPENAAIYNQNLINHVGRGTPRHPGAIETILFSMFNENLKQSGVEQNWGLFYPNMQRVYPIKFN

SEQ ID NO: 28908 - DNA, 907 bp, Zea mays subsp. mays
  misc_feature (1)..(907): Ceres Seq. ID no. 12362307
atcagattgggagactcacttcactcactcgggagtcgggtcctcctcgactcagctcctccacaaacaaagccaccaccatcccaacccaaacacatcggccgaccacgggcgccgccatgtccaccgctgacgcggcgagcccggccctggcgccggactgggacgcgccggcgggcgaaggcctggccctggcccagttcgccgcgggctgcttctggagcgtggagctggtgtaccagcgcctcccaggcgtggcgcgcacggaggtggggtactcgcagggccaccgccacgcccccacctaccgcgacgtctgcggcaacggcacgggccacgccgaggtggtccgcgtgcactacgaccccaaggcctgcccctacgacgtcctcctcgacgtcttctgggccaagcacaaccccaccacgctcaacagacagggcaacgacgtcgggacgcagtaccggtcgggcatctactactacacggcagagcaggagacgctggcgcgcgagtcgctggctgcgaagcagaaggagtggcaggacgcgatcgtcaccgaggtcctgccggcgcgacggttctaccccgccgaggagtaccaccagcagtacctcgagaagggcgggcagtccgccaagaagggctgcagcgatcccatccgctgctacggttgagtaccgaccgacccctgtccggagcaccgaagacgccgtgaatgaactgtgctgcatcgatgcgttgtactacctccacctccgctctcgaatagttgttgcccgctagttcattttataactaaacgaccataaataaaaaagaacggagggaagatattgtaactaaagtgtaagatgacttttttgtgttgtgtatcgtactactgcttgttcagagatctacgttg

SEQ ID NO: 28909 - protein, 261 aa, Zea mays subsp. mays
  peptide (1)..(261): Ceres Seq. ID no. 12362308
  misc_feature (79)..(239): Pfam Name: Pfam Description:  Mucin-like glycoprotein
  misc_feature (6)..(239): NCBI GI NO: 29246775 NR Description: GLP_375_16023_15058 [Giardia lamblia ATCC 50803]
  misc_feature (18)..(240): NCBI GI NO: 1669674 NR Description: Microtubule-associated protein 4 [Gallus gallus]
IRLGDSLHSLGSRVLLDSAPPQTKPPPSQPKHIGRPRAPPCPPLTRRARPWRRTGTRRRAKAWPWPSSPRAASGAWSWCTSASQAWRARRWGTRRATATPPPTATSAATARATPRWSACTTTPRPAPTTSSSTSSGPSTTPPRSTDRATTSGRSTGRASTTTRQSRRRWRASRWLRSRRSGRTRSSPRSCRRDGSTPPRSTTSSTSRRAGSPPRRAAAIPSAATVEYRPTPVRSTEDAVNELCCIDALYYLHLRSRIVVAR

SEQ ID NO: 28910 - protein, 224 aa, Zea mays subsp. mays
  peptide (1)..(224): Ceres Seq. ID no. 12362309
  misc_feature (64)..(218): Pfam Name: Pfam Description:  Peptide methionine sulfoxide reductase
  misc_feature (41)..(224): NCBI GI NO: 38345255 NR Description: OSJNBb0011N17.16
  misc_feature (45)..(224): NCBI GI NO: 40019251 NR Description: peptide methionine sulfoxide reductase
  misc_feature (45)..(224): NCBI GI NO: 38345256 NR Description: OSJNBb0011N17.17
  misc_feature (43)..(224): NCBI GI NO: 37536896 NR Description: putative peptide methionine sulfoxide reductase
  misc_feature (37)..(224): NCBI GI NO: 1709692 NR Description: Peptide methionine sulfoxide reductase
  misc_feature (48)..(224): NCBI GI NO: 1709691 NR Description: Peptide methionine sulfoxide reductase
  misc_feature (40)..(224): NCBI GI NO: 31455408 NR Description: methionine sulfoxide reductase
  misc_feature (16)..(224): NCBI GI NO: 12230349 NR Description: Peptide methionine sulfoxide reductase
  misc_feature (40)..(224): NCBI GI NO: 11342533 NR Description: methionine sulfoxide reductase
  misc_feature (37)..(224): NCBI GI NO: 18424492 NR Description: peptide methionine sulfoxide reductase
QIGRLTSLTRESGPPRLSSSTNKATTIPTQTHRPTTGAAMSTADAASPALAPDWDAPAGEGLALAQFAAGCFWSVELVYQRLPGVARTEVGYSQGHRHAPTYRDVCGNGTGHAEVVRVHYDPKACPYDVLLDVFWAKHNPTTLNRQGNDVGTQYRSGIYYYTAEQETLARESLAAKQKEWQDAIVTEVLPARRFYPAEEYHQQYLEKGGQSAKKGCSDPIRCYG

SEQ ID NO: 28911 - protein, 185 aa, Zea mays subsp. mays
  peptide (1)..(185): Ceres Seq. ID no. 12362310
  misc_feature (25)..(179): Pfam Name: Pfam Description:  Peptide methionine sulfoxide reductase
  misc_feature (2)..(185): NCBI GI NO: 38345255 NR Description: OSJNBb0011N17.16
  misc_feature (6)..(185): NCBI GI NO: 40019251 NR Description: peptide methionine sulfoxide reductase
  misc_feature (6)..(185): NCBI GI NO: 38345256 NR Description: OSJNBb0011N17.17
  misc_feature (4)..(185): NCBI GI NO: 37536896 NR Description: putative peptide methionine sulfoxide reductase
  misc_feature (1)..(185): NCBI GI NO: 1709692 NR Description: Peptide methionine sulfoxide reductase
  misc_feature (9)..(185): NCBI GI NO: 1709691 NR Description: Peptide methionine sulfoxide reductase
  misc_feature (1)..(185): NCBI GI NO: 31455408 NR Description: methionine sulfoxide reductase
  misc_feature (1)..(185): NCBI GI NO: 12230349 NR Description: Peptide methionine sulfoxide reductase
  misc_feature (1)..(185): NCBI GI NO: 11342533 NR Description: methionine sulfoxide reductase
  misc_feature (1)..(185): NCBI GI NO: 18424492 NR Description: peptide methionine sulfoxide reductase
MSTADAASPALAPDWDAPAGEGLALAQFAAGCFWSVELVYQRLPGVARTEVGYSQGHRHAPTYRDVCGNGTGHAEVVRVHYDPKACPYDVLLDVFWAKHNPTTLNRQGNDVGTQYRSGIYYYTAEQETLARESLAAKQKEWQDAIVTEVLPARRFYPAEEYHQQYLEKGGQSAKKGCSDPIRCYG

SEQ ID NO: 28912 - DNA, 1488 bp, Zea mays subsp. mays
  misc_feature (1)..(1488): Ceres Seq. ID no. 13494410
aactccccaccccagccgatcccaacgcacactgcacccagtccggcggccgccggcaatggcggtgcacggcggcgactacctgcggcggttcgttgcggagacggagtggtwcaacgaggtcgtcctcaacgccgtggcgccaggcgactggtggcgcggcctgccgcacccggtgcagtcgtggatgcgcaactgcgtcggcggttacctcctctacttcatctctggtttcctctggtgtttcgtcatctactactggaagcgccacgcctacatccccaaagatgccatccccacaaacgaagctatgaagaagcaaatagctgtagcatccaaggctatgcctttttactgtgctcttccaactttatctgagtatatgatcgasagcggatggacccggtgttactttaatatcagcgaahtgggtttttctgcgtacctttgttatatggctatgtatctcatttttgtggagtttggaatttactggatgcacagagagttgcatgacataaagccactatacaaacatctgcatgcgacccaccatatttacaacaaggagaacaccttgtctccgtttgctggactcgcgtttcacccactggatggtattctgcaagcgataccgcatgtgcttgcgctcttcctcctcccaacgcacttcaggacgcacatcgctctcgtgttcttggagggcgtgtggacgacaaacatccacgactgcattcacggcaaggtatggccagtcatgggcgctgggtatcacaccatccaccatacgacttaccgccacaactatggccactacaccgtctggatggactggatgtttggtacgctccgtgagccagatgatatcctcaagaaggcctgagttcgtcgtagctgtggttttcctacggtgctggatgtgcttggtctgttstgtccccagtgcctctaatccgctgagcctgttcagcgctctgtttctgtaggctttggtgtgctatttagtttgctaggttttatatgttgtgcttattctgtaatttagtgatgtttgtctgatgacgcaacggagttcaggacgaataaaaagaaagatttsctacacacattctggattccaaaaaaaaaaaaaaaaaaaaaaaaaaaaaaaaaaaaaaaaaaaaaaaaaaaaaaaataaaaaaaaaaaaaaaaaaktttttttttttttttttgtctgttctaggtttagaagcctatgctatgctgctggttcacctaagcatttgktggaaggtaacaccaagcagccgtgaacagccacggtcacctgaggagccttctcgcagtgtctggatgtggttgtttgagcctctgaggggaaatgccctgcgcgcttctgtgcttctcgtgtttctacctggcaaccacgtgcacataattttaccagaatccgattgtttccattcgtgtagcagtatttctctataaaatgccagaaagtttcaggc

SEQ ID NO: 28913 - protein, 293 aa, Zea mays subsp. mays
  peptide (1)..(293): Ceres Seq. ID no. 15222928
  misc_feature (26)..(292): NCBI GI NO: 4426627 NR Description: sterol-C5(6)-desaturase homolog
  misc_feature (20)..(197): NCBI GI NO: 34895618 NR Description: putative sterol-C5(6)-desaturase
  misc_feature (232)..(292): NCBI GI NO: 34895618 NR Description: putative sterol-C5(6)-desaturase
  misc_feature (26)..(292): NCBI GI NO: 33301670 NR Description: Delta-7-sterol-C5
  misc_feature (27)..(286): NCBI GI NO: 5031219 NR Description: delta7 sterol C-5 desaturase
  misc_feature (27)..(286): NCBI GI NO: 15232935 NR Description: delta 7-sterol-C5-desaturase (STE1)
  misc_feature (27)..(286): NCBI GI NO: 21594971 NR Description: sterol-C5-desaturase [Arabidopsis thaliana]
  misc_feature (27)..(286): NCBI GI NO: 2129741 NR Description: C-5 sterol desaturase (EC 1
  misc_feature (20)..(286): NCBI GI NO: 15232937 NR Description: delta 7-sterol-C5-desaturase, putative
  misc_feature (67)..(286): NCBI GI NO: 25742651 NR Description: sterol-C5-desaturase
  misc_feature (38)..(38): Xaa is any aa, unknown or other
  misc_feature (130)..(130): Xaa is any aa, unknown or other
  misc_feature (143)..(143): Xaa is any aa, unknown or other
TPHPSRSQRTLHPVRRPPAMAVHGGDYLRRFVAETEWXNEVVLNAVAPGDWWRGLPHPVQSWMRNCVGGYLLYFISGFLWCFVIYYWKRHAYIPKDAIPTNEAMKKQIAVASKAMPFYCALPTLSEYMIXSGWTRCYFNISEXGFSAYLCYMAMYLIFVEFGIYWMHRELHDIKPLYKHLHATHHIYNKENTLSPFAGLAFHPLDGILQAIPHVLALFLLPTHFRTHIALVFLEGVWTTNIHDCIHGKVWPVMGAGYHTIHHTTYRHNYGHYTVWMDWMFGTLREPDDILKKA

SEQ ID NO: 28914 - protein, 274 aa, Zea mays subsp. mays
  peptide (1)..(274): Ceres Seq. ID no. 15222929
  misc_feature (7)..(273): NCBI GI NO: 4426627 NR Description: sterol-C5(6)-desaturase homolog
  misc_feature (1)..(178): NCBI GI NO: 34895618 NR Description: putative sterol-C5(6)-desaturase
  misc_feature (213)..(273): NCBI GI NO: 34895618 NR Description: putative sterol-C5(6)-desaturase
  misc_feature (7)..(273): NCBI GI NO: 33301670 NR Description: Delta-7-sterol-C5
  misc_feature (8)..(267): NCBI GI NO: 5031219 NR Description: delta7 sterol C-5 desaturase
  misc_feature (8)..(267): NCBI GI NO: 15232935 NR Description: delta 7-sterol-C5-desaturase (STE1)
  misc_feature (8)..(267): NCBI GI NO: 21594971 NR Description: sterol-C5-desaturase [Arabidopsis thaliana]
  misc_feature (8)..(267): NCBI GI NO: 2129741 NR Description: C-5 sterol desaturase (EC 1
  misc_feature (1)..(267): NCBI GI NO: 15232937 NR Description: delta 7-sterol-C5-desaturase, putative
  misc_feature (48)..(267): NCBI GI NO: 25742651 NR Description: sterol-C5-desaturase
  misc_feature (19)..(19): Xaa is any aa, unknown or other
  misc_feature (111)..(111): Xaa is any aa, unknown or other
  misc_feature (124)..(124): Xaa is any aa, unknown or other
MAVHGGDYLRRFVAETEWXNEVVLNAVAPGDWWRGLPHPVQSWMRNCVGGYLLYFISGFLWCFVIYYWKRHAYIPKDAIPTNEAMKKQIAVASKAMPFYCALPTLSEYMIXSGWTRCYFNISEXGFSAYLCYMAMYLIFVEFGIYWMHRELHDIKPLYKHLHATHHIYNKENTLSPFAGLAFHPLDGILQAIPHVLALFLLPTHFRTHIALVFLEGVWTTNIHDCIHGKVWPVMGAGYHTIHHTTYRHNYGHYTVWMDWMFGTLREPDDILKKA

SEQ ID NO: 28915 - protein, 231 aa, Zea mays subsp. mays
  peptide (1)..(231): Ceres Seq. ID no. 15222930
  misc_feature (1)..(230): NCBI GI NO: 4426627 NR Description: sterol-C5(6)-desaturase homolog
  misc_feature (1)..(135): NCBI GI NO: 34895618 NR Description: putative sterol-C5(6)-desaturase
  misc_feature (170)..(230): NCBI GI NO: 34895618 NR Description: putative sterol-C5(6)-desaturase
  misc_feature (1)..(230): NCBI GI NO: 33301670 NR Description: Delta-7-sterol-C5
  misc_feature (1)..(224): NCBI GI NO: 5031219 NR Description: delta7 sterol C-5 desaturase
  misc_feature (1)..(224): NCBI GI NO: 15232935 NR Description: delta 7-sterol-C5-desaturase (STE1)
  misc_feature (1)..(224): NCBI GI NO: 21594971 NR Description: sterol-C5-desaturase [Arabidopsis thaliana]
  misc_feature (1)..(224): NCBI GI NO: 2129741 NR Description: C-5 sterol desaturase (EC 1
  misc_feature (1)..(224): NCBI GI NO: 15232937 NR Description: delta 7-sterol-C5-desaturase, putative
  misc_feature (5)..(224): NCBI GI NO: 25742651 NR Description: sterol-C5-desaturase
  misc_feature (68)..(68): Xaa is any aa, unknown or other
  misc_feature (81)..(81): Xaa is any aa, unknown or other
MRNCVGGYLLYFISGFLWCFVIYYWKRHAYIPKDAIPTNEAMKKQIAVASKAMPFYCALPTLSEYMIXSGWTRCYFNISEXGFSAYLCYMAMYLIFVEFGIYWMHRELHDIKPLYKHLHATHHIYNKENTLSPFAGLAFHPLDGILQAIPHVLALFLLPTHFRTHIALVFLEGVWTTNIHDCIHGKVWPVMGAGYHTIHHTTYRHNYGHYTVWMDWMFGTLREPDDILKKA

SEQ ID NO: 28916 - DNA, 1419 bp, Zea mays subsp. mays
  misc_feature (1)..(1419): Ceres Seq. ID no. 12361440
gtcactttctctccggaggcgacgtgtcgagtggagcgacgtctccaccatcttcttggcttttcctccttccccgcccttccgaatttctccgcgatttcagcgcgcttcctcccgccggctcctccccccgcctccgctctcaccgcggccggccagccatggagcaaggccaggggccgccgccgccgaagccgcctgcgacggagcgcgacatcggattcgccgagcgggccgtggcggcggcaggcgcggccgtcgtgtccgccgtcctcgtcaaccccctcgacgtcgccaagacaaggttgcaagcacaagctgctggagttgtttataacccgatatggtcagattttaggtgctatccatcatgcagcactggtggaatcaatggtttaggcccatgctcggcctgcagtcctgaatgctttcagtacagaggaactatggatgtgttttctaaagtcactagacaggaaggaatttttagactatggagaggtactggtgcaagcctggcattggctgtaccaacggttggaatatatctgcctagttacgatttattgcgcaattggattgaagaatactcggaccgcaattgtcccaagcttcgaccatatgctcctcttatttctggctctattgcacgatcattggcatgcataacttgttgccctattgagttagcaagaacacgtatgcaggccttcaaagaatcgaatgttggagcgaagccccctggaatgtggaagaccttgataggtgtgctttcatcaagacagagcatcaagagccctgaaaacgtgcgaggataccacctcctatggactggtctgggagcgcaactagcacgcgatgcgccctactcagctatatgctggacagttcttgaaccaattagacgacatgtgacacgactattcggtgatcaaagcaacgcgacagttatattgggggcgaacttttctgcaggctttattgctggggttatctctgcgggcgctacctgccctcttgatgttgccaagacacgcagacaaatagagaaggatcctgaaagggtattgagcatgaacacaaggcgcatattgcttgaggtttggaggaaggaaggtgtggaaggtctgttcagaggcgcaggccctcgaatggggcgcgcaggcccgtcggtgggcatcgtcgtctcctcctacgaagttgtgaagcacctcatgcacaagaacacgagcaatgcagcagacctatgattcgatgagctcgattagcacgccctaatggcacaagtaggattaggaatgtcgctattcaaagaaacacatttttttacggtagtccatgacagataaatgttatccctccattccattacaaactgttacttctaagatgggtttttatgcatctagtggctagctt

SEQ ID NO: 28917 - protein, 415 aa, Zea mays subsp. mays
  peptide (1)..(415): Ceres Seq. ID no. 12361441
  misc_feature (129)..(407): NCBI GI NO: 34904154 NR Description: P0417G05.20
  misc_feature (67)..(407): NCBI GI NO: 40253478 NR Description: putative mitochondrial carrier protein
  misc_feature (68)..(411): NCBI GI NO: 18417093 NR Description: putative protein; protein id: At4g27940
  misc_feature (54)..(406): NCBI GI NO: 30690323 NR Description: mitochondrial carrier protein family
  misc_feature (54)..(406): NCBI GI NO: 19310377 NR Description: At2g46320/F11C10.1 [Arabidopsis thaliana]
  misc_feature (54)..(406): NCBI GI NO: 25408981 NR Description: hypothetical protein At2g46320
  misc_feature (158)..(406): NCBI GI NO: 30690327 NR Description: mitochondrial carrier protein family
  misc_feature (68)..(359): NCBI GI NO: 7486963 NR Description: hypothetical protein T13J8
  misc_feature (76)..(407): NCBI GI NO: 31242839 NR Description: ENSANGP00000020264 [Anopheles gambiae]
  misc_feature (53)..(408): NCBI GI NO: 28571261 NR Description: CG33075-PA [Drosophila melanogaster]
HFLSGGDVSSGATSPPSSWLFLLPRPSEFLRDFSALPPAGSSPRLRSHRGRPAMEQGQGPPPPKPPATERDIGFAERAVAAAGAAVVSAVLVNPLDVAKTRLQAQAAGVVYNPIWSDFRCYPSCSTGGINGLGPCSACSPECFQYRGTMDVFSKVTRQEGIFRLWRGTGASLALAVPTVGIYLPSYDLLRNWIEEYSDRNCPKLRPYAPLISGSIARSLACITCCPIELARTRMQAFKESNVGAKPPGMWKTLIGVLSSRQSIKSPENVRGYHLLWTGLGAQLARDAPYSAICWTVLEPIRRHVTRLFGDQSNATVILGANFSAGFIAGVISAGATCPLDVAKTRRQIEKDPERVLSMNTRRILLEVWRKEGVEGLFRGAGPRMGRAGPSVGIVVSSYEVVKHLMHKNTSNAADL

SEQ ID NO: 28918 - protein, 362 aa, Zea mays subsp. mays
  peptide (1)..(362): Ceres Seq. ID no. 12361442
  misc_feature (76)..(354): NCBI GI NO: 34904154 NR Description: P0417G05.20
  misc_feature (14)..(354): NCBI GI NO: 40253478 NR Description: putative mitochondrial carrier protein
  misc_feature (15)..(358): NCBI GI NO: 18417093 NR Description: putative protein; protein id: At4g27940
  misc_feature (1)..(353): NCBI GI NO: 30690323 NR Description: mitochondrial carrier protein family
  misc_feature (1)..(353): NCBI GI NO: 19310377 NR Description: At2g46320/F11C10.1 [Arabidopsis thaliana]
  misc_feature (1)..(353): NCBI GI NO: 25408981 NR Description: hypothetical protein At2g46320
  misc_feature (105)..(353): NCBI GI NO: 30690327 NR Description: mitochondrial carrier protein family
  misc_feature (15)..(306): NCBI GI NO: 7486963 NR Description: hypothetical protein T13J8
  misc_feature (23)..(354): NCBI GI NO: 31242839 NR Description: ENSANGP00000020264 [Anopheles gambiae]
  misc_feature (1)..(355): NCBI GI NO: 28571261 NR Description: CG33075-PA [Drosophila melanogaster]
MEQGQGPPPPKPPATERDIGFAERAVAAAGAAVVSAVLVNPLDVAKTRLQAQAAGVVYNPIWSDFRCYPSCSTGGINGLGPCSACSPECFQYRGTMDVFSKVTRQEGIFRLWRGTGASLALAVPTVGIYLPSYDLLRNWIEEYSDRNCPKLRPYAPLISGSIARSLACITCCPIELARTRMQAFKESNVGAKPPGMWKTLIGVLSSRQSIKSPENVRGYHLLWTGLGAQLARDAPYSAICWTVLEPIRRHVTRLFGDQSNATVILGANFSAGFIAGVISAGATCPLDVAKTRRQIEKDPERVLSMNTRRILLEVWRKEGVEGLFRGAGPRMGRAGPSVGIVVSSYEVVKHLMHKNTSNAADL

SEQ ID NO: 28919 - protein, 267 aa, Zea mays subsp. mays
  peptide (1)..(267): Ceres Seq. ID no. 12361443
  misc_feature (1)..(259): NCBI GI NO: 34904154 NR Description: P0417G05.20
  misc_feature (1)..(259): NCBI GI NO: 40253478 NR Description: putative mitochondrial carrier protein
  misc_feature (1)..(263): NCBI GI NO: 18417093 NR Description: putative protein; protein id: At4g27940
  misc_feature (1)..(258): NCBI GI NO: 30690323 NR Description: mitochondrial carrier protein family
  misc_feature (1)..(258): NCBI GI NO: 19310377 NR Description: At2g46320/F11C10.1 [Arabidopsis thaliana]
  misc_feature (1)..(258): NCBI GI NO: 25408981 NR Description: hypothetical protein At2g46320
  misc_feature (10)..(258): NCBI GI NO: 30690327 NR Description: mitochondrial carrier protein family
  misc_feature (1)..(211): NCBI GI NO: 7486963 NR Description: hypothetical protein T13J8
  misc_feature (1)..(259): NCBI GI NO: 31242839 NR Description: ENSANGP00000020264 [Anopheles gambiae]
  misc_feature (1)..(260): NCBI GI NO: 28571261 NR Description: CG33075-PA [Drosophila melanogaster]
MDVFSKVTRQEGIFRLWRGTGASLALAVPTVGIYLPSYDLLRNWIEEYSDRNCPKLRPYAPLISGSIARSLACITCCPIELARTRMQAFKESNVGAKPPGMWKTLIGVLSSRQSIKSPENVRGYHLLWTGLGAQLARDAPYSAICWTVLEPIRRHVTRLFGDQSNATVILGANFSAGFIAGVISAGATCPLDVAKTRRQIEKDPERVLSMNTRRILLEVWRKEGVEGLFRGAGPRMGRAGPSVGIVVSSYEVVKHLMHKNTSNAADL

SEQ ID NO: 28920 - DNA, 712 bp, Zea mays subsp. mays
  misc_feature (1)..(712): Ceres Seq. ID no. 12403665
acattttcaggtggagatggaacacatttacccaccattatcaaatctccagaagcacgtggctggacattttttggttgggacattatgaagcataaaatgaagcaaaaaagttacaggaacaaggtgctacagaggtccgcagctgttctgggatatgcagcacatgcagtcttgctcatagcttgctatctagatgtccccctccgatatcccttgcgctttggagggtcccgatcttatgtgagtgatcgcttgccttcagctgatacagcatcatcggctgctttagcaagtaccaggaacaccgaatcagaactaacagaataccctcttttcctggaatgccaagacgatgactccactagtgcctcctatgccatttatttattgcacaaggatacggagcagcttctgaactatgttggagctgagagctgtggaaggcacgtgtttggtaacctacgagaacttcttaggatcgtgcagtctgataagtttgtgtacagatgatggttccaatccatgtggttttggagtgcttatgctgtagatgtattatagagatgtaagtaggtgtttttcttttctcttcccattctttcgtgtgattcattccctctttccctgcgctaggttttttatatgtgcaggaaataggcaattatgtttttctagagaaatgaaatgtactcacacgtatggcttcttg

SEQ ID NO: 28921 - protein, 170 aa, Zea mays subsp. mays
  peptide (1)..(170): Ceres Seq. ID no. 12403666
  misc_feature (42)..(168): NCBI GI NO: 30685426 NR Description: expressed protein [Arabidopsis thaliana]
  misc_feature (42)..(133): NCBI GI NO: 20197059 NR Description: hypothetical protein [Arabidopsis thaliana]
  misc_feature (42)..(133): NCBI GI NO: 7486092 NR Description: hypothetical protein At2g32760
TFSGGDGTHLPTIIKSPEARGWTFFGWDIMKHKMKQKSYRNKVLQRSAAVLGYAAHAVLLIACYLDVPLRYPLRFGGSRSYVSDRLPSADTASSAALASTRNTESELTEYPLFLECQDDDSTSASYAIYLLHKDTEQLLNYVGAESCGRHVFGNLRELLRIVQSDKFVYR

SEQ ID NO: 28922 - protein, 141 aa, Zea mays subsp. mays
  peptide (1)..(141): Ceres Seq. ID no. 12403667
  misc_feature (13)..(139): NCBI GI NO: 30685426 NR Description: expressed protein [Arabidopsis thaliana]
  misc_feature (13)..(104): NCBI GI NO: 20197059 NR Description: hypothetical protein [Arabidopsis thaliana]
  misc_feature (13)..(104): NCBI GI NO: 7486092 NR Description: hypothetical protein At2g32760
MKHKMKQKSYRNKVLQRSAAVLGYAAHAVLLIACYLDVPLRYPLRFGGSRSYVSDRLPSADTASSAALASTRNTESELTEYPLFLECQDDDSTSASYAIYLLHKDTEQLLNYVGAESCGRHVFGNLRELLRIVQSDKFVYR

SEQ ID NO: 28923 - protein, 137 aa, Zea mays subsp. mays
  peptide (1)..(137): Ceres Seq. ID no. 12403668
  misc_feature (9)..(135): NCBI GI NO: 30685426 NR Description: expressed protein [Arabidopsis thaliana]
  misc_feature (9)..(100): NCBI GI NO: 20197059 NR Description: hypothetical protein [Arabidopsis thaliana]
  misc_feature (9)..(100): NCBI GI NO: 7486092 NR Description: hypothetical protein At2g32760
MKQKSYRNKVLQRSAAVLGYAAHAVLLIACYLDVPLRYPLRFGGSRSYVSDRLPSADTASSAALASTRNTESELTEYPLFLECQDDDSTSASYAIYLLHKDTEQLLNYVGAESCGRHVFGNLRELLRIVQSDKFVYR

SEQ ID NO: 28924 - DNA, 1062 bp, Zea mays subsp. mays
  misc_feature (1)..(1062): Ceres Seq. ID no. 12400985
  misc_feature (549)..(549): n is a, c, t, g, unknown, or other
  misc_feature (468)..(468): n is a, c, t, g, unknown, or other
  misc_feature (470)..(470): n is a, c, t, g, unknown, or other
  misc_feature (546)..(546): n is a, c, t, g, unknown, or other
  misc_feature (469)..(469): n is a, c, t, g, unknown, or other
  misc_feature (467)..(467): n is a, c, t, g, unknown, or other
  misc_feature (494)..(494): n is a, c, t, g, unknown, or other
  misc_feature (444)..(444): n is a, c, t, g, unknown, or other
  misc_feature (479)..(479): n is a, c, t, g, unknown, or other
  misc_feature (466)..(466): n is a, c, t, g, unknown, or other
  misc_feature (547)..(547): n is a, c, t, g, unknown, or other
  misc_feature (471)..(471): n is a, c, t, g, unknown, or other
  misc_feature (465)..(465): n is a, c, t, g, unknown, or other
  misc_feature (432)..(432): n is a, c, t, g, unknown, or other
  misc_feature (550)..(550): n is a, c, t, g, unknown, or other
  misc_feature (493)..(493): n is a, c, t, g, unknown, or other
  misc_feature (478)..(478): n is a, c, t, g, unknown, or other
agttcgaaaggttcaacttcaaacacactccaaactccaagcctcaataatctcgacctctgtaatgaccaagaagctcatctccatctccaccatggccgggaagcaaggttgcaaggagcagtccaatgatcggaggatccaggcttcgatccaaggagacgccaagagcgtggtggtggggttcggcggcaggctggtcacccgtgagcaggagcaggaggacgccatcatcgtcgcggcgctgcggcacgtggtgtccgggtacagcacgccgccgccggaggtcgtcgtcacggtggcgggcggggaggcgtgcgggacctgcggcatcgacgggtgcctcggctgcgacttcttcggggcgccggagctggcgcaggaggcagtggcctgcggcacatggcaggtggcgacgacggcgtcggtcgngggcgtgggcancggcggcggcgctgaggcccnnnnnnncgtaggnncaggaacatgtacnncggcgtgcggcagcggccgtggggcaagtgggcggcggagatccgcgatccnngnngcgcgcggcgcgcgtgtggctgggcacgttcgacaccgcggaggaggctgccagggcctacgactgcgccgcggtcgagttccgcggcccccgcgcgaagctcaacttcccgggccacgaggcgctgttccagggccacggcgacaccgcggcggcgaacaccgagacacagacgccgtcgccgtcgccgtcgccgggagagtggcagctgggcggcggagcaggagacgagctgtgggaaggtctacaggacctgatgaagcaggacgaggtggaccgctggctcgcgccggttttcggcgccgcgtctagtttttgagctattgtactgtgcacgcaagcgtggttactgacaggatcacagctagactgaccagcatatctagttggttcttttgtagcgtatttttttagggaaacatgattctttttttttgttgtcgtgtattgattgggatatagagagtttttttcctctcttgatggaagtagttggaaagctgtgttgatag

SEQ ID NO: 28925 - protein, 286 aa, Zea mays subsp. mays
  peptide (1)..(286): Ceres Seq. ID no. 12400986
  misc_feature (72)..(123): NCBI GI NO: 15235365 NR Description: putative protein; protein id: At4g34410
  misc_feature (144)..(144): Xaa is any aa, unknown or other
  misc_feature (148)..(148): Xaa is any aa, unknown or other
  misc_feature (155)..(155): Xaa is any aa, unknown or other
  misc_feature (156)..(156): Xaa is any aa, unknown or other
  misc_feature (157)..(157): Xaa is any aa, unknown or other
  misc_feature (159)..(159): Xaa is any aa, unknown or other
  misc_feature (160)..(160): Xaa is any aa, unknown or other
  misc_feature (164)..(164): Xaa is any aa, unknown or other
  misc_feature (165)..(165): Xaa is any aa, unknown or other
  misc_feature (182)..(182): Xaa is any aa, unknown or other
  misc_feature (183)..(183): Xaa is any aa, unknown or other
VRKVQLQTHSKLQASIISTSVMTKKLISISTMAGKQGCKEQSNDRRIQASIQGDAKSVVVGFGGRLVTREQEQEDAIIVAALRHVVSGYSTPPPEVVVTVAGGEACGTCGIDGCLGCDFFGAPELAQEAVACGTWQVATTASVXGVGXGGGAEAXXXVXXGTCXXACGSGRGASGRRRSAIXXARGARVAGHVRHRGGGCQGLRLRRGRVPRPPREAQLPGPRGAVPGPRRHRGGEHRDTDAVAVAVAGRVAAGRRSRRRAVGRSTGPDEAGRGGPLARAGFRRRV

SEQ ID NO: 28926 - protein, 265 aa, Zea mays subsp. mays
  peptide (1)..(265): Ceres Seq. ID no. 12400987
  misc_feature (51)..(102): NCBI GI NO: 15235365 NR Description: putative protein; protein id: At4g34410
  misc_feature (123)..(123): Xaa is any aa, unknown or other
  misc_feature (127)..(127): Xaa is any aa, unknown or other
  misc_feature (134)..(134): Xaa is any aa, unknown or other
  misc_feature (135)..(135): Xaa is any aa, unknown or other
  misc_feature (136)..(136): Xaa is any aa, unknown or other
  misc_feature (138)..(138): Xaa is any aa, unknown or other
  misc_feature (139)..(139): Xaa is any aa, unknown or other
  misc_feature (143)..(143): Xaa is any aa, unknown or other
  misc_feature (144)..(144): Xaa is any aa, unknown or other
  misc_feature (161)..(161): Xaa is any aa, unknown or other
  misc_feature (162)..(162): Xaa is any aa, unknown or other
MTKKLISISTMAGKQGCKEQSNDRRIQASIQGDAKSVVVGFGGRLVTREQEQEDAIIVAALRHVVSGYSTPPPEVVVTVAGGEACGTCGIDGCLGCDFFGAPELAQEAVACGTWQVATTASVXGVGXGGGAEAXXXVXXGTCXXACGSGRGASGRRRSAIXXARGARVAGHVRHRGGGCQGLRLRRGRVPRPPREAQLPGPRGAVPGPRRHRGGEHRDTDAVAVAVAGRVAAGRRSRRRAVGRSTGPDEAGRGGPLARAGFRRRV

SEQ ID NO: 28927 - protein, 255 aa, Zea mays subsp. mays
  peptide (1)..(255): Ceres Seq. ID no. 12400988
  misc_feature (41)..(92): NCBI GI NO: 15235365 NR Description: putative protein; protein id: At4g34410
  misc_feature (113)..(113): Xaa is any aa, unknown or other
  misc_feature (117)..(117): Xaa is any aa, unknown or other
  misc_feature (124)..(124): Xaa is any aa, unknown or other
  misc_feature (125)..(125): Xaa is any aa, unknown or other
  misc_feature (126)..(126): Xaa is any aa, unknown or other
  misc_feature (128)..(128): Xaa is any aa, unknown or other
  misc_feature (129)..(129): Xaa is any aa, unknown or other
  misc_feature (133)..(133): Xaa is any aa, unknown or other
  misc_feature (134)..(134): Xaa is any aa, unknown or other
  misc_feature (151)..(151): Xaa is any aa, unknown or other
  misc_feature (152)..(152): Xaa is any aa, unknown or other
MAGKQGCKEQSNDRRIQASIQGDAKSVVVGFGGRLVTREQEQEDAIIVAALRHVVSGYSTPPPEVVVTVAGGEACGTCGIDGCLGCDFFGAPELAQEAVACGTWQVATTASVXGVGXGGGAEAXXXVXXGTCXXACGSGRGASGRRRSAIXXARGARVAGHVRHRGGGCQGLRLRRGRVPRPPREAQLPGPRGAVPGPRRHRGGEHRDTDAVAVAVAGRVAAGRRSRRRAVGRSTGPDEAGRGGPLARAGFRRRV

SEQ ID NO: 28928 - DNA, 1101 bp, Zea mays subsp. mays
  misc_feature (1)..(1101): Ceres Seq. ID no. 12350018
ctcccagcatccgtatccctccatcagtccctcgggccatccctagcttcatcccaattcttgttcgtgcagctgctcgtggcagcctgagaccaggcgcgaggatgctggcggtgttcagcggcgaggtggtggaggtgccggcggagctggtggcggcggggagccggacgccgtcgcccaagacgaaggcgtccgagctcgtcgcgcgcttcctggggaccagctgccccgccgccgtgtccgtgcgcctcgccgacctcggccacctcgcctactcccacgccaaccaggccctcctccgcccaaggtcgttcgcggcgaaggacgaggtgttctgcctgttcgagggggtgctggacaacctggggcggctgagccagcagtacgggctgtccaagggcgccaacgaggtgctcctggtcatcgaggcctacaaggcgctgcgggaccgggcgccgtacccggccagcctcatgctcgcgcagctcgccggcgcctacgccttcgtgctcttcgacgcgtccaccaactcgctcctcgtcgcgtcgggcggcgacgtgcccctcttctggggcgtcaccgccgacggctgcgtcgccttctccgacgacatcgacgtgctcaaaggctcctgcggcaagtccctcgcgcctttcccgcaaggttgcttctactctaatgcccttggaggattgaagtgctacgagaatcccaagaacaaagtgactgccgttcctgcaaacgaggaggaaatctgcggcgcaaccttccaggtggaaggggctacggtgctcacagcgctgcattaggagatgaggtgtcttcctccgtctccaggcctggactgggggcaactgtacatggtgcctggtggtgtaatgtaacataacggcaatggcatatgcagctgatcctggtctgcctgtatcatctcctcccacccgtaaagagaagttctttctgccgccatcgccatggtcagtcagagcttctctgctatagctgctggatgtgttgtgtgttgcgtctgtatcgtctctagtttgttcgacttacgtggaaacctgagatcagaccgggtatcgagcggctgcttgc

SEQ ID NO: 28929 - protein, 269 aa, Zea mays subsp. mays
  peptide (1)..(269): Ceres Seq. ID no. 12350019
  misc_feature (36)..(255): NCBI GI NO: 7489671 NR Description: hypothetical protein wali7 - wheat (fragment)
  misc_feature (35)..(265): NCBI GI NO: 15239658 NR Description: aluminium-induced protein - like
  misc_feature (35)..(267): NCBI GI NO: 7488881 NR Description: hypothetical protein ARG10 - mung bean
  misc_feature (35)..(260): NCBI GI NO: 7488440 NR Description: aluminum-induced protein - rape
  misc_feature (35)..(267): NCBI GI NO: 13958130 NR Description: aluminium induced protein [Avicennia marina]
  misc_feature (35)..(267): NCBI GI NO: 34541994 NR Description: Al-induced protein [Gossypium hirsutum]
  misc_feature (35)..(263): NCBI GI NO: 20340249 NR Description: aluminum-induced protein-like protein
  misc_feature (22)..(260): NCBI GI NO: 30017570 NR Description: unknown protein
  misc_feature (35)..(263): NCBI GI NO: 15239993 NR Description: aluminum-induced protein-like
  misc_feature (35)..(260): NCBI GI NO: 15228883 NR Description: unknown protein; protein id: At3g22850
PSIRIPPSVPRAIPSFIPILVRAAARGSLRPGARMLAVFSGEVVEVPAELVAAGSRTPSPKTKASELVARFLGTSCPAAVSVRLADLGHLAYSHANQALLRPRSFAAKDEVFCLFEGVLDNLGRLSQQYGLSKGANEVLLVIEAYKALRDRAPYPASLMLAQLAGAYAFVLFDASTNSLLVASGGDVPLFWGVTADGCVAFSDDIDVLKGSCGKSLAPFPQGCFYSNALGGLKCYENPKNKVTAVPANEEEICGATFQVEGATVLTALH

SEQ ID NO: 28930 - protein, 235 aa, Zea mays subsp. mays
  peptide (1)..(235): Ceres Seq. ID no. 12350020
  misc_feature (2)..(221): NCBI GI NO: 7489671 NR Description: hypothetical protein wali7 - wheat (fragment)
  misc_feature (1)..(231): NCBI GI NO: 15239658 NR Description: aluminium-induced protein - like
  misc_feature (1)..(233): NCBI GI NO: 7488881 NR Description: hypothetical protein ARG10 - mung bean
  misc_feature (1)..(226): NCBI GI NO: 7488440 NR Description: aluminum-induced protein - rape
  misc_feature (1)..(233): NCBI GI NO: 13958130 NR Description: aluminium induced protein [Avicennia marina]
  misc_feature (1)..(233): NCBI GI NO: 34541994 NR Description: Al-induced protein [Gossypium hirsutum]
  misc_feature (1)..(229): NCBI GI NO: 20340249 NR Description: aluminum-induced protein-like protein
  misc_feature (1)..(226): NCBI GI NO: 30017570 NR Description: unknown protein
  misc_feature (1)..(229): NCBI GI NO: 15239993 NR Description: aluminum-induced protein-like
  misc_feature (1)..(226): NCBI GI NO: 15228883 NR Description: unknown protein; protein id: At3g22850
MLAVFSGEVVEVPAELVAAGSRTPSPKTKASELVARFLGTSCPAAVSVRLADLGHLAYSHANQALLRPRSFAAKDEVFCLFEGVLDNLGRLSQQYGLSKGANEVLLVIEAYKALRDRAPYPASLMLAQLAGAYAFVLFDASTNSLLVASGGDVPLFWGVTADGCVAFSDDIDVLKGSCGKSLAPFPQGCFYSNALGGLKCYENPKNKVTAVPANEEEICGATFQVEGATVLTALH

SEQ ID NO: 28931 - DNA, 743 bp, Zea mays subsp. mays
  misc_feature (1)..(743): Ceres Seq. ID no. 12343252
aaaaaagccaaaagcccgaaaccagaggcgggtagggttctagctgcaggcgacggccatggccgcctccgccgccgccccggcgctgcttcgacgcctcttctgcagctctattccagcctcctcctccgtactgcgcgctaccttttgctcctccgccggcttcggctcgtcttctccgtcctccatattcggcgacgccaccgaggtcgccaacgtgccaccgctcaccacgcccaacctcttcgtcagtggcctttcaaggttaacgacagatgagaagctccagggtgcatttgctcctttcgggaggctccttgaagcaaaagtggtgacggatagagtttctgggaggtcaaagggtttcggtttcgtgagatatgccaccatagaagaggccgagagagcgcggcaggagatgaacgccaagttcctggatggatgggtcatcttcgttgaccctgccaagccaaggcagccaaagcccgctcctcagcaggacactggttcatcgcatgctggcttcacgacgaacaagactgtaggatggtgcggctaggctcattgatctgtcgcgatatttcacggcacaaaacttggattgcaggggtggatctaggggtgttagtcacccggataaaatttataaattctttagaaaaacacagttaaagttcaagaaaatttgtatcatgtagcaaacctgaccttgctacccgataatatttttggttagattcgcc

SEQ ID NO: 28932 - protein, 166 aa, Zea mays subsp. mays
  peptide (1)..(166): Ceres Seq. ID no. 12343253
  misc_feature (62)..(133): Pfam Name: a.k.a. RRM, RBD, or RNP domain Pfam Description: RNA recognition motif.
  misc_feature (38)..(165): NCBI GI NO: 15224298 NR Description: RRM-containing protein; protein id: At2g37510
  misc_feature (1)..(160): NCBI GI NO: 15239676 NR Description: RRM-containing protein; protein id: At5g54580
  misc_feature (55)..(149): NCBI GI NO: 38636774 NR Description: putative RNA recognition motif
  misc_feature (56)..(153): NCBI GI NO: 34898598 NR Description: P0534A03.25
  misc_feature (37)..(145): NCBI GI NO: 18402803 NR Description: expressed protein; protein id: At3g20930
  misc_feature (59)..(139): NCBI GI NO: 38344030 NR Description: OJ991214_12.1
  misc_feature (31)..(148): NCBI GI NO: 15219486 NR Description: RRM-containing RNA-binding protein, putative
  misc_feature (62)..(140): NCBI GI NO: 15239958 NR Description: RRM-containing protein; protein id: At5g06210
  misc_feature (29)..(141): NCBI GI NO: 34906972 NR Description: putative glycine-rich RNA-binding protein 2
  misc_feature (63)..(139): NCBI GI NO: 21388658 NR Description: glycine-rich RNA binding protein
MAASAAAPALLRRLFCSSIPASSSVLRATFCSSAGFGSSSPSSIFGDATEVANVPPLTTPNLFVSGLSRLTTDEKLQGAFAPFGRLLEAKVVTDRVSGRSKGFGFVRYATIEEAERARQEMNAKFLDGWVIFVDPAKPRQPKPAPQQDTGSSHAGFTTNKTVGWCG

SEQ ID NO: 28933 - protein, 92 aa, Zea mays subsp. mays
  peptide (1)..(92): Ceres Seq. ID no. 12343254
KKAKSPKPEAGRVLAAGDGHGRLRRRPGAASTPLLQLYSSLLLRTARYLLLLRRLRLVFSVLHIRRRHRGRQRATAHHAQPLRQWPFKVNDR

SEQ ID NO: 28934 - DNA, 654 bp, Zea mays subsp. mays
  misc_feature (1)..(654): Ceres Seq. ID no. 12401179
aagactggcgaaacgcgttgttttcctcttttccccaaggcaaccaaaccatctcgattctcgactcgtggggaagtttcgctctcgccggcgtcgacggcctagggttcgaggaacgtccgtccgtccgtccggggaaggagcggtagggaggcggagatgatcgaggtggtgctcaacgaccgcctggggaagaaggtgcgggtcaagtgcaacgaggacgacaccatcggcgacctcaagaagctggtggcggcgcagacgggggacgcgccccgagaagatccgcatccagaagtggtacaacatctacaaggaccacatcaccctcaaggactacgaggtccacgacggcatgggcctcgagctctactacaactgagccgccgcccctctctccctctcgtcaggttggtctgaattctgaagtcatgggtgcaattcgcttcgcggtgatctcttaagctcatcacatatataaaagcaacctcagtgggctatgtaagacatggcgtgccaaactatcagtgaccactgacagctttgcaatacgttgttgtatggtcaacctgcaaacttggtgtactgctactcgtactataaataacatagggttttaaccttggttgtggtaatggtcatcttttctcattc

SEQ ID NO: 28935 - protein, 86 aa, Zea mays subsp. mays
  peptide (1)..(86): Ceres Seq. ID no. 12401180
  misc_feature (1)..(41): NCBI GI NO: 15230632 NR Description: putative protein; protein id: At3g45180.1
  misc_feature (1)..(36): NCBI GI NO: 15238924 NR Description: ubiquitin-like protein; protein id: At5g42300
  misc_feature (1)..(36): NCBI GI NO: 23482066 NR Description: ubiquitin-like protein [Plasmodium yoelii yoelii]
  misc_feature (1)..(36): NCBI GI NO: 23509060 NR Description: ubiquitin-like protein, putative
  misc_feature (1)..(36): NCBI GI NO: 40889756 NR Description: Chain A
  misc_feature (1)..(36): NCBI GI NO: 38492721 NR Description: Chain A
  misc_feature (1)..(36): NCBI GI NO: 13236510 NR Description: ubiquitin-like 5 [Homo sapiens]
  misc_feature (1)..(36): NCBI GI NO: 30585153 NR Description: Homo sapiens ubiquitin-like 5
  misc_feature (1)..(36): NCBI GI NO: 33416599 NR Description: Unknown (protein for MGC:66388) [Danio rerio]
  misc_feature (1)..(36): NCBI GI NO: 17507389 NR Description: UBiquitin-Like family UBL-5 (8.7 kD) (ubl-5)
MIEVVLNDRLGKKVRVKCNEDDTIGDLKKLVAAQTGDAPREDPHPEVVQHLQGPHHPQGLRGPRRHGPRALLQLSRRPSLPLVRLV

SEQ ID NO: 28936 - protein, 53 aa, Zea mays subsp. mays
  peptide (1)..(53): Ceres Seq. ID no. 12401181
RLAKRVVFLFSPRQPNHLDSRLVGKFRSRRRRRPRVRGTSVRPSGEGAVGRRR

SEQ ID NO: 28937 - protein, 48 aa, Zea mays subsp. mays
  peptide (1)..(48): Ceres Seq. ID no. 12401182
DWRNALFSSFPQGNQTISILDSWGSFALAGVDGLGFEERPSVRPGKER

SEQ ID NO: 28938 - DNA, 712 bp, Zea mays subsp. mays
  misc_feature (1)..(712): Ceres Seq. ID no. 12343010
gctagcggtccgcacccactcacccgttgcctccaaactcatttctcccgagcgccgccgcgagcctctgttccagcttcgttcatggcttccctcaccggatccgctctctcctttgcgaggcccgtcaaggcaatcagcattaagtctgtctctttctctggtctaaggaaggataatgtagccttccgcttgcagccagtgccacaaagattcgctgtctgctgtcctgctaaaaaggagactgtggatcgggtttgtgatattgtcaagaagcagcttgcacttcctgagggcactgaggtctgtggctcctctaagtttcaagacctcggtgctgattcgttggacactgttgagattgttatgggccttgaggaggctttcaagatcactgtagaggagtcgagcgcgcagtcaatcgcaactgtggaagatgctgctaatctcatcgacgaacttgttgcaggagcagcaaaatcgtgttaaactcgtggtcgtattgcgttgggtgctgtaccagggcatcacttgttgttctatgcccccttccctactagattttcttttctaccctgggcctggagagatgtttctgtcatgactgtcattgtggatctcgcgatattgttatattgaagcttttgtgcttgttcaagaaaagaaaatgttgttgcgatatatatgttattatattgaatttttttttgtc

SEQ ID NO: 28939 - protein, 162 aa, Zea mays subsp. mays
  peptide (1)..(162): Ceres Seq. ID no. 12343011
  misc_feature (84)..(151): Pfam Name: Pfam Description:  Phosphopantetheine attachment site
  misc_feature (29)..(155): NCBI GI NO: 113169 NR Description: Acyl carrier protein II, chloroplast precursor
  misc_feature (29)..(161): NCBI GI NO: 113172 NR Description: Acyl carrier protein III, chloroplast precursor
  misc_feature (51)..(161): NCBI GI NO: 166975 NR Description: acyl carrier protein III precursor
  misc_feature (43)..(159): NCBI GI NO: 7442270 NR Description: acyl carrier protein - maize
  misc_feature (29)..(155): NCBI GI NO: 2465010 NR Description: acyl carrier protein [Fragaria vesca]
  misc_feature (50)..(154): NCBI GI NO: 30102979 NR Description: putative acyl carrier protein, 3'-partial
  misc_feature (29)..(155): NCBI GI NO: 20137323 NR Description: Acyl carrier protein 1, chloroplast precursor
  misc_feature (29)..(159): NCBI GI NO: 16518983 NR Description: acyl carrier protein [Olea europaea]
  misc_feature (26)..(155): NCBI GI NO: 113165 NR Description: Acyl carrier protein I, chloroplast precursor
  misc_feature (29)..(154): NCBI GI NO: 5669599 NR Description: acyl carrier protein [Coriandrum sativum]
ASGPHPLTRCLQTHFSRAPPRASVPASFMASLTGSALSFARPVKAISIKSVSFSGLRKDNVAFRLQPVPQRFAVCCPAKKETVDRVCDIVKKQLALPEGTEVCGSSKFQDLGADSLDTVEIVMGLEEAFKITVEESSAQSIATVEDAANLIDELVAGAAKSC

SEQ ID NO: 28940 - protein, 134 aa, Zea mays subsp. mays
  peptide (1)..(134): Ceres Seq. ID no. 12343012
  misc_feature (56)..(123): Pfam Name: Pfam Description:  Phosphopantetheine attachment site
  misc_feature (1)..(127): NCBI GI NO: 113169 NR Description: Acyl carrier protein II, chloroplast precursor
  misc_feature (1)..(133): NCBI GI NO: 113172 NR Description: Acyl carrier protein III, chloroplast precursor
  misc_feature (23)..(133): NCBI GI NO: 166975 NR Description: acyl carrier protein III precursor
  misc_feature (15)..(131): NCBI GI NO: 7442270 NR Description: acyl carrier protein - maize
  misc_feature (1)..(127): NCBI GI NO: 2465010 NR Description: acyl carrier protein [Fragaria vesca]
  misc_feature (22)..(126): NCBI GI NO: 30102979 NR Description: putative acyl carrier protein, 3'-partial
  misc_feature (1)..(127): NCBI GI NO: 20137323 NR Description: Acyl carrier protein 1, chloroplast precursor
  misc_feature (1)..(131): NCBI GI NO: 16518983 NR Description: acyl carrier protein [Olea europaea]
  misc_feature (1)..(127): NCBI GI NO: 113165 NR Description: Acyl carrier protein I, chloroplast precursor
  misc_feature (1)..(126): NCBI GI NO: 5669599 NR Description: acyl carrier protein [Coriandrum sativum]
MASLTGSALSFARPVKAISIKSVSFSGLRKDNVAFRLQPVPQRFAVCCPAKKETVDRVCDIVKKQLALPEGTEVCGSSKFQDLGADSLDTVEIVMGLEEAFKITVEESSAQSIATVEDAANLIDELVAGAAKSC

SEQ ID NO: 28941 - DNA, 1024 bp, Zea mays subsp. mays
  misc_feature (1)..(1024): Ceres Seq. ID no. 12462326
gcttctagcaagagcacgaacgagggccaagcgctccaaaaccagcgacgtggaagcgcctgcgccgcgagcatccttcctgagcgcggggccaagcagagcagtgcaagcagcatatggcgcgccgtgccagcctgctcctcgccgcggcgctgctcgtcgccgtcgctgccgcggcggtgccgccgacgtgcgagcgcatcgagtgcccggcgtacgaggtggtggacagcgccaacgggttcgagatccggcggtacacggacgccatgtggatcaccacggcgcccatcgaggacatctccttcgtcgccgccacgcgcaccggcttcctacagctgttcgactacatccagggcaagaacgcgtacaaccagacgatcgagatgacggcgccggtgctgacgcgggtgtcgcccagcgacgggcccttctgcgcctccgccttcgccgtgagcttctacgtgccggccaagaaccaggcggacccgccgccggccgagggcctgcgcgtggaccgctgggccggggccaggtacgcggccgtgcgccgcttcgggggcttcgtggcggacgccgacgtcggggagcaggcggcgcggctcgaggccagcctccagggcacccggtgggccgccgccgtcaacgacgcgcgcagggccgacccggcctcgccctacaccgtcgcgcagtacaactcgcccttcgagttcaccggcagggtcaacgagatctggatgctcttcgacgcggacgacgacgccagtatgtgatgcgattccaagcgtgctctcggggcactgaggcgtttagggaaggacgcgcatgcacctgtgcagtgcagctgtgctaccatgaagtatttcgtgctcttgtgcgctagcttcgtttactttcgacttttcgagtaaggaataaggtgcctcttgttgcaataatgataaagctaatcctgcttgtaattacatttcgtggcatggccattccggcaacatgtccagtaaaaaaaaactttttagtttcg

SEQ ID NO: 28942 - protein, 293 aa, Zea mays subsp. mays
  peptide (1)..(293): Ceres Seq. ID no. 12462327
  misc_feature (46)..(276): Pfam Name: Pfam Description:  HlyD family secretion protein
LLARARTRAKRSKTSDVEAPAPRASFLSAGPSRAVQAAYGAPCQPAPRRGAARRRRCRGGAADVRAHRVPGVRGGGQRQRVRDPAVHGRHVDHHGAHRGHLLRRRHAHRLPTAVRLHPGQERVQPDDRDDGAGADAGVAQRRALLRLRLRRELLRAGQEPGGPAAGRGPARGPLGRGQVRGRAPLRGLRGGRRRRGAGGAARGQPPGHPVGRRRQRRAQGRPGLALHRRAVQLALRVHRQGQRDLDALRRGRRRQYVMRFQACSRGTEAFREGRACTCAVQLCYHEVFRALVR

SEQ ID NO: 28943 - protein, 218 aa, Zea mays subsp. mays
  peptide (1)..(218): Ceres Seq. ID no. 12462328
  misc_feature (28)..(211): Pfam Name: Pfam Description:  SOUL heme-binding protein
  misc_feature (1)..(218): NCBI GI NO: 34903864 NR Description: unnamed protein product
  misc_feature (23)..(213): NCBI GI NO: 15220033 NR Description: SOUL-like protein; protein id: At1g17100
  misc_feature (21)..(218): NCBI GI NO: 18411970 NR Description: expressed protein; protein id: At1g78450
  misc_feature (21)..(218): NCBI GI NO: 21593898 NR Description: SOUL-like protein [Arabidopsis thaliana]
  misc_feature (1)..(213): NCBI GI NO: 34904402 NR Description: unnamed protein product
  misc_feature (23)..(211): NCBI GI NO: 15218357 NR Description: hypothetical protein; protein id: At1g78460.1
  misc_feature (29)..(213): NCBI GI NO: 28278449 NR Description: Similar to heme binding protein 2 [Danio rerio]
  misc_feature (20)..(209): NCBI GI NO: 7657603 NR Description: heme binding protein 2
  misc_feature (27)..(209): NCBI GI NO: 27731687 NR Description: similar to heme binding protein 2
  misc_feature (43)..(209): NCBI GI NO: 15778345 NR Description: C6ORF34B [Homo sapiens]
MARRASLLLAAALLVAVAAAAVPPTCERIECPAYEVVDSANGFEIRRYTDAMWITTAPIEDISFVAATRTGFLQLFDYIQGKNAYNQTIEMTAPVLTRVSPSDGPFCASAFAVSFYVPAKNQADPPPAEGLRVDRWAGARYAAVRRFGGFVADADVGEQAARLEASLQGTRWAAAVNDARRADPASPYTVAQYNSPFEFTGRVNEIWMLFDADDDASM

SEQ ID NO: 28944 - protein, 167 aa, Zea mays subsp. mays
  peptide (1)..(167): Ceres Seq. ID no. 12462329
  misc_feature (1)..(160): Pfam Name: Pfam Description:  SOUL heme-binding protein
  misc_feature (1)..(167): NCBI GI NO: 34903864 NR Description: unnamed protein product
  misc_feature (1)..(162): NCBI GI NO: 15220033 NR Description: SOUL-like protein; protein id: At1g17100
  misc_feature (1)..(167): NCBI GI NO: 18411970 NR Description: expressed protein; protein id: At1g78450
  misc_feature (1)..(167): NCBI GI NO: 21593898 NR Description: SOUL-like protein [Arabidopsis thaliana]
  misc_feature (1)..(162): NCBI GI NO: 34904402 NR Description: unnamed protein product
  misc_feature (1)..(160): NCBI GI NO: 15218357 NR Description: hypothetical protein; protein id: At1g78460.1
  misc_feature (1)..(162): NCBI GI NO: 28278449 NR Description: Similar to heme binding protein 2 [Danio rerio]
  misc_feature (1)..(158): NCBI GI NO: 7657603 NR Description: heme binding protein 2
  misc_feature (1)..(158): NCBI GI NO: 27731687 NR Description: similar to heme binding protein 2
  misc_feature (1)..(158): NCBI GI NO: 15778345 NR Description: C6ORF34B [Homo sapiens]
MWITTAPIEDISFVAATRTGFLQLFDYIQGKNAYNQTIEMTAPVLTRVSPSDGPFCASAFAVSFYVPAKNQADPPPAEGLRVDRWAGARYAAVRRFGGFVADADVGEQAARLEASLQGTRWAAAVNDARRADPASPYTVAQYNSPFEFTGRVNEIWMLFDADDDASM

SEQ ID NO: 28945 - DNA, 761 bp, Zea mays subsp. mays
  misc_feature (1)..(761): Ceres Seq. ID no. 12401903
  misc_feature (743)..(743): n is a, c, t, g, unknown, or other
  misc_feature (234)..(234): n is a, c, t, g, unknown, or other
  misc_feature (489)..(489): n is a, c, t, g, unknown, or other
  misc_feature (320)..(320): n is a, c, t, g, unknown, or other
  misc_feature (487)..(487): n is a, c, t, g, unknown, or other
  misc_feature (338)..(338): n is a, c, t, g, unknown, or other
  misc_feature (667)..(667): n is a, c, t, g, unknown, or other
  misc_feature (240)..(240): n is a, c, t, g, unknown, or other
  misc_feature (690)..(690): n is a, c, t, g, unknown, or other
  misc_feature (486)..(486): n is a, c, t, g, unknown, or other
  misc_feature (622)..(622): n is a, c, t, g, unknown, or other
  misc_feature (454)..(454): n is a, c, t, g, unknown, or other
  misc_feature (231)..(231): n is a, c, t, g, unknown, or other
  misc_feature (623)..(623): n is a, c, t, g, unknown, or other
  misc_feature (337)..(337): n is a, c, t, g, unknown, or other
  misc_feature (490)..(490): n is a, c, t, g, unknown, or other
ctctcgtatcaattctccaagcgcggtgccgcgccgagcgaagaagctcgtctcgtctccatggcggccgcagcggtggccgtctccacctctgtgtgcacgtcctcaaggcgtagcacgggctgtccgaacgtgaggccccaggcccgtccgctcctaggcaggccgtcgccgcgccggaggctgcagacggccttggccgcgacgggcaagacgccgggcgaggcggangancaggtncccgcgtgggccaagcccggcgcggacgagccgccaccctgggagcgcgagggcggggccgcgcgtggacaggaggcccngcaggtccccttctacnngtacctgctcgcgtccacgatcaccgccatcgccgcgatcggctccatcttcgagtacaccaaccagcggccggtgttcgggatcgtcggccccgacagcgccctgtacgcgccgntcctgggcttcttcgtacttcaccggcatccnnanntccgcgtttctgtggttcaaggccgtgcagacggcgaacagagaggccgaggagcaagaccgcagagacggattcctgtgagaggctgtgggtgactccggcgcactcgccggtgccgtcgccgtgcagaannacgcgcaccgcaccaccggtattcgcagcgacgggtgacgggtncatgttgtcatgttatgtatgtncggtgtactgtatactagaatttgagagagcggatggatttgcggcacaaatncagagaaaatatattaat

SEQ ID NO: 28946 - protein, 194 aa, Zea mays subsp. mays
  peptide (1)..(194): Ceres Seq. ID no. 12401904
  misc_feature (21)..(158): NCBI GI NO: 15230505 NR Description: putative protein; protein id: At3g51510
  misc_feature (77)..(77): Xaa is any aa, unknown or other
  misc_feature (78)..(78): Xaa is any aa, unknown or other
  misc_feature (80)..(80): Xaa is any aa, unknown or other
  misc_feature (107)..(107): Xaa is any aa, unknown or other
  misc_feature (113)..(113): Xaa is any aa, unknown or other
  misc_feature (152)..(152): Xaa is any aa, unknown or other
  misc_feature (162)..(162): Xaa is any aa, unknown or other
  misc_feature (163)..(163): Xaa is any aa, unknown or other
  misc_feature (164)..(164): Xaa is any aa, unknown or other
LSYQFSKRGAAPSEEARLVSMAAAAVAVSTSVCTSSRRSTGCPNVRPQARPLLGRPSPRRRLQTALAATGKTPGEAXXQXPAWAKPGADEPPPWEREGGAARGQEAXQVPFYXYLLASTITAIAAIGSIFEYTNQRPVFGIVGPDSALYAPXLGFFVLHRHXXXRVSVVQGRADGEQRGRGARPQRRIPVRGCG

SEQ ID NO: 28947 - protein, 174 aa, Zea mays subsp. mays
  peptide (1)..(174): Ceres Seq. ID no. 12401905
  misc_feature (1)..(138): NCBI GI NO: 15230505 NR Description: putative protein; protein id: At3g51510
  misc_feature (57)..(57): Xaa is any aa, unknown or other
  misc_feature (58)..(58): Xaa is any aa, unknown or other
  misc_feature (60)..(60): Xaa is any aa, unknown or other
  misc_feature (87)..(87): Xaa is any aa, unknown or other
  misc_feature (93)..(93): Xaa is any aa, unknown or other
  misc_feature (132)..(132): Xaa is any aa, unknown or other
  misc_feature (142)..(142): Xaa is any aa, unknown or other
  misc_feature (143)..(143): Xaa is any aa, unknown or other
  misc_feature (144)..(144): Xaa is any aa, unknown or other
MAAAAVAVSTSVCTSSRRSTGCPNVRPQARPLLGRPSPRRRLQTALAATGKTPGEAXXQXPAWAKPGADEPPPWEREGGAARGQEAXQVPFYXYLLASTITAIAAIGSIFEYTNQRPVFGIVGPDSALYAPXLGFFVLHRHXXXRVSVVQGRADGEQRGRGARPQRRIPVRGCG

SEQ ID NO: 28948 - DNA, 1086 bp, Zea mays subsp. mays
  misc_feature (1)..(1086): Ceres Seq. ID no. 12401172
atttattttcttcccccactccatcttggagaagaagaacaaggaggagaaggcaaaagaaggccgacgcgctcgccgctgctaccgaaatcggccagacattccccaaaccctacgctcgctcgctcgccggagccctcgttgaaccgagcaggcgggcgaaggaggctcgacgatgttccgcaaccagtacgacaccgacgtgaccacgtggagcccccaggggcggctcttccaggtggagtacgccatggaggccgtcaagcagggctccgcctgcgtggggctccggtcccgcacccacgccgtcctcgccgccgtcaacaagcctgcctccgagctctcctcctaccagcggaaggtgttccgcgtcgccgaccacgccggggtcgcgctcgccggcctcaccgccgacggccgcgtcctctcgcgcttcctccgcaacgagtgcatcaaccactccttcgtctacgaggcgccgctccccgtctccaggctcgcgctcaggctcgccgacaaggcgcaggtttgcacacagcggtcatggaagaggccctacggcgtgggcctcctcgttgccggactggacgagtcaggagcccacctgtactacaactgccccagcgggaactacttcgagtaccaggcgttcgccatcggctcccgctcccaagccgctaagacgttcctggagcgcaggttccagggctacgacgactacaccccggagcagctcgtcagggacgctctctccgccgtgaaggagacgctgcagggcgagaagctgtccggatccaactgcaccgtggccatcgtcggcaggaaggacgacggcaccgtcgagccgttcgaggtgatcggcacggcgagggtccaggaacttatcgactccatggagatggaggtcgccgagcaggcaccgcctccggaggctgctgctgctagctcctccatgcaggaggagggggagaggggctcggatgacgctgctgcacccatggacatctagagggctgggatagggggagactcatatgaaacccgtacactgcattccgagttccaaaagactaagaccacttcttt

SEQ ID NO: 28949 - protein, 277 aa, Zea mays subsp. mays
  peptide (1)..(277): Ceres Seq. ID no. 12401173
  misc_feature (29)..(214): Pfam Name: Pfam Description:  Proteasome A-type and B-type
  misc_feature (1)..(277): NCBI GI NO: 1709758 NR Description: Proteasome subunit alpha type 1
  misc_feature (1)..(277): NCBI GI NO: 22947842 NR Description: 20S proteasome alpha 6 subunit
  misc_feature (1)..(277): NCBI GI NO: 21537234 NR Description: 20S proteasome subunit PAF1 [Arabidopsis thaliana]
  misc_feature (1)..(277): NCBI GI NO: 25290066 NR Description: C 3
  misc_feature (1)..(277): NCBI GI NO: 15220151 NR Description: 20S proteasome alpha subunit F2
  misc_feature (1)..(277): NCBI GI NO: 15239061 NR Description: 20S proteasome alpha subunit F1
  misc_feature (11)..(277): NCBI GI NO: 2511586 NR Description: multicatalytic endopeptidase
  misc_feature (6)..(162): NCBI GI NO: 14594923 NR Description: putative alpha6 proteasome subunit
  misc_feature (1)..(243): NCBI GI NO: 12229911 NR Description: Proteasome subunit alpha type 1
  misc_feature (1)..(263): NCBI GI NO: 33563282 NR Description: proteasome
MFRNQYDTDVTTWSPQGRLFQVEYAMEAVKQGSACVGLRSRTHAVLAAVNKPASELSSYQRKVFRVADHAGVALAGLTADGRVLSRFLRNECINHSFVYEAPLPVSRLALRLADKAQVCTQRSWKRPYGVGLLVAGLDESGAHLYYNCPSGNYFEYQAFAIGSRSQAAKTFLERRFQGYDDYTPEQLVRDALSAVKETLQGEKLSGSNCTVAIVGRKDDGTVEPFEVIGTARVQELIDSMEMEVAEQAPPPEAAAASSSMQEEGERGSDDAAAPMDI

SEQ ID NO: 28950 - protein, 252 aa, Zea mays subsp. mays
  peptide (1)..(252): Ceres Seq. ID no. 12401174
  misc_feature (4)..(189): Pfam Name: Pfam Description:  Proteasome A-type and B-type
  misc_feature (1)..(252): NCBI GI NO: 1709758 NR Description: Proteasome subunit alpha type 1
  misc_feature (1)..(252): NCBI GI NO: 22947842 NR Description: 20S proteasome alpha 6 subunit
  misc_feature (1)..(252): NCBI GI NO: 21537234 NR Description: 20S proteasome subunit PAF1 [Arabidopsis thaliana]
  misc_feature (1)..(252): NCBI GI NO: 25290066 NR Description: C 3
  misc_feature (1)..(252): NCBI GI NO: 15220151 NR Description: 20S proteasome alpha subunit F2
  misc_feature (1)..(252): NCBI GI NO: 15239061 NR Description: 20S proteasome alpha subunit F1
  misc_feature (1)..(252): NCBI GI NO: 2511586 NR Description: multicatalytic endopeptidase
  misc_feature (1)..(137): NCBI GI NO: 14594923 NR Description: putative alpha6 proteasome subunit
  misc_feature (1)..(218): NCBI GI NO: 12229911 NR Description: Proteasome subunit alpha type 1
  misc_feature (1)..(238): NCBI GI NO: 33563282 NR Description: proteasome
MEAVKQGSACVGLRSRTHAVLAAVNKPASELSSYQRKVFRVADHAGVALAGLTADGRVLSRFLRNECINHSFVYEAPLPVSRLALRLADKAQVCTQRSWKRPYGVGLLVAGLDESGAHLYYNCPSGNYFEYQAFAIGSRSQAAKTFLERRFQGYDDYTPEQLVRDALSAVKETLQGEKLSGSNCTVAIVGRKDDGTVEPFEVIGTARVQELIDSMEMEVAEQAPPPEAAAASSSMQEEGERGSDDAAAPMDI

SEQ ID NO: 28951 - protein, 226 aa, Zea mays subsp. mays
  peptide (1)..(226): Ceres Seq. ID no. 12401175
IYFLPPLHLGEEEQGGEGKRRPTRSPLLPKSARHSPNPTLARSPEPSLNRAGGRRRLDDVPQPVRHRRDHVEPPGAALPGGVRHGGRQAGLRLRGAPVPHPRRPRRRQQACLRALLLPAEGVPRRRPRRGRARRPHRRRPRPLALPPQRVHQPLLRLRGAAPRLQARAQARRQGAGLHTAVMEEALRRGPPRCRTGRVRSPPVLQLPQRELLRVPGVRHRLPLPSR

SEQ ID NO: 28952 - DNA, 890 bp, Zea mays subsp. mays; identical to SEQ ID NO: 25099
  misc_feature (1)..(890): Ceres Seq. ID no. 12595102

SEQ ID NO: 28953 - protein, 145 aa, Zea mays subsp. mays; identical to SEQ ID NO: 25100
  peptide (1)..(145): Ceres Seq. ID no. 12595103
  misc_feature (1)..(62): Pfam Name: UPF0113 Pfam Description: Uncharacterised protein family
  misc_feature (1)..(62): NCBI GI NO: 22831121 NR Description: putative 60S ribosome subunit biogenesis protein
  misc_feature (1)..(61): NCBI GI NO: 20301988 NR Description: Saccharomyces cerevisiae Nip7p homolog
  misc_feature (1)..(61): NCBI GI NO: 7705437 NR Description: hypothetical protein HSPC031 [Homo sapiens]
  misc_feature (1)..(61): NCBI GI NO: 12852038 NR Description: unnamed protein product [Mus musculus]
  misc_feature (1)..(61): NCBI GI NO: 13928674 NR Description: RIKEN cDNA 1110017C15 [Mus musculus]
  misc_feature (1)..(62): NCBI GI NO: 17506003 NR Description: 60S ribosome biogenesis (20.1 kD)
  misc_feature (1)..(62): NCBI GI NO: 39589582 NR Description: Hypothetical protein CBG12182
  misc_feature (1)..(61): NCBI GI NO: 34876605 NR Description: similar to Saccharomyces cerevisiae Nip7p homolog
  misc_feature (1)..(61): NCBI GI NO: 19075218 NR Description: putative protein involved in 60S ribosome subunitbiogenesis
  misc_feature (1)..(61): NCBI GI NO: 6841580 NR Description: HSPC180 [Homo sapiens]

SEQ ID NO: 28954 - DNA, 947 bp, Zea mays subsp. mays
  misc_feature (1)..(947): Ceres Seq. ID no. 12467581
  misc_feature (519)..(519): n is a, c, t, g, unknown, or other
taaggaatgttttagatatgaatgctcactttggtggatttaatgctgctttactgaaggcaggaaagtctgtatgggtgatgaatgttgttcctacagatgccccaaactatctaccgctgatatttgaccggggttttatcggggttcaacatgactggtgtgatgcatttccaacttacccaagaacatatgatatggtgcacgctgatggttttctatcacttcagaagaaccacaagcatagatgttctactcttgacatattcttggaagttgaccgcatcctacgaccagagggctgggtcataatccgtgacgctgcccctcttattgaagcggcaagatctgttgttactcaactcagatgggacgcccgcgttttggatcttgacatagccagtgatgaaaaactactggtctgtcagaagccgtttctcagaaaataatgagcatagtagacactgacacaagatatgaacttattctttcaccctacacactgttacaattgctgtntgagcacaactgagtacaaagtttgggtaaaaaacacgggaagcatgattcagcaaacttgtcatgcatcaccatggaaccgcaaggtgccattaaattgatcggtcaagtgcatgctgcagaaacaggcttggtggctaagctttccaggccaaggttttattgccaggatatagagatgaagccataaaaattactttattagtgaaaccatatccaataaagagatgctgctgcggtgtacataatcgccgccaatgtgccatataggtataattcattttttcccttgttacaatttctctccttttttctgtaactgtgccaatttgttttattttgtatcttgtatgtaaattggttggtctatatactgatcatcccagactacagcctagtgaaatcaatataattattatttggagatg

SEQ ID NO: 28955 - protein, 148 aa, Zea mays subsp. mays
  peptide (1)..(148): Ceres Seq. ID no. 12467582
  misc_feature (1)..(143): Pfam Name: Pfam Description:  Putative methyltransferase
  misc_feature (1)..(148): NCBI GI NO: 12324243 NR Description: unknown protein, 5' partial; 69506-67937
  misc_feature (1)..(148): NCBI GI NO: 18395560 NR Description: expressed protein; protein id: At2g03480.1
  misc_feature (1)..(148): NCBI GI NO: 25411012 NR Description: hypothetical protein At2g03480
  misc_feature (1)..(147): NCBI GI NO: 14532450 NR Description: At2g03480/T4M8.9 [Arabidopsis thaliana]
  misc_feature (1)..(147): NCBI GI NO: 24111341 NR Description: At2g03480/T4M8.9 [Arabidopsis thaliana]
  misc_feature (1)..(148): NCBI GI NO: 15222970 NR Description: hypothetical protein; protein id: At1g13860.1
  misc_feature (1)..(148): NCBI GI NO: 26449782 NR Description: unknown protein [Arabidopsis thaliana]
  misc_feature (1)..(130): NCBI GI NO: 25402770 NR Description: protein F16A14.7 [imported] - Arabidopsis thaliana
  misc_feature (1)..(143): NCBI GI NO: 15222494 NR Description: unknown protein; protein id: At1g31850.1
  misc_feature (1)..(143): NCBI GI NO: 21741752 NR Description: OSJNBa0060B20.12
RNVLDMNAHFGGFNAALLKAGKSVWVMNVVPTDAPNYLPLIFDRGFIGVQHDWCDAFPTYPRTYDMVHADGFLSLQKNHKHRCSTLDIFLEVDRILRPEGWVIIRDAAPLIEAARSVVTQLRWDARVLDLDIASDEKLLVCQKPFLRK

SEQ ID NO: 28956 - protein, 143 aa, Zea mays subsp. mays
  peptide (1)..(143): Ceres Seq. ID no. 12467583
  misc_feature (1)..(138): Pfam Name: Pfam Description:  Putative methyltransferase
  misc_feature (1)..(143): NCBI GI NO: 12324243 NR Description: unknown protein, 5' partial; 69506-67937
  misc_feature (1)..(143): NCBI GI NO: 18395560 NR Description: expressed protein; protein id: At2g03480.1
  misc_feature (1)..(143): NCBI GI NO: 25411012 NR Description: hypothetical protein At2g03480
  misc_feature (1)..(142): NCBI GI NO: 14532450 NR Description: At2g03480/T4M8.9 [Arabidopsis thaliana]
  misc_feature (1)..(142): NCBI GI NO: 24111341 NR Description: At2g03480/T4M8.9 [Arabidopsis thaliana]
  misc_feature (1)..(143): NCBI GI NO: 15222970 NR Description: hypothetical protein; protein id: At1g13860.1
  misc_feature (1)..(143): NCBI GI NO: 26449782 NR Description: unknown protein [Arabidopsis thaliana]
  misc_feature (1)..(125): NCBI GI NO: 25402770 NR Description: protein F16A14.7 [imported] - Arabidopsis thaliana
  misc_feature (1)..(138): NCBI GI NO: 15222494 NR Description: unknown protein; protein id: At1g31850.1
  misc_feature (1)..(138): NCBI GI NO: 21741752 NR Description: OSJNBa0060B20.12
MNAHFGGFNAALLKAGKSVWVMNVVPTDAPNYLPLIFDRGFIGVQHDWCDAFPTYPRTYDMVHADGFLSLQKNHKHRCSTLDIFLEVDRILRPEGWVIIRDAAPLIEAARSVVTQLRWDARVLDLDIASDEKLLVCQKPFLRK

SEQ ID NO: 28957 - protein, 122 aa, Zea mays subsp. mays
  peptide (1)..(122): Ceres Seq. ID no. 12467584
  misc_feature (1)..(117): Pfam Name: Pfam Description:  Putative methyltransferase
  misc_feature (1)..(122): NCBI GI NO: 12324243 NR Description: unknown protein, 5' partial; 69506-67937
  misc_feature (1)..(122): NCBI GI NO: 18395560 NR Description: expressed protein; protein id: At2g03480.1
  misc_feature (1)..(122): NCBI GI NO: 25411012 NR Description: hypothetical protein At2g03480
  misc_feature (1)..(121): NCBI GI NO: 14532450 NR Description: At2g03480/T4M8.9 [Arabidopsis thaliana]
  misc_feature (1)..(121): NCBI GI NO: 24111341 NR Description: At2g03480/T4M8.9 [Arabidopsis thaliana]
  misc_feature (1)..(122): NCBI GI NO: 15222970 NR Description: hypothetical protein; protein id: At1g13860.1
  misc_feature (1)..(122): NCBI GI NO: 26449782 NR Description: unknown protein [Arabidopsis thaliana]
  misc_feature (1)..(104): NCBI GI NO: 25402770 NR Description: protein F16A14.7 [imported] - Arabidopsis thaliana
  misc_feature (1)..(117): NCBI GI NO: 15222494 NR Description: unknown protein; protein id: At1g31850.1
  misc_feature (1)..(117): NCBI GI NO: 21741752 NR Description: OSJNBa0060B20.12
MNVVPTDAPNYLPLIFDRGFIGVQHDWCDAFPTYPRTYDMVHADGFLSLQKNHKHRCSTLDIFLEVDRILRPEGWVIIRDAAPLIEAARSVVTQLRWDARVLDLDIASDEKLLVCQKPFLRK

SEQ ID NO: 28958 - DNA, 855 bp, Zea mays subsp. mays
  misc_feature (1)..(855): Ceres Seq. ID no. 12351202
agctaattgcttttccagctgttcgtctcgccctgcatatgcgtctctctgctgccaggctcaagggctccacgctcgtcaccaatggcgtgataacggccgggtctgacgagtgggcgatctacggcggaaccggggtgtttgccatggcgaggggcgtcataaggagaaggtatctcgccgacagggccggcgggaacactgatgagctcaacatggatgtcttctgccggccgtttggctcacagtcagagctgcaagataagatgcaggtgcaggggcagggctctagcgtcaccaagattggactatggggtggaccgggagggtcggcacaggacatcacggcggagcggccgccgcagcgtctgcacagcgtcaccgttcgtgctggcgtcgccctcgactccatcgagttcacctatactgacagcgcttggcagaggcgcgccgctgggcgatggggtggactcgggggcaatgttcgaacgatcgaccttggcgacgccgaggatgtcagggaagtctcgggaacatacggcgcatttgaaggtgccactacgctgacctcgctcaggctcgtcaccagcagcagaacctggggcccctggggtgtcgagaacgggacgcgtttctccgtcacggcgcccatcggcagcagcatcgtgggattctatgcgcgggcgggaaccaggctcgtcgatgctatcggtgtttacttgcgtcagatttaattcgaataatagcaggggagctactgctagctacgtacctgctccatcctccattatcctttatttcaattcgctcatcatcgtcgtgtgtaaattaaataaataaagctcttgtgcccat

SEQ ID NO: 28959 - protein, 243 aa, Zea mays subsp. mays
  peptide (1)..(243): Ceres Seq. ID no. 12351203
  misc_feature (109)..(241): Pfam Name: Pfam Description:  Jacalin-like lectin domain
  misc_feature (19)..(243): NCBI GI NO: 9313027 NR Description: beta-glucosidase aggregating factor precursor
  misc_feature (19)..(243): NCBI GI NO: 7489385 NR Description: jakalin homolog - barley
  misc_feature (19)..(243): NCBI GI NO: 7489383 NR Description: jacalin homolog - barley
  misc_feature (19)..(229): NCBI GI NO: 7489384 NR Description: jacalin homolog - barley
  misc_feature (19)..(240): NCBI GI NO: 7489661 NR Description: benzothiadiazole-induced protein
  misc_feature (19)..(241): NCBI GI NO: 21311647 NR Description: hessian fly response gene 1 protein
  misc_feature (19)..(239): NCBI GI NO: 16151819 NR Description: VER2 [Triticum aestivum]
  misc_feature (97)..(241): NCBI GI NO: 34915016 NR Description: putative Mannose-Binding Rice Lectin
  misc_feature (96)..(240): NCBI GI NO: 38344523 NR Description: OSJNBa0016N04.16
  misc_feature (97)..(240): NCBI GI NO: 134190 NR Description: Salt-stress induced protein (Salt protein)
LIAFPAVRLALHMRLSAARLKGSTLVTNGVITAGSDEWAIYGGTGVFAMARGVIRRRYLADRAGGNTDELNMDVFCRPFGSQSELQDKMQVQGQGSSVTKIGLWGGPGGSAQDITAERPPQRLHSVTVRAGVALDSIEFTYTDSAWQRRAAGRWGGLGGNVRTIDLGDAEDVREVSGTYGAFEGATTLTSLRLVTSSRTWGPWGVENGTRFSVTAPIGSSIVGFYARAGTRLVDAIGVYLRQI

SEQ ID NO: 28960 - protein, 231 aa, Zea mays subsp. mays
  peptide (1)..(231): Ceres Seq. ID no. 12351204
  misc_feature (97)..(229): Pfam Name: Pfam Description:  Jacalin-like lectin domain
  misc_feature (7)..(231): NCBI GI NO: 9313027 NR Description: beta-glucosidase aggregating factor precursor
  misc_feature (7)..(231): NCBI GI NO: 7489385 NR Description: jakalin homolog - barley
  misc_feature (7)..(231): NCBI GI NO: 7489383 NR Description: jacalin homolog - barley
  misc_feature (7)..(217): NCBI GI NO: 7489384 NR Description: jacalin homolog - barley
  misc_feature (7)..(228): NCBI GI NO: 7489661 NR Description: benzothiadiazole-induced protein
  misc_feature (7)..(229): NCBI GI NO: 21311647 NR Description: hessian fly response gene 1 protein
  misc_feature (7)..(227): NCBI GI NO: 16151819 NR Description: VER2 [Triticum aestivum]
  misc_feature (85)..(229): NCBI GI NO: 34915016 NR Description: putative Mannose-Binding Rice Lectin
  misc_feature (84)..(228): NCBI GI NO: 38344523 NR Description: OSJNBa0016N04.16
  misc_feature (85)..(228): NCBI GI NO: 134190 NR Description: Salt-stress induced protein (Salt protein)
MRLSAARLKGSTLVTNGVITAGSDEWAIYGGTGVFAMARGVIRRRYLADRAGGNTDELNMDVFCRPFGSQSELQDKMQVQGQGSSVTKIGLWGGPGGSAQDITAERPPQRLHSVTVRAGVALDSIEFTYTDSAWQRRAAGRWGGLGGNVRTIDLGDAEDVREVSGTYGAFEGATTLTSLRLVTSSRTWGPWGVENGTRFSVTAPIGSSIVGFYARAGTRLVDAIGVYLRQI

SEQ ID NO: 28961 - protein, 195 aa, Zea mays subsp. mays
  peptide (1)..(195): Ceres Seq. ID no. 12351205
  misc_feature (61)..(193): Pfam Name: Pfam Description:  Jacalin-like lectin domain
  misc_feature (1)..(195): NCBI GI NO: 9313027 NR Description: beta-glucosidase aggregating factor precursor
  misc_feature (1)..(195): NCBI GI NO: 7489385 NR Description: jakalin homolog - barley
  misc_feature (1)..(195): NCBI GI NO: 7489383 NR Description: jacalin homolog - barley
  misc_feature (1)..(181): NCBI GI NO: 7489384 NR Description: jacalin homolog - barley
  misc_feature (1)..(192): NCBI GI NO: 7489661 NR Description: benzothiadiazole-induced protein
  misc_feature (1)..(193): NCBI GI NO: 21311647 NR Description: hessian fly response gene 1 protein
  misc_feature (1)..(191): NCBI GI NO: 16151819 NR Description: VER2 [Triticum aestivum]
  misc_feature (49)..(193): NCBI GI NO: 34915016 NR Description: putative Mannose-Binding Rice Lectin
  misc_feature (48)..(192): NCBI GI NO: 38344523 NR Description: OSJNBa0016N04.16
  misc_feature (49)..(192): NCBI GI NO: 134190 NR Description: Salt-stress induced protein (Salt protein)
MARGVIRRRYLADRAGGNTDELNMDVFCRPFGSQSELQDKMQVQGQGSSVTKIGLWGGPGGSAQDITAERPPQRLHSVTVRAGVALDSIEFTYTDSAWQRRAAGRWGGLGGNVRTIDLGDAEDVREVSGTYGAFEGATTLTSLRLVTSSRTWGPWGVENGTRFSVTAPIGSSIVGFYARAGTRLVDAIGVYLRQI

SEQ ID NO: 28962 - DNA, 1251 bp, Zea mays subsp. mays
  misc_feature (1)..(1251): Ceres Seq. ID no. 12403316
actgacagctcgccgaggggccgcgccgcgctcgagacccgtcgatggcgaggcggagcctggcggtcgacgcaaccgcaggcgccgcatcccgggttcggttcgcgcccacctccaataacctgctcgtctcctcatgggattcggggctgcggttgtacgatgccgacgagggcacgctcagggtcaacgtggagtcagaggcggcattcctcgactgctgcttcgaggatgagtctgcagcgtttgcctgcggctctgatggatctgtgagaaggtacgacttccactcaggttcgcaggatacggtggggctccatgaagatgcactagcctgcattgagttctcttcactgaccggtcagattatgacaggcagccttgacaagaagctaaagctttgggattcaaaaacaagaaatgtaagcccgagcggcaccataaccttaaattcagatgtggcctcaatttctatatgcggcatttacatattagctgcagttgagagaaatgtttatctttatgacatgaggaatctaacaagaccagttgatgaaaaagactgtcctctggattatcaaattcgatgccttcatacttctctagagtggaatgcttatgttgctggctctgtggatggagttgttgcattgaagtatcttgatcgtggaacagatagagatttgggatatgcatttcgttgtcatccaaattccagaaacggaaaatggaatctggtccctgtaaattgcatctcagttcatccctgcaacagaactttcgttacgggagatgataaaggatgcactattgtttgggatgctcaattgaaaaagaagctgattgagcttccaatgtatttgggcagtgtggcgtcagtggcatacaaccataatggccaacttctggcggttgcctcaaactattttttagaagtggataaagaggagcaacaccaccaggtattcattgaaactgtggagaacttcaaaggcaagtcccgtgtgggatagagccttctaacaaaacatgttctgttcatctgttgtattgtattttgtctaccatacatgttaaaggtcaccaagatgtgacagcatgttgtattatgttgtatgactaagcattttttttaggaaacgacataatatggctaagcaatacttgtatatattggttacatctagtctgagacagctgtggtgtgttgtaactcttttgagcttttgcaaccagtattgctgttctggt

SEQ ID NO: 28963 - protein, 322 aa, Zea mays subsp. mays
  peptide (1)..(322): Ceres Seq. ID no. 12403317
  misc_feature (14)..(309): NCBI GI NO: 18409261 NR Description: mitotic checkpoint protein, putative
  misc_feature (14)..(309): NCBI GI NO: 12597795 NR Description: mitotic checkpoint protein, putative
  misc_feature (14)..(309): NCBI GI NO: 21593642 NR Description: mitotic checkpoint protein, putative
  misc_feature (16)..(320): NCBI GI NO: 15222841 NR Description: mitotic checkpoint protein, putative
  misc_feature (1)..(320): NCBI GI NO: 18402300 NR Description: mitotic checkpoint protein, putative
  misc_feature (16)..(320): NCBI GI NO: 28564814 NR Description: putative mitotic checkpoint protein
  misc_feature (14)..(320): NCBI GI NO: 37362190 NR Description: BUB3 budding uninhibited by benzimidazoles 3-like
  misc_feature (16)..(320): NCBI GI NO: 4757880 NR Description: BUB3 budding uninhibited by benzimidazoles 3 homolog
  misc_feature (16)..(320): NCBI GI NO: 3986296 NR Description: mitotic checkpoint [Xenopus laevis]
  misc_feature (1)..(294): NCBI GI NO: 6320954 NR Description: Nuclear pore protein required for poly
MARRSLAVDATAGAASRVRFAPTSNNLLVSSWDSGLRLYDADEGTLRVNVESEAAFLDCCFEDESAAFACGSDGSVRRYDFHSGSQDTVGLHEDALACIEFSSLTGQIMTGSLDKKLKLWDSKTRNVSPSGTITLNSDVASISICGIYILAAVERNVYLYDMRNLTRPVDEKDCPLDYQIRCLHTSLEWNAYVAGSVDGVVALKYLDRGTDRDLGYAFRCHPNSRNGKWNLVPVNCISVHPCNRTFVTGDDKGCTIVWDAQLKKKLIELPMYLGSVASVAYNHNGQLLAVASNYFLEVDKEEQHHQVFIETVENFKGKSRVG

SEQ ID NO: 28964 - protein, 214 aa, Zea mays subsp. mays
  peptide (1)..(214): Ceres Seq. ID no. 12403318
  misc_feature (1)..(201): NCBI GI NO: 18409261 NR Description: mitotic checkpoint protein, putative
  misc_feature (1)..(201): NCBI GI NO: 12597795 NR Description: mitotic checkpoint protein, putative
  misc_feature (1)..(201): NCBI GI NO: 21593642 NR Description: mitotic checkpoint protein, putative
  misc_feature (1)..(212): NCBI GI NO: 15222841 NR Description: mitotic checkpoint protein, putative
  misc_feature (1)..(212): NCBI GI NO: 18402300 NR Description: mitotic checkpoint protein, putative
  misc_feature (1)..(212): NCBI GI NO: 28564814 NR Description: putative mitotic checkpoint protein
  misc_feature (1)..(212): NCBI GI NO: 37362190 NR Description: BUB3 budding uninhibited by benzimidazoles 3-like
  misc_feature (1)..(212): NCBI GI NO: 4757880 NR Description: BUB3 budding uninhibited by benzimidazoles 3 homolog
  misc_feature (1)..(212): NCBI GI NO: 3986296 NR Description: mitotic checkpoint [Xenopus laevis]
  misc_feature (1)..(186): NCBI GI NO: 6320954 NR Description: Nuclear pore protein required for poly
MTGSLDKKLKLWDSKTRNVSPSGTITLNSDVASISICGIYILAAVERNVYLYDMRNLTRPVDEKDCPLDYQIRCLHTSLEWNAYVAGSVDGVVALKYLDRGTDRDLGYAFRCHPNSRNGKWNLVPVNCISVHPCNRTFVTGDDKGCTIVWDAQLKKKLIELPMYLGSVASVAYNHNGQLLAVASNYFLEVDKEEQHHQVFIETVENFKGKSRVG

SEQ ID NO: 28965 - protein, 161 aa, Zea mays subsp. mays
  peptide (1)..(161): Ceres Seq. ID no. 12403319
  misc_feature (1)..(148): NCBI GI NO: 18409261 NR Description: mitotic checkpoint protein, putative
  misc_feature (1)..(148): NCBI GI NO: 12597795 NR Description: mitotic checkpoint protein, putative
  misc_feature (1)..(148): NCBI GI NO: 21593642 NR Description: mitotic checkpoint protein, putative
  misc_feature (1)..(159): NCBI GI NO: 15222841 NR Description: mitotic checkpoint protein, putative
  misc_feature (1)..(159): NCBI GI NO: 18402300 NR Description: mitotic checkpoint protein, putative
  misc_feature (1)..(159): NCBI GI NO: 28564814 NR Description: putative mitotic checkpoint protein
  misc_feature (1)..(159): NCBI GI NO: 37362190 NR Description: BUB3 budding uninhibited by benzimidazoles 3-like
  misc_feature (1)..(159): NCBI GI NO: 4757880 NR Description: BUB3 budding uninhibited by benzimidazoles 3 homolog
  misc_feature (1)..(159): NCBI GI NO: 3986296 NR Description: mitotic checkpoint [Xenopus laevis]
  misc_feature (1)..(133): NCBI GI NO: 6320954 NR Description: Nuclear pore protein required for poly
MRNLTRPVDEKDCPLDYQIRCLHTSLEWNAYVAGSVDGVVALKYLDRGTDRDLGYAFRCHPNSRNGKWNLVPVNCISVHPCNRTFVTGDDKGCTIVWDAQLKKKLIELPMYLGSVASVAYNHNGQLLAVASNYFLEVDKEEQHHQVFIETVENFKGKSRVG

SEQ ID NO: 28966 - DNA, 1178 bp, Zea mays subsp. mays
  misc_feature (1)..(1178): Ceres Seq. ID no. 12352502
agtttaatacaaaccaggcttgctcgtggcggcaaaaaaccaacgtgcttgatctccctccgccactccatccatctcctcgctcccagtccccgggaagcatggcgtccgtcaccgcccgcgccccggtagcggcccttcgcccgtcgtcggcatcgctcaagtcgtcgtcggccttccttggccactctagccgcctcggccgcaccgcgtctcccacgaggcgcagcctcaaggcggaggccaagggcgagtggctccccggccttccctccccctcctacctcgacggcagcctggcgggtgacaatggcttcgacccgttgggcctggcggaggaccccgagaacctgcggtggttcgtgcaggcggagctggtgaacggccggtgggccatgcttggcgtggccgggatgctcatcccggaggtgctgaccaaagccgggctgatcaacgcgccgcagtggtacgacgccagcaagtcggagtacttcgcgtcgtcgtccacgctgttcgtggtcgagttcatcctgttccactacgtggagatccggcggtggcaggacatcaagaaccccggcagcgtcaaccaggaccccatcttcaagagctacagcctgccgccgcacgagtgcggctacccgggcagcgtcttcaacccgctcaacttcgcgcccacgctcgaggccaaggagaaggagctcgccaacgggaggctggcgatgctggcgttcctgggcttcctgatccagcacaacgtcaccggcaaggggcccttcgacaacctgctgcagcacctgtctgacccatggcacaacaccatcatccagaccttctccggttgagtcgaggtcgaggagggatacgatccatcgctggtgagctgatatggactggaaggcaaacattgaaaccttaagttcctttctggatcagtttgtgtgtgttgttaatctatctggagggtacagattcgggccgtgttgcaatgcatgcatggtctgaagggagcgagggctgaggagtgactggtatgtacattagctgaaggggatattaagggtagagatcgtttgatcagtatcatctgtatatccccatgcatggggtttcgttttgtgcgcttacttctggcttgccagcgtatggttcaatgtggaaacacatgtattagtacg

SEQ ID NO: 28967 - protein, 280 aa, Zea mays subsp. mays
  peptide (1)..(280): Ceres Seq. ID no. 12352503
  misc_feature (91)..(252): Pfam Name: Pfam Description:  Chlorophyll A-B binding protein
  misc_feature (34)..(280): NCBI GI NO: 3789952 NR Description: chlorophyll a/b-binding protein presursor
  misc_feature (55)..(280): NCBI GI NO: 9624495 NR Description: chlorophyll a/b-binding protein precursor
  misc_feature (34)..(279): NCBI GI NO: 100197 NR Description: chlorophyll a/b-binding protein (cab-12) - tomato
  misc_feature (34)..(279): NCBI GI NO: 100196 NR Description: chlorophyll a/b-binding protein (cab-11) - tomato
  misc_feature (34)..(280): NCBI GI NO: 13385204 NR Description: cDNA sequence BC002118
  misc_feature (34)..(280): NCBI GI NO: 322392 NR Description: chlorophyll a/b-binding protein type 4
  misc_feature (44)..(280): NCBI GI NO: 322393 NR Description: chlorophyll a/b-binding protein type 4
  misc_feature (34)..(279): NCBI GI NO: 30692874 NR Description: light-harvesting chlorophyll a/b binding protein
  misc_feature (34)..(280): NCBI GI NO: 20218813 NR Description: putative chlorophyll a/b-binding protein type 4
  misc_feature (34)..(280): NCBI GI NO: 11277626 NR Description: chlorophyll a/b-binding protein
FNTNQACSWRQKTNVLDLPPPLHPSPRSQSPGSMASVTARAPVAALRPSSASLKSSSAFLGHSSRLGRTASPTRRSLKAEAKGEWLPGLPSPSYLDGSLAGDNGFDPLGLAEDPENLRWFVQAELVNGRWAMLGVAGMLIPEVLTKAGLINAPQWYDASKSEYFASSSTLFVVEFILFHYVEIRRWQDIKNPGSVNQDPIFKSYSLPPHECGYPGSVFNPLNFAPTLEAKEKELANGRLAMLAFLGFLIQHNVTGKGPFDNLLQHLSDPWHNTIIQTFSG

SEQ ID NO: 28968 - protein, 247 aa, Zea mays subsp. mays
  peptide (1)..(247): Ceres Seq. ID no. 12352504
  misc_feature (58)..(219): Pfam Name: Pfam Description:  Chlorophyll A-B binding protein
  misc_feature (1)..(247): NCBI GI NO: 3789952 NR Description: chlorophyll a/b-binding protein presursor
  misc_feature (22)..(247): NCBI GI NO: 9624495 NR Description: chlorophyll a/b-binding protein precursor
  misc_feature (1)..(246): NCBI GI NO: 100197 NR Description: chlorophyll a/b-binding protein (cab-12) - tomato
  misc_feature (1)..(246): NCBI GI NO: 100196 NR Description: chlorophyll a/b-binding protein (cab-11) - tomato
  misc_feature (1)..(247): NCBI GI NO: 13385204 NR Description: cDNA sequence BC002118
  misc_feature (1)..(247): NCBI GI NO: 322392 NR Description: chlorophyll a/b-binding protein type 4
  misc_feature (11)..(247): NCBI GI NO: 322393 NR Description: chlorophyll a/b-binding protein type 4
  misc_feature (1)..(246): NCBI GI NO: 30692874 NR Description: light-harvesting chlorophyll a/b binding protein
  misc_feature (1)..(247): NCBI GI NO: 20218813 NR Description: putative chlorophyll a/b-binding protein type 4
  misc_feature (1)..(247): NCBI GI NO: 11277626 NR Description: chlorophyll a/b-binding protein
MASVTARAPVAALRPSSASLKSSSAFLGHSSRLGRTASPTRRSLKAEAKGEWLPGLPSPSYLDGSLAGDNGFDPLGLAEDPENLRWFVQAELVNGRWAMLGVAGMLIPEVLTKAGLINAPQWYDASKSEYFASSSTLFVVEFILFHYVEIRRWQDIKNPGSVNQDPIFKSYSLPPHECGYPGSVFNPLNFAPTLEAKEKELANGRLAMLAFLGFLIQHNVTGKGPFDNLLQHLSDPWHNTIIQTFSG

SEQ ID NO: 28969 - protein, 149 aa, Zea mays subsp. mays
  peptide (1)..(149): Ceres Seq. ID no. 12352505
  misc_feature (1)..(121): Pfam Name: Pfam Description:  Chlorophyll A-B binding protein
  misc_feature (1)..(149): NCBI GI NO: 3789952 NR Description: chlorophyll a/b-binding protein presursor
  misc_feature (1)..(149): NCBI GI NO: 9624495 NR Description: chlorophyll a/b-binding protein precursor
  misc_feature (1)..(148): NCBI GI NO: 100197 NR Description: chlorophyll a/b-binding protein (cab-12) - tomato
  misc_feature (1)..(148): NCBI GI NO: 100196 NR Description: chlorophyll a/b-binding protein (cab-11) - tomato
  misc_feature (1)..(149): NCBI GI NO: 13385204 NR Description: cDNA sequence BC002118
  misc_feature (1)..(149): NCBI GI NO: 322392 NR Description: chlorophyll a/b-binding protein type 4
  misc_feature (1)..(149): NCBI GI NO: 322393 NR Description: chlorophyll a/b-binding protein type 4
  misc_feature (1)..(148): NCBI GI NO: 30692874 NR Description: light-harvesting chlorophyll a/b binding protein
  misc_feature (1)..(149): NCBI GI NO: 20218813 NR Description: putative chlorophyll a/b-binding protein type 4
  misc_feature (1)..(149): NCBI GI NO: 11277626 NR Description: chlorophyll a/b-binding protein
MLGVAGMLIPEVLTKAGLINAPQWYDASKSEYFASSSTLFVVEFILFHYVEIRRWQDIKNPGSVNQDPIFKSYSLPPHECGYPGSVFNPLNFAPTLEAKEKELANGRLAMLAFLGFLIQHNVTGKGPFDNLLQHLSDPWHNTIIQTFSG

SEQ ID NO: 28970 - DNA, 1696 bp, Zea mays subsp. mays
  misc_feature (1)..(1696): Ceres Seq. ID no. 12352506
atagagagagccactggccacaggtaggcaggcaggaggacgagtcggcaaggaagctgcctgctttcagaaagagtcatagagatagttattaagatggcgttgcttcggctgcttgccctctccctgctcttcgcagtggccactcctgtcagggacatcgcccacgatgcctgctcgtcagaagtgaaggatttccagcacctgaacaacagctcggggctccacctgacgctgcaccacccgcagagcccctgctccccggcgccgctgcccgccgacctccccttctccgcggtgctcgcccacgacggcgcgcgcatcgcgtcgctcgccgcgcgcctcgccaagacgccgtcctctcggcccaccttgcttgacgagagccgcgcggggtcgtcgtcgtcgtcccccgatgacgagtccctcgcgtccgtgccgctcggcccgggcacgtccgtcggcgtcggcaactacgtcacccgcatgggcctcggcacgccggccaagtcgtacgtcatggtcgtggacacggggtcctcgctcacctggctccagtgctccccctgcgtcgtgtcgtgccaccgccagtccggcccggtgttcaaccccaaggcgtccagctcctacgcctccgtgtcctgctccgcgcagcagtgcagcgacctcaccaccgccacgctcaaccccgcctcctgctccacctccaacgtctgcatctaccaggccagctacggcgacagctccttctcggtcgggtatctgagcaaggacaccgtgtcgttcggctccaccagcgtgcccaacttctactacggctgcggacaagacaacgagggcctcttcgggcagtcggcggggctcatcggcctggcgcgtaacaagctgtcgctgctgtaccagctggcgccgagcatgggctactccttctcctactgcctcccgacgtcgtcgtcgtcctcctcggggtacctgtccatcggctcctacaacccggggcagtactcgtacacgcccatggcgtcgagctcgctggacgactcgctctacttcatcaagatgaccgggatcaaggtcgcgggcaagccgctgtccgtgtcgtcgtcggcctactccagcctgccgacgatcatcgactccggcacggtgatcacgcgcctgcctacgggcgtgtactcggcgctcagcaaggcggtggcgggcgccatgaaggggacgccccgcgcgtcggcgttctccatcctggacacgtgcttccagggccaggcggcgcggctgcgcgtgcccgaggtcaccatggccttcgccggcggcgcggcgctcaagctggccgccaggaacctgctggtggacgtggacagcgccaccacgtgcctggccttcgcgcccgcccggagcgccgccatcatcgggaacacgcagcagcagacgttcagcgtcgtctacgacgtcaagaacagcaagatcgggttcgccgccgccggctgcagctgagaagcgacacctacatacacgcgcatgcacagaccgactcggcaactaaaactaaaacgagcagcgcatgcatgcatctaccgtccggtttcgtctgaaaccatcattaatttcgatcgtccactccacgcacagcaagttctttacggaccttgccgcatatgatatgtacatggtgacaagataaggtacaggagaattg

SEQ ID NO: 28971 - protein, 465 aa, Zea mays subsp. mays
  peptide (1)..(465): Ceres Seq. ID no. 12352507
  misc_feature (96)..(459): Pfam Name: Pfam Description:  Eukaryotic aspartyl protease
  misc_feature (42)..(465): NCBI GI NO: 24430421 NR Description: 41 kD chloroplast nucleoid DNA binding protein
  misc_feature (42)..(465): NCBI GI NO: 7489168 NR Description: nucleoid DNA-binding protein cnd41
  misc_feature (19)..(465): NCBI GI NO: 22326716 NR Description: nucleoid DNA-binding protein cnd41 - like protein
  misc_feature (41)..(465): NCBI GI NO: 11358588 NR Description: nucleoid DNA-binding protein cnd41-like protein -Arabidopsis thaliana
  misc_feature (1)..(464): NCBI GI NO: 34895664 NR Description: nucleoid DNA-binding protein cnd41-like protein
  misc_feature (46)..(464): NCBI GI NO: 24417232 NR Description: unknown [Arabidopsis thaliana]
  misc_feature (18)..(464): NCBI GI NO: 15229656 NR Description: putative chloroplast nucleoid DNA-binding protein
  misc_feature (18)..(464): NCBI GI NO: 19424106 NR Description: putative chloroplast nucleoid DNA-binding protein
  misc_feature (46)..(464): NCBI GI NO: 15238250 NR Description: nucleoid DNA-binding protein cnd41 - like protein
  misc_feature (67)..(464): NCBI GI NO: 15222611 NR Description: hypothetical protein; protein id: At1g25510
MALLRLLALSLLFAVATPVRDIAHDACSSEVKDFQHLNNSSGLHLTLHHPQSPCSPAPLPADLPFSAVLAHDGARIASLAARLAKTPSSRPTLLDESRAGSSSSSPDDESLASVPLGPGTSVGVGNYVTRMGLGTPAKSYVMVVDTGSSLTWLQCSPCVVSCHRQSGPVFNPKASSSYASVSCSAQQCSDLTTATLNPASCSTSNVCIYQASYGDSSFSVGYLSKDTVSFGSTSVPNFYYGCGQDNEGLFGQSAGLIGLARNKLSLLYQLAPSMGYSFSYCLPTSSSSSSGYLSIGSYNPGQYSYTPMASSSLDDSLYFIKMTGIKVAGKPLSVSSSAYSSLPTIIDSGTVITRLPTGVYSALSKAVAGAMKGTPRASAFSILDTCFQGQAARLRVPEVTMAFAGGAALKLAARNLLVDVDSATTCLAFAPARSAAIIGNTQQQTFSVVYDVKNSKIGFAAAGCS

SEQ ID NO: 28972 - protein, 335 aa, Zea mays subsp. mays
  peptide (1)..(335): Ceres Seq. ID no. 12352508
  misc_feature (1)..(329): Pfam Name: Pfam Description:  Eukaryotic aspartyl protease
  misc_feature (1)..(335): NCBI GI NO: 24430421 NR Description: 41 kD chloroplast nucleoid DNA binding protein
  misc_feature (1)..(335): NCBI GI NO: 7489168 NR Description: nucleoid DNA-binding protein cnd41
  misc_feature (1)..(335): NCBI GI NO: 22326716 NR Description: nucleoid DNA-binding protein cnd41 - like protein
  misc_feature (1)..(335): NCBI GI NO: 11358588 NR Description: nucleoid DNA-binding protein cnd41-like protein -Arabidopsis thaliana
  misc_feature (1)..(334): NCBI GI NO: 34895664 NR Description: nucleoid DNA-binding protein cnd41-like protein
  misc_feature (1)..(334): NCBI GI NO: 24417232 NR Description: unknown [Arabidopsis thaliana]
  misc_feature (1)..(334): NCBI GI NO: 15229656 NR Description: putative chloroplast nucleoid DNA-binding protein
  misc_feature (1)..(334): NCBI GI NO: 19424106 NR Description: putative chloroplast nucleoid DNA-binding protein
  misc_feature (1)..(334): NCBI GI NO: 15238250 NR Description: nucleoid DNA-binding protein cnd41 - like protein
  misc_feature (1)..(334): NCBI GI NO: 15222611 NR Description: hypothetical protein; protein id: At1g25510
MGLGTPAKSYVMVVDTGSSLTWLQCSPCVVSCHRQSGPVFNPKASSSYASVSCSAQQCSDLTTATLNPASCSTSNVCIYQASYGDSSFSVGYLSKDTVSFGSTSVPNFYYGCGQDNEGLFGQSAGLIGLARNKLSLLYQLAPSMGYSFSYCLPTSSSSSSGYLSIGSYNPGQYSYTPMASSSLDDSLYFIKMTGIKVAGKPLSVSSSAYSSLPTIIDSGTVITRLPTGVYSALSKAVAGAMKGTPRASAFSILDTCFQGQAARLRVPEVTMAFAGGAALKLAARNLLVDVDSATTCLAFAPARSAAIIGNTQQQTFSVVYDVKNSKIGFAAAGCS

SEQ ID NO: 28973 - protein, 324 aa, Zea mays subsp. mays
  peptide (1)..(324): Ceres Seq. ID no. 12352509
  misc_feature (1)..(318): Pfam Name: Pfam Description:  Eukaryotic aspartyl protease
  misc_feature (1)..(324): NCBI GI NO: 24430421 NR Description: 41 kD chloroplast nucleoid DNA binding protein
  misc_feature (1)..(324): NCBI GI NO: 7489168 NR Description: nucleoid DNA-binding protein cnd41
  misc_feature (1)..(324): NCBI GI NO: 22326716 NR Description: nucleoid DNA-binding protein cnd41 - like protein
  misc_feature (1)..(324): NCBI GI NO: 11358588 NR Description: nucleoid DNA-binding protein cnd41-like protein -Arabidopsis thaliana
  misc_feature (1)..(323): NCBI GI NO: 34895664 NR Description: nucleoid DNA-binding protein cnd41-like protein
  misc_feature (1)..(323): NCBI GI NO: 24417232 NR Description: unknown [Arabidopsis thaliana]
  misc_feature (1)..(323): NCBI GI NO: 15229656 NR Description: putative chloroplast nucleoid DNA-binding protein
  misc_feature (1)..(323): NCBI GI NO: 19424106 NR Description: putative chloroplast nucleoid DNA-binding protein
  misc_feature (1)..(323): NCBI GI NO: 15238250 NR Description: nucleoid DNA-binding protein cnd41 - like protein
  misc_feature (1)..(323): NCBI GI NO: 15222611 NR Description: hypothetical protein; protein id: At1g25510
MVVDTGSSLTWLQCSPCVVSCHRQSGPVFNPKASSSYASVSCSAQQCSDLTTATLNPASCSTSNVCIYQASYGDSSFSVGYLSKDTVSFGSTSVPNFYYGCGQDNEGLFGQSAGLIGLARNKLSLLYQLAPSMGYSFSYCLPTSSSSSSGYLSIGSYNPGQYSYTPMASSSLDDSLYFIKMTGIKVAGKPLSVSSSAYSSLPTIIDSGTVITRLPTGVYSALSKAVAGAMKGTPRASAFSILDTCFQGQAARLRVPEVTMAFAGGAALKLAARNLLVDVDSATTCLAFAPARSAAIIGNTQQQTFSVVYDVKNSKIGFAAAGCS

SEQ ID NO: 28974 - DNA, 930 bp, Zea mays subsp. mays
  misc_feature (1)..(930): Ceres Seq. ID no. 12402182
  misc_feature (244)..(244): n is a, c, t, g, unknown, or other
atcagcaagaacacgtctgcctctcaccaaccgcggcttgccaaccttctaattagcctttgacccacccccccgccgcccgccgccgcagaccatggaacacgcgtccgccttcctcgcgcgcgcgctcaccactccgctcccggcacccgccgccctcccgcgccgccgcccggctcgcgtggccgtcgccgccgcggcgccggagcgcaggccgccgggcgcggtggcgtccaccaccaantacgtcgtgccgctcgacgcggcgccgtccgggatcacgcgcccgctcgtcgagatcctccgcgacctcaacaagcgcgtcccggacgccatcgtgcggccctcctcccggcgcgcctccgcctccgaccccgtcatcccctggtaccatgccaataggatgctcagcttttatggtccaggttggtgtggggaagttcgtgatgttatttacactgacagtggaaaggtaacggtcatataccgcgtgactgtgcgcggaacagatggagaggttcacagggaggctgctggaacagcatcgctgagcgatgaacggttcgacgaccccgtgtctgcggcagaagaggcagcgttctgcaaagcctgcgcgaggttcggtttcggcctttacctgtaccatgaagacgagacaccatagaagaccaacaatttctccacatcgtctatgccggccctgttctgttcagatttgcgcttgaggggctgtgctctactgttgttgatcagtaagtctatcagatacccatcccattgctgctaggtccttgagctgttgtaacgctggtactatatgttgtttgctcgttttggtagctttgtcttgcaaaaaaatgttgtcagctacaattggtatggattatggaactattagtatatatgcaatacttttttgttgcttacctc

SEQ ID NO: 28975 - protein, 189 aa, Zea mays subsp. mays
  peptide (1)..(189): Ceres Seq. ID no. 12402183
  misc_feature (5)..(142): NCBI GI NO: 27573357 NR Description: hypothetical protein
  misc_feature (51)..(185): NCBI GI NO: 15238827 NR Description: putative protein; protein id: At5g47870
  misc_feature (51)..(185): NCBI GI NO: 21593360 NR Description: unknown [Arabidopsis thaliana]
  misc_feature (10)..(186): NCBI GI NO: 34907336 NR Description: putative SnRK1-interacting protein 1
  misc_feature (56)..(186): NCBI GI NO: 15224018 NR Description: hypothetical protein; protein id: At1g71310.1
  misc_feature (20)..(186): NCBI GI NO: 9367245 NR Description: SnRK1-interacting protein 1
  misc_feature (50)..(50): Xaa is any aa, unknown or other
MEHASAFLARALTTPLPAPAALPRRRPARVAVAAAAPERRPPGAVASTTXYVVPLDAAPSGITRPLVEILRDLNKRVPDAIVRPSSRRASASDPVIPWYHANRMLSFYGPGWCGEVRDVIYTDSGKVTVIYRVTVRGTDGEVHREAAGTASLSDERFDDPVSAAEEAAFCKACARFGFGLYLYHEDETP

SEQ ID NO: 28976 - DNA, 857 bp, Zea mays subsp. mays
  misc_feature (1)..(857): Ceres Seq. ID no. 12351562
aacttccgcccaaatccaccaccgccataccagcgtgtccgcgattccgtcgagtagactgggcgagagagtagtctcggacgagaagaggcgaatatgagttccggcggcggcaggggcaagcccaaggggtccaaggctgtgtcgcggtcgaccaaggccgggctgcagttccccgtcggccgcatcgcgcgctacctcaaggccggcaagtacgccgagcgcgtcggcggtggtgcgcccgtctacctctccgccgtcctcgagtatctcgcggcagaggtaactgcctccctcttcttttccctgccctccatttctctccccccctccctttagcgaatccgtttggatgtttgttgaatctttgcggtacgctcataatcgtttgcctgcaggtgttggaactggcgggcaacgcggcgcgcgacaacaagaagaaccgcatcgtgccgcgtcacatccagctcgccgtgcgcaacgacgaggaactcagcaagctgctcggagctgtcaccatcgccgccggaggtgtgttgcccaacattcatcagacgctgctgcccaagaaggccggtgggaagggcaaggccgacatcggttccgcatcccaggagttctaagcggccgcggcggcggttgcaggtttctctgacttgttcgaactggagctccaacatgcatgaagtccccccgttgctcaagtttcgtcgattagtagtgttagggtgttttctatctttggttaggtttaggttgtctgatggatggtttatcagacgaaagtttggtgatcgagggcttcctgtatgtatcaatcaatcttgctggaatggaacaaatcgttggttgcagtt

SEQ ID NO: 28977 - protein, 100 aa, Zea mays subsp. mays
  peptide (1)..(100): Ceres Seq. ID no. 12351563
MFVESLRYAHNRLPAGVGTGGQRGARQQEEPHRAASHPARRAQRRGTQQAARSCHHRRRRCVAQHSSDAAAQEGRWEGQGRHRFRIPGVLSGRGGGCRFL

SEQ ID NO: 28978 - protein, 80 aa, Zea mays subsp. mays
  peptide (1)..(80): Ceres Seq. ID no. 12351564
  misc_feature (5)..(63): Pfam Name: Pfam Description:  Core histone H2A/H2B/H3/H4
  misc_feature (1)..(63): NCBI GI NO: 29612542 NR Description: Unknown (protein for IMAGE:6033710) [Danio rerio]
  misc_feature (5)..(63): NCBI GI NO: 12856110 NR Description: unnamed protein product [Mus musculus]
  misc_feature (3)..(63): NCBI GI NO: 21703314 NR Description: histone 2A Z variant [Boltenia villosa]
  misc_feature (3)..(63): NCBI GI NO: 4504255 NR Description: H2A histone family, member Z; H2AZ histone
  misc_feature (3)..(63): NCBI GI NO: 17738227 NR Description: Histone H2A variant CG5499-PA
  misc_feature (3)..(63): NCBI GI NO: 6912616 NR Description: histone H2A
  misc_feature (1)..(63): NCBI GI NO: 20514361 NR Description: histone H2A.F/Z [Toxoplasma gondii]
  misc_feature (5)..(63): NCBI GI NO: 13385734 NR Description: RIKEN cDNA 4933432H23 [Mus musculus]
  misc_feature (1)..(63): NCBI GI NO: 21321778 NR Description: unknown protein
  misc_feature (5)..(63): NCBI GI NO: 15214035 NR Description: Histone H2A
MSSGGGRGKPKGSKAVSRSTKAGLQFPVGRIARYLKAGKYAERVGGGAPVYLSAVLEYLAAEVTASLFFSLPSISLPPSL

SEQ ID NO: 28979 - protein, 59 aa, Zea mays subsp. mays
  peptide (1)..(59): Ceres Seq. ID no. 12351565
MHEVPPLLKFRRLVVLGCFLSLVRFRLSDGWFIRRKFGDRGLPVCINQSCWNGTNRWLQ

SEQ ID NO: 28980 - DNA, 765 bp, Zea mays subsp. mays
  misc_feature (1)..(765): Ceres Seq. ID no. 12403404
ttccaaaacccaacgcggcaaacggcttcctcatccccctcccctcgccatggccgtccccacctccacctcctccccgctccccctcctcttcctccatcgctgcaccgcaaactctagcccctcggttctctccttcccgtcctccctccgcggcgcgtccctccgctcccgggccgcggccgcaccgcccgcagagaccctctctgccgacggcatccccgacgcgccaccggaaggggcgggaacgggaattccgttgccatcgtcgattggggatgatggggagcagcttgcacccaagcagaagatcagaatcaagctgcggtcctactgggtgccgttgatagaggactcgtgcaagaagataaccgaagctgccaaaacaaccaacgcaaagaccatgggtcccgttcctctgcccactaagaggagagtctattgtgtgcttaactctcctcacgtgcacaaggactcacggttccatttcgagatccggacgcatcagcggctgattgatatcatgtatccaactgcccaaacaattgattcgttgatgcaactccagctccctgccggtgtggatgttgaggttaagctatgattctgttggagctgaacttttcgaagtttgatgtaatgaggtattcattttctgcagcttttctctgggactgaaagaaatgtagtgcctgtactaggaaagaagatgttcagaattgaatgtacttgatttgaagtatatcagatgatatggttcatgcc

SEQ ID NO: 28981 - protein, 200 aa, Zea mays subsp. mays
  peptide (1)..(200): Ceres Seq. ID no. 12403405
  misc_feature (103)..(198): Pfam Name: Pfam Description:  Ribosomal protein S10p/S20e
  misc_feature (17)..(200): NCBI GI NO: 15231154 NR Description: 30S ribosomal protein S10, putative
  misc_feature (14)..(200): NCBI GI NO: 7578929 NR Description: plastid ribosomal protein S10 precursor
  misc_feature (103)..(200): NCBI GI NO: 11465752 NR Description: ribosomal protein S10 [Porphyra purpurea]
  misc_feature (103)..(200): NCBI GI NO: 11467349 NR Description: ribosomal protein S10 [Cyanophora paradoxa]
  misc_feature (101)..(200): NCBI GI NO: 23125142 NR Description: hypothetical protein [Nostoc punctiforme]
  misc_feature (101)..(200): NCBI GI NO: 1350919 NR Description: 30S ribosomal protein S10
  misc_feature (101)..(200): NCBI GI NO: 16330912 NR Description: 30S ribosomal protein S10
  misc_feature (100)..(200): NCBI GI NO: 15644249 NR Description: ribosomal protein S10 [Thermotoga maritima]
  misc_feature (101)..(200): NCBI GI NO: 11467745 NR Description: ribosomal protein S10 [Guillardia theta]
  misc_feature (101)..(200): NCBI GI NO: 17231828 NR Description: 30S ribosomal protein S10 [Nostoc sp. PCC 7120]
SKTQRGKRLPHPPPLAMAVPTSTSSPLPLLFLHRCTANSSPSVLSFPSSLRGASLRSRAAAAPPAETLSADGIPDAPPEGAGTGIPLPSSIGDDGEQLAPKQKIRIKLRSYWVPLIEDSCKKITEAAKTTNAKTMGPVPLPTKRRVYCVLNSPHVHKDSRFHFEIRTHQRLIDIMYPTAQTIDSLMQLQLPAGVDVEVKL

SEQ ID NO: 28982 - protein, 184 aa, Zea mays subsp. mays
  peptide (1)..(184): Ceres Seq. ID no. 12403406
  misc_feature (87)..(182): Pfam Name: Pfam Description:  Ribosomal protein S10p/S20e
  misc_feature (1)..(184): NCBI GI NO: 15231154 NR Description: 30S ribosomal protein S10, putative
  misc_feature (1)..(184): NCBI GI NO: 7578929 NR Description: plastid ribosomal protein S10 precursor
  misc_feature (87)..(184): NCBI GI NO: 11465752 NR Description: ribosomal protein S10 [Porphyra purpurea]
  misc_feature (87)..(184): NCBI GI NO: 11467349 NR Description: ribosomal protein S10 [Cyanophora paradoxa]
  misc_feature (85)..(184): NCBI GI NO: 23125142 NR Description: hypothetical protein [Nostoc punctiforme]
  misc_feature (85)..(184): NCBI GI NO: 1350919 NR Description: 30S ribosomal protein S10
  misc_feature (85)..(184): NCBI GI NO: 16330912 NR Description: 30S ribosomal protein S10
  misc_feature (84)..(184): NCBI GI NO: 15644249 NR Description: ribosomal protein S10 [Thermotoga maritima]
  misc_feature (85)..(184): NCBI GI NO: 11467745 NR Description: ribosomal protein S10 [Guillardia theta]
  misc_feature (85)..(184): NCBI GI NO: 17231828 NR Description: 30S ribosomal protein S10 [Nostoc sp. PCC 7120]
MAVPTSTSSPLPLLFLHRCTANSSPSVLSFPSSLRGASLRSRAAAAPPAETLSADGIPDAPPEGAGTGIPLPSSIGDDGEQLAPKQKIRIKLRSYWVPLIEDSCKKITEAAKTTNAKTMGPVPLPTKRRVYCVLNSPHVHKDSRFHFEIRTHQRLIDIMYPTAQTIDSLMQLQLPAGVDVEVKL

SEQ ID NO: 28983 - protein, 114 aa, Zea mays subsp. mays
  peptide (1)..(114): Ceres Seq. ID no. 12403407
  misc_feature (1)..(74): Pfam Name: Pfam Description:  Extensin-like region
  misc_feature (12)..(79): NCBI GI NO: 38346367 NR Description: OSJNBa0011E07.13
PKPNAANGFLIPLPSPWPSPPPPPPRSPSSSSIAAPQTLAPRFSPSRPPSAARPSAPGPRPHRPQRPSLPTASPTRHRKGREREFRCHRRLGMMGSSLHPSRRSESSCGPTGCR

SEQ ID NO: 28984 - DNA, 479 bp, Zea mays subsp. mays
  misc_feature (1)..(479): Ceres Seq. ID no. 6403897
  misc_feature (179)..(179): n is a, c, t, g, unknown, or other
atatatccagtcccgtggagtagcgacggtatcgtgggtagcttccttctcgcatcgactagcagtgtttcacgcggttttgtttggcctaggagctgctggatctgcacgtttagcccggttacgtacatatgaatgttgaaaagctcaagaagatggcaggtgctgtgcgcaccggnggggaagggtagcgtgcgcaggaagaagaaggcagtccacaagactacaaccacagatgacaaacggcttcaaagcaccttgaaaagaataggagtgaacagcattcctggtattgaagaggtcaacatctttaaggatgatgttgttattcagtttgtaaatcctaaagtgcaagcgtcaattggtgctaatacatgggtggtcagtggaactccacagacaaagaagctgcaagatctgcttccgtcgattatcaaccagcttggtcctgacaacctggacaatctgcggaggctcgc

SEQ ID NO: 28985 - protein, 114 aa, Zea mays subsp. mays
  peptide (1)..(114): Ceres Seq. ID no. 6403898
  misc_feature (33)..(91): Pfam Name: Pfam Description:  NAC domain
  misc_feature (16)..(113): NCBI GI NO: 37535464 NR Description: putative transcription factor
  misc_feature (16)..(113): NCBI GI NO: 24431603 NR Description: Putative transcription factor
  misc_feature (16)..(113): NCBI GI NO: 29367567 NR Description: putative transcription factor BTF3
  misc_feature (16)..(105): NCBI GI NO: 29367579 NR Description: putative transcription factor BTF3
  misc_feature (16)..(113): NCBI GI NO: 27573340 NR Description: putative transcription factor
  misc_feature (16)..(113): NCBI GI NO: 33945882 NR Description: transcription factor homolog BTF3-like protein
  misc_feature (16)..(112): NCBI GI NO: 7441988 NR Description: transcription factor homolog BTF3
  misc_feature (16)..(113): NCBI GI NO: 15219413 NR Description: putative transcription factor BTF3
  misc_feature (16)..(113): NCBI GI NO: 21537065 NR Description: putative transcription factor BTF3
  misc_feature (16)..(113): NCBI GI NO: 15220876 NR Description: transcription factor, putative
  misc_feature (15)..(15): Xaa is any aa, unknown or other
MLKSSRRWQVLCAPXGKGSVRRKKKAVHKTTTTDDKRLQSTLKRIGVNSIPGIEEVNIFKDDVVIQFVNPKVQASIGANTWVVSGTPQTKKLQDLLPSIINQLGPDNLDNLRRL

SEQ ID NO: 28986 - DNA, 1147 bp, Zea mays subsp. mays
  misc_feature (1)..(1147): Ceres Seq. ID no. 13628192
aacccctgcaaaaacccgccactctcagatccgcacagcgacgcccgccagccagacccgatcccctccctcgctagggttttcgtccccgcgccgccgcgctcccggatcccaccgaaacaaccatggccggcggtcccgcggcggtgtcgttcctgaccaacatcgcgaaggtggctgcggggctcggagccgcggcctcgctcgcctccgcgtcgctctacaccgtcgacggcggcgagcgcgccgtcatcttcgaccgtttccgcggggtgctcccggagaccgtcggcgagggcacccatttcctcgtgccctggctgcagaagcccttcatcttcgacatccgcacgcgcccgcacaacttctcctccaactcggggaccaaggacctgcagatggtcaacctcacgctccgtctcctctcccgccccgacgtccagcacctccccaccatcttcacctccctcggactcgagtacgacgacaaagtgctcccctccatcggcaacgaggtgctcaaggccgtcgtcgcccagttcaatgccgaccagctcctcaccgaccgcccccacgtctccgccctcgtccgcgacgctctcatccgccgcgcccgcgagttcaacatcatcctcgacgacgtcgccatcacccacctctcctatggtatcgagttctcgctggccgttgagaagaagcaggtcgcgcagcaggaggccgagcgctccaagttcctcgtcgccaaggcggagcaggagaggcgggcggccatcgtgcgcgctgagggagagagcgagtccgcgcgcctcatctctgaggccacggcgatggctgggacagggctgatcgagctcaggaggatcgaggcggccaaggagattgccgcagagctggctcgctcaccgaatgtggcatacattccttctggggaaaacggaaagatgctgcttggtctcaatgctactggatttggccggtgattcactgtttttttagtctgcttgtgctatgtgctgatgcatgactaaaacggaggttcgaactttgaaggacagtgatatctgctatccttgcttatgttaagttttccttgtcttggaactaaatgtgtctgttgtgctccaaataagttttggtttttgactgc

SEQ ID NO: 28987 - protein, 284 aa, Zea mays subsp. mays
  peptide (1)..(284): Ceres Seq. ID no. 13628193
  misc_feature (1)..(284): NCBI GI NO: 7716458 NR Description: prohibitin [Zea mays]
  misc_feature (1)..(284): NCBI GI NO: 38567717 NR Description: B1358B12.15
  misc_feature (3)..(279): NCBI GI NO: 7716460 NR Description: prohibitin [Zea mays]
  misc_feature (1)..(280): NCBI GI NO: 7489185 NR Description: prohibitin - common tobacco
  misc_feature (1)..(278): NCBI GI NO: 15237488 NR Description: prohibitin (gb|AAC49691.1) [Arabidopsis thaliana]
  misc_feature (1)..(278): NCBI GI NO: 15232129 NR Description: prohibitin -related [Arabidopsis thaliana]
  misc_feature (1)..(278): NCBI GI NO: 21592895 NR Description: prohibitin, putative [Arabidopsis thaliana]
  misc_feature (1)..(278): NCBI GI NO: 27765032 NR Description: At3g27280 [Arabidopsis thaliana]
  misc_feature (130)..(278): NCBI GI NO: 15241367 NR Description: prohibitin - like protein [Arabidopsis thaliana]
  misc_feature (12)..(105): NCBI GI NO: 15241367 NR Description: prohibitin - like protein [Arabidopsis thaliana]
MAGGPAAVSFLTNIAKVAAGLGAAASLASASLYTVDGGERAVIFDRFRGVLPETVGEGTHFLVPWLQKPFIFDIRTRPHNFSSNSGTKDLQMVNLTLRLLSRPDVQHLPTIFTSLGLEYDDKVLPSIGNEVLKAVVAQFNADQLLTDRPHVSALVRDALIRRAREFNIILDDVAITHLSYGIEFSLAVEKKQVAQQEAERSKFLVAKAEQERRAAIVRAEGESESARLISEATAMAGTGLIELRRIEAAKEIAAELARSPNVAYIPSGENGKMLLGLNATGFGR

SEQ ID NO: 28988 - protein, 229 aa, Zea mays subsp. mays
  peptide (1)..(229): Ceres Seq. ID no. 13628194
TPAKTRHSQIRTATPASQTRSPPSLGFSSPRRRAPGSHRNNHGRRSRGGVVPDQHREGGCGARSRGLARLRVALHRRRRRARRHLRPFPRGAPGDRRRGHPFPRALAAEALHLRHPHAPAQLLLQLGDQGPADGQPHAPSPLPPRRPAPPHHLHLPRTRVRRQSAPLHRQRGAQGRRRPVQCRPAPHRPPPRLRPRPRRSHPPRPRVQHHPRRRRHHPPLLWYRVLAGR

SEQ ID NO: 28989 - protein, 193 aa, Zea mays subsp. mays
  peptide (1)..(193): Ceres Seq. ID no. 13628195
  misc_feature (1)..(193): NCBI GI NO: 7716458 NR Description: prohibitin [Zea mays]
  misc_feature (1)..(193): NCBI GI NO: 38567717 NR Description: B1358B12.15
  misc_feature (1)..(188): NCBI GI NO: 7716460 NR Description: prohibitin [Zea mays]
  misc_feature (1)..(189): NCBI GI NO: 7489185 NR Description: prohibitin - common tobacco
  misc_feature (1)..(187): NCBI GI NO: 15237488 NR Description: prohibitin (gb|AAC49691.1) [Arabidopsis thaliana]
  misc_feature (1)..(187): NCBI GI NO: 15232129 NR Description: prohibitin -related [Arabidopsis thaliana]
  misc_feature (1)..(187): NCBI GI NO: 21592895 NR Description: prohibitin, putative [Arabidopsis thaliana]
  misc_feature (1)..(187): NCBI GI NO: 27765032 NR Description: At3g27280 [Arabidopsis thaliana]
  misc_feature (39)..(187): NCBI GI NO: 15241367 NR Description: prohibitin - like protein [Arabidopsis thaliana]
  misc_feature (1)..(14): NCBI GI NO: 15241367 NR Description: prohibitin - like protein [Arabidopsis thaliana]
MVNLTLRLLSRPDVQHLPTIFTSLGLEYDDKVLPSIGNEVLKAVVAQFNADQLLTDRPHVSALVRDALIRRAREFNIILDDVAITHLSYGIEFSLAVEKKQVAQQEAERSKFLVAKAEQERRAAIVRAEGESESARLISEATAMAGTGLIELRRIEAAKEIAAELARSPNVAYIPSGENGKMLLGLNATGFGR

SEQ ID NO: 28990 - DNA, 734 bp, Zea mays subsp. mays
  misc_feature (1)..(734): Ceres Seq. ID no. 12401914
  misc_feature (523)..(523): n is a, c, t, g, unknown, or other
  misc_feature (511)..(511): n is a, c, t, g, unknown, or other
  misc_feature (547)..(547): n is a, c, t, g, unknown, or other
  misc_feature (270)..(270): n is a, c, t, g, unknown, or other
acccacccacccaccgagctgcctgctacacccctgccaagatccatctttccggttccgccgcctgatcgaagtgaacaagcaagtaagagccatggcgagcgagcacgcggcggggggcgatgctaagcatcaccagaagcagagcctgatggacaaggcgaaggggttcgtcgcggagaagatcgcgcacatccccaagcccgaggccacgctggacggcgtgacgttcaagggcctgagccgggagtgcatcacgctgcacagcancgtgaacgtgtccaacccctacgaccaccgcctccccatctgcgaggtgacctacacgctccggtgcgccggcaaggaggtggcgtccggcaccatgccggaccccggctggatcgccgccagcggctccaccgcgctggagatccccgccaaggtgccctacgacttcctcgtctccctcgtcagggacgtcggccgggactgggacatcgactacgagctccaggtcgggctcaccgtngacctccccatngtcggcaacttcaccatcccgctntccacctctggcgagttcaagctccccaccctcaaggacttgttctgatctagtagtagctcgcttgccttgtgttctgtgcgggcgcgcaccagcgatctgtacgacgagcttttgcaaataaacgacgcagctcctctgttctatatatctcagtgaatgcctaagctaaggggatggatggttt

SEQ ID NO: 28991 - protein, 197 aa, Zea mays subsp. mays
  peptide (1)..(197): Ceres Seq. ID no. 12401915
  misc_feature (50)..(196): Pfam Name: Pfam Description:  Late embryogenesis abundant protein
  misc_feature (39)..(196): NCBI GI NO: 34912834 NR Description: putative embryogenesis-abundant protein
  misc_feature (50)..(197): NCBI GI NO: 34904186 NR Description: putative late embryogenesis abundant protein LEA14-A
  misc_feature (50)..(197): NCBI GI NO: 1170745 NR Description: Late embryogenesis abundant protein Lea14-A
  misc_feature (51)..(197): NCBI GI NO: 7595792 NR Description: late-embryogenesis abundant protein
  misc_feature (50)..(197): NCBI GI NO: 1170746 NR Description: Desiccation protectant protein Lea14 homolog
  misc_feature (32)..(197): NCBI GI NO: 15225930 NR Description: putative desiccation related protein
  misc_feature (32)..(197): NCBI GI NO: 21555248 NR Description: putative desiccation related protein
  misc_feature (49)..(197): NCBI GI NO: 15223413 NR Description: hypothetical protein; protein id: At1g01470
  misc_feature (49)..(197): NCBI GI NO: 3850842 NR Description: Lea protein [Pseudotsuga menziesii]
  misc_feature (50)..(197): NCBI GI NO: 7489027 NR Description: late embryogenesis (Lea)-like protein - tomato
  misc_feature (90)..(90): Xaa is any aa, unknown or other
  misc_feature (170)..(170): Xaa is any aa, unknown or other
  misc_feature (174)..(174): Xaa is any aa, unknown or other
  misc_feature (182)..(182): Xaa is any aa, unknown or other
PTHPPSCLLHPCQDPSFRFRRLIEVNKQVRAMASEHAAGGDAKHHQKQSLMDKAKGFVAEKIAHIPKPEATLDGVTFKGLSRECITLHSXVNVSNPYDHRLPICEVTYTLRCAGKEVASGTMPDPGWIAASGSTALEIPAKVPYDFLVSLVRDVGRDWDIDYELQVGLTXDLPXVGNFTIPXSTSGEFKLPTLKDLF

SEQ ID NO: 28992 - protein, 166 aa, Zea mays subsp. mays
  peptide (1)..(166): Ceres Seq. ID no. 12401916
  misc_feature (19)..(165): Pfam Name: Pfam Description:  Late embryogenesis abundant protein
  misc_feature (8)..(165): NCBI GI NO: 34912834 NR Description: putative embryogenesis-abundant protein
  misc_feature (19)..(166): NCBI GI NO: 34904186 NR Description: putative late embryogenesis abundant protein LEA14-A
  misc_feature (19)..(166): NCBI GI NO: 1170745 NR Description: Late embryogenesis abundant protein Lea14-A
  misc_feature (20)..(166): NCBI GI NO: 7595792 NR Description: late-embryogenesis abundant protein
  misc_feature (19)..(166): NCBI GI NO: 1170746 NR Description: Desiccation protectant protein Lea14 homolog
  misc_feature (1)..(166): NCBI GI NO: 15225930 NR Description: putative desiccation related protein
  misc_feature (1)..(166): NCBI GI NO: 21555248 NR Description: putative desiccation related protein
  misc_feature (18)..(166): NCBI GI NO: 15223413 NR Description: hypothetical protein; protein id: At1g01470
  misc_feature (18)..(166): NCBI GI NO: 3850842 NR Description: Lea protein [Pseudotsuga menziesii]
  misc_feature (19)..(166): NCBI GI NO: 7489027 NR Description: late embryogenesis (Lea)-like protein - tomato
  misc_feature (59)..(59): Xaa is any aa, unknown or other
  misc_feature (139)..(139): Xaa is any aa, unknown or other
  misc_feature (143)..(143): Xaa is any aa, unknown or other
  misc_feature (151)..(151): Xaa is any aa, unknown or other
MASEHAAGGDAKHHQKQSLMDKAKGFVAEKIAHIPKPEATLDGVTFKGLSRECITLHSXVNVSNPYDHRLPICEVTYTLRCAGKEVASGTMPDPGWIAASGSTALEIPAKVPYDFLVSLVRDVGRDWDIDYELQVGLTXDLPXVGNFTIPXSTSGEFKLPTLKDLF

SEQ ID NO: 28993 - protein, 147 aa, Zea mays subsp. mays
  peptide (1)..(147): Ceres Seq. ID no. 12401917
  misc_feature (1)..(146): Pfam Name: Pfam Description:  Late embryogenesis abundant protein
  misc_feature (1)..(146): NCBI GI NO: 34912834 NR Description: putative embryogenesis-abundant protein
  misc_feature (1)..(147): NCBI GI NO: 34904186 NR Description: putative late embryogenesis abundant protein LEA14-A
  misc_feature (1)..(147): NCBI GI NO: 1170745 NR Description: Late embryogenesis abundant protein Lea14-A
  misc_feature (1)..(147): NCBI GI NO: 7595792 NR Description: late-embryogenesis abundant protein
  misc_feature (1)..(147): NCBI GI NO: 1170746 NR Description: Desiccation protectant protein Lea14 homolog
  misc_feature (1)..(147): NCBI GI NO: 15225930 NR Description: putative desiccation related protein
  misc_feature (1)..(147): NCBI GI NO: 21555248 NR Description: putative desiccation related protein
  misc_feature (1)..(147): NCBI GI NO: 15223413 NR Description: hypothetical protein; protein id: At1g01470
  misc_feature (1)..(147): NCBI GI NO: 3850842 NR Description: Lea protein [Pseudotsuga menziesii]
  misc_feature (1)..(147): NCBI GI NO: 7489027 NR Description: late embryogenesis (Lea)-like protein - tomato
  misc_feature (40)..(40): Xaa is any aa, unknown or other
  misc_feature (120)..(120): Xaa is any aa, unknown or other
  misc_feature (124)..(124): Xaa is any aa, unknown or other
  misc_feature (132)..(132): Xaa is any aa, unknown or other
MDKAKGFVAEKIAHIPKPEATLDGVTFKGLSRECITLHSXVNVSNPYDHRLPICEVTYTLRCAGKEVASGTMPDPGWIAASGSTALEIPAKVPYDFLVSLVRDVGRDWDIDYELQVGLTXDLPXVGNFTIPXSTSGEFKLPTLKDLF

SEQ ID NO: 28994 - DNA, 1017 bp, Zea mays subsp. mays; identical to SEQ ID NO: 24473
  misc_feature (1)..(1017): Ceres Seq. ID no. 12402465

SEQ ID NO: 28995 - protein, 255 aa, Zea mays subsp. mays; identical to SEQ ID NO: 24474
  peptide (1)..(255): Ceres Seq. ID no. 12402466
  misc_feature (90)..(243): Pfam Name: Pfam Description:  CRAL/TRIO domain
  misc_feature (3)..(248): NCBI GI NO: 27573358 NR Description: putative phosphatidylinositol/phosphatidylcholinetransfer protein
  misc_feature (6)..(246): NCBI GI NO: 7488696 NR Description: polyphosphoinositide binding protein Ssh2
  misc_feature (17)..(247): NCBI GI NO: 34907052 NR Description: sec14 like protein
  misc_feature (1)..(246): NCBI GI NO: 15223439 NR Description: SEC14 cytosolic factor, putative
  misc_feature (17)..(247): NCBI GI NO: 2286121 NR Description: sec14 like protein [Oryza sativa]
  misc_feature (1)..(246): NCBI GI NO: 17226662 NR Description: polyphosphoinositide binding protein
  misc_feature (54)..(246): NCBI GI NO: 19347976 NR Description: putative polyphosphoinositide binding protein
  misc_feature (36)..(245): NCBI GI NO: 30684014 NR Description: SEC14 cytosolic factor, putative
  misc_feature (36)..(245): NCBI GI NO: 25402783 NR Description: protein F10B6.22 [imported] - Arabidopsis thaliana
  misc_feature (40)..(242): NCBI GI NO: 34903076 NR Description: unnamed protein product

SEQ ID NO: 28996 - protein, 220 aa, Zea mays subsp. mays; identical to SEQ ID NO: 24475
  peptide (1)..(220): Ceres Seq. ID no. 12402467
  misc_feature (3)..(220): Pfam Name: Pfam Description:  Equine herpesvirus glycoprotein gp2
  misc_feature (1)..(215): NCBI GI NO: 13592175 NR Description: ppg3 [Leishmania major]
  misc_feature (1)..(220): NCBI GI NO: 13592175 NR Description: ppg3 [Leishmania major]
  misc_feature (1)..(215): NCBI GI NO: 13592175 NR Description: ppg3 [Leishmania major]
  misc_feature (1)..(210): NCBI GI NO: 13592175 NR Description: ppg3 [Leishmania major]
  misc_feature (1)..(210): NCBI GI NO: 13592175 NR Description: ppg3 [Leishmania major]
  misc_feature (1)..(220): NCBI GI NO: 13592175 NR Description: ppg3 [Leishmania major]
  misc_feature (1)..(220): NCBI GI NO: 13592175 NR Description: ppg3 [Leishmania major]
  misc_feature (1)..(210): NCBI GI NO: 13592175 NR Description: ppg3 [Leishmania major]
  misc_feature (1)..(215): NCBI GI NO: 13592175 NR Description: ppg3 [Leishmania major]
  misc_feature (1)..(210): NCBI GI NO: 13592175 NR Description: ppg3 [Leishmania major]

SEQ ID NO: 28997 - protein, 196 aa, Zea mays subsp. mays; identical to SEQ ID NO: 24476
  peptide (1)..(196): Ceres Seq. ID no. 12402468
  misc_feature (31)..(184): Pfam Name: Pfam Description:  CRAL/TRIO domain
  misc_feature (1)..(189): NCBI GI NO: 27573358 NR Description: putative phosphatidylinositol/phosphatidylcholinetransfer protein
  misc_feature (1)..(187): NCBI GI NO: 7488696 NR Description: polyphosphoinositide binding protein Ssh2
  misc_feature (1)..(188): NCBI GI NO: 34907052 NR Description: sec14 like protein
  misc_feature (1)..(187): NCBI GI NO: 15223439 NR Description: SEC14 cytosolic factor, putative
  misc_feature (1)..(188): NCBI GI NO: 2286121 NR Description: sec14 like protein [Oryza sativa]
  misc_feature (1)..(187): NCBI GI NO: 17226662 NR Description: polyphosphoinositide binding protein
  misc_feature (1)..(187): NCBI GI NO: 19347976 NR Description: putative polyphosphoinositide binding protein
  misc_feature (1)..(186): NCBI GI NO: 30684014 NR Description: SEC14 cytosolic factor, putative
  misc_feature (1)..(186): NCBI GI NO: 25402783 NR Description: protein F10B6.22 [imported] - Arabidopsis thaliana
  misc_feature (1)..(183): NCBI GI NO: 34903076 NR Description: unnamed protein product

SEQ ID NO: 28998 - DNA, 1053 bp, Zea mays subsp. mays
  misc_feature (1)..(1053): Ceres Seq. ID no. 12365672
atccatccgcgcgctcttaatttagcttcctcctccgatcctcacctactagcaggcacagacagcagcatcgatcggatcggagcagcacagcgcgcgtcaccgcaagctcaagtgtcttcttccttgcttgcttgcctgcttacctctcagttccccactcacgtctcttgccgtacgtacgtgcgtccaacacaccaggtgaaaatgggctcggagacggagacggtcaacgtggaaggcatcccgttcccggcggagatcaccgtcggcaaccctctctccctcctaggcacaggcatcacggacatcgagatccacttcctgcagatcaagtacaacgccatcggagtctatctccacaacgccggcggcggcgacagcaccacgctgctgggccacctcggggcctggaagggcaagacggcggaggagctcctagcggacgccgccttctgggccgcgctggtggcggcccccgtcgagaagctgttccgcgtcgtggtcatcaaggagatcaagggctcgcagtacggcgtgcagcttgagagctccgtccgcgaccgcctcgccgccgccgacctctacgaggacgacgaagaggaggcgctcgagaaggtcgccgacttcttccagtccaagtacttcaagccgggctccgtcgtcaccttccacttcccggcaccggcctccgcctccccgggacccgcggcggagatcaccttcgcgacggagggcaagggcgacgccaggatcgcggtggagaacgggaacgtcgccgggatgatccagacctggtacctcggcggcgactccgcggtgtcccccagcaccgtccgcagcctggccgaccgtttcgccgcgctgctcgccgtcgcagcgtgatttatatgatgctcagtctgctttaatctaatttccggccggttggtcgagttgcgttggatttgagttcgtgaatgtccgttctgtacgcgtcttgtctcgtgtgtgttgtcgtttgcagcgaatttgcaagtaataataataaaaagtatgtcctgtaggttgtgc

SEQ ID NO: 28999 - protein, 294 aa, Zea mays subsp. mays
  peptide (1)..(294): Ceres Seq. ID no. 12365673
  misc_feature (74)..(290): Pfam Name: Pfam Description:  Chalcone-flavanone isomerase
  misc_feature (74)..(290): NCBI GI NO: 18414838 NR Description: putative protein; protein id: At5g05270.1
  misc_feature (77)..(290): NCBI GI NO: 10176739 NR Description: contains similarity to chalcone-flavonone isomerase
  misc_feature (72)..(294): NCBI GI NO: 4126399 NR Description: chalcone isomerase [Citrus sinensis]
  misc_feature (72)..(290): NCBI GI NO: 68481 NR Description: chalcone isomerase (EC 5
  misc_feature (70)..(290): NCBI GI NO: 116134 NR Description: CHALCONE--FLAVONONE ISOMERASE 1
  misc_feature (70)..(290): NCBI GI NO: 20152984 NR Description: chalcone isomerase
  misc_feature (70)..(290): NCBI GI NO: 22218881 NR Description: Chain A, Chalcone Isomerase--T48a Mutant
  misc_feature (70)..(290): NCBI GI NO: 29124145 NR Description: chalcone isomerase
  misc_feature (85)..(290): NCBI GI NO: 116136 NR Description: CHALCONE--FLAVONONE ISOMERASE A
  misc_feature (85)..(290): NCBI GI NO: 228617 NR Description: chalcone flavanone isomerase
IHPRALNLASSSDPHLLAGTDSSIDRIGAAQRASPQAQVSSSLLACLLTSQFPTHVSCRTYVRPTHQVKMGSETETVNVEGIPFPAEITVGNPLSLLGTGITDIEIHFLQIKYNAIGVYLHNAGGGDSTTLLGHLGAWKGKTAEELLADAAFWAALVAAPVEKLFRVVVIKEIKGSQYGVQLESSVRDRLAAADLYEDDEEEALEKVADFFQSKYFKPGSVVTFHFPAPASASPGPAAEITFATEGKGDARIAVENGNVAGMIQTWYLGGDSAVSPSTVRSLADRFAALLAVAA

SEQ ID NO: 29000 - protein, 225 aa, Zea mays subsp. mays
  peptide (1)..(225): Ceres Seq. ID no. 12365674
  misc_feature (5)..(221): Pfam Name: Pfam Description:  Chalcone-flavanone isomerase
  misc_feature (5)..(221): NCBI GI NO: 18414838 NR Description: putative protein; protein id: At5g05270.1
  misc_feature (8)..(221): NCBI GI NO: 10176739 NR Description: contains similarity to chalcone-flavonone isomerase
  misc_feature (3)..(225): NCBI GI NO: 4126399 NR Description: chalcone isomerase [Citrus sinensis]
  misc_feature (3)..(221): NCBI GI NO: 68481 NR Description: chalcone isomerase (EC 5
  misc_feature (1)..(221): NCBI GI NO: 116134 NR Description: CHALCONE--FLAVONONE ISOMERASE 1
  misc_feature (1)..(221): NCBI GI NO: 20152984 NR Description: chalcone isomerase
  misc_feature (1)..(221): NCBI GI NO: 22218881 NR Description: Chain A, Chalcone Isomerase--T48a Mutant
  misc_feature (1)..(221): NCBI GI NO: 29124145 NR Description: chalcone isomerase
  misc_feature (16)..(221): NCBI GI NO: 116136 NR Description: CHALCONE--FLAVONONE ISOMERASE A
  misc_feature (16)..(221): NCBI GI NO: 228617 NR Description: chalcone flavanone isomerase
MGSETETVNVEGIPFPAEITVGNPLSLLGTGITDIEIHFLQIKYNAIGVYLHNAGGGDSTTLLGHLGAWKGKTAEELLADAAFWAALVAAPVEKLFRVVVIKEIKGSQYGVQLESSVRDRLAAADLYEDDEEEALEKVADFFQSKYFKPGSVVTFHFPAPASASPGPAAEITFATEGKGDARIAVENGNVAGMIQTWYLGGDSAVSPSTVRSLADRFAALLAVAA

SEQ ID NO: 29001 - DNA, 1048 bp, Zea mays subsp. mays
  misc_feature (1)..(1048): Ceres Seq. ID no. 12336653
gctgtcctactccacacaccgcgctcacctactccaatccagacccctctctccctcacccacagtccccgccggcgccgcgtccgcgtcctgtgcgcctcgctcactctgcttccgccgccgccgcagcagtcgtctcgcagcggagcggacccggaggcctaccatggcagcggcaatctcgctggaggccggcggggccctggcccatgacctagggtctgcagtcgtcacaggtggtgtcgccctcgcgctcctcaaattctttgaggagctcgccaagcgcggcgtcttcgagcagaaactcagcaggaagcttgttcatataagcgttgggctggtattcatgctcttttggcctctttttagctctggatggtatactcctttccttgctgcgctagcaccaggggttaacattataaggatgcttctactggggctgggacttatgaaaaacgaggctatggttaaatcaatgagccgctctggagattacagggaacttctcaagggcccactgtattatgctgctactataacttttgccacgtctcttttatggagaacctcaccagttgctatagcacttatatgcaacttatgtgctggggatggtatagccgatgttgttgggagacgcctaggtaaagaaaagcttccatacaatcccaacaaatcatatgctggaagcatagcaatggcggtggctggttttctggcctcagttgggtatatgcattacttccacactttcggttttattgaggaaacatggtacatggctttaagcttcctcgtggtctctgtagctgcagcactcgttgaatcgcaccccatcagcacagaacttgatgacaatttgactgttcttttgacatcattcctagttggtagcctcatcttttgatgtttaggcgcaaggacgtatgagatgtttctccgtcatgctgtaatcttctgatgtttaggctcaaggacatatgagatgtttctccgtcatgctgtattttatgtaaaacgtttctaaaatactactataattgtg

SEQ ID NO: 29002 - protein, 302 aa, Zea mays subsp. mays
  peptide (1)..(302): Ceres Seq. ID no. 12336654
  misc_feature (12)..(302): NCBI GI NO: 34907982 NR Description: P0446G04.23
  misc_feature (17)..(302): NCBI GI NO: 21593148 NR Description: unknown [Arabidopsis thaliana]
  misc_feature (17)..(302): NCBI GI NO: 15237702 NR Description: putative protein; protein id: At5g58560
  misc_feature (17)..(272): NCBI GI NO: 8843778 NR Description: emb|CAB85555
  misc_feature (31)..(302): NCBI GI NO: 28393229 NR Description: unknown protein [Arabidopsis thaliana]
  misc_feature (31)..(302): NCBI GI NO: 15238184 NR Description: putative protein; protein id: At5g04490
  misc_feature (31)..(302): NCBI GI NO: 21537252 NR Description: unknown [Arabidopsis thaliana]
  misc_feature (10)..(302): NCBI GI NO: 32488404 NR Description: OSJNBa0043A12.34
  misc_feature (106)..(301): NCBI GI NO: 28850457 NR Description: similar to Oryza sativa (japonica cultivar-group)
  misc_feature (102)..(290): NCBI GI NO: 21674801 NR Description: conserved hypothetical protein
LSYSTHRAHLLQSRPLSPSPTVPAGAASASCAPRSLCFRRRRSSRLAAERTRRPTMAAAISLEAGGALAHDLGSAVVTGGVALALLKFFEELAKRGVFEQKLSRKLVHISVGLVFMLFWPLFSSGWYTPFLAALAPGVNIIRMLLLGLGLMKNEAMVKSMSRSGDYRELLKGPLYYAATITFATSLLWRTSPVAIALICNLCAGDGIADVVGRRLGKEKLPYNPNKSYAGSIAMAVAGFLASVGYMHYFHTFGFIEETWYMALSFLVVSVAAALVESHPISTELDDNLTVLLTSFLVGSLIF

SEQ ID NO: 29003 - protein, 247 aa, Zea mays subsp. mays
  peptide (1)..(247): Ceres Seq. ID no. 12336655
  misc_feature (1)..(247): NCBI GI NO: 34907982 NR Description: P0446G04.23
  misc_feature (1)..(247): NCBI GI NO: 21593148 NR Description: unknown [Arabidopsis thaliana]
  misc_feature (1)..(247): NCBI GI NO: 15237702 NR Description: putative protein; protein id: At5g58560
  misc_feature (1)..(217): NCBI GI NO: 8843778 NR Description: emb|CAB85555
  misc_feature (1)..(247): NCBI GI NO: 28393229 NR Description: unknown protein [Arabidopsis thaliana]
  misc_feature (1)..(247): NCBI GI NO: 15238184 NR Description: putative protein; protein id: At5g04490
  misc_feature (1)..(247): NCBI GI NO: 21537252 NR Description: unknown [Arabidopsis thaliana]
  misc_feature (1)..(247): NCBI GI NO: 32488404 NR Description: OSJNBa0043A12.34
  misc_feature (51)..(246): NCBI GI NO: 28850457 NR Description: similar to Oryza sativa (japonica cultivar-group)
  misc_feature (47)..(235): NCBI GI NO: 21674801 NR Description: conserved hypothetical protein
MAAAISLEAGGALAHDLGSAVVTGGVALALLKFFEELAKRGVFEQKLSRKLVHISVGLVFMLFWPLFSSGWYTPFLAALAPGVNIIRMLLLGLGLMKNEAMVKSMSRSGDYRELLKGPLYYAATITFATSLLWRTSPVAIALICNLCAGDGIADVVGRRLGKEKLPYNPNKSYAGSIAMAVAGFLASVGYMHYFHTFGFIEETWYMALSFLVVSVAAALVESHPISTELDDNLTVLLTSFLVGSLIF

SEQ ID NO: 29004 - protein, 187 aa, Zea mays subsp. mays
  peptide (1)..(187): Ceres Seq. ID no. 12336656
  misc_feature (1)..(187): NCBI GI NO: 34907982 NR Description: P0446G04.23
  misc_feature (1)..(187): NCBI GI NO: 21593148 NR Description: unknown [Arabidopsis thaliana]
  misc_feature (1)..(187): NCBI GI NO: 15237702 NR Description: putative protein; protein id: At5g58560
  misc_feature (1)..(157): NCBI GI NO: 8843778 NR Description: emb|CAB85555
  misc_feature (1)..(187): NCBI GI NO: 28393229 NR Description: unknown protein [Arabidopsis thaliana]
  misc_feature (1)..(187): NCBI GI NO: 15238184 NR Description: putative protein; protein id: At5g04490
  misc_feature (1)..(187): NCBI GI NO: 21537252 NR Description: unknown [Arabidopsis thaliana]
  misc_feature (1)..(187): NCBI GI NO: 32488404 NR Description: OSJNBa0043A12.34
  misc_feature (1)..(186): NCBI GI NO: 28850457 NR Description: similar to Oryza sativa (japonica cultivar-group)
  misc_feature (1)..(175): NCBI GI NO: 21674801 NR Description: conserved hypothetical protein
MLFWPLFSSGWYTPFLAALAPGVNIIRMLLLGLGLMKNEAMVKSMSRSGDYRELLKGPLYYAATITFATSLLWRTSPVAIALICNLCAGDGIADVVGRRLGKEKLPYNPNKSYAGSIAMAVAGFLASVGYMHYFHTFGFIEETWYMALSFLVVSVAAALVESHPISTELDDNLTVLLTSFLVGSLIF

SEQ ID NO: 29005 - DNA, 1345 bp, Zea mays subsp. mays
  misc_feature (1)..(1345): Ceres Seq. ID no. 12407229
aaaacctctagagccaaaaagacataaacaccataaaaaagagctcatttaccatccgcaggagctcccttccagacgcttccgctcttctctctctgcttccggcagaaatcaaggcagtattaggatggtgaccccgcgcctcttcgcgcgactctaccggcattgcgtcggcgcagcggctgcgtcatcagccgcggggcggcaccggggggccctggcagcggcggccgtggagcagttcgccggttcctccctgcctgtcggggttccaaaatttttgaatcatcatttcagatactcaaccagcatttttcaaaagattggtttctcgtctgtttcaccacaacaaagtgatgatgatgttaatgagctgaaagaccacgaaagggccttagatggatcaagtgaagattgtccatctggaagtattgaaggccttgatctgtcgagagatgatttggtgaagctagttcgtgagaaggatggattgttgaagtccaaagatggtgaaatcaaagatatgaaggataaggttttgcgcagctatgcagaaatggaaaatatcattgctcggacaaaacgtgaatctgagaactccaaaaaatatgcagtacagaacttctctaagagcctgctagatgttgctgacaatttggctagggcatcatctgttgtcaaggaaagcttctcgaaaattgatacctcaaaagattctgctggagctgtcccactactgaaaaccctgctggagggtgtggacatgactgagaagcaacttgcagaggtcttcaagaagtttggagtcgaaaaatttgacccgctgaatgaggaatttgatcctaacaggcattgtcagtttttcaaattcctgatccttcaaaaccaccggggaccgttgcttctgttgtaaaggtgggctacatgttacacgatcgcgtcctccgccctgccgaagtcggcgtcactgccacggagggaggtgcgcatgcaactgaagaggcagagaagccggaggagaaaacagcgagggactaaagttagccgtggtgtagtcaaggaggattgaatgccgtttctgtttagagtttgagaaacatgaatgaatgcagaaaacttttggccgtgttcgacacggggagaaagtttagcaagcaggctggcgccttttttttttttcttgtttggaacttggaatgaaatccattttggggtttggagcaaccctgcatgtcgtacaacaccttctgcctgctagtatgtgaccgttgaccttgagggatgggcatgaggcccttggccgatactaaagagctgtgctgccgtgatcggctttctgtggctc

SEQ ID NO: 29006 - protein, 303 aa, Zea mays subsp. mays
  peptide (1)..(303): Ceres Seq. ID no. 12407230
  misc_feature (135)..(289): Pfam Name: Pfam Description:  GrpE
  misc_feature (47)..(289): NCBI GI NO: 38636943 NR Description: putative chaperone GrpE
  misc_feature (109)..(289): NCBI GI NO: 7485329 NR Description: hypothetical protein F10M23
  misc_feature (109)..(289): NCBI GI NO: 18416821 NR Description: grpE like protein; protein id: At4g26780
  misc_feature (100)..(289): NCBI GI NO: 3851640 NR Description: chaperone GrpE type 2 [Nicotiana tabacum]
  misc_feature (103)..(289): NCBI GI NO: 3851638 NR Description: chaperone GrpE type 1 [Nicotiana tabacum]
  misc_feature (88)..(289): NCBI GI NO: 15240475 NR Description: chaperone GrpE-like protein; protein id:At5g55200
  misc_feature (43)..(289): NCBI GI NO: 21554173 NR Description: chaperone GrpE-like protein [Arabidopsis thaliana]
  misc_feature (109)..(289): NCBI GI NO: 1669597 NR Description: AR192 [Arabidopsis thaliana]
  misc_feature (171)..(282): NCBI GI NO: 22962327 NR Description: hypothetical protein [Rhodopseudomonas palustris]
  misc_feature (171)..(289): NCBI GI NO: 23012592 NR Description: hypothetical protein
KPLEPKRHKHHKKELIYHPQELPSRRFRSSLSASGRNQGSIRMVTPRLFARLYRHCVGAAAASSAAGRHRGALAAAAVEQFAGSSLPVGVPKFLNHHFRYSTSIFQKIGFSSVSPQQSDDDVNELKDHERALDGSSEDCPSGSIEGLDLSRDDLVKLVREKDGLLKSKDGEIKDMKDKVLRSYAEMENIIARTKRESENSKKYAVQNFSKSLLDVADNLARASSVVKESFSKIDTSKDSAGAVPLLKTLLEGVDMTEKQLAEVFKKFGVEKFDPLNEEFDPNRHCQFFKFLILQNHRGPLLLL

SEQ ID NO: 29007 - protein, 261 aa, Zea mays subsp. mays
  peptide (1)..(261): Ceres Seq. ID no. 12407231
  misc_feature (93)..(247): Pfam Name: Pfam Description:  GrpE
  misc_feature (5)..(247): NCBI GI NO: 38636943 NR Description: putative chaperone GrpE
  misc_feature (67)..(247): NCBI GI NO: 7485329 NR Description: hypothetical protein F10M23
  misc_feature (67)..(247): NCBI GI NO: 18416821 NR Description: grpE like protein; protein id: At4g26780
  misc_feature (58)..(247): NCBI GI NO: 3851640 NR Description: chaperone GrpE type 2 [Nicotiana tabacum]
  misc_feature (61)..(247): NCBI GI NO: 3851638 NR Description: chaperone GrpE type 1 [Nicotiana tabacum]
  misc_feature (46)..(247): NCBI GI NO: 15240475 NR Description: chaperone GrpE-like protein; protein id:At5g55200
  misc_feature (1)..(247): NCBI GI NO: 21554173 NR Description: chaperone GrpE-like protein [Arabidopsis thaliana]
  misc_feature (67)..(247): NCBI GI NO: 1669597 NR Description: AR192 [Arabidopsis thaliana]
  misc_feature (129)..(240): NCBI GI NO: 22962327 NR Description: hypothetical protein [Rhodopseudomonas palustris]
  misc_feature (129)..(247): NCBI GI NO: 23012592 NR Description: hypothetical protein
MVTPRLFARLYRHCVGAAAASSAAGRHRGALAAAAVEQFAGSSLPVGVPKFLNHHFRYSTSIFQKIGFSSVSPQQSDDDVNELKDHERALDGSSEDCPSGSIEGLDLSRDDLVKLVREKDGLLKSKDGEIKDMKDKVLRSYAEMENIIARTKRESENSKKYAVQNFSKSLLDVADNLARASSVVKESFSKIDTSKDSAGAVPLLKTLLEGVDMTEKQLAEVFKKFGVEKFDPLNEEFDPNRHCQFFKFLILQNHRGPLLLL

SEQ ID NO: 29008 - DNA, 1233 bp, Zea mays subsp. mays; identical to SEQ ID NO: 24242
  misc_feature (1)..(1233): Ceres Seq. ID no. 13564187

SEQ ID NO: 29009 - protein, 267 aa, Zea mays subsp. mays; identical to SEQ ID NO: 24243
  peptide (1)..(267): Ceres Seq. ID no. 13564188
  misc_feature (1)..(267): NCBI GI NO: 11385533 NR Description: glutathione S-transferase GST 41 [Zea mays]
  misc_feature (18)..(235): NCBI GI NO: 23978432 NR Description: glutathione S-transferase [Cucurbita maxima]
  misc_feature (12)..(235): NCBI GI NO: 11385523 NR Description: glutathione S-transferase GST 36 [Zea mays]
  misc_feature (20)..(235): NCBI GI NO: 11385497 NR Description: glutathione S-transferase GST 23 [Zea mays]
  misc_feature (18)..(235): NCBI GI NO: 15430731 NR Description: putative glutathione S-transferase OsGSTU17
  misc_feature (15)..(226): NCBI GI NO: 4468798 NR Description: GST7 protein [Zea mays]
  misc_feature (18)..(226): NCBI GI NO: 11385441 NR Description: glutathione S-transferase GST 13 [Glycine max]
  misc_feature (16)..(243): NCBI GI NO: 37536280 NR Description: putative glutathione S-transferase
  misc_feature (11)..(234): NCBI GI NO: 11177837 NR Description: putative glutathione S-transferase OsGSTU2
  misc_feature (12)..(234): NCBI GI NO: 37536338 NR Description: putative glutathione S-transferase

SEQ ID NO: 29010 - protein, 251 aa, Zea mays subsp. mays; identical to SEQ ID NO: 24244
  peptide (1)..(251): Ceres Seq. ID no. 13564189
  misc_feature (1)..(251): NCBI GI NO: 11385533 NR Description: glutathione S-transferase GST 41 [Zea mays]
  misc_feature (2)..(219): NCBI GI NO: 23978432 NR Description: glutathione S-transferase [Cucurbita maxima]
  misc_feature (1)..(219): NCBI GI NO: 11385523 NR Description: glutathione S-transferase GST 36 [Zea mays]
  misc_feature (4)..(219): NCBI GI NO: 11385497 NR Description: glutathione S-transferase GST 23 [Zea mays]
  misc_feature (2)..(219): NCBI GI NO: 15430731 NR Description: putative glutathione S-transferase OsGSTU17
  misc_feature (1)..(210): NCBI GI NO: 4468798 NR Description: GST7 protein [Zea mays]
  misc_feature (2)..(210): NCBI GI NO: 11385441 NR Description: glutathione S-transferase GST 13 [Glycine max]
  misc_feature (1)..(227): NCBI GI NO: 37536280 NR Description: putative glutathione S-transferase
  misc_feature (1)..(218): NCBI GI NO: 11177837 NR Description: putative glutathione S-transferase OsGSTU2
  misc_feature (1)..(218): NCBI GI NO: 37536338 NR Description: putative glutathione S-transferase

SEQ ID NO: 29011 - DNA, 870 bp, Zea mays subsp. mays
  misc_feature (1)..(870): Ceres Seq. ID no. 12566255
taatcgaaaaagactcatcagttcagttcaatccaatccaaattccaatcccacccagccccttccaagaactccagtcgtccaacaaaagcaggagtcgcatcccagacgcccccgcaatcccgcatcagagacaggcagggagggaaccgagatctgtccgtccgtgtcgatggagtcaacggtggagcggataagctcgtcggtgcagtcctgggtgaaggaccacgagctcgcagccatcggaggcgtgtgggctgcggcggcgggcgcttcggtggcgtacagccggaggaaggcgccgcagcggggcacgggcctgcgcctcatccacgccaggatgcacgcgcaggcgctcacgctcgccgtcctcggcggcgccgccctcttccactgctacggcgacggcggccgcaggaagagggccgacgacatcgacctcgacttctactcgcagctgccgccggcaaccgacgccgacggcaacgagaaccagcggtggagctggtaggaggaggagccgaggagaaggaagaactgtagcagactagcagtgggtgcttgcagcaataataattgaggtggggcctatgacgtggcgcgcgggagggattagtctgtgctaatcctaatccatcctacgacgggcggcccgtttacttaacattatcggtccatgctgtcatggccggcaccacatccacatctactagtcatctaggagcagccgcccatagtttgctgctgctgctgcttctctcctgtatcacagtactaccaccaccaccatttgtttatctgatgaatgaacggtggcgatgatgacgatattgtttatatcacgttttcatttttttttttgcactcttc

SEQ ID NO: 29012 - protein, 169 aa, Zea mays subsp. mays
  peptide (1)..(169): Ceres Seq. ID no. 12566256
  misc_feature (69)..(129): Pfam Name: Pfam Description:  Hypoxia induced protein conserved region
  misc_feature (62)..(102): NCBI GI NO: 3282394 NR Description: anaerobically inducible early gene 2
  misc_feature (67)..(133): NCBI GI NO: 15241035 NR Description: putative protein; protein id: At5g27760
  misc_feature (69)..(133): NCBI GI NO: 15230007 NR Description: unknown protein; protein id: At3g05550.1
NRKRLISSVQSNPNSNPTQPLPRTPVVQQKQESHPRRPRNPASETGREGTEICPSVSMESTVERISSSVQSWVKDHELAAIGGVWAAAAGASVAYSRRKAPQRGTGLRLIHARMHAQALTLAVLGGAALFHCYGDGGRRKRADDIDLDFYSQLPPATDADGNENQRWSW

SEQ ID NO: 29013 - protein, 112 aa, Zea mays subsp. mays
  peptide (1)..(112): Ceres Seq. ID no. 12566257
  misc_feature (12)..(72): Pfam Name: Pfam Description:  Hypoxia induced protein conserved region
  misc_feature (5)..(45): NCBI GI NO: 3282394 NR Description: anaerobically inducible early gene 2
  misc_feature (10)..(76): NCBI GI NO: 15241035 NR Description: putative protein; protein id: At5g27760
  misc_feature (12)..(76): NCBI GI NO: 15230007 NR Description: unknown protein; protein id: At3g05550.1
MESTVERISSSVQSWVKDHELAAIGGVWAAAAGASVAYSRRKAPQRGTGLRLIHARMHAQALTLAVLGGAALFHCYGDGGRRKRADDIDLDFYSQLPPATDADGNENQRWSW

SEQ ID NO: 29014 - DNA, 1530 bp, Zea mays subsp. mays
  misc_feature (1)..(1530): Ceres Seq. ID no. 12408856
acttctttctcgtcttcctctcctgtctcctcgcagcagggtgctggaagaagtttctggttaggagaatccggttgaggttgccatttcccaacttcttccagcggttcggctcggaggcgaactgagatgtcctgttcgtgatcggtttgttcttgcagctgcagacagcttgtcgattccttgcttgaggagcagccatggacagaagaaaccgaccagctccgttggttgacagctctgcatgcttttgccgagtggacagatcatccgccgcggcggcggcgaggcgaatcccagtgtcgaaggcgtgcgtgcaaccgagcctcagggcgtccatccacccgctgaagccacggccgggcgcagagcggagccgcggaggggcgtgcccgctgctcccaggccttccggacgacctcgccattgcctgtctcatccgggtgcccagagccgaccactggaagctgaggctggtgtgccggaagtggtgccgcctgctcgccggcaactacttctacggcctccgccggcggctcgggctcgcggagcagtggctgtacgccgtgaagcgcgacggcagggacgggcgcgtgtcgtgggacgtgctcgacccgtcgcgcggcgagtggcgcgcgctgccgcccgtgccgggcgagtacgcggaggccgacgggttcggctgcgccgtgctcggcggctgccacctgtacctgctcggcggcagggacccgcgcaggggcagcgccatgcggcgggtggtgttctacagcgcccggagcaaccggtggcaccgcgcgccggacatgctgcgccgccggcagttcttcgacgtgtgcgtcatgggcaaccgcctgtacgtcgcgggcggtgagggtggcggcggcgggctcaggtccgctgaggtgttcgacccggccaagaaccgctggtccttcgtggccgagatggccgcgccgatggcgccgttcgtcagcgcggtgcatggcgggcggtggttcgtgaagggtattggcgcgcagcagcaggtgctaagccaggcatactccccggtgtctgactcgtggtccatcgtcctcgacggcatggtcaccggctggcggagccccagcgcgtgcctcaacggccggctctatgctgcagagtgcatggacggatgccggttgagggcctacgacgaggccgtggacgcgtggagcacctgcgccgacagcaagcagcaccgagggagctcccaggcggctgccattgtcgccctccacggaaggctcttcgtcgtccgcaacgacatgagcgtctcggccgtccaggtggcggccgaggcgggaaagcagaggtggcagaccctcgccggcaaagcgcataccaagagctttgtcacgggcctgttgtccaacctctctggtcgcagccgcgccaagaacaacatcctccattgccaagttcttgaggtctagctgtcttgctccctgatgagctatgcttataagttactagaatcacgcaatgaaaaagtacgtgagaaatctc

SEQ ID NO: 29015 - protein, 418 aa, Zea mays subsp. mays
  peptide (1)..(418): Ceres Seq. ID no. 12408857
  misc_feature (157)..(204): Pfam Name: Pfam Description:  Kelch motif
  misc_feature (8)..(417): NCBI GI NO: 18405298 NR Description: expressed protein; protein id: At1g55270
  misc_feature (8)..(418): NCBI GI NO: 37534254 NR Description: unknown protein
  misc_feature (8)..(384): NCBI GI NO: 25405811 NR Description: unknown protein, 58496-60308
  misc_feature (11)..(418): NCBI GI NO: 19071626 NR Description: putative Kelch motif containing protein
  misc_feature (19)..(383): NCBI GI NO: 18397351 NR Description: expressed protein; protein id: At1g30090
  misc_feature (57)..(372): NCBI GI NO: 18400571 NR Description: expressed protein; protein id: At2g24540
  misc_feature (57)..(372): NCBI GI NO: 21593163 NR Description: unknown [Arabidopsis thaliana]
  misc_feature (66)..(371): NCBI GI NO: 18411974 NR Description: SKP1 interacting partner 4
  misc_feature (66)..(371): NCBI GI NO: 26453288 NR Description: putative SKP1 interacting partner 4 SKIP4
  misc_feature (65)..(359): NCBI GI NO: 15220452 NR Description: unknown protein; protein id: At1g67480.1
MDRRNRPAPLVDSSACFCRVDRSSAAAAARRIPVSKACVQPSLRASIHPLKPRPGAERSRGGACPLLPGLPDDLAIACLIRVPRADHWKLRLVCRKWCRLLAGNYFYGLRRRLGLAEQWLYAVKRDGRDGRVSWDVLDPSRGEWRALPPVPGEYAEADGFGCAVLGGCHLYLLGGRDPRRGSAMRRVVFYSARSNRWHRAPDMLRRRQFFDVCVMGNRLYVAGGEGGGGGLRSAEVFDPAKNRWSFVAEMAAPMAPFVSAVHGGRWFVKGIGAQQQVLSQAYSPVSDSWSIVLDGMVTGWRSPSACLNGRLYAAECMDGCRLRAYDEAVDAWSTCADSKQHRGSSQAAAIVALHGRLFVVRNDMSVSAVQVAAEAGKQRWQTLAGKAHTKSFVTGLLSNLSGRSRAKNNILHCQVLEV

SEQ ID NO: 29016 - protein, 235 aa, Zea mays subsp. mays
  peptide (1)..(235): Ceres Seq. ID no. 12408858
  misc_feature (1)..(234): NCBI GI NO: 18405298 NR Description: expressed protein; protein id: At1g55270
  misc_feature (1)..(235): NCBI GI NO: 37534254 NR Description: unknown protein
  misc_feature (1)..(201): NCBI GI NO: 25405811 NR Description: unknown protein, 58496-60308
  misc_feature (1)..(235): NCBI GI NO: 19071626 NR Description: putative Kelch motif containing protein
  misc_feature (1)..(200): NCBI GI NO: 18397351 NR Description: expressed protein; protein id: At1g30090
  misc_feature (1)..(189): NCBI GI NO: 18400571 NR Description: expressed protein; protein id: At2g24540
  misc_feature (1)..(189): NCBI GI NO: 21593163 NR Description: unknown [Arabidopsis thaliana]
  misc_feature (1)..(188): NCBI GI NO: 18411974 NR Description: SKP1 interacting partner 4
  misc_feature (1)..(188): NCBI GI NO: 26453288 NR Description: putative SKP1 interacting partner 4 SKIP4
  misc_feature (1)..(176): NCBI GI NO: 15220452 NR Description: unknown protein; protein id: At1g67480.1
MRRVVFYSARSNRWHRAPDMLRRRQFFDVCVMGNRLYVAGGEGGGGGLRSAEVFDPAKNRWSFVAEMAAPMAPFVSAVHGGRWFVKGIGAQQQVLSQAYSPVSDSWSIVLDGMVTGWRSPSACLNGRLYAAECMDGCRLRAYDEAVDAWSTCADSKQHRGSSQAAAIVALHGRLFVVRNDMSVSAVQVAAEAGKQRWQTLAGKAHTKSFVTGLLSNLSGRSRAKNNILHCQVLEV

SEQ ID NO: 29017 - protein, 216 aa, Zea mays subsp. mays
  peptide (1)..(216): Ceres Seq. ID no. 12408859
  misc_feature (1)..(215): NCBI GI NO: 18405298 NR Description: expressed protein; protein id: At1g55270
  misc_feature (1)..(216): NCBI GI NO: 37534254 NR Description: unknown protein
  misc_feature (1)..(182): NCBI GI NO: 25405811 NR Description: unknown protein, 58496-60308
  misc_feature (1)..(216): NCBI GI NO: 19071626 NR Description: putative Kelch motif containing protein
  misc_feature (1)..(181): NCBI GI NO: 18397351 NR Description: expressed protein; protein id: At1g30090
  misc_feature (1)..(170): NCBI GI NO: 18400571 NR Description: expressed protein; protein id: At2g24540
  misc_feature (1)..(170): NCBI GI NO: 21593163 NR Description: unknown [Arabidopsis thaliana]
  misc_feature (1)..(169): NCBI GI NO: 18411974 NR Description: SKP1 interacting partner 4
  misc_feature (1)..(169): NCBI GI NO: 26453288 NR Description: putative SKP1 interacting partner 4 SKIP4
  misc_feature (1)..(157): NCBI GI NO: 15220452 NR Description: unknown protein; protein id: At1g67480.1
MLRRRQFFDVCVMGNRLYVAGGEGGGGGLRSAEVFDPAKNRWSFVAEMAAPMAPFVSAVHGGRWFVKGIGAQQQVLSQAYSPVSDSWSIVLDGMVTGWRSPSACLNGRLYAAECMDGCRLRAYDEAVDAWSTCADSKQHRGSSQAAAIVALHGRLFVVRNDMSVSAVQVAAEAGKQRWQTLAGKAHTKSFVTGLLSNLSGRSRAKNNILHCQVLEV

SEQ ID NO: 29018 - DNA, 1606 bp, Zea mays subsp. mays
  misc_feature (1)..(1606): Ceres Seq. ID no. 13498353
gaaaatttccggtgctgagcgtgcatcggcagagctgactgtgactggtgaactgaaggaaaggggaggagaaggggagggaagctttgggcgggagaggaagcctagcagcaacagtaggcagtagcagggttgaccggaggggcagtggagtctggagagtaacccaacaaccccctcctcccctccccttctgtcttattgccacctctccacgtctccaccaaacaaggcaacaagggagaagtagatctgcatctgcgagaggaggcagcgggggtggtgatgatggagagccagccgctgcaggccccgacggccacggctccggcccccggatctgcggagccagccggagctccgccggccgtcacccccggcaaggagttcacgcgcacctgcaagggcctcgtcgtcgtgctcatcggaggatacgtgctgctccagctcctcccttcgtcactcaactacctcgccatcatcccctccaagacaatcccctatgtatggaccgtctttaccgctggttacatcgagcaagtcctcccaggggccattggcagttctcttggtcttctcttttgtggaaaggacattgaaccagcatggggccgcaaggaattcttgaagttcattattttgatcaactccatctgtggcattcttgcattttgctttgctattggactctactacgtcactggaaaggagagcttccttgtcacaccactttctggtttccacggttgccttgctggctttcttgtggccctgaagcaactcttaccaaaccttgagcttcctatgtgctttttctggaaaataaaggcaaagtggatgccattctttgttgtatgtttctcaagtatcatggccttcatcgtgcctgattccattaacttcctgccaactttggtgtccgggatgtacgttagctggctttacctgagatacttccaaaggaacccactgactggacttaagggtgatcccagtgatgacttttccttccccagtttattcccagctgccatgagaccagttacggaccctgtggccaacctgtttgataggctgttgtgtgcaaggtccaggcctttggaagtcgccctcccgatatcagatcctaccaaggcttcaagaagaagggagcgtggcgagagggttcttgaggaaaggttggcggctgacaatgctggtgacacagaggcctcgcctcgtggccatggcaccgcggaagactgagaactttcttgtgaccatcagctcctcttataggagccatggctttgctccctccagcgtttatagctctgcacttttgtcttctggagatggagctattcagttcacagcgaacgaataatacgatgttcttagtttctctttttttccgcttctttgtctgcgaggatttattggttaaattgtgtactagtcaattgttatggtacagcgaaaaagagagaagagggtgatggcatttgcagcgaggtgttgagattccgttgtagccatgcatttgcagccgattgtttggtactggtcaaagttctgtagtagtcatatactctgcttaaaatatagaaagaagaatggcttcgtc

SEQ ID NO: 29019 - protein, 319 aa, Zea mays subsp. mays
  peptide (1)..(319): Ceres Seq. ID no. 13498354
  misc_feature (2)..(319): NCBI GI NO: 21741573 NR Description: OSJNBa0094O15.3
  misc_feature (19)..(319): NCBI GI NO: 34395257 NR Description: putative placental protein 6
  misc_feature (27)..(302): NCBI GI NO: 18398108 NR Description: expressed protein [Arabidopsis thaliana]
  misc_feature (35)..(302): NCBI GI NO: 6648207 NR Description: unknown protein [Arabidopsis thaliana]
  misc_feature (42)..(299): NCBI GI NO: 5902022 NR Description: PL6 protein [Homo sapiens]
  misc_feature (42)..(312): NCBI GI NO: 19920824 NR Description: CG9536-PA [Drosophila melanogaster]
  misc_feature (40)..(299): NCBI GI NO: 34865897 NR Description: similar to PL6 protein [Rattus norvegicus]
  misc_feature (40)..(299): NCBI GI NO: 9790165 NR Description: PL6 protein; PL-6; placental protein 6
  misc_feature (42)..(248): NCBI GI NO: 39593885 NR Description: Hypothetical protein CBG06225
  misc_feature (42)..(229): NCBI GI NO: 15639966 NR Description: glpG protein, putative [Treponema pallidum]
MMESQPLQAPTATAPAPGSAEPAGAPPAVTPGKEFTRTCKGLVVVLIGGYVLLQLLPSSLNYLAIIPSKTIPYVWTVFTAGYIEQVLPGAIGSSLGLLFCGKDIEPAWGRKEFLKFIILINSICGILAFCFAIGLYYVTGKESFLVTPLSGFHGCLAGFLVALKQLLPNLELPMCFFWKIKAKWMPFFVVCFSSIMAFIVPDSINFLPTLVSGMYVSWLYLRYFQRNPLTGLKGDPSDDFSFPSLFPAAMRPVTDPVANLFDRLLCARSRPLEVALPISDPTKASRRRERGERVLEERLAADNAGDTEASPRGHGTAED

SEQ ID NO: 29020 - protein, 318 aa, Zea mays subsp. mays
  peptide (1)..(318): Ceres Seq. ID no. 13498355
  misc_feature (1)..(318): NCBI GI NO: 21741573 NR Description: OSJNBa0094O15.3
  misc_feature (18)..(318): NCBI GI NO: 34395257 NR Description: putative placental protein 6
  misc_feature (26)..(301): NCBI GI NO: 18398108 NR Description: expressed protein [Arabidopsis thaliana]
  misc_feature (34)..(301): NCBI GI NO: 6648207 NR Description: unknown protein [Arabidopsis thaliana]
  misc_feature (41)..(298): NCBI GI NO: 5902022 NR Description: PL6 protein [Homo sapiens]
  misc_feature (41)..(311): NCBI GI NO: 19920824 NR Description: CG9536-PA [Drosophila melanogaster]
  misc_feature (39)..(298): NCBI GI NO: 34865897 NR Description: similar to PL6 protein [Rattus norvegicus]
  misc_feature (39)..(298): NCBI GI NO: 9790165 NR Description: PL6 protein; PL-6; placental protein 6
  misc_feature (41)..(247): NCBI GI NO: 39593885 NR Description: Hypothetical protein CBG06225
  misc_feature (41)..(228): NCBI GI NO: 15639966 NR Description: glpG protein, putative [Treponema pallidum]
MESQPLQAPTATAPAPGSAEPAGAPPAVTPGKEFTRTCKGLVVVLIGGYVLLQLLPSSLNYLAIIPSKTIPYVWTVFTAGYIEQVLPGAIGSSLGLLFCGKDIEPAWGRKEFLKFIILINSICGILAFCFAIGLYYVTGKESFLVTPLSGFHGCLAGFLVALKQLLPNLELPMCFFWKIKAKWMPFFVVCFSSIMAFIVPDSINFLPTLVSGMYVSWLYLRYFQRNPLTGLKGDPSDDFSFPSLFPAAMRPVTDPVANLFDRLLCARSRPLEVALPISDPTKASRRRERGERVLEERLAADNAGDTEASPRGHGTAED

SEQ ID NO: 29021 - DNA, 1201 bp, Zea mays subsp. mays
  misc_feature (1)..(1201): Ceres Seq. ID no. 13492541
gcgcgcccgtggcccgtaaaagacaccaacccacttctcgaatcgaatccaggtccagggacgccgctacccgccgtccttcacccccgccatgccaacgctcggcatctcgccgctgctggacgcctacttccggcgccgcttcgccgcagcgggcctcgtggaggcctccgtcccgctggacggcggcgccaccacggtccactgctggcgcttcccgccggggtccgccgacggcgaggacgacgcccgtcccgtcctggtgctcctgcacggcttcgggcccccggcaacgtggcagtggaggcgccaggtgggccctctctcgcgccggttccgcctcgtcgtcccggacctgctcttcttcggcggctcgtccacgtcggcggcggcgcccggcgccgggcgggtgtccgaggcgcggcaggcggaggcggtggcgaagctcgtggcggccctggtggcgccgccggcgcgcgtgtcggtggccggcaccagctacggcgggttcgtggcgtaccacctggcgcggctgctgggccccggcgcggtggaccgggtggtgatcgccagctccgacctcctcaaggccgacgccgacgaccgcgccctgctccgccgcggcgccgccgagcgcgtcgaggacgtcatgctgccccgctcccccgagcggatgcggcgcctgatgcagctcgcctaccaccgcccgcgccgcttcacgccgggcttcgtgctccgggatctcgcccagtatctgtacagcgacaaagtagaagagaagaaggagctaatcaaggggataacgctgggcaacaaagacaagttccagcttacacctctcccccaggaagtccttgtgttgtggggagagcacgaccagatattcccagtcgagaaggcatttcaagtggcaaggaaacttggagcgaatgctaggctggaggtcctcaaggacaccggccacatgcctcaagaagaggatccaaagcggttcaacgaggcaatcctcaacttcttgcttccagctccaaagtcgtccttgtaacgcgatatatatcccatagttattcacttattattcaggcccaaggagagttcacgatttcgatatgcacattctgcccgatcagtgcagtctttgtcgctttggtatcacctcaccttcaagattgatcatggaaactattgctatttatctgcc

SEQ ID NO: 29022 - protein, 317 aa, Zea mays subsp. mays
  peptide (1)..(317): Ceres Seq. ID no. 13492542
  misc_feature (82)..(220): Pfam Name: Pfam Description:  alpha/beta hydrolase fold
  misc_feature (1)..(220): NCBI GI NO: 24059850 NR Description: hydrolase-like protein
  misc_feature (220)..(317): NCBI GI NO: 24059850 NR Description: hydrolase-like protein
  misc_feature (5)..(310): NCBI GI NO: 27436745 NR Description: Hypothetical protein
  misc_feature (3)..(314): NCBI GI NO: 27436746 NR Description: Unknown protein
  misc_feature (54)..(313): NCBI GI NO: 34896168 NR Description: contains ESTs C73890
  misc_feature (6)..(309): NCBI GI NO: 30689631 NR Description: hydrolase, alpha/beta fold family
  misc_feature (43)..(315): NCBI GI NO: 22326938 NR Description: hydrolase, alpha/beta fold family
  misc_feature (57)..(309): NCBI GI NO: 21592805 NR Description: unknown [Arabidopsis thaliana]
  misc_feature (6)..(314): NCBI GI NO: 37533664 NR Description: putative hydrolase
  misc_feature (6)..(317): NCBI GI NO: 18411865 NR Description: hydrolase, alpha/beta fold family
MPTLGISPLLDAYFRRRFAAAGLVEASVPLDGGATTVHCWRFPPGSADGEDDARPVLVLLHGFGPPATWQWRRQVGPLSRRFRLVVPDLLFFGGSSTSAAAPGAGRVSEARQAEAVAKLVAALVAPPARVSVAGTSYGGFVAYHLARLLGPGAVDRVVIASSDLLKADADDRALLRRGAAERVEDVMLPRSPERMRRLMQLAYHRPRRFTPGFVLRDLAQYLYSDKVEEKKELIKGITLGNKDKFQLTPLPQEVLVLWGEHDQIFPVEKAFQVARKLGANARLEVLKDTGHMPQEEDPKRFNEAILNFLLPAPKSSL

SEQ ID NO: 29023 - protein, 311 aa, Zea mays subsp. mays
  peptide (1)..(311): Ceres Seq. ID no. 13492543
  misc_feature (111)..(220): Pfam Name: DUF390 Pfam Description: Protein of unknown function
  misc_feature (18)..(311): NCBI GI NO: 29247944 NR Description: GLP_26_54603_52153 [Giardia lamblia ATCC 50803]
  misc_feature (1)..(307): NCBI GI NO: 33865132 NR Description: possible N-terminal part of IF-2
  misc_feature (17)..(311): NCBI GI NO: 23018055 NR Description: hypothetical protein [Thermobifida fusca]
  misc_feature (55)..(259): NCBI GI NO: 23105938 NR Description: hypothetical protein [Azotobacter vinelandii]
  misc_feature (11)..(296): NCBI GI NO: 25989119 NR Description: unknown [Streptomyces aureofaciens]
  misc_feature (161)..(311): NCBI GI NO: 5032119 NR Description: Ser/Arg-related nuclear matrix protein
  misc_feature (12)..(298): NCBI GI NO: 14018072 NR Description: hypothetical protein [Oryza sativa]
  misc_feature (51)..(247): NCBI GI NO: 7494125 NR Description: myosin-IA - Acanthamoeba castellanii
  misc_feature (40)..(311): NCBI GI NO: 23105951 NR Description: hypothetical protein [Azotobacter vinelandii]
  misc_feature (44)..(272): NCBI GI NO: 538695 NR Description: hypothetical protein
ARPWPVKDTNPLLESNPGPGTPLPAVLHPRHANARHLAAAGRLLPAPLRRSGPRGGLRPAGRRRHHGPLLALPAGVRRRRGRRPSRPGAPARLRAPGNVAVEAPGGPSLAPVPPRRPGPALLRRLVHVGGGARRRAGVRGAAGGGGGEARGGPGGAAGARVGGRHQLRRVRGVPPGAAAGPRRGGPGGDRQLRPPQGRRRRPRPAPPRRRRARRGRHAAPLPRADAAPDAARLPPPAPLHAGLRAPGSRPVSVQRQSRREEGANQGDNAGQQRQVPAYTSPPGSPCVVGRARPDIPSREGISSGKETWSEC

SEQ ID NO: 29024 - protein, 187 aa, Zea mays subsp. mays
  peptide (1)..(187): Ceres Seq. ID no. 13492544
  misc_feature (5)..(142): NCBI GI NO: 5032119 NR Description: Ser/Arg-related nuclear matrix protein
  misc_feature (4)..(187): NCBI GI NO: 9845307 NR Description: pr5 [Rat cytomegalovirus]
  misc_feature (2)..(187): NCBI GI NO: 27375632 NR Description: blr0521 [Bradyrhizobium japonicum]
APVARKRHQPTSRIESRSRDAATRRPSPPPCQRSASRRCWTPTSGAASPQRASWRPPSRWTAAPPRSTAGASRRGPPTARTTPVPSWCSCTASGPRQRGSGGARWALSRAGSASSSRTCSSSAARPRRRRRPAPGGCPRRGRRRRWRSSWRPWWRRRRACRWPAPATAGSWRTTWRGCWAPARWTGW

SEQ ID NO: 29025 - DNA, 1109 bp, Zea mays subsp. mays
  misc_feature (1)..(1109): Ceres Seq. ID no. 13498696
ccctgaaactcaactagccgttggagtcaaggcagcggcggcggacgcggctgaaagctgtcgaccgtgccgcgccgcccccaacggtcactggagaggaagaagaaactcgcatttccatccccagccaattgtcgctcgcctttaaatcctgcgccccaccgccgcctccactcccaccgctctctatcctcccactcaaatactcctcaatagccatcgaggagaagggagatagaaacgggagggaacacccactcgatcgtcagccatgacccggggagagaaccaggagtcgcaaaccggtaacgtccccgccgcatccgcggcgacgccggggccgaagccggcgtcggcgggggccgggaaaggcgcggagggccagtctgtggtgcggcggctgcagtcggagctgatggcgctgatgatgggcggcgacccgggcgtgtcggcgtttcccgagggggacaacatgctccactgggtgggcaccatcgacggctccgccgggacggcctacgagggcacctcctaccgcctcgcgttggccttcaccaccgagtacccgtacaagccgcccaaggtgcggttcgacaccccctgcttccaccctaacgtcgacgtgcacggcaacatctgcctggacatcctccaggacaagtggtcctccgcctacgacgtgcgcaccatcctcctctccatccagagcctgcttggagagccgaacaacgactcgccgctcaacactcaggcggcagcgctctgggcgaaccaggaagagtttaggaagatggtggagaaaatctacaagcccgccgcatagaggaggatgacagcgccggtgaagatgtgggttcttcaagcactcatttcgcttggattgatcgacaagagataatatttggattgtttgggttcccagtctggtgctgtagcaggaaggaatatttgggtcgcctagagcgtggcgattctgtaattttgttctttgagttctgaaatgttcagatattcatttttccatgaatcgttttcgtcccttcgcctcttcctaactgcaatattggtatgaaattatgaatatggactggacaagactgattgaattc

SEQ ID NO: 29026 - protein, 183 aa, Zea mays subsp. mays
  peptide (1)..(183): Ceres Seq. ID no. 13498697
  misc_feature (1)..(183): NCBI GI NO: 34903234 NR Description: unnamed protein product
  misc_feature (12)..(181): NCBI GI NO: 18403097 NR Description: ubiquitin-conjugating enzyme (UBC20)
  misc_feature (12)..(181): NCBI GI NO: 21618179 NR Description: E2, ubiquitin-conjugating enzyme, putative
  misc_feature (11)..(181): NCBI GI NO: 18402475 NR Description: ubiquitin-conjugating enzyme (UBC19)
  misc_feature (12)..(181): NCBI GI NO: 25293673 NR Description: hypothetical protein F17J6.3
  misc_feature (25)..(181): NCBI GI NO: 9454557 NR Description: Putative ubiquitin carrier protein
  misc_feature (13)..(180): NCBI GI NO: 3915189 NR Description: UBIQUITIN-CONJUGATING ENZYME X
  misc_feature (15)..(182): NCBI GI NO: 3915196 NR Description: Ubiquitin-conjugating enzyme E2-C
  misc_feature (15)..(179): NCBI GI NO: 5902146 NR Description: ubiquitin-conjugating enzyme E2C
  misc_feature (15)..(179): NCBI GI NO: 30583869 NR Description: Homo sapiens ubiquitin-conjugating enzyme E2C
MTRGENQESQTGNVPAASAATPGPKPASAGAGKGAEGQSVVRRLQSELMALMMGGDPGVSAFPEGDNMLHWVGTIDGSAGTAYEGTSYRLALAFTTEYPYKPPKVRFDTPCFHPNVDVHGNICLDILQDKWSSAYDVRTILLSIQSLLGEPNNDSPLNTQAAALWANQEEFRKMVEKIYKPAA

SEQ ID NO: 29027 - protein, 135 aa, Zea mays subsp. mays
  peptide (1)..(135): Ceres Seq. ID no. 13498698
  misc_feature (1)..(135): NCBI GI NO: 34903234 NR Description: unnamed protein product
  misc_feature (1)..(133): NCBI GI NO: 18403097 NR Description: ubiquitin-conjugating enzyme (UBC20)
  misc_feature (1)..(133): NCBI GI NO: 21618179 NR Description: E2, ubiquitin-conjugating enzyme, putative
  misc_feature (1)..(133): NCBI GI NO: 18402475 NR Description: ubiquitin-conjugating enzyme (UBC19)
  misc_feature (1)..(133): NCBI GI NO: 25293673 NR Description: hypothetical protein F17J6.3
  misc_feature (1)..(133): NCBI GI NO: 9454557 NR Description: Putative ubiquitin carrier protein
  misc_feature (1)..(132): NCBI GI NO: 3915189 NR Description: UBIQUITIN-CONJUGATING ENZYME X
  misc_feature (1)..(134): NCBI GI NO: 3915196 NR Description: Ubiquitin-conjugating enzyme E2-C
  misc_feature (1)..(131): NCBI GI NO: 5902146 NR Description: ubiquitin-conjugating enzyme E2C
  misc_feature (1)..(131): NCBI GI NO: 30583869 NR Description: Homo sapiens ubiquitin-conjugating enzyme E2C
MALMMGGDPGVSAFPEGDNMLHWVGTIDGSAGTAYEGTSYRLALAFTTEYPYKPPKVRFDTPCFHPNVDVHGNICLDILQDKWSSAYDVRTILLSIQSLLGEPNNDSPLNTQAAALWANQEEFRKMVEKIYKPAA

SEQ ID NO: 29028 - protein, 132 aa, Zea mays subsp. mays
  peptide (1)..(132): Ceres Seq. ID no. 13498699
  misc_feature (1)..(132): NCBI GI NO: 34903234 NR Description: unnamed protein product
  misc_feature (1)..(130): NCBI GI NO: 18403097 NR Description: ubiquitin-conjugating enzyme (UBC20)
  misc_feature (1)..(130): NCBI GI NO: 21618179 NR Description: E2, ubiquitin-conjugating enzyme, putative
  misc_feature (1)..(130): NCBI GI NO: 18402475 NR Description: ubiquitin-conjugating enzyme (UBC19)
  misc_feature (1)..(130): NCBI GI NO: 25293673 NR Description: hypothetical protein F17J6.3
  misc_feature (1)..(130): NCBI GI NO: 9454557 NR Description: Putative ubiquitin carrier protein
  misc_feature (1)..(129): NCBI GI NO: 3915189 NR Description: UBIQUITIN-CONJUGATING ENZYME X
  misc_feature (1)..(131): NCBI GI NO: 3915196 NR Description: Ubiquitin-conjugating enzyme E2-C
  misc_feature (1)..(128): NCBI GI NO: 5902146 NR Description: ubiquitin-conjugating enzyme E2C
  misc_feature (1)..(128): NCBI GI NO: 30583869 NR Description: Homo sapiens ubiquitin-conjugating enzyme E2C
MMGGDPGVSAFPEGDNMLHWVGTIDGSAGTAYEGTSYRLALAFTTEYPYKPPKVRFDTPCFHPNVDVHGNICLDILQDKWSSAYDVRTILLSIQSLLGEPNNDSPLNTQAAALWANQEEFRKMVEKIYKPAA

SEQ ID NO: 29029 - DNA, 1576 bp, Zea mays subsp. mays
  misc_feature (1)..(1576): Ceres Seq. ID no. 12565869
tattgtgaggggctactgttgggggccttcggcttccgaaggtcctcaaaaatgtaatttgactatgttttccaggagaaatatgtgaacaggtaccttcgaagtcagattgcgagtatacaagagcatggttaagacgaagcttgactgggacggcgatcacgacgaaggataagacgatcacgaagctatgtgcagaagagcttcggcataacggcgggaaggggaaaccgacttaaagatgaaaagccaaattagacctcgaagaattactatagagttattgataaatgtaaagggcattaatgtaattttgcatgggctgcgacccgtgcctataaataggtgaacagtattcccgtactgttcacgctgacttggcattcacttttgcgtcacgcctgtattctcattccttcaagccgaaggtacatttgtaatttaccattgtttacataagtaatataaatggaaatagattaataataatgtttatagaaattatgttactttctatactttgtatgaatgttctccatcttctatcatgatcatgaaggtgaatctgacataacaaaggagcgaattgagaaaattctcaaggctggagctaatgttgtgttgaccaccaagggaattgacgatatgtccttgaagtactttgttgaggctggtgcgattgcagtaaggcgtgtgcgcaaggaagatttgcgacatgttgccaaagccactggtgcaactatggtgtctacttttgcggacatggaaggtgaagaaacattcgattcatcattccttggccatgctgatgaagttgtggaggaaagaattgctgacgatgatgttattctggtgaaaggcacaaagaacaccagcgcggtctctataatacttaggggcgcaaatgactacatgcttgatgagattgaacggtccttgcatgatgccctgtgcattgtgaagagaaccctggaatcaaatatggttgttgctgggggtggtgcagttgaagctgcgctgtcagctttatctggagaaccttgcaacaaccctgggttctcgggaacaattggcaattgctgaatttgctgagtctttgttaatcataccaaaggtactatctgttaatgctgcaaaagatgcaactgagcttgtagcaaagcttagggcatatcatcatactgctcaaacaaaggccgacaagcaacattattcaagtatgggccttgacctctctaagggtatcattcgcaacaaccttgagtatggcgtgatagagccatcgatgagcaaagtaaagatcattcagtttgccacggaggctgccattactatcctgaggattgacgacatgatcaagcttaccaaggaagaagagggtaacgaagagtaagcagcccaccagtagtgggctagtggactcccatgggatggttgccatagcatgtagcacttgttttttcacttatcgtttacttttgcttgctgtgagcattcgtttgtaggaaaagtgagaacggatgtgtatcaatccgtgttgggtgacgatgactcacggatgaatcaaatatttgcc

SEQ ID NO: 29030 - protein, 184 aa, Zea mays subsp. mays
  peptide (1)..(184): Ceres Seq. ID no. 12565870
  misc_feature (12)..(165): Pfam Name: Pfam Description:  TCP-1/cpn60 chaperonin family
  misc_feature (12)..(165): NCBI GI NO: 38345468 NR Description: OSJNBa0010H02.6
  misc_feature (12)..(165): NCBI GI NO: 24371053 NR Description: t-complex polypeptide 1 [Bruguiera sexangula]
  misc_feature (12)..(165): NCBI GI NO: 25083339 NR Description: t-complex polypeptide 1 homologue
  misc_feature (12)..(165): NCBI GI NO: 15231024 NR Description: t-complex polypeptide 1 homologue
  misc_feature (12)..(165): NCBI GI NO: 9293959 NR Description: chaperonin, t-complex protein alpha subunit
  misc_feature (12)..(165): NCBI GI NO: 17066720 NR Description: CCT chaperonin alpha subunit
  misc_feature (12)..(165): NCBI GI NO: 135538 NR Description: T-complex protein 1, alpha subunit
  misc_feature (12)..(165): NCBI GI NO: 30584211 NR Description: Homo sapiens t-complex 1 [synthetic construct]
  misc_feature (12)..(165): NCBI GI NO: 13540473 NR Description: t-complex 1; T-complex locus TCP-1; t-complex 1
  misc_feature (12)..(165): NCBI GI NO: 135536 NR Description: T-COMPLEX PROTEIN 1, ALPHA SUBUNIT
MFSIFYHDHEGESDITKERIEKILKAGANVVLTTKGIDDMSLKYFVEAGAIAVRRVRKEDLRHVAKATGATMVSTFADMEGEETFDSSFLGHADEVVEERIADDDVILVKGTKNTSAVSIILRGANDYMLDEIERSLHDALCIVKRTLESNMVVAGGGAVEAALSALSGEPCNNPGFSGTIGNC

SEQ ID NO: 29031 - protein, 145 aa, Zea mays subsp. mays
  peptide (1)..(145): Ceres Seq. ID no. 12565871
  misc_feature (1)..(126): Pfam Name: Pfam Description:  TCP-1/cpn60 chaperonin family
  misc_feature (1)..(126): NCBI GI NO: 38345468 NR Description: OSJNBa0010H02.6
  misc_feature (1)..(126): NCBI GI NO: 24371053 NR Description: t-complex polypeptide 1 [Bruguiera sexangula]
  misc_feature (1)..(126): NCBI GI NO: 25083339 NR Description: t-complex polypeptide 1 homologue
  misc_feature (1)..(126): NCBI GI NO: 15231024 NR Description: t-complex polypeptide 1 homologue
  misc_feature (1)..(126): NCBI GI NO: 9293959 NR Description: chaperonin, t-complex protein alpha subunit
  misc_feature (1)..(126): NCBI GI NO: 17066720 NR Description: CCT chaperonin alpha subunit
  misc_feature (1)..(126): NCBI GI NO: 135538 NR Description: T-complex protein 1, alpha subunit
  misc_feature (1)..(126): NCBI GI NO: 30584211 NR Description: Homo sapiens t-complex 1 [synthetic construct]
  misc_feature (1)..(126): NCBI GI NO: 13540473 NR Description: t-complex 1; T-complex locus TCP-1; t-complex 1
  misc_feature (1)..(126): NCBI GI NO: 135536 NR Description: T-COMPLEX PROTEIN 1, ALPHA SUBUNIT
MSLKYFVEAGAIAVRRVRKEDLRHVAKATGATMVSTFADMEGEETFDSSFLGHADEVVEERIADDDVILVKGTKNTSAVSIILRGANDYMLDEIERSLHDALCIVKRTLESNMVVAGGGAVEAALSALSGEPCNNPGFSGTIGNC

SEQ ID NO: 29032 - protein, 113 aa, Zea mays subsp. mays
  peptide (1)..(113): Ceres Seq. ID no. 12565872
  misc_feature (1)..(94): Pfam Name: Pfam Description:  TCP-1/cpn60 chaperonin family
  misc_feature (1)..(94): NCBI GI NO: 38345468 NR Description: OSJNBa0010H02.6
  misc_feature (1)..(94): NCBI GI NO: 24371053 NR Description: t-complex polypeptide 1 [Bruguiera sexangula]
  misc_feature (1)..(94): NCBI GI NO: 25083339 NR Description: t-complex polypeptide 1 homologue
  misc_feature (1)..(94): NCBI GI NO: 15231024 NR Description: t-complex polypeptide 1 homologue
  misc_feature (1)..(94): NCBI GI NO: 9293959 NR Description: chaperonin, t-complex protein alpha subunit
  misc_feature (1)..(94): NCBI GI NO: 17066720 NR Description: CCT chaperonin alpha subunit
  misc_feature (1)..(94): NCBI GI NO: 135538 NR Description: T-complex protein 1, alpha subunit
  misc_feature (1)..(94): NCBI GI NO: 30584211 NR Description: Homo sapiens t-complex 1 [synthetic construct]
  misc_feature (1)..(94): NCBI GI NO: 13540473 NR Description: t-complex 1; T-complex locus TCP-1; t-complex 1
  misc_feature (1)..(94): NCBI GI NO: 135536 NR Description: T-COMPLEX PROTEIN 1, ALPHA SUBUNIT
MVSTFADMEGEETFDSSFLGHADEVVEERIADDDVILVKGTKNTSAVSIILRGANDYMLDEIERSLHDALCIVKRTLESNMVVAGGGAVEAALSALSGEPCNNPGFSGTIGNC

SEQ ID NO: 29033 - DNA, 1555 bp, Zea mays subsp. mays
  misc_feature (1)..(1555): Ceres Seq. ID no. 12434998
acaccaagagcaggctcacgccgcaacctagcctgcacgcactctcagtctctcactgaccgcgaccagcgctcagccttctgctccggaagctagctctccggccagccaccccaccccgtccacccgacaatggcggccgccgtggccctcctcctgctctccgccctcggcggagcggcggcgcaggtgttccctccgtggaacggcacgttcccgatggggcccgggttcggaggcgggagcagcggcggcggcgcgggcgcgggcgcggggaccggcgtgccggcgatgttcgtgttcggggactcgctgacggacaacggcaacaacaacgacctgaactcgctcgccaaggctaactacccgccctacggcatcgacttcgccggcggccctaccggccgcttctccaacggctacaccatggtcgacgagatcgctcagctgctgggcctgccgctgctgccgtcgcacacggacgcggcgtcgagcggcggcggcgacgcggcgctgcacggcgtgaactacgcgtcggcggcggcggggatcctggacaacacggggcagaacttcgtggggcgcatcccgttcaaccagcagatcaagaacttcgagcagacgctggagcagctgcggcgccggacgacgacgacgaggccgggcgcgggcgcgggcgggctggcgcggagcatcttctacgtgggcatgggcagcaacgactacctcaacaactacctcatgcccaactacaacacccgcaacgagtacaacggcgaccagtactccacgctgctggtgcgccagtacgccaggcagctcgacgcgctctacggcctgggcgcccgcaggttcgtcatcgccggggtgggctccatggcctgcatccccaacatgcgcgcgcggagccccgtcaacatgtgctcgcccgacgtcgacgacctcatcatccctttcaacaccaaggtcaaggccatggtgaccagcctcaacgccaaccgcccggacgccaagttcatctacgtcgacaactacgccatgatctcccagatcctaagcaacccgtggtcctacgggttcagcgtggccgaccgcggctgctgcggcatcgggaggaaccggggcatgatcacctgcctgcccttcctgcgcccgtgcctcaaccgcaactcctacatcttctgggacgccttccacccgacggagagggtcaacgtgctcctcggcagggccgccttcagtggcggcaacgacgtcgtctaccccatgaacatccagcagctcgccgcatggcagccgtgactcggtgcaaagctgtcgatcgatcgatgcgtcgttttgtagcactacttactgctatagcgtgtgtggtcatgagtaggagggagctgagcggagttatggtacggtgcgtatcagcgaccagtatcctgctgtttggggtcaatgtcaacatcgtgtctcttgtttttggttcatcagttagttatctatcaatgtttgttcgcttattacctgtactgcatcacggagatcagtggagtcatatatttcc

SEQ ID NO: 29034 - protein, 389 aa, Zea mays subsp. mays
  peptide (1)..(389): Ceres Seq. ID no. 12434999
  misc_feature (54)..(368): Pfam Name: Pfam Description:  GDSL-like Lipase/Acylhydrolase
  misc_feature (48)..(386): NCBI GI NO: 18409881 NR Description: hypothetical protein; protein id: At1g71691.1
  misc_feature (51)..(384): NCBI GI NO: 15224005 NR Description: putative GDSL-motif lipase/acylhydrolase
  misc_feature (45)..(385): NCBI GI NO: 21592417 NR Description: lipase/hydrolase, putative [Arabidopsis thaliana]
  misc_feature (45)..(385): NCBI GI NO: 15220514 NR Description: lipase/hydrolase, putative; protein id:At1g29670
  misc_feature (43)..(385): NCBI GI NO: 34909504 NR Description: putative GDSL-motif lipase/hydrolase-like protein
  misc_feature (52)..(386): NCBI GI NO: 15242458 NR Description: GDSL-motif lipase/hydrolase-like protein
  misc_feature (52)..(386): NCBI GI NO: 21553940 NR Description: GDSL-motif lipase/hydrolase-like protein
  misc_feature (41)..(385): NCBI GI NO: 15241626 NR Description: GDSL-motif lipase acylhydrolase-like protein
  misc_feature (51)..(386): NCBI GI NO: 34910808 NR Description: GDSL-motif lipase/hydrolase-like protein
  misc_feature (51)..(385): NCBI GI NO: 18398991 NR Description: unknown protein; protein id: At1g33811
MAAAVALLLLSALGGAAAQVFPPWNGTFPMGPGFGGGSSGGGAGAGAGTGVPAMFVFGDSLTDNGNNNDLNSLAKANYPPYGIDFAGGPTGRFSNGYTMVDEIAQLLGLPLLPSHTDAASSGGGDAALHGVNYASAAAGILDNTGQNFVGRIPFNQQIKNFEQTLEQLRRRTTTTRPGAGAGGLARSIFYVGMGSNDYLNNYLMPNYNTRNEYNGDQYSTLLVRQYARQLDALYGLGARRFVIAGVGSMACIPNMRARSPVNMCSPDVDDLIIPFNTKVKAMVTSLNANRPDAKFIYVDNYAMISQILSNPWSYGFSVADRGCCGIGRNRGMITCLPFLRPCLNRNSYIFWDAFHPTERVNVLLGRAAFSGGNDVVYPMNIQQLAAWQP

SEQ ID NO: 29035 - protein, 360 aa, Zea mays subsp. mays
  peptide (1)..(360): Ceres Seq. ID no. 12435000
  misc_feature (25)..(339): Pfam Name: Pfam Description:  GDSL-like Lipase/Acylhydrolase
  misc_feature (19)..(357): NCBI GI NO: 18409881 NR Description: hypothetical protein; protein id: At1g71691.1
  misc_feature (22)..(355): NCBI GI NO: 15224005 NR Description: putative GDSL-motif lipase/acylhydrolase
  misc_feature (16)..(356): NCBI GI NO: 21592417 NR Description: lipase/hydrolase, putative [Arabidopsis thaliana]
  misc_feature (16)..(356): NCBI GI NO: 15220514 NR Description: lipase/hydrolase, putative; protein id:At1g29670
  misc_feature (14)..(356): NCBI GI NO: 34909504 NR Description: putative GDSL-motif lipase/hydrolase-like protein
  misc_feature (23)..(357): NCBI GI NO: 15242458 NR Description: GDSL-motif lipase/hydrolase-like protein
  misc_feature (23)..(357): NCBI GI NO: 21553940 NR Description: GDSL-motif lipase/hydrolase-like protein
  misc_feature (12)..(356): NCBI GI NO: 15241626 NR Description: GDSL-motif lipase acylhydrolase-like protein
  misc_feature (22)..(357): NCBI GI NO: 34910808 NR Description: GDSL-motif lipase/hydrolase-like protein
  misc_feature (22)..(356): NCBI GI NO: 18398991 NR Description: unknown protein; protein id: At1g33811
MGPGFGGGSSGGGAGAGAGTGVPAMFVFGDSLTDNGNNNDLNSLAKANYPPYGIDFAGGPTGRFSNGYTMVDEIAQLLGLPLLPSHTDAASSGGGDAALHGVNYASAAAGILDNTGQNFVGRIPFNQQIKNFEQTLEQLRRRTTTTRPGAGAGGLARSIFYVGMGSNDYLNNYLMPNYNTRNEYNGDQYSTLLVRQYARQLDALYGLGARRFVIAGVGSMACIPNMRARSPVNMCSPDVDDLIIPFNTKVKAMVTSLNANRPDAKFIYVDNYAMISQILSNPWSYGFSVADRGCCGIGRNRGMITCLPFLRPCLNRNSYIFWDAFHPTERVNVLLGRAAFSGGNDVVYPMNIQQLAAWQP

SEQ ID NO: 29036 - protein, 336 aa, Zea mays subsp. mays
  peptide (1)..(336): Ceres Seq. ID no. 12435001
  misc_feature (1)..(315): Pfam Name: Pfam Description:  GDSL-like Lipase/Acylhydrolase
  misc_feature (1)..(333): NCBI GI NO: 18409881 NR Description: hypothetical protein; protein id: At1g71691.1
  misc_feature (1)..(331): NCBI GI NO: 15224005 NR Description: putative GDSL-motif lipase/acylhydrolase
  misc_feature (1)..(332): NCBI GI NO: 21592417 NR Description: lipase/hydrolase, putative [Arabidopsis thaliana]
  misc_feature (1)..(332): NCBI GI NO: 15220514 NR Description: lipase/hydrolase, putative; protein id:At1g29670
  misc_feature (1)..(332): NCBI GI NO: 34909504 NR Description: putative GDSL-motif lipase/hydrolase-like protein
  misc_feature (1)..(333): NCBI GI NO: 15242458 NR Description: GDSL-motif lipase/hydrolase-like protein
  misc_feature (1)..(333): NCBI GI NO: 21553940 NR Description: GDSL-motif lipase/hydrolase-like protein
  misc_feature (1)..(332): NCBI GI NO: 15241626 NR Description: GDSL-motif lipase acylhydrolase-like protein
  misc_feature (1)..(333): NCBI GI NO: 34910808 NR Description: GDSL-motif lipase/hydrolase-like protein
  misc_feature (1)..(332): NCBI GI NO: 18398991 NR Description: unknown protein; protein id: At1g33811
MFVFGDSLTDNGNNNDLNSLAKANYPPYGIDFAGGPTGRFSNGYTMVDEIAQLLGLPLLPSHTDAASSGGGDAALHGVNYASAAAGILDNTGQNFVGRIPFNQQIKNFEQTLEQLRRRTTTTRPGAGAGGLARSIFYVGMGSNDYLNNYLMPNYNTRNEYNGDQYSTLLVRQYARQLDALYGLGARRFVIAGVGSMACIPNMRARSPVNMCSPDVDDLIIPFNTKVKAMVTSLNANRPDAKFIYVDNYAMISQILSNPWSYGFSVADRGCCGIGRNRGMITCLPFLRPCLNRNSYIFWDAFHPTERVNVLLGRAAFSGGNDVVYPMNIQQLAAWQP

SEQ ID NO: 29037 - DNA, 695 bp, Zea mays subsp. mays
  misc_feature (1)..(695): Ceres Seq. ID no. 12382109
gcacgagaccattacctagaacatcctaatcgaaaaaacactcaatcaactagctcaacaacacctgacctgatacaaaaggagccctagagttccagagacgaagaaaggagaagaagccaatcagccaccagccatgatgagtgccaagagacttgttcagatgtcaagtagtaggtggcgaagaatggcggccctcgcgaggaagaggctcgcatcgacacctgtgaaagaaactgacgggtcgtcatgcagcacttcgtcggtggctggcaaaggccactgtgccatgtactcggctgatggtcggcggtttgaggtcccgttggtgttcctcggaacggctctcttcggtgagctcctgagcatgtcgcaggaggagttcggcttcgctggtgatgacggcaggatcaccttgccatgtgagtctttggtgatggagtacatgatgtgtttgcttacaagagatgcctctgaagaggtcaaaaggttgtttttgagctccatggcaaggccttgccactatggatctggactggtgcaaaccatgcatcatacccagcgaactgttgttcctagcttctgaagattagcatatatgcgcagtagcaagcagattgttttcaccttttcgtgtttgatgtaaatgtttacataatgtagattgggatggaatggaactaaccatatggttc

SEQ ID NO: 29038 - protein, 149 aa, Zea mays subsp. mays
  peptide (1)..(149): Ceres Seq. ID no. 12382110
  misc_feature (1)..(108): Pfam Name: Pfam Description:  Auxin responsive protein
  misc_feature (1)..(128): NCBI GI NO: 20149052 NR Description: auxin-induced SAUR-like protein [Capsicum annuum]
  misc_feature (1)..(146): NCBI GI NO: 21592571 NR Description: auxin-induced protein, putative
  misc_feature (1)..(146): NCBI GI NO: 18397123 NR Description: auxin-induced protein, putative
  misc_feature (1)..(146): NCBI GI NO: 18397101 NR Description: auxin-induced protein, putative
  misc_feature (1)..(146): NCBI GI NO: 18397103 NR Description: auxin-induced protein, putative
  misc_feature (1)..(146): NCBI GI NO: 26452170 NR Description: putative auxin-induced protein
  misc_feature (1)..(145): NCBI GI NO: 38603942 NR Description: At1g29420 [Arabidopsis thaliana]
  misc_feature (1)..(146): NCBI GI NO: 21617989 NR Description: auxin-induced protein, putative
  misc_feature (1)..(146): NCBI GI NO: 21553494 NR Description: auxin-induced protein, putative
  misc_feature (1)..(125): NCBI GI NO: 26452075 NR Description: putative auxin-induced protein
MMSAKRLVQMSSSRWRRMAALARKRLASTPVKETDGSSCSTSSVAGKGHCAMYSADGRRFEVPLVFLGTALFGELLSMSQEEFGFAGDDGRITLPCESLVMEYMMCLLTRDASEEVKRLFLSSMARPCHYGSGLVQTMHHTQRTVVPSF

SEQ ID NO: 29039 - protein, 148 aa, Zea mays subsp. mays
  peptide (1)..(148): Ceres Seq. ID no. 12382111
  misc_feature (1)..(107): Pfam Name: Pfam Description:  Auxin responsive protein
  misc_feature (1)..(127): NCBI GI NO: 20149052 NR Description: auxin-induced SAUR-like protein [Capsicum annuum]
  misc_feature (1)..(145): NCBI GI NO: 21592571 NR Description: auxin-induced protein, putative
  misc_feature (1)..(145): NCBI GI NO: 18397123 NR Description: auxin-induced protein, putative
  misc_feature (1)..(145): NCBI GI NO: 18397101 NR Description: auxin-induced protein, putative
  misc_feature (1)..(145): NCBI GI NO: 18397103 NR Description: auxin-induced protein, putative
  misc_feature (1)..(145): NCBI GI NO: 26452170 NR Description: putative auxin-induced protein
  misc_feature (1)..(144): NCBI GI NO: 38603942 NR Description: At1g29420 [Arabidopsis thaliana]
  misc_feature (1)..(145): NCBI GI NO: 21617989 NR Description: auxin-induced protein, putative
  misc_feature (1)..(145): NCBI GI NO: 21553494 NR Description: auxin-induced protein, putative
  misc_feature (1)..(124): NCBI GI NO: 26452075 NR Description: putative auxin-induced protein
MSAKRLVQMSSSRWRRMAALARKRLASTPVKETDGSSCSTSSVAGKGHCAMYSADGRRFEVPLVFLGTALFGELLSMSQEEFGFAGDDGRITLPCESLVMEYMMCLLTRDASEEVKRLFLSSMARPCHYGSGLVQTMHHTQRTVVPSF

SEQ ID NO: 29040 - protein, 140 aa, Zea mays subsp. mays
  peptide (1)..(140): Ceres Seq. ID no. 12382112
  misc_feature (1)..(99): Pfam Name: Pfam Description:  Auxin responsive protein
  misc_feature (1)..(119): NCBI GI NO: 20149052 NR Description: auxin-induced SAUR-like protein [Capsicum annuum]
  misc_feature (1)..(137): NCBI GI NO: 21592571 NR Description: auxin-induced protein, putative
  misc_feature (1)..(137): NCBI GI NO: 18397123 NR Description: auxin-induced protein, putative
  misc_feature (1)..(137): NCBI GI NO: 18397101 NR Description: auxin-induced protein, putative
  misc_feature (1)..(137): NCBI GI NO: 18397103 NR Description: auxin-induced protein, putative
  misc_feature (1)..(137): NCBI GI NO: 26452170 NR Description: putative auxin-induced protein
  misc_feature (1)..(136): NCBI GI NO: 38603942 NR Description: At1g29420 [Arabidopsis thaliana]
  misc_feature (1)..(137): NCBI GI NO: 21617989 NR Description: auxin-induced protein, putative
  misc_feature (1)..(137): NCBI GI NO: 21553494 NR Description: auxin-induced protein, putative
  misc_feature (1)..(116): NCBI GI NO: 26452075 NR Description: putative auxin-induced protein
MSSSRWRRMAALARKRLASTPVKETDGSSCSTSSVAGKGHCAMYSADGRRFEVPLVFLGTALFGELLSMSQEEFGFAGDDGRITLPCESLVMEYMMCLLTRDASEEVKRLFLSSMARPCHYGSGLVQTMHHTQRTVVPSF

SEQ ID NO: 29041 - DNA, 1241 bp, Zea mays subsp. mays
  misc_feature (1)..(1241): Ceres Seq. ID no. 12344775
acggttagttgtttcacacggacgcgcatttgtcgcgatcgacgatcgagaaaatcctagggttttcctctctcgccgccgccgacttaaagaggacagaggagtaggcgaagtagcgccgggagaggaacatggggacgccggagacgtcgcgggagccgtgcccggaccggatcctggacgacgtcggcggcgcgttcgggatgggcgccgttggcggctccgcctatcacttcatcaagggcatctacaactccccaaacgggatgcgcctgtccggaggcgcgcagaccgtgcgcatgaacgcgccgcgcgtggggggcagcttcgccgtttggggcggcctcttctccaccttcgactgcgccatggtgtacgcgcgccagaaggaggacccttggaactccatcgttgcgggcgcagccacgggcgggttcctctctatgcgccagggcatgggggccgcgggccggtccgcgctcatgggcggcatcctgctggccctcatcgagggcgccggactcatgctcaatcgcgtcctcgccaacccgccgctgcccgccgacgatcccaaccttacagcggccatgggcggcaaccctttcccgggcctgccgcaggcgccgccggtcgtggcacctccggaagcggcgacctccagcggcgtgggtggcttgttcgggggactgtttggcaggaaggaggaggataagaaacccagcgcagtcgggggcaagtcggagatcttggagagcttcgacacgcccagcagtccgataccatcgttcgagtacaagtgaggaaaaggttggctgacgccactgttgcttgcttggtgttgcaatgtggtggtggtggtctggaattggtgaattgcatgtcagcgatacaataacacagacaggacaggagatggattgtttgatgaatttattcctgcgccgctctgcctcgacggctcatatctatacgcccgcttgtgtatgtataagccctttttcaaaacgtggcagattggctactttttgatgagatgtagtagtatctgtaggagcaacagctgtagtattatatgcattcgtgtttgtgcaatgcaatgcacatcaaaacccttgtgcggttgtgcctggccatctgaagggacgacttatttgttcatgtcgctggtcttcgttttgctggcccagtggcctacgaggctgtgctgtgttaaggattggacatctgaagggttcttttgc

SEQ ID NO: 29042 - protein, 236 aa, Zea mays subsp. mays
  peptide (1)..(236): Ceres Seq. ID no. 12344776
RLVVSHGRAFVAIDDRENPRVFLSRRRRLKEDRGVGEVAPGEEHGDAGDVAGAVPGPDPGRRRRRVRDGRRWRLRLSLHQGHLQLPKRDAPVRRRADRAHERAARGGQLRRLGRPLLHLRLRHGVRAPEGGPLELHRCGRSHGRVPLYAPGHGGRGPVRAHGRHPAGPHRGRRTHAQSRPRQPAAARRRSQPYSGHGRQPFPGPAAGAAGRGTSGSGDLQRRGWLVRGTVWQEGGG

SEQ ID NO: 29043 - protein, 222 aa, Zea mays subsp. mays
  peptide (1)..(222): Ceres Seq. ID no. 12344777
  misc_feature (1)..(222): NCBI GI NO: 34394571 NR Description: translocase inner membrane-like protein
  misc_feature (1)..(222): NCBI GI NO: 15217923 NR Description: mitochondrial inner membrane translocase component
  misc_feature (1)..(171): NCBI GI NO: 15228131 NR Description: putative protein translocase; protein id:At2g37410
  misc_feature (1)..(171): NCBI GI NO: 38678772 NR Description: mitochondrial inner membrane translocase TM17-2
  misc_feature (1)..(171): NCBI GI NO: 6103722 NR Description: TIM17 [Arabidopsis thaliana]
  misc_feature (5)..(162): NCBI GI NO: 5032181 NR Description: translocase of inner mitochondrial membrane 17 homolog B
  misc_feature (5)..(162): NCBI GI NO: 34933423 NR Description: similar to mitochondrial inner membrane translocasecomponent Tim17b
  misc_feature (5)..(162): NCBI GI NO: 33468937 NR Description: translocator of inner mitochondrial membrane b
  misc_feature (5)..(156): NCBI GI NO: 30923567 NR Description: CG40451-PA [Drosophila melanogaster]
  misc_feature (5)..(165): NCBI GI NO: 33468943 NR Description: translocator of inner mitochondrial membrane a
MGTPETSREPCPDRILDDVGGAFGMGAVGGSAYHFIKGIYNSPNGMRLSGGAQTVRMNAPRVGGSFAVWGGLFSTFDCAMVYARQKEDPWNSIVAGAATGGFLSMRQGMGAAGRSALMGGILLALIEGAGLMLNRVLANPPLPADDPNLTAAMGGNPFPGLPQAPPVVAPPEAATSSGVGGLFGGLFGRKEEDKKPSAVGGKSEILESFDTPSSPIPSFEYK

SEQ ID NO: 29044 - protein, 198 aa, Zea mays subsp. mays
  peptide (1)..(198): Ceres Seq. ID no. 12344778
  misc_feature (1)..(198): NCBI GI NO: 34394571 NR Description: translocase inner membrane-like protein
  misc_feature (1)..(198): NCBI GI NO: 15217923 NR Description: mitochondrial inner membrane translocase component
  misc_feature (1)..(147): NCBI GI NO: 15228131 NR Description: putative protein translocase; protein id:At2g37410
  misc_feature (1)..(147): NCBI GI NO: 38678772 NR Description: mitochondrial inner membrane translocase TM17-2
  misc_feature (1)..(147): NCBI GI NO: 6103722 NR Description: TIM17 [Arabidopsis thaliana]
  misc_feature (1)..(138): NCBI GI NO: 5032181 NR Description: translocase of inner mitochondrial membrane 17 homolog B
  misc_feature (1)..(138): NCBI GI NO: 34933423 NR Description: similar to mitochondrial inner membrane translocasecomponent Tim17b
  misc_feature (1)..(138): NCBI GI NO: 33468937 NR Description: translocator of inner mitochondrial membrane b
  misc_feature (1)..(132): NCBI GI NO: 30923567 NR Description: CG40451-PA [Drosophila melanogaster]
  misc_feature (1)..(141): NCBI GI NO: 33468943 NR Description: translocator of inner mitochondrial membrane a
MGAVGGSAYHFIKGIYNSPNGMRLSGGAQTVRMNAPRVGGSFAVWGGLFSTFDCAMVYARQKEDPWNSIVAGAATGGFLSMRQGMGAAGRSALMGGILLALIEGAGLMLNRVLANPPLPADDPNLTAAMGGNPFPGLPQAPPVVAPPEAATSSGVGGLFGGLFGRKEEDKKPSAVGGKSEILESFDTPSSPIPSFEYK

SEQ ID NO: 29045 - DNA, 1006 bp, Zea mays subsp. mays
  misc_feature (1)..(1006): Ceres Seq. ID no. 12344779
agatatggttttcggatacttgaaagcccatcttactctccttccggtcgccgcagtaaacccctaggaagaaaccccaccgcttctggccgccgccggctcaccggtgacggcatccaaatccatggcctcccgccaggcgctccacatcttcacgccctcccggcgggcgatgcacatcctcacgtcgtcccgcggcatcgcctcgaccccgcacctctcgtccttcggctggtttgataagatcaagtccaccatcactggcaagaagcccgaggaggcctccgaggcatcctccttcaccctcatccagttcgcagacacgatggagaaagcgaggaagctggggacgttcaagaacttcgttgccgggcgggccagcgaggccaccgtcgtgaacgtcttcgagaagcactccgctgtgctgcgctacctcggtgccatcgaccccaccggcgagaacctccgaaacactgacaaaattaacgcgaccaagcactgcaactgcacaattgctgacgtggagcacattctggccaagtacacatgggctaaagaggctcagaagaagattgcaaagctcaaggaagaagggaagccattaccgaagtcatttaacgaggtccaaaatctaatgggttctacaccagtggatgtcggcagaagtaatctggcaaagagtggtcagataagtaggaatgctttctgcccatgtggttctaagaaacgatataaaaggtgctgtggagcttcatgagatgaacaacaatcctctagttcactagcacatgcaggccaggtgcagcgtttgtaagctcttttctttgccaaactctaccaagctctttcgtggacaacacctgaatttgaagcttgcaatttgtaaagcactatgagcgagccctatgtttcagaaggctttctcttaaactctgatttcttgattggagttgttgtttaacattgattcagttcaaccatgcatgaatctaggtaatatatatcc

SEQ ID NO: 29046 - protein, 210 aa, Zea mays subsp. mays
  peptide (1)..(210): Ceres Seq. ID no. 12344780
  misc_feature (39)..(167): NCBI GI NO: 15229851 NR Description: unknown protein; protein id: At3g04950.1
MASRQALHIFTPSRRAMHILTSSRGIASTPHLSSFGWFDKIKSTITGKKPEEASEASSFTLIQFADTMEKARKLGTFKNFVAGRASEATVVNVFEKHSAVLRYLGAIDPTGENLRNTDKINATKHCNCTIADVEHILAKYTWAKEAQKKIAKLKEEGKPLPKSFNEVQNLMGSTPVDVGRSNLAKSGQISRNAFCPCGSKKRYKRCCGAS

SEQ ID NO: 29047 - protein, 194 aa, Zea mays subsp. mays
  peptide (1)..(194): Ceres Seq. ID no. 12344781
  misc_feature (23)..(151): NCBI GI NO: 15229851 NR Description: unknown protein; protein id: At3g04950.1
MHILTSSRGIASTPHLSSFGWFDKIKSTITGKKPEEASEASSFTLIQFADTMEKARKLGTFKNFVAGRASEATVVNVFEKHSAVLRYLGAIDPTGENLRNTDKINATKHCNCTIADVEHILAKYTWAKEAQKKIAKLKEEGKPLPKSFNEVQNLMGSTPVDVGRSNLAKSGQISRNAFCPCGSKKRYKRCCGAS

SEQ ID NO: 29048 - protein, 143 aa, Zea mays subsp. mays
  peptide (1)..(143): Ceres Seq. ID no. 12344782
  misc_feature (1)..(100): NCBI GI NO: 15229851 NR Description: unknown protein; protein id: At3g04950.1
MEKARKLGTFKNFVAGRASEATVVNVFEKHSAVLRYLGAIDPTGENLRNTDKINATKHCNCTIADVEHILAKYTWAKEAQKKIAKLKEEGKPLPKSFNEVQNLMGSTPVDVGRSNLAKSGQISRNAFCPCGSKKRYKRCCGAS

SEQ ID NO: 29049 - DNA, 1515 bp, Zea mays subsp. mays
  misc_feature (1)..(1515): Ceres Seq. ID no. 13498565
ccattacctagaacatcctaatcgaaaaaagaagccaagggggaagcgaaaccgaaagcgagcagagtttggcaatggagctcccgtggggaatgctgctgccgctgctgctggtcctctccgtctcgtcctcgtcatcgtcgtcggctgctgccacgctcgccgtcagcgctccgcccccactgcttgttcctcctcctcgtcatgctcaagacgccgaaggcatgctcatcaacggcaacttcgagacggcgccgcggaggctgaacaagaccctcatcgtggggcgccactcgctgccggggtggacggtgcaggggcacgtggagtacgtctcgggcggtccccagcccgggggcatgttcttcgcggtgccgcacggcgtgcacgcgctgcgcctcggcagccgcgcgtcggcgtcgcagaacgtgacggtgcggccgggggcgctgtacgcgctcacgttcgcggcgacgcggacgtgcgcgcaggacgaggccctgcgcgtggcggtggcgccgtcgctctcggcgcccgccgacgtcgccgtgcgcacgctctacagcggcgcgtccgccgacacctgggcctggggcttccgcgcctcctcccccgtcgcgcaggtcacgttcgccaaccccggcgtgcaggaggaccccgcgtgcggcccgctgctggacgctgtcgccatcaaggagctgcccgcgccgtacccgaccaaagacaacctgatcaagaacgacggcttcgagatcggtccccaggtgctcaggaactcgacggtcggcgttctgctgccccccaagcagaaggacgcgacgtcgccgctgcccggctggatcatcgagtcgctcaaggcggtgcggttcatcgacgcggcccacttctctgtccccgcggggcagtacgcggtggagctggtggccgggcgggagagcgccatcgcgcaggtcatccgcaccgtgcccaaccgcgcctacaacctgtcgttcgccgtcggcgacgcccggaacggctgccacggctctatgctggtggaggcgttcgcgggcaacgtcacgcagaaggtgccgttcgattccacggggaaaggcgggtttaagacggcggcgttcaggttcgtggccagcggcgtccgcacccgcctcaccttctacagctcctactaccacaccaaggtcaccgacggcgtctcgctctgcggccccgtgctggaccaggtcaaggttgtgcctgtcaaggcgtagtgaaatgtagtgaaatgaatcgtgagagcgccgagtgacggtcgagtgacggtctgctctgctctgctctgctcgtcgtctgtagctgtgctcgtcgtgatttggcgtggtgggttgtgaaagtgtggacgaattatggacccttcggaatctgatcgtggtgtgctgtgcggtgcgatgtgctgtagcgaaatttggttactcatctcttgttctctccgcgtttggaatttgcgttttccaatccggtattgaatgtataataatt

SEQ ID NO: 29050 - protein, 390 aa, Zea mays subsp. mays
  peptide (1)..(390): Ceres Seq. ID no. 13498566
  misc_feature (64)..(385): Pfam Name: Pfam Description:  Protein of unknown function, DUF642
  misc_feature (1)..(390): NCBI GI NO: 30102997 NR Description: unknown protein
  misc_feature (45)..(385): NCBI GI NO: 18398135 NR Description: expressed protein [Arabidopsis thaliana]
  misc_feature (64)..(385): NCBI GI NO: 12321555 NR Description: unknown protein, 5' partial [Arabidopsis thaliana]
  misc_feature (42)..(385): NCBI GI NO: 15227437 NR Description: expressed protein [Arabidopsis thaliana]
  misc_feature (41)..(385): NCBI GI NO: 15227439 NR Description: expressed protein [Arabidopsis thaliana]
  misc_feature (48)..(389): NCBI GI NO: 15239049 NR Description: expressed protein [Arabidopsis thaliana]
  misc_feature (48)..(389): NCBI GI NO: 21554402 NR Description: unknown [Arabidopsis thaliana]
  misc_feature (48)..(389): NCBI GI NO: 23397043 NR Description: unknown protein [Arabidopsis thaliana]
  misc_feature (49)..(389): NCBI GI NO: 15239438 NR Description: expressed protein [Arabidopsis thaliana]
  misc_feature (49)..(389): NCBI GI NO: 21537379 NR Description: unknown [Arabidopsis thaliana]
MELPWGMLLPLLLVLSVSSSSSSSAAATLAVSAPPPLLVPPPRHAQDAEGMLINGNFETAPRRLNKTLIVGRHSLPGWTVQGHVEYVSGGPQPGGMFFAVPHGVHALRLGSRASASQNVTVRPGALYALTFAATRTCAQDEALRVAVAPSLSAPADVAVRTLYSGASADTWAWGFRASSPVAQVTFANPGVQEDPACGPLLDAVAIKELPAPYPTKDNLIKNDGFEIGPQVLRNSTVGVLLPPKQKDATSPLPGWIIESLKAVRFIDAAHFSVPAGQYAVELVAGRESAIAQVIRTVPNRAYNLSFAVGDARNGCHGSMLVEAFAGNVTQKVPFDSTGKGGFKTAAFRFVASGVRTRLTFYSSYYHTKVTDGVSLCGPVLDQVKVVPVKA

SEQ ID NO: 29051 - protein, 384 aa, Zea mays subsp. mays
  peptide (1)..(384): Ceres Seq. ID no. 13498567
  misc_feature (58)..(379): Pfam Name: Pfam Description:  Protein of unknown function, DUF642
  misc_feature (1)..(384): NCBI GI NO: 30102997 NR Description: unknown protein
  misc_feature (39)..(379): NCBI GI NO: 18398135 NR Description: expressed protein [Arabidopsis thaliana]
  misc_feature (58)..(379): NCBI GI NO: 12321555 NR Description: unknown protein, 5' partial [Arabidopsis thaliana]
  misc_feature (36)..(379): NCBI GI NO: 15227437 NR Description: expressed protein [Arabidopsis thaliana]
  misc_feature (35)..(379): NCBI GI NO: 15227439 NR Description: expressed protein [Arabidopsis thaliana]
  misc_feature (42)..(383): NCBI GI NO: 15239049 NR Description: expressed protein [Arabidopsis thaliana]
  misc_feature (42)..(383): NCBI GI NO: 21554402 NR Description: unknown [Arabidopsis thaliana]
  misc_feature (42)..(383): NCBI GI NO: 23397043 NR Description: unknown protein [Arabidopsis thaliana]
  misc_feature (43)..(383): NCBI GI NO: 15239438 NR Description: expressed protein [Arabidopsis thaliana]
  misc_feature (43)..(383): NCBI GI NO: 21537379 NR Description: unknown [Arabidopsis thaliana]
MLLPLLLVLSVSSSSSSSAAATLAVSAPPPLLVPPPRHAQDAEGMLINGNFETAPRRLNKTLIVGRHSLPGWTVQGHVEYVSGGPQPGGMFFAVPHGVHALRLGSRASASQNVTVRPGALYALTFAATRTCAQDEALRVAVAPSLSAPADVAVRTLYSGASADTWAWGFRASSPVAQVTFANPGVQEDPACGPLLDAVAIKELPAPYPTKDNLIKNDGFEIGPQVLRNSTVGVLLPPKQKDATSPLPGWIIESLKAVRFIDAAHFSVPAGQYAVELVAGRESAIAQVIRTVPNRAYNLSFAVGDARNGCHGSMLVEAFAGNVTQKVPFDSTGKGGFKTAAFRFVASGVRTRLTFYSSYYHTKVTDGVSLCGPVLDQVKVVPVKA

SEQ ID NO: 29052 - protein, 366 aa, Zea mays subsp. mays
  peptide (1)..(366): Ceres Seq. ID no. 13498568
  misc_feature (76)..(340): NCBI GI NO: 23102218 NR Description: hypothetical protein [Azotobacter vinelandii]
HYLEHPNRKKKPRGKRNRKRAEFGNGAPVGNAAAAAAGPLRLVLVIVVGCCHARRQRSAPTACSSSSSCSRRRRHAHQRQLRDGAAEAEQDPHRGAPLAAGVDGAGARGVRLGRSPARGHVLRGAARRARAAPRQPRVGVAERDGAAGGAVRAHVRGDADVRAGRGPARGGGAVALGARRRRRAHALQRRVRRHLGLGLPRLLPRRAGHVRQPRRAGGPRVRPAAGRCRHQGAARAVPDQRQPDQERRLRDRSPGAQELDGRRSAAPQAEGRDVAAARLDHRVAQGGAVHRRGPLLCPRGAVRGGAGGRAGERHRAGHPHRAQPRLQPVVRRRRRPERLPRLYAGGGVRGQRHAEGAVRFHGERRV

SEQ ID NO: 29053 - DNA, 1693 bp, Zea mays subsp. mays
  misc_feature (1)..(1693): Ceres Seq. ID no. 13498349
actcactcatagaggccgtcaggccagtcgccctcgcccagtagtaggctagtagcgacgggcgacggtggagatcgtgcgaggctgtgtactacctgtacgcctccatcgtcgcctcgcaccatcaatcctgtgcggtgccagatcctccccgggtcttgtcttgtcgcaggtggaagccatgtccgccgcggacgcagccggcggcaaggaggcggcgccggcgtgcgactcctgcacgggcatgccggcggtggtgtactgccgggccgactccgcgaggctgtgcctgcagtgcgaccgccacgtgcacggcgccaacaccgtgtccacccgccacgcccgggcgccgctctgcgccgggtgccacgcagccgctgccgctgccgccacgccggccgcttcctctgcgccagctgccgcttgggggaggagaaggatgagcgggacggcggtggcgccgccgacagtagtagcgacgacggtggcgcggtggaagggtacgccgggtgcccctcggtcgccgatctcgcgaccatcctgggcgccggctccgcgtgggaggagccccagacgctccgcttggagagccggagctccggcggcgagctggctgacgaggtcatccgccagctggtggagctcgccaggtcggaggcggcggctcgcgctgagatggagcagcttactccatggccgtcgccggagcttgctgccattactggacagtacgccgacttcggggctctcgacgctgacaccgcctggcatgatgatgcagcagccatcgcggcagcagtagtgccttccactgaggaggagcagcaagcgtggatcgcggccggctgcgacgtcggcgcgtgccggacggaggagaaggcgcgcgagaacgacgctgctctggccgagccgtgtctgtcctcgttcgtggagatgtcagagatctgccccgccagcgtcgtcggtcaccctcagccacggcggggacgagggcgtcgacagcagcggcaagacagccccgcggccgcagctggccgcgccgacgccggcgaagggcggctacgacgtggcctaccccgaccgcggcacggtgatctcgcgctacaaggagaagcggaagaacaggaggttcgacaagcagatccggtacgagtcgcgcaaggcccgcgccgacggccggatgcggatcaaggggcggttcgccaagtccggcgaggtctgagacgcgtgcgggcgctcacgccatgccaacggcaacgagctggtagggggaccgtgcgtgtgtttcacgtgggtggttaggtttggtattttggttggtgttgcagctcgctgctcgcacgtgtcgatgcgtactagtctacgttgattagagacggttgtctactctttcctcattcgtttaataaaacacggctccaccaccaatgcaagtttcaccccgatcgattggaagcgtgtgtttacgtggagaactcgctaagttagatgtcgtttggtaatgtaatagataaccgatattgttaaattatatttgtttaggtttaattataattaataatatactagaaatagataccggcttattcgaacttgttactgccggtattcgagagtgaatcattaccattattatttaagttgtatttcgtgaatcaaacgacacattagtttctagtcaaatttgttattc

SEQ ID NO: 29054 - protein, 208 aa, Zea mays subsp. mays
  peptide (1)..(208): Ceres Seq. ID no. 13498350
  misc_feature (1)..(91): NCBI GI NO: 34899270 NR Description: putative zinc-finger protein
  misc_feature (1)..(11): NCBI GI NO: 34899270 NR Description: putative zinc-finger protein
  misc_feature (1)..(93): NCBI GI NO: 7522220 NR Description: zinc-finger protein C60910 [imported] - rice
MEQLTPWPSPELAAITGQYADFGALDADTAWHDDAAAIAAAVVPSTEEEQQAWIAAGCDVGACRTEEKARENDAALAEPCLSSFVEMSEICPASVVGHPQPRRGRGRRQQRQDSPAAAAGRADAGEGRLRRGLPRPRHGDLALQGEAEEQEVRQADPVRVAQGPRRRPDADQGAVRQVRRGLRRVRALTPCQRQRAGRGTVRVFHVGG

SEQ ID NO: 29055 - protein, 206 aa, Zea mays subsp. mays
  peptide (1)..(206): Ceres Seq. ID no. 13498351
  misc_feature (12)..(58): Pfam Name: Pfam Description:  B-box zinc finger
  misc_feature (3)..(69): NCBI GI NO: 34899270 NR Description: putative zinc-finger protein
  misc_feature (1)..(111): NCBI GI NO: 7522220 NR Description: zinc-finger protein C60910 [imported] - rice
  misc_feature (9)..(79): NCBI GI NO: 38175538 NR Description: zinc-finger protein C60910-like
  misc_feature (11)..(62): NCBI GI NO: 30685731 NR Description: CONSTANS B-box zinc finger family protein
  misc_feature (1)..(102): NCBI GI NO: 34898680 NR Description: Hd1 [Oryza sativa (japonica cultivar-group)]
  misc_feature (1)..(81): NCBI GI NO: 11094209 NR Description: allele:Hd1 [Oryza sativa]
  misc_feature (16)..(111): NCBI GI NO: 15231491 NR Description: CONSTANS B-box zinc finger family protein
  misc_feature (16)..(68): NCBI GI NO: 7489605 NR Description: zinc-finger protein S3574 [imported] - rice
  misc_feature (8)..(85): NCBI GI NO: 21667479 NR Description: CONSTANS-like protein
  misc_feature (8)..(85): NCBI GI NO: 21667483 NR Description: CONSTANS-like protein
MSAADAAGGKEAAPACDSCTGMPAVVYCRADSARLCLQCDRHVHGANTVSTRHARAPLCAGCHAAAAAAATPAASSAPAAAWGRRRMSGTAVAPPTVVATTVARWKGTPGAPRSPISRPSWAPAPRGRSPRRSAWRAGAPAASWLTRSSASWWSSPGRRRRLALRWSSLLHGRRRSLLPLLDSTPTSGLSTLTPPGMMMQQPSRQQ

SEQ ID NO: 29056 - protein, 185 aa, Zea mays subsp. mays
  peptide (1)..(185): Ceres Seq. ID no. 13498352
  misc_feature (1)..(37): Pfam Name: Pfam Description:  B-box zinc finger
  misc_feature (1)..(48): NCBI GI NO: 34899270 NR Description: putative zinc-finger protein
  misc_feature (1)..(90): NCBI GI NO: 7522220 NR Description: zinc-finger protein C60910 [imported] - rice
  misc_feature (1)..(58): NCBI GI NO: 38175538 NR Description: zinc-finger protein C60910-like
  misc_feature (1)..(41): NCBI GI NO: 30685731 NR Description: CONSTANS B-box zinc finger family protein
  misc_feature (1)..(81): NCBI GI NO: 34898680 NR Description: Hd1 [Oryza sativa (japonica cultivar-group)]
  misc_feature (1)..(60): NCBI GI NO: 11094209 NR Description: allele:Hd1 [Oryza sativa]
  misc_feature (1)..(90): NCBI GI NO: 15231491 NR Description: CONSTANS B-box zinc finger family protein
  misc_feature (1)..(47): NCBI GI NO: 7489605 NR Description: zinc-finger protein S3574 [imported] - rice
  misc_feature (1)..(64): NCBI GI NO: 21667479 NR Description: CONSTANS-like protein
  misc_feature (1)..(64): NCBI GI NO: 21667483 NR Description: CONSTANS-like protein
MPAVVYCRADSARLCLQCDRHVHGANTVSTRHARAPLCAGCHAAAAAAATPAASSAPAAAWGRRRMSGTAVAPPTVVATTVARWKGTPGAPRSPISRPSWAPAPRGRSPRRSAWRAGAPAASWLTRSSASWWSSPGRRRRLALRWSSLLHGRRRSLLPLLDSTPTSGLSTLTPPGMMMQQPSRQQ

SEQ ID NO: 29057 - DNA, 1706 bp, Zea mays subsp. mays; identical to SEQ ID NO: 24298
  misc_feature (1)..(1706): Ceres Seq. ID no. 12408837

SEQ ID NO: 29058 - protein, 409 aa, Zea mays subsp. mays; identical to SEQ ID NO: 24299
  peptide (1)..(409): Ceres Seq. ID no. 12408838
  misc_feature (1)..(409): NCBI GI NO: 1352200 NR Description: TRIOSE PHOSPHATE/PHOSPHATE TRANSLOCATOR
  misc_feature (1)..(409): NCBI GI NO: 13195734 NR Description: triose phosphate translocator [Triticum aestivum]
  misc_feature (1)..(409): NCBI GI NO: 13518113 NR Description: triose phosphate/phosphate translocator
  misc_feature (11)..(409): NCBI GI NO: 9295273 NR Description: triose phosphate/phosphate translocator precursor
  misc_feature (10)..(409): NCBI GI NO: 629694 NR Description: phosphate translocator
  misc_feature (7)..(409): NCBI GI NO: 1352199 NR Description: Triose phosphate/phosphate translocator
  misc_feature (12)..(406): NCBI GI NO: 117291 NR Description: TRIOSE PHOSPHATE/PHOSPHATE TRANSLOCATOR
  misc_feature (12)..(406): NCBI GI NO: 21593093 NR Description: phosphate/triose-phosphate translocator precursor
  misc_feature (12)..(408): NCBI GI NO: 9757731 NR Description: phosphate/triose-phosphate translocator precursor
  misc_feature (79)..(397): NCBI GI NO: 18423670 NR Description: glucose-6-phosphate/phosphate translocator

SEQ ID NO: 29059 - protein, 296 aa, Zea mays subsp. mays; identical to SEQ ID NO: 24300
  peptide (1)..(296): Ceres Seq. ID no. 12408839
  misc_feature (1)..(296): NCBI GI NO: 1352200 NR Description: TRIOSE PHOSPHATE/PHOSPHATE TRANSLOCATOR
  misc_feature (1)..(296): NCBI GI NO: 13195734 NR Description: triose phosphate translocator [Triticum aestivum]
  misc_feature (1)..(296): NCBI GI NO: 13518113 NR Description: triose phosphate/phosphate translocator
  misc_feature (1)..(296): NCBI GI NO: 9295273 NR Description: triose phosphate/phosphate translocator precursor
  misc_feature (1)..(296): NCBI GI NO: 629694 NR Description: phosphate translocator
  misc_feature (1)..(296): NCBI GI NO: 1352199 NR Description: Triose phosphate/phosphate translocator
  misc_feature (1)..(293): NCBI GI NO: 117291 NR Description: TRIOSE PHOSPHATE/PHOSPHATE TRANSLOCATOR
  misc_feature (1)..(293): NCBI GI NO: 21593093 NR Description: phosphate/triose-phosphate translocator precursor
  misc_feature (1)..(295): NCBI GI NO: 9757731 NR Description: phosphate/triose-phosphate translocator precursor
  misc_feature (1)..(284): NCBI GI NO: 18423670 NR Description: glucose-6-phosphate/phosphate translocator

SEQ ID NO: 29060 - DNA, 1395 bp, Zea mays subsp. mays
  misc_feature (1)..(1395): Ceres Seq. ID no. 12408833
aaataggtagatgatgccgctaacagtaacacagagtaaaagactccaattttcccacggctactgaatcacggatgcttaaatctccccaatccgtatctctgtttccctcacagcgcggctgcctataaccactccaggtctccagcgaagcaggctcaggcgcaacgcaacaacacaaggcggcggttatggcctctgctgctgcgacggctacgatggggacggggaaggtggtgtgcgtcaccggcgcatcagggtacatcgcgtcctggattgtcaggctcctcctcgaccgcggctacaccgtccgcgccaccgtgcgagacaccgctgacccaaagaaaacattgcacctgactgcgttggatggtgctaaggataggctgcacttatttaaagctagcctgctagaagagggttctttcgatgctgcagttcatggatgcgacactgtatttcatactgcctctcccttttatcacaatgtcaaggatgctaaggcagagttacttgacccagcagttaagggaacactcaatgttctcggttcatgcaagaaagcttctattaaaaaggtggttgtaacatcatctatggctgctgtagcctacaacgggaggccaaggactcctgaggtcacagttgacgagacatggttttctgatccacaaatttgtgaaacaaatcagcaatggtatattttgtccaagacgctggcagaggaggctgcttggaagttctcaagggataatggacttgaaatcgttactataaacccagcgatggttattggtcccctgctgcagcctacactaaataccagtgctgaagcaatcctgaagttaatcaatgggtcatcgtctacatatcccaatttttgctttggatgggttaatgtcaaggatgttgccctggcccatatccttgcatacgaggttccctcatcaaatggaaggtactgcatggtggaaagagttgttcactactcagaactggtgaacattatccgcaacatgtatcctacccttcctcttccggacaagtgtgcagatgacaagccgtttgtcccaccctaccaagtatcaaaggagaagataaaaagcataggcatcgagttgattccactggagacgagcgtcaaggagaccatcgaaagcttgaaagagaaggggttcgctagtttttgactcgtgcaagctgtgaaacagaagtgttactgtactacgtgatgttgcattgtacacatgcatcggacttcgcagttcccaagctattttggtagctttggtctgtaagattacctaaaataaactgagccacgttgccacgctgtagcttttgtacatgttatgctttgatcggattgagacacgtgatatatggtcgttgctt

SEQ ID NO: 29061 - protein, 332 aa, Zea mays subsp. mays
  peptide (1)..(332): Ceres Seq. ID no. 12408834
  misc_feature (14)..(306): Pfam Name: Pfam Description:  3-beta hydroxysteroid dehydrogenase/ isomerase family
  misc_feature (1)..(332): NCBI GI NO: 34913420 NR Description: putative cinnamyl-alcohol dehydrogenase
  misc_feature (8)..(332): NCBI GI NO: 15239741 NR Description: cinnamyl-alcohol dehydrogenase - like protein
  misc_feature (8)..(332): NCBI GI NO: 21594240 NR Description: cinnamyl-alcohol dehydrogenase-like protein
  misc_feature (11)..(332): NCBI GI NO: 7488627 NR Description: probable cinnamyl-alcohol dehydrogenase (EC1
  misc_feature (7)..(332): NCBI GI NO: 7431409 NR Description: cinnamyl-alcohol dehydrogenase (EC 1
  misc_feature (11)..(332): NCBI GI NO: 37029996 NR Description: NADPH-dependent cinnamyl alcohol dehydrogenase
  misc_feature (14)..(332): NCBI GI NO: 25405464 NR Description: hypothetical protein F5D21.12
  misc_feature (14)..(332): NCBI GI NO: 30694964 NR Description: cinnamyl-alcohol dehydrogenase (CAD), putative
  misc_feature (11)..(332): NCBI GI NO: 7431406 NR Description: probable cinnamyl-alcohol dehydrogenase (EC1
  misc_feature (13)..(329): NCBI GI NO: 5852203 NR Description: aldehyde reductase [Vigna radiata]
MASAAATATMGTGKVVCVTGASGYIASWIVRLLLDRGYTVRATVRDTADPKKTLHLTALDGAKDRLHLFKASLLEEGSFDAAVHGCDTVFHTASPFYHNVKDAKAELLDPAVKGTLNVLGSCKKASIKKVVVTSSMAAVAYNGRPRTPEVTVDETWFSDPQICETNQQWYILSKTLAEEAAWKFSRDNGLEIVTINPAMVIGPLLQPTLNTSAEAILKLINGSSSTYPNFCFGWVNVKDVALAHILAYEVPSSNGRYCMVERVVHYSELVNIIRNMYPTLPLPDKCADDKPFVPPYQVSKEKIKSIGIELIPLETSVKETIESLKEKGFASF

SEQ ID NO: 29062 - protein, 323 aa, Zea mays subsp. mays
  peptide (1)..(323): Ceres Seq. ID no. 12408835
  misc_feature (5)..(297): Pfam Name: Pfam Description:  3-beta hydroxysteroid dehydrogenase/ isomerase family
  misc_feature (1)..(323): NCBI GI NO: 34913420 NR Description: putative cinnamyl-alcohol dehydrogenase
  misc_feature (1)..(323): NCBI GI NO: 15239741 NR Description: cinnamyl-alcohol dehydrogenase - like protein
  misc_feature (1)..(323): NCBI GI NO: 21594240 NR Description: cinnamyl-alcohol dehydrogenase-like protein
  misc_feature (2)..(323): NCBI GI NO: 7488627 NR Description: probable cinnamyl-alcohol dehydrogenase (EC1
  misc_feature (1)..(323): NCBI GI NO: 7431409 NR Description: cinnamyl-alcohol dehydrogenase (EC 1
  misc_feature (2)..(323): NCBI GI NO: 37029996 NR Description: NADPH-dependent cinnamyl alcohol dehydrogenase
  misc_feature (5)..(323): NCBI GI NO: 25405464 NR Description: hypothetical protein F5D21.12
  misc_feature (5)..(323): NCBI GI NO: 30694964 NR Description: cinnamyl-alcohol dehydrogenase (CAD), putative
  misc_feature (2)..(323): NCBI GI NO: 7431406 NR Description: probable cinnamyl-alcohol dehydrogenase (EC1
  misc_feature (4)..(320): NCBI GI NO: 5852203 NR Description: aldehyde reductase [Vigna radiata]
MGTGKVVCVTGASGYIASWIVRLLLDRGYTVRATVRDTADPKKTLHLTALDGAKDRLHLFKASLLEEGSFDAAVHGCDTVFHTASPFYHNVKDAKAELLDPAVKGTLNVLGSCKKASIKKVVVTSSMAAVAYNGRPRTPEVTVDETWFSDPQICETNQQWYILSKTLAEEAAWKFSRDNGLEIVTINPAMVIGPLLQPTLNTSAEAILKLINGSSSTYPNFCFGWVNVKDVALAHILAYEVPSSNGRYCMVERVVHYSELVNIIRNMYPTLPLPDKCADDKPFVPPYQVSKEKIKSIGIELIPLETSVKETIESLKEKGFASF

SEQ ID NO: 29063 - protein, 197 aa, Zea mays subsp. mays
  peptide (1)..(197): Ceres Seq. ID no. 12408836
  misc_feature (1)..(171): Pfam Name: Pfam Description:  3-beta hydroxysteroid dehydrogenase/ isomerase family
  misc_feature (1)..(197): NCBI GI NO: 34913420 NR Description: putative cinnamyl-alcohol dehydrogenase
  misc_feature (1)..(197): NCBI GI NO: 15239741 NR Description: cinnamyl-alcohol dehydrogenase - like protein
  misc_feature (1)..(197): NCBI GI NO: 21594240 NR Description: cinnamyl-alcohol dehydrogenase-like protein
  misc_feature (1)..(197): NCBI GI NO: 7488627 NR Description: probable cinnamyl-alcohol dehydrogenase (EC1
  misc_feature (1)..(197): NCBI GI NO: 7431409 NR Description: cinnamyl-alcohol dehydrogenase (EC 1
  misc_feature (1)..(197): NCBI GI NO: 37029996 NR Description: NADPH-dependent cinnamyl alcohol dehydrogenase
  misc_feature (1)..(197): NCBI GI NO: 25405464 NR Description: hypothetical protein F5D21.12
  misc_feature (1)..(197): NCBI GI NO: 30694964 NR Description: cinnamyl-alcohol dehydrogenase (CAD), putative
  misc_feature (1)..(197): NCBI GI NO: 7431406 NR Description: probable cinnamyl-alcohol dehydrogenase (EC1
  misc_feature (1)..(194): NCBI GI NO: 5852203 NR Description: aldehyde reductase [Vigna radiata]
MAAVAYNGRPRTPEVTVDETWFSDPQICETNQQWYILSKTLAEEAAWKFSRDNGLEIVTINPAMVIGPLLQPTLNTSAEAILKLINGSSSTYPNFCFGWVNVKDVALAHILAYEVPSSNGRYCMVERVVHYSELVNIIRNMYPTLPLPDKCADDKPFVPPYQVSKEKIKSIGIELIPLETSVKETIESLKEKGFASF

SEQ ID NO: 29064 - DNA, 1014 bp, Zea mays subsp. mays
  misc_feature (1)..(1014): Ceres Seq. ID no. 12412614
actcccaagttcaccttcctctgcctgtagatcttctagagtcccgtatacggtttcgtctttcgtgtcccacttccatggcggcggcggcgcagctgcacggatcggctgcggccacggtggcatatcgcgggactcgagcctactcagttccatcctcatgccggtggccgcagtctggttccccgaagctttcgatttctacaagtggagtcagtatgaagccatttggctttgctgctaaactttcaacaaaatgtgcaaatgagaatgctcgagttgaagaattagatttgaggtcagaccagatgaaggaattacaggtggaggagcaggttattccccagaagaggagtgctaaaatccatgacttctgccttgggatcccttttggtggtcttttattctctatggggcttctaggatacatcttctccagaagcaccataagtcttgtcttgggcattgcaccagggctagccactctgctacttggcactctcagtctgaagttctggaggagcggcagatccagcttcctgcttatcttggctcaggcagcaatttctgctttcctggcatggaaatactctcatgcttacttcttgacaaatagactccttccttggggcttctacgcgtcactgagcactgcaatgggttgtttctacgcctatgtgctacttgcgggaggaaatcccccgcctaagaagttggcagccattccaccgcagtaggaagagccgaagagggattcggtttaggatcagcgtgcgttgacccttcgctccatagtaaaattttgattgtcttcctaagtatattctgcagcctttgtacactgctggctgggcctttgttttttcgatcctggtagcctgaaattttgagcaaataaagatccagaggacaatagccctgcctccagtaacatgctgttttcttgctcatgaatgaacgtgataaatataagcctgctcggcaaactggctgtcacagaaagttgtggcaagc

SEQ ID NO: 29065 - protein, 244 aa, Zea mays subsp. mays
  peptide (1)..(244): Ceres Seq. ID no. 12412615
  misc_feature (124)..(227): Pfam Name: UPF0136 Pfam Description: Uncharacterised protein family
  misc_feature (26)..(242): NCBI GI NO: 38344745 NR Description: OSJNBa0089K21.3
  misc_feature (49)..(238): NCBI GI NO: 18410685 NR Description: expressed protein; protein id: At3g57280
  misc_feature (49)..(238): NCBI GI NO: 11290570 NR Description: hypothetical protein F28O9
  misc_feature (121)..(237): NCBI GI NO: 15232290 NR Description: unknown protein; protein id: At3g20510.1
  misc_feature (121)..(236): NCBI GI NO: 18403201 NR Description: expressed protein; protein id: At1g50740
  misc_feature (121)..(237): NCBI GI NO: 34896628 NR Description: hypothetical protein [Oryza sativa]
SQVHLPLPVDLLESRIRFRLSCPTSMAAAAQLHGSAAATVAYRGTRAYSVPSSCRWPQSGSPKLSISTSGVSMKPFGFAAKLSTKCANENARVEELDLRSDQMKELQVEEQVIPQKRSAKIHDFCLGIPFGGLLFSMGLLGYIFSRSTISLVLGIAPGLATLLLGTLSLKFWRSGRSSFLLILAQAAISAFLAWKYSHAYFLTNRLLPWGFYASLSTAMGCFYAYVLLAGGNPPPKKLAAIPPQ

SEQ ID NO: 29066 - protein, 219 aa, Zea mays subsp. mays
  peptide (1)..(219): Ceres Seq. ID no. 12412616
  misc_feature (99)..(202): Pfam Name: UPF0136 Pfam Description: Uncharacterised protein family
  misc_feature (1)..(217): NCBI GI NO: 38344745 NR Description: OSJNBa0089K21.3
  misc_feature (24)..(213): NCBI GI NO: 18410685 NR Description: expressed protein; protein id: At3g57280
  misc_feature (24)..(213): NCBI GI NO: 11290570 NR Description: hypothetical protein F28O9
  misc_feature (96)..(212): NCBI GI NO: 15232290 NR Description: unknown protein; protein id: At3g20510.1
  misc_feature (96)..(211): NCBI GI NO: 18403201 NR Description: expressed protein; protein id: At1g50740
  misc_feature (96)..(212): NCBI GI NO: 34896628 NR Description: hypothetical protein [Oryza sativa]
MAAAAQLHGSAAATVAYRGTRAYSVPSSCRWPQSGSPKLSISTSGVSMKPFGFAAKLSTKCANENARVEELDLRSDQMKELQVEEQVIPQKRSAKIHDFCLGIPFGGLLFSMGLLGYIFSRSTISLVLGIAPGLATLLLGTLSLKFWRSGRSSFLLILAQAAISAFLAWKYSHAYFLTNRLLPWGFYASLSTAMGCFYAYVLLAGGNPPPKKLAAIPPQ

SEQ ID NO: 29067 - protein, 172 aa, Zea mays subsp. mays
  peptide (1)..(172): Ceres Seq. ID no. 12412617
  misc_feature (52)..(155): Pfam Name: UPF0136 Pfam Description: Uncharacterised protein family
  misc_feature (1)..(170): NCBI GI NO: 38344745 NR Description: OSJNBa0089K21.3
  misc_feature (1)..(166): NCBI GI NO: 18410685 NR Description: expressed protein; protein id: At3g57280
  misc_feature (1)..(166): NCBI GI NO: 11290570 NR Description: hypothetical protein F28O9
  misc_feature (49)..(165): NCBI GI NO: 15232290 NR Description: unknown protein; protein id: At3g20510.1
  misc_feature (49)..(164): NCBI GI NO: 18403201 NR Description: expressed protein; protein id: At1g50740
  misc_feature (49)..(165): NCBI GI NO: 34896628 NR Description: hypothetical protein [Oryza sativa]
MKPFGFAAKLSTKCANENARVEELDLRSDQMKELQVEEQVIPQKRSAKIHDFCLGIPFGGLLFSMGLLGYIFSRSTISLVLGIAPGLATLLLGTLSLKFWRSGRSSFLLILAQAAISAFLAWKYSHAYFLTNRLLPWGFYASLSTAMGCFYAYVLLAGGNPPPKKLAAIPPQ

SEQ ID NO: 29068 - DNA, 1174 bp, Zea mays subsp. mays
  misc_feature (1)..(1174): Ceres Seq. ID no. 12412610
gcccttccgcggctgtgctgtgctctgctctgctctgctccccgtctttcctcctctcccggtctttcctcctctccccttcccgcccagcgcgtccccacgaggaaccaaccccgcggcatggggatcgtggaggaggcgcacaacctgcgagtggtgggcgaggggaagcgcggggtcatcgtgctggcgcacggcttcggcaccgaccagtccgtgtggaagcacctggtgccgcacctcgtcgccgactaccgcgtcgtgctcttcgacaccatgggcgccggccccaccaacccggactacttcgacttctcccgctacgccacgctcgagggctacgcgctcgacctcctcgccatcctccaggagctcggcgtccgctcctgcatctacgtcggccactccgtctccgcggtcatcggcgcgctcgcctccatctccaggcctgacctcttcaccaagctcgtgctcctctccgcgtccccaaggtacctcaatgatgtggactactatggcgggtttgagcaagatgagcttgatgagctgtttgaggcgatgcgatcaaactacaaggcctggtgctcaggttttgcgcccctgtgtgttggcggagacatggaatcagtggcagttcaggagtttagcaggacgctcttcaatatacgtccggacattgcgcttagtgttgcccagacgatcttccagagcgacgtgcgcagcctcctcccgcacgtcactgtcccatgccacattgttcagagcaccaaggatctcgcggtgccggtcgtggtgtctgagtacctgcacaggcaccttggtggcgactccatcgtggaggtgatgccctctgaaggccatcttccccagcttagctctccggacattgtaatccctgtcttactccgacacatccagcacgatatcgcagtctaggttggtcaatcgttcctccaagacgatgagcatccgaagctgtctacttgtctgtttgtatcttgcttaattgttcaacgtaggatcgcatctatttgatgttctaataaggtttcaaaggtgttatgtagtgttggcggtggaaagtgtagcatatatgtatgtgttatccattggtcgtctaatgtaggctaccatgttggatgctctgacatctgaagtccttcagaagctcttc

SEQ ID NO: 29069 - protein, 311 aa, Zea mays subsp. mays
  peptide (1)..(311): Ceres Seq. ID no. 12412611
  misc_feature (85)..(303): Pfam Name: Pfam Description:  alpha/beta hydrolase fold
  misc_feature (165)..(311): NCBI GI NO: 40736991 NR Description: putative hydrolases
  misc_feature (41)..(166): NCBI GI NO: 40736991 NR Description: putative hydrolases
  misc_feature (41)..(311): NCBI GI NO: 15235567 NR Description: putative protein; protein id: At4g37470
  misc_feature (46)..(294): NCBI GI NO: 18396732 NR Description: expressed protein; protein id: At3g03990
  misc_feature (46)..(294): NCBI GI NO: 21593927 NR Description: unknown [Arabidopsis thaliana]
  misc_feature (48)..(298): NCBI GI NO: 24216360 NR Description: Predicted hydrolases or acyltransferases
  misc_feature (47)..(306): NCBI GI NO: 15230110 NR Description: unknown protein; protein id: At3g24420.1
  misc_feature (44)..(294): NCBI GI NO: 22987307 NR Description: hypothetical protein [Burkholderia fungorum]
  misc_feature (49)..(301): NCBI GI NO: 34912326 NR Description: P0451D05.26
  misc_feature (61)..(305): NCBI GI NO: 22298700 NR Description: ORF_ID:tlr1157~hypothetical protein
ALPRLCCALLCSAPRLSSSPGLSSSPLPAQRVPTRNQPRGMGIVEEAHNLRVVGEGKRGVIVLAHGFGTDQSVWKHLVPHLVADYRVVLFDTMGAGPTNPDYFDFSRYATLEGYALDLLAILQELGVRSCIYVGHSVSAVIGALASISRPDLFTKLVLLSASPRYLNDVDYYGGFEQDELDELFEAMRSNYKAWCSGFAPLCVGGDMESVAVQEFSRTLFNIRPDIALSVAQTIFQSDVRSLLPHVTVPCHIVQSTKDLAVPVVVSEYLHRHLGGDSIVEVMPSEGHLPQLSSPDIVIPVLLRHIQHDIAV

SEQ ID NO: 29070 - protein, 280 aa, Zea mays subsp. mays
  peptide (1)..(280): Ceres Seq. ID no. 12412612
  misc_feature (53)..(278): Pfam Name: Pfam Description:  Equine herpesvirus glycoprotein gp2
  misc_feature (1)..(210): NCBI GI NO: 2135766 NR Description: mucin 5AC (clone JER47) - human (fragment)
  misc_feature (65)..(182): NCBI GI NO: 6473880 NR Description: Hypothetical protein [Schizosaccharomyces pombe]
  misc_feature (1)..(210): NCBI GI NO: 563375 NR Description: mucin [Homo sapiens]
  misc_feature (1)..(260): NCBI GI NO: 17384256 NR Description: mucin 5 [Homo sapiens]
  misc_feature (1)..(279): NCBI GI NO: 17384256 NR Description: mucin 5 [Homo sapiens]
  misc_feature (29)..(195): NCBI GI NO: 11359723 NR Description: proteophosphoglycan, membrane-associated
  misc_feature (30)..(280): NCBI GI NO: 25011571 NR Description: Unknown [Streptococcus agalactiae NEM316]
  misc_feature (65)..(277): NCBI GI NO: 11359723 NR Description: proteophosphoglycan, membrane-associated
  misc_feature (30)..(280): NCBI GI NO: 22537606 NR Description: cell wall surface anchor family protein
  misc_feature (30)..(280): NCBI GI NO: 25011571 NR Description: Unknown [Streptococcus agalactiae NEM316]
PFRGCAVLCSALLPVFPPLPVFPPLPFPPSASPRGTNPAAWGSWRRRTTCEWWARGSAGSSCWRTASAPTSPCGSTWCRTSSPTTASCSSTPWAPAPPTRTTSTSPATPRSRATRSTSSPSSRSSASAPASTSATPSPRSSARSPPSPGLTSSPSSCSSPRPQGTSMMWTTMAGLSKMSLMSCLRRCDQTTRPGAQVLRPCVLAETWNQWQFRSLAGRSSIYVRTLRLVLPRRSSRATCAASSRTSLSHATLFRAPRISRCRSWCLSTCTGTLVATPSWR

SEQ ID NO: 29071 - protein, 271 aa, Zea mays subsp. mays
  peptide (1)..(271): Ceres Seq. ID no. 12412613
  misc_feature (45)..(263): Pfam Name: Pfam Description:  alpha/beta hydrolase fold
  misc_feature (125)..(271): NCBI GI NO: 40736991 NR Description: putative hydrolases
  misc_feature (1)..(126): NCBI GI NO: 40736991 NR Description: putative hydrolases
  misc_feature (1)..(271): NCBI GI NO: 15235567 NR Description: putative protein; protein id: At4g37470
  misc_feature (6)..(254): NCBI GI NO: 18396732 NR Description: expressed protein; protein id: At3g03990
  misc_feature (6)..(254): NCBI GI NO: 21593927 NR Description: unknown [Arabidopsis thaliana]
  misc_feature (8)..(258): NCBI GI NO: 24216360 NR Description: Predicted hydrolases or acyltransferases
  misc_feature (7)..(266): NCBI GI NO: 15230110 NR Description: unknown protein; protein id: At3g24420.1
  misc_feature (4)..(254): NCBI GI NO: 22987307 NR Description: hypothetical protein [Burkholderia fungorum]
  misc_feature (9)..(261): NCBI GI NO: 34912326 NR Description: P0451D05.26
  misc_feature (21)..(265): NCBI GI NO: 22298700 NR Description: ORF_ID:tlr1157~hypothetical protein
MGIVEEAHNLRVVGEGKRGVIVLAHGFGTDQSVWKHLVPHLVADYRVVLFDTMGAGPTNPDYFDFSRYATLEGYALDLLAILQELGVRSCIYVGHSVSAVIGALASISRPDLFTKLVLLSASPRYLNDVDYYGGFEQDELDELFEAMRSNYKAWCSGFAPLCVGGDMESVAVQEFSRTLFNIRPDIALSVAQTIFQSDVRSLLPHVTVPCHIVQSTKDLAVPVVVSEYLHRHLGGDSIVEVMPSEGHLPQLSSPDIVIPVLLRHIQHDIAV

SEQ ID NO: 29072 - DNA, 1511 bp, Zea mays subsp. mays
  misc_feature (1)..(1511): Ceres Seq. ID no. 12407681
atcaaacggactcacagctcgcagcacctgcatgacattgagaaccagccagctaaccaaccaaccaaccggcggagccaaagccaagaaggaaggcaacgtgcccatccagtcaggatgtgcaactccaacgtcaagtccgcgggggtggcccagatcgacggccgcccggtgctgcagccggcgggcaaccgcgtggcggcgccggagccggacgcctcccgcccgctcaagaagtccctccagaagtcgctctccatgccggcctactacgacagcaatgccaccgcgggcgcccgtcctgcgccggccgagaacaccacccgtgcagcggctaattcgtctccgctgcctcccgcgaaggcggcgacgaaggcagcgggcgctttccccgcggagaagagcggcaggtccaaggcagccaggaggccaggcgccgtgccgccgccggtggtggcgttcgcggcgctggacgcgttggagccggcggggagcatcgccgcggcgcagcgggagcacgccgcgcaggcgcaggcgcagcgcaagctgcggatcgcgcactacggccgcaccgcgtccttctcccgggtggaggggcgagtagtcggcgccgcggccgccgcccccgagcgggccgtcaccgcctcccccgccgggcaggacgagaagcgctgcagcttcatcacgccctactcagaccccctgtatgtcgcgtaccacgacgaggagtggggagtgcccgtgcacgacgacgagttgctattcgagatgctcacactgtctggcgtgcaagtcggggccgactggacttccatcctcaagaaaagacacgtgtacagggaggcgttctccggcttcaacgtggatgcggtcgccaagtacaccgagaagcagatggcgtcgctgagcgccgactacgggctggatttgggcaccgtcagaggaaccgtcaacaacgcctgccggattatcgaggtgcggagggacttcggctcgctggacaggtacgtgtgggcgttcgtgaacaacaggccgctgtcgccgagctacaggtacagccggaagatcccggcgaagacgtccaagtcggagtgcatcagcaaggacatggtccggcgcaggttccgcttcgtcggccccaccgtcgtccactccttcatgcaggcggtcggcctcaccaacgaccacctcgtctcgtgcccgcgccaccgcgcctgctccgccgccgccgttaactgattctgctgaccaccgtccaccgatcaagagccagacgtaaggaagaaaagagaccttttatctaaggacacgtacaatacaaccgagaaaaaggagaaaggttagtagcctctagtagcactagatcgaagtagtagtatacgaaagggagagtgctggtttgcaagtgtgtgtgcatcatgtacgtatgatgatcgagtgtgcttgtgtagattagttacgcccccacccctaattattagtcaatgaatgagcttgcttgctgcgacttc

SEQ ID NO: 29073 - protein, 412 aa, Zea mays subsp. mays
  peptide (1)..(412): Ceres Seq. ID no. 12407682
  misc_feature (231)..(404): Pfam Name: Pfam Description:  Methyladenine glycosylase
  misc_feature (13)..(410): NCBI GI NO: 34908920 NR Description: P0691E06.10
  misc_feature (161)..(412): NCBI GI NO: 18399721 NR Description: expressed protein; protein id: At3g12710
  misc_feature (161)..(412): NCBI GI NO: 21536975 NR Description: unknown [Arabidopsis thaliana]
  misc_feature (114)..(410): NCBI GI NO: 15241554 NR Description: putative protein; protein id: At5g44680
  misc_feature (114)..(410): NCBI GI NO: 21592537 NR Description: unknown [Arabidopsis thaliana]
  misc_feature (94)..(410): NCBI GI NO: 38345034 NR Description: OSJNBa0029H02.18
  misc_feature (210)..(406): NCBI GI NO: 15242914 NR Description: putative protein; protein id: At5g57970.1
  misc_feature (163)..(410): NCBI GI NO: 15218379 NR Description: hypothetical protein; protein id: At1g15970.1
  misc_feature (210)..(406): NCBI GI NO: 15220860 NR Description: DNA-3-methyladenine glycosidase, putative
  misc_feature (134)..(407): NCBI GI NO: 18410766 NR Description: putative DNA-3-methyladenine glycosylase I
IKRTHSSQHLHDIENQPANQPTNRRSQSQEGRQRAHPVRMCNSNVKSAGVAQIDGRPVLQPAGNRVAAPEPDASRPLKKSLQKSLSMPAYYDSNATAGARPAPAENTTRAAANSSPLPPAKAATKAAGAFPAEKSGRSKAARRPGAVPPPVVAFAALDALEPAGSIAAAQREHAAQAQAQRKLRIAHYGRTASFSRVEGRVVGAAAAAPERAVTASPAGQDEKRCSFITPYSDPLYVAYHDEEWGVPVHDDELLFEMLTLSGVQVGADWTSILKKRHVYREAFSGFNVDAVAKYTEKQMASLSADYGLDLGTVRGTVNNACRIIEVRRDFGSLDRYVWAFVNNRPLSPSYRYSRKIPAKTSKSECISKDMVRRRFRFVGPTVVHSFMQAVGLTNDHLVSCPRHRACSAAAVN

SEQ ID NO: 29074 - protein, 373 aa, Zea mays subsp. mays
  peptide (1)..(373): Ceres Seq. ID no. 12407683
  misc_feature (192)..(365): Pfam Name: Pfam Description:  Methyladenine glycosylase
  misc_feature (1)..(371): NCBI GI NO: 34908920 NR Description: P0691E06.10
  misc_feature (122)..(373): NCBI GI NO: 18399721 NR Description: expressed protein; protein id: At3g12710
  misc_feature (122)..(373): NCBI GI NO: 21536975 NR Description: unknown [Arabidopsis thaliana]
  misc_feature (75)..(371): NCBI GI NO: 15241554 NR Description: putative protein; protein id: At5g44680
  misc_feature (75)..(371): NCBI GI NO: 21592537 NR Description: unknown [Arabidopsis thaliana]
  misc_feature (55)..(371): NCBI GI NO: 38345034 NR Description: OSJNBa0029H02.18
  misc_feature (171)..(367): NCBI GI NO: 15242914 NR Description: putative protein; protein id: At5g57970.1
  misc_feature (124)..(371): NCBI GI NO: 15218379 NR Description: hypothetical protein; protein id: At1g15970.1
  misc_feature (171)..(367): NCBI GI NO: 15220860 NR Description: DNA-3-methyladenine glycosidase, putative
  misc_feature (95)..(368): NCBI GI NO: 18410766 NR Description: putative DNA-3-methyladenine glycosylase I
MCNSNVKSAGVAQIDGRPVLQPAGNRVAAPEPDASRPLKKSLQKSLSMPAYYDSNATAGARPAPAENTTRAAANSSPLPPAKAATKAAGAFPAEKSGRSKAARRPGAVPPPVVAFAALDALEPAGSIAAAQREHAAQAQAQRKLRIAHYGRTASFSRVEGRVVGAAAAAPERAVTASPAGQDEKRCSFITPYSDPLYVAYHDEEWGVPVHDDELLFEMLTLSGVQVGADWTSILKKRHVYREAFSGFNVDAVAKYTEKQMASLSADYGLDLGTVRGTVNNACRIIEVRRDFGSLDRYVWAFVNNRPLSPSYRYSRKIPAKTSKSECISKDMVRRRFRFVGPTVVHSFMQAVGLTNDHLVSCPRHRACSAAAVN

SEQ ID NO: 29075 - protein, 326 aa, Zea mays subsp. mays
  peptide (1)..(326): Ceres Seq. ID no. 12407684
  misc_feature (145)..(318): Pfam Name: Pfam Description:  Methyladenine glycosylase
  misc_feature (1)..(324): NCBI GI NO: 34908920 NR Description: P0691E06.10
  misc_feature (75)..(326): NCBI GI NO: 18399721 NR Description: expressed protein; protein id: At3g12710
  misc_feature (75)..(326): NCBI GI NO: 21536975 NR Description: unknown [Arabidopsis thaliana]
  misc_feature (28)..(324): NCBI GI NO: 15241554 NR Description: putative protein; protein id: At5g44680
  misc_feature (28)..(324): NCBI GI NO: 21592537 NR Description: unknown [Arabidopsis thaliana]
  misc_feature (8)..(324): NCBI GI NO: 38345034 NR Description: OSJNBa0029H02.18
  misc_feature (124)..(320): NCBI GI NO: 15242914 NR Description: putative protein; protein id: At5g57970.1
  misc_feature (77)..(324): NCBI GI NO: 15218379 NR Description: hypothetical protein; protein id: At1g15970.1
  misc_feature (124)..(320): NCBI GI NO: 15220860 NR Description: DNA-3-methyladenine glycosidase, putative
  misc_feature (48)..(321): NCBI GI NO: 18410766 NR Description: putative DNA-3-methyladenine glycosylase I
MPAYYDSNATAGARPAPAENTTRAAANSSPLPPAKAATKAAGAFPAEKSGRSKAARRPGAVPPPVVAFAALDALEPAGSIAAAQREHAAQAQAQRKLRIAHYGRTASFSRVEGRVVGAAAAAPERAVTASPAGQDEKRCSFITPYSDPLYVAYHDEEWGVPVHDDELLFEMLTLSGVQVGADWTSILKKRHVYREAFSGFNVDAVAKYTEKQMASLSADYGLDLGTVRGTVNNACRIIEVRRDFGSLDRYVWAFVNNRPLSPSYRYSRKIPAKTSKSECISKDMVRRRFRFVGPTVVHSFMQAVGLTNDHLVSCPRHRACSAAAVN

SEQ ID NO: 29076 - DNA, 1420 bp, Zea mays subsp. mays
  misc_feature (1)..(1420): Ceres Seq. ID no. 12362864
gcacgagaccattacctagaacatcctaatcgaaaacttcgatcccacgtcttctcaacctttcttcttctctcctcgagaaccccaatccaaacccccaaccgccaaaattcctacgagatatatcacagaaatatcgtcttggctcagatcgtgcccgagtgaggaggcagtgagttttgaggggacgcaggatcatggcgtcgtcgctggccgaggaggaggaggccttcgagcacacgcttctggtggtgcgcgaggtgtcagtgtacaagatcccgccgcgcaccaccagcggcggctacaagtgcggcgagtggctgcagtcggacaagatctggtccgggcgcctccgcgtggtgtcctgcggtgaccgctgcgagatccggctcgaggacccggccacgggggagctcttcgccgcctgcttcgtgctgccggggcagcgggagagcgccgtcgagaccgtgctcgactcctcccgctacttcgtgctccgcatcgaggacggcagggggaagcatgccttcgtcgggctcggcttcaacgagcgcaacgaagcattcgacttcaacgtcgccctctctgaccacgagaaatacgtcaagagggagcaggagaaggagaccacgggcgctggcggcgaggagactggcggcggtgagattgatatacatccggctgtcaatcgccgactcaaggaaggtgaaaccattaggataactgtaaaaaacaagccatcaactggaagtggtatgctttcagctgctggtttatctggagggaccactgcaaaacccaagacaagcatgcttctcgcgccacctccaggtgcagctgggaagcttcgatctcctcttccaccaccacctaacgaccctgcagctgcaaggatgaattctggacatactgcaggaatcagggctccaaaagagcccaccaagagaaataacgaccctttttcagatctttctgctataaagcaaaatctaccttcatctgctgaacccggacaaacaaagagcacaggagctggatgggcagcattctgacgatggatgcatgatctactgctactattggcatttgtttatctgaagaaggggaatgggtagttgaagcaccgaacaaggatctggaactgctggatgcctctacccctttcgaaactgaatggttaaaatgattgatcaacctaccagttccagttgtcacttgtcagtcgagaaataaacctttcccagagttgtattacccgtctcaccacatgaatggatgctcacattttctggatttagatacagcgtcccatcttgtttttatgttattcgtgctatgtttcacaaagcaataccagaatcatactgacctcgatgtgtattttgcggcgaaagattggaaatactgttacaagtgtgtc

SEQ ID NO: 29077 - protein, 284 aa, Zea mays subsp. mays
  peptide (1)..(284): Ceres Seq. ID no. 12362865
  misc_feature (1)..(284): NCBI GI NO: 37535352 NR Description: unknown protein
  misc_feature (7)..(284): NCBI GI NO: 18379172 NR Description: Expressed protein; protein id: At1g03900
  misc_feature (7)..(264): NCBI GI NO: 14596175 NR Description: Unknown protein [Arabidopsis thaliana]
  misc_feature (7)..(284): NCBI GI NO: 25406749 NR Description: hypothetical protein
  misc_feature (8)..(284): NCBI GI NO: 10435511 NR Description: unnamed protein product [Homo sapiens]
  misc_feature (8)..(284): NCBI GI NO: 8922416 NR Description: hypothetical protein FLJ10420 [Homo sapiens]
  misc_feature (5)..(269): NCBI GI NO: 22760576 NR Description: unnamed protein product [Homo sapiens]
  misc_feature (8)..(284): NCBI GI NO: 13384758 NR Description: RIKEN cDNA 1110005F07 [Mus musculus]
  misc_feature (5)..(269): NCBI GI NO: 22760612 NR Description: unnamed protein product [Homo sapiens]
  misc_feature (5)..(269): NCBI GI NO: 31542528 NR Description: DKFZP566B183 protein [Homo sapiens]
MASSLAEEEEAFEHTLLVVREVSVYKIPPRTTSGGYKCGEWLQSDKIWSGRLRVVSCGDRCEIRLEDPATGELFAACFVLPGQRESAVETVLDSSRYFVLRIEDGRGKHAFVGLGFNERNEAFDFNVALSDHEKYVKREQEKETTGAGGEETGGGEIDIHPAVNRRLKEGETIRITVKNKPSTGSGMLSAAGLSGGTTAKPKTSMLLAPPPGAAGKLRSPLPPPPNDPAAARMNSGHTAGIRAPKEPTKRNNDPFSDLSAIKQNLPSSAEPGQTKSTGAGWAAF

SEQ ID NO: 29078 - DNA, 1314 bp, Zea mays subsp. mays
  misc_feature (1)..(1314): Ceres Seq. ID no. 12344243
atgcgcctcgcggccgcttcgacagtccctcgcgttccatttgcttcggctcatctcagatcaagctagcgcacctgacacccaccacctccctcccagatccaccaccccagccatggccaccgcctttgactccccgacctcctcccccgccgccgcgcccttccacgacgaccctttcctccatttcgacggctcggcccccgccgccgccgacggcttcccggcctccccggacgcctacgcgccctcccccttcggcatgccccactccaacggcgacctccacgacgaccctttcgccgcacctgctgactccaacggtgggcccatccttccgccgcccaccgagatgggccgcgaggagggattcctgctccgcgagtggtgccgacaaaatgctattcaccttgaggaaaaagagaagaaggagaaggagctgaggagccaaatcatcgttgatgctgaagagtttaagaaagcttttgttgagaagagaaagctcaatgctgagacaagtaagggccaaaaccgtgacagggagaagcttttcctagcaaaccaggaaaagttccatgctggtgcagataagcaatactggaaggcgatatctgaacttatcccacatgagattgctaacatcgagaagagaggggcaaggaaagacaaggagaagaagcctgggatcgtggtgatccagggaccgaagcctgggaagccaacggacatggcacggatgcggcagatattgctgaagctgaagcacactcccccaccacacatgaagccacctccgccacctgccgcagctaccggaaaggatggagcaccagctgccgccgggaaggatggagctaagccagcaaccgttgccaacggcagtgtccctgagatggaaaaggctgctgcggaggcatcagtgccagcggcagcaccaccagcagcaactgagccgatcgcagctgcttaatctaatcatctgtggtaggaggatgtgaaaaatctcttattggagttgttgcagaggcggtggtggtgagtgaaactgaaaacgtgtgaatttccggcatggtggaggcatgcactgtgtatttgttacctcgattcatttacattactgctactatatattgttattgcattttgtagagaaggggcgggcgtatcctggttcatggtaataataaggttgtattaggaggatgtttggctgtattatgtttcttcttccaagtgtttgtaaatttcccttttgttattaaaactgattgtattgttaaatttttctttgttattaaaactgattgtattgct

SEQ ID NO: 29079 - protein, 322 aa, Zea mays subsp. mays
  peptide (1)..(322): Ceres Seq. ID no. 12344244
  misc_feature (256)..(318): Pfam Name: Pfam Description:  Glycoprotein GG/GX
  misc_feature (30)..(317): NCBI GI NO: 32487391 NR Description: OSJNBb0017I01.5
  misc_feature (93)..(321): NCBI GI NO: 34394059 NR Description: hypothetical protein
  misc_feature (59)..(322): NCBI GI NO: 21536711 NR Description: unknown [Arabidopsis thaliana]
  misc_feature (59)..(317): NCBI GI NO: 18399468 NR Description: expressed protein; protein id: At2g20760
  misc_feature (44)..(274): NCBI GI NO: 18405251 NR Description: expressed protein; protein id: At2g40060
  misc_feature (44)..(274): NCBI GI NO: 21593842 NR Description: unknown [Arabidopsis thaliana]
  misc_feature (74)..(270): NCBI GI NO: 18409442 NR Description: putative protein; protein id: At3g51890
  misc_feature (74)..(270): NCBI GI NO: 11291712 NR Description: hypothetical protein
  misc_feature (118)..(270): NCBI GI NO: 21617999 NR Description: unknown [Arabidopsis thaliana]
  misc_feature (256)..(322): NCBI GI NO: 27375632 NR Description: blr0521 [Bradyrhizobium japonicum]
CASRPLRQSLAFHLLRLISDQASAPDTHHLPPRSTTPAMATAFDSPTSSPAAAPFHDDPFLHFDGSAPAAADGFPASPDAYAPSPFGMPHSNGDLHDDPFAAPADSNGGPILPPPTEMGREEGFLLREWCRQNAIHLEEKEKKEKELRSQIIVDAEEFKKAFVEKRKLNAETSKGQNRDREKLFLANQEKFHAGADKQYWKAISELIPHEIANIEKRGARKDKEKKPGIVVIQGPKPGKPTDMARMRQILLKLKHTPPPHMKPPPPPAAATGKDGAPAAAGKDGAKPATVANGSVPEMEKAAAEASVPAAAPPAATEPIAAA

SEQ ID NO: 29080 - protein, 284 aa, Zea mays subsp. mays
  peptide (1)..(284): Ceres Seq. ID no. 12344245
  misc_feature (218)..(280): Pfam Name: Pfam Description:  Glycoprotein GG/GX
  misc_feature (1)..(279): NCBI GI NO: 32487391 NR Description: OSJNBb0017I01.5
  misc_feature (55)..(283): NCBI GI NO: 34394059 NR Description: hypothetical protein
  misc_feature (21)..(284): NCBI GI NO: 21536711 NR Description: unknown [Arabidopsis thaliana]
  misc_feature (21)..(279): NCBI GI NO: 18399468 NR Description: expressed protein; protein id: At2g20760
  misc_feature (6)..(236): NCBI GI NO: 18405251 NR Description: expressed protein; protein id: At2g40060
  misc_feature (6)..(236): NCBI GI NO: 21593842 NR Description: unknown [Arabidopsis thaliana]
  misc_feature (36)..(232): NCBI GI NO: 18409442 NR Description: putative protein; protein id: At3g51890
  misc_feature (36)..(232): NCBI GI NO: 11291712 NR Description: hypothetical protein
  misc_feature (80)..(232): NCBI GI NO: 21617999 NR Description: unknown [Arabidopsis thaliana]
  misc_feature (218)..(284): NCBI GI NO: 27375632 NR Description: blr0521 [Bradyrhizobium japonicum]
MATAFDSPTSSPAAAPFHDDPFLHFDGSAPAAADGFPASPDAYAPSPFGMPHSNGDLHDDPFAAPADSNGGPILPPPTEMGREEGFLLREWCRQNAIHLEEKEKKEKELRSQIIVDAEEFKKAFVEKRKLNAETSKGQNRDREKLFLANQEKFHAGADKQYWKAISELIPHEIANIEKRGARKDKEKKPGIVVIQGPKPGKPTDMARMRQILLKLKHTPPPHMKPPPPPAAATGKDGAPAAAGKDGAKPATVANGSVPEMEKAAAEASVPAAAPPAATEPIAAA

SEQ ID NO: 29081 - protein, 235 aa, Zea mays subsp. mays
  peptide (1)..(235): Ceres Seq. ID no. 12344246
  misc_feature (169)..(231): Pfam Name: Pfam Description:  Glycoprotein GG/GX
  misc_feature (1)..(230): NCBI GI NO: 32487391 NR Description: OSJNBb0017I01.5
  misc_feature (6)..(234): NCBI GI NO: 34394059 NR Description: hypothetical protein
  misc_feature (1)..(235): NCBI GI NO: 21536711 NR Description: unknown [Arabidopsis thaliana]
  misc_feature (1)..(230): NCBI GI NO: 18399468 NR Description: expressed protein; protein id: At2g20760
  misc_feature (1)..(187): NCBI GI NO: 18405251 NR Description: expressed protein; protein id: At2g40060
  misc_feature (1)..(187): NCBI GI NO: 21593842 NR Description: unknown [Arabidopsis thaliana]
  misc_feature (1)..(183): NCBI GI NO: 18409442 NR Description: putative protein; protein id: At3g51890
  misc_feature (1)..(183): NCBI GI NO: 11291712 NR Description: hypothetical protein
  misc_feature (31)..(183): NCBI GI NO: 21617999 NR Description: unknown [Arabidopsis thaliana]
  misc_feature (169)..(235): NCBI GI NO: 27375632 NR Description: blr0521 [Bradyrhizobium japonicum]
MPHSNGDLHDDPFAAPADSNGGPILPPPTEMGREEGFLLREWCRQNAIHLEEKEKKEKELRSQIIVDAEEFKKAFVEKRKLNAETSKGQNRDREKLFLANQEKFHAGADKQYWKAISELIPHEIANIEKRGARKDKEKKPGIVVIQGPKPGKPTDMARMRQILLKLKHTPPPHMKPPPPPAAATGKDGAPAAAGKDGAKPATVANGSVPEMEKAAAEASVPAAAPPAATEPIAAA

SEQ ID NO: 29082 - DNA, 1466 bp, Zea mays subsp. mays
  misc_feature (1)..(1466): Ceres Seq. ID no. 12387022
gcgtcaccatccatttgacgaggcggtttatcccccagcaccccaaccaacctttccacgtaccaccgggtttctgtccgcgccccgcccttcaaaagcaggtccgcacgccggccggcgagacagacgacaccaccacgccgggacgggaggcacaggtgcggtctgcgtcgagagttggtccactggcaggccggaatgaagaagtgcgcgtcggagctggagctggaggcgttcatccgggagagcggcgaggacgcccgcgccgccgccggaggtagcagtccggggtgcggtggatcaagcgatcccggagggagcggcgtcttctcacccggcttcggtttcgccgactcggacaccatggatggaggcagttggtggtacgggaacgtccgcacgccgaacccagtcatgtcgcaggcggcgtccatatccgctagccccgggctaaccacctcagccaatcatgctcttgaaagcgagtcagactccgacagcgaatcactgtatgaggtagagggagttccatacgagcgaggtaacagatccattgagacgaagcgaataagaaggatggtgtccaatagggagtctgcgcggcggtctaggaggaggaaacaggcacagttgtctgaccttgagtcacaggttgaacgactcaaaggtgaaaacgcaacactgttccagcaactttcagatgccaaccaacagttcagtactgcagtcacagacaacagaatcctcaaatccgatgtagaagcgttaagaattaaggtaaagatggcagaggatatggtagcgagaagtgctgtatcgtgtggcctaggcgaccttggcctggcaccatacgtgaactcaaggaagatgtgccaagctttgaatgtgctcacagggttggatttactagggagtgatgcgttcaggggtccaaccgcaggtacacgagtacagaactcaccagtacagagcactgcaagcctagagagtctggataaccgaaagtccaacgaggtgaccagttgcgcggcggacatttggccttgagcttcaagccattgatctgattcaaagcttgctccaccctcaaaaaaaggaccagagtttgtcaactcaaatagctggtggcttgagcagagcttctggcacgagttctcttgaaccatatttccacataagctttataggatgcatcactcttttgatgtcacttagtttcaagtataaaatgaagctgtctttgtacaaagctgcaaatgagaagtaaatgaaacgtcctggacaaacttgtgaagtaggaatgatacataggctctatttccaggtcagatgagacagttatgtttacaacaaaaagcaatacatgttgtttagaaaccgctattaattcacaggaatgttcaatccagtacaagtcatctagtagatttgcacccctaccttctagtagattcaaccatgttttc

SEQ ID NO: 29083 - protein, 282 aa, Zea mays subsp. mays
  peptide (1)..(282): Ceres Seq. ID no. 12387023
  misc_feature (118)..(179): Pfam Name: Pfam Description:  bZIP transcription factor
  misc_feature (1)..(282): NCBI GI NO: 13365774 NR Description: RISBZ5 [Oryza sativa]
  misc_feature (23)..(252): NCBI GI NO: 7489562 NR Description: probable transcription activator - rice
  misc_feature (76)..(248): NCBI GI NO: 13365772 NR Description: RISBZ4 [Oryza sativa]
  misc_feature (95)..(248): NCBI GI NO: 7489563 NR Description: probable transcription activator 2 - rice plasmidpBC663
  misc_feature (1)..(282): NCBI GI NO: 18420842 NR Description: bZIP protein, G/HBF-1-related
  misc_feature (119)..(203): NCBI GI NO: 3287204 NR Description: RITA-1 protein [Oryza sativa]
  misc_feature (128)..(203): NCBI GI NO: 3287202 NR Description: RITA-2 protein [Oryza sativa]
  misc_feature (1)..(203): NCBI GI NO: 30691973 NR Description: bZIP family transcription factor
  misc_feature (1)..(203): NCBI GI NO: 30691978 NR Description: bZIP family transcription factor
  misc_feature (86)..(203): NCBI GI NO: 7488648 NR Description: bZIP DNA-binding protein HBF-1 - soybean
MKKCASELELEAFIRESGEDARAAAGGSSPGCGGSSDPGGSGVFSPGFGFADSDTMDGGSWWYGNVRTPNPVMSQAASISASPGLTTSANHALESESDSDSESLYEVEGVPYERGNRSIETKRIRRMVSNRESARRSRRRKQAQLSDLESQVERLKGENATLFQQLSDANQQFSTAVTDNRILKSDVEALRIKVKMAEDMVARSAVSCGLGDLGLAPYVNSRKMCQALNVLTGLDLLGSDAFRGPTAGTRVQNSPVQSTASLESLDNRKSNEVTSCAADIWP

SEQ ID NO: 29084 - protein, 227 aa, Zea mays subsp. mays
  peptide (1)..(227): Ceres Seq. ID no. 12387024
  misc_feature (63)..(124): Pfam Name: Pfam Description:  bZIP transcription factor
  misc_feature (1)..(227): NCBI GI NO: 13365774 NR Description: RISBZ5 [Oryza sativa]
  misc_feature (1)..(197): NCBI GI NO: 7489562 NR Description: probable transcription activator - rice
  misc_feature (21)..(193): NCBI GI NO: 13365772 NR Description: RISBZ4 [Oryza sativa]
  misc_feature (40)..(193): NCBI GI NO: 7489563 NR Description: probable transcription activator 2 - rice plasmidpBC663
  misc_feature (1)..(227): NCBI GI NO: 18420842 NR Description: bZIP protein, G/HBF-1-related
  misc_feature (64)..(148): NCBI GI NO: 3287204 NR Description: RITA-1 protein [Oryza sativa]
  misc_feature (73)..(148): NCBI GI NO: 3287202 NR Description: RITA-2 protein [Oryza sativa]
  misc_feature (1)..(148): NCBI GI NO: 30691973 NR Description: bZIP family transcription factor
  misc_feature (1)..(148): NCBI GI NO: 30691978 NR Description: bZIP family transcription factor
  misc_feature (31)..(148): NCBI GI NO: 7488648 NR Description: bZIP DNA-binding protein HBF-1 - soybean
MDGGSWWYGNVRTPNPVMSQAASISASPGLTTSANHALESESDSDSESLYEVEGVPYERGNRSIETKRIRRMVSNRESARRSRRRKQAQLSDLESQVERLKGENATLFQQLSDANQQFSTAVTDNRILKSDVEALRIKVKMAEDMVARSAVSCGLGDLGLAPYVNSRKMCQALNVLTGLDLLGSDAFRGPTAGTRVQNSPVQSTASLESLDNRKSNEVTSCAADIWP

SEQ ID NO: 29085 - protein, 210 aa, Zea mays subsp. mays
  peptide (1)..(210): Ceres Seq. ID no. 12387025
  misc_feature (46)..(107): Pfam Name: Pfam Description:  bZIP transcription factor
  misc_feature (1)..(210): NCBI GI NO: 13365774 NR Description: RISBZ5 [Oryza sativa]
  misc_feature (1)..(180): NCBI GI NO: 7489562 NR Description: probable transcription activator - rice
  misc_feature (4)..(176): NCBI GI NO: 13365772 NR Description: RISBZ4 [Oryza sativa]
  misc_feature (23)..(176): NCBI GI NO: 7489563 NR Description: probable transcription activator 2 - rice plasmidpBC663
  misc_feature (1)..(210): NCBI GI NO: 18420842 NR Description: bZIP protein, G/HBF-1-related
  misc_feature (47)..(131): NCBI GI NO: 3287204 NR Description: RITA-1 protein [Oryza sativa]
  misc_feature (56)..(131): NCBI GI NO: 3287202 NR Description: RITA-2 protein [Oryza sativa]
  misc_feature (1)..(131): NCBI GI NO: 30691973 NR Description: bZIP family transcription factor
  misc_feature (1)..(131): NCBI GI NO: 30691978 NR Description: bZIP family transcription factor
  misc_feature (14)..(131): NCBI GI NO: 7488648 NR Description: bZIP DNA-binding protein HBF-1 - soybean
MSQAASISASPGLTTSANHALESESDSDSESLYEVEGVPYERGNRSIETKRIRRMVSNRESARRSRRRKQAQLSDLESQVERLKGENATLFQQLSDANQQFSTAVTDNRILKSDVEALRIKVKMAEDMVARSAVSCGLGDLGLAPYVNSRKMCQALNVLTGLDLLGSDAFRGPTAGTRVQNSPVQSTASLESLDNRKSNEVTSCAADIWP

SEQ ID NO: 29086 - DNA, 1492 bp, Zea mays subsp. mays
  misc_feature (1)..(1492): Ceres Seq. ID no. 12408826
cccggacctctctctctctctctctcctcccttccatccaggctgccaagccgcctccggctccaccttaccggccggagataagaagaccctgatgcggctgcggccgcggcggccggaggcctgaggttggttggatatgggtggagtgacttcgtccgtggcctctaagatggccttcttccctcccgacccgccgtcttacggcgtggtggacgaggaggacgaggacgcggcgtgcaacaaggtggcaacaacgaggagggtggcgatgacgggcgtgcggtggagcgtgggcgtggaggcgaggcgggtgcgcacgcggcgaggctccgacatcatcgccgtctacgtgcggcaccccggggctagcctcaccctcctcttctcccacggcaacgccgccgacctcggcaagatgtacggcatcttcgtcgagctcagcgaacgactccacgtcaacctcatggggtatgattactctggttatgggcagtcatcaggcaagccaagtgaagctaatacctttgctgacatagaggctgcatacaagtgcctcgtggacgtctatggaactagggaagaagacattgttctgtatggccagtctgttggcagcggaccaacccttgatctagctgttcgtttcgatcgcgtaagagctgtggttctgcacagtccaatactgtctggattgcgtgtcatgtattctgtgaagaaaacgtactggtttgacatatacaagaacatcgacaaaatcccgcatgttaaatgcccggttttggtaatccatggcaccaaagatgacgtggtggactgctcccatggcaagcggctctacgagctgtgccagcacaagtacgaacccctgtggatcgagggaggtgaccatggcaacctggagaaattcccagtgttcattcgacatctgaagaagttcttactgtccgtaaagaagctgccatatgaaaaagacgccgcggccgagcacgagccacgggcagctgagaacagaacgcagcatggcggcgaagccatctccgaggctcctcctcgcatgatctcgcggaggctagagtcatcgaagaagagcacgatccatgaagcaaagcctaggccgagcagcgagcacacggataagcgcaggcgaagcacgggccacagggagaaggcgaggtccagcacagacaggagagagagatcgaggagaagcgtcgactgcttcgacagcatcctcgaacacgagcagccggaaaggccaaggaaaagcttcgacaggatcggagagaagattagagcaatgggtttgtgcaatgtcgactgcttcaaagagcctcctgatagcactgagctttccagaggtagttgagtggaaaaggaattctggttgctgtcagagtcagtatttttcttttcccttgctgctttagatacaaagaaaactacagctgtgtgatggcaatgttaatcataagatgttcacgaacagagc

SEQ ID NO: 29087 - protein, 409 aa, Zea mays subsp. mays
  peptide (1)..(409): Ceres Seq. ID no. 12408827
  misc_feature (110)..(178): Pfam Name: Pfam Description:  alpha/beta hydrolase fold
  misc_feature (1)..(365): NCBI GI NO: 15232168 NR Description: unknown protein; protein id: At3g01690.1
  misc_feature (1)..(387): NCBI GI NO: 15241394 NR Description: putative protein; protein id: At5g14390
  misc_feature (1)..(387): NCBI GI NO: 15233975 NR Description: putative protein; protein id: At4g24760
  misc_feature (1)..(403): NCBI GI NO: 15230760 NR Description: unknown protein; protein id: At3g30380.1
  misc_feature (1)..(337): NCBI GI NO: 34911338 NR Description: P0519D04.38
  misc_feature (1)..(340): NCBI GI NO: 10177798 NR Description: emb|CAB87778
  misc_feature (1)..(271): NCBI GI NO: 22330474 NR Description: hypothetical protein; protein id: At1g66900
  misc_feature (1)..(359): NCBI GI NO: 9802758 NR Description: Hypothetical protein [Arabidopsis thaliana]
  misc_feature (1)..(340): NCBI GI NO: 15240861 NR Description: putative protein; protein id: At5g38220.1
  misc_feature (1)..(338): NCBI GI NO: 25352159 NR Description: F21F23.4 protein - Arabidopsis thaliana
MGGVTSSVASKMAFFPPDPPSYGVVDEEDEDAACNKVATTRRVAMTGVRWSVGVEARRVRTRRGSDIIAVYVRHPGASLTLLFSHGNAADLGKMYGIFVELSERLHVNLMGYDYSGYGQSSGKPSEANTFADIEAAYKCLVDVYGTREEDIVLYGQSVGSGPTLDLAVRFDRVRAVVLHSPILSGLRVMYSVKKTYWFDIYKNIDKIPHVKCPVLVIHGTKDDVVDCSHGKRLYELCQHKYEPLWIEGGDHGNLEKFPVFIRHLKKFLLSVKKLPYEKDAAAEHEPRAAENRTQHGGEAISEAPPRMISRRLESSKKSTIHEAKPRPSSEHTDKRRRSTGHREKARSSTDRRERSRRSVDCFDSILEHEQPERPRKSFDRIGEKIRAMGLCNVDCFKEPPDSTELSRGS

SEQ ID NO: 29088 - protein, 398 aa, Zea mays subsp. mays
  peptide (1)..(398): Ceres Seq. ID no. 12408828
  misc_feature (99)..(167): Pfam Name: Pfam Description:  alpha/beta hydrolase fold
  misc_feature (1)..(354): NCBI GI NO: 15232168 NR Description: unknown protein; protein id: At3g01690.1
  misc_feature (1)..(376): NCBI GI NO: 15241394 NR Description: putative protein; protein id: At5g14390
  misc_feature (1)..(376): NCBI GI NO: 15233975 NR Description: putative protein; protein id: At4g24760
  misc_feature (1)..(392): NCBI GI NO: 15230760 NR Description: unknown protein; protein id: At3g30380.1
  misc_feature (1)..(326): NCBI GI NO: 34911338 NR Description: P0519D04.38
  misc_feature (1)..(329): NCBI GI NO: 10177798 NR Description: emb|CAB87778
  misc_feature (1)..(260): NCBI GI NO: 22330474 NR Description: hypothetical protein; protein id: At1g66900
  misc_feature (1)..(348): NCBI GI NO: 9802758 NR Description: Hypothetical protein [Arabidopsis thaliana]
  misc_feature (1)..(329): NCBI GI NO: 15240861 NR Description: putative protein; protein id: At5g38220.1
  misc_feature (1)..(327): NCBI GI NO: 25352159 NR Description: F21F23.4 protein - Arabidopsis thaliana
MAFFPPDPPSYGVVDEEDEDAACNKVATTRRVAMTGVRWSVGVEARRVRTRRGSDIIAVYVRHPGASLTLLFSHGNAADLGKMYGIFVELSERLHVNLMGYDYSGYGQSSGKPSEANTFADIEAAYKCLVDVYGTREEDIVLYGQSVGSGPTLDLAVRFDRVRAVVLHSPILSGLRVMYSVKKTYWFDIYKNIDKIPHVKCPVLVIHGTKDDVVDCSHGKRLYELCQHKYEPLWIEGGDHGNLEKFPVFIRHLKKFLLSVKKLPYEKDAAAEHEPRAAENRTQHGGEAISEAPPRMISRRLESSKKSTIHEAKPRPSSEHTDKRRRSTGHREKARSSTDRRERSRRSVDCFDSILEHEQPERPRKSFDRIGEKIRAMGLCNVDCFKEPPDSTELSRGS

SEQ ID NO: 29089 - protein, 365 aa, Zea mays subsp. mays
  peptide (1)..(365): Ceres Seq. ID no. 12408829
  misc_feature (66)..(134): Pfam Name: Pfam Description:  alpha/beta hydrolase fold
  misc_feature (1)..(321): NCBI GI NO: 15232168 NR Description: unknown protein; protein id: At3g01690.1
  misc_feature (1)..(343): NCBI GI NO: 15241394 NR Description: putative protein; protein id: At5g14390
  misc_feature (1)..(343): NCBI GI NO: 15233975 NR Description: putative protein; protein id: At4g24760
  misc_feature (1)..(359): NCBI GI NO: 15230760 NR Description: unknown protein; protein id: At3g30380.1
  misc_feature (1)..(293): NCBI GI NO: 34911338 NR Description: P0519D04.38
  misc_feature (1)..(296): NCBI GI NO: 10177798 NR Description: emb|CAB87778
  misc_feature (1)..(227): NCBI GI NO: 22330474 NR Description: hypothetical protein; protein id: At1g66900
  misc_feature (1)..(315): NCBI GI NO: 9802758 NR Description: Hypothetical protein [Arabidopsis thaliana]
  misc_feature (1)..(296): NCBI GI NO: 15240861 NR Description: putative protein; protein id: At5g38220.1
  misc_feature (1)..(294): NCBI GI NO: 25352159 NR Description: F21F23.4 protein - Arabidopsis thaliana
MTGVRWSVGVEARRVRTRRGSDIIAVYVRHPGASLTLLFSHGNAADLGKMYGIFVELSERLHVNLMGYDYSGYGQSSGKPSEANTFADIEAAYKCLVDVYGTREEDIVLYGQSVGSGPTLDLAVRFDRVRAVVLHSPILSGLRVMYSVKKTYWFDIYKNIDKIPHVKCPVLVIHGTKDDVVDCSHGKRLYELCQHKYEPLWIEGGDHGNLEKFPVFIRHLKKFLLSVKKLPYEKDAAAEHEPRAAENRTQHGGEAISEAPPRMISRRLESSKKSTIHEAKPRPSSEHTDKRRRSTGHREKARSSTDRRERSRRSVDCFDSILEHEQPERPRKSFDRIGEKIRAMGLCNVDCFKEPPDSTELSRGS

SEQ ID NO: 29090 - DNA, 1751 bp, Zea mays subsp. mays
  misc_feature (1)..(1751): Ceres Seq. ID no. 12408818
ataagagtaggtgcagtatatcagtaaccagtaaatacttggacccagcagtaaccaggaccaggagagatcatcaaagtaaccttgctgccttttgagaacagaagcgtcagcagcaccagcaagaagcatcttctctctggagcggcgcctccgagaagaggacgacggatcgggaccaggaggcatggatctatctggcacgcagggcgagctcgcgatcccaatgcacgccaacgtcgcgtcgccctacggaggcggcgtcggcggccatgtcctgcagctgcaccgtgacgaccacggcagcaacaacggccagtctccggcgccgctgctgccaccgccgcctgccgcggcggaggagacggagagctcggcgaagaagcgcggtccggcagccggggccggcggcggcggaggcagctccgcggtgaagtaccgggagtgcctcaagaatcacgcggcggccatcggcgggaacgccaccgacgggtgtggcgagttcatgccaagcggcgaggagggctcgttggaggcgctcaagtgctccgcctgcggctgccaccgcaatttccaccgcaaggaggtggacgacgaggacgacgacatgtacggcgccgccgaaggcttcagcggcctcggtctcggcctcggcctcgggcacggccaccgcgccgcccgccgcctcctggcccccgccatggcgcacccgcaccacaagagcggcggcggggggctcctgatctccggggccgacccctacgccgcgtacgcgtcggcgcgcgcgctccctccggcgctgccgccgccgccagggcacgcccaccaccaccaccagtacgtgatgccgctgaacatgatgcacacctcggagtccgacgacatggagggcggccgcggcggctgcggggacgcggcgcgcggcagcggcgggtcgtcgtcgtccaggaagcggttccgcaccaagttcaccccggagcagaaggcgcgcatgctggagttcgcggagcgcgtggggtggcgcctccagaagctggacgacggcatggtgcaggccttctgccaggagatcggcgtgaagcggcgcgtgctcaaggtgtggatgcacaacaacaagcacaacctcgccaccaagcgcctcgaggcctcgccggcgcaggagcaggcgatggcgggcatggcgtcgccgccgccgccgccgccacccccacagctgcacttgcctctgcagatgcccgctggagtcatgccgccgccgccgccgccgccgcaggccgggtcgtcctgtcaccgcggcggtcccggctccccgctgccgctcaagctcgagtgaccaccgacaacctgacaaaaaacaagaagagggtgaccaccattggtggccgttgatccgtcctggtggtaagtggtaaactagctagctagcagaccgacggaccgcatcgatggctatttcactgttccattagtccattccttcccaagtgatctatctaccgtcgtcgtccaagcagggagagaagtgggcgatgaacttttcttgaaacaacaaaacgaacaaagtccaggttattatcgtctcttttttttccttcccttttccggtgctcgttgctttgtcacaaggtaggggagcaagcaaccaagcatgcatgatagtagtagctgatttcgactggactggactgatttccttccaaaaatttttttcctgatggtgaagaaaactaaatatcctactagtttcctcc

SEQ ID NO: 29091 - protein, 381 aa, Zea mays subsp. mays
  peptide (1)..(381): Ceres Seq. ID no. 12408819
  misc_feature (82)..(137): Pfam Name: Pfam Description:  ZF-HD protein dimerisation region
  misc_feature (1)..(137): NCBI GI NO: 15223757 NR Description: hypothetical protein; protein id: At1g14440
  misc_feature (176)..(316): NCBI GI NO: 15223757 NR Description: hypothetical protein; protein id: At1g14440
  misc_feature (202)..(350): NCBI GI NO: 15238445 NR Description: hypothetical protein common family
  misc_feature (31)..(134): NCBI GI NO: 15238445 NR Description: hypothetical protein common family
  misc_feature (205)..(316): NCBI GI NO: 13374061 NR Description: ZF-HD homeobox protein [Flaveria bidentis]
  misc_feature (73)..(137): NCBI GI NO: 13374061 NR Description: ZF-HD homeobox protein [Flaveria bidentis]
  misc_feature (217)..(316): NCBI GI NO: 15226993 NR Description: hypothetical protein; protein id: At2g02540
  misc_feature (217)..(316): NCBI GI NO: 20148768 NR Description: hypothetical protein At2g02540/T822.16
  misc_feature (82)..(142): NCBI GI NO: 15226993 NR Description: hypothetical protein; protein id: At2g02540
  misc_feature (82)..(142): NCBI GI NO: 20148768 NR Description: hypothetical protein At2g02540/T822.16
MDLSGTQGELAIPMHANVASPYGGGVGGHVLQLHRDDHGSNNGQSPAPLLPPPPAAAEETESSAKKRGPAAGAGGGGGSSAVKYRECLKNHAAAIGGNATDGCGEFMPSGEEGSLEALKCSACGCHRNFHRKEVDDEDDDMYGAAEGFSGLGLGLGLGHGHRAARRLLAPAMAHPHHKSGGGGLLISGADPYAAYASARALPPALPPPPGHAHHHHQYVMPLNMMHTSESDDMEGGRGGCGDAARGSGGSSSSRKRFRTKFTPEQKARMLEFAERVGWRLQKLDDGMVQAFCQEIGVKRRVLKVWMHNNKHNLATKRLEASPAQEQAMAGMASPPPPPPPPQLHLPLQMPAGVMPPPPPPPQAGSSCHRGGPGSPLPLKLE

SEQ ID NO: 29092 - protein, 368 aa, Zea mays subsp. mays
  peptide (1)..(368): Ceres Seq. ID no. 12408820
  misc_feature (69)..(124): Pfam Name: Pfam Description:  ZF-HD protein dimerisation region
  misc_feature (1)..(124): NCBI GI NO: 15223757 NR Description: hypothetical protein; protein id: At1g14440
  misc_feature (163)..(303): NCBI GI NO: 15223757 NR Description: hypothetical protein; protein id: At1g14440
  misc_feature (189)..(337): NCBI GI NO: 15238445 NR Description: hypothetical protein common family
  misc_feature (18)..(121): NCBI GI NO: 15238445 NR Description: hypothetical protein common family
  misc_feature (192)..(303): NCBI GI NO: 13374061 NR Description: ZF-HD homeobox protein [Flaveria bidentis]
  misc_feature (60)..(124): NCBI GI NO: 13374061 NR Description: ZF-HD homeobox protein [Flaveria bidentis]
  misc_feature (204)..(303): NCBI GI NO: 15226993 NR Description: hypothetical protein; protein id: At2g02540
  misc_feature (204)..(303): NCBI GI NO: 20148768 NR Description: hypothetical protein At2g02540/T822.16
  misc_feature (69)..(129): NCBI GI NO: 15226993 NR Description: hypothetical protein; protein id: At2g02540
  misc_feature (69)..(129): NCBI GI NO: 20148768 NR Description: hypothetical protein At2g02540/T822.16
MHANVASPYGGGVGGHVLQLHRDDHGSNNGQSPAPLLPPPPAAAEETESSAKKRGPAAGAGGGGGSSAVKYRECLKNHAAAIGGNATDGCGEFMPSGEEGSLEALKCSACGCHRNFHRKEVDDEDDDMYGAAEGFSGLGLGLGLGHGHRAARRLLAPAMAHPHHKSGGGGLLISGADPYAAYASARALPPALPPPPGHAHHHHQYVMPLNMMHTSESDDMEGGRGGCGDAARGSGGSSSSRKRFRTKFTPEQKARMLEFAERVGWRLQKLDDGMVQAFCQEIGVKRRVLKVWMHNNKHNLATKRLEASPAQEQAMAGMASPPPPPPPPQLHLPLQMPAGVMPPPPPPPQAGSSCHRGGPGSPLPLKLE

SEQ ID NO: 29093 - protein, 275 aa, Zea mays subsp. mays
  peptide (1)..(275): Ceres Seq. ID no. 12408821
  misc_feature (1)..(31): NCBI GI NO: 15223757 NR Description: hypothetical protein; protein id: At1g14440
  misc_feature (70)..(210): NCBI GI NO: 15223757 NR Description: hypothetical protein; protein id: At1g14440
  misc_feature (96)..(244): NCBI GI NO: 15238445 NR Description: hypothetical protein common family
  misc_feature (1)..(28): NCBI GI NO: 15238445 NR Description: hypothetical protein common family
  misc_feature (99)..(210): NCBI GI NO: 13374061 NR Description: ZF-HD homeobox protein [Flaveria bidentis]
  misc_feature (1)..(31): NCBI GI NO: 13374061 NR Description: ZF-HD homeobox protein [Flaveria bidentis]
  misc_feature (111)..(210): NCBI GI NO: 15226993 NR Description: hypothetical protein; protein id: At2g02540
  misc_feature (111)..(210): NCBI GI NO: 20148768 NR Description: hypothetical protein At2g02540/T822.16
  misc_feature (1)..(36): NCBI GI NO: 15226993 NR Description: hypothetical protein; protein id: At2g02540
  misc_feature (1)..(36): NCBI GI NO: 20148768 NR Description: hypothetical protein At2g02540/T822.16
MPSGEEGSLEALKCSACGCHRNFHRKEVDDEDDDMYGAAEGFSGLGLGLGLGHGHRAARRLLAPAMAHPHHKSGGGGLLISGADPYAAYASARALPPALPPPPGHAHHHHQYVMPLNMMHTSESDDMEGGRGGCGDAARGSGGSSSSRKRFRTKFTPEQKARMLEFAERVGWRLQKLDDGMVQAFCQEIGVKRRVLKVWMHNNKHNLATKRLEASPAQEQAMAGMASPPPPPPPPQLHLPLQMPAGVMPPPPPPPQAGSSCHRGGPGSPLPLKLE

SEQ ID NO: 29094 - DNA, 1643 bp, Zea mays subsp. mays
  misc_feature (1)..(1643): Ceres Seq. ID no. 12408814
gcacgagaccattacctagaacatcctaatcgaaagtctgccaacgccgctactcggcgcaccttggcttgctatttcgccaacaacctcctccctctttaccgcggcgtgccgcgtgcggcgggcgcggatggcaacggccgcctccgcctccccctcccccggcgcgttcggcgccaaaacccctgccccagcccgtgggctgagcacgcacccggtcctgaccccgagccccgcattcgcgaggtcttcgccgcgcacccccgcctgcggcaggtcccgcgccagcctccacatcggcggcctggggctcgaccagcagcagcagctgccgccgccgccggcaacggaaccgggctccacgtgccccccacggtcgcgccgctcgccgtgcctaagatggccggctccatgaagacccataagaacgtcctgctcttctactgcgaggagatgcgggacctcgcgcagcaggtggtcgcccggaacgatgacatcgaactgcgatccatctcatggaggacatttccggacggatacccgaatctgttcatctcgaatgcccataacattcgtgggcagcatgttgcctttttggcttcgtttagctcgcccagcgtcatatttgagcaactatctgtcatatataatctgccaaagttgtttatttcttcgtttactcttatactcccgtttttcccaaccgggacttctgagcgcatggaagatgagggagatgttgcaaccgcctttacacttgccagatttttgtcaaatataccaatatcacgaggcgggccatcgagtttagtaattttcgatatccatgctttgcaggagagattctactttggagactcagtcttaccatgttttgagagtggcatccccttgctgaaaagtaagcttcaggagctacctgattcccataatataactatagcatttccagatgacggtgcatggaaacgcttctataagcagcttcaacattttcctatggttatatgtaacaaagttagagaaggggagcagagaattgtacggataaaggagggagatcctagaggccgtcatgttgttatagtggatgacttggtccagtctggcagtactttgattgagtgccagaaagtactggctgctcatggagctgcaaaggtcagtgcatatgtgacacatggcattttccccaatagctcatgggagaaatttcagcatgacaatggagagggtccggagcatggcctgagccacttttggcttactgattcatgcccccttactgtcaaggcggtgaagggcagacggccatttgaaattctaagtctggccggacctattgcttctgctctccagatttaggcaaatctggtctgctcgatccttcgggatattgtgactattcagttagttcttctttcctttgttgctgttgaggaatttggtgttttcctttgtacagctattgagtgtctcgcaatgtatttactagaaaaccataaaatggcagatcttcactgcagggtctgcttggcagaaagcattcgtagtcgtagtattagctgttaataatttgactgagcaagtcaagcgttgatctgtgttctagtataaataaaactctcgaataagtttcagtg

SEQ ID NO: 29095 - protein, 454 aa, Zea mays subsp. mays
  peptide (1)..(454): Ceres Seq. ID no. 12408815
  misc_feature (72)..(454): NCBI GI NO: 34910736 NR Description: putative phosphoribosyl pyrophosphate synthase
  misc_feature (137)..(454): NCBI GI NO: 4902877 NR Description: phosphoribosyl pyrophosphate synthase isozyme 3
  misc_feature (123)..(454): NCBI GI NO: 15220191 NR Description: phosphoribosyl diphosphate synthase
  misc_feature (130)..(454): NCBI GI NO: 25529012 NR Description: ribose-phosphate diphosphokinase (EC 2
  misc_feature (123)..(454): NCBI GI NO: 25402614 NR Description: hypothetical protein
  misc_feature (123)..(312): NCBI GI NO: 6573738 NR Description: F20B24.13 [Arabidopsis thaliana]
  misc_feature (308)..(411): NCBI GI NO: 6573738 NR Description: F20B24.13 [Arabidopsis thaliana]
  misc_feature (408)..(454): NCBI GI NO: 6573738 NR Description: F20B24.13 [Arabidopsis thaliana]
  misc_feature (139)..(454): NCBI GI NO: 22671730 NR Description: phosphoribosyl pyrophosphate synthetase
  misc_feature (142)..(454): NCBI GI NO: 15228027 NR Description: putative ribose phosphate pyrophosphokinase
ARDHYLEHPNRKSANAATRRTLACYFANNLLPLYRGVPRAAGADGNGRLRLPLPRRVRRQNPCPSPWAEHAPGPDPEPRIREVFAAHPRLRQVPRQPPHRRPGARPAAAAAAAAGNGTGLHVPPTVAPLAVPKMAGSMKTHKNVLLFYCEEMRDLAQQVVARNDDIELRSISWRTFPDGYPNLFISNAHNIRGQHVAFLASFSSPSVIFEQLSVIYNLPKLFISSFTLILPFFPTGTSERMEDEGDVATAFTLARFLSNIPISRGGPSSLVIFDIHALQERFYFGDSVLPCFESGIPLLKSKLQELPDSHNITIAFPDDGAWKRFYKQLQHFPMVICNKVREGEQRIVRIKEGDPRGRHVVIVDDLVQSGSTLIECQKVLAAHGAAKVSAYVTHGIFPNSSWEKFQHDNGEGPEHGLSHFWLTDSCPLTVKAVKGRRPFEILSLAGPIASALQI

SEQ ID NO: 29096 - protein, 321 aa, Zea mays subsp. mays
  peptide (1)..(321): Ceres Seq. ID no. 12408816
  misc_feature (1)..(321): NCBI GI NO: 34910736 NR Description: putative phosphoribosyl pyrophosphate synthase
  misc_feature (4)..(321): NCBI GI NO: 4902877 NR Description: phosphoribosyl pyrophosphate synthase isozyme 3
  misc_feature (1)..(321): NCBI GI NO: 15220191 NR Description: phosphoribosyl diphosphate synthase
  misc_feature (1)..(321): NCBI GI NO: 25529012 NR Description: ribose-phosphate diphosphokinase (EC 2
  misc_feature (1)..(321): NCBI GI NO: 25402614 NR Description: hypothetical protein
  misc_feature (1)..(179): NCBI GI NO: 6573738 NR Description: F20B24.13 [Arabidopsis thaliana]
  misc_feature (175)..(278): NCBI GI NO: 6573738 NR Description: F20B24.13 [Arabidopsis thaliana]
  misc_feature (275)..(321): NCBI GI NO: 6573738 NR Description: F20B24.13 [Arabidopsis thaliana]
  misc_feature (6)..(321): NCBI GI NO: 22671730 NR Description: phosphoribosyl pyrophosphate synthetase
  misc_feature (9)..(321): NCBI GI NO: 15228027 NR Description: putative ribose phosphate pyrophosphokinase
MAGSMKTHKNVLLFYCEEMRDLAQQVVARNDDIELRSISWRTFPDGYPNLFISNAHNIRGQHVAFLASFSSPSVIFEQLSVIYNLPKLFISSFTLILPFFPTGTSERMEDEGDVATAFTLARFLSNIPISRGGPSSLVIFDIHALQERFYFGDSVLPCFESGIPLLKSKLQELPDSHNITIAFPDDGAWKRFYKQLQHFPMVICNKVREGEQRIVRIKEGDPRGRHVVIVDDLVQSGSTLIECQKVLAAHGAAKVSAYVTHGIFPNSSWEKFQHDNGEGPEHGLSHFWLTDSCPLTVKAVKGRRPFEILSLAGPIASALQI

SEQ ID NO: 29097 - protein, 317 aa, Zea mays subsp. mays
  peptide (1)..(317): Ceres Seq. ID no. 12408817
  misc_feature (1)..(317): NCBI GI NO: 34910736 NR Description: putative phosphoribosyl pyrophosphate synthase
  misc_feature (1)..(317): NCBI GI NO: 4902877 NR Description: phosphoribosyl pyrophosphate synthase isozyme 3
  misc_feature (1)..(317): NCBI GI NO: 15220191 NR Description: phosphoribosyl diphosphate synthase
  misc_feature (1)..(317): NCBI GI NO: 25529012 NR Description: ribose-phosphate diphosphokinase (EC 2
  misc_feature (1)..(317): NCBI GI NO: 25402614 NR Description: hypothetical protein
  misc_feature (1)..(175): NCBI GI NO: 6573738 NR Description: F20B24.13 [Arabidopsis thaliana]
  misc_feature (171)..(274): NCBI GI NO: 6573738 NR Description: F20B24.13 [Arabidopsis thaliana]
  misc_feature (271)..(317): NCBI GI NO: 6573738 NR Description: F20B24.13 [Arabidopsis thaliana]
  misc_feature (2)..(317): NCBI GI NO: 22671730 NR Description: phosphoribosyl pyrophosphate synthetase
  misc_feature (5)..(317): NCBI GI NO: 15228027 NR Description: putative ribose phosphate pyrophosphokinase
MKTHKNVLLFYCEEMRDLAQQVVARNDDIELRSISWRTFPDGYPNLFISNAHNIRGQHVAFLASFSSPSVIFEQLSVIYNLPKLFISSFTLILPFFPTGTSERMEDEGDVATAFTLARFLSNIPISRGGPSSLVIFDIHALQERFYFGDSVLPCFESGIPLLKSKLQELPDSHNITIAFPDDGAWKRFYKQLQHFPMVICNKVREGEQRIVRIKEGDPRGRHVVIVDDLVQSGSTLIECQKVLAAHGAAKVSAYVTHGIFPNSSWEKFQHDNGEGPEHGLSHFWLTDSCPLTVKAVKGRRPFEILSLAGPIASALQI

SEQ ID NO: 29098 - DNA, 2161 bp, Zea mays subsp. mays
  misc_feature (1)..(2161): Ceres Seq. ID no. 13494407
  misc_feature (1914)..(1914): n is a, c, t, g, unknown, or other
  misc_feature (1981)..(1981): n is a, c, t, g, unknown, or other
  misc_feature (1873)..(1873): n is a, c, t, g, unknown, or other
  misc_feature (1786)..(1786): n is a, c, t, g, unknown, or other
agaagaggcctccccgctccgcgttccccagcgccagcggtaacccaacccaactcctctgagctgtgacacagctgtcctcctccccccactccaggcgctcacacaccctccacttccctccacaggaatccgccgccataatctcctccgctccgctccactccgcattgcaggattgcgccgagcacgagcaccctcctccccgaagcctcttctttgctctgctttcggtggtatggtgggatgatgagcagggcggcagtgctgctgtgtctcctctgctgcctcgccgccgtcggcgaggcggcgtcagtggtgggcgagggcgaggcggcggagctggccgtgtcggtggacccgtcgtggcggttccctagccagcggctgcgggacgcgtacgtcgcgctgcagacctggaagcagcaggccatcttctccgaccccaggggtttcaccgccgactgggtgggcccgggggtatgcaactacaccggggtcttctgcgcgccgctgccgcgcggggtgccgggcgccggggagctcgccgtcgcgggcctcgacctcaaccacggcgacatcgcgggctacctcccgccggagctcggcctgctcgctgacctctcgctgctccacctcaactccaaccgcttctgcggcctcgtccccgccactctgcgccgcctccagcttctcgtcgagctcgacctcagcaacaaccgcctcgtcggggcattcccggccgtcgtgctggagctcccggcgctcaagttcctcgacctccgcttcaacgacttcgagggcgccatcccgccggagctcttcgaccgcccgctcgacgccatcttcctcaaccacaaccgcctccgctccccgctccccgacaacttcggcaactccccggcctccgttatcgtactcgccgacaacagcttcggcggatgcctcccggccagcctcggcaacatgtccggcacactcaacgagatcctcctcatcaacaacggcctcgactcctgcgtcccgccggaggtcggcttgctccgggaggtgaccgtcttcgacgtcagcttcaactcgctcgtcggcccgctgccgcagcaggtggccgggatgcgcaaggtggagcagctggacgtcgcgcacaaccgcctgtccggggccgtcccggaggccatctgcgccctcccgcggctcaagaacctgaccatctcctacaacttcttcaccggcgagccgccgtcctgcgcgcgcgtcgtgccttcggacggtgacaggaggaactgcctgcccaaccgccccacacagcgcacgccgcagcagtgcgccgcgttctactcgcagccgcccgtcgactgcgccgcgttccagtgcaagccgtttgtccctgttccgccgccgccgccgccatcataccccggcccgttgccaccggtataccctatgccgtacgcatcgcctccgccacctgcgcagtaccgatgattcgtcgaggagggagaagcactatcactttcaccttaattcaccaccaccgctgctgcgctggatgaagacagcaaagtttcaccgtcacaattgtacgtggtcagtcattgttgtgcttagattagtagtgttcttgattgatagctaccggcatatagaagattatattattataaggtgcatatatcgctcttgcttttgcattggtcgttctctgtttttcgcgttgatcggggtttgcgtcacggtgatggtgaaatagatggtcagatggaggtgaaaaggattggaaggaacnatttgagtttggattgattgctaattggctgactgcttgagagagagatcaggatgacgaggaggattggttggtgacttggcgccnccttgggcctcggatgtatagggggaattaagcttaagttnttcagttaagctactgctttcagttgggagcccggagataagttttcagaccaaggaatgtaccccncttaactattctttttgcatttttatgtcacagctacttactgttaatcgattgttatgatatatctgttttgattcttagaaggttttggtcctttgcttgctactcaatgttgtttagttcacatatttgtaacgcaatattcgtttaagtctaaccgtaatcagataccttaccgtg

SEQ ID NO: 29099 - protein, 412 aa, Zea mays subsp. mays
  peptide (1)..(412): Ceres Seq. ID no. 13494408
  misc_feature (352)..(408): Pfam Name: Pfam Description:  Extensin-like region
  misc_feature (2)..(409): NCBI GI NO: 34906174 NR Description: putative extensin-like protein
  misc_feature (35)..(409): NCBI GI NO: 34912294 NR Description: putative extensin-like protein
  misc_feature (28)..(408): NCBI GI NO: 15233976 NR Description: leucine-rich repeat extensin family
  misc_feature (383)..(411): NCBI GI NO: 15233976 NR Description: leucine-rich repeat extensin family
  misc_feature (29)..(409): NCBI GI NO: 15235668 NR Description: leucine-rich repeat extensin family
  misc_feature (28)..(409): NCBI GI NO: 15230120 NR Description: leucine-rich repeat extensin family
  misc_feature (47)..(408): NCBI GI NO: 15228861 NR Description: leucine-rich repeat extensin family
  misc_feature (35)..(412): NCBI GI NO: 7484956 NR Description: extensin homolog F24O1.18 - Arabidopsis thaliana
  misc_feature (35)..(412): NCBI GI NO: 15220780 NR Description: leucine-rich repeat extensin family
  misc_feature (35)..(408): NCBI GI NO: 15221178 NR Description: leucine-rich repeat extensin family
MMSRAAVLLCLLCCLAAVGEAASVVGEGEAAELAVSVDPSWRFPSQRLRDAYVALQTWKQQAIFSDPRGFTADWVGPGVCNYTGVFCAPLPRGVPGAGELAVAGLDLNHGDIAGYLPPELGLLADLSLLHLNSNRFCGLVPATLRRLQLLVELDLSNNRLVGAFPAVVLELPALKFLDLRFNDFEGAIPPELFDRPLDAIFLNHNRLRSPLPDNFGNSPASVIVLADNSFGGCLPASLGNMSGTLNEILLINNGLDSCVPPEVGLLREVTVFDVSFNSLVGPLPQQVAGMRKVEQLDVAHNRLSGAVPEAICALPRLKNLTISYNFFTGEPPSCARVVPSDGDRRNCLPNRPTQRTPQQCAAFYSQPPVDCAAFQCKPFVPVPPPPPPSYPGPLPPVYPMPYASPPPPAQYR

SEQ ID NO: 29100 - protein, 411 aa, Zea mays subsp. mays
  peptide (1)..(411): Ceres Seq. ID no. 13494409
  misc_feature (351)..(407): Pfam Name: Pfam Description:  Extensin-like region
  misc_feature (1)..(408): NCBI GI NO: 34906174 NR Description: putative extensin-like protein
  misc_feature (34)..(408): NCBI GI NO: 34912294 NR Description: putative extensin-like protein
  misc_feature (27)..(407): NCBI GI NO: 15233976 NR Description: leucine-rich repeat extensin family
  misc_feature (382)..(410): NCBI GI NO: 15233976 NR Description: leucine-rich repeat extensin family
  misc_feature (28)..(408): NCBI GI NO: 15235668 NR Description: leucine-rich repeat extensin family
  misc_feature (27)..(408): NCBI GI NO: 15230120 NR Description: leucine-rich repeat extensin family
  misc_feature (46)..(407): NCBI GI NO: 15228861 NR Description: leucine-rich repeat extensin family
  misc_feature (34)..(411): NCBI GI NO: 7484956 NR Description: extensin homolog F24O1.18 - Arabidopsis thaliana
  misc_feature (34)..(411): NCBI GI NO: 15220780 NR Description: leucine-rich repeat extensin family
  misc_feature (34)..(407): NCBI GI NO: 15221178 NR Description: leucine-rich repeat extensin family
MSRAAVLLCLLCCLAAVGEAASVVGEGEAAELAVSVDPSWRFPSQRLRDAYVALQTWKQQAIFSDPRGFTADWVGPGVCNYTGVFCAPLPRGVPGAGELAVAGLDLNHGDIAGYLPPELGLLADLSLLHLNSNRFCGLVPATLRRLQLLVELDLSNNRLVGAFPAVVLELPALKFLDLRFNDFEGAIPPELFDRPLDAIFLNHNRLRSPLPDNFGNSPASVIVLADNSFGGCLPASLGNMSGTLNEILLINNGLDSCVPPEVGLLREVTVFDVSFNSLVGPLPQQVAGMRKVEQLDVAHNRLSGAVPEAICALPRLKNLTISYNFFTGEPPSCARVVPSDGDRRNCLPNRPTQRTPQQCAAFYSQPPVDCAAFQCKPFVPVPPPPPPSYPGPLPPVYPMPYASPPPPAQYR

SEQ ID NO: 29101 - DNA, 789 bp, Zea mays subsp. mays
  misc_feature (1)..(789): Ceres Seq. ID no. 14312670
tcgaaaaactccaaccgccgagccagaggcacccggagcagcgcacagcaagtcagcaacagagcgcacaccgtcgccgcatccgcctccgcagcagcagcaatggcgcgcgccggcgctctctgcctggtgctgctctgcctcgtggccgcgcactcagccgcagcgcagaagtccacgacggccccggccgccgcgccggccgccgccaccaccccgccggcgaccccgaccaagaagacgcccgcgcccgccgccgcgccgcccaccaccccggccaccctggccccggccgccgccccgcccaccacgccggccacccccgcgcccgtcgctgcggcgcccactaccccggccaccctggcacccgccgcggcgccgtgatggcggtggcggctacggcggtggcggcggctacggtggcggcggcggctacggtggtggtggcggcggctacggcggtggcaaccgtggcggcggctacggcaactccgacgggaactggaggaactgagcggtggggcccgcgcggccaagttatcctgttcgctaccgtgatgtttaccctagtccagagggtttatcttcgttcgtgtcgtgtttgttgttgcccatctgtgtttttgattgcaaggtcgctctgtgtcagttgttagtgctgtgttcatcctcggtttcagcagacccatgcatcaaacagcatggactgcggatcgatggatgctgttacccccgtcaggctttattctaagttaatcttaaggaaaaaatggtgcttcttggtgctgc

SEQ ID NO: 29102 - protein, 217 aa, Zea mays subsp. mays
  peptide (1)..(217): Ceres Seq. ID no. 14312671
  misc_feature (124)..(164): NCBI GI NO: 11360494 NR Description: antifreeze glycopeptide AFGP polyprotein precursor
  misc_feature (124)..(164): NCBI GI NO: 11360494 NR Description: antifreeze glycopeptide AFGP polyprotein precursor
  misc_feature (120)..(170): NCBI GI NO: 5001993 NR Description: chimeric AFGP/ trypsinogen-like serine proteaseprecursor
  misc_feature (126)..(168): NCBI GI NO: 5001993 NR Description: chimeric AFGP/ trypsinogen-like serine proteaseprecursor
  misc_feature (126)..(170): NCBI GI NO: 5001993 NR Description: chimeric AFGP/ trypsinogen-like serine proteaseprecursor
  misc_feature (126)..(164): NCBI GI NO: 11360494 NR Description: antifreeze glycopeptide AFGP polyprotein precursor
  misc_feature (126)..(164): NCBI GI NO: 11360494 NR Description: antifreeze glycopeptide AFGP polyprotein precursor
  misc_feature (126)..(163): NCBI GI NO: 5001993 NR Description: chimeric AFGP/ trypsinogen-like serine proteaseprecursor
  misc_feature (126)..(163): NCBI GI NO: 5001993 NR Description: chimeric AFGP/ trypsinogen-like serine proteaseprecursor
  misc_feature (109)..(175): NCBI GI NO: 11360494 NR Description: antifreeze glycopeptide AFGP polyprotein precursor
EKLQPPSQRHPEQRTASQQQSAHRRRIRLRSSSNGARRRSLPGAALPRGRALSRSAEVHDGPGRRAGRRHHPAGDPDQEDARARRRAAHHPGHPGPGRRPAHHAGHPRARRCGAHYPGHPGTRRGAVMAVAATAVAAATVAAAATVVVAAATAVATVAAATATPTGTGGTERWGPRGQVILFATVMFTLVQRVYLRSCRVCCCPSVFLIARSLCVSC

SEQ ID NO: 29103 - protein, 170 aa, Zea mays subsp. mays
  peptide (1)..(170): Ceres Seq. ID no. 14312672
  misc_feature (4)..(162): Pfam Name: Pfam Description:  Formin Homology 2 Domain
  misc_feature (126)..(170): NCBI GI NO: 82696 NR Description: glycine-rich protein - maize
  misc_feature (126)..(170): NCBI GI NO: 20257675 NR Description: glycine-rich RNA binding protein [Zea mays]
  misc_feature (126)..(170): NCBI GI NO: 20257693 NR Description: glycine-rich RNA binding protein [Zea mays]
  misc_feature (126)..(170): NCBI GI NO: 20257709 NR Description: glycine-rich RNA binding protein [Zea mays]
  misc_feature (126)..(170): NCBI GI NO: 20257699 NR Description: glycine-rich RNA binding protein [Zea mays]
  misc_feature (126)..(170): NCBI GI NO: 20257691 NR Description: glycine-rich RNA binding protein [Zea mays]
  misc_feature (126)..(170): NCBI GI NO: 20257683 NR Description: glycine-rich RNA binding protein [Zea mays]
  misc_feature (126)..(170): NCBI GI NO: 20257687 NR Description: glycine-rich RNA binding protein [Zea mays]
  misc_feature (16)..(124): NCBI GI NO: 2129478 NR Description: chitinase (EC 3.2.1.14) precursor - beet
  misc_feature (126)..(170): NCBI GI NO: 544421 NR Description: Glycine-rich RNA-binding protein 1
RKTPTAEPEAPGAAHSKSATERTPSPHPPPQQQQWRAPALSAWCCSASWPRTQPQRRSPRRPRPPRRPPPPPRRRPRPRRRPRPPPRRPPPRPPWPRPPPRPPRRPPPRPSLRRPLPRPPWHPPRRRDGGGGYGGGGGYGGGGGYGGGGGGYGGGNRGGGYGNSDGNWRN

SEQ ID NO: 29104 - protein, 127 aa, Zea mays subsp. mays
  peptide (1)..(127): Ceres Seq. ID no. 14312673
  misc_feature (24)..(125): Pfam Name: Pfam Description:  Equine herpesvirus glycoprotein gp2
  misc_feature (11)..(127): NCBI GI NO: 11360494 NR Description: antifreeze glycopeptide AFGP polyprotein precursor
  misc_feature (35)..(127): NCBI GI NO: 10945615 NR Description: arabinogalactan protein [Nicotiana alata]
  misc_feature (11)..(127): NCBI GI NO: 5001993 NR Description: chimeric AFGP/ trypsinogen-like serine proteaseprecursor
  misc_feature (11)..(127): NCBI GI NO: 5001993 NR Description: chimeric AFGP/ trypsinogen-like serine proteaseprecursor
  misc_feature (11)..(127): NCBI GI NO: 5001993 NR Description: chimeric AFGP/ trypsinogen-like serine proteaseprecursor
  misc_feature (8)..(127): NCBI GI NO: 11360494 NR Description: antifreeze glycopeptide AFGP polyprotein precursor
  misc_feature (8)..(127): NCBI GI NO: 11360494 NR Description: antifreeze glycopeptide AFGP polyprotein precursor
  misc_feature (11)..(127): NCBI GI NO: 5001993 NR Description: chimeric AFGP/ trypsinogen-like serine proteaseprecursor
  misc_feature (6)..(125): NCBI GI NO: 11360494 NR Description: antifreeze glycopeptide AFGP polyprotein precursor
  misc_feature (35)..(127): NCBI GI NO: 1362097 NR Description: probable arabinogalactan protein precursor - tomato
SKNSNRRARGTRSSAQQVSNRAHTVAASASAAAAMARAGALCLVLLCLVAAHSAAAQKSTTAPAAAPAAATTPPATPTKKTPAPAAAPPTTPATLAPAAAPPTTPATPAPVAAAPTTPATLAPAAAP

SEQ ID NO: 29105 - DNA, 895 bp, Zea mays subsp. mays
  misc_feature (1)..(895): Ceres Seq. ID no. 12343628
aaattgtatctgcagtcgcccacctccatgccaacggtattatgcatagagatttgaagcctgagaacatcttactggatgctgatggtcatgctatgctgactgactttggtgtggcaaaagaatttgatgaaaacactagatcaaactcaatgtgtggtactgttgaatacatggccccagaaattgttcagggccgaggtcatgataaggctgcagactggtggagtgtgggagtccttctttttgaaatgcttacaggaaagccaccgtttgttggtggaaacagagacaagattcagcagaagatagtaaaggagaagataaagctgccaacatatttatctagtgaagttcactcaatgttgaaaggattattgcacaaagaagctggcagacggctgggaagcggaccaggcggcagtgacgaaatcaagaaccacaagtggttcaagtctgtaaactggaagaggctggaggcccggcagatcgagccaagcttccggccgaatgttgctggcaagacctgcattgcgaactttgacgagtgctggacgaacatgcccgtgcttgattctccggtggccagccctgttgcggccaacagcaactttgtggggttcagttatgtgaggcccgcaccgttcctccagaagccgagtccacttggctaaagaactacttccgtgatctgatatctaacccggagttcaaataactatctttgagtctgaatcctatgtatttcttcaagacattagtgatgggaatctaaccttattgttgtgttgtgggtaggccagccaagcgcctattgcttgagaacaacagcttggcaagtgacaatgtgcaatattgccagaagttcttattgaagcgccataataattctcct

SEQ ID NO: 29106 - protein, 223 aa, Zea mays subsp. mays
  peptide (1)..(223): Ceres Seq. ID no. 12343629
  misc_feature (1)..(150): Pfam Name: Pfam Description:  Protein kinase domain
  misc_feature (1)..(223): NCBI GI NO: 1362152 NR Description: ribosomal protein S6 kinase homolog
  misc_feature (1)..(221): NCBI GI NO: 33146662 NR Description: putative S6 ribosomal protein kinase
  misc_feature (1)..(223): NCBI GI NO: 7649389 NR Description: S6 ribosomal protein kinase
  misc_feature (1)..(223): NCBI GI NO: 37575481 NR Description: ribosomal protein S6 kinase [Zea mays]
  misc_feature (1)..(218): NCBI GI NO: 15231959 NR Description: putative ribosomal-protein S6 kinase
  misc_feature (1)..(218): NCBI GI NO: 15231960 NR Description: putative ribosomal-protein S6 kinase
  misc_feature (1)..(218): NCBI GI NO: 21537155 NR Description: putative ribosomal-protein S6 kinase ATPK6
  misc_feature (1)..(218): NCBI GI NO: 2129541 NR Description: protein kinase ATPK19 (EC 2
  misc_feature (1)..(213): NCBI GI NO: 109371 NR Description: probable ribosomal protein S6 kinase (EC 2
  misc_feature (1)..(213): NCBI GI NO: 125695 NR Description: Ribosomal protein S6 kinase (S6K) (p70-S6K)
IVSAVAHLHANGIMHRDLKPENILLDADGHAMLTDFGVAKEFDENTRSNSMCGTVEYMAPEIVQGRGHDKAADWWSVGVLLFEMLTGKPPFVGGNRDKIQQKIVKEKIKLPTYLSSEVHSMLKGLLHKEAGRRLGSGPGGSDEIKNHKWFKSVNWKRLEARQIEPSFRPNVAGKTCIANFDECWTNMPVLDSPVASPVAANSNFVGFSYVRPAPFLQKPSPLG

SEQ ID NO: 29107 - protein, 210 aa, Zea mays subsp. mays
  peptide (1)..(210): Ceres Seq. ID no. 12343630
  misc_feature (1)..(137): Pfam Name: Pfam Description:  Protein kinase domain
  misc_feature (1)..(210): NCBI GI NO: 1362152 NR Description: ribosomal protein S6 kinase homolog
  misc_feature (1)..(208): NCBI GI NO: 33146662 NR Description: putative S6 ribosomal protein kinase
  misc_feature (1)..(210): NCBI GI NO: 7649389 NR Description: S6 ribosomal protein kinase
  misc_feature (1)..(210): NCBI GI NO: 37575481 NR Description: ribosomal protein S6 kinase [Zea mays]
  misc_feature (1)..(205): NCBI GI NO: 15231959 NR Description: putative ribosomal-protein S6 kinase
  misc_feature (1)..(205): NCBI GI NO: 15231960 NR Description: putative ribosomal-protein S6 kinase
  misc_feature (1)..(205): NCBI GI NO: 21537155 NR Description: putative ribosomal-protein S6 kinase ATPK6
  misc_feature (1)..(205): NCBI GI NO: 2129541 NR Description: protein kinase ATPK19 (EC 2
  misc_feature (1)..(200): NCBI GI NO: 109371 NR Description: probable ribosomal protein S6 kinase (EC 2
  misc_feature (1)..(200): NCBI GI NO: 125696 NR Description: Ribosomal protein S6 kinase I (S6K) (P70-S6K)
MHRDLKPENILLDADGHAMLTDFGVAKEFDENTRSNSMCGTVEYMAPEIVQGRGHDKAADWWSVGVLLFEMLTGKPPFVGGNRDKIQQKIVKEKIKLPTYLSSEVHSMLKGLLHKEAGRRLGSGPGGSDEIKNHKWFKSVNWKRLEARQIEPSFRPNVAGKTCIANFDECWTNMPVLDSPVASPVAANSNFVGFSYVRPAPFLQKPSPLG

SEQ ID NO: 29108 - protein, 192 aa, Zea mays subsp. mays
  peptide (1)..(192): Ceres Seq. ID no. 12343631
  misc_feature (1)..(119): Pfam Name: Pfam Description:  Protein kinase domain
  misc_feature (1)..(192): NCBI GI NO: 1362152 NR Description: ribosomal protein S6 kinase homolog
  misc_feature (1)..(190): NCBI GI NO: 33146662 NR Description: putative S6 ribosomal protein kinase
  misc_feature (1)..(192): NCBI GI NO: 7649389 NR Description: S6 ribosomal protein kinase
  misc_feature (1)..(192): NCBI GI NO: 37575481 NR Description: ribosomal protein S6 kinase [Zea mays]
  misc_feature (1)..(187): NCBI GI NO: 15231959 NR Description: putative ribosomal-protein S6 kinase
  misc_feature (1)..(187): NCBI GI NO: 15231960 NR Description: putative ribosomal-protein S6 kinase
  misc_feature (1)..(187): NCBI GI NO: 21537155 NR Description: putative ribosomal-protein S6 kinase ATPK6
  misc_feature (1)..(187): NCBI GI NO: 2129541 NR Description: protein kinase ATPK19 (EC 2
  misc_feature (1)..(182): NCBI GI NO: 109371 NR Description: probable ribosomal protein S6 kinase (EC 2
  misc_feature (1)..(182): NCBI GI NO: 125695 NR Description: Ribosomal protein S6 kinase (S6K) (p70-S6K)
MLTDFGVAKEFDENTRSNSMCGTVEYMAPEIVQGRGHDKAADWWSVGVLLFEMLTGKPPFVGGNRDKIQQKIVKEKIKLPTYLSSEVHSMLKGLLHKEAGRRLGSGPGGSDEIKNHKWFKSVNWKRLEARQIEPSFRPNVAGKTCIANFDECWTNMPVLDSPVASPVAANSNFVGFSYVRPAPFLQKPSPLG

SEQ ID NO: 29109 - DNA, 1109 bp, Zea mays subsp. mays
  misc_feature (1)..(1109): Ceres Seq. ID no. 12353933
gcacagtgccactgaccactgcgagctctccctccagtttcacacaccctgatctgttcgcatcagtctcccggtcgcaagcgcctccgaaaccctagactcgcctcgcgagttgcttcgcttctcctgcccccgatggagccgtccccggcggtcgctgcggagctctggtgctcaccgcacctcgccgcgggcggcggccgcccgttggaggcgacctcggccgtcacggagaagagcagcggcggccgcggaggaggcggcgccgtccggaggaggccgagggagaccccggtgtccgaggatgactcgtcccggatcgtctccacttccggcggtggcggcggccaggatttgactgatctagaagcaaagcgttccaaaacaaataagtccagtaataataaaggcagtctaagaacagaggttgaaactgactcaagaagtgctggcaaggctgttagtaaaaacattccagcagcagagccaccaaaacaagattatatccatgtcagggcaaggaggggtcaagcaactgatagtcatagtcttgcagagagggcacgtcgtgagaaaataagtgaacgaatgaaagttctccaagatcttgtgcctggatgcaacaaggttattggcaaagcatcagtacttgatgagataattaattacatccagtcgttgcaatgtcaagttgagttcctgtccatgaaactagaggcagtgaatgcccaggcaaaccagggagttgaagtatttccagccaaagattacggttctcagacatacaacacagctcctgggctgacatttgatacgcaaaccagtagagaatacgcccagggcacgtcgacctcggaatggcttcacatgcagattggcagtggctatgaaagggtttcatgaacgagatgaatccaggcagccgctaaataaagtgaaccatgatcaatcatggccgtgcttgtagatcattctttttcattttttttgaaaccatcatgttccagacgcattttttattcatgcttggagctgtaattccagccggaacatgtatttttgatgaggcgctcatttgtttccccatctgaatctcaagactgtttctg

SEQ ID NO: 29110 - protein, 255 aa, Zea mays subsp. mays
  peptide (1)..(255): Ceres Seq. ID no. 12353934
  misc_feature (133)..(183): Pfam Name: Pfam Description:  Helix-loop-helix DNA-binding domain
  misc_feature (1)..(255): NCBI GI NO: 29150361 NR Description: hypothetical protein
  misc_feature (56)..(255): NCBI GI NO: 33339703 NR Description: MYC1 [Catharanthus roseus]
  misc_feature (56)..(255): NCBI GI NO: 18406408 NR Description: bHLH protein; protein id: At1g59640
  misc_feature (56)..(255): NCBI GI NO: 21592490 NR Description: unknown [Arabidopsis thaliana]
  misc_feature (21)..(255): NCBI GI NO: 15241896 NR Description: putative protein; protein id: At5g62610
  misc_feature (56)..(211): NCBI GI NO: 25404871 NR Description: protein T30E16.21
  misc_feature (56)..(211): NCBI GI NO: 25453562 NR Description: helix-loop-helix protein homolog
  misc_feature (56)..(211): NCBI GI NO: 30696324 NR Description: bHLH protein [Arabidopsis thaliana]
  misc_feature (18)..(230): NCBI GI NO: 34906952 NR Description: DNA-binding protein-like protein
  misc_feature (42)..(211): NCBI GI NO: 15239013 NR Description: putative protein; protein id: At5g48560
MEPSPAVAAELWCSPHLAAGGGRPLEATSAVTEKSSGGRGGGGAVRRRPRETPVSEDDSSRIVSTSGGGGGQDLTDLEAKRSKTNKSSNNKGSLRTEVETDSRSAGKAVSKNIPAAEPPKQDYIHVRARRGQATDSHSLAERARREKISERMKVLQDLVPGCNKVIGKASVLDEIINYIQSLQCQVEFLSMKLEAVNAQANQGVEVFPAKDYGSQTYNTAPGLTFDTQTSREYAQGTSTSEWLHMQIGSGYERVS

SEQ ID NO: 29111 - DNA, 1657 bp, Zea mays subsp. mays
  misc_feature (1)..(1657): Ceres Seq. ID no. 12548275
cttctagataagcagcgcaaacccctactctctcgcctctccctatccatccccaaataatccccacctcccgctcatcctccgcctccgccgcccgccatggcctccctcacctcggcctccacctcactcctcttcccgcaggcctcctcatccaggagccgcgtccggctctccacctccctgggcttctccgcgcagccggcgcggctgcggagccgggcggcggcaggagggcagcggcgcgggagcctgctggtggtgcgcgcggcgaggggaaagttcgagcgcaccaagccgcacgtaaacatcggcaccatcggtcacgtcgaccacggcaagaccaccctcaccgccgcgctcaccatggtgctcgcctccgtcggcggcagcgcgcccaagaagtacgacgagatcgatgccgcccccgaggagcgtgcccgcggtatcaccatcaacaccgccaccgtcgagtacgagaccgagacccgccactacgcgcacgtcgactgccccggccacgccgactatgtcaagaacatgatcaccggcgctgcgcagatggacggcgccatcctcgtcgtctctggcgccgacggtcccatgccgcagaccaaagagcacattctcctcgccaagcaggtcggcgttcccaagatcgttgtcttcctcaacaagaaggacatggtcgacgacgaggagctgctcgagctcgtcgagctggaagtccgcgagctgctcagcaactatgagtacgacggcgacgaggtgccaatcgtcgctggctccgccctcaaggcgctcgaggccctcatgggcaaccctaccctgaagcgcggcgacgatgagtgggtggactgcatcttcaagctggttgattctgtggattcctacattccagtgccacagcggcagaccgacctcccgttcttactcgctgttgaagatgtcttctccatcaccggtcgtggtacagttgccactggccgtatcgagcgtggcaccgtcaagattggtgacacagtcgatatcgttggaatccgggacacccggaactgcaccgtgactggcgttgagatgttccagaagaccatggacgatgccatggctggagacaatgtcggactgctgctccgtggtatgcagaaggatgacattgagagaggcatggtgctggcaaagcccggctctatcacaccgcacaccaagtttgaggctgttgtgtatgtgcttaagaaggaagagggtggccggcactcacctttcttccctggttaccgcccgcagttctacatgaggacaaccgatgtgacagggaatgtgactgtgattatgaatgacaaagatgaggaggcgaagatgtgcatgcctggtgaccgtatcaagatggttgttcagctcatccagcctgttgcttgtgagcagggtatgaggtttgctatccgtgagggtggtaagactgttggtgctggtgtcatcaacaaaatcattgagtaaactggatatatcacatccaccacgagaattttccttgtttactcaaagcgaaatgctctgtagttgttattatgtgttgagttttaggggttgttcatgtgaaattgtagtatgacactctttcgccaagtgaatttgcataatttatgacattcacggc

SEQ ID NO: 29112 - protein, 465 aa, Zea mays subsp. mays
  peptide (1)..(465): Ceres Seq. ID no. 12548276
  misc_feature (66)..(270): Pfam Name: Pfam Description:  Elongation factor Tu GTP binding domain
  misc_feature (1)..(465): NCBI GI NO: 17225494 NR Description: translational elongation factor Tu [Oryza sativa]
  misc_feature (1)..(465): NCBI GI NO: 6525065 NR Description: chloroplast translational elongation factor Tu
  misc_feature (1)..(465): NCBI GI NO: 459241 NR Description: chloroplast elongation factor TuB(EF-TuB)
  misc_feature (3)..(465): NCBI GI NO: 12830555 NR Description: chloroplast translational elongation factor Tu
  misc_feature (1)..(465): NCBI GI NO: 1169494 NR Description: ELONGATION FACTOR TU, CHLOROPLAST PRECURSOR
  misc_feature (1)..(465): NCBI GI NO: 486827 NR Description: translation elongation factor EF-Tu
  misc_feature (1)..(465): NCBI GI NO: 2494261 NR Description: Elongation factor Tu, chloroplast precursor
  misc_feature (1)..(465): NCBI GI NO: 6015084 NR Description: ELONGATION FACTOR TU, CHLOROPLAST PRECURSOR
  misc_feature (55)..(465): NCBI GI NO: 218312 NR Description: chloroplast elongation factor TuB (EF-TuB)
  misc_feature (4)..(465): NCBI GI NO: 729409 NR Description: ELONGATION FACTOR TU, CHLOROPLAST PRECURSOR
MASLTSASTSLLFPQASSSRSRVRLSTSLGFSAQPARLRSRAAAGGQRRGSLLVVRAARGKFERTKPHVNIGTIGHVDHGKTTLTAALTMVLASVGGSAPKKYDEIDAAPEERARGITINTATVEYETETRHYAHVDCPGHADYVKNMITGAAQMDGAILVVSGADGPMPQTKEHILLAKQVGVPKIVVFLNKKDMVDDEELLELVELEVRELLSNYEYDGDEVPIVAGSALKALEALMGNPTLKRGDDEWVDCIFKLVDSVDSYIPVPQRQTDLPFLLAVEDVFSITGRGTVATGRIERGTVKIGDTVDIVGIRDTRNCTVTGVEMFQKTMDDAMAGDNVGLLLRGMQKDDIERGMVLAKPGSITPHTKFEAVVYVLKKEEGGRHSPFFPGYRPQFYMRTTDVTGNVTVIMNDKDEEAKMCMPGDRIKMVVQLIQPVACEQGMRFAIREGGKTVGAGVINKIIE

SEQ ID NO: 29113 - protein, 376 aa, Zea mays subsp. mays
  peptide (1)..(376): Ceres Seq. ID no. 12548277
  misc_feature (1)..(181): Pfam Name: Pfam Description:  Elongation factor Tu GTP binding domain
  misc_feature (1)..(376): NCBI GI NO: 17225494 NR Description: translational elongation factor Tu [Oryza sativa]
  misc_feature (1)..(376): NCBI GI NO: 6525065 NR Description: chloroplast translational elongation factor Tu
  misc_feature (1)..(376): NCBI GI NO: 459241 NR Description: chloroplast elongation factor TuB(EF-TuB)
  misc_feature (1)..(376): NCBI GI NO: 12830555 NR Description: chloroplast translational elongation factor Tu
  misc_feature (1)..(376): NCBI GI NO: 1169494 NR Description: ELONGATION FACTOR TU, CHLOROPLAST PRECURSOR
  misc_feature (1)..(376): NCBI GI NO: 486827 NR Description: translation elongation factor EF-Tu
  misc_feature (1)..(376): NCBI GI NO: 2494261 NR Description: Elongation factor Tu, chloroplast precursor
  misc_feature (1)..(376): NCBI GI NO: 6015084 NR Description: ELONGATION FACTOR TU, CHLOROPLAST PRECURSOR
  misc_feature (1)..(376): NCBI GI NO: 218312 NR Description: chloroplast elongation factor TuB (EF-TuB)
  misc_feature (1)..(376): NCBI GI NO: 729409 NR Description: ELONGATION FACTOR TU, CHLOROPLAST PRECURSOR
MVLASVGGSAPKKYDEIDAAPEERARGITINTATVEYETETRHYAHVDCPGHADYVKNMITGAAQMDGAILVVSGADGPMPQTKEHILLAKQVGVPKIVVFLNKKDMVDDEELLELVELEVRELLSNYEYDGDEVPIVAGSALKALEALMGNPTLKRGDDEWVDCIFKLVDSVDSYIPVPQRQTDLPFLLAVEDVFSITGRGTVATGRIERGTVKIGDTVDIVGIRDTRNCTVTGVEMFQKTMDDAMAGDNVGLLLRGMQKDDIERGMVLAKPGSITPHTKFEAVVYVLKKEEGGRHSPFFPGYRPQFYMRTTDVTGNVTVIMNDKDEEAKMCMPGDRIKMVVQLIQPVACEQGMRFAIREGGKTVGAGVINKIIE

SEQ ID NO: 29114 - protein, 318 aa, Zea mays subsp. mays
  peptide (1)..(318): Ceres Seq. ID no. 12548278
  misc_feature (1)..(123): Pfam Name: Pfam Description:  Elongation factor Tu GTP binding domain
  misc_feature (1)..(318): NCBI GI NO: 17225494 NR Description: translational elongation factor Tu [Oryza sativa]
  misc_feature (1)..(318): NCBI GI NO: 6525065 NR Description: chloroplast translational elongation factor Tu
  misc_feature (1)..(318): NCBI GI NO: 459241 NR Description: chloroplast elongation factor TuB(EF-TuB)
  misc_feature (1)..(318): NCBI GI NO: 12830555 NR Description: chloroplast translational elongation factor Tu
  misc_feature (1)..(318): NCBI GI NO: 1169494 NR Description: ELONGATION FACTOR TU, CHLOROPLAST PRECURSOR
  misc_feature (1)..(318): NCBI GI NO: 486827 NR Description: translation elongation factor EF-Tu
  misc_feature (1)..(318): NCBI GI NO: 2494261 NR Description: Elongation factor Tu, chloroplast precursor
  misc_feature (1)..(318): NCBI GI NO: 6015084 NR Description: ELONGATION FACTOR TU, CHLOROPLAST PRECURSOR
  misc_feature (1)..(318): NCBI GI NO: 218312 NR Description: chloroplast elongation factor TuB (EF-TuB)
  misc_feature (1)..(318): NCBI GI NO: 729409 NR Description: ELONGATION FACTOR TU, CHLOROPLAST PRECURSOR
MITGAAQMDGAILVVSGADGPMPQTKEHILLAKQVGVPKIVVFLNKKDMVDDEELLELVELEVRELLSNYEYDGDEVPIVAGSALKALEALMGNPTLKRGDDEWVDCIFKLVDSVDSYIPVPQRQTDLPFLLAVEDVFSITGRGTVATGRIERGTVKIGDTVDIVGIRDTRNCTVTGVEMFQKTMDDAMAGDNVGLLLRGMQKDDIERGMVLAKPGSITPHTKFEAVVYVLKKEEGGRHSPFFPGYRPQFYMRTTDVTGNVTVIMNDKDEEAKMCMPGDRIKMVVQLIQPVACEQGMRFAIREGGKTVGAGVINKIIE

SEQ ID NO: 29115 - DNA, 1197 bp, Zea mays subsp. mays
  misc_feature (1)..(1197): Ceres Seq. ID no. 12408810
tagaacatcctaatcgaaaaaggcgggcccaaggtcgtgactaggcacagtcgcacagaccactagaccagcacacggccacagtaccacacagaacagtagcaccgggctccgggcaccagggcaggcgaattcctaggttcgctggagcctggagcgagggatggccgccgcctcgctcgcgttggcgagtcctttccggcttctcctccgcgcccctcacccgcgcggagccatccccgtcccgtgctactttatctcgcgaggacggtatagcaccgccattgccgtcgcagcagcgagggattcggcggtgaaaggaagcgtggacaggaattcagcggaggaagtcaggaacattctgaatatggcagaaagggcttcccaacgaagagatgtttttcacaccaattttcttactccacctatagtgaaagagactatgctggcacttgaaaagtttgcagataccaaagcagtagctcagggtggctaccctcaggctgagaggtgccgaatatctgttgggcacccggacgtcatgacaagtaacccagatgtggttgctgctttgagcatctcagggaatttccggttggaatcttgttctcatggtgactttcttggtgctattcttgggacaggaataacaagggagaaagttggagatattcttttgcagggggaacgaggtgcccaggtccttgttgacccagaacttgttgactatctgatttctacccttgaaaaggtggggaaagttggtgtttcatgcactcagattcctttgcttgctctagaatatgaaccgccaaggaccaattcatttaaaactgtagaatcatcgctcagggttgatgcccttgccagtgcaggatttaaaatctcacgcacgaagcttgctagcttgataagttctggtgatgttcgtgtgaattggacaccaacaacaaaaaatggagttaccctcaaatctagagatgttgtttctgttagtgggatgggaaggttaaagattggggaaattgtgactacgaggaaaggaaaatatgcggtttgagttgattcgctatttgtaatcatgggactggtctactttcatgtctgaaactctgaatttaacggtacacattttctcctatatgtgatgagaatcatgtattaagtattacttctcagtgaagttgaaagtgatgc

SEQ ID NO: 29116 - protein, 298 aa, Zea mays subsp. mays
  peptide (1)..(298): Ceres Seq. ID no. 12408811
  misc_feature (229)..(275): Pfam Name: Pfam Description:  S4 domain
  misc_feature (1)..(298): NCBI GI NO: 18404337 NR Description: expressed protein; protein id: At1g53120
  misc_feature (173)..(298): NCBI GI NO: 34909484 NR Description: P0481E12.12
  misc_feature (47)..(298): NCBI GI NO: 16330752 NR Description: hypothetical protein [Synechocystis sp. PCC 6803]
  misc_feature (47)..(298): NCBI GI NO: 17230382 NR Description: hypothetical protein [Nostoc sp. PCC 7120]
  misc_feature (47)..(298): NCBI GI NO: 23125059 NR Description: hypothetical protein [Nostoc punctiforme]
  misc_feature (47)..(298): NCBI GI NO: 23042582 NR Description: hypothetical protein
  misc_feature (47)..(298): NCBI GI NO: 37519960 NR Description: hypothetical protein gll0391
  misc_feature (1)..(255): NCBI GI NO: 25405622 NR Description: hypothetical protein F8L10.3
  misc_feature (79)..(298): NCBI GI NO: 22299704 NR Description: ORF_ID:tlr2161~hypothetical protein
  misc_feature (194)..(293): NCBI GI NO: 25405622 NR Description: hypothetical protein F8L10.3
MAAASLALASPFRLLLRAPHPRGAIPVPCYFISRGRYSTAIAVAAARDSAVKGSVDRNSAEEVRNILNMAERASQRRDVFHTNFLTPPIVKETMLALEKFADTKAVAQGGYPQAERCRISVGHPDVMTSNPDVVAALSISGNFRLESCSHGDFLGAILGTGITREKVGDILLQGERGAQVLVDPELVDYLISTLEKVGKVGVSCTQIPLLALEYEPPRTNSFKTVESSLRVDALASAGFKISRTKLASLISSGDVRVNWTPTTKNGVTLKSRDVVSVSGMGRLKIGEIVTTRKGKYAV

SEQ ID NO: 29117 - protein, 230 aa, Zea mays subsp. mays
  peptide (1)..(230): Ceres Seq. ID no. 12408812
  misc_feature (161)..(207): Pfam Name: Pfam Description:  S4 domain
  misc_feature (1)..(230): NCBI GI NO: 18404337 NR Description: expressed protein; protein id: At1g53120
  misc_feature (105)..(230): NCBI GI NO: 34909484 NR Description: P0481E12.12
  misc_feature (1)..(230): NCBI GI NO: 16330752 NR Description: hypothetical protein [Synechocystis sp. PCC 6803]
  misc_feature (1)..(230): NCBI GI NO: 17230382 NR Description: hypothetical protein [Nostoc sp. PCC 7120]
  misc_feature (1)..(230): NCBI GI NO: 23125059 NR Description: hypothetical protein [Nostoc punctiforme]
  misc_feature (1)..(230): NCBI GI NO: 23042582 NR Description: hypothetical protein
  misc_feature (1)..(230): NCBI GI NO: 37519960 NR Description: hypothetical protein gll0391
  misc_feature (1)..(187): NCBI GI NO: 25405622 NR Description: hypothetical protein F8L10.3
  misc_feature (11)..(230): NCBI GI NO: 22299704 NR Description: ORF_ID:tlr2161~hypothetical protein
  misc_feature (126)..(225): NCBI GI NO: 25405622 NR Description: hypothetical protein F8L10.3
MAERASQRRDVFHTNFLTPPIVKETMLALEKFADTKAVAQGGYPQAERCRISVGHPDVMTSNPDVVAALSISGNFRLESCSHGDFLGAILGTGITREKVGDILLQGERGAQVLVDPELVDYLISTLEKVGKVGVSCTQIPLLALEYEPPRTNSFKTVESSLRVDALASAGFKISRTKLASLISSGDVRVNWTPTTKNGVTLKSRDVVSVSGMGRLKIGEIVTTRKGKYAV

SEQ ID NO: 29118 - protein, 205 aa, Zea mays subsp. mays
  peptide (1)..(205): Ceres Seq. ID no. 12408813
  misc_feature (136)..(182): Pfam Name: Pfam Description:  S4 domain
  misc_feature (1)..(205): NCBI GI NO: 18404337 NR Description: expressed protein; protein id: At1g53120
  misc_feature (80)..(205): NCBI GI NO: 34909484 NR Description: P0481E12.12
  misc_feature (1)..(205): NCBI GI NO: 16330752 NR Description: hypothetical protein [Synechocystis sp. PCC 6803]
  misc_feature (1)..(205): NCBI GI NO: 17230382 NR Description: hypothetical protein [Nostoc sp. PCC 7120]
  misc_feature (1)..(205): NCBI GI NO: 23125059 NR Description: hypothetical protein [Nostoc punctiforme]
  misc_feature (1)..(205): NCBI GI NO: 23042582 NR Description: hypothetical protein
  misc_feature (1)..(205): NCBI GI NO: 37519960 NR Description: hypothetical protein gll0391
  misc_feature (1)..(162): NCBI GI NO: 25405622 NR Description: hypothetical protein F8L10.3
  misc_feature (1)..(205): NCBI GI NO: 22299704 NR Description: ORF_ID:tlr2161~hypothetical protein
  misc_feature (101)..(200): NCBI GI NO: 25405622 NR Description: hypothetical protein F8L10.3
MLALEKFADTKAVAQGGYPQAERCRISVGHPDVMTSNPDVVAALSISGNFRLESCSHGDFLGAILGTGITREKVGDILLQGERGAQVLVDPELVDYLISTLEKVGKVGVSCTQIPLLALEYEPPRTNSFKTVESSLRVDALASAGFKISRTKLASLISSGDVRVNWTPTTKNGVTLKSRDVVSVSGMGRLKIGEIVTTRKGKYAV

SEQ ID NO: 29119 - DNA, 1057 bp, Zea mays subsp. mays
  misc_feature (1)..(1057): Ceres Seq. ID no. 12340862
aaaatttccacaaccgaaacctgcagtcgggtcatctcgtccacgaaacgtacggacttcgggcatcggccccaacgccagcggcaccgcacccgcaccaccaagctcgtcggcgacatgaatccgcccgcagcagccgcgtccaccggcgcaggaggccacgccgcggcgcctgcggcagccccggagtacgtgcactacccgaggctctcgccagaggaggtggccccgcccccgccttatgcacgccgccaccgccgcgccgtccgcctacggaggcaacccctacatctactcccccgccggcggcgccgccacctccccgaagaatacgatggactccgtgaaggacgtgctcggcaagatggggaagaggtttggcgaggcggcccgcaagaccgagaccatcaccggcaatttctggcagcacttgaaaactggaccaagcattactgatgcagcaatgagcaggatctcacaggtcaccaaagtcattgcagaaggtggatatgacaaaattttccatcaaacttttgaggtcgcccctggtgaaaagctcaagaagccatatgcatgttatctgtcaacctcggctggtcctgttatgggtgtgctttacctgtccaatgtaaaactggcattttgtagtgataacccacttgcataccaggttggagacaaaactgagtggagttactacaaggtggtcatcccccttgctcaactgcgatcaattaattcatcaacaagcagaacaaatgcagcagagaaatacattcaggtggtttctgttgataaccatgggttttggtttatgggcttcgtttactatgacagtgcggtgaagaatctgcaggaagcacttcaggaggctcagaatttacgtgcttagtgatgttcatggattggaactagcatgtcttatacattacagctgtgatatactgtttttccgtcagtttcgactgtttgtccagatttagtttgcgtaggtatcagctgtttctgtcttttgtactgacttaaaccaatgttcaatatgtgacgtgcatccttt

SEQ ID NO: 29120 - protein, 216 aa, Zea mays subsp. mays
  peptide (1)..(216): Ceres Seq. ID no. 12340863
  misc_feature (92)..(169): Pfam Name: Pfam Description:  GRAM domain
  misc_feature (1)..(216): NCBI GI NO: 34902414 NR Description: Putative FH protein interacting protein FIP1
  misc_feature (33)..(209): NCBI GI NO: 34906818 NR Description: contains EST C91668
  misc_feature (1)..(216): NCBI GI NO: 18399985 NR Description: Expressed protein; protein id: At2g22475
  misc_feature (3)..(209): NCBI GI NO: 15217869 NR Description: FH protein interacting protein FIP1
  misc_feature (1)..(216): NCBI GI NO: 21592789 NR Description: unknown [Arabidopsis thaliana]
  misc_feature (1)..(216): NCBI GI NO: 26452129 NR Description: unknown protein [Arabidopsis thaliana]
  misc_feature (1)..(209): NCBI GI NO: 29788871 NR Description: putative ABA-responsive protein
  misc_feature (4)..(127): NCBI GI NO: 15236123 NR Description: putative protein; protein id: At4g40100.1
  misc_feature (155)..(209): NCBI GI NO: 15236123 NR Description: putative protein; protein id: At4g40100.1
  misc_feature (75)..(209): NCBI GI NO: 33146631 NR Description: putative FH protein interacting protein FIP1
MHAATAAPSAYGGNPYIYSPAGGAATSPKNTMDSVKDVLGKMGKRFGEAARKTETITGNFWQHLKTGPSITDAAMSRISQVTKVIAEGGYDKIFHQTFEVAPGEKLKKPYACYLSTSAGPVMGVLYLSNVKLAFCSDNPLAYQVGDKTEWSYYKVVIPLAQLRSINSSTSRTNAAEKYIQVVSVDNHGFWFMGFVYYDSAVKNLQEALQEAQNLRA

SEQ ID NO: 29121 - protein, 185 aa, Zea mays subsp. mays
  peptide (1)..(185): Ceres Seq. ID no. 12340864
  misc_feature (61)..(138): Pfam Name: Pfam Description:  GRAM domain
  misc_feature (1)..(185): NCBI GI NO: 34902414 NR Description: Putative FH protein interacting protein FIP1
  misc_feature (2)..(178): NCBI GI NO: 34906818 NR Description: contains EST C91668
  misc_feature (1)..(185): NCBI GI NO: 18399985 NR Description: Expressed protein; protein id: At2g22475
  misc_feature (1)..(178): NCBI GI NO: 15217869 NR Description: FH protein interacting protein FIP1
  misc_feature (1)..(185): NCBI GI NO: 21592789 NR Description: unknown [Arabidopsis thaliana]
  misc_feature (1)..(185): NCBI GI NO: 26452129 NR Description: unknown protein [Arabidopsis thaliana]
  misc_feature (1)..(178): NCBI GI NO: 29788871 NR Description: putative ABA-responsive protein
  misc_feature (1)..(96): NCBI GI NO: 15236123 NR Description: putative protein; protein id: At4g40100.1
  misc_feature (124)..(178): NCBI GI NO: 15236123 NR Description: putative protein; protein id: At4g40100.1
  misc_feature (44)..(178): NCBI GI NO: 33146631 NR Description: putative FH protein interacting protein FIP1
MDSVKDVLGKMGKRFGEAARKTETITGNFWQHLKTGPSITDAAMSRISQVTKVIAEGGYDKIFHQTFEVAPGEKLKKPYACYLSTSAGPVMGVLYLSNVKLAFCSDNPLAYQVGDKTEWSYYKVVIPLAQLRSINSSTSRTNAAEKYIQVVSVDNHGFWFMGFVYYDSAVKNLQEALQEAQNLRA

SEQ ID NO: 29122 - protein, 175 aa, Zea mays subsp. mays
  peptide (1)..(175): Ceres Seq. ID no. 12340865
  misc_feature (51)..(128): Pfam Name: Pfam Description:  GRAM domain
  misc_feature (1)..(175): NCBI GI NO: 34902414 NR Description: Putative FH protein interacting protein FIP1
  misc_feature (1)..(168): NCBI GI NO: 34906818 NR Description: contains EST C91668
  misc_feature (1)..(175): NCBI GI NO: 18399985 NR Description: Expressed protein; protein id: At2g22475
  misc_feature (1)..(168): NCBI GI NO: 15217869 NR Description: FH protein interacting protein FIP1
  misc_feature (1)..(175): NCBI GI NO: 21592789 NR Description: unknown [Arabidopsis thaliana]
  misc_feature (1)..(175): NCBI GI NO: 26452129 NR Description: unknown protein [Arabidopsis thaliana]
  misc_feature (1)..(168): NCBI GI NO: 29788871 NR Description: putative ABA-responsive protein
  misc_feature (1)..(86): NCBI GI NO: 15236123 NR Description: putative protein; protein id: At4g40100.1
  misc_feature (114)..(168): NCBI GI NO: 15236123 NR Description: putative protein; protein id: At4g40100.1
  misc_feature (34)..(168): NCBI GI NO: 33146631 NR Description: putative FH protein interacting protein FIP1
MGKRFGEAARKTETITGNFWQHLKTGPSITDAAMSRISQVTKVIAEGGYDKIFHQTFEVAPGEKLKKPYACYLSTSAGPVMGVLYLSNVKLAFCSDNPLAYQVGDKTEWSYYKVVIPLAQLRSINSSTSRTNAAEKYIQVVSVDNHGFWFMGFVYYDSAVKNLQEALQEAQNLRA

SEQ ID NO: 29123 - DNA, 1352 bp, Zea mays subsp. mays
  misc_feature (1)..(1352): Ceres Seq. ID no. 12556765
gcacgagaccattacctagaacatcctaatcgaaaagagaaaataataattaaaaaaaagcagtgaaccttctcgcgctcggcagttggcagtcctgtcctgtggaccgtatgacgtgtttatttatgggcggcgccttcgtctccactccccaccggaggaaggaagcgagaagaccagaagggatggcaaccggtagtgaagcctcgaaggcagctgaggctgtggttgactggcataaacacgacagcaagaggatgctccatgcggtttaccgtgttggggatctggaccgcacaatcaagtactacacggaatgctttgggatgaaactgctgaggaaaagggatgttcctgatgagaagtacaccaatgccttccttggctttgggccagagaacaccaactttgcagttgaattgacatacaactatggcgttgacaagtatgacattggaacgggctttgggcatttcgcaattgctaatgatgatgtgtacaagttagctgagaatatcaaatccaagggtggtaagatcacccgcgaacctggtcctgtcaagggaggatccactgttattgccttcgcacaggatcctgatggctacatgtttgagcttatccagagggctgacacacctgagcctctttgccaggtcatgcttcgtgttggtgaccttgagcgttctatcaagttttatgagaaggccctagggatgaagctcctaaggaagaaggatgtacctgattacaagtataccattgccatgttgggctatgctgatgaggacaagacaactgttctggagctgacgtacaactatggagtcacagaatacagcaagggcaatgcatatgctcaggttgccattggcaccaatgatgtgtacaagagcgccgaggcggttgatctggcgaccaaagaactaggtggcaagattttgcggcagccagggcctctacctgggatcaacactaagatcgcctcttttgttgatccagatggctggaaagtggttctggttgacaacaccgacttcctcaaggaactccactgaaggctcgggatacccaggtgctgtgctaggatgtagtaatgcttgtctgtggtgtaataagatgtgggtggtttgtttctgccctgatgaacttataatactgaatgttgctacagaggttgtgcttctgccagtgaggtttgggatttgctatgtaactgtgcctgcgggctccgattctggcgctgttcgtacactgtagaagccagtgaatcccaataaacccagcttcacaggctcctcttatcccgtagaccctagttgtttttgggtggagctggagccactgacccc

SEQ ID NO: 29124 - protein, 315 aa, Zea mays subsp. mays
  peptide (1)..(315): Ceres Seq. ID no. 12556766
  misc_feature (26)..(314): NCBI GI NO: 4126809 NR Description: glyoxalase I
  misc_feature (26)..(314): NCBI GI NO: 16580747 NR Description: glyoxalase I
  misc_feature (33)..(314): NCBI GI NO: 1808684 NR Description: hypothetical protein [Sporobolus stapfianus]
  misc_feature (26)..(314): NCBI GI NO: 2213425 NR Description: hypothetical protein [Citrus x paradisi]
  misc_feature (10)..(314): NCBI GI NO: 15220397 NR Description: glyoxalase I, putative
  misc_feature (36)..(314): NCBI GI NO: 15221116 NR Description: glyoxalase I, putative
  misc_feature (10)..(314): NCBI GI NO: 21537360 NR Description: glyoxalase I, putative [Arabidopsis thaliana]
  misc_feature (36)..(314): NCBI GI NO: 15810219 NR Description: putative lactoylglutathione lyase
  misc_feature (10)..(314): NCBI GI NO: 25350143 NR Description: protein F1N21.10 [imported] - Arabidopsis thaliana
  misc_feature (42)..(314): NCBI GI NO: 7619802 NR Description: putative glyoxalase I [Triticum aestivum]
MTCLFMGGAFVSTPHRRKEARRPEGMATGSEASKAAEAVVDWHKHDSKRMLHAVYRVGDLDRTIKYYTECFGMKLLRKRDVPDEKYTNAFLGFGPENTNFAVELTYNYGVDKYDIGTGFGHFAIANDDVYKLAENIKSKGGKITREPGPVKGGSTVIAFAQDPDGYMFELIQRADTPEPLCQVMLRVGDLERSIKFYEKALGMKLLRKKDVPDYKYTIAMLGYADEDKTTVLELTYNYGVTEYSKGNAYAQVAIGTNDVYKSAEAVDLATKELGGKILRQPGPLPGINTKIASFVDPDGWKVVLVDNTDFLKELH

SEQ ID NO: 29125 - protein, 310 aa, Zea mays subsp. mays
  peptide (1)..(310): Ceres Seq. ID no. 12556767
  misc_feature (21)..(309): NCBI GI NO: 4126809 NR Description: glyoxalase I
  misc_feature (21)..(309): NCBI GI NO: 16580747 NR Description: glyoxalase I
  misc_feature (28)..(309): NCBI GI NO: 1808684 NR Description: hypothetical protein [Sporobolus stapfianus]
  misc_feature (21)..(309): NCBI GI NO: 2213425 NR Description: hypothetical protein [Citrus x paradisi]
  misc_feature (5)..(309): NCBI GI NO: 15220397 NR Description: glyoxalase I, putative
  misc_feature (31)..(309): NCBI GI NO: 15221116 NR Description: glyoxalase I, putative
  misc_feature (5)..(309): NCBI GI NO: 21537360 NR Description: glyoxalase I, putative [Arabidopsis thaliana]
  misc_feature (31)..(309): NCBI GI NO: 15810219 NR Description: putative lactoylglutathione lyase
  misc_feature (5)..(309): NCBI GI NO: 25350143 NR Description: protein F1N21.10 [imported] - Arabidopsis thaliana
  misc_feature (37)..(309): NCBI GI NO: 7619802 NR Description: putative glyoxalase I [Triticum aestivum]
MGGAFVSTPHRRKEARRPEGMATGSEASKAAEAVVDWHKHDSKRMLHAVYRVGDLDRTIKYYTECFGMKLLRKRDVPDEKYTNAFLGFGPENTNFAVELTYNYGVDKYDIGTGFGHFAIANDDVYKLAENIKSKGGKITREPGPVKGGSTVIAFAQDPDGYMFELIQRADTPEPLCQVMLRVGDLERSIKFYEKALGMKLLRKKDVPDYKYTIAMLGYADEDKTTVLELTYNYGVTEYSKGNAYAQVAIGTNDVYKSAEAVDLATKELGGKILRQPGPLPGINTKIASFVDPDGWKVVLVDNTDFLKELH

SEQ ID NO: 29126 - protein, 290 aa, Zea mays subsp. mays
  peptide (1)..(290): Ceres Seq. ID no. 12556768
  misc_feature (1)..(289): NCBI GI NO: 4126809 NR Description: glyoxalase I
  misc_feature (1)..(289): NCBI GI NO: 16580747 NR Description: glyoxalase I
  misc_feature (8)..(289): NCBI GI NO: 1808684 NR Description: hypothetical protein [Sporobolus stapfianus]
  misc_feature (1)..(289): NCBI GI NO: 2213425 NR Description: hypothetical protein [Citrus x paradisi]
  misc_feature (1)..(289): NCBI GI NO: 15220397 NR Description: glyoxalase I, putative
  misc_feature (11)..(289): NCBI GI NO: 15221116 NR Description: glyoxalase I, putative
  misc_feature (1)..(289): NCBI GI NO: 21537360 NR Description: glyoxalase I, putative [Arabidopsis thaliana]
  misc_feature (11)..(289): NCBI GI NO: 15810219 NR Description: putative lactoylglutathione lyase
  misc_feature (1)..(289): NCBI GI NO: 25350143 NR Description: protein F1N21.10 [imported] - Arabidopsis thaliana
  misc_feature (17)..(289): NCBI GI NO: 7619802 NR Description: putative glyoxalase I [Triticum aestivum]
MATGSEASKAAEAVVDWHKHDSKRMLHAVYRVGDLDRTIKYYTECFGMKLLRKRDVPDEKYTNAFLGFGPENTNFAVELTYNYGVDKYDIGTGFGHFAIANDDVYKLAENIKSKGGKITREPGPVKGGSTVIAFAQDPDGYMFELIQRADTPEPLCQVMLRVGDLERSIKFYEKALGMKLLRKKDVPDYKYTIAMLGYADEDKTTVLELTYNYGVTEYSKGNAYAQVAIGTNDVYKSAEAVDLATKELGGKILRQPGPLPGINTKIASFVDPDGWKVVLVDNTDFLKELH

SEQ ID NO: 29127 - DNA, 1423 bp, Zea mays subsp. mays
  misc_feature (1)..(1423): Ceres Seq. ID no. 12408806
aaattctcgaagataacgaccaagagattaaaaaagtatcttcatgggttcgctctcacagcccacgcaggaggcaccgaacattctagccctctgtggtgtcaacggcaaggcaaagcgaacgcatcaagttcgccgtccaaaccagcagcagcctccatcggacggcagagagcagccgctcgccacttggattcaaacgccccgtcactctaatcgcgtagaaactaccaaattacccctagccccctccctcagtctccctgcagctgctccgtcggaacggacaaccgcggccatcccccagccccccctcttgctgcacactcgcactgctagggttcgctcgcaatccagcctctacgccatggcgaagacaaagcaagggaagcgggacgtcgacgcctacaccatcaagggcaccaacaaggtggtccgagtgggggactgcgtgctgatgcggccggcggacacggacaagccgccgtacgtggcgcgggtggagcggatggagtcggacgggcgcggcggcgtgcgggtgagggtgcgctggtactaccgcccggaggaggccaagggcggccgccgcccgttccacggctccaaggagctcttcctctccgaccacttggacacgcagagcgcgcacaccattgagggcaagtgcatcgttcactccttcaagagctacaccaagctcgacaacgtcggcccggaggacttctactgccgatttgactacaaggccgccaccggtgcattcacccccgaccgtgtcgccgtgtattgcaagtgtgagatgccgtacaacccagacgacctcatggtgcagtgtgaaggctgcaaggactggttccatccgtcttgtatgggaatgaccattgagcaagccaaaaagatagatcattacatgtgctcggattgtgctgaaaaaaatggtgcaaagagaccctcaaattcatacccagtttcaccaaactctgattctaagatcgaatcaaagaggcgcaagagataaattctggcaaaggagatcgatatggcgtctgctcctcattactgatgcatattgagatgtacactgcgagagaagagccaagccaattgtaggacaaaacttgcttaacttatcattcttctgtgtattctggggacgtttcctgcagcttagacatttagtgtgatgagtaggtcagtcagtccccccccccgctgcagcgcgcgcatgatcagctgctggtggcgggataagtcgggaaatgctagagcgctgatgattctgtcgatgtaactttatcgggttgtgtgtgtgtgttttaacatatgcactggctggaaacattcccatgtgtgaatgggcgatgctgatgatagcttgactgctgtttcataattcagttagatgttgccaagcaaagacttg

SEQ ID NO: 29128 - protein, 324 aa, Zea mays subsp. mays
  peptide (1)..(324): Ceres Seq. ID no. 12408807
  misc_feature (128)..(244): Pfam Name: Pfam Description:  BAH domain
  misc_feature (109)..(324): NCBI GI NO: 37573088 NR Description: receptor like protein
  misc_feature (109)..(316): NCBI GI NO: 34904940 NR Description: OSJNBa0077M12.13
  misc_feature (109)..(324): NCBI GI NO: 33146914 NR Description: putative ES43 protein
  misc_feature (134)..(317): NCBI GI NO: 11292613 NR Description: receptor like protein - Arabidopsis thaliana
  misc_feature (139)..(317): NCBI GI NO: 15234729 NR Description: receptor like protein
  misc_feature (109)..(324): NCBI GI NO: 34897170 NR Description: putative DNA-binding protein
  misc_feature (109)..(321): NCBI GI NO: 18420377 NR Description: ES43 like protein; protein id: At4g39100
  misc_feature (109)..(321): NCBI GI NO: 21595796 NR Description: ES43 like protein [Arabidopsis thaliana]
  misc_feature (109)..(317): NCBI GI NO: 7484948 NR Description: ES43 protein homolog F19H22
  misc_feature (116)..(324): NCBI GI NO: 629783 NR Description: ES43 protein - barley
MGSLSQPTQEAPNILALCGVNGKAKRTHQVRRPNQQQPPSDGREQPLATWIQTPRHSNRVETTKLPLAPSLSLPAAAPSERTTAAIPQPPLLLHTRTARVRSQSSLYAMAKTKQGKRDVDAYTIKGTNKVVRVGDCVLMRPADTDKPPYVARVERMESDGRGGVRVRVRWYYRPEEAKGGRRPFHGSKELFLSDHLDTQSAHTIEGKCIVHSFKSYTKLDNVGPEDFYCRFDYKAATGAFTPDRVAVYCKCEMPYNPDDLMVQCEGCKDWFHPSCMGMTIEQAKKIDHYMCSDCAEKNGAKRPSNSYPVSPNSDSKIESKRRKR

SEQ ID NO: 29129 - protein, 216 aa, Zea mays subsp. mays
  peptide (1)..(216): Ceres Seq. ID no. 12408808
  misc_feature (20)..(136): Pfam Name: Pfam Description:  BAH domain
  misc_feature (1)..(216): NCBI GI NO: 37573088 NR Description: receptor like protein
  misc_feature (1)..(208): NCBI GI NO: 34904940 NR Description: OSJNBa0077M12.13
  misc_feature (1)..(216): NCBI GI NO: 33146914 NR Description: putative ES43 protein
  misc_feature (26)..(209): NCBI GI NO: 11292613 NR Description: receptor like protein - Arabidopsis thaliana
  misc_feature (31)..(209): NCBI GI NO: 15234729 NR Description: receptor like protein
  misc_feature (1)..(216): NCBI GI NO: 34897170 NR Description: putative DNA-binding protein
  misc_feature (1)..(213): NCBI GI NO: 18420377 NR Description: ES43 like protein; protein id: At4g39100
  misc_feature (1)..(213): NCBI GI NO: 21595796 NR Description: ES43 like protein [Arabidopsis thaliana]
  misc_feature (1)..(209): NCBI GI NO: 7484948 NR Description: ES43 protein homolog F19H22
  misc_feature (8)..(216): NCBI GI NO: 629783 NR Description: ES43 protein - barley
MAKTKQGKRDVDAYTIKGTNKVVRVGDCVLMRPADTDKPPYVARVERMESDGRGGVRVRVRWYYRPEEAKGGRRPFHGSKELFLSDHLDTQSAHTIEGKCIVHSFKSYTKLDNVGPEDFYCRFDYKAATGAFTPDRVAVYCKCEMPYNPDDLMVQCEGCKDWFHPSCMGMTIEQAKKIDHYMCSDCAEKNGAKRPSNSYPVSPNSDSKIESKRRKR

SEQ ID NO: 29130 - protein, 186 aa, Zea mays subsp. mays
  peptide (1)..(186): Ceres Seq. ID no. 12408809
  misc_feature (1)..(106): Pfam Name: Pfam Description:  BAH domain
  misc_feature (1)..(186): NCBI GI NO: 37573088 NR Description: receptor like protein
  misc_feature (1)..(178): NCBI GI NO: 34904940 NR Description: OSJNBa0077M12.13
  misc_feature (1)..(186): NCBI GI NO: 33146914 NR Description: putative ES43 protein
  misc_feature (1)..(179): NCBI GI NO: 11292613 NR Description: receptor like protein - Arabidopsis thaliana
  misc_feature (1)..(179): NCBI GI NO: 15234729 NR Description: receptor like protein
  misc_feature (1)..(186): NCBI GI NO: 34897170 NR Description: putative DNA-binding protein
  misc_feature (1)..(183): NCBI GI NO: 18420377 NR Description: ES43 like protein; protein id: At4g39100
  misc_feature (1)..(183): NCBI GI NO: 21595796 NR Description: ES43 like protein [Arabidopsis thaliana]
  misc_feature (1)..(179): NCBI GI NO: 7484948 NR Description: ES43 protein homolog F19H22
  misc_feature (1)..(186): NCBI GI NO: 629783 NR Description: ES43 protein - barley
MRPADTDKPPYVARVERMESDGRGGVRVRVRWYYRPEEAKGGRRPFHGSKELFLSDHLDTQSAHTIEGKCIVHSFKSYTKLDNVGPEDFYCRFDYKAATGAFTPDRVAVYCKCEMPYNPDDLMVQCEGCKDWFHPSCMGMTIEQAKKIDHYMCSDCAEKNGAKRPSNSYPVSPNSDSKIESKRRKR

SEQ ID NO: 29131 - DNA, 1648 bp, Zea mays subsp. mays
  misc_feature (1)..(1648): Ceres Seq. ID no. 12567042
aaaacggtcacccgttctacgcttggcttggctgcgctgcgcacaccgaacccctcgccgtcgcggctcgcctcggctccgccccgaccgaccgatcgatccggccggcggtgggcgccatggcctcccccaaccccgaggccgcggggctgcaggccgtggctgtggcgggggcaggggagggcggctcgtcctcgtcgctcagcgccgttgcgggagcggctgcgttgtccggggagctggtgcccaggagggcgttggcgctgcgcaaggagcgcgtgtgcacggccaaggagcgcatcagccgcatgcctccctgtgcggcggggaagcggagctccatctaccgcggggtcacccggcataggtggacaggtcgatatgaggctcacctttgggacaaaagcacgtggaatcagaatcagaacaaaaagggcaaacaggtatatctaggtgcatatgatgatgaagaggctgcagcaagggccctatgaccttgctgcattaaaatactggggagctggaacacaaataaatttcccagtatctgactatgcaagagaccttgaagagatgcagatgatatccaaggaggattatctcgtgtctcttaggagaaagagcagtgccttctacagggggttaccaaaatatcgtgggcttcttaggcaacttcataattccagatgggatacatctttgggactcggcaatgactacatgagccttagttgtggcaaggatatcatgttggatgggaaatttgcaggaagctttggtctagagaggaaaattgatcttacaaattacatccggtggtggctaccaaagaagacaaggcagtcagatacatctaaaacagaagaaattgctgatgaaattcgagctattgaaagttcaatgcaacagactgaaccctataagttgccttctcttggcttcagttctccatcaaagccctcttcaatgggcttatcagcatgcagcatattatctcagtctgatgcctttaaaagcttcttggagaagtctacaaaattatctgaagaatgtagtcttagcaaagaaattgttgaaggaaagactgttgcctcggtacctgctactggatatgatacaggggcaattaatattaacatgaatgagttgctagtacaaagatctacttactcaatggcccctgttatgcctacaccaatgaagagtacctggagccctgctgatccttccgtggatccacttttttggagcaactttgttttgccatcgagtcaacctgttacaatggcgacaataacaacaacaacgtttgcaaagaatgaggtaagttcaagtgatccattccagagccaagagtgactgcacgagcttactgaagcaggatattttagattggtcaaagacagcatcccgtgcgtcaactagattctttttgtcaagcttttgatgtcgcaacttgtgagcaatactccttgtttatccatacttcataggacatgaatagaaggtatgacaagtgcaagcatagttatgtaatatacagtggctagttgccagaaaatgagatttagttgtgtagagctgtttgtacatattgagatggttgtttcagttcaatctcaacaggtttgaggaaaatatccaacgg

SEQ ID NO: 29132 - protein, 299 aa, Zea mays subsp. mays
  peptide (1)..(299): Ceres Seq. ID no. 12567043
  misc_feature (11)..(199): NCBI GI NO: 18405784 NR Description: putative AP2 domain transcription factor
  misc_feature (11)..(199): NCBI GI NO: 21593696 NR Description: putative AP2 domain transcription factor
  misc_feature (11)..(199): NCBI GI NO: 25408750 NR Description: probable AP2 domain transcription factor
  misc_feature (11)..(160): NCBI GI NO: 26452593 NR Description: putative AP2 domain transcription factor
  misc_feature (11)..(160): NCBI GI NO: 30688760 NR Description: ovule development protein, putative
  misc_feature (126)..(283): NCBI GI NO: 21593696 NR Description: putative AP2 domain transcription factor
  misc_feature (126)..(283): NCBI GI NO: 18405784 NR Description: putative AP2 domain transcription factor
  misc_feature (126)..(283): NCBI GI NO: 30688760 NR Description: ovule development protein, putative
  misc_feature (126)..(283): NCBI GI NO: 26452593 NR Description: putative AP2 domain transcription factor
  misc_feature (126)..(275): NCBI GI NO: 25408750 NR Description: probable AP2 domain transcription factor
MMMKRLQQGPYDLAALKYWGAGTQINFPVSDYARDLEEMQMISKEDYLVSLRRKSSAFYRGLPKYRGLLRQLHNSRWDTSLGLGNDYMSLSCGKDIMLDGKFAGSFGLERKIDLTNYIRWWLPKKTRQSDTSKTEEIADEIRAIESSMQQTEPYKLPSLGFSSPSKPSSMGLSACSILSQSDAFKSFLEKSTKLSEECSLSKEIVEGKTVASVPATGYDTGAININMNELLVQRSTYSMAPVMPTPMKSTWSPADPSVDPLFWSNFVLPSSQPVTMATITTTTFAKNEVSSSDPFQSQE

SEQ ID NO: 29133 - protein, 298 aa, Zea mays subsp. mays
  peptide (1)..(298): Ceres Seq. ID no. 12567044
  misc_feature (10)..(198): NCBI GI NO: 18405784 NR Description: putative AP2 domain transcription factor
  misc_feature (10)..(198): NCBI GI NO: 25408750 NR Description: probable AP2 domain transcription factor
  misc_feature (10)..(198): NCBI GI NO: 21593696 NR Description: putative AP2 domain transcription factor
  misc_feature (10)..(159): NCBI GI NO: 26452593 NR Description: putative AP2 domain transcription factor
  misc_feature (10)..(159): NCBI GI NO: 30688760 NR Description: ovule development protein, putative
  misc_feature (125)..(282): NCBI GI NO: 21593696 NR Description: putative AP2 domain transcription factor
  misc_feature (125)..(282): NCBI GI NO: 18405784 NR Description: putative AP2 domain transcription factor
  misc_feature (125)..(282): NCBI GI NO: 26452593 NR Description: putative AP2 domain transcription factor
  misc_feature (125)..(282): NCBI GI NO: 30688760 NR Description: ovule development protein, putative
  misc_feature (125)..(274): NCBI GI NO: 25408750 NR Description: probable AP2 domain transcription factor
MMKRLQQGPYDLAALKYWGAGTQINFPVSDYARDLEEMQMISKEDYLVSLRRKSSAFYRGLPKYRGLLRQLHNSRWDTSLGLGNDYMSLSCGKDIMLDGKFAGSFGLERKIDLTNYIRWWLPKKTRQSDTSKTEEIADEIRAIESSMQQTEPYKLPSLGFSSPSKPSSMGLSACSILSQSDAFKSFLEKSTKLSEECSLSKEIVEGKTVASVPATGYDTGAININMNELLVQRSTYSMAPVMPTPMKSTWSPADPSVDPLFWSNFVLPSSQPVTMATITTTTFAKNEVSSSDPFQSQE

SEQ ID NO: 29134 - protein, 297 aa, Zea mays subsp. mays
  peptide (1)..(297): Ceres Seq. ID no. 12567045
  misc_feature (9)..(197): NCBI GI NO: 18405784 NR Description: putative AP2 domain transcription factor
  misc_feature (9)..(197): NCBI GI NO: 25408750 NR Description: probable AP2 domain transcription factor
  misc_feature (9)..(197): NCBI GI NO: 21593696 NR Description: putative AP2 domain transcription factor
  misc_feature (9)..(158): NCBI GI NO: 26452593 NR Description: putative AP2 domain transcription factor
  misc_feature (9)..(158): NCBI GI NO: 30688760 NR Description: ovule development protein, putative
  misc_feature (124)..(281): NCBI GI NO: 21593696 NR Description: putative AP2 domain transcription factor
  misc_feature (124)..(281): NCBI GI NO: 18405784 NR Description: putative AP2 domain transcription factor
  misc_feature (124)..(281): NCBI GI NO: 30688760 NR Description: ovule development protein, putative
  misc_feature (124)..(281): NCBI GI NO: 26452593 NR Description: putative AP2 domain transcription factor
  misc_feature (124)..(273): NCBI GI NO: 25408750 NR Description: probable AP2 domain transcription factor
MKRLQQGPYDLAALKYWGAGTQINFPVSDYARDLEEMQMISKEDYLVSLRRKSSAFYRGLPKYRGLLRQLHNSRWDTSLGLGNDYMSLSCGKDIMLDGKFAGSFGLERKIDLTNYIRWWLPKKTRQSDTSKTEEIADEIRAIESSMQQTEPYKLPSLGFSSPSKPSSMGLSACSILSQSDAFKSFLEKSTKLSEECSLSKEIVEGKTVASVPATGYDTGAININMNELLVQRSTYSMAPVMPTPMKSTWSPADPSVDPLFWSNFVLPSSQPVTMATITTTTFAKNEVSSSDPFQSQE

SEQ ID NO: 29135 - DNA, 1442 bp, Zea mays subsp. mays
  misc_feature (1)..(1442): Ceres Seq. ID no. 12408799
gatccctagctctgcccctctcctccagcgccgctcgccagctctctgcccccgccgcgcccagagatgcagatcccccaccgccgttaccgctgggtgaaggagtgggtctcgcaagaactggtcgtcgccggaggcccctgcgtgctgtacaagtgggtgcgagaggacagactagcagctttgaaggctaaggacaagaagcatggggcagaatctgcaactcctgaacccaactctgaggttctcttcctgtgcagctacgaaggatgtgggaagacattttttgatgcaggggctcttaggaagcatgctcacgtccatggggagaggcaatatatctgtcactatgagaactgtggcaagaaattcttagatagttctaagttgaagagacattttcttattcatacaggagaaaagaattttgtgtgcccacatgaaggttgtgggaaggctttttcgttggattttaatttaaaggcacacatgaaaacacattctgcagataactatcatgtgtgccagtacccagaatgtggccgaagatttacacaagaatcaaaactaagagctcatatcagggcacaacatgagaaagctgtttgcctgcagaatccaggtgcttcggctatgaaccatagtgcaattggagaacagcatcagccccctaagccagcaaaggtctcagcaacgcctccagctccctcagctgagcgcccttacgtctgcccctacgatggttgcgacaaggcatacatccacgagtacaagctgaacctccatttgaaaaaggagcatcccaaccactaccaggatggtggtccacaaggcgctgccccttcaaagcgcagcatctcgaagagttcccataggagcagaccggacatcactgctagaatgccaccagccaaggtctccaagcgcaaaggagggtacgcagcgccatcgccagctgtgaacctccctgaggagcaccttcccgaggagcagcagtggccaaggaaagtgatgtacgaggatgacagcgaggagaccgaggaagaagaggggggcaacaatgtcgaggatagatggaactacaacagagctgctagtagcgatgatgaggaaaccgaagacgaacaatgagcttctagcaggcgtccatctgttctgtagttgtgcatataccataaattttaaactttgagggttatagtttttgcatacatgtaaaattttaaaataaggcggacttgttgtagacagcataggttgtaggtggtctgccccttctcaatcagacatgccatgagttcagaaaggataatggatcattgttctcgtttcgcttgtttttgtgtttgtgtttgtgccttttggttcgttatcacagatgagttattactgtaaccctgatttcagtgtttggcaatcaatctcgtcagccttacatttgt

SEQ ID NO: 29136 - protein, 354 aa, Zea mays subsp. mays
  peptide (1)..(354): Ceres Seq. ID no. 12408800
  misc_feature (220)..(245): Pfam Name: Pfam Description:  Zinc finger, C2H2 type
  misc_feature (48)..(303): NCBI GI NO: 4927259 NR Description: putative transcription repressor maize TRM protein
  misc_feature (9)..(354): NCBI GI NO: 4519673 NR Description: WREBP-2 [Nicotiana tabacum]
  misc_feature (1)..(353): NCBI GI NO: 30680251 NR Description: expressed protein [Arabidopsis thaliana]
  misc_feature (1)..(191): NCBI GI NO: 18149203 NR Description: unknown protein [Arabidopsis thaliana]
  misc_feature (237)..(353): NCBI GI NO: 18149203 NR Description: unknown protein [Arabidopsis thaliana]
  misc_feature (64)..(172): NCBI GI NO: 2565032 NR Description: transcription activator/repressor proteindelta/YY1
  misc_feature (64)..(179): NCBI GI NO: 88893 NR Description: transcription repressor protein YY1 - human
  misc_feature (64)..(179): NCBI GI NO: 27545350 NR Description: YY1 transcription factor [Rattus norvegicus]
  misc_feature (64)..(179): NCBI GI NO: 189174 NR Description: DNA-binding protein
  misc_feature (64)..(179): NCBI GI NO: 1079317 NR Description: transcription activator/repressor protein delta/YY1
MQIPHRRYRWVKEWVSQELVVAGGPCVLYKWVREDRLAALKAKDKKHGAESATPEPNSEVLFLCSYEGCGKTFFDAGALRKHAHVHGERQYICHYENCGKKFLDSSKLKRHFLIHTGEKNFVCPHEGCGKAFSLDFNLKAHMKTHSADNYHVCQYPECGRRFTQESKLRAHIRAQHEKAVCLQNPGASAMNHSAIGEQHQPPKPAKVSATPPAPSAERPYVCPYDGCDKAYIHEYKLNLHLKKEHPNHYQDGGPQGAAPSKRSISKSSHRSRPDITARMPPAKVSKRKGGYAAPSPAVNLPEEHLPEEQQWPRKVMYEDDSEETEEEEGGNNVEDRWNYNRAASSDDEETEDEQ

SEQ ID NO: 29137 - protein, 213 aa, Zea mays subsp. mays
  peptide (1)..(213): Ceres Seq. ID no. 12408801
  misc_feature (79)..(104): Pfam Name: Pfam Description:  Zinc finger, C2H2 type
  misc_feature (1)..(162): NCBI GI NO: 4927259 NR Description: putative transcription repressor maize TRM protein
  misc_feature (1)..(213): NCBI GI NO: 4519673 NR Description: WREBP-2 [Nicotiana tabacum]
  misc_feature (1)..(212): NCBI GI NO: 30680251 NR Description: expressed protein [Arabidopsis thaliana]
  misc_feature (1)..(50): NCBI GI NO: 18149203 NR Description: unknown protein [Arabidopsis thaliana]
  misc_feature (96)..(212): NCBI GI NO: 18149203 NR Description: unknown protein [Arabidopsis thaliana]
  misc_feature (1)..(31): NCBI GI NO: 2565032 NR Description: transcription activator/repressor proteindelta/YY1
  misc_feature (1)..(38): NCBI GI NO: 88893 NR Description: transcription repressor protein YY1 - human
  misc_feature (1)..(38): NCBI GI NO: 189174 NR Description: DNA-binding protein
  misc_feature (1)..(38): NCBI GI NO: 4507955 NR Description: YY1 transcription factor [Homo sapiens]
  misc_feature (1)..(38): NCBI GI NO: 1079317 NR Description: transcription activator/repressor protein delta/YY1
MKTHSADNYHVCQYPECGRRFTQESKLRAHIRAQHEKAVCLQNPGASAMNHSAIGEQHQPPKPAKVSATPPAPSAERPYVCPYDGCDKAYIHEYKLNLHLKKEHPNHYQDGGPQGAAPSKRSISKSSHRSRPDITARMPPAKVSKRKGGYAAPSPAVNLPEEHLPEEQQWPRKVMYEDDSEETEEEEGGNNVEDRWNYNRAASSDDEETEDEQ

SEQ ID NO: 29138 - DNA, 1833 bp, Zea mays subsp. mays
  misc_feature (1)..(1833): Ceres Seq. ID no. 12405464
atctcccatcccatccagccatcctccgctttcccttcccctcgccgccccccaccccccagatcggcaaatccgcccgcacctaccccgcgcgcgtcgcgcgtcccggatggccatcgtctcctccgcccgactcgtggttccgtagcatgggccactccccctcttccctttccaaatccggcccctcctctccaccgcgccgcagcaggtcgttctcccccatggcgccgccgcagcagctgcggctgaccgcgccgttgcaggtcgctgcggggggcagcggcagcgactcgtcctcctcgttcgtgccccccgctcgggactacacccaagacctgcccgacgagatcctcgcgctggtattcgcgtcgctctcgcccaccgaccgcaacgcctgctccctcacctgctcccgatggatggaggtcgacgccaccacgcgccaccggctctccctcgacgcccgcgccgcgctgggcaacgcggccaccgcgctgttctcgcggttcacggctgtcacgaagctcgcgctccgctgcgcgcgcgactcaggattggacagcctctccgaccacggcgctgcggcgctggccgccgcgcttccctcggagcgcctcgccaggctcaagctccgcggtctaaggaagctctccgacgccgggctagcctccctcgctgccggcgcgccagcgatccgcaagctctctattgcgtcctgcaccttcggacccagggcattcgtcgccgtgctccagtcgtgccccctcctcgaggacctctccgtcaagcgcctccgcagcgtagcagacacgtccggtgccgccagttccattgctgaggagatcaagtttccaccggctttgtccctgcgttcggtttgcgtcaaggatctatataacgctctgtgctttgtgccgcttgtggcgtcctcaccgaacctccgctccctcaagatactgcggtgctccggcgcctgggacctgccattggaggtcatcgctgcacgtgctcctggccttgttgagcttcaccttgagaagctacaggttggcgaccgtgggcttgcggcgctttccgcctgtgccaatctggaagttctgttccttgtcaagacccctgagtgcactgattcaggcatcatcagtgttgccgagaagtgccacaaactccgcaaactgcatgtggatgggtggcgcacaaacaggattggagatttcggactcatggctgtggcacgaggatgtccagatctgcaggagctcgttttgataggggtcaaccccaccgtgctgagccttcggatgcttggtgagcactgccggttgctggaacggctggcactttgtgggtgtgaaactgtgggggatgctgagatcatttgcttggctgagcgatgggctgcgctcaagaagctctgcatcaagggttgccccgtgtcagatcgtgggatggaagcactaaatggggggtgccccggtttagtcaaggtgaagctgaagagatgtcgtggagtgtcatacgagtgcattgagaacctgaaggttactaggggggagtcattttccatcagcttggatgttgtattggagcatgatgccgggagcactagtgaaaatggtgcacaagagaatggacaggcacaaattacagagctggccggtcaaatgacaggcatggacctcctgaccaatgccgctggcacacaatcatcgattcataccattaacaggatgaggagtgtcatgtcagcgatccggcgtaggtttggcaatcctctgccaccatgatgtgagatggaaactaatgaactgttatttacatcctttatct

SEQ ID NO: 29139 - protein, 595 aa, Zea mays subsp. mays
  peptide (1)..(595): Ceres Seq. ID no. 12405465
  misc_feature (75)..(592): NCBI GI NO: 21743072 NR Description: OSJNBb0002J11.1
  misc_feature (108)..(588): NCBI GI NO: 15220130 NR Description: F-box protein family; protein id: At1g47056.1
  misc_feature (50)..(544): NCBI GI NO: 30013671 NR Description: Avr9/Cf-9 rapidly elicited protein 189
  misc_feature (81)..(526): NCBI GI NO: 18425169 NR Description: SKP1 interacting partner 2
  misc_feature (108)..(591): NCBI GI NO: 18412996 NR Description: F-box protein family, AtFBL8/AtFBL24
  misc_feature (108)..(551): NCBI GI NO: 18409012 NR Description: F-box protein family, AtFBL16
  misc_feature (81)..(377): NCBI GI NO: 15810227 NR Description: putative SKP1 interacting partner SKIP2
  misc_feature (113)..(505): NCBI GI NO: 18414458 NR Description: F-box protein family, AtFBL4; protein id:At4g15475
  misc_feature (113)..(505): NCBI GI NO: 21536497 NR Description: F-box protein family, AtFBL4
  misc_feature (188)..(502): NCBI GI NO: 18414458 NR Description: F-box protein family, AtFBL4; protein id:At4g15475
LPSHPAILRFPFPSPPPTPQIGKSARTYPARVARPGWPSSPPPDSWFRSMGHSPSSLSKSGPSSPPRRSRSFSPMAPPQQLRLTAPLQVAAGGSGSDSSSSFVPPARDYTQDLPDEILALVFASLSPTDRNACSLTCSRWMEVDATTRHRLSLDARAALGNAATALFSRFTAVTKLALRCARDSGLDSLSDHGAAALAAALPSERLARLKLRGLRKLSDAGLASLAAGAPAIRKLSIASCTFGPRAFVAVLQSCPLLEDLSVKRLRSVADTSGAASSIAEEIKFPPALSLRSVCVKDLYNALCFVPLVASSPNLRSLKILRCSGAWDLPLEVIAARAPGLVELHLEKLQVGDRGLAALSACANLEVLFLVKTPECTDSGIISVAEKCHKLRKLHVDGWRTNRIGDFGLMAVARGCPDLQELVLIGVNPTVLSLRMLGEHCRLLERLALCGCETVGDAEIICLAERWAALKKLCIKGCPVSDRGMEALNGGCPGLVKVKLKRCRGVSYECIENLKVTRGESFSISLDVVLEHDAGSTSENGAQENGQAQITELAGQMTGMDLLTNAAGTQSSIHTINRMRSVMSAIRRRFGNPLPP

SEQ ID NO: 29140 - protein, 546 aa, Zea mays subsp. mays
  peptide (1)..(546): Ceres Seq. ID no. 12405466
  misc_feature (26)..(543): NCBI GI NO: 21743072 NR Description: OSJNBb0002J11.1
  misc_feature (59)..(539): NCBI GI NO: 15220130 NR Description: F-box protein family; protein id: At1g47056.1
  misc_feature (1)..(495): NCBI GI NO: 30013671 NR Description: Avr9/Cf-9 rapidly elicited protein 189
  misc_feature (32)..(477): NCBI GI NO: 18425169 NR Description: SKP1 interacting partner 2
  misc_feature (59)..(542): NCBI GI NO: 18412996 NR Description: F-box protein family, AtFBL8/AtFBL24
  misc_feature (59)..(502): NCBI GI NO: 18409012 NR Description: F-box protein family, AtFBL16
  misc_feature (32)..(328): NCBI GI NO: 15810227 NR Description: putative SKP1 interacting partner SKIP2
  misc_feature (64)..(456): NCBI GI NO: 18414458 NR Description: F-box protein family, AtFBL4; protein id:At4g15475
  misc_feature (64)..(456): NCBI GI NO: 21536497 NR Description: F-box protein family, AtFBL4
  misc_feature (139)..(453): NCBI GI NO: 18414458 NR Description: F-box protein family, AtFBL4; protein id:At4g15475
MGHSPSSLSKSGPSSPPRRSRSFSPMAPPQQLRLTAPLQVAAGGSGSDSSSSFVPPARDYTQDLPDEILALVFASLSPTDRNACSLTCSRWMEVDATTRHRLSLDARAALGNAATALFSRFTAVTKLALRCARDSGLDSLSDHGAAALAAALPSERLARLKLRGLRKLSDAGLASLAAGAPAIRKLSIASCTFGPRAFVAVLQSCPLLEDLSVKRLRSVADTSGAASSIAEEIKFPPALSLRSVCVKDLYNALCFVPLVASSPNLRSLKILRCSGAWDLPLEVIAARAPGLVELHLEKLQVGDRGLAALSACANLEVLFLVKTPECTDSGIISVAEKCHKLRKLHVDGWRTNRIGDFGLMAVARGCPDLQELVLIGVNPTVLSLRMLGEHCRLLERLALCGCETVGDAEIICLAERWAALKKLCIKGCPVSDRGMEALNGGCPGLVKVKLKRCRGVSYECIENLKVTRGESFSISLDVVLEHDAGSTSENGAQENGQAQITELAGQMTGMDLLTNAAGTQSSIHTINRMRSVMSAIRRRFGNPLPP

SEQ ID NO: 29141 - protein, 521 aa, Zea mays subsp. mays
  peptide (1)..(521): Ceres Seq. ID no. 12405467
  misc_feature (1)..(518): NCBI GI NO: 21743072 NR Description: OSJNBb0002J11.1
  misc_feature (34)..(514): NCBI GI NO: 15220130 NR Description: F-box protein family; protein id: At1g47056.1
  misc_feature (1)..(470): NCBI GI NO: 30013671 NR Description: Avr9/Cf-9 rapidly elicited protein 189
  misc_feature (7)..(452): NCBI GI NO: 18425169 NR Description: SKP1 interacting partner 2
  misc_feature (34)..(517): NCBI GI NO: 18412996 NR Description: F-box protein family, AtFBL8/AtFBL24
  misc_feature (34)..(477): NCBI GI NO: 18409012 NR Description: F-box protein family, AtFBL16
  misc_feature (7)..(303): NCBI GI NO: 15810227 NR Description: putative SKP1 interacting partner SKIP2
  misc_feature (39)..(431): NCBI GI NO: 18414458 NR Description: F-box protein family, AtFBL4; protein id:At4g15475
  misc_feature (39)..(431): NCBI GI NO: 21536497 NR Description: F-box protein family, AtFBL4
  misc_feature (114)..(428): NCBI GI NO: 18414458 NR Description: F-box protein family, AtFBL4; protein id:At4g15475
MAPPQQLRLTAPLQVAAGGSGSDSSSSFVPPARDYTQDLPDEILALVFASLSPTDRNACSLTCSRWMEVDATTRHRLSLDARAALGNAATALFSRFTAVTKLALRCARDSGLDSLSDHGAAALAAALPSERLARLKLRGLRKLSDAGLASLAAGAPAIRKLSIASCTFGPRAFVAVLQSCPLLEDLSVKRLRSVADTSGAASSIAEEIKFPPALSLRSVCVKDLYNALCFVPLVASSPNLRSLKILRCSGAWDLPLEVIAARAPGLVELHLEKLQVGDRGLAALSACANLEVLFLVKTPECTDSGIISVAEKCHKLRKLHVDGWRTNRIGDFGLMAVARGCPDLQELVLIGVNPTVLSLRMLGEHCRLLERLALCGCETVGDAEIICLAERWAALKKLCIKGCPVSDRGMEALNGGCPGLVKVKLKRCRGVSYECIENLKVTRGESFSISLDVVLEHDAGSTSENGAQENGQAQITELAGQMTGMDLLTNAAGTQSSIHTINRMRSVMSAIRRRFGNPLPP

SEQ ID NO: 29142 - DNA, 775 bp, Zea mays subsp. mays
  misc_feature (1)..(775): Ceres Seq. ID no. 12413965
gagctgaaggcgacggccaaccgctcgaaaagagcaggtcaggaagccgaggctaacggcaagctcgcgcacgacgactccagacttgaagggcgttccggtgaaatctcgtcgtttcagtcgctgtgcgcgcacatctggagggcggtgacgcgcgcgcgccggctgctggctgccgacaagacgacgacgttccgcatggccgtgaactgccggcaccgtctgcgcccggcgatctccccgctctacttcggcaacgcgatccagagcgtggcgacgacggccaccgtagccgagctggcgtccaacgacctgggctgggcggccgcccggctgaacgccaccgtggcgtcgcacaaggacggcgcgatccggcgcgccgcggcggagtgggaggccgcgccccgttgcttcccgctaggcaaccccgacggggcggccctcacgatggggagctcgcctcggttcccgatgtacgacgggaacgacttcgggtggggccgcgcgctcgccgtgcggagcggccgcgcgaacaaattcgacggcaagatgtcttcgttccccggacaggctggggacggtagcatcgacgtggaggtgtgcctcgcgccagacaccatggcgcatctcctcctcgacaaggagttcttgcagtacgtgtcctcccctgcaccgtgaggcggtgacagagtgaatgtgtggcttgttgctgcgcagctacatatagtaactggatttgtaccctttcagcagatatcaagtgcttgccaacttg

SEQ ID NO: 29143 - protein, 225 aa, Zea mays subsp. mays
  peptide (1)..(225): Ceres Seq. ID no. 12413966
  misc_feature (1)..(217): Pfam Name: Pfam Description:  Transferase family
  misc_feature (1)..(221): NCBI GI NO: 34908396 NR Description: P0529E05.24
  misc_feature (35)..(222): NCBI GI NO: 15225603 NR Description: putative anthocyanin 5-aromatic acyltransferase
  misc_feature (1)..(221): NCBI GI NO: 21666314 NR Description: AER [Nicotiana tabacum]
  misc_feature (17)..(221): NCBI GI NO: 15240918 NR Description: anthranilate N-benzoyltransferase - like protein
  misc_feature (36)..(215): NCBI GI NO: 24413968 NR Description: N-hydroxycinnamoyl/benzoyltransferase-like protein~contains EST AU096989
  misc_feature (36)..(221): NCBI GI NO: 15239072 NR Description: N-hydroxycinnamoyl benzoyltransferase-like protein
  misc_feature (36)..(216): NCBI GI NO: 34899602 NR Description: N-hydroxycinnamoyl benzoyltransferase-like protein
  misc_feature (23)..(218): NCBI GI NO: 21636163 NR Description: HCBT-like putative defense response protein
  misc_feature (35)..(222): NCBI GI NO: 15241431 NR Description: N-hydroxycinnamoyl benzoyltransferase
  misc_feature (37)..(225): NCBI GI NO: 38346680 NR Description: OSJNBa0069D17.11
ELKATANRSKRAGQEAEANGKLAHDDSRLEGRSGEISSFQSLCAHIWRAVTRARRLLAADKTTTFRMAVNCRHRLRPAISPLYFGNAIQSVATTATVAELASNDLGWAAARLNATVASHKDGAIRRAAAEWEAAPRCFPLGNPDGAALTMGSSPRFPMYDGNDFGWGRALAVRSGRANKFDGKMSSFPGQAGDGSIDVEVCLAPDTMAHLLLDKEFLQYVSSPAP

SEQ ID NO: 29144 - protein, 159 aa, Zea mays subsp. mays
  peptide (1)..(159): Ceres Seq. ID no. 12413967
  misc_feature (1)..(151): Pfam Name: Pfam Description:  Transferase family
  misc_feature (1)..(155): NCBI GI NO: 34908396 NR Description: P0529E05.24
  misc_feature (1)..(156): NCBI GI NO: 15225603 NR Description: putative anthocyanin 5-aromatic acyltransferase
  misc_feature (1)..(155): NCBI GI NO: 21666314 NR Description: AER [Nicotiana tabacum]
  misc_feature (1)..(155): NCBI GI NO: 15240918 NR Description: anthranilate N-benzoyltransferase - like protein
  misc_feature (1)..(149): NCBI GI NO: 24413968 NR Description: N-hydroxycinnamoyl/benzoyltransferase-like protein~contains EST AU096989
  misc_feature (1)..(155): NCBI GI NO: 15239072 NR Description: N-hydroxycinnamoyl benzoyltransferase-like protein
  misc_feature (1)..(150): NCBI GI NO: 34899602 NR Description: N-hydroxycinnamoyl benzoyltransferase-like protein
  misc_feature (1)..(152): NCBI GI NO: 21636163 NR Description: HCBT-like putative defense response protein
  misc_feature (1)..(156): NCBI GI NO: 15241431 NR Description: N-hydroxycinnamoyl benzoyltransferase
  misc_feature (1)..(159): NCBI GI NO: 38346680 NR Description: OSJNBa0069D17.11
MAVNCRHRLRPAISPLYFGNAIQSVATTATVAELASNDLGWAAARLNATVASHKDGAIRRAAAEWEAAPRCFPLGNPDGAALTMGSSPRFPMYDGNDFGWGRALAVRSGRANKFDGKMSSFPGQAGDGSIDVEVCLAPDTMAHLLLDKEFLQYVSSPAP

SEQ ID NO: 29145 - DNA, 1422 bp, Zea mays subsp. mays
  misc_feature (1)..(1422): Ceres Seq. ID no. 12407902
aacccattcttcggcggttcggcccggcctgcaccctgcagccaccaagcaaacccagtgctctgctttctgcattcccccccgccgccactccgtcgggcttgatgagcctctgctccaagctcttcgcgttgctccgcaagtcccgcgccctcgccaccagcaccgccgccgcagccgccgcgacaacctccgcgacggcgtcggccaacgggatggaggaggctgtcgccgcggcgggcccgctgcgcacgcgcgtctgcatcatcggcagcggcccagccgcgcacacggcggccgtctacgccgcgcgcgccgagctcaagcccgtcctcttcgagggctggctcgccaacgacatcgccgcgggtggacagctcaccaccaccaccgacgtcgagaacttcccgggcttccccgacggcatcctcggcgccgacctcatggatcgctgccgcgcgcagtcgctcaggttcgggaccaagatcctcaccgagaccgtcaccaccgtggacttctccgcccgccccttccgtgtcgcctccgacgacaccgttgtgcacgccgactccgtcgtcgtcgccacgggcgccgtcgcgcgcaggctgcacttcgccggctccgacgccttctggaaccggggcatctccgcctgcgccgtctgcgacggggctgcgcctatcttccggaacaagcccatcgccgtcgtcggaggcggggactccgccatggaggaggctaacttcctcaccaagtacggctcgcaagtttacatcatccaccgccgcagcgacttccgggcgtccaagatcatgcaggcgcgcacgctctccaaccccaagatcaaggtcgtctggaactccgaggtcgtcgaggcctacggcggtgcggatggcggcccgctagccggcgtcaaggtcaaggacgtcgtcaccggcgaggtctctgatctccaggtggccgggctcttctttgccatcggtcacgagccggcgacaaaatttcttggagggcagctcgagctcgactctgatgggtatgtggtgaccaagcccggttccacgcacaccagtgtgcagggggtctttgcagctggggatgtccaggacaagaagtaccgccaggccattactgcagctggatcaggttgcatggctgctctggatgcagagcactacctgcaggaggttggagcacaggaagggaagaccgattgactatgtctgggccaagctgctcttgggccaaggaaaacttctccgaaagccgctctctagtggtgtaaacagcacattattatttggttttaggcctcaaattacgttacattggaaattgatttatatgagcgtgcgcaagcttgtatacattattcgcattgtttattactcttagagtcttagtcattaatcacactttgct

SEQ ID NO: 29146 - protein, 404 aa, Zea mays subsp. mays
  peptide (1)..(404): Ceres Seq. ID no. 12407903
  misc_feature (85)..(377): Pfam Name: Pfam Description:  Pyridine nucleotide-disulphide oxidoreductase
  misc_feature (72)..(404): NCBI GI NO: 17826833 NR Description: NADPH-thioredoxin reductase [Triticum aestivum]
  misc_feature (54)..(404): NCBI GI NO: 12644431 NR Description: Thioredoxin reductase 2
  misc_feature (83)..(404): NCBI GI NO: 30679976 NR Description: thioredoxin reductase 2
  misc_feature (84)..(404): NCBI GI NO: 15237010 NR Description: thioredoxin reductase
  misc_feature (84)..(404): NCBI GI NO: 1942055 NR Description: Structure Of Nadph Dependent Thioredoxin Reductase
  misc_feature (84)..(404): NCBI GI NO: 28393819 NR Description: putative thioredoxin reductase (NADPH) 2
  misc_feature (84)..(404): NCBI GI NO: 1076418 NR Description: thioredoxin-disulfide reductase (EC 1.8.1.9) 2
  misc_feature (84)..(404): NCBI GI NO: 468526 NR Description: Thioredoxin reductase [Arabidopsis thaliana]
  misc_feature (107)..(404): NCBI GI NO: 1076358 NR Description: thioredoxin-disulfide reductase (EC 1
  misc_feature (116)..(404): NCBI GI NO: 20466580 NR Description: putative thioredoxin reductase
PILRRFGPACTLQPPSKPSALLSAFPPAATPSGLMSLCSKLFALLRKSRALATSTAAAAAATTSATASANGMEEAVAAAGPLRTRVCIIGSGPAAHTAAVYAARAELKPVLFEGWLANDIAAGGQLTTTTDVENFPGFPDGILGADLMDRCRAQSLRFGTKILTETVTTVDFSARPFRVASDDTVVHADSVVVATGAVARRLHFAGSDAFWNRGISACAVCDGAAPIFRNKPIAVVGGGDSAMEEANFLTKYGSQVYIIHRRSDFRASKIMQARTLSNPKIKVVWNSEVVEAYGGADGGPLAGVKVKDVVTGEVSDLQVAGLFFAIGHEPATKFLGGQLELDSDGYVVTKPGSTHTSVQGVFAAGDVQDKKYRQAITAAGSGCMAALDAEHYLQEVGAQEGKTD

SEQ ID NO: 29147 - protein, 370 aa, Zea mays subsp. mays
  peptide (1)..(370): Ceres Seq. ID no. 12407904
  misc_feature (51)..(343): Pfam Name: Pfam Description:  Pyridine nucleotide-disulphide oxidoreductase
  misc_feature (38)..(370): NCBI GI NO: 17826833 NR Description: NADPH-thioredoxin reductase [Triticum aestivum]
  misc_feature (20)..(370): NCBI GI NO: 12644431 NR Description: Thioredoxin reductase 2
  misc_feature (49)..(370): NCBI GI NO: 30679976 NR Description: thioredoxin reductase 2
  misc_feature (50)..(370): NCBI GI NO: 15237010 NR Description: thioredoxin reductase
  misc_feature (50)..(370): NCBI GI NO: 1942055 NR Description: Structure Of Nadph Dependent Thioredoxin Reductase
  misc_feature (50)..(370): NCBI GI NO: 28393819 NR Description: putative thioredoxin reductase (NADPH) 2
  misc_feature (50)..(370): NCBI GI NO: 1076418 NR Description: thioredoxin-disulfide reductase (EC 1.8.1.9) 2
  misc_feature (50)..(370): NCBI GI NO: 468526 NR Description: Thioredoxin reductase [Arabidopsis thaliana]
  misc_feature (73)..(370): NCBI GI NO: 1076358 NR Description: thioredoxin-disulfide reductase (EC 1
  misc_feature (82)..(370): NCBI GI NO: 20466580 NR Description: putative thioredoxin reductase
MSLCSKLFALLRKSRALATSTAAAAAATTSATASANGMEEAVAAAGPLRTRVCIIGSGPAAHTAAVYAARAELKPVLFEGWLANDIAAGGQLTTTTDVENFPGFPDGILGADLMDRCRAQSLRFGTKILTETVTTVDFSARPFRVASDDTVVHADSVVVATGAVARRLHFAGSDAFWNRGISACAVCDGAAPIFRNKPIAVVGGGDSAMEEANFLTKYGSQVYIIHRRSDFRASKIMQARTLSNPKIKVVWNSEVVEAYGGADGGPLAGVKVKDVVTGEVSDLQVAGLFFAIGHEPATKFLGGQLELDSDGYVVTKPGSTHTSVQGVFAAGDVQDKKYRQAITAAGSGCMAALDAEHYLQEVGAQEGKTD

SEQ ID NO: 29148 - protein, 333 aa, Zea mays subsp. mays
  peptide (1)..(333): Ceres Seq. ID no. 12407905
  misc_feature (14)..(306): Pfam Name: Pfam Description:  Pyridine nucleotide-disulphide oxidoreductase
  misc_feature (1)..(333): NCBI GI NO: 17826833 NR Description: NADPH-thioredoxin reductase [Triticum aestivum]
  misc_feature (1)..(333): NCBI GI NO: 12644431 NR Description: Thioredoxin reductase 2
  misc_feature (12)..(333): NCBI GI NO: 30679976 NR Description: thioredoxin reductase 2
  misc_feature (13)..(333): NCBI GI NO: 15237010 NR Description: thioredoxin reductase
  misc_feature (13)..(333): NCBI GI NO: 1942055 NR Description: Structure Of Nadph Dependent Thioredoxin Reductase
  misc_feature (13)..(333): NCBI GI NO: 28393819 NR Description: putative thioredoxin reductase (NADPH) 2
  misc_feature (13)..(333): NCBI GI NO: 1076418 NR Description: thioredoxin-disulfide reductase (EC 1.8.1.9) 2
  misc_feature (13)..(333): NCBI GI NO: 468526 NR Description: Thioredoxin reductase [Arabidopsis thaliana]
  misc_feature (36)..(333): NCBI GI NO: 1076358 NR Description: thioredoxin-disulfide reductase (EC 1
  misc_feature (45)..(333): NCBI GI NO: 20466580 NR Description: putative thioredoxin reductase
MEEAVAAAGPLRTRVCIIGSGPAAHTAAVYAARAELKPVLFEGWLANDIAAGGQLTTTTDVENFPGFPDGILGADLMDRCRAQSLRFGTKILTETVTTVDFSARPFRVASDDTVVHADSVVVATGAVARRLHFAGSDAFWNRGISACAVCDGAAPIFRNKPIAVVGGGDSAMEEANFLTKYGSQVYIIHRRSDFRASKIMQARTLSNPKIKVVWNSEVVEAYGGADGGPLAGVKVKDVVTGEVSDLQVAGLFFAIGHEPATKFLGGQLELDSDGYVVTKPGSTHTSVQGVFAAGDVQDKKYRQAITAAGSGCMAALDAEHYLQEVGAQEGKTD

SEQ ID NO: 29149 - DNA, 1287 bp, Zea mays subsp. mays
  misc_feature (1)..(1287): Ceres Seq. ID no. 12408795
gcgttgccgcctccttccttccttctcacgaaaaggcaggcaagggaaaggcaaaggccaacccatcccctgcctcctccgttgctctgctgctccccctccttatctaatcctctggttcctggaccccggcctgcaagctcaagcagcagcagcggcgccggcgacgagaagggagtaggaggaggattgctaccatcctatatcatatcatacatatacagagacagcaaggaggaggagaaggtgtgtagcgaggttgagatccggaggatgccttccagtgccatgagttccgggctgttcgtggagtccgcctccggcagcggcgccgagccggtgctctgcgcgcctcggccgcgcagggtccagcaggtgcacccctgcagcgccgacctcatccttggcgcaccgcccttcccgcgcaacgccaacagcaagggcagcagcagcagggaaggaggcaggacgacgaccaggccggcggcggaggacgaggacgaggactgccgctgggcggcgttcggcgggtcgccgccggcgcgcgcggacaacccgctggtgcacgacccccggttcctgcggaaccagcgccacccggcgccgctggagctcgggtcgccgaaccaccggcggccgacctacagcagcggtggcgacggcagcgggtttgcctcgtcgtcgttcgcgccggccgtgaggatccagggcttcgacgtcgccgcgtgccgcgcgtgagagcgagctccggccgggcggggctttggcttttcgatctattaaattaaattaacagcaggtgaggtcaggtcagatcagatcatagtagggaggaaggcgaggagggcgggagggatgggatgagatctcctcttcctcctcctcgcgagggaggcgatccagtcgtatgagtgaagtaaagaagagtactccagtcgtactataggttgatgttcgccgataccacaccacacagcagccggtcaaagggagtgaaaactgattttttgtttacggggttttgtcagcaaggttattaggttttgtgtttgtgctgtagcctgtaagatgtaagctactactagcacgggtctcttgttcgttgatgctgctctgctctggcctctgggtgcccctgtattgtagatataaatcagcacccagttcgggcggtcggccagcgttcgtttttcttctagttgacgaggaggaagaagatgtccgctcctcgccatgtaatgtaaccatggctgtactcctacatacatgcaatcatgtataaagatg

SEQ ID NO: 29150 - protein, 245 aa, Zea mays subsp. mays
  peptide (1)..(245): Ceres Seq. ID no. 12408796
  misc_feature (101)..(245): NCBI GI NO: 34907108 NR Description: OSJNBa0052O12.19
ALPPPSFLLTKRQARERQRPTHPLPPPLLCCSPSLSNPLVPGPRPASSSSSSGAGDEKGVGGGLLPSYIISYIYRDSKEEEKVCSEVEIRRMPSSAMSSGLFVESASGSGAEPVLCAPRPRRVQQVHPCSADLILGAPPFPRNANSKGSSSREGGRTTTRPAAEDEDEDCRWAAFGGSPPARADNPLVHDPRFLRNQRHPAPLELGSPNHRRPTYSSGGDGSGFASSSFAPAVRIQGFDVAACRA

SEQ ID NO: 29151 - protein, 154 aa, Zea mays subsp. mays
  peptide (1)..(154): Ceres Seq. ID no. 12408797
  misc_feature (10)..(154): NCBI GI NO: 34907108 NR Description: OSJNBa0052O12.19
MPSSAMSSGLFVESASGSGAEPVLCAPRPRRVQQVHPCSADLILGAPPFPRNANSKGSSSREGGRTTTRPAAEDEDEDCRWAAFGGSPPARADNPLVHDPRFLRNQRHPAPLELGSPNHRRPTYSSGGDGSGFASSSFAPAVRIQGFDVAACRA

SEQ ID NO: 29152 - protein, 149 aa, Zea mays subsp. mays
  peptide (1)..(149): Ceres Seq. ID no. 12408798
  misc_feature (5)..(149): NCBI GI NO: 34907108 NR Description: OSJNBa0052O12.19
MSSGLFVESASGSGAEPVLCAPRPRRVQQVHPCSADLILGAPPFPRNANSKGSSSREGGRTTTRPAAEDEDEDCRWAAFGGSPPARADNPLVHDPRFLRNQRHPAPLELGSPNHRRPTYSSGGDGSGFASSSFAPAVRIQGFDVAACRA

SEQ ID NO: 29153 - DNA, 1201 bp, Zea mays subsp. mays
  misc_feature (1)..(1201): Ceres Seq. ID no. 12408788
aaaaacaaactaaaatcgagaaacgcgatcgtaagtagcggcggcggcggcgtggcgacagcaggagtaggattggcccagttcaatcgcacggccaatctggtaggcggtcatcgtcagaatccagactccacataccggcccatttacagcaaggaaccgcgaacgccaagctcgtcttctttcttggaagaggggccgctccactcgactgaaagcgcaatcaactctagtctctagccacaactcgaagtacgagtacctccggagtccggatggctgcagcgatggacgtcgacgaagccggcggcgaggagaggcgaccgtcggagaaggagctcttccgcgccgccgagtccggcgacgccgccgcgttcgcctccctcgcccccgccgacctctccctgcgcaacgaggacggccgctccctcctccacgtcgccgccgctgccggccatccccaggtggtgctcgcgcttgcccagtgcggtggtgacgccgcggctagcgtgctgaatgcgcaggacgaggaggggtgggcgccgatccactccgccgcgagctccggcaactctcaaatcgtcgacatcctgcttgagcgaggtgctgatgctaacctggttactgatggtggccgaactgctcttcattatgctgcgagtaaagggaggcttaacatagctgaaaaactaatagcccatggtgctaatgtcaacaagaaagacaagtttggctgcacacctttgcatagagctgcaagcactggaaacgcggagctgtgtgaattcctcattgaggaaggtgctgaagttgatgctgttgacaagacaggacaaacacctcttacgcatgctgttatatgtgagaacaaaggggctgctcttctgctaattagacatggtgctgatgttgatgtcgaggacaaggaaggctacactgcccttggccgagcatcgaacagcttcagacctgcactcatcgatgcagccaaggcaatgctcgaaggatgatctggtgctctgctcaaagacgatggaaagtgtgatacgagaaactgtgctgagtcgaggtgttaaagcttgttctggtgtgtaaacaaaggggctctacagaatcagatttgaccctgctagaattttgcccttgttgggtttatttaaccattgtgactaacatctcataagctaagctttggttctcc

SEQ ID NO: 29154 - protein, 244 aa, Zea mays subsp. mays
  peptide (1)..(244): Ceres Seq. ID no. 12408789
  misc_feature (152)..(184): Pfam Name: Pfam Description:  Ankyrin repeat
  misc_feature (1)..(244): NCBI GI NO: 15341604 NR Description: putative ankyrin [Oryza sativa]
  misc_feature (19)..(244): NCBI GI NO: 30678058 NR Description: ankyrin -related [Arabidopsis thaliana]
  misc_feature (19)..(244): NCBI GI NO: 25295712 NR Description: probable ankyrin [imported] - Arabidopsis thaliana
  misc_feature (14)..(244): NCBI GI NO: 37681913 NR Description: proteasome 26S subunit, non-ATPase, 10
  misc_feature (37)..(244): NCBI GI NO: 4506217 NR Description: proteasome 26S non-ATPase subunit 10 isoform 1
  misc_feature (37)..(244): NCBI GI NO: 39654744 NR Description: Chain A, X-Ray Structure Of Human Gankyrin
  misc_feature (49)..(222): NCBI GI NO: 28274852 NR Description: ankyrin repeat protein E4_2 [synthetic construct]
  misc_feature (37)..(223): NCBI GI NO: 16758980 NR Description: proteasome
  misc_feature (37)..(223): NCBI GI NO: 25990817 NR Description: gankyrin oncoprotein [Mesocricetus auratus]
  misc_feature (37)..(223): NCBI GI NO: 12857852 NR Description: unnamed protein product [Mus musculus]
MAAAMDVDEAGGEERRPSEKELFRAAESGDAAAFASLAPADLSLRNEDGRSLLHVAAAAGHPQVVLALAQCGGDAAASVLNAQDEEGWAPIHSAASSGNSQIVDILLERGADANLVTDGGRTALHYAASKGRLNIAEKLIAHGANVNKKDKFGCTPLHRAASTGNAELCEFLIEEGAEVDAVDKTGQTPLTHAVICENKGAALLLIRHGADVDVEDKEGYTALGRASNSFRPALIDAAKAMLEG

SEQ ID NO: 29155 - protein, 240 aa, Zea mays subsp. mays
  peptide (1)..(240): Ceres Seq. ID no. 12408790
  misc_feature (148)..(180): Pfam Name: Pfam Description:  Ankyrin repeat
  misc_feature (1)..(240): NCBI GI NO: 15341604 NR Description: putative ankyrin [Oryza sativa]
  misc_feature (15)..(240): NCBI GI NO: 30678058 NR Description: ankyrin -related [Arabidopsis thaliana]
  misc_feature (15)..(240): NCBI GI NO: 25295712 NR Description: probable ankyrin [imported] - Arabidopsis thaliana
  misc_feature (10)..(240): NCBI GI NO: 37681913 NR Description: proteasome 26S subunit, non-ATPase, 10
  misc_feature (33)..(240): NCBI GI NO: 4506217 NR Description: proteasome 26S non-ATPase subunit 10 isoform 1
  misc_feature (33)..(240): NCBI GI NO: 39654744 NR Description: Chain A, X-Ray Structure Of Human Gankyrin
  misc_feature (45)..(218): NCBI GI NO: 28274852 NR Description: ankyrin repeat protein E4_2 [synthetic construct]
  misc_feature (33)..(219): NCBI GI NO: 16758980 NR Description: proteasome
  misc_feature (33)..(219): NCBI GI NO: 25990817 NR Description: gankyrin oncoprotein [Mesocricetus auratus]
  misc_feature (33)..(219): NCBI GI NO: 12857852 NR Description: unnamed protein product [Mus musculus]
MDVDEAGGEERRPSEKELFRAAESGDAAAFASLAPADLSLRNEDGRSLLHVAAAAGHPQVVLALAQCGGDAAASVLNAQDEEGWAPIHSAASSGNSQIVDILLERGADANLVTDGGRTALHYAASKGRLNIAEKLIAHGANVNKKDKFGCTPLHRAASTGNAELCEFLIEEGAEVDAVDKTGQTPLTHAVICENKGAALLLIRHGADVDVEDKEGYTALGRASNSFRPALIDAAKAMLEG

SEQ ID NO: 29156 - DNA, 1848 bp, Zea mays subsp. mays
  misc_feature (1)..(1848): Ceres Seq. ID no. 12372600
gcacgagaccattacctagaacatcctaatcgaaaacccatccggcctcccccccgtctcgatagtcgataccaggttctaaatggcgatggcgatgatggctatgcgacgcgcggtggcgctcggcgctcgccacatccccgccgccgcagcctcttcgttccgagtcgtctccctccgccacatgagcgcggacgcgggcgccgcgatggagaagatccgcgccgccgggctgctcaggacgcaggggcttatcgctgggcagtgggtggacgcctacgacggaaagaccattgaggtgcaaaatccagcaactggtgaggtcctggcaaacgtgtcctgtatgggcagcagagaaacatctgatgctattgcttctgctcacagtacattctattcttggagtaaattcactgcaagtgagaggagcaaggcactaagaaaatggtacgatctaattatttcacacaaggaagagcttgcacttctcatgacactggagcaggggaaacctatgaaagaagcccttggtgaggtcaattatggtgcaagtttcatagaatattttgcagaggaagcaaagcgtatatatggtgacatcattcccccaactttatctgatcgcagattgttggttttgaagcagcctgttggggtagttggagctattacaccatggaattttccattagcaatgataacccgcaaggttggaccagctttggcctgtggctgtactgttgttgtcaagccatcggagttcacacctctgacagcattagctgcagcagatcttgctcttcaagcgggaataccagcgggtgcattgaatgttgtgatgggtaatgctgctgagataggtgatgcgttgctgcagagtacacaggtcagaaagattacattcactggatcaacagctgttggcaaaaaactgatggctggatctgcaaatactgtgaaaaaggtctccttggaacttggtgggaatgcaccttgcattgttttcgatgatgcggacattgatgttgctgttaaaggcagtcttgctgccaagttccgtaacagtggacagacatgtgtttgtgcaaacaggatattggtgcaagaaggtatctacgaaaagtttgcaaaagcattcatccaggctgttcagagtttgaaggtcggtaacggtctagaagagagtacatctcagggtcctctgattaacgaagctgctgttcaaaaggtggagaagttcataaatgacgcaacttcaaagggagcaaatgtcatgctaggtggtaaaagacacagcctgggaatgtcattttatgagccaactgtagtagggaatgtcagcaacgatatgcttcttttcagagaagaagtttttggtccagttgcaccccttataccgttcaaaactgaggaagaagcagtccatatggccaacgatacaaacacaggcttagctgcatacatttttaccaagagcatacctcgttcttggcgtgtatctgaatctcttgagtacggcttagttggggtaaacgaggggattatttcaacggaggtggcgccatttggcggagtaaagcagtctggtctagggagagaaggatcgaagtacggcattgacgagtacttggagctcaagtacatctgcatgggcaacttgggttgagtcctgaagtcggcctctagctcgaaacactcggcagatgatgaacggagaaaccaggcgtgcttagaagggcgtgagttgcgtttagctgcaagatcggtcatgatggctgtgggagagcagttttagaataaatcgaataagccgcggagcattaaataaaagaagtggaaatgagatgt

SEQ ID NO: 29157 - protein, 527 aa, Zea mays subsp. mays
  peptide (1)..(527): Ceres Seq. ID no. 12372601
  misc_feature (3)..(526): NCBI GI NO: 15219379 NR Description: succinic semialdehyde dehydrogenase
  misc_feature (38)..(526): NCBI GI NO: 25284177 NR Description: hypothetical protein T8K14.14
  misc_feature (46)..(526): NCBI GI NO: 23014760 NR Description: hypothetical protein
  misc_feature (51)..(524): NCBI GI NO: 23106028 NR Description: hypothetical protein [Azotobacter vinelandii]
  misc_feature (51)..(526): NCBI GI NO: 27479656 NR Description: Orf17 [Photorhabdus luminescens]
  misc_feature (20)..(526): NCBI GI NO: 23105708 NR Description: hypothetical protein [Azotobacter vinelandii]
  misc_feature (46)..(526): NCBI GI NO: 23054134 NR Description: hypothetical protein [Geobacter metallireducens]
  misc_feature (43)..(522): NCBI GI NO: 17223783 NR Description: AttK [Agrobacterium tumefaciens]
  misc_feature (42)..(522): NCBI GI NO: 16119363 NR Description: AGR_pAT_197p [Agrobacterium tumefaciens]
  misc_feature (43)..(522): NCBI GI NO: 17938723 NR Description: NAD-dependent succinate aldehyde dehydrogenases
MAMAMMAMRRAVALGARHIPAAAASSFRVVSLRHMSADAGAAMEKIRAAGLLRTQGLIAGQWVDAYDGKTIEVQNPATGEVLANVSCMGSRETSDAIASAHSTFYSWSKFTASERSKALRKWYDLIISHKEELALLMTLEQGKPMKEALGEVNYGASFIEYFAEEAKRIYGDIIPPTLSDRRLLVLKQPVGVVGAITPWNFPLAMITRKVGPALACGCTVVVKPSEFTPLTALAAADLALQAGIPAGALNVVMGNAAEIGDALLQSTQVRKITFTGSTAVGKKLMAGSANTVKKVSLELGGNAPCIVFDDADIDVAVKGSLAAKFRNSGQTCVCANRILVQEGIYEKFAKAFIQAVQSLKVGNGLEESTSQGPLINEAAVQKVEKFINDATSKGANVMLGGKRHSLGMSFYEPTVVGNVSNDMLLFREEVFGPVAPLIPFKTEEEAVHMANDTNTGLAAYIFTKSIPRSWRVSESLEYGLVGVNEGIISTEVAPFGGVKQSGLGREGSKYGIDEYLELKYICMGNLG

SEQ ID NO: 29158 - protein, 525 aa, Zea mays subsp. mays
  peptide (1)..(525): Ceres Seq. ID no. 12372602
  misc_feature (1)..(524): NCBI GI NO: 15219379 NR Description: succinic semialdehyde dehydrogenase
  misc_feature (36)..(524): NCBI GI NO: 25284177 NR Description: hypothetical protein T8K14.14
  misc_feature (44)..(524): NCBI GI NO: 23014760 NR Description: hypothetical protein
  misc_feature (49)..(522): NCBI GI NO: 23106028 NR Description: hypothetical protein [Azotobacter vinelandii]
  misc_feature (49)..(524): NCBI GI NO: 27479656 NR Description: Orf17 [Photorhabdus luminescens]
  misc_feature (18)..(524): NCBI GI NO: 23105708 NR Description: hypothetical protein [Azotobacter vinelandii]
  misc_feature (44)..(524): NCBI GI NO: 23054134 NR Description: hypothetical protein [Geobacter metallireducens]
  misc_feature (41)..(520): NCBI GI NO: 17223783 NR Description: AttK [Agrobacterium tumefaciens]
  misc_feature (40)..(520): NCBI GI NO: 16119363 NR Description: AGR_pAT_197p [Agrobacterium tumefaciens]
  misc_feature (41)..(520): NCBI GI NO: 17938723 NR Description: NAD-dependent succinate aldehyde dehydrogenases
MAMMAMRRAVALGARHIPAAAASSFRVVSLRHMSADAGAAMEKIRAAGLLRTQGLIAGQWVDAYDGKTIEVQNPATGEVLANVSCMGSRETSDAIASAHSTFYSWSKFTASERSKALRKWYDLIISHKEELALLMTLEQGKPMKEALGEVNYGASFIEYFAEEAKRIYGDIIPPTLSDRRLLVLKQPVGVVGAITPWNFPLAMITRKVGPALACGCTVVVKPSEFTPLTALAAADLALQAGIPAGALNVVMGNAAEIGDALLQSTQVRKITFTGSTAVGKKLMAGSANTVKKVSLELGGNAPCIVFDDADIDVAVKGSLAAKFRNSGQTCVCANRILVQEGIYEKFAKAFIQAVQSLKVGNGLEESTSQGPLINEAAVQKVEKFINDATSKGANVMLGGKRHSLGMSFYEPTVVGNVSNDMLLFREEVFGPVAPLIPFKTEEEAVHMANDTNTGLAAYIFTKSIPRSWRVSESLEYGLVGVNEGIISTEVAPFGGVKQSGLGREGSKYGIDEYLELKYICMGNLG

SEQ ID NO: 29159 - protein, 523 aa, Zea mays subsp. mays
  peptide (1)..(523): Ceres Seq. ID no. 12372603
  misc_feature (1)..(522): NCBI GI NO: 15219379 NR Description: succinic semialdehyde dehydrogenase
  misc_feature (34)..(522): NCBI GI NO: 25284177 NR Description: hypothetical protein T8K14.14
  misc_feature (42)..(522): NCBI GI NO: 23014760 NR Description: hypothetical protein
  misc_feature (47)..(520): NCBI GI NO: 23106028 NR Description: hypothetical protein [Azotobacter vinelandii]
  misc_feature (47)..(522): NCBI GI NO: 27479656 NR Description: Orf17 [Photorhabdus luminescens]
  misc_feature (16)..(522): NCBI GI NO: 23105708 NR Description: hypothetical protein [Azotobacter vinelandii]
  misc_feature (42)..(522): NCBI GI NO: 23054134 NR Description: hypothetical protein [Geobacter metallireducens]
  misc_feature (39)..(518): NCBI GI NO: 17223783 NR Description: AttK [Agrobacterium tumefaciens]
  misc_feature (38)..(518): NCBI GI NO: 16119363 NR Description: AGR_pAT_197p [Agrobacterium tumefaciens]
  misc_feature (39)..(518): NCBI GI NO: 17938723 NR Description: NAD-dependent succinate aldehyde dehydrogenases
MMAMRRAVALGARHIPAAAASSFRVVSLRHMSADAGAAMEKIRAAGLLRTQGLIAGQWVDAYDGKTIEVQNPATGEVLANVSCMGSRETSDAIASAHSTFYSWSKFTASERSKALRKWYDLIISHKEELALLMTLEQGKPMKEALGEVNYGASFIEYFAEEAKRIYGDIIPPTLSDRRLLVLKQPVGVVGAITPWNFPLAMITRKVGPALACGCTVVVKPSEFTPLTALAAADLALQAGIPAGALNVVMGNAAEIGDALLQSTQVRKITFTGSTAVGKKLMAGSANTVKKVSLELGGNAPCIVFDDADIDVAVKGSLAAKFRNSGQTCVCANRILVQEGIYEKFAKAFIQAVQSLKVGNGLEESTSQGPLINEAAVQKVEKFINDATSKGANVMLGGKRHSLGMSFYEPTVVGNVSNDMLLFREEVFGPVAPLIPFKTEEEAVHMANDTNTGLAAYIFTKSIPRSWRVSESLEYGLVGVNEGIISTEVAPFGGVKQSGLGREGSKYGIDEYLELKYICMGNLG

SEQ ID NO: 29160 - DNA, 1185 bp, Zea mays subsp. mays
  misc_feature (1)..(1185): Ceres Seq. ID no. 12408784
aaaccagtcaccgcctaccaccgttttataatccacccctcccactccccctgttttttcttcttccgctgttctactccggcgtgttggtcgacggcggcgcagatgacgaccctcgatctgatgggagggtacgggcgggtggacgagcaggtggccatccaggaggccgccacggcgggggctgcgcgggatggagcgtctcatcttgcagctctcccaggctggcaccggggagcggtcgtcgtccccaccggcggtacaggcgcagcgccagcagcagaagcagctggagcagatccagcagcaggttgactgccgggagctcacggacatgacggtgtccaagttcaagaaggtgatctccatcctgaaccgcacggggcacgcgcggttccggcgtggccccgtggcggcgcggtcgcagtcgcagtcgcagggacctgcctcccccgagcccgcgcaatcggcgccggctcccgccgcgaggcccctgacgctggacttcaccaagtcggtgtccggttacagcagggactccgggttcagcgtgtccggcgcgagctcgtcgttcctgtcgtcggtgacgaccggggacgggagcgtgtcgaacgggcgcgcgggaggctcgtcgttcctcatgctcccaccggcgcccggcgcggccagctgcgcgaagccgccgcccgccggtgcggcgcagaagcgcaagtgccacgaccacgcgcactcggagaacgtcgccggcggcaagtacggtgctaacggcgggcgctgccactgctcgaagcgcaggaagcaccgtgtgaagcgcacgatccgcgtgccggcgatcagccccaaagtggcggacatccccgccgacgagtactcgtggcgcaagtacggccagaaacccatcaaggggtcgccctacccacgcggctactacaagtgcagcacggtgcgcggctgccccgcccggaagcatgtggagcgcgaccccgccgacccgtcgatgctgatcgtcacctacgagggcgagcaccgccacagccccgcctccggccaggacccgccgccgccgtcgctcgcgccgctgccggagctgcccagccattgatttggcttcctgcctgctctgtcctgtcaattactagtagctgttgtcataagttataaaatcaaaatcgccagttcagtttt

SEQ ID NO: 29161 - protein, 302 aa, Zea mays subsp. mays
  peptide (1)..(302): Ceres Seq. ID no. 12408785
  misc_feature (222)..(282): Pfam Name: Pfam Description:  WRKY DNA -binding domain
  misc_feature (1)..(296): NCBI GI NO: 38568048 NR Description: OSJNBa0065J03.18
  misc_feature (1)..(299): NCBI GI NO: 4894963 NR Description: DNA-binding protein WRKY3 [Avena sativa]
  misc_feature (37)..(296): NCBI GI NO: 18400580 NR Description: WRKY family transcription factor
  misc_feature (37)..(292): NCBI GI NO: 25348152 NR Description: probable WRKY-type DNA binding protein
  misc_feature (91)..(287): NCBI GI NO: 30689072 NR Description: WRKY family transcription factor
  misc_feature (34)..(102): NCBI GI NO: 30689072 NR Description: WRKY family transcription factor
  misc_feature (91)..(287): NCBI GI NO: 22329054 NR Description: WRKY family transcription factor
  misc_feature (34)..(102): NCBI GI NO: 22329054 NR Description: WRKY family transcription factor
  misc_feature (91)..(287): NCBI GI NO: 16604573 NR Description: putative putaive DNA-binding protein
  misc_feature (34)..(102): NCBI GI NO: 16604573 NR Description: putative putaive DNA-binding protein
MERLILQLSQAGTGERSSSPPAVQAQRQQQKQLEQIQQQVDCRELTDMTVSKFKKVISILNRTGHARFRRGPVAARSQSQSQGPASPEPAQSAPAPAARPLTLDFTKSVSGYSRDSGFSVSGASSSFLSSVTTGDGSVSNGRAGGSSFLMLPPAPGAASCAKPPPAGAAQKRKCHDHAHSENVAGGKYGANGGRCHCSKRRKHRVKRTIRVPAISPKVADIPADEYSWRKYGQKPIKGSPYPRGYYKCSTVRGCPARKHVERDPADPSMLIVTYEGEHRHSPASGQDPPPPSLAPLPELPSH

SEQ ID NO: 29162 - protein, 255 aa, Zea mays subsp. mays
  peptide (1)..(255): Ceres Seq. ID no. 12408786
  misc_feature (175)..(235): Pfam Name: Pfam Description:  WRKY DNA -binding domain
  misc_feature (1)..(249): NCBI GI NO: 38568048 NR Description: OSJNBa0065J03.18
  misc_feature (1)..(252): NCBI GI NO: 4894963 NR Description: DNA-binding protein WRKY3 [Avena sativa]
  misc_feature (1)..(249): NCBI GI NO: 18400580 NR Description: WRKY family transcription factor
  misc_feature (1)..(245): NCBI GI NO: 25348152 NR Description: probable WRKY-type DNA binding protein
  misc_feature (44)..(240): NCBI GI NO: 30689072 NR Description: WRKY family transcription factor
  misc_feature (1)..(55): NCBI GI NO: 30689072 NR Description: WRKY family transcription factor
  misc_feature (44)..(240): NCBI GI NO: 22329054 NR Description: WRKY family transcription factor
  misc_feature (1)..(55): NCBI GI NO: 22329054 NR Description: WRKY family transcription factor
  misc_feature (44)..(240): NCBI GI NO: 16604573 NR Description: putative putaive DNA-binding protein
  misc_feature (1)..(55): NCBI GI NO: 16604573 NR Description: putative putaive DNA-binding protein
MTVSKFKKVISILNRTGHARFRRGPVAARSQSQSQGPASPEPAQSAPAPAARPLTLDFTKSVSGYSRDSGFSVSGASSSFLSSVTTGDGSVSNGRAGGSSFLMLPPAPGAASCAKPPPAGAAQKRKCHDHAHSENVAGGKYGANGGRCHCSKRRKHRVKRTIRVPAISPKVADIPADEYSWRKYGQKPIKGSPYPRGYYKCSTVRGCPARKHVERDPADPSMLIVTYEGEHRHSPASGQDPPPPSLAPLPELPSH

SEQ ID NO: 29163 - protein, 153 aa, Zea mays subsp. mays
  peptide (1)..(153): Ceres Seq. ID no. 12408787
  misc_feature (73)..(133): Pfam Name: Pfam Description:  WRKY DNA -binding domain
  misc_feature (1)..(147): NCBI GI NO: 38568048 NR Description: OSJNBa0065J03.18
  misc_feature (1)..(150): NCBI GI NO: 4894963 NR Description: DNA-binding protein WRKY3 [Avena sativa]
  misc_feature (1)..(147): NCBI GI NO: 18400580 NR Description: WRKY family transcription factor
  misc_feature (1)..(143): NCBI GI NO: 25348152 NR Description: probable WRKY-type DNA binding protein
  misc_feature (1)..(138): NCBI GI NO: 30689072 NR Description: WRKY family transcription factor
  misc_feature (1)..(138): NCBI GI NO: 22329054 NR Description: WRKY family transcription factor
  misc_feature (1)..(138): NCBI GI NO: 16604573 NR Description: putative putaive DNA-binding protein
  misc_feature (1)..(138): NCBI GI NO: 21537078 NR Description: putaive DNA-binding protein [Arabidopsis thaliana]
  misc_feature (1)..(142): NCBI GI NO: 38175580 NR Description: putative DNA-binding protein NtWRKY3
  misc_feature (1)..(151): NCBI GI NO: 38346908 NR Description: OSJNBb0015N08.8
MLPPAPGAASCAKPPPAGAAQKRKCHDHAHSENVAGGKYGANGGRCHCSKRRKHRVKRTIRVPAISPKVADIPADEYSWRKYGQKPIKGSPYPRGYYKCSTVRGCPARKHVERDPADPSMLIVTYEGEHRHSPASGQDPPPPSLAPLPELPSH

SEQ ID NO: 29164 - DNA, 1818 bp, Zea mays subsp. mays
  misc_feature (1)..(1818): Ceres Seq. ID no. 12406318
gcacgagaccattacctagaacatcctaatcaaaactctctctctctcattcatctcgcctttctttcttaccggccggccggccggcggctgggctctgcaattcacccaacttttctctgttttcactacgatctcagggctccggcgaccgtgcggcctcatcatcagctacaacctaccagctgctaccgtctcggtcgccgcctagctctccgcagcggctagctcatccggccggccgccccttttctcttgccgttgcgcagttgcgcccccttccccgcggcttaggaaccatcgaaaagacgcctcaccatctcctttgtgtccttgctaactaactcccccattaaatcctctccttcctcccgcgctggccgtgtggtctctcagccctccgagttgatccataagctagcgccatcatcgatcgccatatatacatagccaaggacgcacgcgcgcgcgcgcgcaaaccagcgggagcgaacaccaaccggccggaccaattaagaagcaggctagcaagtcgaagaggaaagaagagaaggggggtaccgggggtaccggccggtcatcgatcgagcttggcgaagcagcgaccgccgggtcgtcgtcgtcggtacatgcatgcagcgcggcggtgatcaagcaggagcgagcctgggcatggagatgggggtggggtacgccggcggcggcggcggcggcgagtgctcgtcgtcctcggcggctgccgcggccgcggccgcggcggagggggaggagcggcagctgctcaagggggagatcgcggtgcacccgctgtgcgagcagctagtggcggcgcacgtggggtgcctgcgcgtggccacgcccatcgaccacctccccctcatcgacgcccagctcgcgcagtccagcggcctcctccactcctacgccgcccaccaccgccccttcctctccccgcacgacaagcacgacctcgactcgttcctcgcgcagtacctgatgctgctgtgctcgttccgggagcagctgcagcagcacgtccgggtgcacgccgtggaggccgtcatggcgtgccgcgagatcgagcagtccctgcaggacctaaccggggcgacacttgaggaagggacgggggcgaccatgtcagaggacgaggacgaggcgccgatgctggaggtgggcctggatatgggctccgacgggcacgacatgatgggcttcggcccgctcatgcccaccgactcggagcgctcgctcatggagagggtcaggcaggagctcaagatggagctcaagcagggtttcaagtcgagaatagaggatgtgcgggaggagatcctgaggaaaaggagggccgggaagctgcctggggacaccaccagcatcctcaagcaatggtggcaggagcactccaagtggccataccccacggaagacgataaggctaagctcgtcgaagagaccggcctgcagctgaagcaaatcaacaactggttcatcaaccagaggaagaggaactggcacaacaactcccagacgtcaaccctcaaatcgaagcgtaaaaggtgatggaggagagctagctgcaccgtatataccgtgtatgtaacgcacacctgctgacacacatgtacacatgtataccataccaacacgctaatcaaacggagctctgcatggcgactgtactcacggaaataaagaggaccatatcgaccggttcaactgtatatctagccattagtctgaccactggcatatttgtttgctgcggctgatactttgagctgatgatgtgtggctcacagcatactttattcc

SEQ ID NO: 29165 - protein, 310 aa, Zea mays subsp. mays
  peptide (1)..(310): Ceres Seq. ID no. 12406319
  misc_feature (103)..(158): Pfam Name: Pfam Description:  KNOX2 domain
  misc_feature (7)..(310): NCBI GI NO: 14149141 NR Description: KNOX family class 2 homeodomain protein
  misc_feature (7)..(310): NCBI GI NO: 4098246 NR Description: homeobox 2 protein [Lycopersicon esculentum]
  misc_feature (32)..(309): NCBI GI NO: 21618231 NR Description: homeodomain-containing protein HD1, putative
  misc_feature (10)..(309): NCBI GI NO: 18407708 NR Description: homeodomain-containing protein HD1, putative
  misc_feature (41)..(309): NCBI GI NO: 25386223 NR Description: hypothetical protein F16P17.16
  misc_feature (41)..(309): NCBI GI NO: 26451690 NR Description: putative homeodomain transcription factor KNAT6
  misc_feature (10)..(309): NCBI GI NO: 1170191 NR Description: Homeobox protein HD1
  misc_feature (118)..(310): NCBI GI NO: 4887620 NR Description: homeobox gene
  misc_feature (1)..(310): NCBI GI NO: 3023961 NR Description: Homeobox protein knotted-1 like 3 (KNAP3)
  misc_feature (1)..(310): NCBI GI NO: 7446253 NR Description: probable homeobox protein OSH45, splice form OSH44
MQRGGDQAGASLGMEMGVGYAGGGGGGECSSSSAAAAAAAAAEGEERQLLKGEIAVHPLCEQLVAAHVGCLRVATPIDHLPLIDAQLAQSSGLLHSYAAHHRPFLSPHDKHDLDSFLAQYLMLLCSFREQLQQHVRVHAVEAVMACREIEQSLQDLTGATLEEGTGATMSEDEDEAPMLEVGLDMGSDGHDMMGFGPLMPTDSERSLMERVRQELKMELKQGFKSRIEDVREEILRKRRAGKLPGDTTSILKQWWQEHSKWPYPTEDDKAKLVEETGLQLKQINNWFINQRKRNWHNNSQTSTLKSKRKR

SEQ ID NO: 29166 - protein, 297 aa, Zea mays subsp. mays
  peptide (1)..(297): Ceres Seq. ID no. 12406320
  misc_feature (90)..(145): Pfam Name: Pfam Description:  KNOX2 domain
  misc_feature (1)..(297): NCBI GI NO: 14149141 NR Description: KNOX family class 2 homeodomain protein
  misc_feature (1)..(297): NCBI GI NO: 4098246 NR Description: homeobox 2 protein [Lycopersicon esculentum]
  misc_feature (19)..(296): NCBI GI NO: 21618231 NR Description: homeodomain-containing protein HD1, putative
  misc_feature (1)..(296): NCBI GI NO: 18407708 NR Description: homeodomain-containing protein HD1, putative
  misc_feature (28)..(296): NCBI GI NO: 25386223 NR Description: hypothetical protein F16P17.16
  misc_feature (28)..(296): NCBI GI NO: 26451690 NR Description: putative homeodomain transcription factor KNAT6
  misc_feature (1)..(296): NCBI GI NO: 1170191 NR Description: Homeobox protein HD1
  misc_feature (105)..(297): NCBI GI NO: 4887620 NR Description: homeobox gene
  misc_feature (1)..(297): NCBI GI NO: 3023961 NR Description: Homeobox protein knotted-1 like 3 (KNAP3)
  misc_feature (1)..(297): NCBI GI NO: 7446253 NR Description: probable homeobox protein OSH45, splice form OSH44
MEMGVGYAGGGGGGECSSSSAAAAAAAAAEGEERQLLKGEIAVHPLCEQLVAAHVGCLRVATPIDHLPLIDAQLAQSSGLLHSYAAHHRPFLSPHDKHDLDSFLAQYLMLLCSFREQLQQHVRVHAVEAVMACREIEQSLQDLTGATLEEGTGATMSEDEDEAPMLEVGLDMGSDGHDMMGFGPLMPTDSERSLMERVRQELKMELKQGFKSRIEDVREEILRKRRAGKLPGDTTSILKQWWQEHSKWPYPTEDDKAKLVEETGLQLKQINNWFINQRKRNWHNNSQTSTLKSKRKR

SEQ ID NO: 29167 - protein, 295 aa, Zea mays subsp. mays
  peptide (1)..(295): Ceres Seq. ID no. 12406321
  misc_feature (88)..(143): Pfam Name: Pfam Description:  KNOX2 domain
  misc_feature (1)..(295): NCBI GI NO: 14149141 NR Description: KNOX family class 2 homeodomain protein
  misc_feature (1)..(295): NCBI GI NO: 4098246 NR Description: homeobox 2 protein [Lycopersicon esculentum]
  misc_feature (17)..(294): NCBI GI NO: 21618231 NR Description: homeodomain-containing protein HD1, putative
  misc_feature (1)..(294): NCBI GI NO: 18407708 NR Description: homeodomain-containing protein HD1, putative
  misc_feature (26)..(294): NCBI GI NO: 25386223 NR Description: hypothetical protein F16P17.16
  misc_feature (26)..(294): NCBI GI NO: 26451690 NR Description: putative homeodomain transcription factor KNAT6
  misc_feature (1)..(294): NCBI GI NO: 1170191 NR Description: Homeobox protein HD1
  misc_feature (103)..(295): NCBI GI NO: 4887620 NR Description: homeobox gene
  misc_feature (1)..(295): NCBI GI NO: 3023961 NR Description: Homeobox protein knotted-1 like 3 (KNAP3)
  misc_feature (1)..(295): NCBI GI NO: 7446253 NR Description: probable homeobox protein OSH45, splice form OSH44
MGVGYAGGGGGGECSSSSAAAAAAAAAEGEERQLLKGEIAVHPLCEQLVAAHVGCLRVATPIDHLPLIDAQLAQSSGLLHSYAAHHRPFLSPHDKHDLDSFLAQYLMLLCSFREQLQQHVRVHAVEAVMACREIEQSLQDLTGATLEEGTGATMSEDEDEAPMLEVGLDMGSDGHDMMGFGPLMPTDSERSLMERVRQELKMELKQGFKSRIEDVREEILRKRRAGKLPGDTTSILKQWWQEHSKWPYPTEDDKAKLVEETGLQLKQINNWFINQRKRNWHNNSQTSTLKSKRKR

SEQ ID NO: 29168 - DNA, 1215 bp, Zea mays subsp. mays
  misc_feature (1)..(1215): Ceres Seq. ID no. 12406200
  misc_feature (971)..(971): n is a, c, t, g, unknown, or other
  misc_feature (1192)..(1192): n is a, c, t, g, unknown, or other
atacggacacaggatatttggtcgctggagacagacacacgacacgacacagacatgcgtcgaggtcacgaggtccagagcagtaggaaagtagttttctcgaggccacgaggtcccctgtacctgtagctgtagcatgggcggtacagcagcaccaatgcaagctgcaaggcgatcgaatgatactaccccaccggcgtcggacatgcaggtacggtagcgttctgtttttgtttataaataaaaaaaaactgctccacgctttgcacacggccgatccaggcagcagcagcagcatgttcccacaggcagatgcgcatccagcccacgagcctctcgccggccgggtggccatcgtgacaggaggcgccgggggcatcggctcggcggtggccgcgcacctggcgtccctgggcgcccgcgtcgtggtcggcttcatcggcgacccggcccccgcggaccagctcgtggcggccctcaacaactcctcgccggcaggcaacagcgacccgcgcgccgtggcggtggcagcggacgtgtcggacccggcgcaggtggcgcggctgttcgacgcggcggaggcggcgttcgggccggagctgcacgtgctggtggccgcggcgggggtgcaggacgcgacgtacccgcggatcgcggacacgtcgcccgagcagtgggacctcgcgttcggcgtgaacacgcgcggcacgttcctgtgctgccgggaggcggcgcggcggctggcgcgcggcggcgcgggccgcatcgtcaccctctcgtcctccaacgtggggtcgctgcggcccgggtacggcgcgtacgctgccagcaaggcggccgtggaggccatgacaaaggtgctggccaaggagctgggcgggacggggatcacggtcaacgccgtggcgccgggccccgtggccacgcccatgttctacgcgggcaagtcggaggagcgcgtggccgccgcngcgcgcgagtgccccatggggaggctcgccgagccggcggacgtggcgcccgtggtggggttcctgtgcaccgacgccgccggctggatcaacgggcaggtcatccgagtcaacggcggctacgtgtgagtgtactgtgatgagagggaggaggcatagctagctagcttagcttggagtgtcagcgtgtcaccaaccgacaattacacgtgctccttccnttaataataataataataataat

SEQ ID NO: 29169 - protein, 306 aa, Zea mays subsp. mays
  peptide (1)..(306): Ceres Seq. ID no. 12406201
  misc_feature (53)..(306): NCBI GI NO: 18087667 NR Description: putative dehydrogenase [Oryza sativa]
  misc_feature (44)..(304): NCBI GI NO: 34395018 NR Description: putative short-chain dehydrogenase/reductase
  misc_feature (49)..(306): NCBI GI NO: 34393370 NR Description: putative short-chain dehydrogenase/reductase
  misc_feature (52)..(306): NCBI GI NO: 15235621 NR Description: short-chain alcohol dehydrogenase like protein
  misc_feature (52)..(306): NCBI GI NO: 15229203 NR Description: putative short-chain type dehydrogenase/reductase
  misc_feature (32)..(306): NCBI GI NO: 34395019 NR Description: putative short-chain dehydrogenase/reductase
  misc_feature (52)..(305): NCBI GI NO: 37534988 NR Description: putative short-chain alcohol dehydrogenase
  misc_feature (53)..(306): NCBI GI NO: 9758903 NR Description: Brn1-like protein [Arabidopsis thaliana]
  misc_feature (52)..(306): NCBI GI NO: 1711355 NR Description: SHORT-CHAIN TYPE DEHYDROGENASE/REDUCTASE
  misc_feature (53)..(304): NCBI GI NO: 30679011 NR Description: short-chain type dehydrogenase/reductase -related
  misc_feature (264)..(264): Xaa is any aa, unknown or other
MILPHRRRTCRYGSVLFLFINKKKLLHALHTADPGSSSSMFPQADAHPAHEPLAGRVAIVTGGAGGIGSAVAAHLASLGARVVVGFIGDPAPADQLVAALNNSSPAGNSDPRAVAVAADVSDPAQVARLFDAAEAAFGPELHVLVAAAGVQDATYPRIADTSPEQWDLAFGVNTRGTFLCCREAARRLARGGAGRIVTLSSSNVGSLRPGYGAYAASKAAVEAMTKVLAKELGGTGITVNAVAPGPVATPMFYAGKSEERVAAXARECPMGRLAEPADVAPVVGFLCTDAAGWINGQVIRVNGGYV

SEQ ID NO: 29170 - protein, 267 aa, Zea mays subsp. mays
  peptide (1)..(267): Ceres Seq. ID no. 12406202
  misc_feature (14)..(267): NCBI GI NO: 18087667 NR Description: putative dehydrogenase [Oryza sativa]
  misc_feature (5)..(265): NCBI GI NO: 34395018 NR Description: putative short-chain dehydrogenase/reductase
  misc_feature (10)..(267): NCBI GI NO: 34393370 NR Description: putative short-chain dehydrogenase/reductase
  misc_feature (13)..(267): NCBI GI NO: 15235621 NR Description: short-chain alcohol dehydrogenase like protein
  misc_feature (13)..(267): NCBI GI NO: 15229203 NR Description: putative short-chain type dehydrogenase/reductase
  misc_feature (1)..(267): NCBI GI NO: 34395019 NR Description: putative short-chain dehydrogenase/reductase
  misc_feature (13)..(266): NCBI GI NO: 37534988 NR Description: putative short-chain alcohol dehydrogenase
  misc_feature (14)..(267): NCBI GI NO: 9758903 NR Description: Brn1-like protein [Arabidopsis thaliana]
  misc_feature (13)..(267): NCBI GI NO: 1711355 NR Description: SHORT-CHAIN TYPE DEHYDROGENASE/REDUCTASE
  misc_feature (14)..(265): NCBI GI NO: 30679011 NR Description: short-chain type dehydrogenase/reductase -related
  misc_feature (225)..(225): Xaa is any aa, unknown or other
MFPQADAHPAHEPLAGRVAIVTGGAGGIGSAVAAHLASLGARVVVGFIGDPAPADQLVAALNNSSPAGNSDPRAVAVAADVSDPAQVARLFDAAEAAFGPELHVLVAAAGVQDATYPRIADTSPEQWDLAFGVNTRGTFLCCREAARRLARGGAGRIVTLSSSNVGSLRPGYGAYAASKAAVEAMTKVLAKELGGTGITVNAVAPGPVATPMFYAGKSEERVAAXARECPMGRLAEPADVAPVVGFLCTDAAGWINGQVIRVNGGYV

SEQ ID NO: 29171 - DNA, 1432 bp, Zea mays subsp. mays
  misc_feature (1)..(1432): Ceres Seq. ID no. 12407071
  misc_feature (585)..(585): n is a, c, t, g, unknown, or other
atcttccccgtgcttgcagttgcagtgcagctgtacccacagtgccctgtcagtctcggccattgcaatgcctcaagaagcagcaatggagttgccaagaccaatgggcgtgcttctgctcgtgttcttcgtcttgtgcagagtgggggacgcggcgacgttcatgttcgtgaaccggtgcacggacacggtgtggccgggcgtcctgtccaacgccggcagcccaaggctggagccgacggggttcgagctcccgccgggcgcggcacgcgcggtgccggcgccggcgggctggtccggccgcatgtgggcgcgcacgggctgctcccaggacggcgccacggggcggctcgtctgtgccacgggcgactgcggctctggctccgccgagtgcgcgggcgcgggcgctgcgccgccggccacgctggccgagttcacgctcgacggcagtggcgggctggacttctacgacgtcagcctcgtggatggctacaacctccccgtgctggtggagacctccggcggcgcaggctccagcgggccggcgtcgtgcgcggcggccgggtgcgcagcgaacctgaaacncgatgtgccccgccgagctccgagccgggggcggcgccgcgtgccggagcgcgtgcgacgcgttcgcgcggcccgagtactgctgcagcggcgccttcgcgtccccggcggcgtgccggccgactacctactcgcaggtgttcaagagcgcgtgcccgcgctcctacagttacgccttcgacgatcccacctccacattcacctgcggcggcggcccagactacaccgtcaccttctgccccggcgccaccccaagccagaagtcgacgaccacaccgggcgcgacgccggcgacggtgccggggacaatgacgacgacggtgccggaggcaacgccgatgccgggcgcgaccccggctatgccgacggggaccatgatgccaccgggcgcgacgttcacggacgccaccccggacagcgcgatgatgccgatgggtggcctgggcatcgagggcgggggccaaggcagcgtgctcctgggcggcagcagcagcgaaggcagcgtctcttggctcgccaacatggccaccggcgacgcggccgtcccgctggtggcttcggctcggttattggtggcgccactggcaacgttgctctgcggcctccatttgctgtagtagtggtgatggagggagcagaggaatctgttggcgattcgcacggtggcgcctttgtattgccgtgtctgtagatgattttactgtccattgatcatgttgcgttagccccggtcccaggattagatacttgtggctactagtagtactagttctagaggagaaattaaagcatggatgtggacattgattaaagttaatcgctgtcgtgctagctgcgctttgttgtt

SEQ ID NO: 29172 - protein, 424 aa, Zea mays subsp. mays
  peptide (1)..(424): Ceres Seq. ID no. 12407072
  misc_feature (58)..(205): Pfam Name: Pfam Description:  Thaumatin family
  misc_feature (31)..(205): NCBI GI NO: 37531036 NR Description: putative thaumatin-like protein
  misc_feature (33)..(198): NCBI GI NO: 21592749 NR Description: putative thaumatin-like protein
  misc_feature (33)..(198): NCBI GI NO: 18420282 NR Description: putative thaumatin-like protein
  misc_feature (52)..(198): NCBI GI NO: 7442168 NR Description: pathogenesis-related protein F20M13
  misc_feature (33)..(198): NCBI GI NO: 37531042 NR Description: putative thaumatin-like protein
  misc_feature (38)..(198): NCBI GI NO: 15233437 NR Description: thaumatin-like protein; protein id: At4g36010
  misc_feature (29)..(198): NCBI GI NO: 15222875 NR Description: thaumatin, putative; protein id: At1g75800
  misc_feature (37)..(198): NCBI GI NO: 2262099 NR Description: thaumatin isolog [Arabidopsis thaliana]
  misc_feature (39)..(198): NCBI GI NO: 15233738 NR Description: thaumatin-like protein; protein id: At4g24180.1
  misc_feature (34)..(198): NCBI GI NO: 38346455 NR Description: OSJNBa0019G23.3
  misc_feature (195)..(195): Xaa is any aa, unknown or other
SSPCLQLQCSCTHSALSVSAIAMPQEAAMELPRPMGVLLLVFFVLCRVGDAATFMFVNRCTDTVWPGVLSNAGSPRLEPTGFELPPGAARAVPAPAGWSGRMWARTGCSQDGATGRLVCATGDCGSGSAECAGAGAAPPATLAEFTLDGSGGLDFYDVSLVDGYNLPVLVETSGGAGSSGPASCAAAGCAANLKXDVPRRAPSRGRRRVPERVRRVRAARVLLQRRLRVPGGVPADYLLAGVQERVPALLQLRLRRSHLHIHLRRRPRLHRHLLPRRHPKPEVDDHTGRDAGDGAGDNDDDGAGGNADAGRDPGYADGDHDATGRDVHGRHPGQRDDADGWPGHRGRGPRQRAPGRQQQRRQRLLARQHGHRRRGRPAGGFGSVIGGATGNVALRPPFAVVVVMEGAEESVGDSHGGAFVLPCL

SEQ ID NO: 29173 - protein, 402 aa, Zea mays subsp. mays
  peptide (1)..(402): Ceres Seq. ID no. 12407073
  misc_feature (36)..(183): Pfam Name: Pfam Description:  Thaumatin family
  misc_feature (9)..(183): NCBI GI NO: 37531036 NR Description: putative thaumatin-like protein
  misc_feature (11)..(176): NCBI GI NO: 21592749 NR Description: putative thaumatin-like protein
  misc_feature (11)..(176): NCBI GI NO: 18420282 NR Description: putative thaumatin-like protein
  misc_feature (30)..(176): NCBI GI NO: 7442168 NR Description: pathogenesis-related protein F20M13
  misc_feature (11)..(176): NCBI GI NO: 37531042 NR Description: putative thaumatin-like protein
  misc_feature (16)..(176): NCBI GI NO: 15233437 NR Description: thaumatin-like protein; protein id: At4g36010
  misc_feature (7)..(176): NCBI GI NO: 15222875 NR Description: thaumatin, putative; protein id: At1g75800
  misc_feature (15)..(176): NCBI GI NO: 2262099 NR Description: thaumatin isolog [Arabidopsis thaliana]
  misc_feature (17)..(176): NCBI GI NO: 15233738 NR Description: thaumatin-like protein; protein id: At4g24180.1
  misc_feature (12)..(176): NCBI GI NO: 38346455 NR Description: OSJNBa0019G23.3
  misc_feature (173)..(173): Xaa is any aa, unknown or other
MPQEAAMELPRPMGVLLLVFFVLCRVGDAATFMFVNRCTDTVWPGVLSNAGSPRLEPTGFELPPGAARAVPAPAGWSGRMWARTGCSQDGATGRLVCATGDCGSGSAECAGAGAAPPATLAEFTLDGSGGLDFYDVSLVDGYNLPVLVETSGGAGSSGPASCAAAGCAANLKXDVPRRAPSRGRRRVPERVRRVRAARVLLQRRLRVPGGVPADYLLAGVQERVPALLQLRLRRSHLHIHLRRRPRLHRHLLPRRHPKPEVDDHTGRDAGDGAGDNDDDGAGGNADAGRDPGYADGDHDATGRDVHGRHPGQRDDADGWPGHRGRGPRQRAPGRQQQRRQRLLARQHGHRRRGRPAGGFGSVIGGATGNVALRPPFAVVVVMEGAEESVGDSHGGAFVLPCL

SEQ ID NO: 29174 - protein, 396 aa, Zea mays subsp. mays
  peptide (1)..(396): Ceres Seq. ID no. 12407074
  misc_feature (30)..(177): Pfam Name: Pfam Description:  Thaumatin family
  misc_feature (3)..(177): NCBI GI NO: 37531036 NR Description: putative thaumatin-like protein
  misc_feature (5)..(170): NCBI GI NO: 21592749 NR Description: putative thaumatin-like protein
  misc_feature (5)..(170): NCBI GI NO: 18420282 NR Description: putative thaumatin-like protein
  misc_feature (24)..(170): NCBI GI NO: 7442168 NR Description: pathogenesis-related protein F20M13
  misc_feature (5)..(170): NCBI GI NO: 37531042 NR Description: putative thaumatin-like protein
  misc_feature (10)..(170): NCBI GI NO: 15233437 NR Description: thaumatin-like protein; protein id: At4g36010
  misc_feature (1)..(170): NCBI GI NO: 15222875 NR Description: thaumatin, putative; protein id: At1g75800
  misc_feature (9)..(170): NCBI GI NO: 2262099 NR Description: thaumatin isolog [Arabidopsis thaliana]
  misc_feature (11)..(170): NCBI GI NO: 15233738 NR Description: thaumatin-like protein; protein id: At4g24180.1
  misc_feature (6)..(170): NCBI GI NO: 38346455 NR Description: OSJNBa0019G23.3
  misc_feature (167)..(167): Xaa is any aa, unknown or other
MELPRPMGVLLLVFFVLCRVGDAATFMFVNRCTDTVWPGVLSNAGSPRLEPTGFELPPGAARAVPAPAGWSGRMWARTGCSQDGATGRLVCATGDCGSGSAECAGAGAAPPATLAEFTLDGSGGLDFYDVSLVDGYNLPVLVETSGGAGSSGPASCAAAGCAANLKXDVPRRAPSRGRRRVPERVRRVRAARVLLQRRLRVPGGVPADYLLAGVQERVPALLQLRLRRSHLHIHLRRRPRLHRHLLPRRHPKPEVDDHTGRDAGDGAGDNDDDGAGGNADAGRDPGYADGDHDATGRDVHGRHPGQRDDADGWPGHRGRGPRQRAPGRQQQRRQRLLARQHGHRRRGRPAGGFGSVIGGATGNVALRPPFAVVVVMEGAEESVGDSHGGAFVLPCL

SEQ ID NO: 29175 - DNA, 1708 bp, Zea mays subsp. mays
  misc_feature (1)..(1708): Ceres Seq. ID no. 12408780
ccttttcccaaatcccacacctatggcgatcgtcggcggcggcgggagctggagcatccacggccgcgctgatgtcacatcccgctacgaggtcctcggccgtgcgggctccggttcctatgctgatgtctaccgcggccgccgccgatccgacggtgctgctgtcgcgctcaaggaggtccacgacgctgtcagcgctcgcagcgaggtcgaggctctcctcgccattcccccttcccccaacgttgtcgcactcatcgaccacttccccggcggcgattgcgacgacgacgtcctcgtcctcgagtggctcccgctcgacctcgccgccgttgtgcgtgacgcgaggaggcgcgcgggcgggggcgagggaggggaaggcatccccgcctcgcaactcaaacggtggatgctgcaggtgcttgagggggtcgccgcgtgccaccgcgccggcgtcgtgcaccgtgacctgaagcctgagaacctgctcatctccgaagacggggtgctcaaagtcgccgattttggtcaggctaggatacttcagcagtcagcacctacatttcaagaaatgtacccacacgagcaaagttcaggcatggaaacatgggttccacaacaacaaccagcagtgctacaagggacagaagaggaaccaacatcttatgaatcagatgctactgctggtcaggagccagagaccctaactgctgctgactacctgcgtgaactggaccaactccgagaaaaatccagcgatgttgacaaaatgagctttcaggatgaacatgcatcctgtcttgccacgtgcagcacaggagacattgaagatgatccatacccagcctcctactctgacgatatggaaggcataggtgaagattctggtgccttcacttcttgtgttggcactaggtggttcagggctcctgagcttttatatgggtcaacaaactatgggctagagattgatctctggtcgcttggatgcattttggcagaactgatgaaattggaggctttgttcccagggatatctgatattgatcagattagtagaatcatcaatgtcctgggcgatataacagaagaaacctttccaggctgttcaaacttgccagattacaacaagatttcctttaacaaagttgagaaaccgacaggccttgaagcatgtctgcctaacagatctcctactgaggttagcatcataaagcagctaatttgctatgacacagcaaagaggaccagtgctgttgatctgctgaatgatcggtactttaccgaagagcccttgccggcacctatagaaggattacatgtcccggcatcaaaggacgaggatgatgacagctcaactgaagaatggggtaattacagggatggtgtctctcgggttgactttgatgagtttggtagtatggatgccaccaaaactgagaagggtttcagcatacagttttcgtgacgaagaaagacgtagacgtacggaccatgcgtgccatgtccaaactaagaccatatcatggtatttatctacatgggagttgaattgctgtcaacatagacgaacatcagtaagcgatcaaaggttgtgcaatgttgctttgggtttaacatttttttagtttctatggaactttgtgattctttgtacggcagaaccagttttttccctggcaagaataaaactgtgtgtggtagtctg

SEQ ID NO: 29176 - protein, 488 aa, Zea mays subsp. mays
  peptide (1)..(488): Ceres Seq. ID no. 12408781
  misc_feature (29)..(426): Pfam Name: Pfam Description:  Protein kinase domain
  misc_feature (16)..(487): NCBI GI NO: 15235518 NR Description: Cyclin-dependent kinase F;1; protein id:At4g28980
  misc_feature (3)..(488): NCBI GI NO: 6984233 NR Description: CDK-activating kinase [Euphorbia esula]
  misc_feature (28)..(217): NCBI GI NO: 16716469 NR Description: cell cycle related kinase
  misc_feature (294)..(442): NCBI GI NO: 16716469 NR Description: cell cycle related kinase
  misc_feature (28)..(217): NCBI GI NO: 23344742 NR Description: cell cycle related kinase [Homo sapiens]
  misc_feature (293)..(442): NCBI GI NO: 23344742 NR Description: cell cycle related kinase [Homo sapiens]
  misc_feature (28)..(217): NCBI GI NO: 34873735 NR Description: similar to CDK-related protein kinase PNQLARE
  misc_feature (294)..(442): NCBI GI NO: 34873735 NR Description: similar to CDK-related protein kinase PNQLARE
  misc_feature (29)..(223): NCBI GI NO: 4557439 NR Description: cyclin-dependent kinase 3 [Homo sapiens]
  misc_feature (298)..(434): NCBI GI NO: 4557439 NR Description: cyclin-dependent kinase 3 [Homo sapiens]
LFPNPTPMAIVGGGGSWSIHGRADVTSRYEVLGRAGSGSYADVYRGRRRSDGAAVALKEVHDAVSARSEVEALLAIPPSPNVVALIDHFPGGDCDDDVLVLEWLPLDLAAVVRDARRRAGGGEGGEGIPASQLKRWMLQVLEGVAACHRAGVVHRDLKPENLLISEDGVLKVADFGQARILQQSAPTFQEMYPHEQSSGMETWVPQQQPAVLQGTEEEPTSYESDATAGQEPETLTAADYLRELDQLREKSSDVDKMSFQDEHASCLATCSTGDIEDDPYPASYSDDMEGIGEDSGAFTSCVGTRWFRAPELLYGSTNYGLEIDLWSLGCILAELMKLEALFPGISDIDQISRIINVLGDITEETFPGCSNLPDYNKISFNKVEKPTGLEACLPNRSPTEVSIIKQLICYDTAKRTSAVDLLNDRYFTEEPLPAPIEGLHVPASKDEDDDSSTEEWGNYRDGVSRVDFDEFGSMDATKTEKGFSIQFS

SEQ ID NO: 29177 - protein, 481 aa, Zea mays subsp. mays
  peptide (1)..(481): Ceres Seq. ID no. 12408782
  misc_feature (22)..(419): Pfam Name: Pfam Description:  Protein kinase domain
  misc_feature (9)..(480): NCBI GI NO: 15235518 NR Description: Cyclin-dependent kinase F;1; protein id:At4g28980
  misc_feature (1)..(481): NCBI GI NO: 6984233 NR Description: CDK-activating kinase [Euphorbia esula]
  misc_feature (21)..(210): NCBI GI NO: 16716469 NR Description: cell cycle related kinase
  misc_feature (287)..(435): NCBI GI NO: 16716469 NR Description: cell cycle related kinase
  misc_feature (21)..(210): NCBI GI NO: 23344742 NR Description: cell cycle related kinase [Homo sapiens]
  misc_feature (286)..(435): NCBI GI NO: 23344742 NR Description: cell cycle related kinase [Homo sapiens]
  misc_feature (21)..(210): NCBI GI NO: 34873735 NR Description: similar to CDK-related protein kinase PNQLARE
  misc_feature (287)..(435): NCBI GI NO: 34873735 NR Description: similar to CDK-related protein kinase PNQLARE
  misc_feature (22)..(216): NCBI GI NO: 4557439 NR Description: cyclin-dependent kinase 3 [Homo sapiens]
  misc_feature (291)..(427): NCBI GI NO: 4557439 NR Description: cyclin-dependent kinase 3 [Homo sapiens]
MAIVGGGGSWSIHGRADVTSRYEVLGRAGSGSYADVYRGRRRSDGAAVALKEVHDAVSARSEVEALLAIPPSPNVVALIDHFPGGDCDDDVLVLEWLPLDLAAVVRDARRRAGGGEGGEGIPASQLKRWMLQVLEGVAACHRAGVVHRDLKPENLLISEDGVLKVADFGQARILQQSAPTFQEMYPHEQSSGMETWVPQQQPAVLQGTEEEPTSYESDATAGQEPETLTAADYLRELDQLREKSSDVDKMSFQDEHASCLATCSTGDIEDDPYPASYSDDMEGIGEDSGAFTSCVGTRWFRAPELLYGSTNYGLEIDLWSLGCILAELMKLEALFPGISDIDQISRIINVLGDITEETFPGCSNLPDYNKISFNKVEKPTGLEACLPNRSPTEVSIIKQLICYDTAKRTSAVDLLNDRYFTEEPLPAPIEGLHVPASKDEDDDSSTEEWGNYRDGVSRVDFDEFGSMDATKTEKGFSIQFS

SEQ ID NO: 29178 - protein, 352 aa, Zea mays subsp. mays
  peptide (1)..(352): Ceres Seq. ID no. 12408783
  misc_feature (1)..(290): Pfam Name: Pfam Description:  Protein kinase domain
  misc_feature (1)..(351): NCBI GI NO: 15235518 NR Description: Cyclin-dependent kinase F;1; protein id:At4g28980
  misc_feature (1)..(352): NCBI GI NO: 6984233 NR Description: CDK-activating kinase [Euphorbia esula]
  misc_feature (1)..(81): NCBI GI NO: 16716469 NR Description: cell cycle related kinase
  misc_feature (158)..(306): NCBI GI NO: 16716469 NR Description: cell cycle related kinase
  misc_feature (1)..(81): NCBI GI NO: 23344742 NR Description: cell cycle related kinase [Homo sapiens]
  misc_feature (157)..(306): NCBI GI NO: 23344742 NR Description: cell cycle related kinase [Homo sapiens]
  misc_feature (1)..(81): NCBI GI NO: 34873735 NR Description: similar to CDK-related protein kinase PNQLARE
  misc_feature (158)..(306): NCBI GI NO: 34873735 NR Description: similar to CDK-related protein kinase PNQLARE
  misc_feature (1)..(87): NCBI GI NO: 4557439 NR Description: cyclin-dependent kinase 3 [Homo sapiens]
  misc_feature (162)..(298): NCBI GI NO: 4557439 NR Description: cyclin-dependent kinase 3 [Homo sapiens]
MLQVLEGVAACHRAGVVHRDLKPENLLISEDGVLKVADFGQARILQQSAPTFQEMYPHEQSSGMETWVPQQQPAVLQGTEEEPTSYESDATAGQEPETLTAADYLRELDQLREKSSDVDKMSFQDEHASCLATCSTGDIEDDPYPASYSDDMEGIGEDSGAFTSCVGTRWFRAPELLYGSTNYGLEIDLWSLGCILAELMKLEALFPGISDIDQISRIINVLGDITEETFPGCSNLPDYNKISFNKVEKPTGLEACLPNRSPTEVSIIKQLICYDTAKRTSAVDLLNDRYFTEEPLPAPIEGLHVPASKDEDDDSSTEEWGNYRDGVSRVDFDEFGSMDATKTEKGFSIQFS

SEQ ID NO: 29179 - DNA, 1844 bp, Zea mays subsp. mays
  misc_feature (1)..(1844): Ceres Seq. ID no. 12408772
aaaaaaagcatgcgaattattcgaggcggctttatggtcggacggatcacccccagcaaggagccgccacccgccactccgccagagcattgcagcgccagccacctcgccccctctcgctgtcccgcaccacccgctccgagggaaggagaggtaaccggtgggggggcgcggcggcgagcggagatcccgggaactccgatcgagcgcaagcggcgggacctgcgggagcagagagcgcgcagggaggacaagtgagtagcgtggttcgatggtaagggagacgggatactacgacgtgctggaagtgagcccgacggcctccgaggccgagatcaagaaggcatactacgtcaaggcgaggcaggtccatccggacaagaacccagatgatccgcttgcggcggcgaggttccaggaattgggggaggcataccaagtgctcagtaatcccaagcagcgtgaagactatgacttacatgggaaacctggtatttcaacggaagcgataattgatcctgcagcaatttttgcgatgctgttcggtagcgagctttttgaggactacattggtcagctggcgatggcatccatggcttcacttgatggttttactgaaaacgaacagatcgatccaagaaggttgcaagagcaaatgcgagttgtacaaaaagaaagagaggagaaacttgcagaggcactaaaagataggttgcatctttatgttcaaggaaacaaagaggaatttatccagtatgctgatgctgaggttactagactctctaatgccgcatacggtgttgatatgttgagtactattggttatgtgtattcgagacaagcttctaaggagcttggaaagcaagctaaatatcttggtgttccatttattgctgaatggttcagaaacaaagggcattctattaaatcccaaataactgctgcaacaggtgcattagctcttatgcagctgcaggaagactggagaaagcatctcagtgatgagtgccactacaatgaagaggaactggaggcttacatgctgacacataagagtgttatggtggactcgttatggaagcttaatgttgctgatatagaggaaaccctgtcacatgtgtgtcaaatggtgcttcatgacagcagtgccaggaaagaggaactgcgagttcgagctaaaggattgaaaactttaggcaaaatattccatcaagccaagcttagcactgctgagggagatccagcagcaatgaataatacaataaataacttggatgagaatgatgatagttcaccggagtcatctccaagatctcccagggaccaaatgttcgatacaaacccaccttattcccagagtccatacgtggaggcccctgagttgggcgggtatttttccttcgacttcccaatgcctatcgctccgcctggcgcgcagagggaccctattccgtgaccgccgtgagtgcggcggctctgttttgtgtggatcgtcattttgtacaatattgcctgtgtaaatcatttttatttgtaacattagtagcagtagtgtgagacagcagcttggcacccattgcatcgtttcttttctttttcttcgtgtaatcaatcaatcaagcatgcgacgacggcagccttgtcttgttcgtagggcttggtctgcttctggccacgggtcagccattggtgtacatgaactaccacctctttgtttcttgtgtttatcagtttatgggtgcataattgtttagcctatgggcccatctgggcaaacaacacttgcttgtgctaagctttgctcgaacttcgtctcgtgaaatttgatcatctcctcttcctgc

SEQ ID NO: 29180 - protein, 394 aa, Zea mays subsp. mays
  peptide (1)..(394): Ceres Seq. ID no. 12408773
  misc_feature (7)..(71): Pfam Name: Pfam Description:  DnaJ domain
  misc_feature (122)..(394): NCBI GI NO: 27817868 NR Description: OJ1081_B12.17
  misc_feature (1)..(130): NCBI GI NO: 27817868 NR Description: OJ1081_B12.17
  misc_feature (1)..(390): NCBI GI NO: 18394951 NR Description: expressed protein; protein id: At1g21080
  misc_feature (1)..(388): NCBI GI NO: 15223142 NR Description: putative DnaJ protein; protein id: At1g76700.1
  misc_feature (1)..(388): NCBI GI NO: 26449747 NR Description: putative DnaJ protein [Arabidopsis thaliana]
  misc_feature (1)..(394): NCBI GI NO: 2230757 NR Description: dnaJ-like protein [Arabidopsis thaliana]
  misc_feature (1)..(349): NCBI GI NO: 30699227 NR Description: DnaJ protein family [Arabidopsis thaliana]
  misc_feature (89)..(390): NCBI GI NO: 15982848 NR Description: At1g21080/T22I11_9 [Arabidopsis thaliana]
  misc_feature (1)..(344): NCBI GI NO: 15226572 NR Description: putative DnaJ protein; protein id: At2g21510
  misc_feature (1)..(297): NCBI GI NO: 25406486 NR Description: hypothetical protein F22K20.12
MVRETGYYDVLEVSPTASEAEIKKAYYVKARQVHPDKNPDDPLAAARFQELGEAYQVLSNPKQREDYDLHGKPGISTEAIIDPAAIFAMLFGSELFEDYIGQLAMASMASLDGFTENEQIDPRRLQEQMRVVQKEREEKLAEALKDRLHLYVQGNKEEFIQYADAEVTRLSNAAYGVDMLSTIGYVYSRQASKELGKQAKYLGVPFIAEWFRNKGHSIKSQITAATGALALMQLQEDWRKHLSDECHYNEEELEAYMLTHKSVMVDSLWKLNVADIEETLSHVCQMVLHDSSARKEELRVRAKGLKTLGKIFHQAKLSTAEGDPAAMNNTINNLDENDDSSPESSPRSPRDQMFDTNPPYSQSPYVEAPELGGYFSFDFPMPIAPPGAQRDPIP

SEQ ID NO: 29181 - protein, 306 aa, Zea mays subsp. mays
  peptide (1)..(306): Ceres Seq. ID no. 12408774
  misc_feature (34)..(306): NCBI GI NO: 27817868 NR Description: OJ1081_B12.17
  misc_feature (1)..(42): NCBI GI NO: 27817868 NR Description: OJ1081_B12.17
  misc_feature (1)..(302): NCBI GI NO: 18394951 NR Description: expressed protein; protein id: At1g21080
  misc_feature (1)..(300): NCBI GI NO: 15223142 NR Description: putative DnaJ protein; protein id: At1g76700.1
  misc_feature (1)..(300): NCBI GI NO: 26449747 NR Description: putative DnaJ protein [Arabidopsis thaliana]
  misc_feature (1)..(306): NCBI GI NO: 2230757 NR Description: dnaJ-like protein [Arabidopsis thaliana]
  misc_feature (1)..(261): NCBI GI NO: 30699227 NR Description: DnaJ protein family [Arabidopsis thaliana]
  misc_feature (1)..(302): NCBI GI NO: 15982848 NR Description: At1g21080/T22I11_9 [Arabidopsis thaliana]
  misc_feature (1)..(256): NCBI GI NO: 15226572 NR Description: putative DnaJ protein; protein id: At2g21510
  misc_feature (1)..(209): NCBI GI NO: 25406486 NR Description: hypothetical protein F22K20.12
MLFGSELFEDYIGQLAMASMASLDGFTENEQIDPRRLQEQMRVVQKEREEKLAEALKDRLHLYVQGNKEEFIQYADAEVTRLSNAAYGVDMLSTIGYVYSRQASKELGKQAKYLGVPFIAEWFRNKGHSIKSQITAATGALALMQLQEDWRKHLSDECHYNEEELEAYMLTHKSVMVDSLWKLNVADIEETLSHVCQMVLHDSSARKEELRVRAKGLKTLGKIFHQAKLSTAEGDPAAMNNTINNLDENDDSSPESSPRSPRDQMFDTNPPYSQSPYVEAPELGGYFSFDFPMPIAPPGAQRDPIP

SEQ ID NO: 29182 - protein, 290 aa, Zea mays subsp. mays
  peptide (1)..(290): Ceres Seq. ID no. 12408775
  misc_feature (18)..(290): NCBI GI NO: 27817868 NR Description: OJ1081_B12.17
  misc_feature (1)..(26): NCBI GI NO: 27817868 NR Description: OJ1081_B12.17
  misc_feature (1)..(286): NCBI GI NO: 18394951 NR Description: expressed protein; protein id: At1g21080
  misc_feature (1)..(284): NCBI GI NO: 15223142 NR Description: putative DnaJ protein; protein id: At1g76700.1
  misc_feature (1)..(284): NCBI GI NO: 26449747 NR Description: putative DnaJ protein [Arabidopsis thaliana]
  misc_feature (1)..(290): NCBI GI NO: 2230757 NR Description: dnaJ-like protein [Arabidopsis thaliana]
  misc_feature (1)..(245): NCBI GI NO: 30699227 NR Description: DnaJ protein family [Arabidopsis thaliana]
  misc_feature (1)..(286): NCBI GI NO: 15982848 NR Description: At1g21080/T22I11_9 [Arabidopsis thaliana]
  misc_feature (1)..(240): NCBI GI NO: 15226572 NR Description: putative DnaJ protein; protein id: At2g21510
  misc_feature (1)..(193): NCBI GI NO: 25406486 NR Description: hypothetical protein F22K20.12
MASMASLDGFTENEQIDPRRLQEQMRVVQKEREEKLAEALKDRLHLYVQGNKEEFIQYADAEVTRLSNAAYGVDMLSTIGYVYSRQASKELGKQAKYLGVPFIAEWFRNKGHSIKSQITAATGALALMQLQEDWRKHLSDECHYNEEELEAYMLTHKSVMVDSLWKLNVADIEETLSHVCQMVLHDSSARKEELRVRAKGLKTLGKIFHQAKLSTAEGDPAAMNNTINNLDENDDSSPESSPRSPRDQMFDTNPPYSQSPYVEAPELGGYFSFDFPMPIAPPGAQRDPIP

SEQ ID NO: 29183 - DNA, 1334 bp, Zea mays subsp. mays
  misc_feature (1)..(1334): Ceres Seq. ID no. 12408768
gccgccatctctctctctctctctctctctctcttcatcgccgcagtgcgcgctcctacaacccatcgctcaccaccacctgctcctccagcggcggcgtccagggtgaacccgaatccccaacaccatggcggggggcaagatccagaagaagcgccacggcgcggcgggaggcgcccggctgcagggcggtatcccgttcgagaagtccaaggggcagcacatcctgcggaacccggcgctggtggactccatcgtcgccaaggccggtctcaagcccaccgacaccgtcctggagatcgggccgggcacaggaaacctcaccaagcgcctcctcgaggctggtgtcaaggccgtcgtcgccgtcgagctcgacccgcgcatggtgctcgagctcaaccggcggttccaggggcacccgctctcctcgcgcctcaaggttatccaaggagatgtcctcaaatgtgatctcccatactttgatatttgtgtggcaaacatcccgtaccagatctcatctccccttactttcaagcttctgtcacaccgtccaatctttaggtgtgctgtgattatgtttcaacgtgaatttgccatgagacttgtggcacaaccgggagatagcctctactgtcgtctctccgtgaatgtgcagctcctgtcacgagtgtcgcatctcctgaaggtggggaggaacaactttaggcctccacccaaagttgattcatcagttgtgcgaatagagcccaggaagcccctccctcctgtcagcttcaaggagtgggatgggcttgtgaggatttgtttcaaccggaagaacaagaccctgggctccctctttaaacagaaacgtgttctggaattgctagagaagaactacaagactatgcagtctctccaaactgtgcaagatgcagaaatgggtgaggagaagatgtccgcagacgatgtcgcgttgctggctaatatggttgaagatatgagcatggagactggctatgataaggaagatgatgaaatggaaatggatgatgcagacatggctggagatggtgctgcaagctttaaagaaaagattatgggtatattgcagcagggcgattttgcagaaaagagaggttccaagctgagccaagttgatttcttatacctgctgtccctcttcaacaaagctggtatacatttctcgtgattggtggtccagcttctcttcagtagtagtctgtttctttctgttttatttgtcgtgctgttaatgtacttattagttactgaaaaaacctctaagcttgtgctcgtagaaattttttacaggctccgtcctagtttgagct

SEQ ID NO: 29184 - protein, 354 aa, Zea mays subsp. mays
  peptide (1)..(354): Ceres Seq. ID no. 12408769
  misc_feature (1)..(354): NCBI GI NO: 15226591 NR Description: putative dimethyladenosine transferase
  misc_feature (21)..(302): NCBI GI NO: 21313560 NR Description: RIKEN cDNA 1500031M22 [Mus musculus]
  misc_feature (312)..(354): NCBI GI NO: 21313560 NR Description: RIKEN cDNA 1500031M22 [Mus musculus]
  misc_feature (21)..(302): NCBI GI NO: 7657198 NR Description: putative dimethyladenosine transferase
  misc_feature (312)..(354): NCBI GI NO: 7657198 NR Description: putative dimethyladenosine transferase
  misc_feature (21)..(302): NCBI GI NO: 27151490 NR Description: Probable dimethyladenosine transferase
  misc_feature (312)..(354): NCBI GI NO: 27151490 NR Description: Probable dimethyladenosine transferase
  misc_feature (5)..(300): NCBI GI NO: 21358017 NR Description: CG11837-PA [Drosophila melanogaster]
  misc_feature (314)..(354): NCBI GI NO: 21358017 NR Description: CG11837-PA [Drosophila melanogaster]
  misc_feature (2)..(302): NCBI GI NO: 34854204 NR Description: similar to RIKEN cDNA 1500031M22
MAGGKIQKKRHGAAGGARLQGGIPFEKSKGQHILRNPALVDSIVAKAGLKPTDTVLEIGPGTGNLTKRLLEAGVKAVVAVELDPRMVLELNRRFQGHPLSSRLKVIQGDVLKCDLPYFDICVANIPYQISSPLTFKLLSHRPIFRCAVIMFQREFAMRLVAQPGDSLYCRLSVNVQLLSRVSHLLKVGRNNFRPPPKVDSSVVRIEPRKPLPPVSFKEWDGLVRICFNRKNKTLGSLFKQKRVLELLEKNYKTMQSLQTVQDAEMGEEKMSADDVALLANMVEDMSMETGYDKEDDEMEMDDADMAGDGAASFKEKIMGILQQGDFAEKRGSKLSQVDFLYLLSLFNKAGIHFS

SEQ ID NO: 29185 - protein, 269 aa, Zea mays subsp. mays
  peptide (1)..(269): Ceres Seq. ID no. 12408770
  misc_feature (1)..(269): NCBI GI NO: 15226591 NR Description: putative dimethyladenosine transferase
  misc_feature (1)..(217): NCBI GI NO: 21313560 NR Description: RIKEN cDNA 1500031M22 [Mus musculus]
  misc_feature (227)..(269): NCBI GI NO: 21313560 NR Description: RIKEN cDNA 1500031M22 [Mus musculus]
  misc_feature (1)..(217): NCBI GI NO: 7657198 NR Description: putative dimethyladenosine transferase
  misc_feature (227)..(269): NCBI GI NO: 7657198 NR Description: putative dimethyladenosine transferase
  misc_feature (1)..(217): NCBI GI NO: 27151490 NR Description: Probable dimethyladenosine transferase
  misc_feature (227)..(269): NCBI GI NO: 27151490 NR Description: Probable dimethyladenosine transferase
  misc_feature (1)..(215): NCBI GI NO: 21358017 NR Description: CG11837-PA [Drosophila melanogaster]
  misc_feature (229)..(269): NCBI GI NO: 21358017 NR Description: CG11837-PA [Drosophila melanogaster]
  misc_feature (1)..(217): NCBI GI NO: 34854204 NR Description: similar to RIKEN cDNA 1500031M22
MVLELNRRFQGHPLSSRLKVIQGDVLKCDLPYFDICVANIPYQISSPLTFKLLSHRPIFRCAVIMFQREFAMRLVAQPGDSLYCRLSVNVQLLSRVSHLLKVGRNNFRPPPKVDSSVVRIEPRKPLPPVSFKEWDGLVRICFNRKNKTLGSLFKQKRVLELLEKNYKTMQSLQTVQDAEMGEEKMSADDVALLANMVEDMSMETGYDKEDDEMEMDDADMAGDGAASFKEKIMGILQQGDFAEKRGSKLSQVDFLYLLSLFNKAGIHFS

SEQ ID NO: 29186 - protein, 205 aa, Zea mays subsp. mays
  peptide (1)..(205): Ceres Seq. ID no. 12408771
  misc_feature (1)..(205): NCBI GI NO: 15226591 NR Description: putative dimethyladenosine transferase
  misc_feature (1)..(153): NCBI GI NO: 21313560 NR Description: RIKEN cDNA 1500031M22 [Mus musculus]
  misc_feature (163)..(205): NCBI GI NO: 21313560 NR Description: RIKEN cDNA 1500031M22 [Mus musculus]
  misc_feature (1)..(153): NCBI GI NO: 7657198 NR Description: putative dimethyladenosine transferase
  misc_feature (163)..(205): NCBI GI NO: 7657198 NR Description: putative dimethyladenosine transferase
  misc_feature (1)..(153): NCBI GI NO: 27151490 NR Description: Probable dimethyladenosine transferase
  misc_feature (163)..(205): NCBI GI NO: 27151490 NR Description: Probable dimethyladenosine transferase
  misc_feature (1)..(151): NCBI GI NO: 21358017 NR Description: CG11837-PA [Drosophila melanogaster]
  misc_feature (165)..(205): NCBI GI NO: 21358017 NR Description: CG11837-PA [Drosophila melanogaster]
  misc_feature (1)..(153): NCBI GI NO: 34854204 NR Description: similar to RIKEN cDNA 1500031M22
MFQREFAMRLVAQPGDSLYCRLSVNVQLLSRVSHLLKVGRNNFRPPPKVDSSVVRIEPRKPLPPVSFKEWDGLVRICFNRKNKTLGSLFKQKRVLELLEKNYKTMQSLQTVQDAEMGEEKMSADDVALLANMVEDMSMETGYDKEDDEMEMDDADMAGDGAASFKEKIMGILQQGDFAEKRGSKLSQVDFLYLLSLFNKAGIHFS

SEQ ID NO: 29187 - DNA, 1432 bp, Zea mays subsp. mays
  misc_feature (1)..(1432): Ceres Seq. ID no. 12357962
  misc_feature (1376)..(1376): n is a, c, t, g, unknown, or other
  misc_feature (1397)..(1397): n is a, c, t, g, unknown, or other
  misc_feature (1395)..(1395): n is a, c, t, g, unknown, or other
gcaggttccagtattccaccacgcggcgtcgcctgccgaaccccgaaccttctcgaggtcgaggcccctcccctttcgccaggaggtgcgcacggcacgactaacctccacactccccactagcttttcttcccagtttgctccgattttgattccatgaaaacaatgagcaggcgcaacagccgtaccatctatgtaggcaatctccctggggacatccgtgagagggaggttgaggatctcttctacaagtatggccgtattttggatattgacttgaaaatacctccgagacctcctggatacgcattcgttgagtttgaggatccacgtgatgctgatgatgcaatttatggccgtgatgggtataactttgatggctacaggttgagggttgaattagctcatggtggcagaggccagtcttattcttatgatcgttcaagcagctatagcagtgcatgccgtggaggtgtttctaggcgctctgatttccgtgttatggtcactggtttaccctcatcggcatcgtggcaagatctgaaggaccacatgcggcgcgctggtgatgtctgtttctctgatgtataccgtgaggctggagaaactattggaattgtggattatacaaattatgacgatatgaaatacgcgattaggaagcttgatgactcacagttcaggaatgcattttcaagagcatatatcagggtgagggagtatgatgctagatcacgaagcagaagccgtagccactcgtactctagaacccccagctacagcaggagcaggagtccaaaatctgtttctcagtcaccctcatctgtggatgaaagatcgctatcaagatctcgatccccaatttcttctccttctcatgcaagatatgcgacaagccctaggagcagaagcgcatcccgttctcggtctcctgttagatccgattgaactttgagagcccttgaagcagtgagcagccccagggagaagaaaggaacttgagagtatgccgtgccatcacaatggtccgagtgattatgctgttgccactgctccctcacatttaagaggtttcctcttatttagacggcgcatttaattaacattatcttgctaaagagagacttatgcgtagtctacttgtgtactcgttcgtttgtcctcatgttcttggcttcaggaactctggttttttatcattgtacccatagtaaaacctagatgtagttggggtatgccgtatgcgtctatattcggttggtcgaatgtaaatctggatgcatatatgcatctgtttggtttcatttaggcctttccttggtttcgtgattaatgacaacataagcttattgctgtgatcaaagtatattttgtanaggtaattaaagctagtcncncaataatggagattgcttagacaacgtatggtttt

SEQ ID NO: 29188 - protein, 263 aa, Zea mays subsp. mays
  peptide (1)..(263): Ceres Seq. ID no. 12357963
  misc_feature (12)..(80): Pfam Name: a.k.a. RRM, RBD, or RNP domain Pfam Description: RNA recognition motif.
  misc_feature (4)..(263): NCBI GI NO: 34894608 NR Description: putative pre-mRNA splicing factor SF2
  misc_feature (4)..(259): NCBI GI NO: 33146854 NR Description: putative pre-mRNA splicing factor SF2
  misc_feature (4)..(263): NCBI GI NO: 22329428 NR Description: arginine/serine-rich splicing factor, atSRp30
  misc_feature (4)..(260): NCBI GI NO: 4775270 NR Description: SF2/ASF-like splicing modulator Srp30
  misc_feature (4)..(262): NCBI GI NO: 30678391 NR Description: pre-mRNA splicing factor SF2 (SR1 protein)
  misc_feature (4)..(242): NCBI GI NO: 4775271 NR Description: SF2/ASF-like splicing modulator Srp30, variant 1
  misc_feature (4)..(261): NCBI GI NO: 2443473 NR Description: ASF/SF2 homolog [Arabidopsis thaliana]
  misc_feature (4)..(263): NCBI GI NO: 12324445 NR Description: putative splicing factor; 53460-55514
  misc_feature (4)..(259): NCBI GI NO: 22331714 NR Description: arginine/serine-rich splicing factor
  misc_feature (4)..(184): NCBI GI NO: 7484802 NR Description: alternative splicing factor ASF-2 homolog T14P8
MKTMSRRNSRTIYVGNLPGDIREREVEDLFYKYGRILDIDLKIPPRPPGYAFVEFEDPRDADDAIYGRDGYNFDGYRLRVELAHGGRGQSYSYDRSSSYSSACRGGVSRRSDFRVMVTGLPSSASWQDLKDHMRRAGDVCFSDVYREAGETIGIVDYTNYDDMKYAIRKLDDSQFRNAFSRAYIRVREYDARSRSRSRSHSYSRTPSYSRSRSPKSVSQSPSSVDERSLSRSRSPISSPSHARYATSPRSRSASRSRSPVRSD

SEQ ID NO: 29189 - protein, 260 aa, Zea mays subsp. mays
  peptide (1)..(260): Ceres Seq. ID no. 12357964
  misc_feature (9)..(77): Pfam Name: a.k.a. RRM, RBD, or RNP domain Pfam Description: RNA recognition motif.
  misc_feature (1)..(260): NCBI GI NO: 34894608 NR Description: putative pre-mRNA splicing factor SF2
  misc_feature (1)..(256): NCBI GI NO: 33146854 NR Description: putative pre-mRNA splicing factor SF2
  misc_feature (1)..(260): NCBI GI NO: 22329428 NR Description: arginine/serine-rich splicing factor, atSRp30
  misc_feature (1)..(257): NCBI GI NO: 4775270 NR Description: SF2/ASF-like splicing modulator Srp30
  misc_feature (1)..(259): NCBI GI NO: 30678391 NR Description: pre-mRNA splicing factor SF2 (SR1 protein)
  misc_feature (1)..(239): NCBI GI NO: 4775271 NR Description: SF2/ASF-like splicing modulator Srp30, variant 1
  misc_feature (1)..(258): NCBI GI NO: 2443473 NR Description: ASF/SF2 homolog [Arabidopsis thaliana]
  misc_feature (1)..(260): NCBI GI NO: 12324445 NR Description: putative splicing factor; 53460-55514
  misc_feature (1)..(256): NCBI GI NO: 22331714 NR Description: arginine/serine-rich splicing factor
  misc_feature (1)..(181): NCBI GI NO: 7484802 NR Description: alternative splicing factor ASF-2 homolog T14P8
MSRRNSRTIYVGNLPGDIREREVEDLFYKYGRILDIDLKIPPRPPGYAFVEFEDPRDADDAIYGRDGYNFDGYRLRVELAHGGRGQSYSYDRSSSYSSACRGGVSRRSDFRVMVTGLPSSASWQDLKDHMRRAGDVCFSDVYREAGETIGIVDYTNYDDMKYAIRKLDDSQFRNAFSRAYIRVREYDARSRSRSRSHSYSRTPSYSRSRSPKSVSQSPSSVDERSLSRSRSPISSPSHARYATSPRSRSASRSRSPVRSD

SEQ ID NO: 29190 - protein, 148 aa, Zea mays subsp. mays
  peptide (1)..(148): Ceres Seq. ID no. 12357965
  misc_feature (1)..(148): NCBI GI NO: 34894608 NR Description: putative pre-mRNA splicing factor SF2
  misc_feature (1)..(144): NCBI GI NO: 33146854 NR Description: putative pre-mRNA splicing factor SF2
  misc_feature (1)..(148): NCBI GI NO: 22329428 NR Description: arginine/serine-rich splicing factor, atSRp30
  misc_feature (1)..(145): NCBI GI NO: 4775270 NR Description: SF2/ASF-like splicing modulator Srp30
  misc_feature (1)..(147): NCBI GI NO: 30678391 NR Description: pre-mRNA splicing factor SF2 (SR1 protein)
  misc_feature (1)..(127): NCBI GI NO: 4775271 NR Description: SF2/ASF-like splicing modulator Srp30, variant 1
  misc_feature (1)..(146): NCBI GI NO: 2443473 NR Description: ASF/SF2 homolog [Arabidopsis thaliana]
  misc_feature (1)..(148): NCBI GI NO: 12324445 NR Description: putative splicing factor; 53460-55514
  misc_feature (1)..(144): NCBI GI NO: 22331714 NR Description: arginine/serine-rich splicing factor
  misc_feature (1)..(69): NCBI GI NO: 7484802 NR Description: alternative splicing factor ASF-2 homolog T14P8
MVTGLPSSASWQDLKDHMRRAGDVCFSDVYREAGETIGIVDYTNYDDMKYAIRKLDDSQFRNAFSRAYIRVREYDARSRSRSRSHSYSRTPSYSRSRSPKSVSQSPSSVDERSLSRSRSPISSPSHARYATSPRSRSASRSRSPVRSD

SEQ ID NO: 29191 - DNA, 1692 bp, Zea mays subsp. mays
  misc_feature (1)..(1692): Ceres Seq. ID no. 12408764
ggccctctagctagctccggctccgcccactctctatccagtagctagccacaggctctcatccgcctcttgttccttgtcttgttcatggatgcagagacactcaacatcttcccttcccagcccatgcatgtggagccgtcgccgaagggggagattagtttagtcctgtcaccggcgccggtgggatccaagcagcctaggtcaccggaccatcaccatcaccagcaggcggccatggaggagttggcggggagcaggaggcagcagcaggagcacctccacctgcagcaccaccaaccctttgctgccgctgctgagccagcagcacccgggatgatcaaagatgtcaagccactggccaagaaggatcacaggagaggcacatcgaccgctgaacgcgacccaaaaacgctgagaaggctggcccagaacagggaggctgcaaggaaaagcaggctaaggaagaaggcttacatccagcaactcgagtccagcaggatcaggctagctcagctcgaacaagaactgcacactgcaagagctcagggagttttcttccccaacagtggcatcctcgctgaccaaggtgtcgccggcaaaggcgtccccatcggcggcatcgacggcctcagctcagaggcggcgatgttcgacgtggagtacgggcggtggcaggaggagcactaccggctgatgtacgagcttcgggcggcgctgcagcagcacctgccggagggggagctgcagatgtacgtggagagctgcctggcgcaccacgacgagatggtgggcatcaaggagggcgccatcaagggcgacgtcttccacctcatctccggcgtctggcggagccccgccgagcgctgcttcctctggctcggcggcttccgcccctccgaagtcatcaagatgctgctgagccacgtagagcccctgaccgaacagcagatcgtgggcgtgtacgggctgcagcagtcggcgctggagacggaggaagcgctgagccagggcctggaggcgctctaccagtcgctgtctgacaccgtggtctccgacgcgctcagctgcccctcgaacgtctccaactacatgggtcagatggccgtcgccatgaacaagctctccacgctcgagggcttcgtcagacaagctgagaaccttcggcagcagacgctgcaccggctgcaccaggtcctgacgacgcggcagatggcgcggtcgctgctggccgtgtcggactacttccaccgcctccgcacgctgagctcgctctgggtcacacgccccagggcaccgcaggagcaataatagggccacagctggtgacggcggcgctgatgaatggtgatcgccggccgccgcatacaacggcgccacacgcgcatgtgtccattcatgcatatatgagtcgtgcatgggcgcatgcatggtgtgtcgttcgtcatcaagaacagagcttgcaggtagagccagttagggccggccgggggagagagagctagtgaggacgacaaaccaaccaaaggataatgttaatcttggcgacgattgtcgtgttgcttgctttgtagctatagctaggtgtagttgatcgttcgatcgcgatctatcgatcgatcggctgctgctgtagtcgatgcggtggagtgatgatgttgttctaagttaattatctctcatgatcaccgg

SEQ ID NO: 29192 - protein, 407 aa, Zea mays subsp. mays
  peptide (1)..(407): Ceres Seq. ID no. 12408765
  misc_feature (106)..(162): Pfam Name: Pfam Description:  bZIP transcription factor
  misc_feature (40)..(402): NCBI GI NO: 30681632 NR Description: bZIP transcription factor family protein
  misc_feature (5)..(20): NCBI GI NO: 30681632 NR Description: bZIP transcription factor family protein
  misc_feature (40)..(402): NCBI GI NO: 14329655 NR Description: bZIP transcription factor [Arabidopsis thaliana]
  misc_feature (5)..(20): NCBI GI NO: 14329655 NR Description: bZIP transcription factor [Arabidopsis thaliana]
  misc_feature (93)..(402): NCBI GI NO: 9759540 NR Description: bZIP transcription factor-like protein
  misc_feature (101)..(402): NCBI GI NO: 6288682 NR Description: bZIP transcription factor [Nicotiana tabacum]
  misc_feature (86)..(402): NCBI GI NO: 15148926 NR Description: TGA-type basic leucine zipper protein TGA2.2
  misc_feature (101)..(402): NCBI GI NO: 15148924 NR Description: TGA-type basic leucine zipper protein TGA2.1
  misc_feature (106)..(402): NCBI GI NO: 422029 NR Description: transcription factor OBF3.2 - maize
  misc_feature (106)..(402): NCBI GI NO: 422028 NR Description: transcription factor OBF3.1 - maize
MDAETLNIFPSQPMHVEPSPKGEISLVLSPAPVGSKQPRSPDHHHHQQAAMEELAGSRRQQQEHLHLQHHQPFAAAAEPAAPGMIKDVKPLAKKDHRRGTSTAERDPKTLRRLAQNREAARKSRLRKKAYIQQLESSRIRLAQLEQELHTARAQGVFFPNSGILADQGVAGKGVPIGGIDGLSSEAAMFDVEYGRWQEEHYRLMYELRAALQQHLPEGELQMYVESCLAHHDEMVGIKEGAIKGDVFHLISGVWRSPAERCFLWLGGFRPSEVIKMLLSHVEPLTEQQIVGVYGLQQSALETEEALSQGLEALYQSLSDTVVSDALSCPSNVSNYMGQMAVAMNKLSTLEGFVRQAENLRQQTLHRLHQVLTTRQMARSLLAVSDYFHRLRTLSSLWVTRPRAPQEQ

SEQ ID NO: 29193 - protein, 394 aa, Zea mays subsp. mays
  peptide (1)..(394): Ceres Seq. ID no. 12408766
  misc_feature (93)..(149): Pfam Name: Pfam Description:  bZIP transcription factor
  misc_feature (27)..(389): NCBI GI NO: 30681632 NR Description: bZIP transcription factor family protein
  misc_feature (27)..(389): NCBI GI NO: 14329655 NR Description: bZIP transcription factor [Arabidopsis thaliana]
  misc_feature (80)..(389): NCBI GI NO: 9759540 NR Description: bZIP transcription factor-like protein
  misc_feature (88)..(389): NCBI GI NO: 6288682 NR Description: bZIP transcription factor [Nicotiana tabacum]
  misc_feature (73)..(389): NCBI GI NO: 15148926 NR Description: TGA-type basic leucine zipper protein TGA2.2
  misc_feature (88)..(389): NCBI GI NO: 15148924 NR Description: TGA-type basic leucine zipper protein TGA2.1
  misc_feature (93)..(389): NCBI GI NO: 422029 NR Description: transcription factor OBF3.2 - maize
  misc_feature (93)..(389): NCBI GI NO: 422028 NR Description: transcription factor OBF3.1 - maize
  misc_feature (93)..(389): NCBI GI NO: 12230709 NR Description: TGACG-sequence specific DNA-binding protein TGA-2
  misc_feature (93)..(389): NCBI GI NO: 17025920 NR Description: bZIP transcription factor [Oryza sativa]
MHVEPSPKGEISLVLSPAPVGSKQPRSPDHHHHQQAAMEELAGSRRQQQEHLHLQHHQPFAAAAEPAAPGMIKDVKPLAKKDHRRGTSTAERDPKTLRRLAQNREAARKSRLRKKAYIQQLESSRIRLAQLEQELHTARAQGVFFPNSGILADQGVAGKGVPIGGIDGLSSEAAMFDVEYGRWQEEHYRLMYELRAALQQHLPEGELQMYVESCLAHHDEMVGIKEGAIKGDVFHLISGVWRSPAERCFLWLGGFRPSEVIKMLLSHVEPLTEQQIVGVYGLQQSALETEEALSQGLEALYQSLSDTVVSDALSCPSNVSNYMGQMAVAMNKLSTLEGFVRQAENLRQQTLHRLHQVLTTRQMARSLLAVSDYFHRLRTLSSLWVTRPRAPQEQ

SEQ ID NO: 29194 - protein, 357 aa, Zea mays subsp. mays
  peptide (1)..(357): Ceres Seq. ID no. 12408767
  misc_feature (56)..(112): Pfam Name: Pfam Description:  bZIP transcription factor
  misc_feature (1)..(352): NCBI GI NO: 30681632 NR Description: bZIP transcription factor family protein
  misc_feature (1)..(352): NCBI GI NO: 14329655 NR Description: bZIP transcription factor [Arabidopsis thaliana]
  misc_feature (43)..(352): NCBI GI NO: 9759540 NR Description: bZIP transcription factor-like protein
  misc_feature (51)..(352): NCBI GI NO: 6288682 NR Description: bZIP transcription factor [Nicotiana tabacum]
  misc_feature (36)..(352): NCBI GI NO: 15148926 NR Description: TGA-type basic leucine zipper protein TGA2.2
  misc_feature (51)..(352): NCBI GI NO: 15148924 NR Description: TGA-type basic leucine zipper protein TGA2.1
  misc_feature (56)..(352): NCBI GI NO: 422029 NR Description: transcription factor OBF3.2 - maize
  misc_feature (56)..(352): NCBI GI NO: 422028 NR Description: transcription factor OBF3.1 - maize
  misc_feature (56)..(352): NCBI GI NO: 12230709 NR Description: TGACG-sequence specific DNA-binding protein TGA-2
  misc_feature (56)..(352): NCBI GI NO: 17025920 NR Description: bZIP transcription factor [Oryza sativa]
MEELAGSRRQQQEHLHLQHHQPFAAAAEPAAPGMIKDVKPLAKKDHRRGTSTAERDPKTLRRLAQNREAARKSRLRKKAYIQQLESSRIRLAQLEQELHTARAQGVFFPNSGILADQGVAGKGVPIGGIDGLSSEAAMFDVEYGRWQEEHYRLMYELRAALQQHLPEGELQMYVESCLAHHDEMVGIKEGAIKGDVFHLISGVWRSPAERCFLWLGGFRPSEVIKMLLSHVEPLTEQQIVGVYGLQQSALETEEALSQGLEALYQSLSDTVVSDALSCPSNVSNYMGQMAVAMNKLSTLEGFVRQAENLRQQTLHRLHQVLTTRQMARSLLAVSDYFHRLRTLSSLWVTRPRAPQEQ

SEQ ID NO: 29195 - DNA, 1676 bp, Zea mays subsp. mays
  misc_feature (1)..(1676): Ceres Seq. ID no. 12386749
actcaagtcacaacaaacaccaccatcgtctctttgctcagcacaaaagcatcacactccctctctctcgcgcgctcacaagcacgtcgtcaaccatggttgtcgagatgaaggagaacggcgtagcggcgatggcggcgggcgagaaggcgccgcagctgggcgtgaagcgcggcgagccgacgctggtgccgccggcggaggcgacgccgacgggcgggcagtactacctgtccaacctggaccagaacatcgcggtgatcgtgcagacggtgtactgctacaagccctcctcgccgcccggcggcggcgaaggcaaggacgtggacgtggcagccgcgctccgcgacgcgctggcgcgcgtgctggtgcactaccacccgctggcggggcggctgggcgtcagcccggaggatgaagctcaccgtggagctgaccggcggagggcgccgtgttcgtggaggccgacgccgcctgcgacctcgccgccgtcggcgacctcaccaagcccgaccccgccgcgctcggccagctcgtctactccgtccccggcgccaaacacatcctcgagatgccccccatgaccgcgcaggtgacgaggttcaagtgtgggggcttcgcgctcggcctggccatgaaccactgcatgttcgacggcatcggcgccatggagttcgtcaactcgtgggcggagacggcgcgcggcgtcgccgagctcaccgtgccgccgttcctggaccgaagcgtcctgaaggcgcgcgacccgcccgtgcccaccttcccccaccacgagttcgccgagatccccgacgtctccgacacggcggcgctctacggcgcgcaggagctgctgtaccgctccttctgcttcgacccggaccggctggagcgcgtgcgcgggcttgcgctcgccgacggcgccctgggccgctgcaccaccttcgaggcgctgtcggggctggtgtggcgcgcgcgcaccaaggcgctggggctggcgcccgagcagcgcaccaagctgctgttcgccgtggacgggcggcgccggttcgcgccgccgctcccgcggggctacttcggcaacggcatcgtgctcaccaacgcccttgccacggccggcgagctgctgtccgcgcccgtgtcgcgcgcggcggggctggtgcaggacgccgtgcggatggtcaccgacgactacatgcgctcggcggtggactacttcgaggcgacgcgggcccggccgtcgctcgcgtccacgctgctcatcaccacctggtcgcgcctcgagttccacggcgccgacttcgggtggggcgagcccgtcatgtcgggcccggtcacgctgccggagaaggaagtcatcctgttcctggcgcacgggaaggagaggaagagcatcaacgtgctgctcggcctgccagccaccgcgatggacgccttccaagagctcatggacgagatatgattcattcgtcggtgatgacggacatggatgggttgctgctatacatacatttacgatgcagggtgcttatacattcttcaattgctcggtgttatagtacgaccgtgttaatactcgatctatgttgatgttgttaagtttagtggccatatgagaatttgctgtcgattgcaattgttctaatattaatggaaaatagtaaactttatttcctttc

SEQ ID NO: 29196 - protein, 390 aa, Zea mays subsp. mays
  peptide (1)..(390): Ceres Seq. ID no. 12386750
MKLTVELTGGGRRVRGGRRRLRPRRRRRPHQARPRRARPARLLRPRRQTHPRDAPHDRAGDEVQVWGLRARPGHEPLHVRRHRRHGVRQLVGGDGARRRRAHRAAVPGPKRPEGARPARAHLPPPRVRRDPRRLRHGGALRRAGAAVPLLLLRPGPAGARARACARRRRPGPLHHLRGAVGAGVARAHQGAGAGARAAHQAAVRRGRAAPVRAAAPAGLLRQRHRAHQRPCHGRRAAVRARVARGGAGAGRRADGHRRLHALGGGLLRGDAGPAVARVHAAHHHLVAPRVPRRRLRVGRARHVGPGHAAGEGSHPVPGAREGEEEHQRAARPASHRDGRLPRAHGRDMIHSSVMTDMDGLLLYIHLRCRVLIHSSIARCYSTTVLILDLC

SEQ ID NO: 29197 - protein, 295 aa, Zea mays subsp. mays
  peptide (1)..(295): Ceres Seq. ID no. 12386751
  misc_feature (1)..(290): Pfam Name: Pfam Description:  Transferase family
  misc_feature (1)..(290): NCBI GI NO: 30693723 NR Description: transferase family [Arabidopsis thaliana]
  misc_feature (1)..(290): NCBI GI NO: 30693725 NR Description: transferase family [Arabidopsis thaliana]
  misc_feature (1)..(295): NCBI GI NO: 20161743 NR Description: N-hydroxycinnamoyl/benzoyltransferase-like protein
  misc_feature (1)..(293): NCBI GI NO: 15242820 NR Description: acyltransferase-like protein; protein id:At5g63560
  misc_feature (1)..(293): NCBI GI NO: 21553692 NR Description: acyltransferase-like protein
  misc_feature (1)..(292): NCBI GI NO: 34222064 NR Description: At3g48720 [Arabidopsis thaliana]
  misc_feature (1)..(292): NCBI GI NO: 15229017 NR Description: putative protein; protein id: At3g48720.1
  misc_feature (1)..(292): NCBI GI NO: 15218793 NR Description: hypothetical protein; protein id: At1g03390.1
  misc_feature (1)..(292): NCBI GI NO: 15217644 NR Description: putative hypersensitivity-related protein
  misc_feature (1)..(292): NCBI GI NO: 27475616 NR Description: hydroxycinnamoyl transferase [Nicotiana tabacum]
MPPMTAQVTRFKCGGFALGLAMNHCMFDGIGAMEFVNSWAETARGVAELTVPPFLDRSVLKARDPPVPTFPHHEFAEIPDVSDTAALYGAQELLYRSFCFDPDRLERVRGLALADGALGRCTTFEALSGLVWRARTKALGLAPEQRTKLLFAVDGRRRFAPPLPRGYFGNGIVLTNALATAGELLSAPVSRAAGLVQDAVRMVTDDYMRSAVDYFEATRARPSLASTLLITTWSRLEFHGADFGWGEPVMSGPVTLPEKEVILFLAHGKERKSINVLLGLPATAMDAFQELMDEI

SEQ ID NO: 29198 - protein, 292 aa, Zea mays subsp. mays
  peptide (1)..(292): Ceres Seq. ID no. 12386752
  misc_feature (1)..(287): Pfam Name: Pfam Description:  Transferase family
  misc_feature (1)..(287): NCBI GI NO: 30693723 NR Description: transferase family [Arabidopsis thaliana]
  misc_feature (1)..(287): NCBI GI NO: 30693725 NR Description: transferase family [Arabidopsis thaliana]
  misc_feature (1)..(292): NCBI GI NO: 20161743 NR Description: N-hydroxycinnamoyl/benzoyltransferase-like protein
  misc_feature (1)..(290): NCBI GI NO: 15242820 NR Description: acyltransferase-like protein; protein id:At5g63560
  misc_feature (1)..(290): NCBI GI NO: 21553692 NR Description: acyltransferase-like protein
  misc_feature (1)..(289): NCBI GI NO: 34222064 NR Description: At3g48720 [Arabidopsis thaliana]
  misc_feature (1)..(289): NCBI GI NO: 15229017 NR Description: putative protein; protein id: At3g48720.1
  misc_feature (1)..(289): NCBI GI NO: 15218793 NR Description: hypothetical protein; protein id: At1g03390.1
  misc_feature (1)..(289): NCBI GI NO: 15217644 NR Description: putative hypersensitivity-related protein
  misc_feature (1)..(289): NCBI GI NO: 27475616 NR Description: hydroxycinnamoyl transferase [Nicotiana tabacum]
MTAQVTRFKCGGFALGLAMNHCMFDGIGAMEFVNSWAETARGVAELTVPPFLDRSVLKARDPPVPTFPHHEFAEIPDVSDTAALYGAQELLYRSFCFDPDRLERVRGLALADGALGRCTTFEALSGLVWRARTKALGLAPEQRTKLLFAVDGRRRFAPPLPRGYFGNGIVLTNALATAGELLSAPVSRAAGLVQDAVRMVTDDYMRSAVDYFEATRARPSLASTLLITTWSRLEFHGADFGWGEPVMSGPVTLPEKEVILFLAHGKERKSINVLLGLPATAMDAFQELMDEI

SEQ ID NO: 29199 - DNA, 1385 bp, Zea mays subsp. mays
  misc_feature (1)..(1385): Ceres Seq. ID no. 12391341
acgccatcaacagtaccattcagatcggaatcccagttagctctctgtgccctacctgtcagtgacacagaaatccagtcggcggggctgccgcctgccgcatcctcccctcgcccaccgtcgacgacttgatcccctcccaccgttgaggccgcctcctcacggcagcgagccagcgactcctctcttcttcgtctcctacaagtagccagacaccactccgactttgccggcaacccgtcgacagcgacgaggcgcagcataaggtatacgggcacggcggccatggcgaccagctccaaacccgccgcgcccgtggaccccatggtcgtgctcgcccacgagttccccgaggtgtcattcgactacgacgagagggatgtagcgttgtacgcgctcggggttggtgcctgcggcgatgacgccgtcgacgagaaggagcttcacttcgtgtaccacagggatgggcagccacacattaagacccttcctacttttgtttctttatttcccaacaagaacagcaatgggcttggatttgttgatgtgcctggccttaactttgatgcaagccttctactgcatggtcaacaatacatagagatctataggccaatcccttcgtatgccagtgttgtaaacagggttaaagtagctggtttgcatgacaaggggaaagcaactattcttgagctcgaaactaccacaagcctcaaagagtcaggggaaattttatgcatgaacaggagtactatctacttgcgtggtgctggagggttttcagactcttcacggccatactcatatgctacctatcctgctaatcaagtttctcgcatttctattccaaattcggcaccttctgcagtatgcgacgaccagacaaagcaatcccaggcattgttatacaggctatctggggattacaatcctttgcattcagacccagatattgcacagcttgctgggttcacccgtccaatcctgcacggcctctgcaccctaggattcgctgctcgcgccgtcataaaatctttctgcaacggcgaaccgactgcggtgaagagcatcttcggccgtttccttctgcacgtctaccccggggaaacgttgtccactgagatgtggcttgacggccagaaggtgcactaccaaacgaaggccaaggagcggaatcgcgctgtcctctctggatatgtgttgctccagcacatcccctcgtcattgtaagtaaaagttttgtttcttaaaattggtgcccgctgaaagcatttggcttgtctgtgataaattgagcacgaggtgggctgccactgtaatgatagccatgtatgggtctgcacataacacattcgtactgtattgataagaagcacgtaccactc

SEQ ID NO: 29200 - protein, 314 aa, Zea mays subsp. mays
  peptide (1)..(314): Ceres Seq. ID no. 12391342
  misc_feature (179)..(304): Pfam Name: Pfam Description:  MaoC like domain
  misc_feature (1)..(314): NCBI GI NO: 22330656 NR Description: hypothetical protein; protein id: At1g76150
  misc_feature (1)..(205): NCBI GI NO: 6573727 NR Description: T23E18.9 [Arabidopsis thaliana]
  misc_feature (1)..(305): NCBI GI NO: 4504505 NR Description: hydroxysteroid (17-beta) dehydrogenase 4
  misc_feature (8)..(313): NCBI GI NO: 499340 NR Description: 17beta-estradiol dehydrogenase [Sus scrofa]
  misc_feature (8)..(314): NCBI GI NO: 13491722 NR Description: 17-beta-hydroxysteroid dehydrogenase type 4
  misc_feature (8)..(314): NCBI GI NO: 24461283 NR Description: 17-beta-hydroxysteroid dehydrogenase type 4
  misc_feature (17)..(314): NCBI GI NO: 3005897 NR Description: mutifunctional protein2 [Cavia porcellus]
  misc_feature (16)..(313): NCBI GI NO: 13242303 NR Description: peroxisomal multifunctional enzyme type II
  misc_feature (16)..(313): NCBI GI NO: 1620451 NR Description: multifunctional protein 2 [Rattus norvegicus]
  misc_feature (16)..(313): NCBI GI NO: 2492741 NR Description: Estradiol 17 beta-dehydrogenase 4
MATSSKPAAPVDPMVVLAHEFPEVSFDYDERDVALYALGVGACGDDAVDEKELHFVYHRDGQPHIKTLPTFVSLFPNKNSNGLGFVDVPGLNFDASLLLHGQQYIEIYRPIPSYASVVNRVKVAGLHDKGKATILELETTTSLKESGEILCMNRSTIYLRGAGGFSDSSRPYSYATYPANQVSRISIPNSAPSAVCDDQTKQSQALLYRLSGDYNPLHSDPDIAQLAGFTRPILHGLCTLGFAARAVIKSFCNGEPTAVKSIFGRFLLHVYPGETLSTEMWLDGQKVHYQTKAKERNRAVLSGYVLLQHIPSSL

SEQ ID NO: 29201 - protein, 301 aa, Zea mays subsp. mays
  peptide (1)..(301): Ceres Seq. ID no. 12391343
  misc_feature (166)..(291): Pfam Name: Pfam Description:  MaoC like domain
  misc_feature (1)..(301): NCBI GI NO: 22330656 NR Description: hypothetical protein; protein id: At1g76150
  misc_feature (1)..(192): NCBI GI NO: 6573727 NR Description: T23E18.9 [Arabidopsis thaliana]
  misc_feature (1)..(292): NCBI GI NO: 4504505 NR Description: hydroxysteroid (17-beta) dehydrogenase 4
  misc_feature (1)..(300): NCBI GI NO: 499340 NR Description: 17beta-estradiol dehydrogenase [Sus scrofa]
  misc_feature (1)..(301): NCBI GI NO: 13491722 NR Description: 17-beta-hydroxysteroid dehydrogenase type 4
  misc_feature (1)..(301): NCBI GI NO: 24461283 NR Description: 17-beta-hydroxysteroid dehydrogenase type 4
  misc_feature (4)..(301): NCBI GI NO: 3005897 NR Description: mutifunctional protein2 [Cavia porcellus]
  misc_feature (3)..(300): NCBI GI NO: 13242303 NR Description: peroxisomal multifunctional enzyme type II
  misc_feature (3)..(300): NCBI GI NO: 1620451 NR Description: multifunctional protein 2 [Rattus norvegicus]
  misc_feature (3)..(300): NCBI GI NO: 7514017 NR Description: multifunctional beta-oxidation protein 2
MVVLAHEFPEVSFDYDERDVALYALGVGACGDDAVDEKELHFVYHRDGQPHIKTLPTFVSLFPNKNSNGLGFVDVPGLNFDASLLLHGQQYIEIYRPIPSYASVVNRVKVAGLHDKGKATILELETTTSLKESGEILCMNRSTIYLRGAGGFSDSSRPYSYATYPANQVSRISIPNSAPSAVCDDQTKQSQALLYRLSGDYNPLHSDPDIAQLAGFTRPILHGLCTLGFAARAVIKSFCNGEPTAVKSIFGRFLLHVYPGETLSTEMWLDGQKVHYQTKAKERNRAVLSGYVLLQHIPSSL

SEQ ID NO: 29202 - protein, 163 aa, Zea mays subsp. mays
  peptide (1)..(163): Ceres Seq. ID no. 12391344
  misc_feature (28)..(153): Pfam Name: Pfam Description:  MaoC like domain
  misc_feature (1)..(163): NCBI GI NO: 22330656 NR Description: hypothetical protein; protein id: At1g76150
  misc_feature (1)..(54): NCBI GI NO: 6573727 NR Description: T23E18.9 [Arabidopsis thaliana]
  misc_feature (1)..(154): NCBI GI NO: 4504505 NR Description: hydroxysteroid (17-beta) dehydrogenase 4
  misc_feature (1)..(162): NCBI GI NO: 499340 NR Description: 17beta-estradiol dehydrogenase [Sus scrofa]
  misc_feature (1)..(163): NCBI GI NO: 13491722 NR Description: 17-beta-hydroxysteroid dehydrogenase type 4
  misc_feature (1)..(163): NCBI GI NO: 24461283 NR Description: 17-beta-hydroxysteroid dehydrogenase type 4
  misc_feature (1)..(163): NCBI GI NO: 3005897 NR Description: mutifunctional protein2 [Cavia porcellus]
  misc_feature (1)..(162): NCBI GI NO: 13242303 NR Description: peroxisomal multifunctional enzyme type II
  misc_feature (1)..(162): NCBI GI NO: 1620451 NR Description: multifunctional protein 2 [Rattus norvegicus]
  misc_feature (1)..(162): NCBI GI NO: 7514017 NR Description: multifunctional beta-oxidation protein 2
MNRSTIYLRGAGGFSDSSRPYSYATYPANQVSRISIPNSAPSAVCDDQTKQSQALLYRLSGDYNPLHSDPDIAQLAGFTRPILHGLCTLGFAARAVIKSFCNGEPTAVKSIFGRFLLHVYPGETLSTEMWLDGQKVHYQTKAKERNRAVLSGYVLLQHIPSSL

SEQ ID NO: 29203 - DNA, 1262 bp, Zea mays subsp. mays
  misc_feature (1)..(1262): Ceres Seq. ID no. 12413536
gcagactgcagtgcacagggaccgtaccggggagggccggcggcagccatggcgcgcaaggacacagtgccgcttgtcactgcttccggcttcgtggtggcgtcgctgctgctcctgctctgcgccactcgctgcgaagcgagggtcatggcggcgagcaggagcaggagcaggagcaccagcccgctgctcaacgtgctgttcaagctcaacttcatccgcacggtggagccaccgcgccgacttcccactccgaccgccgacgccaccgtcagcctcgccgcgggcgacaccaactcgccgttctgcgtcaacccaccagacgcgccgtcgtccacgacgcctccgtccacgtcatccacgtcatccacgacgcctccgtccacgtcgtccacgccttcgttgccgggccaggcccaggcgccgccgctgccgccgatcacccccgtgccgccgtccttcgagcccagcccgccggagaacggcgccccgggtggaggccagggaggaggagatcaaggccagggaggaggaggtcaaggccagggaggcccaccggcatccacgacaccgaactcgccgccgcaggcaggtccgggagcgccgtttgggtcggtgccgccgagcccccatcgtcatggtgccgagcccgccaggattcggccctggtcccggctccggctcaggcggtggctcgggatccggcgacggcggcggcccgttccagccgccgatcgtgtacccacctccgctggcgccgccgatgctgccgggcgccgggcagacgctgtggtgcgtggccaagcccacggtgccggaccccatcatccaggaggccatggactacgcgtgcggctccggcgccgagtgcgactccatcctgcccagcggcgcgtgctaccaccccaacaccgtgctcgcgcacgcctccttcgcgttcaacagctactggcagcagaacaaggcgaccggcggcaccgccaccattatcaccagagacccgagctacgagaagtgcaaatttgaccttctgtgacgagggagggtacgtagatatgcaggagaacagactgcagataccaaattttttccccaagcttcagttggagttaacattcattttgcttctaggccacaccgatgcacattttgtaactagctcttcttcactagtatggttttgaattttgtaagcctgatactgcgcaaaaggggaaactaaaggtgattccttgacatatttgatatacaagctcttgctc

SEQ ID NO: 29204 - protein, 393 aa, Zea mays subsp. mays
  peptide (1)..(393): Ceres Seq. ID no. 12413537
  misc_feature (272)..(329): Pfam Name: Pfam Description:  Atrophin-1 family
  misc_feature (267)..(336): NCBI GI NO: 188864 NR Description: mucin
  misc_feature (268)..(342): NCBI GI NO: 188864 NR Description: mucin
  misc_feature (267)..(333): NCBI GI NO: 188864 NR Description: mucin
  misc_feature (267)..(336): NCBI GI NO: 188864 NR Description: mucin
  misc_feature (267)..(331): NCBI GI NO: 188864 NR Description: mucin
  misc_feature (267)..(336): NCBI GI NO: 188864 NR Description: mucin
  misc_feature (267)..(336): NCBI GI NO: 188864 NR Description: mucin
  misc_feature (269)..(342): NCBI GI NO: 188864 NR Description: mucin
  misc_feature (269)..(336): NCBI GI NO: 188864 NR Description: mucin
  misc_feature (269)..(342): NCBI GI NO: 188864 NR Description: mucin
RLQCTGTVPGRAGGSHGAQGHSAACHCFRLRGGVAAAPALRHSLRSEGHGGEQEQEQEHQPAAQRAVQAQLHPHGGATAPTSHSDRRRHRQPRRGRHQLAVLRQPTRRAVVHDASVHVIHVIHDASVHVVHAFVAGPGPGAAAAADHPRAAVLRAQPAGERRPGWRPGRRRSRPGRRRSRPGRPTGIHDTELAAAGRSGSAVWVGAAEPPSSWCRARQDSALVPAPAQAVARDPATAAARSSRRSCTHLRWRRRCCRAPGRRCGAWPSPRCRTPSSRRPWTTRAAPAPSATPSCPAARATTPTPCSRTPPSRSTATGSRTRRPAAPPPLSPETRATRSANLTFCDEGGYVDMQENRLQIPNFFPKLQLELTFILLLGHTDAHFVTSSSSLVWF

SEQ ID NO: 29205 - protein, 344 aa, Zea mays subsp. mays
  peptide (1)..(344): Ceres Seq. ID no. 12413538
  misc_feature (210)..(335): NCBI GI NO: 15219387 NR Description: hypothetical protein; protein id: At1g79480.1
  misc_feature (219)..(335): NCBI GI NO: 15218919 NR Description: beta-1,3 glucanase, putative; protein id:At1g29380
  misc_feature (215)..(343): NCBI GI NO: 15240743 NR Description: glycosyl hydrolase family 17; protein id:At5g67460
  misc_feature (210)..(335): NCBI GI NO: 37533178 NR Description: hypothetical protein
  misc_feature (264)..(344): NCBI GI NO: 34909796 NR Description: P0403C05.4
  misc_feature (258)..(341): NCBI GI NO: 34912962 NR Description: beta-1,3 glucanase-like protein
  misc_feature (264)..(341): NCBI GI NO: 34393393 NR Description: putative glycosyl hydrolase
  misc_feature (264)..(341): NCBI GI NO: 22775658 NR Description: contains ESTs C91599
  misc_feature (255)..(341): NCBI GI NO: 21592859 NR Description: unknown [Arabidopsis thaliana]
  misc_feature (243)..(341): NCBI GI NO: 15241485 NR Description: glycosyl hydrolase family 17; protein id:At5g08000
QTAVHRDRTGEGRRQPWRARTQCRLSLLPASWWRRCCSCSAPLAAKRGSWRRAGAGAGAPARCSTCCSSSTSSARWSHRADFPLRPPTPPSASPRATPTRRSASTHQTRRRPRRLRPRHPRHPRRLRPRRPRLRCRARPRRRRCRRSPPCRRPSSPARRRTAPRVEAREEEIKAREEEVKAREAHRHPRHRTRRRRQVRERRLGRCRRAPIVMVPSPPGFGPGPGSGSGGGSGSGDGGGPFQPPIVYPPPLAPPMLPGAGQTLWCVAKPTVPDPIIQEAMDYACGSGAECDSILPSGACYHPNTVLAHASFAFNSYWQQNKATGGTATIITRDPSYEKCKFDLL

SEQ ID NO: 29206 - protein, 341 aa, Zea mays subsp. mays
  peptide (1)..(341): Ceres Seq. ID no. 12413539
  misc_feature (83)..(216): Pfam Name: Pfam Description:  Glycoprotein GG/GX
  misc_feature (101)..(222): NCBI GI NO: 15219387 NR Description: hypothetical protein; protein id: At1g79480.1
  misc_feature (78)..(210): NCBI GI NO: 15219387 NR Description: hypothetical protein; protein id: At1g79480.1
  misc_feature (82)..(187): NCBI GI NO: 15218919 NR Description: beta-1,3 glucanase, putative; protein id:At1g29380
  misc_feature (73)..(209): NCBI GI NO: 188864 NR Description: mucin
  misc_feature (75)..(159): NCBI GI NO: 188864 NR Description: mucin
  misc_feature (106)..(214): NCBI GI NO: 7510074 NR Description: hypothetical protein Y50E8A
  misc_feature (75)..(159): NCBI GI NO: 188864 NR Description: mucin
  misc_feature (73)..(159): NCBI GI NO: 186396 NR Description: mucin
  misc_feature (106)..(214): NCBI GI NO: 7510074 NR Description: hypothetical protein Y50E8A
  misc_feature (106)..(214): NCBI GI NO: 7510074 NR Description: hypothetical protein Y50E8A
ADCSAQGPYRGGPAAAMARKDTVPLVTASGFVVASLLLLLCATRCEARVMAASRSRSRSTSPLLNVLFKLNFIRTVEPPRRLPTPTADATVSLAAGDTNSPFCVNPPDAPSSTTPPSTSSTSSTTPPSTSSTPSLPGQAQAPPLPPITPVPPSFEPSPPENGAPGGGQGGGDQGQGGGGQGQGGPPASTTPNSPPQAGPGAPFGSVPPSPHRHGAEPARIRPWSRLRLRRWLGIRRRRRPVPAADRVPTSAGAADAAGRRADAVVRGQAHGAGPHHPGGHGLRVRLRRRVRLHPAQRRVLPPQHRARARLLRVQQLLAAEQGDRRHRHHYHQRPELREVQI

SEQ ID NO: 29207 - protein, 325 aa, Zea mays subsp. mays
  peptide (1)..(325): Ceres Seq. ID no. 12413540
  misc_feature (67)..(200): Pfam Name: Pfam Description:  Glycoprotein GG/GX
  misc_feature (85)..(206): NCBI GI NO: 15219387 NR Description: hypothetical protein; protein id: At1g79480.1
  misc_feature (62)..(194): NCBI GI NO: 15219387 NR Description: hypothetical protein; protein id: At1g79480.1
  misc_feature (66)..(171): NCBI GI NO: 15218919 NR Description: beta-1,3 glucanase, putative; protein id:At1g29380
  misc_feature (57)..(193): NCBI GI NO: 188864 NR Description: mucin
  misc_feature (59)..(143): NCBI GI NO: 188864 NR Description: mucin
  misc_feature (90)..(198): NCBI GI NO: 7510074 NR Description: hypothetical protein Y50E8A
  misc_feature (59)..(143): NCBI GI NO: 188864 NR Description: mucin
  misc_feature (57)..(143): NCBI GI NO: 186396 NR Description: mucin
  misc_feature (90)..(198): NCBI GI NO: 7510074 NR Description: hypothetical protein Y50E8A
  misc_feature (90)..(198): NCBI GI NO: 7510074 NR Description: hypothetical protein Y50E8A
MARKDTVPLVTASGFVVASLLLLLCATRCEARVMAASRSRSRSTSPLLNVLFKLNFIRTVEPPRRLPTPTADATVSLAAGDTNSPFCVNPPDAPSSTTPPSTSSTSSTTPPSTSSTPSLPGQAQAPPLPPITPVPPSFEPSPPENGAPGGGQGGGDQGQGGGGQGQGGPPASTTPNSPPQAGPGAPFGSVPPSPHRHGAEPARIRPWSRLRLRRWLGIRRRRRPVPAADRVPTSAGAADAAGRRADAVVRGQAHGAGPHHPGGHGLRVRLRRRVRLHPAQRRVLPPQHRARARLLRVQQLLAAEQGDRRHRHHYHQRPELREVQI

SEQ ID NO: 29208 - DNA, 1621 bp, Zea mays subsp. mays
  misc_feature (1)..(1621): Ceres Seq. ID no. 12388645
acaaattgtgtgtgccttggcgtgtcgtggaggccccgggcacgcacgccgcacagtggcatcagctctcagtgcgcgcacgtcaccacaaattgtgtgccttgtcgtggaggccccgggcacgtacgccgcacagggcacacctgctccctccggcctgctctgctcactgctttgattccgcttcggcgcttcgccgcctccggttttctctccgcgcctccagtctccagggacgcaccacctctcccaagtcccaatctcccatggcggcgctgggcacggcgatcacccccgcagcagctaccacggcgccgtgctgctataatcggcatccgcggagccacatcacggcgcgccgtaaccgggttgcctccgcgaggaggcttgacctgtgcgccagctcctcacctgccgtcaccgctcccgacataccagacgaggcgctggtggaacccttggtggcgccggcgccggagacgaagctcaggaagctggcgtgtccaatctgctactaccccctggcgagctcgagcgatcagttggatgatgctaccagtctcgaatgtccaacgtgcaagaaatgctaccccaacaagcaagattactgggatcttacagtgtcagttggttcgacagagtactccgagtccatgccagtggcaacagagttgtttaggactccactggtatcttttctttacgaaagaggatggcgccaaaatttcatatggggtggtttcccaggcctagaaagagagtttgaaatggcaaaaacttatttgaagccaacaattggagggactattgttgatgcaagttgtggaagtggcctgttctcaagattatttattaagagtgggctatattctcttgttgtggcactggatttctcagagaatatgttgaagcagtgcaaccaatacatcaagcaggaaaacatttcagatgagagattagtattggtgagggctgacatatctagactcccttttgtgagtggttcaattgacgctctgcatgcaggtgctgcaattcattgttggccatccccagcttgtgctgttgcagatatcagtagagtccttcgcccagggggaatttttgttgcttcgacattcgtggcagatgttattccaccagctattccagtattgaagatcgtacgcccgtacattagccaaataactggcaacaataccttcttatctgaagtggagcttgaagatctttgcaaagcatgtgggctggttgatttcaaatttgtcagaagtggattctatataatgttttctgccactaaagcatgctaactaagtagcagcaatcgtccagtcgtttatgtcaagactcctcggttttatactgcaaatggtttccttctgtgcattgtgcggttgtgccatttgctctaaaggttgccaactttcctcaagggggtgtggtgtaaatagtgaacacatatattttacttctacttgaccgacctcattatagcatgaaaatatcatattttttgtgtacagcttcatagatctttgcaattatgtaatttaaggcttgtttggaacagctctaccaacctaaaaactgaatctggatatagaatttagttagatcc

SEQ ID NO: 29209 - protein, 436 aa, Zea mays subsp. mays
  peptide (1)..(436): Ceres Seq. ID no. 12388646
  misc_feature (268)..(422): Pfam Name: Pfam Description:  ubiE/COQ5 methyltransferase family
  misc_feature (105)..(434): NCBI GI NO: 18411840 NR Description: expressed protein; protein id: At1g78140
  misc_feature (105)..(284): NCBI GI NO: 25406543 NR Description: hypothetical protein T11I11.8
  misc_feature (318)..(434): NCBI GI NO: 25406543 NR Description: hypothetical protein T11I11.8
  misc_feature (159)..(434): NCBI GI NO: 30688506 NR Description: expressed protein [Arabidopsis thaliana]
  misc_feature (159)..(356): NCBI GI NO: 7487623 NR Description: hypothetical protein At2g41040
  misc_feature (268)..(422): NCBI GI NO: 15896660 NR Description: S-adenosylmethionine-dependent methyltransferase
  misc_feature (266)..(376): NCBI GI NO: 20093135 NR Description: menaquinone biosynthesis methyltransferase
  misc_feature (264)..(373): NCBI GI NO: 23048342 NR Description: hypothetical protein [Methanosarcina barkeri]
  misc_feature (229)..(383): NCBI GI NO: 7443714 NR Description: probable sterol 24-C-methyltransferase (EC2
  misc_feature (245)..(375): NCBI GI NO: 29827478 NR Description: C5-O-methyltransferase
KLCVPWRVVEAPGTHAAQWHQLSVRARHHKLCALSWRPRARTPHRAHLLPPACSAHCFDSASALRRLRFSLRASSLQGRTTSPKSQSPMAALGTAITPAAATTAPCCYNRHPRSHITARRNRVASARRLDLCASSSPAVTAPDIPDEALVEPLVAPAPETKLRKLACPICYYPLASSSDQLDDATSLECPTCKKCYPNKQDYWDLTVSVGSTEYSESMPVATELFRTPLVSFLYERGWRQNFIWGGFPGLEREFEMAKTYLKPTIGGTIVDASCGSGLFSRLFIKSGLYSLVVALDFSENMLKQCNQYIKQENISDERLVLVRADISRLPFVSGSIDALHAGAAIHCWPSPACAVADISRVLRPGGIFVASTFVADVIPPAIPVLKIVRPYISQITGNNTFLSEVELEDLCKACGLVDFKFVRSGFYIMFSATKAC

SEQ ID NO: 29210 - protein, 348 aa, Zea mays subsp. mays
  peptide (1)..(348): Ceres Seq. ID no. 12388647
  misc_feature (180)..(334): Pfam Name: Pfam Description:  ubiE/COQ5 methyltransferase family
  misc_feature (17)..(346): NCBI GI NO: 18411840 NR Description: expressed protein; protein id: At1g78140
  misc_feature (17)..(196): NCBI GI NO: 25406543 NR Description: hypothetical protein T11I11.8
  misc_feature (230)..(346): NCBI GI NO: 25406543 NR Description: hypothetical protein T11I11.8
  misc_feature (71)..(346): NCBI GI NO: 30688506 NR Description: expressed protein [Arabidopsis thaliana]
  misc_feature (71)..(268): NCBI GI NO: 7487623 NR Description: hypothetical protein At2g41040
  misc_feature (180)..(334): NCBI GI NO: 15896660 NR Description: S-adenosylmethionine-dependent methyltransferase
  misc_feature (178)..(288): NCBI GI NO: 20093135 NR Description: menaquinone biosynthesis methyltransferase
  misc_feature (176)..(285): NCBI GI NO: 23048342 NR Description: hypothetical protein [Methanosarcina barkeri]
  misc_feature (141)..(295): NCBI GI NO: 7443714 NR Description: probable sterol 24-C-methyltransferase (EC2
  misc_feature (157)..(287): NCBI GI NO: 29827478 NR Description: C5-O-methyltransferase
MAALGTAITPAAATTAPCCYNRHPRSHITARRNRVASARRLDLCASSSPAVTAPDIPDEALVEPLVAPAPETKLRKLACPICYYPLASSSDQLDDATSLECPTCKKCYPNKQDYWDLTVSVGSTEYSESMPVATELFRTPLVSFLYERGWRQNFIWGGFPGLEREFEMAKTYLKPTIGGTIVDASCGSGLFSRLFIKSGLYSLVVALDFSENMLKQCNQYIKQENISDERLVLVRADISRLPFVSGSIDALHAGAAIHCWPSPACAVADISRVLRPGGIFVASTFVADVIPPAIPVLKIVRPYISQITGNNTFLSEVELEDLCKACGLVDFKFVRSGFYIMFSATKAC

SEQ ID NO: 29211 - protein, 250 aa, Zea mays subsp. mays
  peptide (1)..(250): Ceres Seq. ID no. 12388648
TNCVCLGVSWRPRARTPHSGISSQCAHVTTNCVPCRGGPGHVRRTGHTCSLRPALLTALIPLRRFAASGFLSAPPVSRDAPPLPSPNLPWRRWARRSPPQQLPRRRAAIIGIRGATSRRAVTGLPPRGGLTCAPAPHLPSPLPTYQTRRWWNPWWRRRRRRSSGSWRVQSATTPWRARAISWMMLPVSNVQRARNATPTSKITGILQCQLVRQSTPSPCQWQQSCLGLHWYLFFTKEDGAKISYGVVSQA

SEQ ID NO: 29212 - DNA, 1434 bp, Zea mays subsp. mays
  misc_feature (1)..(1434): Ceres Seq. ID no. 12412606
gtgggcgttgtgtgcgcggccgcagtgtgcggatcaagctgcatgtgtggaaggcagcgctgagttagtgcccagcgtcagcagctataaaagcacttgtactcatcgattatcaacagggaatagagaaaggcagtgtcggagcgctgcaggtgtttgggcgccgaactctttgtgtttagctactgttcattcgtcttcctcctctcaccaatctgtgtcctgtgcttgtgagcgttttagagttccaacaattggtatcagaggcagtttatgcccaagatcttacgctactacctcgagtccgagtccatggcgatggttccgcacggcgccggggggagttcggtctccatgtcatacccggtgctgtcgccggcgagctacacggcgtgggcaatcaaggtggagtcgatcctcgacgcgcaaggtctctgggaggccgtgtctccaccagataatggcgaggtgaacgcggtgaagaacaagacggcgcgggcacagcttctccaagctctgcccgatgacatcttgatgcaggtctccatcaagaaaacggcagcggaggtgtgggcgagcctcaagactcgtttcgtcggtgcggatcgggtcaagacggcacgcctcgccacgctcaagggggagttcgacaagctgtacatggaggacgaggaggcattggacgactacgcaggcaaaatcagcggtatggcagcgcgttacgccgggcttggcgcaacgctcgacgacgctgccatggtgaagaagctcctcgacaccgttccagatcggctcttccccgtcgtcgcgggcatcgagcagttctgcgacgtcgagacgatgccgttcgaggaggcgctcggacgtctcaaggcgttcgatgagcgttctcggcggcgtactcatgccggcggtgaacggcgcgacgatcagctccttctcacggaggccgagtggaaagctcgaaaaaagaagaagtcgacgatcggcaaatgcttcaactgtggcaatcgcggccatttcgcccgggactgccccaagaagaaggaggaggaggcgctgctcgccaacgccaacgaggagccggcgctgttctgagcagcggcgctgggtttagggggagtttgttgggaataaacccagctgcgtgtgcgtgcacacagcgggtggcgtgagtgcgtcgtgttgtctagtgtgtgcgtctgtgtccgagtcgtgcggcggacggagcaattcgtgccgagtacgtgttcttgccgcgtacgttgcgtggtggtagttgcatgcagtcgtggtgatctgttggaggccagccgcagtgtacgcgttcgtgggcgttgtgtgcgcggccgcagtgtgcggatcaagctgcatgtgtggaaggcagcgctgagttagtgcccagcgtcagcagctataaaagcacttgtaccc

SEQ ID NO: 29213 - protein, 274 aa, Zea mays subsp. mays
  peptide (1)..(274): Ceres Seq. ID no. 12412607
  misc_feature (116)..(168): Pfam Name: Pfam Description:  Retrotransposon gag protein
  misc_feature (1)..(273): NCBI GI NO: 34907386 NR Description: P0471B04.27
  misc_feature (14)..(234): NCBI GI NO: 34910624 NR Description: putative copia-type polyprotein
  misc_feature (16)..(234): NCBI GI NO: 30017513 NR Description: putative gag-pol polyprotein
  misc_feature (14)..(234): NCBI GI NO: 37534104 NR Description: putative retroelement
  misc_feature (24)..(235): NCBI GI NO: 34902098 NR Description: hypothetical protein
  misc_feature (213)..(273): NCBI GI NO: 34902098 NR Description: hypothetical protein
  misc_feature (90)..(234): NCBI GI NO: 29150404 NR Description: gag-pol polyprotein
  misc_feature (11)..(273): NCBI GI NO: 37532690 NR Description: putative retroelement
  misc_feature (27)..(273): NCBI GI NO: 37535062 NR Description: putative lectin receptor kinase
  misc_feature (22)..(227): NCBI GI NO: 15230839 NR Description: hypothetical protein; protein id: At3g25450.1
MPKILRYYLESESMAMVPHGAGGSSVSMSYPVLSPASYTAWAIKVESILDAQGLWEAVSPPDNGEVNAVKNKTARAQLLQALPDDILMQVSIKKTAAEVWASLKTRFVGADRVKTARLATLKGEFDKLYMEDEEALDDYAGKISGMAARYAGLGATLDDAAMVKKLLDTVPDRLFPVVAGIEQFCDVETMPFEEALGRLKAFDERSRRRTHAGGERRDDQLLLTEAEWKARKKKKSTIGKCFNCGNRGHFARDCPKKKEEEALLANANEEPALF

SEQ ID NO: 29214 - protein, 261 aa, Zea mays subsp. mays
  peptide (1)..(261): Ceres Seq. ID no. 12412608
  misc_feature (103)..(155): Pfam Name: Pfam Description:  Retrotransposon gag protein
  misc_feature (1)..(260): NCBI GI NO: 34907386 NR Description: P0471B04.27
  misc_feature (1)..(221): NCBI GI NO: 34910624 NR Description: putative copia-type polyprotein
  misc_feature (3)..(221): NCBI GI NO: 30017513 NR Description: putative gag-pol polyprotein
  misc_feature (1)..(221): NCBI GI NO: 37534104 NR Description: putative retroelement
  misc_feature (11)..(222): NCBI GI NO: 34902098 NR Description: hypothetical protein
  misc_feature (200)..(260): NCBI GI NO: 34902098 NR Description: hypothetical protein
  misc_feature (77)..(221): NCBI GI NO: 29150404 NR Description: gag-pol polyprotein
  misc_feature (1)..(260): NCBI GI NO: 37532690 NR Description: putative retroelement
  misc_feature (14)..(260): NCBI GI NO: 37535062 NR Description: putative lectin receptor kinase
  misc_feature (9)..(214): NCBI GI NO: 15230839 NR Description: hypothetical protein; protein id: At3g25450.1
MAMVPHGAGGSSVSMSYPVLSPASYTAWAIKVESILDAQGLWEAVSPPDNGEVNAVKNKTARAQLLQALPDDILMQVSIKKTAAEVWASLKTRFVGADRVKTARLATLKGEFDKLYMEDEEALDDYAGKISGMAARYAGLGATLDDAAMVKKLLDTVPDRLFPVVAGIEQFCDVETMPFEEALGRLKAFDERSRRRTHAGGERRDDQLLLTEAEWKARKKKKSTIGKCFNCGNRGHFARDCPKKKEEEALLANANEEPALF

SEQ ID NO: 29215 - protein, 259 aa, Zea mays subsp. mays
  peptide (1)..(259): Ceres Seq. ID no. 12412609
  misc_feature (101)..(153): Pfam Name: Pfam Description:  Retrotransposon gag protein
  misc_feature (1)..(258): NCBI GI NO: 34907386 NR Description: P0471B04.27
  misc_feature (1)..(219): NCBI GI NO: 34910624 NR Description: putative copia-type polyprotein
  misc_feature (1)..(219): NCBI GI NO: 30017513 NR Description: putative gag-pol polyprotein
  misc_feature (1)..(219): NCBI GI NO: 37534104 NR Description: putative retroelement
  misc_feature (9)..(220): NCBI GI NO: 34902098 NR Description: hypothetical protein
  misc_feature (198)..(258): NCBI GI NO: 34902098 NR Description: hypothetical protein
  misc_feature (75)..(219): NCBI GI NO: 29150404 NR Description: gag-pol polyprotein
  misc_feature (1)..(258): NCBI GI NO: 37532690 NR Description: putative retroelement
  misc_feature (12)..(258): NCBI GI NO: 37535062 NR Description: putative lectin receptor kinase
  misc_feature (7)..(212): NCBI GI NO: 15230839 NR Description: hypothetical protein; protein id: At3g25450.1
MVPHGAGGSSVSMSYPVLSPASYTAWAIKVESILDAQGLWEAVSPPDNGEVNAVKNKTARAQLLQALPDDILMQVSIKKTAAEVWASLKTRFVGADRVKTARLATLKGEFDKLYMEDEEALDDYAGKISGMAARYAGLGATLDDAAMVKKLLDTVPDRLFPVVAGIEQFCDVETMPFEEALGRLKAFDERSRRRTHAGGERRDDQLLLTEAEWKARKKKKSTIGKCFNCGNRGHFARDCPKKKEEEALLANANEEPALF

SEQ ID NO: 29216 - DNA, 1504 bp, Zea mays subsp. mays
  misc_feature (1)..(1504): Ceres Seq. ID no. 12357893
atcaggcctacttggcgcgcgcgcgtctctctctgtctagcggccgagtttaacagttaaaccctagctcaccgtcgtgctcgcctccccgcgcctgctcccttcaggcactgacagttcgccgccgcggcggcgctttcgagcccacgcggaagcgcacctagtgccatggcgaagaagcggaagcacaccgacgcccaggcagagacggccggcgcagagaagccagacgactccgcaccggcgcgcccggagcgcacgctcttcggcttcaaggatccggcccccgacgccgtgcccgcctctgcggcctccagggccgcggtggcgccgtttaggaacagggagaaggtactcatcacctgctcccgccgcatcacgtacaggtatcgtcatctgatgcaggacgtgctatcgatgctcccgcacgcgaagaaggacagcaaggtcgagtcgaagcagagcaaggggaacgctctcaacgagatgctcgagctcaggagctgctccagttgtctcttcttcgagtgccgaaaacagaaggatctttacctttggatggtgaagtctcctggaggaccatcagtgaaatttctagttaatgctgttcacaccatggaggagttgaagcttacgggtaaccatctgaaagggtcacggccacttcttacattttctacaaattttgatgagcaacctcattggaagcttgtgaaggaaattataactcatatatttgctactcctaaagatcaccgtaaagcaaaacctttccatgaccatgtatttgtcttctccattgtggatggccatgtttggttccgaaactaccagatttctgttccccacaatgagattgataaagttgataaaggtggtatggataaaatgacacttattgaggttggccccaggttctgtttgaatccaatcaaaatatttggtggtagttttggtggtcctacatggtatgagaacccatactacatttcccccaatcagatccgtgcactagagaagaggcagaaggcaggcaaatatgccaagaaggtgaaggccaaggtgaggaggaagatgcacgagatggagaacacgctggagcctgatgagtttgctgagctctggaaaggggagtaggctttgatcgaccctgtcaatgtcgtgaagcacccgcaactcctgtcagcaagcgcagattttgtttacctgtgtggcagtgtctatgttgtggaagttctgtatgacaaggcctacgtttattttacataaaatcggattttagtgataacttatgcccatatgacattctctcttgtttgcttctagtggatgtggtgccaagtgttatatcacttatgtgattggtagctgagaatcatggggaagcgcgatcacagttcaaacctcaagatatcaatgtgatagccatagccgtgttccatatgtatactatgtacttcatttcagcaatggttttgtaaggaaaatagatcaagcttcattt

SEQ ID NO: 29217 - protein, 322 aa, Zea mays subsp. mays
  peptide (1)..(322): Ceres Seq. ID no. 12357894
  misc_feature (1)..(322): NCBI GI NO: 18400776 NR Description: expressed protein; protein id: At3g15460
  misc_feature (1)..(322): NCBI GI NO: 16648689 NR Description: AT3g15460/MJK13_12 [Arabidopsis thaliana]
  misc_feature (1)..(322): NCBI GI NO: 18404250 NR Description: expressed protein; protein id: At1g52930
  misc_feature (1)..(319): NCBI GI NO: 30580352 NR Description: Ribosome biogenesis protein Brix
  misc_feature (3)..(319): NCBI GI NO: 19311012 NR Description: BRIX [Homo sapiens]
  misc_feature (46)..(313): NCBI GI NO: 6324496 NR Description: Essential nucleolar protein required for biogenesisof the 60S ribosomal subunit
  misc_feature (56)..(308): NCBI GI NO: 27370947 NR Description: Similar to BRIX [Xenopus laevis]
  misc_feature (56)..(308): NCBI GI NO: 30580353 NR Description: Ribosome biogenesis protein Brix (Bx24)
  misc_feature (57)..(239): NCBI GI NO: 32414967 NR Description: hypothetical protein [Neurospora crassa]
  misc_feature (241)..(307): NCBI GI NO: 32414967 NR Description: hypothetical protein [Neurospora crassa]
MAKKRKHTDAQAETAGAEKPDDSAPARPERTLFGFKDPAPDAVPASAASRAAVAPFRNREKVLITCSRRITYRYRHLMQDVLSMLPHAKKDSKVESKQSKGNALNEMLELRSCSSCLFFECRKQKDLYLWMVKSPGGPSVKFLVNAVHTMEELKLTGNHLKGSRPLLTFSTNFDEQPHWKLVKEIITHIFATPKDHRKAKPFHDHVFVFSIVDGHVWFRNYQISVPHNEIDKVDKGGMDKMTLIEVGPRFCLNPIKIFGGSFGGPTWYENPYYISPNQIRALEKRQKAGKYAKKVKAKVRRKMHEMENTLEPDEFAELWKGE

SEQ ID NO: 29218 - protein, 245 aa, Zea mays subsp. mays
  peptide (1)..(245): Ceres Seq. ID no. 12357895
  misc_feature (1)..(245): NCBI GI NO: 18400776 NR Description: expressed protein; protein id: At3g15460
  misc_feature (1)..(245): NCBI GI NO: 16648689 NR Description: AT3g15460/MJK13_12 [Arabidopsis thaliana]
  misc_feature (1)..(245): NCBI GI NO: 18404250 NR Description: expressed protein; protein id: At1g52930
  misc_feature (1)..(242): NCBI GI NO: 30580352 NR Description: Ribosome biogenesis protein Brix
  misc_feature (1)..(242): NCBI GI NO: 19311012 NR Description: BRIX [Homo sapiens]
  misc_feature (1)..(236): NCBI GI NO: 6324496 NR Description: Essential nucleolar protein required for biogenesisof the 60S ribosomal subunit
  misc_feature (1)..(231): NCBI GI NO: 27370947 NR Description: Similar to BRIX [Xenopus laevis]
  misc_feature (1)..(231): NCBI GI NO: 30580353 NR Description: Ribosome biogenesis protein Brix (Bx24)
  misc_feature (1)..(162): NCBI GI NO: 32414967 NR Description: hypothetical protein [Neurospora crassa]
  misc_feature (164)..(230): NCBI GI NO: 32414967 NR Description: hypothetical protein [Neurospora crassa]
MQDVLSMLPHAKKDSKVESKQSKGNALNEMLELRSCSSCLFFECRKQKDLYLWMVKSPGGPSVKFLVNAVHTMEELKLTGNHLKGSRPLLTFSTNFDEQPHWKLVKEIITHIFATPKDHRKAKPFHDHVFVFSIVDGHVWFRNYQISVPHNEIDKVDKGGMDKMTLIEVGPRFCLNPIKIFGGSFGGPTWYENPYYISPNQIRALEKRQKAGKYAKKVKAKVRRKMHEMENTLEPDEFAELWKGE

SEQ ID NO: 29219 - protein, 239 aa, Zea mays subsp. mays
  peptide (1)..(239): Ceres Seq. ID no. 12357896
  misc_feature (1)..(239): NCBI GI NO: 18400776 NR Description: expressed protein; protein id: At3g15460
  misc_feature (1)..(239): NCBI GI NO: 16648689 NR Description: AT3g15460/MJK13_12 [Arabidopsis thaliana]
  misc_feature (1)..(239): NCBI GI NO: 18404250 NR Description: expressed protein; protein id: At1g52930
  misc_feature (1)..(236): NCBI GI NO: 30580352 NR Description: Ribosome biogenesis protein Brix
  misc_feature (1)..(236): NCBI GI NO: 19311012 NR Description: BRIX [Homo sapiens]
  misc_feature (1)..(230): NCBI GI NO: 6324496 NR Description: Essential nucleolar protein required for biogenesisof the 60S ribosomal subunit
  misc_feature (1)..(225): NCBI GI NO: 27370947 NR Description: Similar to BRIX [Xenopus laevis]
  misc_feature (1)..(225): NCBI GI NO: 30580353 NR Description: Ribosome biogenesis protein Brix (Bx24)
  misc_feature (1)..(156): NCBI GI NO: 32414967 NR Description: hypothetical protein [Neurospora crassa]
  misc_feature (158)..(224): NCBI GI NO: 32414967 NR Description: hypothetical protein [Neurospora crassa]
MLPHAKKDSKVESKQSKGNALNEMLELRSCSSCLFFECRKQKDLYLWMVKSPGGPSVKFLVNAVHTMEELKLTGNHLKGSRPLLTFSTNFDEQPHWKLVKEIITHIFATPKDHRKAKPFHDHVFVFSIVDGHVWFRNYQISVPHNEIDKVDKGGMDKMTLIEVGPRFCLNPIKIFGGSFGGPTWYENPYYISPNQIRALEKRQKAGKYAKKVKAKVRRKMHEMENTLEPDEFAELWKGE

SEQ ID NO: 29220 - DNA, 2155 bp, Zea mays subsp. mays
  misc_feature (1)..(2155): Ceres Seq. ID no. 12408748
acccctgcttgctgcagcttcaagcactaccgaatcagggcgagtgggagcagaggagggaatcccatgtctccgcccctcgctggagcagatcgttgtcgagccgacgtggagctgctgcggtagaaagctagcggagcctgcgagctagcctgatccgtccgcagtccgatcgggatcgatgggtggggaggcgccggagccgcggcggctgacccgggcgctgagcatcggcggcggtgacggcggctgggttcccgaggagatgctgcaactcgtgatggggttcgtcgaggacccgcgcgaccgggaggccgcgtcgctggtgtgtcaccggtggcaccgcgtcgacgcgctctcgcggaagcacgtgacggtgcccttctgctacgccgtttccccggcacgcctgctcgcgcggttcccgcggctcgagtcgctcgcggtgaaggggaagcccccgcgcggccatgtacgggctcatacccgacgactggggcgcctacgcccgcccgtggatcaccgagctcgccgcgccgctcgagtgcctcaaggcgctccacctccgacgcatggtcgtcacagacgacgacctcgccgagctcgtccgtgccagggggcacatgctgcaggagctgaagctcgataagtgcaccggcttctccactcatggactccgcctcgttgccccgctcctgcagatcactgaggactttatttttggaagaatgtcaaattgatgataagggcagtgaatggatccacgatctcgcagtctgctgtcctgttctgacaacattgaatttccacatgactgagcttgaagtgatgccagctgacctaaagcttcttgcaaagagctgcaagtcactgatttcattgaagattagtgactgcgatctttcagatttgatagagttcttccaatttgccacagcactggaagaatttgctggagggacattcaatgagcaaggggaactcagcaagtatgtgaatgttaaatttccatcaagactatgctccttgggacttacttacatgggaacaaatgaaatgcccattatgttccctttttctgcaatactaaagaagctggatttgcaatacactttcctcaccactgaggaccattgccagctcattgcaaaatgcccgaacttactagttctcgcggtgaggaatgtgattggagatagaggattaggagttgttgcggatacgtgcaagaagctccaaaggctcagaatagagcgaggagatgatgaaggaggtgtgcaagaagagcagggaggggtctctcaagtgggcttgacggctatagccgtaggttgccgtgagctggaatatatagctgcctatgtgtctgatataaccaatggggccttggaatctatcgggacattctgcaaaaaactatacgacttccggcttgttctacttgatagagaagagaggataacagacttgccactggacaatggtgtccgagctttgttgaggggctgcaccaagcttcggaggtttgctctgtacttgagaccaggagggctctcagatgcaggtctcggctacattggacagtgcagcggaaacatccagtacatgcttctcggtaatgttggggaaactgatgatggattgatcagcttcgcattgggttgcgtaaacctgcgaaagcttgaactcaggagttgctgcttcagcgagcgagcactggcccttgcaatactacatatgccttccctgaggtacgtatgggttcagggctacaaagcgtctcaaaccggccgagacctcatgctcatggcaaggcccttctggaacatagagtttacacctcccaatcctaagaacggaggttggctgatggaagatggggagccttgtgtagatagtcacgctcagatacttgcataccactccctcgccggtaagaggctggactgcccacaatccgtggttcctttgtatcctgcgtgagtgtaaatagactaagctggtgtctttccttagcctcctggtcaacaagaatggtgttgataactcgatatatgcggttattgtatggatctagatggctagctgctacgtactgtaataagctactagtagctgagagatgtcctggaataagcccttgctatttttgcct

SEQ ID NO: 29221 - protein, 437 aa, Zea mays subsp. mays
  peptide (1)..(437): Ceres Seq. ID no. 12408749
  misc_feature (8)..(437): NCBI GI NO: 34908378 NR Description: P0529E05.15
  misc_feature (6)..(436): NCBI GI NO: 40218003 NR Description: coronatine-insensitive 1 [Lycopersicon esculentum]
  misc_feature (4)..(437): NCBI GI NO: 34902000 NR Description: unknown protein
  misc_feature (5)..(431): NCBI GI NO: 18405209 NR Description: coronatine-insensitive 1
  misc_feature (4)..(431): NCBI GI NO: 18391439 NR Description: transport inhibitor response 1
  misc_feature (4)..(431): NCBI GI NO: 18405102 NR Description: transport inhibitor response 1
  misc_feature (4)..(431): NCBI GI NO: 21740736 NR Description: OSJNBa0072K14.1
  misc_feature (4)..(431): NCBI GI NO: 18412177 NR Description: F-box protein GRR1-like protein 1, AtFBL18
  misc_feature (4)..(431): NCBI GI NO: 12658970 NR Description: GRR1-like protein 1 [Arabidopsis thaliana]
  misc_feature (4)..(431): NCBI GI NO: 15027885 NR Description: putative F-box protein GRR1 protein 1, AtFBL18
MDSASLPRSCRSLRTLFLEECQIDDKGSEWIHDLAVCCPVLTTLNFHMTELEVMPADLKLLAKSCKSLISLKISDCDLSDLIEFFQFATALEEFAGGTFNEQGELSKYVNVKFPSRLCSLGLTYMGTNEMPIMFPFSAILKKLDLQYTFLTTEDHCQLIAKCPNLLVLAVRNVIGDRGLGVVADTCKKLQRLRIERGDDEGGVQEEQGGVSQVGLTAIAVGCRELEYIAAYVSDITNGALESIGTFCKKLYDFRLVLLDREERITDLPLDNGVRALLRGCTKLRRFALYLRPGGLSDAGLGYIGQCSGNIQYMLLGNVGETDDGLISFALGCVNLRKLELRSCCFSERALALAILHMPSLRYVWVQGYKASQTGRDLMLMARPFWNIEFTPPNPKNGGWLMEDGEPCVDSHAQILAYHSLAGKRLDCPQSVVPLYPA

SEQ ID NO: 29222 - protein, 390 aa, Zea mays subsp. mays
  peptide (1)..(390): Ceres Seq. ID no. 12408750
  misc_feature (1)..(390): NCBI GI NO: 34908378 NR Description: P0529E05.15
  misc_feature (1)..(389): NCBI GI NO: 40218003 NR Description: coronatine-insensitive 1 [Lycopersicon esculentum]
  misc_feature (1)..(390): NCBI GI NO: 34902000 NR Description: unknown protein
  misc_feature (1)..(384): NCBI GI NO: 18405209 NR Description: coronatine-insensitive 1
  misc_feature (1)..(384): NCBI GI NO: 18391439 NR Description: transport inhibitor response 1
  misc_feature (1)..(384): NCBI GI NO: 18405102 NR Description: transport inhibitor response 1
  misc_feature (1)..(384): NCBI GI NO: 21740736 NR Description: OSJNBa0072K14.1
  misc_feature (1)..(384): NCBI GI NO: 18412177 NR Description: F-box protein GRR1-like protein 1, AtFBL18
  misc_feature (1)..(384): NCBI GI NO: 12658970 NR Description: GRR1-like protein 1 [Arabidopsis thaliana]
  misc_feature (1)..(384): NCBI GI NO: 15027885 NR Description: putative F-box protein GRR1 protein 1, AtFBL18
MTELEVMPADLKLLAKSCKSLISLKISDCDLSDLIEFFQFATALEEFAGGTFNEQGELSKYVNVKFPSRLCSLGLTYMGTNEMPIMFPFSAILKKLDLQYTFLTTEDHCQLIAKCPNLLVLAVRNVIGDRGLGVVADTCKKLQRLRIERGDDEGGVQEEQGGVSQVGLTAIAVGCRELEYIAAYVSDITNGALESIGTFCKKLYDFRLVLLDREERITDLPLDNGVRALLRGCTKLRRFALYLRPGGLSDAGLGYIGQCSGNIQYMLLGNVGETDDGLISFALGCVNLRKLELRSCCFSERALALAILHMPSLRYVWVQGYKASQTGRDLMLMARPFWNIEFTPPNPKNGGWLMEDGEPCVDSHAQILAYHSLAGKRLDCPQSVVPLYPA

SEQ ID NO: 29223 - protein, 384 aa, Zea mays subsp. mays
  peptide (1)..(384): Ceres Seq. ID no. 12408751
  misc_feature (1)..(384): NCBI GI NO: 34908378 NR Description: P0529E05.15
  misc_feature (1)..(383): NCBI GI NO: 40218003 NR Description: coronatine-insensitive 1 [Lycopersicon esculentum]
  misc_feature (1)..(384): NCBI GI NO: 34902000 NR Description: unknown protein
  misc_feature (1)..(378): NCBI GI NO: 18405209 NR Description: coronatine-insensitive 1
  misc_feature (1)..(378): NCBI GI NO: 18391439 NR Description: transport inhibitor response 1
  misc_feature (1)..(378): NCBI GI NO: 18405102 NR Description: transport inhibitor response 1
  misc_feature (1)..(378): NCBI GI NO: 21740736 NR Description: OSJNBa0072K14.1
  misc_feature (1)..(378): NCBI GI NO: 18412177 NR Description: F-box protein GRR1-like protein 1, AtFBL18
  misc_feature (1)..(378): NCBI GI NO: 12658970 NR Description: GRR1-like protein 1 [Arabidopsis thaliana]
  misc_feature (1)..(378): NCBI GI NO: 15027885 NR Description: putative F-box protein GRR1 protein 1, AtFBL18
MPADLKLLAKSCKSLISLKISDCDLSDLIEFFQFATALEEFAGGTFNEQGELSKYVNVKFPSRLCSLGLTYMGTNEMPIMFPFSAILKKLDLQYTFLTTEDHCQLIAKCPNLLVLAVRNVIGDRGLGVVADTCKKLQRLRIERGDDEGGVQEEQGGVSQVGLTAIAVGCRELEYIAAYVSDITNGALESIGTFCKKLYDFRLVLLDREERITDLPLDNGVRALLRGCTKLRRFALYLRPGGLSDAGLGYIGQCSGNIQYMLLGNVGETDDGLISFALGCVNLRKLELRSCCFSERALALAILHMPSLRYVWVQGYKASQTGRDLMLMARPFWNIEFTPPNPKNGGWLMEDGEPCVDSHAQILAYHSLAGKRLDCPQSVVPLYPA

SEQ ID NO: 29224 - DNA, 1808 bp, Zea mays subsp. mays
  misc_feature (1)..(1808): Ceres Seq. ID no. 12408744
aattccaggagccgcctccttctagagggagagagggagggaccacagccgcggccgcaccggcgcacaccacctacaccgcccgaattcccgatcgataccggagctggacgtggcctagggtttccgagccaggccggcgctatggtgggctgctctaggggctccctccccacctggatgaccgccgccgccgcgcgggtcgacctctcgggcggcgtaacgccttcgcaccagggcccatcctcttcgtccccctcctcgggtcccgctccggccgcgggggcggaccaggagctcgggatgtacgagcgcgcgttctccgctgccggcgccgccttcgtctcagctatcatcgtcaaccctctagatgtcgccaagactagattgcaggcgcaggcggcaggggtgctgtaccaccagcctgcccagatggcggcgctcggccccgatgcgatcctgtctgaattccgatgctctccttcgtgcacacgtggtcttgtattaggaagtgagccagtttgtcctcctgactgcttccagtacaaggggacacttgatgtattcttgaaagtggttagacaggaggggttcgttagactatggagaggaacaaatgcaggcttagcattagctgtacccactgttgggatatacttgccttgttatgatatattccgcaactggattgaggatttcacaagaagtaatgctcctggcttgacaccatatgccccgctagtagcaggatctgttgcacgctcgttagcatgtattgcttgttctccaattgagctcgcaaggacgcgtatgcaggcatataaagagtttcgtcctggcgtaaagcctcctggaatgtggaaaaccttggttggtgttctctcaccacttccaagttcgagtcagaatgtacaaaattaccgtgttctgtggactggggtgggtgcacaacttgctcgagatgttcctttctctgctatatgctggtcaactcttgagcctatgcgaagaaaactacttggttttgttggagaagaaggcaatgcaggtagtgtattgggagtgaattttgctgctggttttgtagcaggcagtcttgctgctggtgctacatgccctctggatgttgcaaaaacaaggagacaaatagagaaggatactgagaaggcaatgaggatgactacaaggcaaacattagctgagatatggaggtctggaggcatgaaaggtctgttcgccggcgttggcccacgtgttgcacgcgctggtccatcggttggtattgtcatttccttctacgaggttgtcaagtacgctcttcatcaaaggcacacctcatgacctagttttgttgataagatggaagccctcccattttgtgaaggcatggtaggctagttactctgacagggctaggtgtaagttggaagatcagagtgcccaacagtcaagacacgacaggctttttcatggacagtgtccatttcagtcaaggataacaataccagttttgccatggagcaggctccagtttcgcccgtgtcaggttttggatcatcgtctaagcttatgtcttggctggatctgaagctgctccggtaaacttggtgtagtccctgtaattgaaggaaaggagagtgtagtagcgtagatactgatcaataattttgcacacccttgaaactacagaagaaattttgcacatcctagtctttgtctcgatgacttaaaaaaagttttggtcttcttgttgacttgttactgtaaaaaccaacgggtatatgtttacttggcagaatcattaattc

SEQ ID NO: 29225 - protein, 446 aa, Zea mays subsp. mays
  peptide (1)..(446): Ceres Seq. ID no. 12408745
  misc_feature (49)..(446): NCBI GI NO: 40253478 NR Description: putative mitochondrial carrier protein
  misc_feature (74)..(446): NCBI GI NO: 18417093 NR Description: putative protein; protein id: At4g27940
  misc_feature (97)..(444): NCBI GI NO: 30690323 NR Description: mitochondrial carrier protein family
  misc_feature (97)..(444): NCBI GI NO: 19310377 NR Description: At2g46320/F11C10.1 [Arabidopsis thaliana]
  misc_feature (97)..(444): NCBI GI NO: 25408981 NR Description: hypothetical protein At2g46320
  misc_feature (170)..(444): NCBI GI NO: 34904154 NR Description: P0417G05.20
  misc_feature (195)..(444): NCBI GI NO: 30690327 NR Description: mitochondrial carrier protein family
  misc_feature (96)..(384): NCBI GI NO: 7486963 NR Description: hypothetical protein T13J8
  misc_feature (89)..(444): NCBI GI NO: 32766523 NR Description: Unknown (protein for MGC:63736) [Danio rerio]
  misc_feature (246)..(443): NCBI GI NO: 20070705 NR Description: mitochondrial carrier family protein
NSRSRLLLEGEREGPQPRPHRRTPPTPPEFPIDTGAGRGLGFPSQAGAMVGCSRGSLPTWMTAAAARVDLSGGVTPSHQGPSSSSPSSGPAPAAGADQELGMYERAFSAAGAAFVSAIIVNPLDVAKTRLQAQAAGVLYHQPAQMAALGPDAILSEFRCSPSCTRGLVLGSEPVCPPDCFQYKGTLDVFLKVVRQEGFVRLWRGTNAGLALAVPTVGIYLPCYDIFRNWIEDFTRSNAPGLTPYAPLVAGSVARSLACIACSPIELARTRMQAYKEFRPGVKPPGMWKTLVGVLSPLPSSSQNVQNYRVLWTGVGAQLARDVPFSAICWSTLEPMRRKLLGFVGEEGNAGSVLGVNFAAGFVAGSLAAGATCPLDVAKTRRQIEKDTEKAMRMTTRQTLAEIWRSGGMKGLFAGVGPRVARAGPSVGIVISFYEVVKYALHQRHTS

SEQ ID NO: 29226 - protein, 398 aa, Zea mays subsp. mays
  peptide (1)..(398): Ceres Seq. ID no. 12408746
  misc_feature (1)..(398): NCBI GI NO: 40253478 NR Description: putative mitochondrial carrier protein
  misc_feature (26)..(398): NCBI GI NO: 18417093 NR Description: putative protein; protein id: At4g27940
  misc_feature (49)..(396): NCBI GI NO: 30690323 NR Description: mitochondrial carrier protein family
  misc_feature (49)..(396): NCBI GI NO: 19310377 NR Description: At2g46320/F11C10.1 [Arabidopsis thaliana]
  misc_feature (49)..(396): NCBI GI NO: 25408981 NR Description: hypothetical protein At2g46320
  misc_feature (122)..(396): NCBI GI NO: 34904154 NR Description: P0417G05.20
  misc_feature (147)..(396): NCBI GI NO: 30690327 NR Description: mitochondrial carrier protein family
  misc_feature (48)..(336): NCBI GI NO: 7486963 NR Description: hypothetical protein T13J8
  misc_feature (41)..(396): NCBI GI NO: 32766523 NR Description: Unknown (protein for MGC:63736) [Danio rerio]
  misc_feature (198)..(395): NCBI GI NO: 20070705 NR Description: mitochondrial carrier family protein
MVGCSRGSLPTWMTAAAARVDLSGGVTPSHQGPSSSSPSSGPAPAAGADQELGMYERAFSAAGAAFVSAIIVNPLDVAKTRLQAQAAGVLYHQPAQMAALGPDAILSEFRCSPSCTRGLVLGSEPVCPPDCFQYKGTLDVFLKVVRQEGFVRLWRGTNAGLALAVPTVGIYLPCYDIFRNWIEDFTRSNAPGLTPYAPLVAGSVARSLACIACSPIELARTRMQAYKEFRPGVKPPGMWKTLVGVLSPLPSSSQNVQNYRVLWTGVGAQLARDVPFSAICWSTLEPMRRKLLGFVGEEGNAGSVLGVNFAAGFVAGSLAAGATCPLDVAKTRRQIEKDTEKAMRMTTRQTLAEIWRSGGMKGLFAGVGPRVARAGPSVGIVISFYEVVKYALHQRHTS

SEQ ID NO: 29227 - protein, 386 aa, Zea mays subsp. mays
  peptide (1)..(386): Ceres Seq. ID no. 12408747
  misc_feature (1)..(386): NCBI GI NO: 40253478 NR Description: putative mitochondrial carrier protein
  misc_feature (14)..(386): NCBI GI NO: 18417093 NR Description: putative protein; protein id: At4g27940
  misc_feature (37)..(384): NCBI GI NO: 30690323 NR Description: mitochondrial carrier protein family
  misc_feature (37)..(384): NCBI GI NO: 19310377 NR Description: At2g46320/F11C10.1 [Arabidopsis thaliana]
  misc_feature (37)..(384): NCBI GI NO: 25408981 NR Description: hypothetical protein At2g46320
  misc_feature (110)..(384): NCBI GI NO: 34904154 NR Description: P0417G05.20
  misc_feature (135)..(384): NCBI GI NO: 30690327 NR Description: mitochondrial carrier protein family
  misc_feature (36)..(324): NCBI GI NO: 7486963 NR Description: hypothetical protein T13J8
  misc_feature (29)..(384): NCBI GI NO: 32766523 NR Description: Unknown (protein for MGC:63736) [Danio rerio]
  misc_feature (186)..(383): NCBI GI NO: 20070705 NR Description: mitochondrial carrier family protein
MTAAAARVDLSGGVTPSHQGPSSSSPSSGPAPAAGADQELGMYERAFSAAGAAFVSAIIVNPLDVAKTRLQAQAAGVLYHQPAQMAALGPDAILSEFRCSPSCTRGLVLGSEPVCPPDCFQYKGTLDVFLKVVRQEGFVRLWRGTNAGLALAVPTVGIYLPCYDIFRNWIEDFTRSNAPGLTPYAPLVAGSVARSLACIACSPIELARTRMQAYKEFRPGVKPPGMWKTLVGVLSPLPSSSQNVQNYRVLWTGVGAQLARDVPFSAICWSTLEPMRRKLLGFVGEEGNAGSVLGVNFAAGFVAGSLAAGATCPLDVAKTRRQIEKDTEKAMRMTTRQTLAEIWRSGGMKGLFAGVGPRVARAGPSVGIVISFYEVVKYALHQRHTS

SEQ ID NO: 29228 - DNA, 1815 bp, Zea mays subsp. mays
  misc_feature (1)..(1815): Ceres Seq. ID no. 12408731
ctgttcattcagatctgctccgtgctgtgcttcttctgctgctgccttgcagcgaccagcgagaagaaatccattcgctaggccggcccacccacccacgatagcggttgtggtcactcatgcgtcgtcgccggagtccaatctcgccgctcggagtttcttgacttttctggtcggagtttccatttcctcctggaggagattatttctttctcctctttcaccccgagaatctcgtctcgggtcgcgctggtttgattcctcctcgcctgagtccaccgctttcgcttccagtggagaagcttgtccgtgaagcagcgctcgtctcctgcttaaaatttcttccttctgccttggtttctttgctcgcgcccgccgatttgcttgctgcccagtccacactcctccgttcgtgtctcgcggctttccgcactcgttttcccggtctcggatttcgttaccaatgggcaacgcgttcgcgtgcatgccgcgcaaggagcagcgaggcgcggccgcggtgtcgcgcagcaagcggatggggagcgcgcggtcggcgcgcggcgggcccaagctgacgcccgcggaggaggagctcctccaccgccaggctctggccatggccatccaccagcacctcgacgccggcggctccatgtcccgccgcatcgacgccggggcctccctgtcccggcgcatggccccgggctccaccagctcccgccgccgcggcgacctgccggactccgtcacgaatgccaagcccgccccaattgttctggagaatttggaaacaaagaaaattgtccttgttcatggagaagggttcggtgcttggtgttggtacaagaccatctcacacttggaggaagctggtctagatcctgttgccttagatctcacaggctctggcatagaccatactgatacaaacagcatagctacgttagcagattactccaagccattgattgattacctcgacagacttcctgaagatgagaaggtcattttggtcggccatagttgcggaggtgcgagtgtctcgtatgcactggagcagtacccccgaaagatctcaaaggcggtgtttcttactgctacaatggtaaaggatggccagaggccctttgacgtgttctcggaggaactccggtcggcggatgttttcttgcaagagtcacagtttctagtctatggaaatgggaaggacaagcctcctactgggctgatgttcgataagcagcagatcaaggggctgtatttcaaccaaactccttccaaggatatggcactagcagcggtgtccatgaggcctatccctctagccccaatcatggagaagctctccctcaccccggagaactacggctccgtccgtcgctacttcatccaggcactcgacgaccacatgctgtcgccggacgcccaggagaagctggtccgcgagaaccctcccgacggcatcttcaagatcaagggcggcgaccactgccccttcttctcgaagccgcagtccctcaacaagatcctgctggagatcgcacagatccaagctcctgcggcgctgctcaaggcgagctcccccgaggagaccgtcgccgccatggtgacagggccagccaagtcatgactgcatgtatgtagtgtacacgaaaagagaaatgagtaagcacataggttgcaaaagggagggggaggaggtctggggattaactgaagccaagctgtgtcggataataatgtagggagttcaaagtgtttctttctttcttctgtgatcagatcagatcatatagagaatgagaggtggtcagc

SEQ ID NO: 29229 - protein, 388 aa, Zea mays subsp. mays
  peptide (1)..(388): Ceres Seq. ID no. 12408732
  misc_feature (1)..(362): NCBI GI NO: 21595837 NR Description: polyneuridine aldehyde esterase, putative
  misc_feature (1)..(362): NCBI GI NO: 15218463 NR Description: polyneuridine aldehyde esterase, putative
  misc_feature (1)..(362): NCBI GI NO: 30681236 NR Description: hydrolase family [Arabidopsis thaliana]
  misc_feature (111)..(362): NCBI GI NO: 25518661 NR Description: hypothetical protein F12G12
  misc_feature (111)..(362): NCBI GI NO: 7485010 NR Description: host response protein homolog T5L19
  misc_feature (41)..(366): NCBI GI NO: 15230077 NR Description: alpha/beta hydrolase, putative
  misc_feature (82)..(362): NCBI GI NO: 15222699 NR Description: hypothetical protein; protein id: At1g26360.1
  misc_feature (105)..(362): NCBI GI NO: 15222256 NR Description: polyneuridine aldehyde esterase, putative
  misc_feature (105)..(362): NCBI GI NO: 25404802 NR Description: probable alpha/beta hydrolase F23O10.18
  misc_feature (148)..(344): NCBI GI NO: 25518436 NR Description: hypothetical protein T1K7
MGNAFACMPRKEQRGAAAVSRSKRMGSARSARGGPKLTPAEEELLHRQALAMAIHQHLDAGGSMSRRIDAGASLSRRMAPGSTSSRRRGDLPDSVTNAKPAPIVLENLETKKIVLVHGEGFGAWCWYKTISHLEEAGLDPVALDLTGSGIDHTDTNSIATLADYSKPLIDYLDRLPEDEKVILVGHSCGGASVSYALEQYPRKISKAVFLTATMVKDGQRPFDVFSEELRSADVFLQESQFLVYGNGKDKPPTGLMFDKQQIKGLYFNQTPSKDMALAAVSMRPIPLAPIMEKLSLTPENYGSVRRYFIQALDDHMLSPDAQEKLVRENPPDGIFKIKGGDHCPFFSKPQSLNKILLEIAQIQAPAALLKASSPEETVAAMVTGPAKS

SEQ ID NO: 29230 - protein, 381 aa, Zea mays subsp. mays
  peptide (1)..(381): Ceres Seq. ID no. 12408733
  misc_feature (1)..(355): NCBI GI NO: 21595837 NR Description: polyneuridine aldehyde esterase, putative
  misc_feature (1)..(355): NCBI GI NO: 15218463 NR Description: polyneuridine aldehyde esterase, putative
  misc_feature (1)..(355): NCBI GI NO: 30681236 NR Description: hydrolase family [Arabidopsis thaliana]
  misc_feature (104)..(355): NCBI GI NO: 25518661 NR Description: hypothetical protein F12G12
  misc_feature (104)..(355): NCBI GI NO: 7485010 NR Description: host response protein homolog T5L19
  misc_feature (34)..(359): NCBI GI NO: 15230077 NR Description: alpha/beta hydrolase, putative
  misc_feature (75)..(355): NCBI GI NO: 15222699 NR Description: hypothetical protein; protein id: At1g26360.1
  misc_feature (98)..(355): NCBI GI NO: 15222256 NR Description: polyneuridine aldehyde esterase, putative
  misc_feature (98)..(355): NCBI GI NO: 25404802 NR Description: probable alpha/beta hydrolase F23O10.18
  misc_feature (141)..(337): NCBI GI NO: 25518436 NR Description: hypothetical protein T1K7
MPRKEQRGAAAVSRSKRMGSARSARGGPKLTPAEEELLHRQALAMAIHQHLDAGGSMSRRIDAGASLSRRMAPGSTSSRRRGDLPDSVTNAKPAPIVLENLETKKIVLVHGEGFGAWCWYKTISHLEEAGLDPVALDLTGSGIDHTDTNSIATLADYSKPLIDYLDRLPEDEKVILVGHSCGGASVSYALEQYPRKISKAVFLTATMVKDGQRPFDVFSEELRSADVFLQESQFLVYGNGKDKPPTGLMFDKQQIKGLYFNQTPSKDMALAAVSMRPIPLAPIMEKLSLTPENYGSVRRYFIQALDDHMLSPDAQEKLVRENPPDGIFKIKGGDHCPFFSKPQSLNKILLEIAQIQAPAALLKASSPEETVAAMVTGPAKS

SEQ ID NO: 29231 - protein, 364 aa, Zea mays subsp. mays
  peptide (1)..(364): Ceres Seq. ID no. 12408734
  misc_feature (1)..(338): NCBI GI NO: 21595837 NR Description: polyneuridine aldehyde esterase, putative
  misc_feature (1)..(338): NCBI GI NO: 15218463 NR Description: polyneuridine aldehyde esterase, putative
  misc_feature (1)..(338): NCBI GI NO: 30681236 NR Description: hydrolase family [Arabidopsis thaliana]
  misc_feature (87)..(338): NCBI GI NO: 25518661 NR Description: hypothetical protein F12G12
  misc_feature (87)..(338): NCBI GI NO: 7485010 NR Description: host response protein homolog T5L19
  misc_feature (17)..(342): NCBI GI NO: 15230077 NR Description: alpha/beta hydrolase, putative
  misc_feature (58)..(338): NCBI GI NO: 15222699 NR Description: hypothetical protein; protein id: At1g26360.1
  misc_feature (81)..(338): NCBI GI NO: 15222256 NR Description: polyneuridine aldehyde esterase, putative
  misc_feature (81)..(338): NCBI GI NO: 25404802 NR Description: probable alpha/beta hydrolase F23O10.18
  misc_feature (124)..(320): NCBI GI NO: 25518436 NR Description: hypothetical protein T1K7
MGSARSARGGPKLTPAEEELLHRQALAMAIHQHLDAGGSMSRRIDAGASLSRRMAPGSTSSRRRGDLPDSVTNAKPAPIVLENLETKKIVLVHGEGFGAWCWYKTISHLEEAGLDPVALDLTGSGIDHTDTNSIATLADYSKPLIDYLDRLPEDEKVILVGHSCGGASVSYALEQYPRKISKAVFLTATMVKDGQRPFDVFSEELRSADVFLQESQFLVYGNGKDKPPTGLMFDKQQIKGLYFNQTPSKDMALAAVSMRPIPLAPIMEKLSLTPENYGSVRRYFIQALDDHMLSPDAQEKLVRENPPDGIFKIKGGDHCPFFSKPQSLNKILLEIAQIQAPAALLKASSPEETVAAMVTGPAKS

SEQ ID NO: 29232 - DNA, 1678 bp, Zea mays subsp. mays
  misc_feature (1)..(1678): Ceres Seq. ID no. 12367431
accggacccgttctgggttttacccctccgccactgccttgttctttcctgctccgctccccacgcgtacgcgcactcgtggcgacgactgggtgatcgccgccgccgccaccacgcaccaccaggccttcaccggcgacaaacaccatcaacagacacaagtgcttcggtcattatagtgccagtaccattctgccagcgagttcctttgccacaaaaagataacactcggatatctcatggcaaaacctgggattttaggccgcagcagtgcacagagatcaaatgagggcatgcgaatcatattctcagcagttattggtgttatgctagggtacttgtttggcatttccttccctacagttaatataacaaagcttcacttcccttccagcattatctcctatatcgaggacagaaactctggcatcacaacccaaacattattgaatcatgcatggacgtctgcagctactcataagaagaacaattcagcttctaactctgatgaaattcctaagatttatgttccaacaaaccctaaaggtgctgaaaggcttccaccgggcattgtagtgtctgaaacagacctttatctccggagattgtggggtgaacctagtgaggatcttactaccaaaccaagataccttgttacatttacagtgggatactctcaaaaggcaaacattgatgcagcggtgaaaaaattttcagataacttcacaattatgttgttccattatgatggccggacaactgagtgggatgaatttgagtggtcaaaaagggctgtccatgtgagtgtcacaaagcagaccaaatggtggtatgccaaacgatttctacatcctgacattgttgcccgctacgactacatatttatctgggatgaagatcttggtgtcgaacattttaatgcagaggcgtacattaagcttgttaggaagcatgggcttgagatctctcagcctggtttggagcccgataaaggtttgacatggcaaatgactaaacgaagaggtgatcaggaagtccacaaagtaactgaggagagacctggctggtgtagcgaccctcacctgccaccatgtgcagcgtttgttgaaattatggcaactgtattctcaagggatgcatggcgctgtgtatggcatatgattcagaacgacttggtccatggatggggccttgattttgctcttaggaaatgtgtggagccagcccatgagaaaattggagtggttgattcccagtggattgttcatcaagtcatcccttcgcttggtaaccagggcaaggcagagaatggaaaagcaccatgggaaggggttagagcacgctgtcgtaaagaatgggggatgttccaaacaaggttgactgatgctgagaaagcatattacttggagcacgggatcacaccaccaaaatcgacggtagcttagctgcacgcaccgacagtagcttagctgcactgcatgcctgcatacaggcacctcgcgagtcacgccaaggtttctgttttgtgaacctagcgccttcctgtccgataagcaactgactctgtagagatgcagcaccacagccagatttgtacagaatcgatgtacgtttttactcttcttaatcttctttacttgttttcaaccgtagcgacgagagtagctcttgtgtaagt

SEQ ID NO: 29233 - protein, 401 aa, Zea mays subsp. mays
  peptide (1)..(401): Ceres Seq. ID no. 12367432
  misc_feature (94)..(393): Pfam Name: DUF707 Pfam Description: Protein of unknown function
  misc_feature (1)..(396): NCBI GI NO: 34906848 NR Description: P0470A12.1
  misc_feature (1)..(400): NCBI GI NO: 14719314 NR Description: putative protein [Oryza sativa]
  misc_feature (45)..(399): NCBI GI NO: 34905994 NR Description: P0518C01.8
  misc_feature (5)..(388): NCBI GI NO: 18408876 NR Description: F12A21
  misc_feature (5)..(393): NCBI GI NO: 18390845 NR Description: storage protein, putative; protein id: At1g08040
  misc_feature (13)..(388): NCBI GI NO: 22331371 NR Description: unknown protein; protein id: At3g27470
  misc_feature (94)..(393): NCBI GI NO: 25407018 NR Description: protein T6D22.12 [imported] - Arabidopsis thaliana
  misc_feature (6)..(48): NCBI GI NO: 25407018 NR Description: protein T6D22.12 [imported] - Arabidopsis thaliana
  misc_feature (10)..(390): NCBI GI NO: 22329525 NR Description: unknown protein; protein id: At1g13000
  misc_feature (92)..(292): NCBI GI NO: 7939519 NR Description: gb|AAD31054
MAKPGILGRSSAQRSNEGMRIIFSAVIGVMLGYLFGISFPTVNITKLHFPSSIISYIEDRNSGITTQTLLNHAWTSAATHKKNNSASNSDEIPKIYVPTNPKGAERLPPGIVVSETDLYLRRLWGEPSEDLTTKPRYLVTFTVGYSQKANIDAAVKKFSDNFTIMLFHYDGRTTEWDEFEWSKRAVHVSVTKQTKWWYAKRFLHPDIVARYDYIFIWDEDLGVEHFNAEAYIKLVRKHGLEISQPGLEPDKGLTWQMTKRRGDQEVHKVTEERPGWCSDPHLPPCAAFVEIMATVFSRDAWRCVWHMIQNDLVHGWGLDFALRKCVEPAHEKIGVVDSQWIVHQVIPSLGNQGKAENGKAPWEGVRARCRKEWGMFQTRLTDAEKAYYLEHGITPPKSTVA

SEQ ID NO: 29234 - protein, 383 aa, Zea mays subsp. mays
  peptide (1)..(383): Ceres Seq. ID no. 12367433
  misc_feature (76)..(375): Pfam Name: DUF707 Pfam Description: Protein of unknown function
  misc_feature (1)..(378): NCBI GI NO: 34906848 NR Description: P0470A12.1
  misc_feature (1)..(382): NCBI GI NO: 14719314 NR Description: putative protein [Oryza sativa]
  misc_feature (27)..(381): NCBI GI NO: 34905994 NR Description: P0518C01.8
  misc_feature (1)..(370): NCBI GI NO: 18408876 NR Description: F12A21
  misc_feature (1)..(375): NCBI GI NO: 18390845 NR Description: storage protein, putative; protein id: At1g08040
  misc_feature (1)..(370): NCBI GI NO: 22331371 NR Description: unknown protein; protein id: At3g27470
  misc_feature (76)..(375): NCBI GI NO: 25407018 NR Description: protein T6D22.12 [imported] - Arabidopsis thaliana
  misc_feature (1)..(30): NCBI GI NO: 25407018 NR Description: protein T6D22.12 [imported] - Arabidopsis thaliana
  misc_feature (1)..(372): NCBI GI NO: 22329525 NR Description: unknown protein; protein id: At1g13000
  misc_feature (74)..(274): NCBI GI NO: 7939519 NR Description: gb|AAD31054
MRIIFSAVIGVMLGYLFGISFPTVNITKLHFPSSIISYIEDRNSGITTQTLLNHAWTSAATHKKNNSASNSDEIPKIYVPTNPKGAERLPPGIVVSETDLYLRRLWGEPSEDLTTKPRYLVTFTVGYSQKANIDAAVKKFSDNFTIMLFHYDGRTTEWDEFEWSKRAVHVSVTKQTKWWYAKRFLHPDIVARYDYIFIWDEDLGVEHFNAEAYIKLVRKHGLEISQPGLEPDKGLTWQMTKRRGDQEVHKVTEERPGWCSDPHLPPCAAFVEIMATVFSRDAWRCVWHMIQNDLVHGWGLDFALRKCVEPAHEKIGVVDSQWIVHQVIPSLGNQGKAENGKAPWEGVRARCRKEWGMFQTRLTDAEKAYYLEHGITPPKSTVA

SEQ ID NO: 29235 - protein, 372 aa, Zea mays subsp. mays
  peptide (1)..(372): Ceres Seq. ID no. 12367434
  misc_feature (65)..(364): Pfam Name: DUF707 Pfam Description: Protein of unknown function
  misc_feature (1)..(367): NCBI GI NO: 34906848 NR Description: P0470A12.1
  misc_feature (1)..(371): NCBI GI NO: 14719314 NR Description: putative protein [Oryza sativa]
  misc_feature (16)..(370): NCBI GI NO: 34905994 NR Description: P0518C01.8
  misc_feature (1)..(359): NCBI GI NO: 18408876 NR Description: F12A21
  misc_feature (1)..(364): NCBI GI NO: 18390845 NR Description: storage protein, putative; protein id: At1g08040
  misc_feature (1)..(359): NCBI GI NO: 22331371 NR Description: unknown protein; protein id: At3g27470
  misc_feature (65)..(364): NCBI GI NO: 25407018 NR Description: protein T6D22.12 [imported] - Arabidopsis thaliana
  misc_feature (1)..(19): NCBI GI NO: 25407018 NR Description: protein T6D22.12 [imported] - Arabidopsis thaliana
  misc_feature (1)..(361): NCBI GI NO: 22329525 NR Description: unknown protein; protein id: At1g13000
  misc_feature (63)..(263): NCBI GI NO: 7939519 NR Description: gb|AAD31054
MLGYLFGISFPTVNITKLHFPSSIISYIEDRNSGITTQTLLNHAWTSAATHKKNNSASNSDEIPKIYVPTNPKGAERLPPGIVVSETDLYLRRLWGEPSEDLTTKPRYLVTFTVGYSQKANIDAAVKKFSDNFTIMLFHYDGRTTEWDEFEWSKRAVHVSVTKQTKWWYAKRFLHPDIVARYDYIFIWDEDLGVEHFNAEAYIKLVRKHGLEISQPGLEPDKGLTWQMTKRRGDQEVHKVTEERPGWCSDPHLPPCAAFVEIMATVFSRDAWRCVWHMIQNDLVHGWGLDFALRKCVEPAHEKIGVVDSQWIVHQVIPSLGNQGKAENGKAPWEGVRARCRKEWGMFQTRLTDAEKAYYLEHGITPPKSTVA

SEQ ID NO: 29236 - DNA, 1597 bp, Zea mays subsp. mays
  misc_feature (1)..(1597): Ceres Seq. ID no. 12412195
gatgcaaacagcaccattcggtcgctccagcttttgtgcacgtccactgtgtccctcctcgctacccccgctttttgtgcgcggtggcaacgtgcgacagccgagaggcagaatgacgaagcaagtggtggtggtggacacagctctggtggcgccgagcgaggagacgccgcggcagccgctgtggctgtccaaccttgacctggccgtgccgaggacgcacacgccgctggtctactactacccggcgccgggcacgggctccttcgcgccggaccggctgagggccgcattgggcgccgctctggtgccattctacccacttgccgggcgcctcggcgttggcccggacggccggctgcagatcgagtgcaacagcaagggcgcgctcttcgtcgtcgccaacgcagacctcaccggcgcggacgtcttcgacgactacgagccgtcgtcggagatcaggaacacttttgtgccgttaggggagtccggcgaggcgaacaacagccccatatccatgttccaggtgacttttctcaagtgcggcggcgtggtgctaggaaccgccatccaccacgcggccatggacggcgtgggcgcgttccagtttatgcagacgtggtccggggtggcacgcggcctggacgtggcggaggcgtgcgggccgcagccgttccacgaccggacgctcctgcacgcgcggcgcccgccgtgcccgacatccgaccacttcgtctactccccggcgttcctcagcggccgcccccggccctacgtcacccgcatctactccgtctcgccgaagctcctcgccgacgtcaagtcgcgctgcgcgccaggcgtgtccacctactgcgccgtcaccgcgcacctctggcgctgcgtgtgcgtcgcgcgcgggctagcgccgggcgcggacacccgcctcagcctgccggccaacgtccgccaccgcctgcgccccccgctcccgcgcaccttcttcggcaacgccgtcgtgcgcgaccacgtcaccgcccccgtcagcaccgtcctcggcgcccctctcgggtccgtggcggagaccatcaagaaggcggtggaccgcgtggacgacgccttcgcgcggtcggtgctggactacctggagctgcagaatgcaggcggcaagcagctgagcggccaggctcaggcccaggcgcccagggagcagctcgtaccggcgacggacctgtgggcggtgagctggctggggatggccatgtacgacgccgacttcggctcaggcgcgccgcggttcgtcgcgccggcgcagatgttcggcatcggcacggcgtatatgacgccgcgcggtccggacagggacgacggcatcgccgtgctcatctctctggagcccgagtacctgtcgtgctttgagaaggtcttcttctataacgagtgatgtctcaggtctggagttcaaggatgtgaacgtgtgaatctccgttcgagtagtaagctatttttcctttccctttttttttgtacgtctgagcggtcccaccgagtattctaggtattccttgaaatacttattgttttggtcaaataaataaatatctgccttgcgttattg

SEQ ID NO: 29237 - protein, 473 aa, Zea mays subsp. mays
  peptide (1)..(473): Ceres Seq. ID no. 12412196
  misc_feature (41)..(472): Pfam Name: Pfam Description:  Transferase family
  misc_feature (41)..(468): NCBI GI NO: 40253398 NR Description: putative hydroxyanthranilatehydroxycinnamoyltransferase 2
  misc_feature (42)..(470): NCBI GI NO: 38345030 NR Description: OSJNBa0029H02.14
  misc_feature (41)..(472): NCBI GI NO: 6469032 NR Description: N-hydroxycinnamoyl/benzoyltransferase
  misc_feature (37)..(470): NCBI GI NO: 40644899 NR Description: hydroxycinnamoyl CoA quinate transferase
  misc_feature (41)..(470): NCBI GI NO: 15239747 NR Description: anthranilate N-benzoyltransferase
  misc_feature (41)..(470): NCBI GI NO: 21536883 NR Description: anthranilate N-benzoyltransferase
  misc_feature (37)..(470): NCBI GI NO: 40644084 NR Description: hydroxycinnamoyl CoA quinate transferase
  misc_feature (41)..(472): NCBI GI NO: 27475616 NR Description: hydroxycinnamoyl transferase [Nicotiana tabacum]
  misc_feature (42)..(470): NCBI GI NO: 7484689 NR Description: anthranilate N-benzoyltransferase (EC 2
  misc_feature (42)..(470): NCBI GI NO: 7484692 NR Description: anthranilate N-benzoyltransferase (EC 2
MQTAPFGRSSFCARPLCPSSLPPLFVRGGNVRQPRGRMTKQVVVVDTALVAPSEETPRQPLWLSNLDLAVPRTHTPLVYYYPAPGTGSFAPDRLRAALGAALVPFYPLAGRLGVGPDGRLQIECNSKGALFVVANADLTGADVFDDYEPSSEIRNTFVPLGESGEANNSPISMFQVTFLKCGGVVLGTAIHHAAMDGVGAFQFMQTWSGVARGLDVAEACGPQPFHDRTLLHARRPPCPTSDHFVYSPAFLSGRPRPYVTRIYSVSPKLLADVKSRCAPGVSTYCAVTAHLWRCVCVARGLAPGADTRLSLPANVRHRLRPPLPRTFFGNAVVRDHVTAPVSTVLGAPLGSVAETIKKAVDRVDDAFARSVLDYLELQNAGGKQLSGQAQAQAPREQLVPATDLWAVSWLGMAMYDADFGSGAPRFVAPAQMFGIGTAYMTPRGPDRDDGIAVLISLEPEYLSCFEKVFFYNE

SEQ ID NO: 29238 - protein, 436 aa, Zea mays subsp. mays
  peptide (1)..(436): Ceres Seq. ID no. 12412197
  misc_feature (4)..(435): Pfam Name: Pfam Description:  Transferase family
  misc_feature (4)..(431): NCBI GI NO: 40253398 NR Description: putative hydroxyanthranilatehydroxycinnamoyltransferase 2
  misc_feature (5)..(433): NCBI GI NO: 38345030 NR Description: OSJNBa0029H02.14
  misc_feature (4)..(435): NCBI GI NO: 6469032 NR Description: N-hydroxycinnamoyl/benzoyltransferase
  misc_feature (1)..(433): NCBI GI NO: 40644899 NR Description: hydroxycinnamoyl CoA quinate transferase
  misc_feature (4)..(433): NCBI GI NO: 15239747 NR Description: anthranilate N-benzoyltransferase
  misc_feature (4)..(433): NCBI GI NO: 21536883 NR Description: anthranilate N-benzoyltransferase
  misc_feature (1)..(433): NCBI GI NO: 40644084 NR Description: hydroxycinnamoyl CoA quinate transferase
  misc_feature (4)..(435): NCBI GI NO: 27475616 NR Description: hydroxycinnamoyl transferase [Nicotiana tabacum]
  misc_feature (5)..(433): NCBI GI NO: 7484689 NR Description: anthranilate N-benzoyltransferase (EC 2
  misc_feature (5)..(433): NCBI GI NO: 7484692 NR Description: anthranilate N-benzoyltransferase (EC 2
MTKQVVVVDTALVAPSEETPRQPLWLSNLDLAVPRTHTPLVYYYPAPGTGSFAPDRLRAALGAALVPFYPLAGRLGVGPDGRLQIECNSKGALFVVANADLTGADVFDDYEPSSEIRNTFVPLGESGEANNSPISMFQVTFLKCGGVVLGTAIHHAAMDGVGAFQFMQTWSGVARGLDVAEACGPQPFHDRTLLHARRPPCPTSDHFVYSPAFLSGRPRPYVTRIYSVSPKLLADVKSRCAPGVSTYCAVTAHLWRCVCVARGLAPGADTRLSLPANVRHRLRPPLPRTFFGNAVVRDHVTAPVSTVLGAPLGSVAETIKKAVDRVDDAFARSVLDYLELQNAGGKQLSGQAQAQAPREQLVPATDLWAVSWLGMAMYDADFGSGAPRFVAPAQMFGIGTAYMTPRGPDRDDGIAVLISLEPEYLSCFEKVFFYNE

SEQ ID NO: 29239 - protein, 301 aa, Zea mays subsp. mays
  peptide (1)..(301): Ceres Seq. ID no. 12412198
  misc_feature (1)..(300): Pfam Name: Pfam Description:  Transferase family
  misc_feature (1)..(296): NCBI GI NO: 40253398 NR Description: putative hydroxyanthranilatehydroxycinnamoyltransferase 2
  misc_feature (1)..(298): NCBI GI NO: 38345030 NR Description: OSJNBa0029H02.14
  misc_feature (1)..(300): NCBI GI NO: 6469032 NR Description: N-hydroxycinnamoyl/benzoyltransferase
  misc_feature (1)..(298): NCBI GI NO: 40644899 NR Description: hydroxycinnamoyl CoA quinate transferase
  misc_feature (1)..(298): NCBI GI NO: 15239747 NR Description: anthranilate N-benzoyltransferase
  misc_feature (1)..(298): NCBI GI NO: 21536883 NR Description: anthranilate N-benzoyltransferase
  misc_feature (1)..(298): NCBI GI NO: 40644084 NR Description: hydroxycinnamoyl CoA quinate transferase
  misc_feature (1)..(300): NCBI GI NO: 27475616 NR Description: hydroxycinnamoyl transferase [Nicotiana tabacum]
  misc_feature (1)..(298): NCBI GI NO: 7484689 NR Description: anthranilate N-benzoyltransferase (EC 2
  misc_feature (1)..(298): NCBI GI NO: 7484692 NR Description: anthranilate N-benzoyltransferase (EC 2
MFQVTFLKCGGVVLGTAIHHAAMDGVGAFQFMQTWSGVARGLDVAEACGPQPFHDRTLLHARRPPCPTSDHFVYSPAFLSGRPRPYVTRIYSVSPKLLADVKSRCAPGVSTYCAVTAHLWRCVCVARGLAPGADTRLSLPANVRHRLRPPLPRTFFGNAVVRDHVTAPVSTVLGAPLGSVAETIKKAVDRVDDAFARSVLDYLELQNAGGKQLSGQAQAQAPREQLVPATDLWAVSWLGMAMYDADFGSGAPRFVAPAQMFGIGTAYMTPRGPDRDDGIAVLISLEPEYLSCFEKVFFYNE

SEQ ID NO: 29240 - DNA, 1433 bp, Zea mays subsp. mays
  misc_feature (1)..(1433): Ceres Seq. ID no. 12408719
ggcaagcctactcaggcgatccgcggtacccgcgcgccagctcctcctcctcctcccgcgccacctcgcagccgccggctccgcccccgcctcgtcccgttcgttctcccgcttccacccccgcgacgacgatgacagctctatgttcgatccaccggagccgccggtgaactggggcatgaacatagttccggagaagaaggctttcgtcgtggagaggttcgggaagtatctcaagaccctcgactccgggttccacctgctgatccccgccgtcgaccgtattgcctacgtgcactcgctcaaggaggagaccatccccattcccgatcagaacgcaatcaccaaggacaacgtcaccatacagatcgacagcgtcatatatatcaagatcatggacccctaccttgcttcctatggtgtggaggatccaatctatgctgtcctacaacttgcacaaacaaccatgagaagtgaacttgggaagataaccttagacaagacttttgaggagagagatgcattaaatgagaaaattgtgagtgccatcaatgaagcagccacagattggggcttgaagtgtattcgctatgagatcagggacataactcctccaacagggattaggcaggctatggagatgcaggctgaagcaaaaaggagaaaacgcgcccaaatccttgaatcagaagggaagaaacatgcccaaatccttgaatcagaagggaagaaaactgcccaggtccttgaatctgaaggagctatgttagatctagcaaaccgtgcgaagggtgcggccgaagcaattcttgccaagtcagaagctactgctcgtggaatgagattggtttcagatgcgatgacaactgaaggcagtgccaaggctgctagcctaaaacttgcagagcaatatatcgaagcattctcaaatctagcacaaaagacaaatacaatgctgctcccaggcaacagtgccagcccagcatctttcgtggcccaggcgatgaagacgtatcagcaaatccattcccatagtcaggcattgaagtaccaccctcaggtagaagggctggaggaatcaggagagaccacccctgctgctccatcttctgaggcaagcaagacaccaccatttgtcggggaagcagattctaaccataccttctcgctgcaacgcccaagaacaagaagtgagcttccctcaagtgcttgaagcccttttcttgtctactgttctgcaacataggagtgtcactgataaacaccagtaggtttagttttctttagtcagagaagctgatgtgcggcgaaggggatagacccgtagcccgtaggcatttggtttcgggaaagctaaatgcgaccggagagagattttgattctggtgaagtttatacgttggttccttcatatattttaaaatgaagtttgt

SEQ ID NO: 29241 - protein, 403 aa, Zea mays subsp. mays
  peptide (1)..(403): Ceres Seq. ID no. 12408720
  misc_feature (1)..(396): NCBI GI NO: 7716464 NR Description: stomatin-like protein [Zea mays]
  misc_feature (54)..(391): NCBI GI NO: 18417021 NR Description: putative protein; protein id: At4g27585
  misc_feature (54)..(378): NCBI GI NO: 7487517 NR Description: hypothetical protein T29A15
  misc_feature (10)..(339): NCBI GI NO: 15239547 NR Description: putative protein; protein id: At5g54100
  misc_feature (10)..(339): NCBI GI NO: 21554125 NR Description: stomatin-like protein [Arabidopsis thaliana]
  misc_feature (22)..(365): NCBI GI NO: 23394406 NR Description: unknown [Phytophthora infestans]
  misc_feature (55)..(354): NCBI GI NO: 32766629 NR Description: Unknown (protein for MGC:63505) [Danio rerio]
  misc_feature (55)..(318): NCBI GI NO: 34905182 NR Description: P0498E12.9
  misc_feature (60)..(349): NCBI GI NO: 15892375 NR Description: unknown [Rickettsia conorii]
  misc_feature (60)..(349): NCBI GI NO: 15604196 NR Description: unknown [Rickettsia prowazekii]
ASLLRRSAVPARQLLLLLPRHLAAAGSAPASSRSFSRFHPRDDDDSSMFDPPEPPVNWGMNIVPEKKAFVVERFGKYLKTLDSGFHLLIPAVDRIAYVHSLKEETIPIPDQNAITKDNVTIQIDSVIYIKIMDPYLASYGVEDPIYAVLQLAQTTMRSELGKITLDKTFEERDALNEKIVSAINEAATDWGLKCIRYEIRDITPPTGIRQAMEMQAEAKRRKRAQILESEGKKHAQILESEGKKTAQVLESEGAMLDLANRAKGAAEAILAKSEATARGMRLVSDAMTTEGSAKAASLKLAEQYIEAFSNLAQKTNTMLLPGNSASPASFVAQAMKTYQQIHSHSQALKYHPQVEGLEESGETTPAAPSSEASKTPPFVGEADSNHTFSLQRPRTRSELPSSA

SEQ ID NO: 29242 - protein, 356 aa, Zea mays subsp. mays
  peptide (1)..(356): Ceres Seq. ID no. 12408721
  misc_feature (1)..(349): NCBI GI NO: 7716464 NR Description: stomatin-like protein [Zea mays]
  misc_feature (7)..(344): NCBI GI NO: 18417021 NR Description: putative protein; protein id: At4g27585
  misc_feature (7)..(331): NCBI GI NO: 7487517 NR Description: hypothetical protein T29A15
  misc_feature (1)..(292): NCBI GI NO: 15239547 NR Description: putative protein; protein id: At5g54100
  misc_feature (1)..(292): NCBI GI NO: 21554125 NR Description: stomatin-like protein [Arabidopsis thaliana]
  misc_feature (1)..(318): NCBI GI NO: 23394406 NR Description: unknown [Phytophthora infestans]
  misc_feature (8)..(307): NCBI GI NO: 32766629 NR Description: Unknown (protein for MGC:63505) [Danio rerio]
  misc_feature (8)..(271): NCBI GI NO: 34905182 NR Description: P0498E12.9
  misc_feature (13)..(302): NCBI GI NO: 15892375 NR Description: unknown [Rickettsia conorii]
  misc_feature (13)..(302): NCBI GI NO: 15604196 NR Description: unknown [Rickettsia prowazekii]
MFDPPEPPVNWGMNIVPEKKAFVVERFGKYLKTLDSGFHLLIPAVDRIAYVHSLKEETIPIPDQNAITKDNVTIQIDSVIYIKIMDPYLASYGVEDPIYAVLQLAQTTMRSELGKITLDKTFEERDALNEKIVSAINEAATDWGLKCIRYEIRDITPPTGIRQAMEMQAEAKRRKRAQILESEGKKHAQILESEGKKTAQVLESEGAMLDLANRAKGAAEAILAKSEATARGMRLVSDAMTTEGSAKAASLKLAEQYIEAFSNLAQKTNTMLLPGNSASPASFVAQAMKTYQQIHSHSQALKYHPQVEGLEESGETTPAAPSSEASKTPPFVGEADSNHTFSLQRPRTRSELPSSA

SEQ ID NO: 29243 - protein, 344 aa, Zea mays subsp. mays
  peptide (1)..(344): Ceres Seq. ID no. 12408722
  misc_feature (1)..(337): NCBI GI NO: 7716464 NR Description: stomatin-like protein [Zea mays]
  misc_feature (1)..(332): NCBI GI NO: 18417021 NR Description: putative protein; protein id: At4g27585
  misc_feature (1)..(319): NCBI GI NO: 7487517 NR Description: hypothetical protein T29A15
  misc_feature (1)..(280): NCBI GI NO: 15239547 NR Description: putative protein; protein id: At5g54100
  misc_feature (1)..(280): NCBI GI NO: 21554125 NR Description: stomatin-like protein [Arabidopsis thaliana]
  misc_feature (1)..(306): NCBI GI NO: 23394406 NR Description: unknown [Phytophthora infestans]
  misc_feature (1)..(295): NCBI GI NO: 32766629 NR Description: Unknown (protein for MGC:63505) [Danio rerio]
  misc_feature (1)..(259): NCBI GI NO: 34905182 NR Description: P0498E12.9
  misc_feature (1)..(290): NCBI GI NO: 15892375 NR Description: unknown [Rickettsia conorii]
  misc_feature (1)..(290): NCBI GI NO: 15604196 NR Description: unknown [Rickettsia prowazekii]
MNIVPEKKAFVVERFGKYLKTLDSGFHLLIPAVDRIAYVHSLKEETIPIPDQNAITKDNVTIQIDSVIYIKIMDPYLASYGVEDPIYAVLQLAQTTMRSELGKITLDKTFEERDALNEKIVSAINEAATDWGLKCIRYEIRDITPPTGIRQAMEMQAEAKRRKRAQILESEGKKHAQILESEGKKTAQVLESEGAMLDLANRAKGAAEAILAKSEATARGMRLVSDAMTTEGSAKAASLKLAEQYIEAFSNLAQKTNTMLLPGNSASPASFVAQAMKTYQQIHSHSQALKYHPQVEGLEESGETTPAAPSSEASKTPPFVGEADSNHTFSLQRPRTRSELPSSA

SEQ ID NO: 29244 - DNA, 1414 bp, Zea mays subsp. mays
  misc_feature (1)..(1414): Ceres Seq. ID no. 12344282
tccacccgtccgatctaaccgtcccaccgcccaagccactcgagggccgatcttgctgctgctgctccgccctccctcctcctcggcaccgtctcgtccgaccatggctgctgactcgggcaagatgccgtccgccggcggcaaggcgccgccacccaagtcatccgactccggcacaggcatcatgaagaggctcccgcgcctggcgctcgtcttcctggtggcgctgctgtaccggcagctgcaggccccggctcccagggtccccggaacgcccggcgggcccccggtgacgtcgccgaggatcaggctcaaggacggaaggcacctcgcgtaccacgagtcgggcgtccccagggagcaggccaggtacaggatcgtcttcatgcacgggttcgactcgtgcaggtacgacgtgctccgggtgtcgccggagctggcccaggagctggggcgtctacctgctctccttcgaccgccccgggtacggggagagcgacccgcacccggctaggaccgacaagagcgtcgccctggacatcgagcagctcgccgacgccatggagctcggcgacaggttctacctcgccggcttctccatgggcggggagatcatgtggagctgcctcaagtacatcccgcacaggctttccggcgtagccatcctgggccccgtgggcaacttctggtggtccggcctccccgcgaacgtgtccctggaggcctggaacgtgcaggtggcgcaggacaagtgggccgtgggcgtggcgcaccacgctccctggctcacctactggtggaacacccagaagctgttcccggcctccagcgtcatcgccttcaacccggccatcatgtcccgggcggacatggcactcatccccagcttcgcctacaggacccacgcctaccaggcgcggcagcagggggagcacgagagcctgcaccgcgacatgatggtcggcttcggcaagtggagctggagcccgctggacctggaggacccgttccccgacggcgacggcaaggtgcacctgtggcacggcgccgaggacctcatcgtgcccgtggggctgtcgaggcacatcagcaagagcctgccgtgggtgcgctaccacgagctgcccacggccggccacctcttccccatggccgacgggatggccgacgtcatcgtcaagtcgctgctgctgggcgacgagtgacgattgtcatctcccgtcgtcgtcgtcgagtcgatctccctctccctcttcctccccccctgctttttcctgtgcgcgcgagtctttttgagtctttgtagtgcagtgagagaatgctacggacatgtctttgcgatcgttactcctattcctatataatatatgatatatagataaagaaatattaacgggatgtttagtttctaaag

SEQ ID NO: 29245 - protein, 214 aa, Zea mays subsp. mays
  peptide (1)..(214): Ceres Seq. ID no. 12344283
  misc_feature (1)..(208): Pfam Name: Pfam Description:  alpha/beta hydrolase fold
  misc_feature (1)..(214): NCBI GI NO: 38346334 NR Description: OSJNBa0073L04.5
  misc_feature (1)..(214): NCBI GI NO: 15228377 NR Description: putative protein; protein id: At3g48410
  misc_feature (1)..(210): NCBI GI NO: 18410582 NR Description: expressed protein; protein id: At1g74300
  misc_feature (1)..(213): NCBI GI NO: 18410575 NR Description: expressed protein; protein id: At1g74280
  misc_feature (1)..(210): NCBI GI NO: 21537089 NR Description: unknown [Arabidopsis thaliana]
  misc_feature (1)..(213): NCBI GI NO: 15221193 NR Description: unknown protein; protein id: At1g74290.1
  misc_feature (1)..(210): NCBI GI NO: 11357595 NR Description: hypothetical protein F24B22
  misc_feature (1)..(210): NCBI GI NO: 15232465 NR Description: putative protein (fragment); protein id:At3g54240
  misc_feature (1)..(211): NCBI GI NO: 15242253 NR Description: putative protein; protein id: At5g22460
  misc_feature (1)..(213): NCBI GI NO: 28416665 NR Description: At2g36290 [Arabidopsis thaliana]
MELGDRFYLAGFSMGGEIMWSCLKYIPHRLSGVAILGPVGNFWWSGLPANVSLEAWNVQVAQDKWAVGVAHHAPWLTYWWNTQKLFPASSVIAFNPAIMSRADMALIPSFAYRTHAYQARQQGEHESLHRDMMVGFGKWSWSPLDLEDPFPDGDGKVHLWHGAEDLIVPVGLSRHISKSLPWVRYHELPTAGHLFPMADGMADVIVKSLLLGDE

SEQ ID NO: 29246 - protein, 201 aa, Zea mays subsp. mays
  peptide (1)..(201): Ceres Seq. ID no. 12344284
  misc_feature (1)..(195): Pfam Name: Pfam Description:  alpha/beta hydrolase fold
  misc_feature (1)..(201): NCBI GI NO: 38346334 NR Description: OSJNBa0073L04.5
  misc_feature (1)..(201): NCBI GI NO: 15228377 NR Description: putative protein; protein id: At3g48410
  misc_feature (1)..(197): NCBI GI NO: 18410582 NR Description: expressed protein; protein id: At1g74300
  misc_feature (1)..(200): NCBI GI NO: 18410575 NR Description: expressed protein; protein id: At1g74280
  misc_feature (1)..(197): NCBI GI NO: 21537089 NR Description: unknown [Arabidopsis thaliana]
  misc_feature (1)..(200): NCBI GI NO: 15221193 NR Description: unknown protein; protein id: At1g74290.1
  misc_feature (1)..(197): NCBI GI NO: 11357595 NR Description: hypothetical protein F24B22
  misc_feature (1)..(197): NCBI GI NO: 15232465 NR Description: putative protein (fragment); protein id:At3g54240
  misc_feature (1)..(198): NCBI GI NO: 15242253 NR Description: putative protein; protein id: At5g22460
  misc_feature (1)..(200): NCBI GI NO: 28416665 NR Description: At2g36290 [Arabidopsis thaliana]
MGGEIMWSCLKYIPHRLSGVAILGPVGNFWWSGLPANVSLEAWNVQVAQDKWAVGVAHHAPWLTYWWNTQKLFPASSVIAFNPAIMSRADMALIPSFAYRTHAYQARQQGEHESLHRDMMVGFGKWSWSPLDLEDPFPDGDGKVHLWHGAEDLIVPVGLSRHISKSLPWVRYHELPTAGHLFPMADGMADVIVKSLLLGDE

SEQ ID NO: 29247 - protein, 196 aa, Zea mays subsp. mays
  peptide (1)..(196): Ceres Seq. ID no. 12344285
  misc_feature (1)..(190): Pfam Name: Pfam Description:  alpha/beta hydrolase fold
  misc_feature (1)..(196): NCBI GI NO: 38346334 NR Description: OSJNBa0073L04.5
  misc_feature (1)..(196): NCBI GI NO: 15228377 NR Description: putative protein; protein id: At3g48410
  misc_feature (1)..(192): NCBI GI NO: 18410582 NR Description: expressed protein; protein id: At1g74300
  misc_feature (1)..(195): NCBI GI NO: 18410575 NR Description: expressed protein; protein id: At1g74280
  misc_feature (1)..(192): NCBI GI NO: 21537089 NR Description: unknown [Arabidopsis thaliana]
  misc_feature (1)..(195): NCBI GI NO: 15221193 NR Description: unknown protein; protein id: At1g74290.1
  misc_feature (1)..(192): NCBI GI NO: 11357595 NR Description: hypothetical protein F24B22
  misc_feature (1)..(192): NCBI GI NO: 15232465 NR Description: putative protein (fragment); protein id:At3g54240
  misc_feature (1)..(193): NCBI GI NO: 15242253 NR Description: putative protein; protein id: At5g22460
  misc_feature (1)..(195): NCBI GI NO: 28416665 NR Description: At2g36290 [Arabidopsis thaliana]
MWSCLKYIPHRLSGVAILGPVGNFWWSGLPANVSLEAWNVQVAQDKWAVGVAHHAPWLTYWWNTQKLFPASSVIAFNPAIMSRADMALIPSFAYRTHAYQARQQGEHESLHRDMMVGFGKWSWSPLDLEDPFPDGDGKVHLWHGAEDLIVPVGLSRHISKSLPWVRYHELPTAGHLFPMADGMADVIVKSLLLGDE

SEQ ID NO: 29248 - DNA, 1434 bp, Zea mays subsp. mays
  misc_feature (1)..(1434): Ceres Seq. ID no. 12356470
accgagatgcaatgcaatgcaaacatcctccctcttctcctgctcctcacagacatcttatcctagctcccggtcgaaggccgtaggtaggattcccttctctattcctcgtccgcttcctcctccggcagccggacctagctagctagctttcttgccgttcgccgcccatggctaggaagtgctctagctgtgggaacaacggccacaactccaggacctgcggcgggcacagcaggaccacggcggccttcgagaacaacggcggcgccggcgtgaggctgttcggggtgcagctgcacgtggggtcctcgtcgcccgtagccgtagccatgaagaggtgcttcagcatggagtgcctgtcgtcgccgccgcccgccgcgccggcgtactacgcggccgctctcgccgccgccaacagcagctcgccgtcggcgtccgcgtcggcgtcctcgtcctcgtcgctcgtctcggtggaggaggcacaggcacccgagaagatggccagcgggtacctctccgacgggctcgtgggcagggcgcaggcggagaggaagaagggcgttccgtggacggaggacgagcaccggcggttcctggcgggcctggagaagctcgggaagggcgactggcgaggcatctcccggcacttcgtcacgacgcggacgccgacgcaggtggccagccacgcccagaagtacttcctccggcagagcagcctggcgcacaagaagcgcaggtccagcctcttcgacgtggtggagaacgctgctgagagggcgacgacgacgagctccagggagcgcccgaggctcacggtcacggatgcgataatcgcgaccgcctctgctgcagcacccggaacaacggcagcactcccggccctgtcgctcggcatccgacggccagcgaggcctgagtaccacgttgacgtcgcgctgcctccgagcagcctgtccatgcagctgccgcggtgctcggcggcaatgggtagcgcgtcggcgtcgccgtcgccgagcctggcgctggcgctggcggggccgaaacacaagcacccttcgccttcgtccctgacggcggcaaaggctagtagtagtggccaggcaccagacctggagctgaagatctcgaccggccggcagagcgagcaccaggtccagacgggctcgccgccgaggacgccctttctgggcaccatcagggtcacgtaaccggaatgacggcggcggcggttagtcgggaatgtcctgctggtagaagaagagcttggccgggccggggtgggaaaactgaaaaggaggagcttttggcagtggtgttggtgtgtgtgtgttgctgccagtggcagccgagacgacgatgccgttcgtttatcacgtgggtgtggtgttgtgcatcatcatcagaaagatggaaactttactttagtggcct

SEQ ID NO: 29249 - protein, 346 aa, Zea mays subsp. mays
  peptide (1)..(346): Ceres Seq. ID no. 12356471
  misc_feature (131)..(178): Pfam Name: Pfam Description:  Myb-like DNA-binding domain
  misc_feature (1)..(220): NCBI GI NO: 34906444 NR Description: P0671B11.14
  misc_feature (1)..(201): NCBI GI NO: 34912404 NR Description: putative Myb-related transcription factor
  misc_feature (30)..(259): NCBI GI NO: 12406995 NR Description: MCB2 protein [Hordeum vulgare subsp. vulgare]
  misc_feature (80)..(197): NCBI GI NO: 24850307 NR Description: transcription factor MYBS3
  misc_feature (1)..(47): NCBI GI NO: 24850307 NR Description: transcription factor MYBS3
  misc_feature (1)..(256): NCBI GI NO: 15228185 NR Description: putative MYB family transcription factor
  misc_feature (1)..(256): NCBI GI NO: 2062176 NR Description: Myb-related transcription activator
  misc_feature (83)..(197): NCBI GI NO: 15238083 NR Description: Myb-related transcription activator-like
  misc_feature (1)..(47): NCBI GI NO: 15238083 NR Description: Myb-related transcription activator-like
  misc_feature (112)..(197): NCBI GI NO: 7705206 NR Description: MybSt1 [Solanum tuberosum]
MARKCSSCGNNGHNSRTCGGHSRTTAAFENNGGAGVRLFGVQLHVGSSSPVAVAMKRCFSMECLSSPPPAAPAYYAAALAAANSSSPSASASASSSSSLVSVEEAQAPEKMASGYLSDGLVGRAQAERKKGVPWTEDEHRRFLAGLEKLGKGDWRGISRHFVTTRTPTQVASHAQKYFLRQSSLAHKKRRSSLFDVVENAAERATTTSSRERPRLTVTDAIIATASAAAPGTTAALPALSLGIRRPARPEYHVDVALPPSSLSMQLPRCSAAMGSASASPSPSLALALAGPKHKHPSPSSLTAAKASSSGQAPDLELKISTGRQSEHQVQTGSPPRTPFLGTIRVT

SEQ ID NO: 29250 - protein, 292 aa, Zea mays subsp. mays
  peptide (1)..(292): Ceres Seq. ID no. 12356472
  misc_feature (77)..(124): Pfam Name: Pfam Description:  Myb-like DNA-binding domain
  misc_feature (1)..(166): NCBI GI NO: 34906444 NR Description: P0671B11.14
  misc_feature (1)..(147): NCBI GI NO: 34912404 NR Description: putative Myb-related transcription factor
  misc_feature (1)..(205): NCBI GI NO: 12406995 NR Description: MCB2 protein [Hordeum vulgare subsp. vulgare]
  misc_feature (26)..(143): NCBI GI NO: 24850307 NR Description: transcription factor MYBS3
  misc_feature (1)..(202): NCBI GI NO: 15228185 NR Description: putative MYB family transcription factor
  misc_feature (1)..(202): NCBI GI NO: 2062176 NR Description: Myb-related transcription activator
  misc_feature (29)..(143): NCBI GI NO: 15238083 NR Description: Myb-related transcription activator-like
  misc_feature (58)..(143): NCBI GI NO: 7705206 NR Description: MybSt1 [Solanum tuberosum]
  misc_feature (58)..(143): NCBI GI NO: 1076660 NR Description: D13F(MYBST1) protein - potato
  misc_feature (11)..(152): NCBI GI NO: 15241963 NR Description: putative protein; protein id: At5g56840.1
MKRCFSMECLSSPPPAAPAYYAAALAAANSSSPSASASASSSSSLVSVEEAQAPEKMASGYLSDGLVGRAQAERKKGVPWTEDEHRRFLAGLEKLGKGDWRGISRHFVTTRTPTQVASHAQKYFLRQSSLAHKKRRSSLFDVVENAAERATTTSSRERPRLTVTDAIIATASAAAPGTTAALPALSLGIRRPARPEYHVDVALPPSSLSMQLPRCSAAMGSASASPSPSLALALAGPKHKHPSPSSLTAAKASSSGQAPDLELKISTGRQSEHQVQTGSPPRTPFLGTIRVT

SEQ ID NO: 29251 - protein, 286 aa, Zea mays subsp. mays
  peptide (1)..(286): Ceres Seq. ID no. 12356473
  misc_feature (71)..(118): Pfam Name: Pfam Description:  Myb-like DNA-binding domain
  misc_feature (1)..(160): NCBI GI NO: 34906444 NR Description: P0671B11.14
  misc_feature (1)..(141): NCBI GI NO: 34912404 NR Description: putative Myb-related transcription factor
  misc_feature (1)..(199): NCBI GI NO: 12406995 NR Description: MCB2 protein [Hordeum vulgare subsp. vulgare]
  misc_feature (20)..(137): NCBI GI NO: 24850307 NR Description: transcription factor MYBS3
  misc_feature (1)..(196): NCBI GI NO: 15228185 NR Description: putative MYB family transcription factor
  misc_feature (1)..(196): NCBI GI NO: 2062176 NR Description: Myb-related transcription activator
  misc_feature (23)..(137): NCBI GI NO: 15238083 NR Description: Myb-related transcription activator-like
  misc_feature (52)..(137): NCBI GI NO: 7705206 NR Description: MybSt1 [Solanum tuberosum]
  misc_feature (52)..(137): NCBI GI NO: 1076660 NR Description: D13F(MYBST1) protein - potato
  misc_feature (5)..(146): NCBI GI NO: 15241963 NR Description: putative protein; protein id: At5g56840.1
MECLSSPPPAAPAYYAAALAAANSSSPSASASASSSSSLVSVEEAQAPEKMASGYLSDGLVGRAQAERKKGVPWTEDEHRRFLAGLEKLGKGDWRGISRHFVTTRTPTQVASHAQKYFLRQSSLAHKKRRSSLFDVVENAAERATTTSSRERPRLTVTDAIIATASAAAPGTTAALPALSLGIRRPARPEYHVDVALPPSSLSMQLPRCSAAMGSASASPSPSLALALAGPKHKHPSPSSLTAAKASSSGQAPDLELKISTGRQSEHQVQTGSPPRTPFLGTIRVT

SEQ ID NO: 29252 - DNA, 1979 bp, Zea mays subsp. mays
  misc_feature (1)..(1979): Ceres Seq. ID no. 12363354
  misc_feature (948)..(948): n is a, c, t, g, unknown, or other
  misc_feature (949)..(949): n is a, c, t, g, unknown, or other
  misc_feature (807)..(807): n is a, c, t, g, unknown, or other
  misc_feature (791)..(791): n is a, c, t, g, unknown, or other
gcacgagaccattacctagaacatcctaatcgaaaaatcttcgtctctctccgactctccctcgcccgcgcacctttccgcgccgcctccttcctttcctcgcgtgctctggcgcgcgcaaggatcaaaaggcgccggccactagaggcgagtgagtcgcatgtaaacgaccaccagctgctgtgatctcaaaagggagcgagagacaaaggagaggcgagcaggtcgtggcggcagcaatcgttgcgaatccgcgcgggattctgtcctctgcaccactgcttcccgctttcctgcccggcggaagtggtataattctccaacgcggttgactgtattgcctctcgctctcggtgggtgggggcatggacgaggcagaggagatgcaggtggagaggctgcacgaggaggccgatgcggggggagccgacacggacaagctcagctacgagatattctccatcctcgagagcaagttcctgttcggctataccgacccgcaccagctctggctgcccaagccagcggcggaactgccggcgcaggcgtccgcggcggcgccgggtaaggcggcgcagcgcgggaaggtctgcgtgctctgcgtggacggcggcgggggcggcctgcgggcgctgctgcccggccgcgcgcttgcgcacctggaggccgcgctgcgccgcgcgtctggggaccccgacgcccgggtcgccgactacttcgacctcgctgcgggcaccggcgccggcggcgtgttcgccgcgatgctcttctccacgcactcgcgcggcgcnccgctgttccacgccnacgacacgtggcggctcgtcgcggaccacgcgccgcgcatgttccgcaggcccgcggcctcctcgtccacttccctcttctgccgcggcaagaagcggcccctggccgcgccaacggcggcgctggaggcggcaatgaagnnggcgttcggccaggagctcaccctgcgggacaccatcaagcccgtgctcatctcttgctacgacctcaagacgtccgcgccgctggtgttctctcgcgccgacgcactggagaacgggagctacgacttccgcctctgcgaggtcgggcgcgccgcgtggtccgaggccggacgcttcgagcccgccgaggtggcgtcggtggacggcgccacgtcctgcgccgctgtagacggcggccccaccatgggcagcccggcggccgccgccatcacgcacgtgctacacaacaagcacgagttcccgttcgtgcgcggggtcgaggacctcctcgtgctctccatcggcggctgctctggcggaggctctggcgccgctggcgaggcggaactccggcgcatgcgtcggtggggtcccaaggagtgggcacgccccatcgcccgtattgcggccgacggcgccgccgaccttgtcgaccacgccgtggcgcgcgccttcggccaatgccgcgcatccaactacctgcgcatccaggcgaagcgggagagcatgccgccgtgcggtacggacggggagtacgacccgaccccaggcaacgtgcgcgcgctgctcgcggcggcggacgagatgctcaagcagcggaacgtggagtcggtgctgttcgaggggaggcgagtcggggagcagacgaacgcggagaagctggactggttcgcggcagagctcgtcgccgagcaccgcagcagagcctcccggatcgcacccaccgttgcgttcaagcaggcgccgcagaagccgtaggcgctggactgagctggtggccgtaagaccgtggcgttaagggcatgtaggcctctctttcttcttgcttgggctggcggctggaattcctgctgcatatttttgacgcggcagcatggcatatcaatatggcattgctctgtgatggagcatttgccgctgtgaaatcgtttcaagggaggatggaatatgaaaggaacgaacgttgccgatataaaaattctaatcttc

SEQ ID NO: 29253 - protein, 460 aa, Zea mays subsp. mays
  peptide (1)..(460): Ceres Seq. ID no. 12363355
  misc_feature (78)..(285): Pfam Name: Pfam Description:  Patatin-like phospholipase
  misc_feature (22)..(456): NCBI GI NO: 15225054 NR Description: patatin family; protein id: At2g39220
  misc_feature (58)..(456): NCBI GI NO: 15233136 NR Description: patatin-related; protein id: At3g54950.1
  misc_feature (72)..(459): NCBI GI NO: 30688454 NR Description: patatin-related [Arabidopsis thaliana]
  misc_feature (72)..(459): NCBI GI NO: 7486230 NR Description: hypothetical protein F27B13
  misc_feature (72)..(452): NCBI GI NO: 34899642 NR Description: contains ESTsAU172959
  misc_feature (16)..(366): NCBI GI NO: 34897124 NR Description: putative lipid acyl hydrolase [Oryza sativa]
  misc_feature (74)..(373): NCBI GI NO: 11357489 NR Description: hypothetical protein F16M2
  misc_feature (74)..(373): NCBI GI NO: 18412659 NR Description: putative protein; protein id: At3g63200
  misc_feature (401)..(442): NCBI GI NO: 11357489 NR Description: hypothetical protein F16M2
  misc_feature (401)..(442): NCBI GI NO: 18412659 NR Description: putative protein; protein id: At3g63200
  misc_feature (142)..(142): Xaa is any aa, unknown or other
  misc_feature (148)..(148): Xaa is any aa, unknown or other
  misc_feature (195)..(195): Xaa is any aa, unknown or other
MDEAEEMQVERLHEEADAGGADTDKLSYEIFSILESKFLFGYTDPHQLWLPKPAAELPAQASAAAPGKAAQRGKVCVLCVDGGGGGLRALLPGRALAHLEAALRRASGDPDARVADYFDLAAGTGAGGVFAAMLFSTHSRGXPLFHAXDTWRLVADHAPRMFRRPAASSSTSLFCRGKKRPLAAPTAALEAAMKXAFGQELTLRDTIKPVLISCYDLKTSAPLVFSRADALENGSYDFRLCEVGRAAWSEAGRFEPAEVASVDGATSCAAVDGGPTMGSPAAAAITHVLHNKHEFPFVRGVEDLLVLSIGGCSGGGSGAAGEAELRRMRRWGPKEWARPIARIAADGAADLVDHAVARAFGQCRASNYLRIQAKRESMPPCGTDGEYDPTPGNVRALLAAADEMLKQRNVESVLFEGRRVGEQTNAEKLDWFAAELVAEHRSRASRIAPTVAFKQAPQKP

SEQ ID NO: 29254 - protein, 454 aa, Zea mays subsp. mays
  peptide (1)..(454): Ceres Seq. ID no. 12363356
  misc_feature (72)..(279): Pfam Name: Pfam Description:  Patatin-like phospholipase
  misc_feature (16)..(450): NCBI GI NO: 15225054 NR Description: patatin family; protein id: At2g39220
  misc_feature (52)..(450): NCBI GI NO: 15233136 NR Description: patatin-related; protein id: At3g54950.1
  misc_feature (66)..(453): NCBI GI NO: 30688454 NR Description: patatin-related [Arabidopsis thaliana]
  misc_feature (66)..(453): NCBI GI NO: 7486230 NR Description: hypothetical protein F27B13
  misc_feature (66)..(446): NCBI GI NO: 34899642 NR Description: contains ESTsAU172959
  misc_feature (10)..(360): NCBI GI NO: 34897124 NR Description: putative lipid acyl hydrolase [Oryza sativa]
  misc_feature (68)..(367): NCBI GI NO: 11357489 NR Description: hypothetical protein F16M2
  misc_feature (68)..(367): NCBI GI NO: 18412659 NR Description: putative protein; protein id: At3g63200
  misc_feature (395)..(436): NCBI GI NO: 11357489 NR Description: hypothetical protein F16M2
  misc_feature (395)..(436): NCBI GI NO: 18412659 NR Description: putative protein; protein id: At3g63200
  misc_feature (136)..(136): Xaa is any aa, unknown or other
  misc_feature (142)..(142): Xaa is any aa, unknown or other
  misc_feature (189)..(189): Xaa is any aa, unknown or other
MQVERLHEEADAGGADTDKLSYEIFSILESKFLFGYTDPHQLWLPKPAAELPAQASAAAPGKAAQRGKVCVLCVDGGGGGLRALLPGRALAHLEAALRRASGDPDARVADYFDLAAGTGAGGVFAAMLFSTHSRGXPLFHAXDTWRLVADHAPRMFRRPAASSSTSLFCRGKKRPLAAPTAALEAAMKXAFGQELTLRDTIKPVLISCYDLKTSAPLVFSRADALENGSYDFRLCEVGRAAWSEAGRFEPAEVASVDGATSCAAVDGGPTMGSPAAAAITHVLHNKHEFPFVRGVEDLLVLSIGGCSGGGSGAAGEAELRRMRRWGPKEWARPIARIAADGAADLVDHAVARAFGQCRASNYLRIQAKRESMPPCGTDGEYDPTPGNVRALLAAADEMLKQRNVESVLFEGRRVGEQTNAEKLDWFAAELVAEHRSRASRIAPTVAFKQAPQKP

SEQ ID NO: 29255 - protein, 328 aa, Zea mays subsp. mays
  peptide (1)..(328): Ceres Seq. ID no. 12363357
  misc_feature (1)..(153): Pfam Name: Pfam Description:  Patatin-like phospholipase
  misc_feature (1)..(324): NCBI GI NO: 15225054 NR Description: patatin family; protein id: At2g39220
  misc_feature (1)..(324): NCBI GI NO: 15233136 NR Description: patatin-related; protein id: At3g54950.1
  misc_feature (1)..(327): NCBI GI NO: 30688454 NR Description: patatin-related [Arabidopsis thaliana]
  misc_feature (1)..(327): NCBI GI NO: 7486230 NR Description: hypothetical protein F27B13
  misc_feature (1)..(320): NCBI GI NO: 34899642 NR Description: contains ESTsAU172959
  misc_feature (1)..(234): NCBI GI NO: 34897124 NR Description: putative lipid acyl hydrolase [Oryza sativa]
  misc_feature (1)..(241): NCBI GI NO: 11357489 NR Description: hypothetical protein F16M2
  misc_feature (1)..(241): NCBI GI NO: 18412659 NR Description: putative protein; protein id: At3g63200
  misc_feature (269)..(310): NCBI GI NO: 11357489 NR Description: hypothetical protein F16M2
  misc_feature (269)..(310): NCBI GI NO: 18412659 NR Description: putative protein; protein id: At3g63200
  misc_feature (10)..(10): Xaa is any aa, unknown or other
  misc_feature (16)..(16): Xaa is any aa, unknown or other
  misc_feature (63)..(63): Xaa is any aa, unknown or other
MLFSTHSRGXPLFHAXDTWRLVADHAPRMFRRPAASSSTSLFCRGKKRPLAAPTAALEAAMKXAFGQELTLRDTIKPVLISCYDLKTSAPLVFSRADALENGSYDFRLCEVGRAAWSEAGRFEPAEVASVDGATSCAAVDGGPTMGSPAAAAITHVLHNKHEFPFVRGVEDLLVLSIGGCSGGGSGAAGEAELRRMRRWGPKEWARPIARIAADGAADLVDHAVARAFGQCRASNYLRIQAKRESMPPCGTDGEYDPTPGNVRALLAAADEMLKQRNVESVLFEGRRVGEQTNAEKLDWFAAELVAEHRSRASRIAPTVAFKQAPQKP

SEQ ID NO: 29256 - DNA, 1383 bp, Zea mays subsp. mays
  misc_feature (1)..(1383): Ceres Seq. ID no. 12408711
aactttccctgcaagaatggatcgcgagaccaagaacagtagaccaaagacaaaggaaggcgagggccaccatccccaaaacccgtaaaaaaacccgaattgacaaattgagtcgacggggaaggaaataaagaaggggaagagcacgcgccgccgccagcaccgcgtccgccatggccgcctcctcccgccgcgcgtctcaattgctggggtccgcggcctcccgcctcctcctcgggcggggcttcgccgcggcagccgccgcggcgccctcgccggcggtcttcgtcgacaagagcacccgtgtgatctgccagggcatcacggggaagaacggcaccttccacaccgagcaggccatcgagtacggcaccaacatggttggtggagtgactcccaagaaaggtggaactgaacatttagggctcccagtgtttaactctgtagcagaagctaaggctgaaacaaaagccaatgcatctgttatatatgttccaccaccatttgctgccgccgctataatggaggcaatggaggctgagctcgaccttgttgtctgcattacggaaggaattccccagcatgacatggtgaaagtgaaggctgcactaaatagacaatctaaaactcgattgattgggccaaattgccctggtatcattaagcctggtgagtgtaaaattggaatcatgccaggttacatccacaagcctgggcgtattgggattgtatctcgttctggtaccttgacatatgaagcggtgtttcaaacaacagctgtaggcttggggcagtcaacttgtgtaggcattggtggtgacccattcaatggcacaaattttgttgattgccttgaaaaatttgtcgatgaccctcagacagaaggcattgttctcatcggtgaaattggaggtacggctgaggaggatgctgcaacgttcatccaggaaagcaaaacacaaaagcctgttgttgcattcattgctggacttacggcactcccaggccgtcgcatgggtcatgctggagctatcgtggcaggaggaaagggtactgcccaggacaaaatcaaggcactcagagaggctggtgttaccgttgtcgagtcaccagcgaagattggttctaccatgtttgaaatcttcaaacagcgtggaatggtagaatagacacagtggtacagtagagagacattgagaaaccgctttttgatgcttgcgggcaatcgcgagcaattcctcggtagatccttctccctggccacaaacaaaactactgaggttttcttttcgtacttgtcttatctttggaagatgtcctggccttcttcacttggataacctttcgctgagctcatttcaataagacgtttcggagccatgg

SEQ ID NO: 29257 - protein, 331 aa, Zea mays subsp. mays
  peptide (1)..(331): Ceres Seq. ID no. 12408712
  misc_feature (38)..(149): Pfam Name: Pfam Description:  CoA binding domain
  misc_feature (1)..(331): NCBI GI NO: 34393512 NR Description: putative succinyl-CoA ligase alpha subunit
  misc_feature (31)..(330): NCBI GI NO: 27357175 NR Description: succinyl-CoA ligase alpha subunit
  misc_feature (1)..(331): NCBI GI NO: 15241592 NR Description: succinyl-CoA-ligase alpha subunit
  misc_feature (19)..(331): NCBI GI NO: 15237260 NR Description: succinyl-CoA synthetase, alpha subunit
  misc_feature (19)..(331): NCBI GI NO: 21593483 NR Description: succinyl-CoA synthetase, alpha subunit
  misc_feature (37)..(331): NCBI GI NO: 1076415 NR Description: succinate-CoA ligase (GDP-forming) (EC 6
  misc_feature (20)..(320): NCBI GI NO: 1711574 NR Description: SUCCINYL-COA LIGASE
  misc_feature (1)..(330): NCBI GI NO: 2258465 NR Description: succinyl-CoA synthetase alpha subunit [Sus scrofa]
  misc_feature (3)..(330): NCBI GI NO: 38181885 NR Description: Suclg1 protein [Rattus norvegicus]
  misc_feature (3)..(330): NCBI GI NO: 16758586 NR Description: succinate-CoA ligase, GDP-forming, alpha subunit
MAASSRRASQLLGSAASRLLLGRGFAAAAAAAPSPAVFVDKSTRVICQGITGKNGTFHTEQAIEYGTNMVGGVTPKKGGTEHLGLPVFNSVAEAKAETKANASVIYVPPPFAAAAIMEAMEAELDLVVCITEGIPQHDMVKVKAALNRQSKTRLIGPNCPGIIKPGECKIGIMPGYIHKPGRIGIVSRSGTLTYEAVFQTTAVGLGQSTCVGIGGDPFNGTNFVDCLEKFVDDPQTEGIVLIGEIGGTAEEDAATFIQESKTQKPVVAFIAGLTALPGRRMGHAGAIVAGGKGTAQDKIKALREAGVTVVESPAKIGSTMFEIFKQRGMVE

SEQ ID NO: 29258 - protein, 263 aa, Zea mays subsp. mays
  peptide (1)..(263): Ceres Seq. ID no. 12408713
  misc_feature (1)..(81): Pfam Name: Pfam Description:  CoA binding domain
  misc_feature (1)..(263): NCBI GI NO: 34393512 NR Description: putative succinyl-CoA ligase alpha subunit
  misc_feature (1)..(262): NCBI GI NO: 27357175 NR Description: succinyl-CoA ligase alpha subunit
  misc_feature (1)..(263): NCBI GI NO: 15241592 NR Description: succinyl-CoA-ligase alpha subunit
  misc_feature (1)..(263): NCBI GI NO: 15237260 NR Description: succinyl-CoA synthetase, alpha subunit
  misc_feature (1)..(263): NCBI GI NO: 21593483 NR Description: succinyl-CoA synthetase, alpha subunit
  misc_feature (1)..(263): NCBI GI NO: 1076415 NR Description: succinate-CoA ligase (GDP-forming) (EC 6
  misc_feature (1)..(252): NCBI GI NO: 1711574 NR Description: SUCCINYL-COA LIGASE
  misc_feature (1)..(262): NCBI GI NO: 2258465 NR Description: succinyl-CoA synthetase alpha subunit [Sus scrofa]
  misc_feature (1)..(262): NCBI GI NO: 38181885 NR Description: Suclg1 protein [Rattus norvegicus]
  misc_feature (1)..(262): NCBI GI NO: 16758586 NR Description: succinate-CoA ligase, GDP-forming, alpha subunit
MVGGVTPKKGGTEHLGLPVFNSVAEAKAETKANASVIYVPPPFAAAAIMEAMEAELDLVVCITEGIPQHDMVKVKAALNRQSKTRLIGPNCPGIIKPGECKIGIMPGYIHKPGRIGIVSRSGTLTYEAVFQTTAVGLGQSTCVGIGGDPFNGTNFVDCLEKFVDDPQTEGIVLIGEIGGTAEEDAATFIQESKTQKPVVAFIAGLTALPGRRMGHAGAIVAGGKGTAQDKIKALREAGVTVVESPAKIGSTMFEIFKQRGMVE

SEQ ID NO: 29259 - protein, 215 aa, Zea mays subsp. mays
  peptide (1)..(215): Ceres Seq. ID no. 12408714
  misc_feature (1)..(215): NCBI GI NO: 34393512 NR Description: putative succinyl-CoA ligase alpha subunit
  misc_feature (1)..(214): NCBI GI NO: 27357175 NR Description: succinyl-CoA ligase alpha subunit
  misc_feature (1)..(215): NCBI GI NO: 15241592 NR Description: succinyl-CoA-ligase alpha subunit
  misc_feature (1)..(215): NCBI GI NO: 15237260 NR Description: succinyl-CoA synthetase, alpha subunit
  misc_feature (1)..(215): NCBI GI NO: 21593483 NR Description: succinyl-CoA synthetase, alpha subunit
  misc_feature (1)..(215): NCBI GI NO: 1076415 NR Description: succinate-CoA ligase (GDP-forming) (EC 6
  misc_feature (1)..(204): NCBI GI NO: 1711574 NR Description: SUCCINYL-COA LIGASE
  misc_feature (1)..(214): NCBI GI NO: 2258465 NR Description: succinyl-CoA synthetase alpha subunit [Sus scrofa]
  misc_feature (1)..(214): NCBI GI NO: 38181885 NR Description: Suclg1 protein [Rattus norvegicus]
  misc_feature (1)..(214): NCBI GI NO: 16758586 NR Description: succinate-CoA ligase, GDP-forming, alpha subunit
MEAMEAELDLVVCITEGIPQHDMVKVKAALNRQSKTRLIGPNCPGIIKPGECKIGIMPGYIHKPGRIGIVSRSGTLTYEAVFQTTAVGLGQSTCVGIGGDPFNGTNFVDCLEKFVDDPQTEGIVLIGEIGGTAEEDAATFIQESKTQKPVVAFIAGLTALPGRRMGHAGAIVAGGKGTAQDKIKALREAGVTVVESPAKIGSTMFEIFKQRGMVE

SEQ ID NO: 29260 - DNA, 1023 bp, Zea mays subsp. mays
  misc_feature (1)..(1023): Ceres Seq. ID no. 12408705
agtatacgatgatttgagggtgtgagctgaaaaatctccacatcaccagattacggccggcggcggcccgctctgttccatcgcccccaagcggcgggccttggctgcgccgcctaaatccaccggcgagagtaaagggcgcccctctctcacacgatggcctcgagctccgcaagcggcgccggggtggagggcggggtcggggaggggccgacgacgctggacgagctgtaccagatcaacgtagtgccggccgagctccacttcaagttccgcaaggagctgcagggcctccgcgtcggcctcaacctcgagttctacaatcttgaggtcaatgactttgaggcaaagatagtactgaagcctctagattacgagcggaaatggaagttccagtacaagcccatcagtggcgacatacagctgctttccaagaagataccagtcacaaagtttctaaatctacaggttggcattggccacaattttcaactgaatgcaactggatggaagtggaagctttctacttgcctggggggagatggtgtgtctcagataagaaacaagtcaaaactcagcttgttcccagggtttgatttgaggattgggtggaaagcagagtatgtgcttcctgagattcatggggctgttggcacaggagaaccagccttcagtatgaactatggaaggttgcatgcatcgatagatcgggtcgaggctatcgttactcagtcagatcagtattgatcttccagtgcggaaaggcaagggagtttcttgatcaataacaaacacgttgagtagatcccagggttacaagaagcattctgaagctccgtgcctgatgtacagcaaataccaaagtttaggaccacgctttgagaagctgtttgagttctccaaagcttttgactttgagcggcttctgttgcttctgaaagcgtaactataaataatgtttatcctgcttgtgtacgaaacaccagagtatcagtaattcagtatagtgagcgacgtcaaagc

SEQ ID NO: 29261 - protein, 196 aa, Zea mays subsp. mays
  peptide (1)..(196): Ceres Seq. ID no. 12408706
  misc_feature (1)..(196): NCBI GI NO: 38344551 NR Description: OSJNBa0027P08.19
  misc_feature (17)..(194): NCBI GI NO: 18396223 NR Description: hypothetical protein; protein id: At2g06010
  misc_feature (51)..(163): NCBI GI NO: 25411202 NR Description: hypothetical protein At2g06010
MASSSASGAGVEGGVGEGPTTLDELYQINVVPAELHFKFRKELQGLRVGLNLEFYNLEVNDFEAKIVLKPLDYERKWKFQYKPISGDIQLLSKKIPVTKFLNLQVGIGHNFQLNATGWKWKLSTCLGGDGVSQIRNKSKLSLFPGFDLRIGWKAEYVLPEIHGAVGTGEPAFSMNYGRLHASIDRVEAIVTQSDQY

SEQ ID NO: 29262 - DNA, 1200 bp, Zea mays subsp. mays
  misc_feature (1)..(1200): Ceres Seq. ID no. 12373524
atcgctggaccatttccccatttccattcccatcccaattcccatccgtttcatttccacctccttttccagtttcgactcgattcgaaacaggataccaaatgcatgatcgatcccacaagccgcagccggcggaggccggcaacggcgggccggctggcgagggcggcggcgggaacgtggatcgggtgctcttcaagaacctcgtcgagatggtgccgctcgtcgagtcgctcatggaccggagggtcaacccggcatactcgcgtcgcgcttcgctggtctacacgccggcgccgcccaagaaggcaagcgatttgaaaagtgtcaaattgccacagagcgtatcagccaaaaagcggagagaccctggtgatatagccaagaagagcaccccagattctaacggcgacaacggttcagttgtgccattatctctgtcaggtgctgaaaatatgcccaaggatgaggttgccgtgctaagcgagcagatcaatgacctacaaaagaagctgcttgagaaggaggaggcactgaggtctgcggagagctctgtgactgagatgaatgcagcatatgcaactatcgatgaactcagacgcctggtggctgacaaagaagctttgatcagatctaccaattctcagttgcatgatgcaaagattatgcttgcagacaagcaagcgtctttagagaaacttgaatgggaggtgaagatgtcaaataaaaaggtcgaagatcttcaaggagatatgtcgaatatgggattcgagataagctcattgatggtatttttcgaaaaaatttcagagaatgtttcaggtgactcttatgatgatataataccatcatcatatgaattagagacacttcaatcaatgagtgaaattgacaagattgaggtcgacaagctagacaaggaaagggttacatatgctgaagctctggcggcagcgagagagaaccctgacgaggagcacttgaatatagctgcggaggcgaggtcaaggctgcaggtccttgtactttagtgtccccttctgattatagcgtttgtatgataatgttgaactgctgatgtaattgtatgtgttggcttgagttgaggtgctcgtggaatccttccggtgattgattcagcactgtaaactgacagctgtttcatgttgtaaccatatttaaggcgtgtttgatttctcc

SEQ ID NO: 29263 - protein, 342 aa, Zea mays subsp. mays
  peptide (1)..(342): Ceres Seq. ID no. 12373525
  misc_feature (162)..(330): Pfam Name: Pfam Description:  Tropomyosin
  misc_feature (59)..(342): NCBI GI NO: 19716176 NR Description: TMV-MP30 binding protein 2C [Nicotiana tabacum]
  misc_feature (52)..(340): NCBI GI NO: 15241531 NR Description: myosin heavy chain-like protein
  misc_feature (145)..(340): NCBI GI NO: 1732515 NR Description: myosin heavy chain-like protein
RWTISPFPFPSQFPSVSFPPPFPVSTRFETGYQMHDRSHKPQPAEAGNGGPAGEGGGGNVDRVLFKNLVEMVPLVESLMDRRVNPAYSRRASLVYTPAPPKKASDLKSVKLPQSVSAKKRRDPGDIAKKSTPDSNGDNGSVVPLSLSGAENMPKDEVAVLSEQINDLQKKLLEKEEALRSAESSVTEMNAAYATIDELRRLVADKEALIRSTNSQLHDAKIMLADKQASLEKLEWEVKMSNKKVEDLQGDMSNMGFEISSLMVFFEKISENVSGDSYDDIIPSSYELETLQSMSEIDKIEVDKLDKERVTYAEALAAARENPDEEHLNIAAEARSRLQVLVL

SEQ ID NO: 29264 - protein, 309 aa, Zea mays subsp. mays
  peptide (1)..(309): Ceres Seq. ID no. 12373526
  misc_feature (129)..(297): Pfam Name: Pfam Description:  Tropomyosin
  misc_feature (26)..(309): NCBI GI NO: 19716176 NR Description: TMV-MP30 binding protein 2C [Nicotiana tabacum]
  misc_feature (19)..(307): NCBI GI NO: 15241531 NR Description: myosin heavy chain-like protein
  misc_feature (112)..(307): NCBI GI NO: 1732515 NR Description: myosin heavy chain-like protein
MHDRSHKPQPAEAGNGGPAGEGGGGNVDRVLFKNLVEMVPLVESLMDRRVNPAYSRRASLVYTPAPPKKASDLKSVKLPQSVSAKKRRDPGDIAKKSTPDSNGDNGSVVPLSLSGAENMPKDEVAVLSEQINDLQKKLLEKEEALRSAESSVTEMNAAYATIDELRRLVADKEALIRSTNSQLHDAKIMLADKQASLEKLEWEVKMSNKKVEDLQGDMSNMGFEISSLMVFFEKISENVSGDSYDDIIPSSYELETLQSMSEIDKIEVDKLDKERVTYAEALAAARENPDEEHLNIAAEARSRLQVLVL

SEQ ID NO: 29265 - protein, 272 aa, Zea mays subsp. mays
  peptide (1)..(272): Ceres Seq. ID no. 12373527
  misc_feature (92)..(260): Pfam Name: Pfam Description:  Tropomyosin
  misc_feature (1)..(272): NCBI GI NO: 19716176 NR Description: TMV-MP30 binding protein 2C [Nicotiana tabacum]
  misc_feature (1)..(270): NCBI GI NO: 15241531 NR Description: myosin heavy chain-like protein
  misc_feature (75)..(270): NCBI GI NO: 1732515 NR Description: myosin heavy chain-like protein
MVPLVESLMDRRVNPAYSRRASLVYTPAPPKKASDLKSVKLPQSVSAKKRRDPGDIAKKSTPDSNGDNGSVVPLSLSGAENMPKDEVAVLSEQINDLQKKLLEKEEALRSAESSVTEMNAAYATIDELRRLVADKEALIRSTNSQLHDAKIMLADKQASLEKLEWEVKMSNKKVEDLQGDMSNMGFEISSLMVFFEKISENVSGDSYDDIIPSSYELETLQSMSEIDKIEVDKLDKERVTYAEALAAARENPDEEHLNIAAEARSRLQVLVL

SEQ ID NO: 29266 - DNA, 1304 bp, Zea mays subsp. mays
  misc_feature (1)..(1304): Ceres Seq. ID no. 12372716
gcacgagaccattacctagaacatcctaatcaaaaaaggccacaagcgcccgagcggcttaaaccctagctcgccgtcgtgctcggctcgccaccccgcgcctgctcctttcaggccctaaccgttcgccgccgcgcattcgagcacacgcggaagcgcacctagtgccatggcgaagaagcggaagcgcaccgacgcgcccgcagaggcggccggcgcagagaagcctgacgactccgcgccggcgcgcccggagcgcacgctcttcggcttcaaggacctggtccccgacgccgagcccgcctccgcgggcgccgaggccgcggtggcgccgttccggaacagggagaaggtactcatcacctgctcccgccgaatcacgtataggtatcggcacctgatgcaggacgtgctgtcgctgctcccgcatgcgaagaaggacagcaaggtcgagtcgaagcagagcaaggggaacgcgctgaacgagctccttgagctcaggagctgctccagctgccttttcttcgagtgcagaaaacagaaggatctttacctttggatggtgaagtctcctggaggaccatcagtaaaatttctagttaatgctgttcacaccatggaggagttgaagcttaccggtaaccatctgaaagggtcacgcccacttcttacattttctacaaattttgatgagcaacctcattggaagcttgtgaaggaaatgataactcagatatttgctactcctaaagatcaccgtaaagcaaaacctttccatgaccatgtgtttgtcttctccattgtggatggccatgtttggtttcgaaactaccagatttcggttccccacaatgagattgataaagttgataaaggtggtctggataaaatgacacttattgaggttggccccaggttctgtttgaatccaatcaaaatatttggtggtagttttggtggtcctacatgggtatgagaacccatactacatttcccccaatcagatccgtgcactagagaagaggcagaaggcaggcaaatatgccaagaaggtgaaggccaaggtgaggcggaagatgcacgagatggagaacacgctggagcctgatgagtttgctgagctctggaaaggggagtaactggtctttgatcgaccctgtcaaagtcgtgaagcaccagcaactccttccacttccaccaagcgcaggtcttgtttaccattgtggcagtgccgactgtcgaggttgtggaagttttgtatcacaaagcatacttttatttatataaaatcggattttagtgat

SEQ ID NO: 29267 - protein, 268 aa, Zea mays subsp. mays
  peptide (1)..(268): Ceres Seq. ID no. 12372717
  misc_feature (1)..(268): NCBI GI NO: 18400776 NR Description: expressed protein; protein id: At3g15460
  misc_feature (1)..(268): NCBI GI NO: 16648689 NR Description: AT3g15460/MJK13_12 [Arabidopsis thaliana]
  misc_feature (1)..(268): NCBI GI NO: 18404250 NR Description: expressed protein; protein id: At1g52930
  misc_feature (2)..(268): NCBI GI NO: 30580352 NR Description: Ribosome biogenesis protein Brix
  misc_feature (53)..(265): NCBI GI NO: 6324496 NR Description: Essential nucleolar protein required for biogenesisof the 60S ribosomal subunit
  misc_feature (2)..(268): NCBI GI NO: 30580353 NR Description: Ribosome biogenesis protein Brix (Bx24)
  misc_feature (1)..(268): NCBI GI NO: 33604118 NR Description: Unknown (protein for IMAGE:6789379) [Danio rerio]
  misc_feature (23)..(268): NCBI GI NO: 27370947 NR Description: Similar to BRIX [Xenopus laevis]
  misc_feature (3)..(268): NCBI GI NO: 19311012 NR Description: BRIX [Homo sapiens]
  misc_feature (90)..(268): NCBI GI NO: 34854362 NR Description: similar to BRIX [Rattus norvegicus]
MAKKRKRTDAPAEAAGAEKPDDSAPARPERTLFGFKDLVPDAEPASAGAEAAVAPFRNREKVLITCSRRITYRYRHLMQDVLSLLPHAKKDSKVESKQSKGNALNELLELRSCSSCLFFECRKQKDLYLWMVKSPGGPSVKFLVNAVHTMEELKLTGNHLKGSRPLLTFSTNFDEQPHWKLVKEMITQIFATPKDHRKAKPFHDHVFVFSIVDGHVWFRNYQISVPHNEIDKVDKGGLDKMTLIEVGPRFCLNPIKIFGGSFGGPTWV

SEQ ID NO: 29268 - protein, 191 aa, Zea mays subsp. mays
  peptide (1)..(191): Ceres Seq. ID no. 12372718
  misc_feature (1)..(191): NCBI GI NO: 18400776 NR Description: expressed protein; protein id: At3g15460
  misc_feature (1)..(191): NCBI GI NO: 16648689 NR Description: AT3g15460/MJK13_12 [Arabidopsis thaliana]
  misc_feature (1)..(191): NCBI GI NO: 18404250 NR Description: expressed protein; protein id: At1g52930
  misc_feature (1)..(191): NCBI GI NO: 30580352 NR Description: Ribosome biogenesis protein Brix
  misc_feature (1)..(188): NCBI GI NO: 6324496 NR Description: Essential nucleolar protein required for biogenesisof the 60S ribosomal subunit
  misc_feature (1)..(191): NCBI GI NO: 30580353 NR Description: Ribosome biogenesis protein Brix (Bx24)
  misc_feature (1)..(191): NCBI GI NO: 33604118 NR Description: Unknown (protein for IMAGE:6789379) [Danio rerio]
  misc_feature (1)..(191): NCBI GI NO: 27370947 NR Description: Similar to BRIX [Xenopus laevis]
  misc_feature (1)..(191): NCBI GI NO: 19311012 NR Description: BRIX [Homo sapiens]
  misc_feature (13)..(191): NCBI GI NO: 34854362 NR Description: similar to BRIX [Rattus norvegicus]
MQDVLSLLPHAKKDSKVESKQSKGNALNELLELRSCSSCLFFECRKQKDLYLWMVKSPGGPSVKFLVNAVHTMEELKLTGNHLKGSRPLLTFSTNFDEQPHWKLVKEMITQIFATPKDHRKAKPFHDHVFVFSIVDGHVWFRNYQISVPHNEIDKVDKGGLDKMTLIEVGPRFCLNPIKIFGGSFGGPTWV

SEQ ID NO: 29269 - protein, 138 aa, Zea mays subsp. mays
  peptide (1)..(138): Ceres Seq. ID no. 12372719
  misc_feature (1)..(138): NCBI GI NO: 18400776 NR Description: expressed protein; protein id: At3g15460
  misc_feature (1)..(138): NCBI GI NO: 16648689 NR Description: AT3g15460/MJK13_12 [Arabidopsis thaliana]
  misc_feature (1)..(138): NCBI GI NO: 18404250 NR Description: expressed protein; protein id: At1g52930
  misc_feature (1)..(138): NCBI GI NO: 30580352 NR Description: Ribosome biogenesis protein Brix
  misc_feature (1)..(135): NCBI GI NO: 6324496 NR Description: Essential nucleolar protein required for biogenesisof the 60S ribosomal subunit
  misc_feature (1)..(138): NCBI GI NO: 30580353 NR Description: Ribosome biogenesis protein Brix (Bx24)
  misc_feature (1)..(138): NCBI GI NO: 33604118 NR Description: Unknown (protein for IMAGE:6789379) [Danio rerio]
  misc_feature (1)..(138): NCBI GI NO: 27370947 NR Description: Similar to BRIX [Xenopus laevis]
  misc_feature (1)..(138): NCBI GI NO: 19311012 NR Description: BRIX [Homo sapiens]
  misc_feature (1)..(138): NCBI GI NO: 34854362 NR Description: similar to BRIX [Rattus norvegicus]
MVKSPGGPSVKFLVNAVHTMEELKLTGNHLKGSRPLLTFSTNFDEQPHWKLVKEMITQIFATPKDHRKAKPFHDHVFVFSIVDGHVWFRNYQISVPHNEIDKVDKGGLDKMTLIEVGPRFCLNPIKIFGGSFGGPTWV

SEQ ID NO: 29270 - DNA, 1919 bp, Zea mays subsp. mays; identical to SEQ ID NO: 26011
  misc_feature (1)..(1919): Ceres Seq. ID no. 12406508

SEQ ID NO: 29271 - protein, 460 aa, Zea mays subsp. mays; identical to SEQ ID NO: 26012
  peptide (1)..(460): Ceres Seq. ID no. 12406509
  misc_feature (18)..(442): NCBI GI NO: 34895168 NR Description: putative cytochrome P450
  misc_feature (33)..(442): NCBI GI NO: 34913354 NR Description: putative cytochrome P450
  misc_feature (20)..(442): NCBI GI NO: 38112707 NR Description: cytochrome P450 [Triticum aestivum]
  misc_feature (20)..(442): NCBI GI NO: 22324446 NR Description: putative cytochrome P450
  misc_feature (29)..(442): NCBI GI NO: 34913346 NR Description: putative cytochrome P450
  misc_feature (23)..(442): NCBI GI NO: 34913362 NR Description: putative cytochrome P450
  misc_feature (20)..(434): NCBI GI NO: 34896952 NR Description: putative cytochrome P450-related protein
  misc_feature (21)..(442): NCBI GI NO: 14719280 NR Description: cytochrome P450 [Zea mays]
  misc_feature (19)..(434): NCBI GI NO: 15226472 NR Description: cytochrome p450, putative; protein id: At2g46950.1
  misc_feature (20)..(434): NCBI GI NO: 15234248 NR Description: cytochrome P450 - like protein

SEQ ID NO: 29272 - protein, 371 aa, Zea mays subsp. mays; identical to SEQ ID NO: 26013
  peptide (1)..(371): Ceres Seq. ID no. 12406510
  misc_feature (1)..(353): NCBI GI NO: 34895168 NR Description: putative cytochrome P450
  misc_feature (1)..(353): NCBI GI NO: 34913354 NR Description: putative cytochrome P450
  misc_feature (1)..(353): NCBI GI NO: 38112707 NR Description: cytochrome P450 [Triticum aestivum]
  misc_feature (1)..(353): NCBI GI NO: 22324446 NR Description: putative cytochrome P450
  misc_feature (1)..(353): NCBI GI NO: 34913346 NR Description: putative cytochrome P450
  misc_feature (1)..(353): NCBI GI NO: 34913362 NR Description: putative cytochrome P450
  misc_feature (1)..(345): NCBI GI NO: 34896952 NR Description: putative cytochrome P450-related protein
  misc_feature (1)..(353): NCBI GI NO: 14719280 NR Description: cytochrome P450 [Zea mays]
  misc_feature (1)..(345): NCBI GI NO: 15226472 NR Description: cytochrome p450, putative; protein id: At2g46950.1
  misc_feature (1)..(345): NCBI GI NO: 15234248 NR Description: cytochrome P450 - like protein

SEQ ID NO: 29273 - protein, 319 aa, Zea mays subsp. mays; identical to SEQ ID NO: 26014
  peptide (1)..(319): Ceres Seq. ID no. 12406511
  misc_feature (1)..(301): NCBI GI NO: 34895168 NR Description: putative cytochrome P450
  misc_feature (1)..(301): NCBI GI NO: 34913354 NR Description: putative cytochrome P450
  misc_feature (1)..(301): NCBI GI NO: 38112707 NR Description: cytochrome P450 [Triticum aestivum]
  misc_feature (1)..(301): NCBI GI NO: 22324446 NR Description: putative cytochrome P450
  misc_feature (1)..(301): NCBI GI NO: 34913346 NR Description: putative cytochrome P450
  misc_feature (1)..(301): NCBI GI NO: 34913362 NR Description: putative cytochrome P450
  misc_feature (1)..(293): NCBI GI NO: 34896952 NR Description: putative cytochrome P450-related protein
  misc_feature (1)..(301): NCBI GI NO: 14719280 NR Description: cytochrome P450 [Zea mays]
  misc_feature (1)..(293): NCBI GI NO: 15226472 NR Description: cytochrome p450, putative; protein id: At2g46950.1
  misc_feature (1)..(293): NCBI GI NO: 15234248 NR Description: cytochrome P450 - like protein

SEQ ID NO: 29274 - DNA, 1506 bp, Zea mays subsp. mays
  misc_feature (1)..(1506): Ceres Seq. ID no. 12406215
  misc_feature (241)..(241): n is a, c, t, g, unknown, or other
  misc_feature (244)..(244): n is a, c, t, g, unknown, or other
  misc_feature (253)..(253): n is a, c, t, g, unknown, or other
ctctttctccttcctcctccttcctctcgctcgctcccctcccttccccgctcctcctcctcctcctcctcctccctttcattcctacctccgctcgcgccactctcctccgaccgaggggcagggaccggtgcccgtccgcccgccatggtctcctggcggcgcagcgcgtcctggctgtcgtcggcgtcgcgctcctcgctcggcgccgccgtcggcggggaggccaaggtcacgccgnagncggatccgncggcgcagcacgacgagcccgacgaggagcgctggtcgcgcctgctgccggagctgctcacggagatcatgcgccgcgtggacgccggcgccgagcgctggccgccgcgccgggacgtcgtggtctgcgcctgcgtgtgccgccggtggcgcgacgccgctgtctcggtcgtgcgcccgccgctcgagtgcggcaggatcaccttcccgtcgtcgctcaagcagcctggaccaagggatgcgccgatgcactgttttatccggagggacaaaaaaaattcaaccttttctctctatctcagcttaacgcaggccctaacggataaagggaagtttcttttggctgctcgaaggttcagacaaggagcacatacagaatatatcatctcttatgactacgatgatctgcacccaagaagcagttcatatgttggaaagttgagatctgacttcttggggacaaagttcatcatctatgatagccaggcgccatatgacggtgccaaaccttcgaggacccgatccactcgccgctttgcaagcaagcagataagcccacaggtttcaggcggcaatttcgaagttggacaagtgacctacaggttcaacttcatgaaatcaagagggccgagacggatgcagtgcaatatccagtgccctgtaggccagggcagcgcttcggatccatccaaggagaaaacaccctcgccgagttccttggacctaaagaacaaggctccaagatggcacgaccatcttcagtgttggtgcttaaatttccacggccgggtgaccgtcgcctccgtgaagaacttccagctcgtcgccacagctggctccggcggtccatggggcgtcggagacgaggagacggtgatcctgcagttcgggaagatcgaggacgatgcgtttacgatggactaccggcagcctctgtccgccttccaggcgttcgccatctgcctcaccagctttggcacgaagctggcctgtgaataaatggttgccggtttacccaactatgttggggatcagattgtagggggtagtctgaactagttgccctgagcacctcagatgggagaaaactggcgataagaaacagggcggacgttgtccctataagctttgactccttgtaatcgcctaaatgattgatttatatatatatgatgtgcgcctatgttgttgaagagatgacgatgacttatcgttgtaaatgccattcccttccgtttggtgacattccattct

SEQ ID NO: 29275 - protein, 416 aa, Zea mays subsp. mays
  peptide (1)..(416): Ceres Seq. ID no. 12406216
  misc_feature (160)..(416): Pfam Name: Pfam Description:  Tub family
  misc_feature (160)..(416): NCBI GI NO: 34911070 NR Description: putative tubby-like protein
  misc_feature (73)..(159): NCBI GI NO: 34911070 NR Description: putative tubby-like protein
  misc_feature (50)..(414): NCBI GI NO: 34909710 NR Description: putative Tub family protein
  misc_feature (96)..(416): NCBI GI NO: 18404413 NR Description: F-box containing tubby family protein
  misc_feature (232)..(416): NCBI GI NO: 7769867 NR Description: F12M16.22 [Arabidopsis thaliana]
  misc_feature (96)..(243): NCBI GI NO: 7769867 NR Description: F12M16.22 [Arabidopsis thaliana]
  misc_feature (93)..(319): NCBI GI NO: 34899264 NR Description: contains ESTsAU068695
  misc_feature (318)..(416): NCBI GI NO: 34899264 NR Description: contains ESTsAU068695
  misc_feature (93)..(299): NCBI GI NO: 5777631 NR Description: CAA303719.1 protein [Oryza sativa]
  misc_feature (307)..(362): NCBI GI NO: 5777631 NR Description: CAA303719.1 protein [Oryza sativa]
  misc_feature (81)..(81): Xaa is any aa, unknown or other
  misc_feature (82)..(82): Xaa is any aa, unknown or other
  misc_feature (85)..(85): Xaa is any aa, unknown or other
LFLLPPPSSRSLPSLPRSSSSSSSSLSFLPPLAPLSSDRGAGTGARPPAMVSWRRSASWLSSASRSSLGAAVGGEAKVTPXXDPXAQHDEPDEERWSRLLPELLTEIMRRVDAGAERWPPRRDVVVCACVCRRWRDAAVSVVRPPLECGRITFPSSLKQPGPRDAPMHCFIRRDKKNSTFSLYLSLTQALTDKGKFLLAARRFRQGAHTEYIISYDYDDLHPRSSSYVGKLRSDFLGTKFIIYDSQAPYDGAKPSRTRSTRRFASKQISPQVSGGNFEVGQVTYRFNFMKSRGPRRMQCNIQCPVGQGSASDPSKEKTPSPSSLDLKNKAPRWHDHLQCWCLNFHGRVTVASVKNFQLVATAGSGGPWGVGDEETVILQFGKIEDDAFTMDYRQPLSAFQAFAICLTSFGTKLACE

SEQ ID NO: 29276 - protein, 367 aa, Zea mays subsp. mays
  peptide (1)..(367): Ceres Seq. ID no. 12406217
  misc_feature (111)..(367): Pfam Name: Pfam Description:  Tub family
  misc_feature (111)..(367): NCBI GI NO: 34911070 NR Description: putative tubby-like protein
  misc_feature (24)..(110): NCBI GI NO: 34911070 NR Description: putative tubby-like protein
  misc_feature (1)..(365): NCBI GI NO: 34909710 NR Description: putative Tub family protein
  misc_feature (47)..(367): NCBI GI NO: 18404413 NR Description: F-box containing tubby family protein
  misc_feature (183)..(367): NCBI GI NO: 7769867 NR Description: F12M16.22 [Arabidopsis thaliana]
  misc_feature (47)..(194): NCBI GI NO: 7769867 NR Description: F12M16.22 [Arabidopsis thaliana]
  misc_feature (44)..(270): NCBI GI NO: 34899264 NR Description: contains ESTsAU068695
  misc_feature (269)..(367): NCBI GI NO: 34899264 NR Description: contains ESTsAU068695
  misc_feature (44)..(250): NCBI GI NO: 5777631 NR Description: CAA303719.1 protein [Oryza sativa]
  misc_feature (258)..(313): NCBI GI NO: 5777631 NR Description: CAA303719.1 protein [Oryza sativa]
  misc_feature (32)..(32): Xaa is any aa, unknown or other
  misc_feature (33)..(33): Xaa is any aa, unknown or other
  misc_feature (36)..(36): Xaa is any aa, unknown or other
MVSWRRSASWLSSASRSSLGAAVGGEAKVTPXXDPXAQHDEPDEERWSRLLPELLTEIMRRVDAGAERWPPRRDVVVCACVCRRWRDAAVSVVRPPLECGRITFPSSLKQPGPRDAPMHCFIRRDKKNSTFSLYLSLTQALTDKGKFLLAARRFRQGAHTEYIISYDYDDLHPRSSSYVGKLRSDFLGTKFIIYDSQAPYDGAKPSRTRSTRRFASKQISPQVSGGNFEVGQVTYRFNFMKSRGPRRMQCNIQCPVGQGSASDPSKEKTPSPSSLDLKNKAPRWHDHLQCWCLNFHGRVTVASVKNFQLVATAGSGGPWGVGDEETVILQFGKIEDDAFTMDYRQPLSAFQAFAICLTSFGTKLACE

SEQ ID NO: 29277 - protein, 309 aa, Zea mays subsp. mays
  peptide (1)..(309): Ceres Seq. ID no. 12406218
  misc_feature (53)..(309): Pfam Name: Pfam Description:  Tub family
  misc_feature (53)..(309): NCBI GI NO: 34911070 NR Description: putative tubby-like protein
  misc_feature (1)..(52): NCBI GI NO: 34911070 NR Description: putative tubby-like protein
  misc_feature (1)..(307): NCBI GI NO: 34909710 NR Description: putative Tub family protein
  misc_feature (1)..(309): NCBI GI NO: 18404413 NR Description: F-box containing tubby family protein
  misc_feature (125)..(309): NCBI GI NO: 7769867 NR Description: F12M16.22 [Arabidopsis thaliana]
  misc_feature (1)..(136): NCBI GI NO: 7769867 NR Description: F12M16.22 [Arabidopsis thaliana]
  misc_feature (1)..(212): NCBI GI NO: 34899264 NR Description: contains ESTsAU068695
  misc_feature (211)..(309): NCBI GI NO: 34899264 NR Description: contains ESTsAU068695
  misc_feature (1)..(192): NCBI GI NO: 5777631 NR Description: CAA303719.1 protein [Oryza sativa]
  misc_feature (200)..(255): NCBI GI NO: 5777631 NR Description: CAA303719.1 protein [Oryza sativa]
MRRVDAGAERWPPRRDVVVCACVCRRWRDAAVSVVRPPLECGRITFPSSLKQPGPRDAPMHCFIRRDKKNSTFSLYLSLTQALTDKGKFLLAARRFRQGAHTEYIISYDYDDLHPRSSSYVGKLRSDFLGTKFIIYDSQAPYDGAKPSRTRSTRRFASKQISPQVSGGNFEVGQVTYRFNFMKSRGPRRMQCNIQCPVGQGSASDPSKEKTPSPSSLDLKNKAPRWHDHLQCWCLNFHGRVTVASVKNFQLVATAGSGGPWGVGDEETVILQFGKIEDDAFTMDYRQPLSAFQAFAICLTSFGTKLACE

SEQ ID NO: 29278 - DNA, 2012 bp, Zea mays subsp. mays
  misc_feature (1)..(2012): Ceres Seq. ID no. 12408330
gacttgaacacggccagcgtctcatcggctgggcgtggtctacactgcacgcacacttaccaccagccaccgcaagtgaatcactagccggaagacaggccaaccccactgctagtgctaggaatctaggagcgagaacgagagaccatgtcctcagaggccagcagcgtcgtcgtcgccgacgagaatggagcggcggagacggtcggcgtcgggcggtacgtggaaatggagaaggaccaagactcgagcgcagccaagtcgcggctctcgggcctgctctggcacggcggctccgcctacgacgcttggttcagctgcgcgtccaaccaggtggctcaggtgctcctgaccctgccctactcgttctcgcaactggggatgctgagcggcatactgttccagctcctgtacgggctgatgggcagctggacggcgtacctcatcagcgttctctacgtggagtaccgggccaggaaggagagggagaaggcggacttcaggaaccatgtcatccagtggttcgaggtgctggacgggctgctcgggaggcactggaggaacgtcggcctggccttcaactgcacgttcctgctcttcggctcggtcatccagctcatcgcatgcgcaagcaacatctactacatcaacgacaagctggacaagcggacgtggacgtacatcttcggcgcctgctgcgccacgacggtgttcatcccgtcgttccacaactaccggatctggtcgttcctgggcctcgtcatgaccacctacacggcgtggtacctcgccgtcgcgtccctcatccatggccaggttgatggcgtgaagcactccgggccgaccaagatggtgctctacttcaccggggccacaaacattctctacactttcggagggcacgctgttaccgtggagatcatgcacgcgatgtggcggccgcagaagttcaaggcgatctacctgatggcgacgctgtacgtgctgacgctgacgctgccgtcggcggccagcgtgtactgggcgttcggcgaccagctgctgacccgctccaacgcgctggcgctgctcccgcgcacggcgttccgcgacgccgccgtcgtgctcatgctcgcccaccagttcatcaccttcggcttcgcctgcacgccgctctacttcgtctgggagaagctcgtcggcctgcacgactgccgcagcctctgcaggcgcgccgccgcgcgcctccccgtcgtcgtccccatctggttcctcgccatcatcttccccttcttcgggcccatcaactccgccgtcggctccctcctcgtcagcttcaccgtctacatcatcccggcgctggcgcacatgatcacgttccggtccgcaacagcccgtgagaacgcgatggagccgccgccgcggctgctggggcgttggacgggcgcgtacatgatcaacgcgttcgtggtggcgtgggtgctggtggtcggcttcggcttcggcggctgggcgagcatgacaaacttcgtccgccagatcgacaccttcggcctcttcaccaagtgctaccagtgcccgccgccaccgcccctgccgttccccggcggcggcctcggcaacatcacgatgccattcaacggcgacgggctccctcctaccccggctccttcgccggcgcattacttcttccgccaccaccggcatcacagccaccaccgcgggctctgatgagagacgatgaaatgaacccggcttaccaccagtagtgcgtgcgtggcacactgctgctttagtttgagctgatcccttagttaagtctagcttaattagcacctgcatgcagcatcttcgttctctcctctagcttgctggtgtcgaacgcatgctttcccggtttcagtgactttagagaccctgcctgagcctgacacgaggggagtatcactgtatcagtactagcatgcagtctcttgtgttccgggctgtgtcctggcgtggagctcaaagaaggggaatccatttctacagcc

SEQ ID NO: 29279 - protein, 520 aa, Zea mays subsp. mays
  peptide (1)..(520): Ceres Seq. ID no. 12408331
  misc_feature (15)..(520): NCBI GI NO: 37531048 NR Description: putative AUX1-like permease
  misc_feature (13)..(479): NCBI GI NO: 15226450 NR Description: AUX1-like amino acid permease
  misc_feature (10)..(478): NCBI GI NO: 6689614 NR Description: AUX1 protein [Zea mays]
  misc_feature (16)..(515): NCBI GI NO: 14279184 NR Description: putative AUX1-like permease
  misc_feature (17)..(511): NCBI GI NO: 21586474 NR Description: auxin influx carrier protein [Medicago truncatula]
  misc_feature (18)..(475): NCBI GI NO: 15217443 NR Description: putative AUX1-like permease; protein id:At1g77690
  misc_feature (18)..(472): NCBI GI NO: 10800922 NR Description: putative AUX1-like permease [Medicago truncatula]
  misc_feature (3)..(472): NCBI GI NO: 18404642 NR Description: expressed protein; protein id: At2g38120
  misc_feature (3)..(479): NCBI GI NO: 21586468 NR Description: auxin influx carrier protein [Medicago truncatula]
MSSEASSVVVADENGAAETVGVGRYVEMEKDQDSSAAKSRLSGLLWHGGSAYDAWFSCASNQVAQVLLTLPYSFSQLGMLSGILFQLLYGLMGSWTAYLISVLYVEYRARKEREKADFRNHVIQWFEVLDGLLGRHWRNVGLAFNCTFLLFGSVIQLIACASNIYYINDKLDKRTWTYIFGACCATTVFIPSFHNYRIWSFLGLVMTTYTAWYLAVASLIHGQVDGVKHSGPTKMVLYFTGATNILYTFGGHAVTVEIMHAMWRPQKFKAIYLMATLYVLTLTLPSAASVYWAFGDQLLTRSNALALLPRTAFRDAAVVLMLAHQFITFGFACTPLYFVWEKLVGLHDCRSLCRRAAARLPVVVPIWFLAIIFPFFGPINSAVGSLLVSFTVYIIPALAHMITFRSATARENAMEPPPRLLGRWTGAYMINAFVVAWVLVVGFGFGGWASMTNFVRQIDTFGLFTKCYQCPPPPPLPFPGGGLGNITMPFNGDGLPPTPAPSPAHYFFRHHRHHSHHRGL

SEQ ID NO: 29280 - protein, 493 aa, Zea mays subsp. mays
  peptide (1)..(493): Ceres Seq. ID no. 12408332
  misc_feature (1)..(493): NCBI GI NO: 37531048 NR Description: putative AUX1-like permease
  misc_feature (1)..(452): NCBI GI NO: 15226450 NR Description: AUX1-like amino acid permease
  misc_feature (1)..(451): NCBI GI NO: 6689614 NR Description: AUX1 protein [Zea mays]
  misc_feature (1)..(488): NCBI GI NO: 14279184 NR Description: putative AUX1-like permease
  misc_feature (1)..(484): NCBI GI NO: 21586474 NR Description: auxin influx carrier protein [Medicago truncatula]
  misc_feature (1)..(448): NCBI GI NO: 15217443 NR Description: putative AUX1-like permease; protein id:At1g77690
  misc_feature (1)..(445): NCBI GI NO: 10800922 NR Description: putative AUX1-like permease [Medicago truncatula]
  misc_feature (1)..(445): NCBI GI NO: 18404642 NR Description: expressed protein; protein id: At2g38120
  misc_feature (1)..(452): NCBI GI NO: 21586468 NR Description: auxin influx carrier protein [Medicago truncatula]
MEKDQDSSAAKSRLSGLLWHGGSAYDAWFSCASNQVAQVLLTLPYSFSQLGMLSGILFQLLYGLMGSWTAYLISVLYVEYRARKEREKADFRNHVIQWFEVLDGLLGRHWRNVGLAFNCTFLLFGSVIQLIACASNIYYINDKLDKRTWTYIFGACCATTVFIPSFHNYRIWSFLGLVMTTYTAWYLAVASLIHGQVDGVKHSGPTKMVLYFTGATNILYTFGGHAVTVEIMHAMWRPQKFKAIYLMATLYVLTLTLPSAASVYWAFGDQLLTRSNALALLPRTAFRDAAVVLMLAHQFITFGFACTPLYFVWEKLVGLHDCRSLCRRAAARLPVVVPIWFLAIIFPFFGPINSAVGSLLVSFTVYIIPALAHMITFRSATARENAMEPPPRLLGRWTGAYMINAFVVAWVLVVGFGFGGWASMTNFVRQIDTFGLFTKCYQCPPPPPLPFPGGGLGNITMPFNGDGLPPTPAPSPAHYFFRHHRHHSHHRGL

SEQ ID NO: 29281 - protein, 442 aa, Zea mays subsp. mays
  peptide (1)..(442): Ceres Seq. ID no. 12408333
  misc_feature (1)..(442): NCBI GI NO: 37531048 NR Description: putative AUX1-like permease
  misc_feature (1)..(401): NCBI GI NO: 15226450 NR Description: AUX1-like amino acid permease
  misc_feature (1)..(400): NCBI GI NO: 6689614 NR Description: AUX1 protein [Zea mays]
  misc_feature (1)..(437): NCBI GI NO: 14279184 NR Description: putative AUX1-like permease
  misc_feature (1)..(433): NCBI GI NO: 21586474 NR Description: auxin influx carrier protein [Medicago truncatula]
  misc_feature (1)..(397): NCBI GI NO: 15217443 NR Description: putative AUX1-like permease; protein id:At1g77690
  misc_feature (1)..(394): NCBI GI NO: 10800922 NR Description: putative AUX1-like permease [Medicago truncatula]
  misc_feature (1)..(394): NCBI GI NO: 18404642 NR Description: expressed protein; protein id: At2g38120
  misc_feature (1)..(401): NCBI GI NO: 21586468 NR Description: auxin influx carrier protein [Medicago truncatula]
MLSGILFQLLYGLMGSWTAYLISVLYVEYRARKEREKADFRNHVIQWFEVLDGLLGRHWRNVGLAFNCTFLLFGSVIQLIACASNIYYINDKLDKRTWTYIFGACCATTVFIPSFHNYRIWSFLGLVMTTYTAWYLAVASLIHGQVDGVKHSGPTKMVLYFTGATNILYTFGGHAVTVEIMHAMWRPQKFKAIYLMATLYVLTLTLPSAASVYWAFGDQLLTRSNALALLPRTAFRDAAVVLMLAHQFITFGFACTPLYFVWEKLVGLHDCRSLCRRAAARLPVVVPIWFLAIIFPFFGPINSAVGSLLVSFTVYIIPALAHMITFRSATARENAMEPPPRLLGRWTGAYMINAFVVAWVLVVGFGFGGWASMTNFVRQIDTFGLFTKCYQCPPPPPLPFPGGGLGNITMPFNGDGLPPTPAPSPAHYFFRHHRHHSHHRGL

SEQ ID NO: 29282 - DNA, 1460 bp, Zea mays subsp. mays
  misc_feature (1)..(1460): Ceres Seq. ID no. 12383521
actcggagagcgtgattatgctgcacgcgttgatttaacagctaaggtttatggtctacataaagcagaacagtatatcgagaaaattcctgcatctcataggagtgaggttgtgtatagaacacttctggcgaattgtgttgctgaaggcaatgtaaaaaaatcggagcaagtttttaataggatgaaggatcttggattcccagttacaacattttcttccaatcagcttctgctactctacaaaagattggacaagaaaaagattgctgatgttctcacaatgatggaaaaggaggatgtgaaaccatctatctttacttacaaggtccttgtagacgccaagggaatggttggagatgtagaagctatggagaaagtggttgaatcaatggtgaaagatggcattgagccagatctcacgtttaatgctacaattgccagacagtacatatttaatggtcagcgtgataaagcagagacacttttggagtcaatggagggtgatgatatccagaaaaaccgtgctgcttgcaagtttctattacctttatatgcttttctgggcaatggtgatgctgtggaaagaatttggaaggtgtgtgaggataatactcgtatagatgagtgcttgtctgctatagatgccttcggtaagcttggtaatgttgaaaaggcagagaaggtttttgaggatatgtttgtgaaatggaaaaacctctcttccaaatactacaccgctttgctaaaggtgtatgctaatcagaacctcttagacaagggtgaggaactagcaaagcggatggatgaggagggtgccaagtttgggaccccaactttgaatgcacttgtgaagctatatgctgacgctggagaggtggagaaagctgagtccctattgcacaagctatctctgaagaacaacgtcaagcccagttacagctcatacatgacactgcttgatagctactcgaagaaaggagacgtccacaactcggagaaagtgttcaacaagttgagacagataggctacactgggaggatcaggatgtaccagtttctgctccattcttatctacatgctaaggcccctgcgtatggattcaaagagaggatgaaggctgacaacattttccccaacagtgccgtggcaactctgattgccgctactgatccgttcgtcaagaagaaatcagtatcggacttgctcgattagattatggagtagtgtgaggtactgaggtccatcatgttgctatgcgcatgtgctgtttcgataagactatggagtagtgtgagaatatatggtgagataataacgtcttagtcttgtaatgaactaccattgactttgcatttagactcatgcgctttgctgaacttgagtcatagaaacaggataaagtgcacgagagagagagaacttgtgctaattcttgatataatattttttgttatcc

SEQ ID NO: 29283 - protein, 404 aa, Zea mays subsp. mays
  peptide (1)..(404): Ceres Seq. ID no. 12383522
  misc_feature (37)..(70): Pfam Name: Pfam Description:  PPR repeat
  misc_feature (1)..(404): NCBI GI NO: 34903362 NR Description: unnamed protein product
  misc_feature (1)..(404): NCBI GI NO: 6958202 NR Description: DNA-binding protein [Triticum aestivum]
  misc_feature (3)..(404): NCBI GI NO: 15220095 NR Description: hypothetical protein; protein id: At1g80270
  misc_feature (3)..(404): NCBI GI NO: 15218196 NR Description: hypothetical protein; protein id: At1g15480.1
  misc_feature (3)..(404): NCBI GI NO: 22331104 NR Description: DNA-binding protein, putative
  misc_feature (3)..(385): NCBI GI NO: 34900334 NR Description: P0592C06.16
  misc_feature (34)..(385): NCBI GI NO: 34394024 NR Description: putative DNA-binding protein
  misc_feature (5)..(377): NCBI GI NO: 15240937 NR Description: putative protein; protein id: At5g27460.1
  misc_feature (5)..(387): NCBI GI NO: 15219808 NR Description: hypothetical protein; protein id: At1g60770.1
  misc_feature (1)..(388): NCBI GI NO: 37535776 NR Description: putative leaf protein
LGERDYAARVDLTAKVYGLHKAEQYIEKIPASHRSEVVYRTLLANCVAEGNVKKSEQVFNRMKDLGFPVTTFSSNQLLLLYKRLDKKKIADVLTMMEKEDVKPSIFTYKVLVDAKGMVGDVEAMEKVVESMVKDGIEPDLTFNATIARQYIFNGQRDKAETLLESMEGDDIQKNRAACKFLLPLYAFLGNGDAVERIWKVCEDNTRIDECLSAIDAFGKLGNVEKAEKVFEDMFVKWKNLSSKYYTALLKVYANQNLLDKGEELAKRMDEEGAKFGTPTLNALVKLYADAGEVEKAESLLHKLSLKNNVKPSYSSYMTLLDSYSKKGDVHNSEKVFNKLRQIGYTGRIRMYQFLLHSYLHAKAPAYGFKERMKADNIFPNSAVATLIAATDPFVKKKSVSDLLD

SEQ ID NO: 29284 - protein, 343 aa, Zea mays subsp. mays
  peptide (1)..(343): Ceres Seq. ID no. 12383523
  misc_feature (1)..(343): NCBI GI NO: 34903362 NR Description: unnamed protein product
  misc_feature (1)..(343): NCBI GI NO: 6958202 NR Description: DNA-binding protein [Triticum aestivum]
  misc_feature (1)..(343): NCBI GI NO: 15220095 NR Description: hypothetical protein; protein id: At1g80270
  misc_feature (1)..(343): NCBI GI NO: 15218196 NR Description: hypothetical protein; protein id: At1g15480.1
  misc_feature (1)..(343): NCBI GI NO: 22331104 NR Description: DNA-binding protein, putative
  misc_feature (1)..(324): NCBI GI NO: 34900334 NR Description: P0592C06.16
  misc_feature (1)..(324): NCBI GI NO: 34394024 NR Description: putative DNA-binding protein
  misc_feature (1)..(316): NCBI GI NO: 15240937 NR Description: putative protein; protein id: At5g27460.1
  misc_feature (1)..(326): NCBI GI NO: 15219808 NR Description: hypothetical protein; protein id: At1g60770.1
  misc_feature (1)..(327): NCBI GI NO: 37535776 NR Description: putative leaf protein
MKDLGFPVTTFSSNQLLLLYKRLDKKKIADVLTMMEKEDVKPSIFTYKVLVDAKGMVGDVEAMEKVVESMVKDGIEPDLTFNATIARQYIFNGQRDKAETLLESMEGDDIQKNRAACKFLLPLYAFLGNGDAVERIWKVCEDNTRIDECLSAIDAFGKLGNVEKAEKVFEDMFVKWKNLSSKYYTALLKVYANQNLLDKGEELAKRMDEEGAKFGTPTLNALVKLYADAGEVEKAESLLHKLSLKNNVKPSYSSYMTLLDSYSKKGDVHNSEKVFNKLRQIGYTGRIRMYQFLLHSYLHAKAPAYGFKERMKADNIFPNSAVATLIAATDPFVKKKSVSDLLD

SEQ ID NO: 29285 - protein, 310 aa, Zea mays subsp. mays
  peptide (1)..(310): Ceres Seq. ID no. 12383524
  misc_feature (1)..(310): NCBI GI NO: 34903362 NR Description: unnamed protein product
  misc_feature (1)..(310): NCBI GI NO: 6958202 NR Description: DNA-binding protein [Triticum aestivum]
  misc_feature (1)..(310): NCBI GI NO: 15220095 NR Description: hypothetical protein; protein id: At1g80270
  misc_feature (1)..(310): NCBI GI NO: 15218196 NR Description: hypothetical protein; protein id: At1g15480.1
  misc_feature (1)..(310): NCBI GI NO: 22331104 NR Description: DNA-binding protein, putative
  misc_feature (1)..(291): NCBI GI NO: 34900334 NR Description: P0592C06.16
  misc_feature (1)..(291): NCBI GI NO: 34394024 NR Description: putative DNA-binding protein
  misc_feature (1)..(283): NCBI GI NO: 15240937 NR Description: putative protein; protein id: At5g27460.1
  misc_feature (1)..(293): NCBI GI NO: 15219808 NR Description: hypothetical protein; protein id: At1g60770.1
  misc_feature (1)..(294): NCBI GI NO: 37535776 NR Description: putative leaf protein
MMEKEDVKPSIFTYKVLVDAKGMVGDVEAMEKVVESMVKDGIEPDLTFNATIARQYIFNGQRDKAETLLESMEGDDIQKNRAACKFLLPLYAFLGNGDAVERIWKVCEDNTRIDECLSAIDAFGKLGNVEKAEKVFEDMFVKWKNLSSKYYTALLKVYANQNLLDKGEELAKRMDEEGAKFGTPTLNALVKLYADAGEVEKAESLLHKLSLKNNVKPSYSSYMTLLDSYSKKGDVHNSEKVFNKLRQIGYTGRIRMYQFLLHSYLHAKAPAYGFKERMKADNIFPNSAVATLIAATDPFVKKKSVSDLLD

SEQ ID NO: 29286 - DNA, 1169 bp, Zea mays subsp. mays
  misc_feature (1)..(1169): Ceres Seq. ID no. 12407205
atcaacccaacacggcgtccccgtcccgagtcaccaccgacccaagcaaaaccgcacgcaccctgccagcggccccccaactcccaacccaacccctactccagctagctcgcggcggcggccagcggccatggccttccggctgagcaacaacctgatcggggtcctaaacttcgtcaccttcctgctctccgtcccgatcctgggcgcgggcatctggctgggccaccgcgccgacggcaccgagtgcgagcgctacctctcggcgcccgtcatcgcgctgggggccttcctcctcgccgtctccctggcgggcctcgtcggcgcctgctgccgcgtcacctggctgctctgggcctacctcctcgccatgttcgtcctcatcctcgtcctcttctgcttcaccgtcttcgccttcgtcgtcaccaacaggggcgccggcgaggccgtctccggccgcggatacaaggagtaccgcctcggggactactccaactggctgcagaagcgcgtcgagaacaccaggaactgggaccggatcaggagctgcctccaggactccaaggtctgcaagagcctgcaggacaagaacgagaccgtcgcccagttcatgagttccagcctctcccccatcgagtctggctgctgcaagccccccaccagctgcggctacacctacgtcggcggcacggactggacgccggtgaccaccaactcgacggacccggactgcaagacctggagcaacgacgcctcggcgctctgctacaactgccagtcgtgcaaggccggcgtggtggccacgttccagcggaactggaagcgcgtcgccgtcgtctgcatcgtcttcctcgtcttcatcatcatcgtctactccgtcggctgctgcgccttcaggaacaaccgcagagacaacgcctaccgcggcgggtggaagggcgggtacgcttgatccaccatcgcgtcgtttaggagcggagccatgcacgcgcgctcggtgctctgctctgctccctgcccgccgctgtcgtcgtacgtacatgtttagtaggctcgttgtagctctgtacaggtgatggagatcgttgttgcggattcttatcgtcttcctggttacatacttacattattgttatgatctgatcagcggtaggttttgtatacgctgc

SEQ ID NO: 29287 - protein, 316 aa, Zea mays subsp. mays
  peptide (1)..(316): Ceres Seq. ID no. 12407206
  misc_feature (49)..(287): Pfam Name: Pfam Description:  Tetraspanin family
  misc_feature (44)..(316): NCBI GI NO: 29367553 NR Description: senescence-associated protein-like protein
  misc_feature (46)..(313): NCBI GI NO: 3551954 NR Description: senescence-associated protein 5
  misc_feature (47)..(307): NCBI GI NO: 20197174 NR Description: hypothetical protein [Arabidopsis thaliana]
  misc_feature (49)..(303): NCBI GI NO: 15234374 NR Description: senescence-associated protein -like
  misc_feature (47)..(315): NCBI GI NO: 15234743 NR Description: senescence-associated protein homolog
  misc_feature (47)..(315): NCBI GI NO: 21537169 NR Description: senescence-associated protein-like protein
  misc_feature (47)..(303): NCBI GI NO: 15238641 NR Description: senescence-associated protein - like
  misc_feature (47)..(305): NCBI GI NO: 15231187 NR Description: putative protein; protein id: At3g45600
  misc_feature (48)..(315): NCBI GI NO: 17979386 NR Description: putative senescence-associated protein 5
  misc_feature (48)..(315): NCBI GI NO: 15237490 NR Description: senescence-associated protein 5-like protein
STQHGVPVPSHHRPKQNRTHPASGPPTPNPTPTPASSRRRPAAMAFRLSNNLIGVLNFVTFLLSVPILGAGIWLGHRADGTECERYLSAPVIALGAFLLAVSLAGLVGACCRVTWLLWAYLLAMFVLILVLFCFTVFAFVVTNRGAGEAVSGRGYKEYRLGDYSNWLQKRVENTRNWDRIRSCLQDSKVCKSLQDKNETVAQFMSSSLSPIESGCCKPPTSCGYTYVGGTDWTPVTTNSTDPDCKTWSNDASALCYNCQSCKAGVVATFQRNWKRVAVVCIVFLVFIIIVYSVGCCAFRNNRRDNAYRGGWKGGYA

SEQ ID NO: 29288 - protein, 273 aa, Zea mays subsp. mays; identical to SEQ ID NO: 23801
  peptide (1)..(273): Ceres Seq. ID no. 12407207
  misc_feature (6)..(244): Pfam Name: Pfam Description:  Tetraspanin family
  misc_feature (1)..(273): NCBI GI NO: 29367553 NR Description: senescence-associated protein-like protein
  misc_feature (3)..(270): NCBI GI NO: 3551954 NR Description: senescence-associated protein 5
  misc_feature (4)..(264): NCBI GI NO: 20197174 NR Description: hypothetical protein [Arabidopsis thaliana]
  misc_feature (6)..(260): NCBI GI NO: 15234374 NR Description: senescence-associated protein -like
  misc_feature (4)..(272): NCBI GI NO: 15234743 NR Description: senescence-associated protein homolog
  misc_feature (4)..(272): NCBI GI NO: 21537169 NR Description: senescence-associated protein-like protein
  misc_feature (4)..(260): NCBI GI NO: 15238641 NR Description: senescence-associated protein - like
  misc_feature (4)..(262): NCBI GI NO: 15231187 NR Description: putative protein; protein id: At3g45600
  misc_feature (5)..(272): NCBI GI NO: 17979386 NR Description: putative senescence-associated protein 5
  misc_feature (5)..(272): NCBI GI NO: 15237490 NR Description: senescence-associated protein 5-like protein

SEQ ID NO: 29289 - protein, 193 aa, Zea mays subsp. mays
  peptide (1)..(193): Ceres Seq. ID no. 12407208
  misc_feature (1)..(164): Pfam Name: Pfam Description:  Tetraspanin family
  misc_feature (1)..(193): NCBI GI NO: 29367553 NR Description: senescence-associated protein-like protein
  misc_feature (1)..(190): NCBI GI NO: 3551954 NR Description: senescence-associated protein 5
  misc_feature (1)..(184): NCBI GI NO: 20197174 NR Description: hypothetical protein [Arabidopsis thaliana]
  misc_feature (1)..(180): NCBI GI NO: 15234374 NR Description: senescence-associated protein -like
  misc_feature (1)..(192): NCBI GI NO: 15234743 NR Description: senescence-associated protein homolog
  misc_feature (1)..(192): NCBI GI NO: 21537169 NR Description: senescence-associated protein-like protein
  misc_feature (1)..(180): NCBI GI NO: 15238641 NR Description: senescence-associated protein - like
  misc_feature (1)..(182): NCBI GI NO: 15231187 NR Description: putative protein; protein id: At3g45600
  misc_feature (1)..(192): NCBI GI NO: 17979386 NR Description: putative senescence-associated protein 5
  misc_feature (1)..(192): NCBI GI NO: 15237490 NR Description: senescence-associated protein 5-like protein
MFVLILVLFCFTVFAFVVTNRGAGEAVSGRGYKEYRLGDYSNWLQKRVENTRNWDRIRSCLQDSKVCKSLQDKNETVAQFMSSSLSPIESGCCKPPTSCGYTYVGGTDWTPVTTNSTDPDCKTWSNDASALCYNCQSCKAGVVATFQRNWKRVAVVCIVFLVFIIIVYSVGCCAFRNNRRDNAYRGGWKGGYA

SEQ ID NO: 29290 - DNA, 927 bp, Zea mays subsp. mays
  misc_feature (1)..(927): Ceres Seq. ID no. 12408690
gtctcctcccgctccccttgcacccgaacccaagccccagtctccacgcgagcggcacacgacgggtgccctggcccccgcgccaccgccgccgctgcctcgcgacgccgccgtcgcggaacgggagctcctcctcgccggagattgactggtgcccggtgcctccggaccagctccccgtgaacgagtacgaggcgctcgcggcctccctgcccttctcctgggcggcggggggcctccgcgtctactgctcccgcctcgcgctcacgggcgccgccgtcgcgctcttcgtcgggctcccggtcgccgccttcgggggccgcggcggggccggcggcgacgctctgcacctcgcgctcggcgccacggggtccgggatcctcgccgtcacgctcgctgtcgtgcggatgtacctcgggtgggcctacgtcggcaaccgcctgctcagcgccacagtggagtatgaggaaacgggatggtatgatggtcagatatgggttaaaactccagaagttttagctcgtgatcggcttctaggctcattttctgtcaagcctgtgctaaacagggtgaagttcaccttggtgggtctggcaggctccctgatcctttgcattcttctgtacgtgaacacggaaaccccaaaggaaccttatggaaataccggtggaaggtctatcccgggagtgtacagcgacgctgctgcaaggtcgtttgagcccgatgcattctgtggagaacctgatttgtcgtagcatcgtaaagcgtggagcatggaaggtttgtagatggcggtatatggtctcacagggtatatacgggggtttctgtacggggtttctgatccatcaaactagggtaatgtaaatatttggccacacccacactagtatcgacattttagacgcaagcctcttatgaaaattc

SEQ ID NO: 29291 - protein, 250 aa, Zea mays subsp. mays
  peptide (1)..(250): Ceres Seq. ID no. 12408691
  misc_feature (46)..(247): NCBI GI NO: 15239796 NR Description: putative protein; protein id: At5g11840.1
  misc_feature (38)..(221): NCBI GI NO: 15240715 NR Description: putative protein; protein id: At5g67370
  misc_feature (38)..(208): NCBI GI NO: 40736997 NR Description: expressed protein
  misc_feature (51)..(208): NCBI GI NO: 17231662 NR Description: hypothetical protein [Nostoc sp. PCC 7120]
  misc_feature (51)..(202): NCBI GI NO: 23123845 NR Description: hypothetical protein [Nostoc punctiforme]
  misc_feature (53)..(198): NCBI GI NO: 37520418 NR Description: hypothetical protein [Gloeobacter violaceus]
  misc_feature (50)..(209): NCBI GI NO: 11467354 NR Description: ycf36 [Cyanophora paradoxa]
  misc_feature (44)..(208): NCBI GI NO: 16331827 NR Description: hypothetical protein [Synechocystis sp. PCC 6803]
  misc_feature (51)..(197): NCBI GI NO: 22298607 NR Description: ORF_ID:tll1063~hypothetical protein
  misc_feature (52)..(205): NCBI GI NO: 23040962 NR Description: hypothetical protein
LLPLPLHPNPSPSLHASGTRRVPWPPRHRRRCLATPPSRNGSSSSPEIDWCPVPPDQLPVNEYEALAASLPFSWAAGGLRVYCSRLALTGAAVALFVGLPVAAFGGRGGAGGDALHLALGATGSGILAVTLAVVRMYLGWAYVGNRLLSATVEYEETGWYDGQIWVKTPEVLARDRLLGSFSVKPVLNRVKFTLVGLAGSLILCILLYVNTETPKEPYGNTGGRSIPGVYSDAAARSFEPDAFCGEPDLS

SEQ ID NO: 29292 - DNA, 1833 bp, Zea mays subsp. mays
  misc_feature (1)..(1833): Ceres Seq. ID no. 12406205
  misc_feature (1088)..(1088): n is a, c, t, g, unknown, or other
  misc_feature (344)..(344): n is a, c, t, g, unknown, or other
  misc_feature (1633)..(1633): n is a, c, t, g, unknown, or other
  misc_feature (1103)..(1103): n is a, c, t, g, unknown, or other
  misc_feature (1335)..(1335): n is a, c, t, g, unknown, or other
aaaaagaagctagaacacgctaacaagacaacaaggtgagtagtttcttgctccaaccgccttacctgccgttgactcgcttgctgcctcggctcatggggcgctactacctgtaggatcatggggcgcgggcgcggccacctcctgctgccggcagcagccgcctgcctgtgggcgctgtcgtgcgcgctgctgctgcgcgcgtcccctcaccgcgctggcgccggcgccggcgggctgctgagggtcgggctcagcaggcgcggcggcgggctcgaccagcgcgcgctggcggcggccaaggccgcgaggcagcaggaggcaagccgtctcggggcctccgncggcggcgacgtccctctcgtcgactacctcaacacccagtactatggggtcgtcggcatcggcacaccgccgcagaacttcaccgtcatcttcgacaccggcagctccaacctctgggtcccctcctccagatgctacttctcgattgcctgctacctgcaccacagatacaagtcggccaagtctagcacgtacaaggcggacggcgagacctgcaagatcacctacggctccggctcgatcgccgggttcttcagcgacgacgacgtgctggtcggggacctgaccgtcaaaaaccagaagttcatcgagacaacgcgcgaaagcagcgtaacgttcataatcggcaagttcgacggcatcctcggtctcggataccccgagatctccgtcggcaaggctcctccgatctggcagagcatgcaggagcaggagctgctggcggaggacgtcttctccttctggctgaaccggagcccggacgcggacgcagcgtccggcggcgagctcgtcttcggcggcgtcgaccctgcgcacttcagcgggaaccacacctacgtccccgtctcccgcaagggatactggcagttcgacatgggggaccttctcatcgacggccactccaccggtttctgcgccaaggggtgcgctgccatcgtcgactccgggacttccttgctcgctggcccaacggccataattgcccaggtgaacgaagcgatcggggcagacgggatcatcancacggagtgcaaggnagttgtgagccagtacggagagatgatcctcgacatgctcatcgcacagacggatccacagagggtgtgcagccaggttggtctgtgcgtgttcgatggcgctcgatctgtcagcgaggggattgaatctgttgtcgggaaagaaaacctgggctcagatgtcatgtgctcggcctgtcagatggctgtcgtgtggatagagaaccagtccgcgaaaacaagaccaaggagntcatactgcagtacgctaaccagctgtgtgagcgtctgccgagccccaacggagagtcaacagtcagctgccaggagatctccaagatgcccagccttgcgttcaccatcgcaaacaagaccttcaccctaacacccgagcagtacattgtgaagctggagcaaggaggccaaaccgtctgcatcagtgggttcatggcgtatgacgtgccaccgccgcgtggtcctctctggattcttggggacgtcttcatgggagcttaccacacggtgttcgacttcggcaacgacaggattgnttcgcggaatctgcatgagtgtggagagcactctcatctttataaagacgataccctatgtattagggatgtgtagtttattgtctatccactacatgccaacagtacgccgcaaataaatcggtggccaaaattgctgaaaccagaaacgtgaacagtactgctttctttgtttctggagaagagcaaatggatgcttc

SEQ ID NO: 29293 - protein, 448 aa, Zea mays subsp. mays
  peptide (1)..(448): Ceres Seq. ID no. 12406206
  misc_feature (40)..(365): Pfam Name: Pfam Description:  Eukaryotic aspartyl protease
  misc_feature (7)..(404): NCBI GI NO: 1168537 NR Description: Aspartic proteinase precursor
  misc_feature (19)..(402): NCBI GI NO: 1168536 NR Description: Phytepsin precursor (Aspartic proteinase)
  misc_feature (20)..(402): NCBI GI NO: 2499819 NR Description: Aspartic proteinase oryzasin 1 precursor
  misc_feature (40)..(428): NCBI GI NO: 21616051 NR Description: aspartic proteinase [Theobroma cacao]
  misc_feature (39)..(397): NCBI GI NO: 1354272 NR Description: aspartic proteinase [Arabidopsis thaliana]
  misc_feature (39)..(397): NCBI GI NO: 15221141 NR Description: putative aspartic proteinase; protein id:At1g11910
  misc_feature (13)..(397): NCBI GI NO: 7435839 NR Description: aspartic proteinase precursor
  misc_feature (44)..(402): NCBI GI NO: 5822248 NR Description: Chain A
  misc_feature (39)..(428): NCBI GI NO: 22330379 NR Description: aspartic protease, putative; protein id:At1g62290
  misc_feature (19)..(428): NCBI GI NO: 2811025 NR Description: Aspartic proteinase precursor
  misc_feature (75)..(75): Xaa is any aa, unknown or other
  misc_feature (323)..(323): Xaa is any aa, unknown or other
  misc_feature (328)..(328): Xaa is any aa, unknown or other
  misc_feature (405)..(405): Xaa is any aa, unknown or other
MGRGRGHLLLPAAAACLWALSCALLLRASPHRAGAGAGGLLRVGLSRRGGGLDQRALAAAKAARQQEASRLGASXGGDVPLVDYLNTQYYGVVGIGTPPQNFTVIFDTGSSNLWVPSSRCYFSIACYLHHRYKSAKSSTYKADGETCKITYGSGSIAGFFSDDDVLVGDLTVKNQKFIETTRESSVTFIIGKFDGILGLGYPEISVGKAPPIWQSMQEQELLAEDVFSFWLNRSPDADAASGGELVFGGVDPAHFSGNHTYVPVSRKGYWQFDMGDLLIDGHSTGFCAKGCAAIVDSGTSLLAGPTAIIAQVNEAIGADGIIXTECKXVVSQYGEMILDMLIAQTDPQRVCSQVGLCVFDGARSVSEGIESVVGKENLGSDVMCSACQMAVVWIENQSAKTRPRXSYCSTLTSCVSVCRAPTESQQSAARRSPRCPALRSPSQTRPSP

SEQ ID NO: 29294 - protein, 233 aa, Zea mays subsp. mays
  peptide (1)..(233): Ceres Seq. ID no. 12406207
  misc_feature (1)..(150): Pfam Name: Pfam Description:  Eukaryotic aspartyl protease
  misc_feature (1)..(189): NCBI GI NO: 1168537 NR Description: Aspartic proteinase precursor
  misc_feature (1)..(187): NCBI GI NO: 1168536 NR Description: Phytepsin precursor (Aspartic proteinase)
  misc_feature (1)..(187): NCBI GI NO: 2499819 NR Description: Aspartic proteinase oryzasin 1 precursor
  misc_feature (1)..(213): NCBI GI NO: 21616051 NR Description: aspartic proteinase [Theobroma cacao]
  misc_feature (1)..(182): NCBI GI NO: 1354272 NR Description: aspartic proteinase [Arabidopsis thaliana]
  misc_feature (1)..(182): NCBI GI NO: 15221141 NR Description: putative aspartic proteinase; protein id:At1g11910
  misc_feature (1)..(182): NCBI GI NO: 7435839 NR Description: aspartic proteinase precursor
  misc_feature (1)..(187): NCBI GI NO: 5822248 NR Description: Chain A
  misc_feature (1)..(213): NCBI GI NO: 22330379 NR Description: aspartic protease, putative; protein id:At1g62290
  misc_feature (1)..(213): NCBI GI NO: 2811025 NR Description: Aspartic proteinase precursor
  misc_feature (108)..(108): Xaa is any aa, unknown or other
  misc_feature (113)..(113): Xaa is any aa, unknown or other
  misc_feature (190)..(190): Xaa is any aa, unknown or other
MQEQELLAEDVFSFWLNRSPDADAASGGELVFGGVDPAHFSGNHTYVPVSRKGYWQFDMGDLLIDGHSTGFCAKGCAAIVDSGTSLLAGPTAIIAQVNEAIGADGIIXTECKXVVSQYGEMILDMLIAQTDPQRVCSQVGLCVFDGARSVSEGIESVVGKENLGSDVMCSACQMAVVWIENQSAKTRPRXSYCSTLTSCVSVCRAPTESQQSAARRSPRCPALRSPSQTRPSP

SEQ ID NO: 29295 - DNA, 1732 bp, Zea mays subsp. mays
  misc_feature (1)..(1732): Ceres Seq. ID no. 12373520
aaaatcaaacagaaccggagtgtcagattcagaaacaataggcagcagctagagcaagcagcatcgcagcatcgcagcagacgccaccgtcacgccaccgcgccgagagagaaaagccgagcggtggcaggcgaggggacgcctgccgcggtgggttggtgggtgccgcctccgcatccggtgccgctgctctgttcctcagtccgcccccatttacctcgcatggattcctgcttgcttctccccaactccacgcgccgatcctccaacctccaggagagcgcgacgcgatccaattgaggtccaggaggtggagggtgcctgcgctgtccgtgtgttcccctttgtttccatcccaagcctggccgcgccgccgctggacgccatcgcgcgcctgcacagcgtcttggtgaggtggtcgaagcagcggcggcggccgcagctcgggagacccggcgcgaggaagcggtggccgagccggcggagcgcgatgctgtgggtggcgcgcctgtccggcttgttatccgccgccatggtggtggtggtgctgtcgccgtcgctccagtccttcccgcccgccgaggccatccggtcgtcgcagttcgacggcagcgtccgcttcccgggacagatcgcagggggcgccaggggggtcgccttccgccgcgccccgccgttccgcaatgccgccgactgcggcgccggcgcggacaacggcaccggcgccaatgtctgctacccatggctcgtccacatcgcgattacgctcgacaacgaatacctgaggggctccgtcgccgcggtccactcggtggtgcagcacgccaggtgccccgagagcgtcttcttccacttcctcgtctccgacccggggctcggggacctcgtccgcgcggtgttcccgcagctccggttcaaggtctactacctggaccccgggcgcgtccgcgggctcatctccacgtcggtgcggcaggcgctggagcagccgctgaactacgcgcgcaactacctggccgagctcctggagccgtgcgtgcgccgcgccatctacctggactccgacctcgtcgtcgtggacgacgtcgccaagctgtggcgcaccgacctcggcgggcgcaccgtgggcgcgcccgagtactgccacgccaacttcaccaagtacttcacggggcggttctggtcggaccagcggttcgccgggacgttcgcggggcggcggccgtgctacttcaacacgggcgtcatggtggtcgacctggagcggtggcggcaggcgggctacacgcagcgcatcgagcggtggatggaggtacagaagtcggcggcggggcgcatctacgagctggggtcgctgccgcccttcctgctggtgttcgcggggcacgtggcgccgatcgagcaccggtggaaccagcacggcctcggcggcgacaatgtcctgggcagctgccgcgacctgcacccggggcccgtgagcctgctgcattggtccgggtccggcaagccgtgggcgcggctgggcgccgggcggccgtgcccgctcgatgcgctctgggcacccttcgacctgtacggccccggccccggcggcggcgccgaggaggacctacatgtttttttattcgcaaaaaacaaactatatgttctccatcttttttttcttcttcttttcccctttgggctgttggattaaatgttttgtgttagattgttcatgttcgttctcggc

SEQ ID NO: 29296 - protein, 401 aa, Zea mays subsp. mays
  peptide (1)..(401): Ceres Seq. ID no. 12373521
  misc_feature (1)..(363): NCBI GI NO: 22331906 NR Description: putative protein; protein id: At3g62660
  misc_feature (6)..(363): NCBI GI NO: 11281926 NR Description: hypothetical protein F26K9
  misc_feature (57)..(362): NCBI GI NO: 15235247 NR Description: predicted glycosyl transferase
  misc_feature (1)..(36): NCBI GI NO: 15235247 NR Description: predicted glycosyl transferase
  misc_feature (57)..(362): NCBI GI NO: 21554300 NR Description: putative glycosyl transferase
  misc_feature (1)..(36): NCBI GI NO: 21554300 NR Description: putative glycosyl transferase
  misc_feature (1)..(362): NCBI GI NO: 15217851 NR Description: hypothetical protein; protein id: At1g02720.1
  misc_feature (57)..(333): NCBI GI NO: 20258800 NR Description: putative glycosyl transferase
  misc_feature (1)..(36): NCBI GI NO: 20258800 NR Description: putative glycosyl transferase
  misc_feature (56)..(362): NCBI GI NO: 18409445 NR Description: expressed protein; protein id: At1g70090
MLWVARLSGLLSAAMVVVVLSPSLQSFPPAEAIRSSQFDGSVRFPGQIAGGARGVAFRRAPPFRNAADCGAGADNGTGANVCYPWLVHIAITLDNEYLRGSVAAVHSVVQHARCPESVFFHFLVSDPGLGDLVRAVFPQLRFKVYYLDPGRVRGLISTSVRQALEQPLNYARNYLAELLEPCVRRAIYLDSDLVVVDDVAKLWRTDLGGRTVGAPEYCHANFTKYFTGRFWSDQRFAGTFAGRRPCYFNTGVMVVDLERWRQAGYTQRIERWMEVQKSAAGRIYELGSLPPFLLVFAGHVAPIEHRWNQHGLGGDNVLGSCRDLHPGPVSLLHWSGSGKPWARLGAGRPCPLDALWAPFDLYGPGPGGGAEEDLHVFLFAKNKLYVLHLFFLLLFPFGLLD

SEQ ID NO: 29297 - protein, 387 aa, Zea mays subsp. mays
  peptide (1)..(387): Ceres Seq. ID no. 12373522
  misc_feature (1)..(349): NCBI GI NO: 22331906 NR Description: putative protein; protein id: At3g62660
  misc_feature (1)..(349): NCBI GI NO: 11281926 NR Description: hypothetical protein F26K9
  misc_feature (43)..(348): NCBI GI NO: 15235247 NR Description: predicted glycosyl transferase
  misc_feature (1)..(22): NCBI GI NO: 15235247 NR Description: predicted glycosyl transferase
  misc_feature (43)..(348): NCBI GI NO: 21554300 NR Description: putative glycosyl transferase
  misc_feature (1)..(22): NCBI GI NO: 21554300 NR Description: putative glycosyl transferase
  misc_feature (1)..(348): NCBI GI NO: 15217851 NR Description: hypothetical protein; protein id: At1g02720.1
  misc_feature (43)..(319): NCBI GI NO: 20258800 NR Description: putative glycosyl transferase
  misc_feature (1)..(22): NCBI GI NO: 20258800 NR Description: putative glycosyl transferase
  misc_feature (42)..(348): NCBI GI NO: 18409445 NR Description: expressed protein; protein id: At1g70090
MVVVVLSPSLQSFPPAEAIRSSQFDGSVRFPGQIAGGARGVAFRRAPPFRNAADCGAGADNGTGANVCYPWLVHIAITLDNEYLRGSVAAVHSVVQHARCPESVFFHFLVSDPGLGDLVRAVFPQLRFKVYYLDPGRVRGLISTSVRQALEQPLNYARNYLAELLEPCVRRAIYLDSDLVVVDDVAKLWRTDLGGRTVGAPEYCHANFTKYFTGRFWSDQRFAGTFAGRRPCYFNTGVMVVDLERWRQAGYTQRIERWMEVQKSAAGRIYELGSLPPFLLVFAGHVAPIEHRWNQHGLGGDNVLGSCRDLHPGPVSLLHWSGSGKPWARLGAGRPCPLDALWAPFDLYGPGPGGGAEEDLHVFLFAKNKLYVLHLFFLLLFPFGLLD

SEQ ID NO: 29298 - protein, 322 aa, Zea mays subsp. mays
  peptide (1)..(322): Ceres Seq. ID no. 12373523
MARPHRDYARQRIPEGLRRRGPLGGAARQVPRERLLPLPRLRPGARGPRPRGVPAAPVQGLLPGPRARPRAHLHVGAAGAGAAAELRAQLPGRAPGAVRAPRHLPGLRPRRRGRRRQAVAHRPRRAHRGRARVLPRQLHQVLHGAVLVGPAVRRDVRGAAAVLLQHGRHGGRPGAVAAGGLHAAHRAVDGGTEVGGGAHLRAGVAAALPAGVRGARGADRAPVEPARPRRRQCPGQLPRPAPGAREPAALVRVRQAVGAAGRRAAVPARCALGTLRPVRPRPRRRRRGGPTCFFIRKKQTICSPSFFSSSFPLWAVGLNVLC

SEQ ID NO: 29299 - DNA, 1901 bp, Zea mays subsp. mays
  misc_feature (1)..(1901): Ceres Seq. ID no. 12372730
  misc_feature (1137)..(1137): n is a, c, t, g, unknown, or other
gcacgagaccattacctagaacatcctaatcgaaaaatcgatacgatgcatgaaaaaggcttaaagagcgcatgcaagctaagcagccatgcccatgccaagatctttccttctccacctcctccttgtcgccagcggcatcgccaatgccggcggcgccgatgacgccctctcgaaggagcccacgccctcctcattccagggagaatggcagctcctccacgcgagcatcggcgtctcggcgatgcacatgcagctgctcccgggagacttggttctcatgttcgaccgcaccgacacgggactctccaacatctcgctcgccgcgctggcgccgtgcgcggcgacccccgacagcgccgactgcacggcgcactcggtgctcctcgacctccgctccaacgtgctgcacccgtacccgctcgccaccaacccgtggtgctcctcgggcgcgctcctccccaacggcacgctcctccagaccggcggcttctccaacggcgaccgcgtcgcgcggctcttctccccggccacggggctgggtcgagctcccgtcgttcctcgccgcgcggaggtggtacgccaccgacatgatccttcccgacgggcgcgtgctcatcctcggcgggcggcgacagttcaacctcgagtacttcccgcacgacggcgcggcgccggcgctgacgttcttcccgttcctggacgagaccacagagccggacgccgagaacaacctgtacccgttcctccacctcctccccgacggcaccgtcttcgtcttcgccaacgaccgcgccgtcgtcttcgacccctacaaccgcgccccgctccggtggctccccgccgtcccgggcggcgtgccgaggaactacccgtcgtccggctcgtccgtgctcctcccgctccgcccggacgcgcccgagcacgccgaggtgctggtctgcggcggcgcgccgcgcggcgcgtaccagctggcgctgcggaacggcacgttcgtgcccgccgaccggacctgcgcccgcgtcgcgccgacggacccggacccagtgtgggcgatcgaggagatgccgctggccagggtgatgggcgacatggtgctgctccccacgggcgacgtgctgatcgtgaacggcgcgncggcggggaccgccgggtgggagctgggccgggagcccgtcacgcggccggtgctgtacaggcccgacgcgccactgggcgcgcggttcgaggcgtcgctggcggcgtcggtggtcccgcgcatgtaccactcgtcggccgcgctggacacgtacggccgcgtgctcgtgggcggcagcaacccgcacgtcgggtacgtgttcaccaacgtgacgcaccccacggagctgagcctggaggcgttcctgccgccgtacatggacccacggcacgacggcgcgcggccgcgggtgctggcggcgccggcagaggtcgggtacggcgaggccacggccgtgcggttcgggatacccgcgggggcggcggatggcgcggctacgggcgaagaggtgcgggtggccgcggtggctccggcgtttgcgacgcactcgttcgggatgaaccagcgcgtggtggagctcgcggtggtgaggatcgcgcagctggacgtcggtgtttacgaggtcgaggtcgccgcgccaccgacgcccggggtggcgccgcccgggtactacatgtggttcgtagtgcacgccggcgtgcccagcagcgccgcgtgggtgcgcatgcggccgctaggaacaggcgcctgagtagctcagactgagggctgatttggtcctcgttggtcaccaaaccagccccgagactttttgcgttctccatgtgtgttttgacttcagtaggacagattcaggttcaactgcacatcaaggtttgcaatg

SEQ ID NO: 29300 - protein, 565 aa, Zea mays subsp. mays
  peptide (1)..(565): Ceres Seq. ID no. 12372731
  misc_feature (15)..(147): Pfam Name: Pfam Description:  Equine herpesvirus glycoprotein gp2
  misc_feature (157)..(558): NCBI GI NO: 25352602 NR Description: F14L17.20 protein - Arabidopsis thaliana
  misc_feature (157)..(555): NCBI GI NO: 15223754 NR Description: hypothetical protein; protein id: At1g14430.1
  misc_feature (157)..(558): NCBI GI NO: 15230360 NR Description: putative protein; protein id: At3g57620.1
  misc_feature (157)..(559): NCBI GI NO: 15222300 NR Description: unknown protein; protein id: At1g75620.1
  misc_feature (157)..(558): NCBI GI NO: 15223699 NR Description: unknown protein; protein id: At1g19900
  misc_feature (157)..(558): NCBI GI NO: 25352604 NR Description: hypothetical protein F6F9.4
  misc_feature (157)..(558): NCBI GI NO: 34911116 NR Description: putative glyoxal oxidase
  misc_feature (157)..(558): NCBI GI NO: 15241135 NR Description: putative protein; protein id: At5g19580
  misc_feature (157)..(558): NCBI GI NO: 19310437 NR Description: AT5g19580/T20D1_100 [Arabidopsis thaliana]
  misc_feature (157)..(558): NCBI GI NO: 15232379 NR Description: putative protein; protein id: At3g53950
  misc_feature (356)..(356): Xaa is any aa, unknown or other
MQAKQPCPCQDLSFSTSSLSPAASPMPAAPMTPSRRSPRPPHSRENGSSSTRASASRRCTCSCSRETWFSCSTAPTRDSPTSRSPRWRRARRPPTAPTARRTRCSSTSAPTCCTRTRSPPTRGAPRARSSPTARSSRPAASPTATASRGSSPRPRGWVELPSFLAARRWYATDMILPDGRVLILGGRRQFNLEYFPHDGAAPALTFFPFLDETTEPDAENNLYPFLHLLPDGTVFVFANDRAVVFDPYNRAPLRWLPAVPGGVPRNYPSSGSSVLLPLRPDAPEHAEVLVCGGAPRGAYQLALRNGTFVPADRTCARVAPTDPDPVWAIEEMPLARVMGDMVLLPTGDVLIVNGAXAGTAGWELGREPVTRPVLYRPDAPLGARFEASLAASVVPRMYHSSAALDTYGRVLVGGSNPHVGYVFTNVTHPTELSLEAFLPPYMDPRHDGARPRVLAAPAEVGYGEATAVRFGIPAGAADGAATGEEVRVAAVAPAFATHSFGMNQRVVELAVVRIAQLDVGVYEVEVAAPPTPGVAPPGYYMWFVVHAGVPSSAAWVRMRPLGTGA

SEQ ID NO: 29301 - protein, 564 aa, Zea mays subsp. mays
  peptide (1)..(564): Ceres Seq. ID no. 12372732
  misc_feature (24)..(150): NCBI GI NO: 25352602 NR Description: F14L17.20 protein - Arabidopsis thaliana
  misc_feature (24)..(150): NCBI GI NO: 15223754 NR Description: hypothetical protein; protein id: At1g14430.1
  misc_feature (41)..(147): NCBI GI NO: 15230360 NR Description: putative protein; protein id: At3g57620.1
  misc_feature (35)..(147): NCBI GI NO: 15222300 NR Description: unknown protein; protein id: At1g75620.1
  misc_feature (35)..(147): NCBI GI NO: 15223699 NR Description: unknown protein; protein id: At1g19900
  misc_feature (53)..(147): NCBI GI NO: 25352604 NR Description: hypothetical protein F6F9.4
  misc_feature (33)..(146): NCBI GI NO: 34911116 NR Description: putative glyoxal oxidase
  misc_feature (35)..(146): NCBI GI NO: 15241135 NR Description: putative protein; protein id: At5g19580
  misc_feature (35)..(146): NCBI GI NO: 19310437 NR Description: AT5g19580/T20D1_100 [Arabidopsis thaliana]
  misc_feature (39)..(147): NCBI GI NO: 15232379 NR Description: putative protein; protein id: At3g53950
  misc_feature (350)..(350): Xaa is any aa, unknown or other
MPMPRSFLLHLLLVASGIANAGGADDALSKEPTPSSFQGEWQLLHASIGVSAMHMQLLPGDLVLMFDRTDTGLSNISLAALAPCAATPDSADCTAHSVLLDLRSNVLHPYPLATNPWCSSGALLPNGTLLQTGGFSNGDRVARLFSPATGLGRAPVVPRRAEVVRHRHDPSRRARAHPRRAATVQPRVLPARRRGAGADVLPVPGRDHRAGRREQPVPVPPPPPRRHRLRLRQRPRRRLRPLQPRPAPVAPRRPGRRAEELPVVRLVRAPPAPPGRARARRGAGLRRRAARRVPAGAAERHVRARRPDLRPRRADGPGPSVGDRGDAAGQGDGRHGAAPHGRRADRERRXGGDRRVGAGPGARHAAGAVQARRATGRAVRGVAGGVGGPAHVPLVGRAGHVRPRARGRQQPARRVRVHQRDAPHGAEPGGVPAAVHGPTARRRAAAGAGGAGRGRVRRGHGRAVRDTRGGGGWRGYGRRGAGGRGGSGVCDALVRDEPARGGARGGEDRAAGRRCLRGRGRRATDARGGAARVLHVVRSARRRAQQRRVGAHAAARNRRLSSSD

SEQ ID NO: 29302 - protein, 562 aa, Zea mays subsp. mays
  peptide (1)..(562): Ceres Seq. ID no. 12372733
  misc_feature (22)..(148): NCBI GI NO: 25352602 NR Description: F14L17.20 protein - Arabidopsis thaliana
  misc_feature (22)..(148): NCBI GI NO: 15223754 NR Description: hypothetical protein; protein id: At1g14430.1
  misc_feature (39)..(145): NCBI GI NO: 15230360 NR Description: putative protein; protein id: At3g57620.1
  misc_feature (33)..(145): NCBI GI NO: 15222300 NR Description: unknown protein; protein id: At1g75620.1
  misc_feature (33)..(145): NCBI GI NO: 15223699 NR Description: unknown protein; protein id: At1g19900
  misc_feature (51)..(145): NCBI GI NO: 25352604 NR Description: hypothetical protein F6F9.4
  misc_feature (31)..(144): NCBI GI NO: 34911116 NR Description: putative glyoxal oxidase
  misc_feature (33)..(144): NCBI GI NO: 15241135 NR Description: putative protein; protein id: At5g19580
  misc_feature (33)..(144): NCBI GI NO: 19310437 NR Description: AT5g19580/T20D1_100 [Arabidopsis thaliana]
  misc_feature (37)..(145): NCBI GI NO: 15232379 NR Description: putative protein; protein id: At3g53950
  misc_feature (348)..(348): Xaa is any aa, unknown or other
MPRSFLLHLLLVASGIANAGGADDALSKEPTPSSFQGEWQLLHASIGVSAMHMQLLPGDLVLMFDRTDTGLSNISLAALAPCAATPDSADCTAHSVLLDLRSNVLHPYPLATNPWCSSGALLPNGTLLQTGGFSNGDRVARLFSPATGLGRAPVVPRRAEVVRHRHDPSRRARAHPRRAATVQPRVLPARRRGAGADVLPVPGRDHRAGRREQPVPVPPPPPRRHRLRLRQRPRRRLRPLQPRPAPVAPRRPGRRAEELPVVRLVRAPPAPPGRARARRGAGLRRRAARRVPAGAAERHVRARRPDLRPRRADGPGPSVGDRGDAAGQGDGRHGAAPHGRRADRERRXGGDRRVGAGPGARHAAGAVQARRATGRAVRGVAGGVGGPAHVPLVGRAGHVRPRARGRQQPARRVRVHQRDAPHGAEPGGVPAAVHGPTARRRAAAGAGGAGRGRVRRGHGRAVRDTRGGGGWRGYGRRGAGGRGGSGVCDALVRDEPARGGARGGEDRAAGRRCLRGRGRRATDARGGAARVLHVVRSARRRAQQRRVGAHAAARNRRLSSSD

SEQ ID NO: 29303 - DNA, 1279 bp, Zea mays subsp. mays
  misc_feature (1)..(1279): Ceres Seq. ID no. 12355346
aaaaatactcccgtgttcttcgaccggcggcggtggtgcgaagcgaggcggtaagggagacgagatgagggggacgaagcggccgctcggcgtggtgacgtcgtgggtgcggcggcagccgcccaaggtgaaggccttccttgccgttgtcaccggcatggccgcgctcgtcttcatccgcttcatcgtccacgaccacgacaacctcttcgtcgctgccgaggctgcgcacgcgctcggcataggcgtcctcatctacaagctaaccaaggagaagacctgcgccggactatccctcaagtctcaggatttaactgcattatttctagctgttagactgtactgcagctttgtcatggagtatgacatccatacaattctggacactgctacacttgtagccacactgtttgttatttatatgatacggttcaaactgaggtcaacttatatggtggataaggataactttgcgttgtattatgtggtgttaccgtgtgctggactggcactacttattcatccgtcaacatctcataacattgtgaaccggatctcctgggggttctgtgtttacttggaagctgtttcagtgcttccgcagttacacttgatgcaaaatactaagattgttgaaccctttacagctcactatgtatttgcattgggagttgcaaggtttcttagctgcgcccactgggttctacaggttttggacacgcgtggtcgtctgttgacagctcttggctatggtttgtggccgtctatggtgcttttatcagaaatcgtgcagacattcatccttgcagatttctgctactactatgtgaagagtcttgttggtgggcaactggtgctacggcttccctcaggggtggtgtaagaagtgcagaaggatactttgaataacagttatgctctagtgcccaacctgggagccttttttttagctgatgatgttgcaagtaatgactatgtattacaaaattgctgcaagggtcctcttaaaacatagtttgtcattgagacttcatagctgcgccgtttcttgatgcccaatctccgagtactagcttcgtgtgactgtcgtggtggtcttagaatcaggtggttagtgatctcattggattatagtagtataattatataatgctttcatatgaaacagattgatcttgatgtatcagcagaactagccacgtgaaaatggttggaccaaggtcatcaggtttgtatttacttaacattgggattatcaataggggttcctttctggtcc

SEQ ID NO: 29304 - protein, 293 aa, Zea mays subsp. mays
  peptide (1)..(293): Ceres Seq. ID no. 12355347
  misc_feature (68)..(279): Pfam Name: Pfam Description:  ER lumen protein retaining receptor
  misc_feature (22)..(293): NCBI GI NO: 15222871 NR Description: ER lumen protein retaining receptor, putative
  misc_feature (25)..(293): NCBI GI NO: 18420309 NR Description: expressed protein; protein id: At4g38790
  misc_feature (26)..(293): NCBI GI NO: 18399619 NR Description: putative ER lumen protein retaining receptor
  misc_feature (22)..(293): NCBI GI NO: 9369358 NR Description: F10A5.5 [Arabidopsis thaliana]
  misc_feature (26)..(293): NCBI GI NO: 13430654 NR Description: putative ER lumen protein retaining receptor
  misc_feature (26)..(293): NCBI GI NO: 21537286 NR Description: putative ER lumen protein retaining receptor
  misc_feature (22)..(293): NCBI GI NO: 15223724 NR Description: ER lumen protein-retaining receptor
  misc_feature (22)..(278): NCBI GI NO: 25518365 NR Description: hypothetical protein T20H2
  misc_feature (26)..(277): NCBI GI NO: 25412019 NR Description: probable ER lumen protein retaining receptor
  misc_feature (23)..(289): NCBI GI NO: 15230808 NR Description: ER lumen protein retaining receptor, putative
KILPCSSTGGGGAKRGGKGDEMRGTKRPLGVVTSWVRRQPPKVKAFLAVVTGMAALVFIRFIVHDHDNLFVAAEAAHALGIGVLIYKLTKEKTCAGLSLKSQDLTALFLAVRLYCSFVMEYDIHTILDTATLVATLFVIYMIRFKLRSTYMVDKDNFALYYVVLPCAGLALLIHPSTSHNIVNRISWGFCVYLEAVSVLPQLHLMQNTKIVEPFTAHYVFALGVARFLSCAHWVLQVLDTRGRLLTALGYGLWPSMVLLSEIVQTFILADFCYYYVKSLVGGQLVLRLPSGVV

SEQ ID NO: 29305 - protein, 272 aa, Zea mays subsp. mays
  peptide (1)..(272): Ceres Seq. ID no. 12355348
  misc_feature (47)..(258): Pfam Name: Pfam Description:  ER lumen protein retaining receptor
  misc_feature (1)..(272): NCBI GI NO: 15222871 NR Description: ER lumen protein retaining receptor, putative
  misc_feature (4)..(272): NCBI GI NO: 18420309 NR Description: expressed protein; protein id: At4g38790
  misc_feature (5)..(272): NCBI GI NO: 18399619 NR Description: putative ER lumen protein retaining receptor
  misc_feature (1)..(272): NCBI GI NO: 9369358 NR Description: F10A5.5 [Arabidopsis thaliana]
  misc_feature (5)..(272): NCBI GI NO: 13430654 NR Description: putative ER lumen protein retaining receptor
  misc_feature (5)..(272): NCBI GI NO: 21537286 NR Description: putative ER lumen protein retaining receptor
  misc_feature (1)..(272): NCBI GI NO: 15223724 NR Description: ER lumen protein-retaining receptor
  misc_feature (1)..(257): NCBI GI NO: 25518365 NR Description: hypothetical protein T20H2
  misc_feature (5)..(256): NCBI GI NO: 25412019 NR Description: probable ER lumen protein retaining receptor
  misc_feature (2)..(268): NCBI GI NO: 15230808 NR Description: ER lumen protein retaining receptor, putative
MRGTKRPLGVVTSWVRRQPPKVKAFLAVVTGMAALVFIRFIVHDHDNLFVAAEAAHALGIGVLIYKLTKEKTCAGLSLKSQDLTALFLAVRLYCSFVMEYDIHTILDTATLVATLFVIYMIRFKLRSTYMVDKDNFALYYVVLPCAGLALLIHPSTSHNIVNRISWGFCVYLEAVSVLPQLHLMQNTKIVEPFTAHYVFALGVARFLSCAHWVLQVLDTRGRLLTALGYGLWPSMVLLSEIVQTFILADFCYYYVKSLVGGQLVLRLPSGVV

SEQ ID NO: 29306 - protein, 241 aa, Zea mays subsp. mays
  peptide (1)..(241): Ceres Seq. ID no. 12355349
  misc_feature (16)..(227): Pfam Name: Pfam Description:  ER lumen protein retaining receptor
  misc_feature (1)..(241): NCBI GI NO: 15222871 NR Description: ER lumen protein retaining receptor, putative
  misc_feature (1)..(241): NCBI GI NO: 18420309 NR Description: expressed protein; protein id: At4g38790
  misc_feature (1)..(241): NCBI GI NO: 18399619 NR Description: putative ER lumen protein retaining receptor
  misc_feature (1)..(241): NCBI GI NO: 9369358 NR Description: F10A5.5 [Arabidopsis thaliana]
  misc_feature (1)..(241): NCBI GI NO: 13430654 NR Description: putative ER lumen protein retaining receptor
  misc_feature (1)..(241): NCBI GI NO: 21537286 NR Description: putative ER lumen protein retaining receptor
  misc_feature (1)..(241): NCBI GI NO: 15223724 NR Description: ER lumen protein-retaining receptor
  misc_feature (1)..(226): NCBI GI NO: 25518365 NR Description: hypothetical protein T20H2
  misc_feature (1)..(225): NCBI GI NO: 25412019 NR Description: probable ER lumen protein retaining receptor
  misc_feature (1)..(237): NCBI GI NO: 15230808 NR Description: ER lumen protein retaining receptor, putative
MAALVFIRFIVHDHDNLFVAAEAAHALGIGVLIYKLTKEKTCAGLSLKSQDLTALFLAVRLYCSFVMEYDIHTILDTATLVATLFVIYMIRFKLRSTYMVDKDNFALYYVVLPCAGLALLIHPSTSHNIVNRISWGFCVYLEAVSVLPQLHLMQNTKIVEPFTAHYVFALGVARFLSCAHWVLQVLDTRGRLLTALGYGLWPSMVLLSEIVQTFILADFCYYYVKSLVGGQLVLRLPSGVV

SEQ ID NO: 29307 - DNA, 1567 bp, Zea mays subsp. mays
  misc_feature (1)..(1567): Ceres Seq. ID no. 12405983
aactctatacagaaaccctggtctgaaagccctcactccaaatctcgcgcactgtcagctgacgccaccgcctgcgccagccctcgccaagccggtgaaaacctcgtgccctccgccgcctccgcccgcctcttccagagtaccgcggtctcatctcctcccgggacgggcatgcagagcacggctgccatcggtctcgttcggccatgcgccgcgcggccactccccacctaccctagcccacggcgcggcgccggcgcgtgcagcggcgccgcacagccgatcctcgcgccccgcggcctctgcctctccgcccgcgccagcctactgccggactcgccgctggaggaggagtaccggagatgcagggccggccggcacgtggccgcggccgggaaggtggcggcggctgatggggccgtagaggaagcggggggagggctcgtcaagacgctgcagctggggtcgctcttcgggctctggtacctcttcaacatctacttcaacatctacaacaagcaggttctgaaggttctgccataccctataaacatcaccacagtgcagtttgccgttggaagtgcccattgctttgtttatgtggatcaccggtatccttaaaaggccaaagatttctggtgcccagctttttgctatccttcctctagctatcgttcataccatgggcaatcttttcacaaacatgagccttggaaaggttgcggtgtcatttacacatactatcaaggccatggaacctttcttctcagttctcctttcagcaattttccttggtgagttgcctacgccttgggttgtgttgtctcttcttccgatcgttggtggtgtggcattggcatcccttactgaggcctcctttaactgggctggattttggagtgcaatggcttcaaatgtaaccttccagtcaaggaatgtgctaagcaagaaacttatggtgaagaaagaggaatctctcgacaacattaatctattttcgataattacagtcatgtcattcttcctgttggccccggtaaccttacttacagaaggtgttaaagttagtccagcagttttgcagtctgctggtttgaacttgaaacagatatacacaaggtcattgattgctgcatgctgcttccatgcataccaacaggtgtcatacatgatcctcgccagggtatccccagtcacacattcagtgggcaattgcgtcaagcgtgtggtggtcattgtgacctcggttctgttcttcaggacccctgtttctcccatcaactcactcggtaccgggatcgctcttgctggagttttcctatactcgcaattgaagaggcttaagcccaagcccaaggctgcttgatcatagacctttgcaggtccatccaatagaacttttgaagttatgctatgccattggaatgattagtgagtgccgtagttagaatgatgtttaaagaagagctaccacttcagcagataatttgtgacttgcttgcattttttggacggatttgttcgtgtattaataattttgcagtgacgatacttctgttgtgctgct

SEQ ID NO: 29308 - protein, 255 aa, Zea mays subsp. mays; identical to SEQ ID NO: 24939
  peptide (1)..(255): Ceres Seq. ID no. 12405984
  misc_feature (1)..(89): Pfam Name: Pfam Description:  Integral membrane protein DUF6
  misc_feature (1)..(255): NCBI GI NO: 7489743 NR Description: glucose-6-phosphate/ phosphate-translocatorprecursor homolog
  misc_feature (1)..(255): NCBI GI NO: 7489742 NR Description: glucose-6-phosphate/ phosphate-translocatorprecursor homolog
  misc_feature (1)..(255): NCBI GI NO: 13991929 NR Description: phosphoenolpyruvate/phosphate translocator
  misc_feature (1)..(255): NCBI GI NO: 29647427 NR Description: putative phosphoenolpyruvate/phosphate translocator
  misc_feature (1)..(253): NCBI GI NO: 7489171 NR Description: phosphate/ phosphoenolpyruvate translocator TABPPT10precursor
  misc_feature (1)..(255): NCBI GI NO: 7489170 NR Description: phosphate/ phosphoenolpyruvate translocatorprecursor
  misc_feature (1)..(255): NCBI GI NO: 1706110 NR Description: Triose phosphate/phosphate translocator
  misc_feature (1)..(255): NCBI GI NO: 7546829 NR Description: phosphate/phosphoenolpyruvate translocator
  misc_feature (1)..(255): NCBI GI NO: 15242801 NR Description: phosphate/ phosphoenolpyruvate translocatorprecursor
  misc_feature (1)..(255): NCBI GI NO: 1778141 NR Description: phosphate/ phosphoenolpyruvate translocatorprecursor

SEQ ID NO: 29309 - protein, 227 aa, Zea mays subsp. mays; identical to SEQ ID NO: 24940
  peptide (1)..(227): Ceres Seq. ID no. 12405985
  misc_feature (1)..(61): Pfam Name: Pfam Description:  Integral membrane protein DUF6
  misc_feature (1)..(227): NCBI GI NO: 7489743 NR Description: glucose-6-phosphate/ phosphate-translocatorprecursor homolog
  misc_feature (1)..(227): NCBI GI NO: 7489742 NR Description: glucose-6-phosphate/ phosphate-translocatorprecursor homolog
  misc_feature (1)..(227): NCBI GI NO: 13991929 NR Description: phosphoenolpyruvate/phosphate translocator
  misc_feature (1)..(227): NCBI GI NO: 29647427 NR Description: putative phosphoenolpyruvate/phosphate translocator
  misc_feature (1)..(225): NCBI GI NO: 7489171 NR Description: phosphate/ phosphoenolpyruvate translocator TABPPT10precursor
  misc_feature (1)..(227): NCBI GI NO: 7489170 NR Description: phosphate/ phosphoenolpyruvate translocatorprecursor
  misc_feature (1)..(227): NCBI GI NO: 1706110 NR Description: Triose phosphate/phosphate translocator
  misc_feature (1)..(227): NCBI GI NO: 7546829 NR Description: phosphate/phosphoenolpyruvate translocator
  misc_feature (1)..(227): NCBI GI NO: 15242801 NR Description: phosphate/ phosphoenolpyruvate translocatorprecursor
  misc_feature (1)..(227): NCBI GI NO: 1778141 NR Description: phosphate/ phosphoenolpyruvate translocatorprecursor

SEQ ID NO: 29310 - protein, 220 aa, Zea mays subsp. mays; identical to SEQ ID NO: 24941
  peptide (1)..(220): Ceres Seq. ID no. 12405986
  misc_feature (1)..(54): Pfam Name: Pfam Description:  Integral membrane protein DUF6
  misc_feature (1)..(220): NCBI GI NO: 7489743 NR Description: glucose-6-phosphate/ phosphate-translocatorprecursor homolog
  misc_feature (1)..(220): NCBI GI NO: 7489742 NR Description: glucose-6-phosphate/ phosphate-translocatorprecursor homolog
  misc_feature (1)..(220): NCBI GI NO: 13991929 NR Description: phosphoenolpyruvate/phosphate translocator
  misc_feature (1)..(220): NCBI GI NO: 29647427 NR Description: putative phosphoenolpyruvate/phosphate translocator
  misc_feature (1)..(218): NCBI GI NO: 7489171 NR Description: phosphate/ phosphoenolpyruvate translocator TABPPT10precursor
  misc_feature (1)..(220): NCBI GI NO: 7489170 NR Description: phosphate/ phosphoenolpyruvate translocatorprecursor
  misc_feature (1)..(220): NCBI GI NO: 1706110 NR Description: Triose phosphate/phosphate translocator
  misc_feature (1)..(220): NCBI GI NO: 7546829 NR Description: phosphate/phosphoenolpyruvate translocator
  misc_feature (1)..(220): NCBI GI NO: 15242801 NR Description: phosphate/ phosphoenolpyruvate translocatorprecursor
  misc_feature (1)..(220): NCBI GI NO: 1778141 NR Description: phosphate/ phosphoenolpyruvate translocatorprecursor

SEQ ID NO: 29311 - DNA, 1555 bp, Zea mays subsp. mays
  misc_feature (1)..(1555): Ceres Seq. ID no. 12352532
ctcttcgccttttcctcccctactttttcctgctactgttcacgctctacagtacggaggctcctacgtgcaggtagctcccaggaccagatccgaaccctaaccctagccaatttggtcggtgatggaagagcacgtgcctcgaggcggcggcggcgggaggcccccgatcccggcggcggcggcgaggaagccggcgctcgcgcggcactcctcttttgtgaggagtcctgcaaacaatacaaagcctgcaactgagagagcttttgaaggcatggacactgaatttatccctattgtacgatctggtgggtgggctgatattggctccaggcacacaatggaggatgtctttatctgctttgataatttcatgcaagattttggaattgaaagttttgaagaaggacccagtgccttttatgggatttttgatgggcatggtggaaagcatgcagctgattttgtgtgcagtaatttaccaaggtttattgtcgaggatgaggattttcctagggagatagtgaaagcaatgtcctctgcattcttgcaggctgatgcttcttttgcagatgcttgttctctgaactgctctctttcttctggtacaactgctcttgcagcacttgtggttgggagatcacttctggtcgcgaatgctggtgactgccgagcagtactttgtcgtcgtggaaaggcaattgagatgtccagggatcacaaaccatcttgcaacagggagaagatacgtattgaggcattgggtggatatgtcgatgatggctacctgaatgggcagcttaatgtcgctcgagcaattggggactggcatatggaaggcatgaaggcatgtggtggtcttggtcctcttactgccgagcctgaggtaatgacaatggatctaactgatgaggacgaattcctgatcatgggctgtgatgggatctgggatgtattcctcagccaaaatgcagtagattttgctcgccgtaagctccaagaacacaatgacccggctgcctgctgtaaagaactagttgatgaggccattaagaggaagagtggtgataacctttctgtggttgtcgtctgcttcaactctaggccgcctcctgttctaacaactcctaggcctcgtgtacagaggagcatatctgcagaaggcctgagagagctgcagagcttccttgatagtttggccgattgacatggggttctagcagccccactataagttttgacattttccatagcttagcttggaaaataggtttagcatgtgctgtctcataacttcgctgagatggctgctgttgagtaatctagagttgtaaaatatgctgcggctaactgtgtcagcagttgagagcgtttatcagttgagagtatttatcagcatgttgactttgtgagtcctgaatgattagtcggcatttcttaggtctccataaatcggtggttcatcgttgtaaaaggctgttaatgcccttggatattttcctgtattgttcgctttggacaagttattaactgggaaaactgctgtttttgctgc

SEQ ID NO: 29312 - protein, 360 aa, Zea mays subsp. mays
  peptide (1)..(360): Ceres Seq. ID no. 12352533
  misc_feature (59)..(317): Pfam Name: Pfam Description:  Protein phosphatase 2C
  misc_feature (12)..(358): NCBI GI NO: 20146108 NR Description: protein phosphatase 2C
  misc_feature (19)..(360): NCBI GI NO: 15224766 NR Description: protein phosphatase 2C
  misc_feature (25)..(356): NCBI GI NO: 21693562 NR Description: DNA-binding protein phosphatase 2C
  misc_feature (1)..(359): NCBI GI NO: 37536524 NR Description: putative protein phosphatase-2C
  misc_feature (55)..(359): NCBI GI NO: 10140768 NR Description: putative protein phosphatase-2C [Oryza sativa]
  misc_feature (27)..(355): NCBI GI NO: 24413992 NR Description: putative DNA-binding protein phosphatase 2C
  misc_feature (53)..(356): NCBI GI NO: 15226152 NR Description: protein phosphatase 2C
  misc_feature (49)..(358): NCBI GI NO: 15230495 NR Description: protein phosphatase 2C
  misc_feature (54)..(356): NCBI GI NO: 25352221 NR Description: phosphoprotein phosphatase (EC 3.1.3.16) 2C
  misc_feature (18)..(356): NCBI GI NO: 15228717 NR Description: protein phosphatase 2C
MEEHVPRGGGGGRPPIPAAAARKPALARHSSFVRSPANNTKPATERAFEGMDTEFIPIVRSGGWADIGSRHTMEDVFICFDNFMQDFGIESFEEGPSAFYGIFDGHGGKHAADFVCSNLPRFIVEDEDFPREIVKAMSSAFLQADASFADACSLNCSLSSGTTALAALVVGRSLLVANAGDCRAVLCRRGKAIEMSRDHKPSCNREKIRIEALGGYVDDGYLNGQLNVARAIGDWHMEGMKACGGLGPLTAEPEVMTMDLTDEDEFLIMGCDGIWDVFLSQNAVDFARRKLQEHNDPAACCKELVDEAIKRKSGDNLSVVVVCFNSRPPPVLTTPRPRVQRSISAEGLRELQSFLDSLAD

SEQ ID NO: 29313 - protein, 310 aa, Zea mays subsp. mays
  peptide (1)..(310): Ceres Seq. ID no. 12352534
  misc_feature (9)..(267): Pfam Name: Pfam Description:  Protein phosphatase 2C
  misc_feature (1)..(308): NCBI GI NO: 20146108 NR Description: protein phosphatase 2C
  misc_feature (1)..(310): NCBI GI NO: 15224766 NR Description: protein phosphatase 2C
  misc_feature (1)..(306): NCBI GI NO: 21693562 NR Description: DNA-binding protein phosphatase 2C
  misc_feature (1)..(309): NCBI GI NO: 37536524 NR Description: putative protein phosphatase-2C
  misc_feature (5)..(309): NCBI GI NO: 10140768 NR Description: putative protein phosphatase-2C [Oryza sativa]
  misc_feature (1)..(305): NCBI GI NO: 24413992 NR Description: putative DNA-binding protein phosphatase 2C
  misc_feature (3)..(306): NCBI GI NO: 15226152 NR Description: protein phosphatase 2C
  misc_feature (1)..(308): NCBI GI NO: 15230495 NR Description: protein phosphatase 2C
  misc_feature (4)..(306): NCBI GI NO: 25352221 NR Description: phosphoprotein phosphatase (EC 3.1.3.16) 2C
  misc_feature (1)..(306): NCBI GI NO: 15228717 NR Description: protein phosphatase 2C
MDTEFIPIVRSGGWADIGSRHTMEDVFICFDNFMQDFGIESFEEGPSAFYGIFDGHGGKHAADFVCSNLPRFIVEDEDFPREIVKAMSSAFLQADASFADACSLNCSLSSGTTALAALVVGRSLLVANAGDCRAVLCRRGKAIEMSRDHKPSCNREKIRIEALGGYVDDGYLNGQLNVARAIGDWHMEGMKACGGLGPLTAEPEVMTMDLTDEDEFLIMGCDGIWDVFLSQNAVDFARRKLQEHNDPAACCKELVDEAIKRKSGDNLSVVVVCFNSRPPPVLTTPRPRVQRSISAEGLRELQSFLDSLAD

SEQ ID NO: 29314 - protein, 288 aa, Zea mays subsp. mays
  peptide (1)..(288): Ceres Seq. ID no. 12352535
  misc_feature (1)..(245): Pfam Name: Pfam Description:  Protein phosphatase 2C
  misc_feature (1)..(286): NCBI GI NO: 20146108 NR Description: protein phosphatase 2C
  misc_feature (1)..(288): NCBI GI NO: 15224766 NR Description: protein phosphatase 2C
  misc_feature (1)..(284): NCBI GI NO: 21693562 NR Description: DNA-binding protein phosphatase 2C
  misc_feature (1)..(287): NCBI GI NO: 37536524 NR Description: putative protein phosphatase-2C
  misc_feature (1)..(287): NCBI GI NO: 10140768 NR Description: putative protein phosphatase-2C [Oryza sativa]
  misc_feature (1)..(283): NCBI GI NO: 24413992 NR Description: putative DNA-binding protein phosphatase 2C
  misc_feature (1)..(284): NCBI GI NO: 15226152 NR Description: protein phosphatase 2C
  misc_feature (1)..(286): NCBI GI NO: 15230495 NR Description: protein phosphatase 2C
  misc_feature (1)..(284): NCBI GI NO: 25352221 NR Description: phosphoprotein phosphatase (EC 3.1.3.16) 2C
  misc_feature (1)..(284): NCBI GI NO: 15228717 NR Description: protein phosphatase 2C
MEDVFICFDNFMQDFGIESFEEGPSAFYGIFDGHGGKHAADFVCSNLPRFIVEDEDFPREIVKAMSSAFLQADASFADACSLNCSLSSGTTALAALVVGRSLLVANAGDCRAVLCRRGKAIEMSRDHKPSCNREKIRIEALGGYVDDGYLNGQLNVARAIGDWHMEGMKACGGLGPLTAEPEVMTMDLTDEDEFLIMGCDGIWDVFLSQNAVDFARRKLQEHNDPAACCKELVDEAIKRKSGDNLSVVVVCFNSRPPPVLTTPRPRVQRSISAEGLRELQSFLDSLAD

SEQ ID NO: 29315 - DNA, 1603 bp, Zea mays subsp. mays
  misc_feature (1)..(1603): Ceres Seq. ID no. 13498922
acaggtcgcaacaaccccaacgagcaaaccccccatttgccaccaaccccgacgaccggcgatgaccggcacggtgtctaagctggcggcgccccgtccggcggcaccgccgctccggccggcgtccctccgcaccgccgccctcgccttcgccccctccgcgcgccgggtccgcgtctccgtcgccgggcgagccaggagccccatcattgcgatggcttcggccaaggaaggaaatggtgcaccgaccaagaggactgcgcttcatgatctctacgagctccagggcctgtccccgtggtacgacaacctatgccgccctgtcacagacttgctgcccattatcgccagcggcgtccgtggagtcaccagcaacccaacgattttccaaaaggccatttcatcgtccagcgcatatgatgatcagttcaagcagctcatttcggctggaaaggacgcggagagcgcttactgggaactcgttataaaggatatccaagatgcgtgcaaactttttgagcccatctacgatgagactgatggggctgatgggtatgtctccgtagaggtgtctcctaggttggcaaatgacactcaaggaactgttgaagcggcaaagtggttacacaaagtggtcaaccgccccaatgtctacataaagatcccagctactgcagaatgtgttccttccatccaggaagttatcgctaatggcattagcgtcaacgtcacgcttattttctcaattgcaagatatgaggctgtgattgatgcttacctcgatgggctagaggcttctggcttgagtgacttatcccgagttactagcgttgcatccttctttgtcagccgagtggacacccttattgacaaaatgcttgacaagattggaacacctgaggcccttgccttgagaggaaaggctgcagtagcacaggccaaactagcaaatcggctctaccagaagaaattctctggcccaaggtgggaggcgttggccaagaaaggtgccaagaaacaaaggttgttgtgggcatccaccggtgtcaagaacccagcttatcctgacactctttatgtggacagtctcatcggacctgacacggtcaacacgatgcccgaccaagctttgcaagcattcatagaccacggcaccgtttcaaggacagttgatgcgaacgtgtctgaggcggaaggtgtatacagtgccttggagaagcttggcatcgactgggaagaggttggaaagcagcttgagctggaaggcgtggactccttcaagaagagctttgacagcctactcgtgagcctgcaggagaagggcaacagcctcaagatggcgagtgtgtaaagctgagaagattgggtacctgcgagtgaacgattttactaaataaaatgctagcttgctggctctcctcttagtttttacgctgtacctttgctctcaattttctgagtcggctttgtatcccaggcttgccagaacgtcattgtgtagccactgttcatggcttgtaattgctacggggtatccgataacgtcattgtggatgaggcctgtttgccctgactcttgaactcaatgtcgccatggtttgct

SEQ ID NO: 29316 - protein, 449 aa, Zea mays subsp. mays
  peptide (1)..(449): Ceres Seq. ID no. 13498923
  misc_feature (98)..(437): Pfam Name: Pfam Description:  Transaldolase
  misc_feature (128)..(445): NCBI GI NO: 34907042 NR Description: putative transaldolase
  misc_feature (71)..(128): NCBI GI NO: 34907042 NR Description: putative transaldolase
  misc_feature (21)..(75): NCBI GI NO: 34907042 NR Description: putative transaldolase
  misc_feature (32)..(449): NCBI GI NO: 7489279 NR Description: transaldolase (EC 2.2.1.2) - potato
  misc_feature (32)..(449): NCBI GI NO: 10441272 NR Description: transaldolase [Lycopersicon esculentum]
  misc_feature (32)..(449): NCBI GI NO: 32481059 NR Description: transaldolase [Lycopersicon esculentum]
  misc_feature (58)..(448): NCBI GI NO: 15240625 NR Description: transaldolase - like protein
  misc_feature (95)..(438): NCBI GI NO: 29832856 NR Description: putative transaldolase
  misc_feature (95)..(441): NCBI GI NO: 29828309 NR Description: putative transaldolase
  misc_feature (95)..(438): NCBI GI NO: 21220422 NR Description: putative transaldolase
QVATTPTSKPPICHQPRRPAMTGTVSKLAAPRPAAPPLRPASLRTAALAFAPSARRVRVSVAGRARSPIIAMASAKEGNGAPTKRTALHDLYELQGLSPWYDNLCRPVTDLLPIIASGVRGVTSNPTIFQKAISSSSAYDDQFKQLISAGKDAESAYWELVIKDIQDACKLFEPIYDETDGADGYVSVEVSPRLANDTQGTVEAAKWLHKVVNRPNVYIKIPATAECVPSIQEVIANGISVNVTLIFSIARYEAVIDAYLDGLEASGLSDLSRVTSVASFFVSRVDTLIDKMLDKIGTPEALALRGKAAVAQAKLANRLYQKKFSGPRWEALAKKGAKKQRLLWASTGVKNPAYPDTLYVDSLIGPDTVNTMPDQALQAFIDHGTVSRTVDANVSEAEGVYSALEKLGIDWEEVGKQLELEGVDSFKKSFDSLLVSLQEKGNSLKMASV

SEQ ID NO: 29317 - protein, 429 aa, Zea mays subsp. mays
  peptide (1)..(429): Ceres Seq. ID no. 13498924
  misc_feature (78)..(417): Pfam Name: Pfam Description:  Transaldolase
  misc_feature (108)..(425): NCBI GI NO: 34907042 NR Description: putative transaldolase
  misc_feature (51)..(108): NCBI GI NO: 34907042 NR Description: putative transaldolase
  misc_feature (1)..(55): NCBI GI NO: 34907042 NR Description: putative transaldolase
  misc_feature (12)..(429): NCBI GI NO: 7489279 NR Description: transaldolase (EC 2.2.1.2) - potato
  misc_feature (12)..(429): NCBI GI NO: 10441272 NR Description: transaldolase [Lycopersicon esculentum]
  misc_feature (12)..(429): NCBI GI NO: 32481059 NR Description: transaldolase [Lycopersicon esculentum]
  misc_feature (38)..(428): NCBI GI NO: 15240625 NR Description: transaldolase - like protein
  misc_feature (75)..(418): NCBI GI NO: 29832856 NR Description: putative transaldolase
  misc_feature (75)..(421): NCBI GI NO: 29828309 NR Description: putative transaldolase
  misc_feature (75)..(418): NCBI GI NO: 21220422 NR Description: putative transaldolase
MTGTVSKLAAPRPAAPPLRPASLRTAALAFAPSARRVRVSVAGRARSPIIAMASAKEGNGAPTKRTALHDLYELQGLSPWYDNLCRPVTDLLPIIASGVRGVTSNPTIFQKAISSSSAYDDQFKQLISAGKDAESAYWELVIKDIQDACKLFEPIYDETDGADGYVSVEVSPRLANDTQGTVEAAKWLHKVVNRPNVYIKIPATAECVPSIQEVIANGISVNVTLIFSIARYEAVIDAYLDGLEASGLSDLSRVTSVASFFVSRVDTLIDKMLDKIGTPEALALRGKAAVAQAKLANRLYQKKFSGPRWEALAKKGAKKQRLLWASTGVKNPAYPDTLYVDSLIGPDTVNTMPDQALQAFIDHGTVSRTVDANVSEAEGVYSALEKLGIDWEEVGKQLELEGVDSFKKSFDSLLVSLQEKGNSLKMASV

SEQ ID NO: 29318 - protein, 378 aa, Zea mays subsp. mays
  peptide (1)..(378): Ceres Seq. ID no. 13498925
  misc_feature (27)..(366): Pfam Name: Pfam Description:  Transaldolase
  misc_feature (57)..(374): NCBI GI NO: 34907042 NR Description: putative transaldolase
  misc_feature (1)..(57): NCBI GI NO: 34907042 NR Description: putative transaldolase
  misc_feature (1)..(378): NCBI GI NO: 7489279 NR Description: transaldolase (EC 2.2.1.2) - potato
  misc_feature (1)..(378): NCBI GI NO: 10441272 NR Description: transaldolase [Lycopersicon esculentum]
  misc_feature (1)..(378): NCBI GI NO: 32481059 NR Description: transaldolase [Lycopersicon esculentum]
  misc_feature (1)..(377): NCBI GI NO: 15240625 NR Description: transaldolase - like protein
  misc_feature (24)..(367): NCBI GI NO: 29832856 NR Description: putative transaldolase
  misc_feature (24)..(370): NCBI GI NO: 29828309 NR Description: putative transaldolase
  misc_feature (24)..(367): NCBI GI NO: 21220422 NR Description: putative transaldolase
  misc_feature (25)..(363): NCBI GI NO: 23019683 NR Description: hypothetical protein [Thermobifida fusca]
MASAKEGNGAPTKRTALHDLYELQGLSPWYDNLCRPVTDLLPIIASGVRGVTSNPTIFQKAISSSSAYDDQFKQLISAGKDAESAYWELVIKDIQDACKLFEPIYDETDGADGYVSVEVSPRLANDTQGTVEAAKWLHKVVNRPNVYIKIPATAECVPSIQEVIANGISVNVTLIFSIARYEAVIDAYLDGLEASGLSDLSRVTSVASFFVSRVDTLIDKMLDKIGTPEALALRGKAAVAQAKLANRLYQKKFSGPRWEALAKKGAKKQRLLWASTGVKNPAYPDTLYVDSLIGPDTVNTMPDQALQAFIDHGTVSRTVDANVSEAEGVYSALEKLGIDWEEVGKQLELEGVDSFKKSFDSLLVSLQEKGNSLKMASV

SEQ ID NO: 29319 - DNA, 1725 bp, Zea mays subsp. mays
  misc_feature (1)..(1725): Ceres Seq. ID no. 12408676
gagatttcgcgctccgttcacccaaaatttccccatctccgacctcccccttcctctccccctgccgctccccgcgccgagaaggagaaccccagccgccgcgcagcgcgccgcccatggcctcctcgtcggagaacgcggctgtgccgccggaggaggagccccaggccccgccgccgccggacacagagcctaccgaggcggcgcccggcgaggcggaggatgagccgcaaaccctagagcgggcgcaggagctcttcgacaggggttccaaggccatcgaggatgaggacttcgtcgacgccgtagactgtctcagccgagcgctcgagatcagggcttcacattatggagagctcgcaccggagtgtgccagcacatacttcaaatatggatgtgccctgctatacaaagctcaggaggagagtgatgttttgggaaatgttcccaagagcttgccaaatgaagactcagtgaagagtacagctactaaagatgacagtggaacctcaaaggtctctggtaccgatgcggaggatgctgcgtcatcagaaaaagttgatgctgaagaaggtcacaactcaaatggcaaaaatcaggagaatgggaatggtgaagttgagaaagatgatgacgacgtcgacgatgatgagaagatgggagatgaagaggataatgatttggatctttcttggaaaatgttggacattgctagggcaatagttgagaagagccaagataacactatggagaaagtaaaaatatattctgctcttgctgaagtggcaacggaaagagaggacatggacaactcactcagtgactatatgaaagctttatccatgttggagcatttggttgagcctgaccatcgtcgagttgtggaattaaacttccgcatttgtttggtttatgaactagtttccaagatcggagaagcaatttcatactgtgcaaaagcaatttcgctatgcaagtcacgcatacagagcctgaaaagttccaaggatgctttgttggctggtatagatggtgatgcatctgctgctgaagctgaaggaggctcagaaaaatctgccattgaaaaagagctagagcagcttactagcatattgcctgatcttgagaagaagcttgaggacctgtctgaagcaaacccaagcgctgacatggatgagatggtgaaggcaatcgtgtccagggtaactgatgtgatgccaaaagctgcatcttttacttcttcccagatggcaacctcaagcaatggattcgactcctcggttatgtctacggcagcgacaaccggaagctctggaagcaccgtgactgaccttggggttgtaggcagaggcgtcaaacgagctagcatcaagccgatctctgctgaacctgctgctaagaaacctgcacttgattcaccatctcaacaaggtgacagcagcatcaactctgaggttgttcctgcaacgcagactggagacgagtcagtatctaagtaaattacaatttcattagccctactgtaatgttaacttgctggaacatattagctgctatgtaaacgcttaagaagggactgctggggccatagactcatcgtgagctgaccattgaaatgttaaattgctgagatcatcatggcggtaaatcatgtctgctatatcaaatatgcttggtgagatgtgtactttctgatttttttgatgtatctgaccgtagtagctc

SEQ ID NO: 29320 - protein, 498 aa, Zea mays subsp. mays
  peptide (1)..(498): Ceres Seq. ID no. 12408677
  misc_feature (82)..(115): Pfam Name: Pfam Description:  TPR Domain
  misc_feature (39)..(498): NCBI GI NO: 38175649 NR Description: tetratricopeptide repeat-containing protein-like
  misc_feature (147)..(498): NCBI GI NO: 32352192 NR Description: hypothetical protein
  misc_feature (61)..(439): NCBI GI NO: 18419996 NR Description: putative protein; protein id: At4g37210.1
  misc_feature (61)..(382): NCBI GI NO: 25407799 NR Description: hypothetical protein AT4g37210
  misc_feature (68)..(337): NCBI GI NO: 4104353 NR Description: nuclear autoantigenic sperm protein autosomalvariant
  misc_feature (66)..(143): NCBI GI NO: 18129310 NR Description: hypothetical protein [Pinus pinaster]
  misc_feature (59)..(489): NCBI GI NO: 123127 NR Description: HISTONE-BINDING PROTEIN N1/N2
  misc_feature (39)..(337): NCBI GI NO: 13435642 NR Description: Unknown (protein for MGC:5829) [Mus musculus]
  misc_feature (68)..(337): NCBI GI NO: 27262630 NR Description: nuclear autoantigenic sperm protein isoform 3
  misc_feature (68)..(337): NCBI GI NO: 30584691 NR Description: Homo sapiens nuclear autoantigenic sperm protein
DFALRSPKISPSPTSPFLSPCRSPRREGEPQPPRSAPPMASSSENAAVPPEEEPQAPPPPDTEPTEAAPGEAEDEPQTLERAQELFDRGSKAIEDEDFVDAVDCLSRALEIRASHYGELAPECASTYFKYGCALLYKAQEESDVLGNVPKSLPNEDSVKSTATKDDSGTSKVSGTDAEDAASSEKVDAEEGHNSNGKNQENGNGEVEKDDDDVDDDEKMGDEEDNDLDLSWKMLDIARAIVEKSQDNTMEKVKIYSALAEVATEREDMDNSLSDYMKALSMLEHLVEPDHRRVVELNFRICLVYELVSKIGEAISYCAKAISLCKSRIQSLKSSKDALLAGIDGDASAAEAEGGSEKSAIEKELEQLTSILPDLEKKLEDLSEANPSADMDEMVKAIVSRVTDVMPKAASFTSSQMATSSNGFDSSVMSTAATTGSSGSTVTDLGVVGRGVKRASIKPISAEPAAKKPALDSPSQQGDSSINSEVVPATQTGDESVSK

SEQ ID NO: 29321 - protein, 460 aa, Zea mays subsp. mays; identical to SEQ ID NO: 24739
  peptide (1)..(460): Ceres Seq. ID no. 12408678
  misc_feature (44)..(77): Pfam Name: Pfam Description:  TPR Domain
  misc_feature (1)..(460): NCBI GI NO: 38175649 NR Description: tetratricopeptide repeat-containing protein-like
  misc_feature (109)..(460): NCBI GI NO: 32352192 NR Description: hypothetical protein
  misc_feature (23)..(401): NCBI GI NO: 18419996 NR Description: putative protein; protein id: At4g37210.1
  misc_feature (23)..(344): NCBI GI NO: 25407799 NR Description: hypothetical protein AT4g37210
  misc_feature (30)..(299): NCBI GI NO: 4104353 NR Description: nuclear autoantigenic sperm protein autosomalvariant
  misc_feature (28)..(105): NCBI GI NO: 18129310 NR Description: hypothetical protein [Pinus pinaster]
  misc_feature (21)..(451): NCBI GI NO: 123127 NR Description: HISTONE-BINDING PROTEIN N1/N2
  misc_feature (1)..(299): NCBI GI NO: 13435642 NR Description: Unknown (protein for MGC:5829) [Mus musculus]
  misc_feature (30)..(299): NCBI GI NO: 27262630 NR Description: nuclear autoantigenic sperm protein isoform 3
  misc_feature (30)..(299): NCBI GI NO: 30584691 NR Description: Homo sapiens nuclear autoantigenic sperm protein

SEQ ID NO: 29322 - protein, 280 aa, Zea mays subsp. mays; identical to SEQ ID NO: 24336
  peptide (1)..(280): Ceres Seq. ID no. 12408679
  misc_feature (1)..(280): NCBI GI NO: 38175649 NR Description: tetratricopeptide repeat-containing protein-like
  misc_feature (1)..(280): NCBI GI NO: 32352192 NR Description: hypothetical protein
  misc_feature (1)..(221): NCBI GI NO: 18419996 NR Description: putative protein; protein id: At4g37210.1
  misc_feature (1)..(164): NCBI GI NO: 25407799 NR Description: hypothetical protein AT4g37210
  misc_feature (1)..(119): NCBI GI NO: 4104353 NR Description: nuclear autoantigenic sperm protein autosomalvariant
  misc_feature (1)..(271): NCBI GI NO: 123127 NR Description: HISTONE-BINDING PROTEIN N1/N2
  misc_feature (1)..(119): NCBI GI NO: 13435642 NR Description: Unknown (protein for MGC:5829) [Mus musculus]
  misc_feature (1)..(119): NCBI GI NO: 27262630 NR Description: nuclear autoantigenic sperm protein isoform 3
  misc_feature (1)..(119): NCBI GI NO: 30584691 NR Description: Homo sapiens nuclear autoantigenic sperm protein
  misc_feature (1)..(268): NCBI GI NO: 28277791 NR Description: Unknown (protein for MGC:56007) [Danio rerio]

SEQ ID NO: 29323 - DNA, 1277 bp, Zea mays subsp. mays
  misc_feature (1)..(1277): Ceres Seq. ID no. 12408673
gcacgagaccattacctagaacatcctaatcgaaaagcaaaatagcaaatttctcggcaaacccgcaattcgcaaacccgcccccaagcccatccctcccgcccgccaggtcccgcgagatctctcacagccccctcagatccgcctcccctcgccgccggcgcgctcgcgcgctttccgcacgcccgccgccatgtcgcacaaccacggcgacacgatcccgctccacccctcgtcggcgcagtccgacatggacgagatcgagagcctcatccacgccgcgccatccccggccaccgtgctccccgcgcggccaccgtctcctacgcgggcctccatccccgtatcctcctctccggccccggcgcccgtccccacgaagccgcctttccccgccgcttccatcccgatctccgtctcccccgttcccgttcccgcgtccgtctccgtccccatcggcgccgacgggtttgggtctccgcccaacacgctcacggagcctgtatgggacaccatcaagcgagacttagcacgcatcgtcagcaatctcaagctcgtcgtcttccccaatccctaccgcgaggaccccggcaaggcgcttagggactgggacctgtggggtcccttcttcttcatcgtcttcctaggcctcacgctctcctggtcggcttccgtgaagaagtctgaagtatttgctgttgcattcgcggtcctggcagctggtgctataattctgaccttgaatgttctgcttctgggggggcacatcatcttcttccaaagcctgagtcttcttggctattgcctatttccattggatgttggtgctctagtttgcatgctgaaggacaatgtcatacttaagattgtcgtggtgacaatcacattggcttggagctcctgggctgcgtatccattcatgagcgctgctgttaacccaaggagaaaagctctggccctatatcctgtcttcctcatgtatatctcagttgggttcctcataattgccattgattaacggggttgagctttgtagtaacatctgaagagttgagagtttccttggatggttgaaccaccagaatacatacaagtttgagtagacaatgcttctatccttgtaccctcgtggagtctttgtgaattgcctcgtaggaattttggtttttacatgatcttgaggcataaggttgtaaaattagtcgaaaatatgtatctgttgtaaagggcatggactttggaccactgaaatggctgtcaagctttcgtatactgcg

SEQ ID NO: 29324 - protein, 274 aa, Zea mays subsp. mays
  peptide (1)..(274): Ceres Seq. ID no. 12408674
  misc_feature (108)..(255): Pfam Name: Pfam Description:  Yip1 domain
  misc_feature (1)..(262): NCBI GI NO: 34908612 NR Description: P0677H08.6
  misc_feature (1)..(274): NCBI GI NO: 7486761 NR Description: hypothetical protein F9N11
  misc_feature (1)..(274): NCBI GI NO: 18417560 NR Description: hypothetical protein common family
  misc_feature (4)..(274): NCBI GI NO: 18398861 NR Description: Expressed protein; protein id: At2g18840
  misc_feature (4)..(274): NCBI GI NO: 21553537 NR Description: unknown [Arabidopsis thaliana]
  misc_feature (68)..(272): NCBI GI NO: 39580726 NR Description: Hypothetical protein CBG08721
  misc_feature (98)..(272): NCBI GI NO: 17509487 NR Description: Yeast YIP1 protein like [Caenorhabditis elegans]
  misc_feature (62)..(271): NCBI GI NO: 26337383 NR Description: unnamed protein product [Mus musculus]
  misc_feature (54)..(271): NCBI GI NO: 28603852 NR Description: hypothetical protein MGC21416 [Homo sapiens]
  misc_feature (94)..(272): NCBI GI NO: 24581631 NR Description: CG3652-PA [Drosophila melanogaster]
MSHNHGDTIPLHPSSAQSDMDEIESLIHAAPSPATVLPARPPSPTRASIPVSSSPAPAPVPTKPPFPAASIPISVSPVPVPASVSVPIGADGFGSPPNTLTEPVWDTIKRDLARIVSNLKLVVFPNPYREDPGKALRDWDLWGPFFFIVFLGLTLSWSASVKKSEVFAVAFAVLAAGAIILTLNVLLLGGHIIFFQSLSLLGYCLFPLDVGALVCMLKDNVILKIVVVTITLAWSSWAAYPFMSAAVNPRRKALALYPVFLMYISVGFLIIAID

SEQ ID NO: 29325 - protein, 255 aa, Zea mays subsp. mays
  peptide (1)..(255): Ceres Seq. ID no. 12408675
  misc_feature (89)..(236): Pfam Name: Pfam Description:  Yip1 domain
  misc_feature (1)..(243): NCBI GI NO: 34908612 NR Description: P0677H08.6
  misc_feature (1)..(255): NCBI GI NO: 7486761 NR Description: hypothetical protein F9N11
  misc_feature (1)..(255): NCBI GI NO: 18417560 NR Description: hypothetical protein common family
  misc_feature (1)..(255): NCBI GI NO: 18398861 NR Description: Expressed protein; protein id: At2g18840
  misc_feature (1)..(255): NCBI GI NO: 21553537 NR Description: unknown [Arabidopsis thaliana]
  misc_feature (49)..(253): NCBI GI NO: 39580726 NR Description: Hypothetical protein CBG08721
  misc_feature (79)..(253): NCBI GI NO: 17509487 NR Description: Yeast YIP1 protein like [Caenorhabditis elegans]
  misc_feature (43)..(252): NCBI GI NO: 26337383 NR Description: unnamed protein product [Mus musculus]
  misc_feature (35)..(252): NCBI GI NO: 28603852 NR Description: hypothetical protein MGC21416 [Homo sapiens]
  misc_feature (75)..(253): NCBI GI NO: 24581631 NR Description: CG3652-PA [Drosophila melanogaster]
MDEIESLIHAAPSPATVLPARPPSPTRASIPVSSSPAPAPVPTKPPFPAASIPISVSPVPVPASVSVPIGADGFGSPPNTLTEPVWDTIKRDLARIVSNLKLVVFPNPYREDPGKALRDWDLWGPFFFIVFLGLTLSWSASVKKSEVFAVAFAVLAAGAIILTLNVLLLGGHIIFFQSLSLLGYCLFPLDVGALVCMLKDNVILKIVVVTITLAWSSWAAYPFMSAAVNPRRKALALYPVFLMYISVGFLIIAID

SEQ ID NO: 29326 - DNA, 803 bp, Zea mays subsp. mays
  misc_feature (1)..(803): Ceres Seq. ID no. 12381210
aatttctcccgaaaaagggtgaagagcagaacgacgaggagattgcttggtgagaggagttggtgaggagaggtcgcgaccatggagaaccttgctctgctttggggcatcatcggcccgggcgtgtccggcgccatcttcggggccggatggtggttctgggtggacgcggtcgtttgcagcgcggtccaggtctccttcctccactaccttccagggatcttcgcttcgctggcggcgctcatgttcaattgcgtgaacaaggatgagatcggatacgactattactcaccctacggggacgattcagagtggagagtgaagctctggctttttgtggcatatgtcgtttcttttgtctgtttagctggatccgtgggtttattggtgcaagatgcactgacgaacaagggcccttctgtctggactggtgttgctggcgttctgcaatgtgttcttgtgttgataagcggcctggtgtattggacatgccactcagaagattaagggcgtaatgtcatgagcagacttgcaaggttggtcacagttgtgtgaaggaaattatttctggcaacatatgattttgtgtgatggaaatgacggacactgttcactgctgaatgggatgactagatgtttcatctgtgcatatctgacttttggaaaatgatgtttcttaacaccggtgcatgtgttagccccagcttcttgtgagttgccaatctgtgatgcggtcgtgatcatgcaaatcttttggctaaagctgaaaccggctgcagcaacaagctagtgctactatttac

SEQ ID NO: 29327 - protein, 141 aa, Zea mays subsp. mays
  peptide (1)..(141): Ceres Seq. ID no. 12381211
  misc_feature (3)..(139): Pfam Name: UPF0220 Pfam Description: Uncharacterised protein family
  misc_feature (3)..(140): NCBI GI NO: 18400231 NR Description: expressed protein; protein id: At1g36980
  misc_feature (3)..(85): NCBI GI NO: 25373092 NR Description: protein T32E20.29
  misc_feature (15)..(134): NCBI GI NO: 24657484 NR Description: CG15012-PB [Drosophila melanogaster]
  misc_feature (16)..(141): NCBI GI NO: 7657595 NR Description: small membrane protein 1 [Homo sapiens]
  misc_feature (12)..(141): NCBI GI NO: 40738694 NR Description: hypothetical protein AN6544.2
  misc_feature (16)..(141): NCBI GI NO: 27732805 NR Description: similar to Small membrane protein 1
  misc_feature (16)..(141): NCBI GI NO: 34610239 NR Description: small membrane protein 1 [Mus musculus]
  misc_feature (37)..(134): NCBI GI NO: 38047947 NR Description: similar to Drosophila melanogaster CG15012
MENLALLWGIIGPGVSGAIFGAGWWFWVDAVVCSAVQVSFLHYLPGIFASLAALMFNCVNKDEIGYDYYSPYGDDSEWRVKLWLFVAYVVSFVCLAGSVGLLVQDALTNKGPSVWTGVAGVLQCVLVLISGLVYWTCHSED

SEQ ID NO: 29328 - protein, 87 aa, Zea mays subsp. mays
  peptide (1)..(87): Ceres Seq. ID no. 12381212
  misc_feature (1)..(85): Pfam Name: UPF0220 Pfam Description: Uncharacterised protein family
  misc_feature (1)..(86): NCBI GI NO: 18400231 NR Description: expressed protein; protein id: At1g36980
  misc_feature (1)..(31): NCBI GI NO: 25373092 NR Description: protein T32E20.29
  misc_feature (1)..(80): NCBI GI NO: 24657484 NR Description: CG15012-PB [Drosophila melanogaster]
  misc_feature (1)..(87): NCBI GI NO: 7657595 NR Description: small membrane protein 1 [Homo sapiens]
  misc_feature (1)..(87): NCBI GI NO: 40738694 NR Description: hypothetical protein AN6544.2
  misc_feature (1)..(87): NCBI GI NO: 27732805 NR Description: similar to Small membrane protein 1
  misc_feature (1)..(87): NCBI GI NO: 34610239 NR Description: small membrane protein 1 [Mus musculus]
  misc_feature (1)..(80): NCBI GI NO: 38047947 NR Description: similar to Drosophila melanogaster CG15012
MFNCVNKDEIGYDYYSPYGDDSEWRVKLWLFVAYVVSFVCLAGSVGLLVQDALTNKGPSVWTGVAGVLQCVLVLISGLVYWTCHSED

SEQ ID NO: 29329 - DNA, 1175 bp, Zea mays subsp. mays
  misc_feature (1)..(1175): Ceres Seq. ID no. 12408185
aacaccaacctcagcacaccaaggagagtacgtggaggagcagccatggcttcatcggtggccgccgcggcgagcacattcctgggcacccgcctggcggacccggcgccacagaacgggcgcatcgtggcccggttcgggttcgggttgggcggcaaggcgaagcctgctccgaagaaggtggcgaagacatcgacctcctctgaccggccgctgtggttccccggcgccgtggcgcccgactacctggacggctcgctggtcggcgactacgggttcgacccgttcggtctcgggaagcccgtggagtacctgcagttcgagttggactcgctggaccagaacctggccaagaatgaggccggcggcatcatcggcacccggttcgagtcctccgaagtcaagtccaccccgttgcagccctacagcgaggtgttcggcctccagcggttccgcgagtgcgagctcatccacggccgctgggccatgctcgccaccctcggcgccctctccgtcgagtggctcaccggcgtcacctggcaggacgccggcaaggtggagctggtggacgggtcctcctacctgggccagccgctgccgttctccatctcgacgctcatctggatcgaggtgctcgtgatcggctacatcgagttccagcgcaacgccgagctcgacccggagaagaggctgtaccccggcggctcctacttcgacccgctcggcctggcggccgaccctgagaagaaggagcggctgcagctggcggagatcaagcacgcgcgcctcgccatggtcgccttcctcggcttcgccgtgcaggccgccgccaccggcaaggggccgctcaacaactgggccacccacctgagcgacccgctccacactaccatcttcgacacgttcggagggtcctcttaagcccgccattgctccgccccgtccatcgaccggaacgtgttcttggattaattaactacgatctctatgagcctggggatggatcaacccgtcgtgcgtggtctcgttttgtgatgagtgggagagagaggatgacaagatcgatcctttgttaatggagatctcgttaattaggagagctaccgctgggacttggtggtttgtaatatatgatccaaccagtgatgaatcaatgcattcacttgtgtacacat

SEQ ID NO: 29330 - protein, 306 aa, Zea mays subsp. mays
  peptide (1)..(306): Ceres Seq. ID no. 12408186
  misc_feature (78)..(276): Pfam Name: Pfam Description:  Chlorophyll A-B binding protein
  misc_feature (16)..(306): NCBI GI NO: 7443231 NR Description: chlorophyll a/b-binding protein CP29 precursor -maize
  misc_feature (16)..(306): NCBI GI NO: 7443230 NR Description: probable chlorophyll a/b-binding protein - rice
  misc_feature (16)..(305): NCBI GI NO: 445116 NR Description: light-harvesting complex IIa protein;
  misc_feature (15)..(306): NCBI GI NO: 4689382 NR Description: chlorophyll a/b binding protein CP29
  misc_feature (15)..(305): NCBI GI NO: 15241005 NR Description: light-harvesting chlorophyll a/b binding protein
  misc_feature (15)..(305): NCBI GI NO: 20260162 NR Description: chlorophyll a/b-binding protein CP29
  misc_feature (15)..(305): NCBI GI NO: 13877547 NR Description: chlorophyll a/b-binding protein CP29
  misc_feature (15)..(305): NCBI GI NO: 15081739 NR Description: AT5g01530/F7A7_50 [Arabidopsis thaliana]
  misc_feature (17)..(305): NCBI GI NO: 15231990 NR Description: putative chlorophyll a/b-binding protein
  misc_feature (16)..(288): NCBI GI NO: 15225630 NR Description: light-harvesting chlorophyll a/b binding protein
NTNLSTPRRVRGGAAMASSVAAAASTFLGTRLADPAPQNGRIVARFGFGLGGKAKPAPKKVAKTSTSSDRPLWFPGAVAPDYLDGSLVGDYGFDPFGLGKPVEYLQFELDSLDQNLAKNEAGGIIGTRFESSEVKSTPLQPYSEVFGLQRFRECELIHGRWAMLATLGALSVEWLTGVTWQDAGKVELVDGSSYLGQPLPFSISTLIWIEVLVIGYIEFQRNAELDPEKRLYPGGSYFDPLGLAADPEKKERLQLAEIKHARLAMVAFLGFAVQAAATGKGPLNNWATHLSDPLHTTIFDTFGGSS

SEQ ID NO: 29331 - protein, 291 aa, Zea mays subsp. mays
  peptide (1)..(291): Ceres Seq. ID no. 12408187
  misc_feature (63)..(261): Pfam Name: Pfam Description:  Chlorophyll A-B binding protein
  misc_feature (1)..(291): NCBI GI NO: 7443231 NR Description: chlorophyll a/b-binding protein CP29 precursor -maize
  misc_feature (1)..(291): NCBI GI NO: 7443230 NR Description: probable chlorophyll a/b-binding protein - rice
  misc_feature (1)..(290): NCBI GI NO: 445116 NR Description: light-harvesting complex IIa protein;
  misc_feature (1)..(291): NCBI GI NO: 4689382 NR Description: chlorophyll a/b binding protein CP29
  misc_feature (1)..(290): NCBI GI NO: 15241005 NR Description: light-harvesting chlorophyll a/b binding protein
  misc_feature (1)..(290): NCBI GI NO: 20260162 NR Description: chlorophyll a/b-binding protein CP29
  misc_feature (1)..(290): NCBI GI NO: 13877547 NR Description: chlorophyll a/b-binding protein CP29
  misc_feature (1)..(290): NCBI GI NO: 15081739 NR Description: AT5g01530/F7A7_50 [Arabidopsis thaliana]
  misc_feature (2)..(290): NCBI GI NO: 15231990 NR Description: putative chlorophyll a/b-binding protein
  misc_feature (1)..(273): NCBI GI NO: 15225630 NR Description: light-harvesting chlorophyll a/b binding protein
MASSVAAAASTFLGTRLADPAPQNGRIVARFGFGLGGKAKPAPKKVAKTSTSSDRPLWFPGAVAPDYLDGSLVGDYGFDPFGLGKPVEYLQFELDSLDQNLAKNEAGGIIGTRFESSEVKSTPLQPYSEVFGLQRFRECELIHGRWAMLATLGALSVEWLTGVTWQDAGKVELVDGSSYLGQPLPFSISTLIWIEVLVIGYIEFQRNAELDPEKRLYPGGSYFDPLGLAADPEKKERLQLAEIKHARLAMVAFLGFAVQAAATGKGPLNNWATHLSDPLHTTIFDTFGGSS

SEQ ID NO: 29332 - protein, 212 aa, Zea mays subsp. mays
  peptide (1)..(212): Ceres Seq. ID no. 12408188
  misc_feature (90)..(212): Pfam Name: Pfam Description:  Equine herpesvirus glycoprotein gp2
  misc_feature (66)..(212): NCBI GI NO: 23017082 NR Description: hypothetical protein [Thermobifida fusca]
  misc_feature (74)..(212): NCBI GI NO: 23017082 NR Description: hypothetical protein [Thermobifida fusca]
  misc_feature (103)..(212): NCBI GI NO: 23510008 NR Description: hypothetical protein [Plasmodium falciparum 3D7]
  misc_feature (130)..(212): NCBI GI NO: 23017082 NR Description: hypothetical protein [Thermobifida fusca]
  misc_feature (76)..(212): NCBI GI NO: 23510008 NR Description: hypothetical protein [Plasmodium falciparum 3D7]
TPTSAHQGEYVEEQPWLHRWPPRRAHSWAPAWRTRRHRTGASWPGSGSGWAARRSLLRRRWRRHRPPLTGRCGSPAPWRPTTWTARWSATTGSTRSVSGSPWSTCSSSWTRWTRTWPRMRPAASSAPGSSPPKSSPPRCSPTARCSASSGSASASSSTAAGPCSPPSAPSPSSGSPASPGRTPARWSWWTGPPTWASRCRSPSRRSSGSRCS

SEQ ID NO: 29333 - DNA, 1163 bp, Zea mays subsp. mays
  misc_feature (1)..(1163): Ceres Seq. ID no. 12483001
aaaagtagaaaaagcgaaaagcctagtagcacaaggctacaagcctacaagcaaccgcgtccgcgtgtggagcaaggaaggcgaggggagccgagcgggcaaccggcggcgacagacatggcggagcagcacaaggaggagtcgggcgtgacagtgctggacaagatctccgacaagctccacgggcgcgggggcggctcgtcttcgtcgtcggactcggacgacgagcgctcgtcggcgacggccgccgtgaaggccaagatctaccgcatcttcgggcgcgagaagcccgtgcactccgtcctcggcggcggcaagccggccgatctgtttctatggaggaacaagaggatctctggtggggtgctcgcaggcgcaactgccttctggctgctgtttgaggtcatggattaccacctcctcaccctgctatgccactgcctcatcctcaccctggccatcctgttcctctggtccaatgccacgactttcatcaacaagtctcctcctaacatccccgaggtgaagatcccagatgacctggctgtgaatgttgcacgttccctgagatatgagatcaacaggggttttgctaccttgagggagattggccaaggccatgacctcaagaaatttctgattgtgattgcaggactgtggatcctttctgttcttgggagctgctgcaatttcctcaccttgtcttacatagtttttatggtactgtacactgtaccggtcctgtatgagaaacatgaggataaggttgatgcttttggtgagaaggccatggtcgagctgaagaggtactacgccatcttcgacgagaaatgcctatcaaagattccgaagggcccattaaaagacaagaagcaacattagaagcttagaatcagataagggtctgcggtgatttatcatctcttttgaccattattcgtcggttttggtggatggatgtgattccatgtctaaatacctggacgtgctctagtgttttagtgtggtcagtagcaatgttctaaattatctgagattacgctgaatcatgttctgaagtccacgtttaacgttgctctccctatcctttggaagtggcaatttcctcaatgtctgtaatatatctagtctagtgctatttcttaatctgacctagcgtcatg

SEQ ID NO: 29334 - protein, 293 aa, Zea mays subsp. mays
  peptide (1)..(293): Ceres Seq. ID no. 12483002
  misc_feature (40)..(291): NCBI GI NO: 34909318 NR Description: OSJNBb0021A09.5
  misc_feature (75)..(291): NCBI GI NO: 34904202 NR Description: P0492F05.25
  misc_feature (46)..(86): NCBI GI NO: 34904202 NR Description: P0492F05.25
  misc_feature (51)..(292): NCBI GI NO: 15236556 NR Description: putative protein; protein id: At4g23630
  misc_feature (51)..(292): NCBI GI NO: 15237093 NR Description: putative protein; protein id: At4g11220
  misc_feature (40)..(291): NCBI GI NO: 15238125 NR Description: putative protein; protein id: At5g41600
  misc_feature (40)..(285): NCBI GI NO: 15222616 NR Description: hypothetical protein; protein id: At1g64090
  misc_feature (40)..(290): NCBI GI NO: 18406991 NR Description: expressed protein; protein id: At2g46170
  misc_feature (44)..(290): NCBI GI NO: 15233147 NR Description: putative protein; protein id: At3g61560.1
  misc_feature (64)..(283): NCBI GI NO: 15234108 NR Description: hypothetical protein; protein id: At4g01230.1
KSRKSEKPSSTRLQAYKQPRPRVEQGRRGEPSGQPAATDMAEQHKEESGVTVLDKISDKLHGRGGGSSSSSDSDDERSSATAAVKAKIYRIFGREKPVHSVLGGGKPADLFLWRNKRISGGVLAGATAFWLLFEVMDYHLLTLLCHCLILTLAILFLWSNATTFINKSPPNIPEVKIPDDLAVNVARSLRYEINRGFATLREIGQGHDLKKFLIVIAGLWILSVLGSCCNFLTLSYIVFMVLYTVPVLYEKHEDKVDAFGEKAMVELKRYYAIFDEKCLSKIPKGPLKDKKQH

SEQ ID NO: 29335 - protein, 254 aa, Zea mays subsp. mays
  peptide (1)..(254): Ceres Seq. ID no. 12483003
  misc_feature (1)..(252): NCBI GI NO: 34909318 NR Description: OSJNBb0021A09.5
  misc_feature (36)..(252): NCBI GI NO: 34904202 NR Description: P0492F05.25
  misc_feature (7)..(47): NCBI GI NO: 34904202 NR Description: P0492F05.25
  misc_feature (12)..(253): NCBI GI NO: 15236556 NR Description: putative protein; protein id: At4g23630
  misc_feature (12)..(253): NCBI GI NO: 15237093 NR Description: putative protein; protein id: At4g11220
  misc_feature (1)..(252): NCBI GI NO: 15238125 NR Description: putative protein; protein id: At5g41600
  misc_feature (1)..(246): NCBI GI NO: 15222616 NR Description: hypothetical protein; protein id: At1g64090
  misc_feature (1)..(251): NCBI GI NO: 18406991 NR Description: expressed protein; protein id: At2g46170
  misc_feature (5)..(251): NCBI GI NO: 15233147 NR Description: putative protein; protein id: At3g61560.1
  misc_feature (25)..(244): NCBI GI NO: 15234108 NR Description: hypothetical protein; protein id: At4g01230.1
MAEQHKEESGVTVLDKISDKLHGRGGGSSSSSDSDDERSSATAAVKAKIYRIFGREKPVHSVLGGGKPADLFLWRNKRISGGVLAGATAFWLLFEVMDYHLLTLLCHCLILTLAILFLWSNATTFINKSPPNIPEVKIPDDLAVNVARSLRYEINRGFATLREIGQGHDLKKFLIVIAGLWILSVLGSCCNFLTLSYIVFMVLYTVPVLYEKHEDKVDAFGEKAMVELKRYYAIFDEKCLSKIPKGPLKDKKQH

SEQ ID NO: 29336 - protein, 158 aa, Zea mays subsp. mays
  peptide (1)..(158): Ceres Seq. ID no. 12483004
  misc_feature (1)..(156): NCBI GI NO: 34909318 NR Description: OSJNBb0021A09.5
  misc_feature (1)..(156): NCBI GI NO: 34904202 NR Description: P0492F05.25
  misc_feature (1)..(157): NCBI GI NO: 15236556 NR Description: putative protein; protein id: At4g23630
  misc_feature (1)..(157): NCBI GI NO: 15237093 NR Description: putative protein; protein id: At4g11220
  misc_feature (1)..(156): NCBI GI NO: 15238125 NR Description: putative protein; protein id: At5g41600
  misc_feature (1)..(150): NCBI GI NO: 15222616 NR Description: hypothetical protein; protein id: At1g64090
  misc_feature (1)..(155): NCBI GI NO: 18406991 NR Description: expressed protein; protein id: At2g46170
  misc_feature (1)..(155): NCBI GI NO: 15233147 NR Description: putative protein; protein id: At3g61560.1
  misc_feature (1)..(148): NCBI GI NO: 15234108 NR Description: hypothetical protein; protein id: At4g01230.1
  misc_feature (1)..(157): NCBI GI NO: 18398810 NR Description: expressed protein; protein id: At3g10260
MDYHLLTLLCHCLILTLAILFLWSNATTFINKSPPNIPEVKIPDDLAVNVARSLRYEINRGFATLREIGQGHDLKKFLIVIAGLWILSVLGSCCNFLTLSYIVFMVLYTVPVLYEKHEDKVDAFGEKAMVELKRYYAIFDEKCLSKIPKGPLKDKKQH

SEQ ID NO: 29337 - DNA, 1806 bp, Zea mays subsp. mays
  misc_feature (1)..(1806): Ceres Seq. ID no. 12373188
accagtcaaacaacgccaagcgcgcctcccgtgaacccagcggcccgtcaagtcaaagcatggacgtgccgctcccgctgctgctcggctccgtggccgtttccctcgtcgtgtggtgccttctgctccgccgcggcggggccgggaaggggaagcggccgctgccgcccggtccccggggctggccggtgctgggcaacctgccgcaggtcggcgccaagccgcaccacaccatgtgtgctctggcgcgggagtacggcccgctgttccggctccggttcggcagcgccgaggtggtggtggccgcgtcggcgcgggtggcggcccagttcctgcgcgcccacgacgccaacttcagcaaccgcccgcccaactccggggccgagcacgtggcgtacaactaccaggacctggtgttcgccccgtacggctcccggtggcgcgcgctacggaagctgtgcgcgctccacctcttctccgccaaggccctggacgacctgcgcggcgtcagggagggcgaggtggcgctcatggtgagggagctcgcccggcagggagagcgagaacgggccgccgtggcgctgggccaggtggccaacgtctgcgcgaccaacacgctggcccgggcgaccgtgggccggcgcgtgttcgccgtcgacggaggggagggcgccagggagttcaaggagatggtggtggagctgatgcagctcgccggggtcttcaacgtcggggacttcgtgccggcgctcgcgtggctcgacccgcagggcgtggtcggcaggatgaagcggctgcaccgcaggtacgacgacatgatgaacgggatcatcagggagaggaaggccgccgaggaaggcaaggacctgctcagcgtgctgctggccaggatgcgggagcagcagccgctagcggagggcgacgacactaggttcaacgagactgacatcaaggcacttctcctgaacctcttcacggctgggacggacacgacatccagcacggtggagtgggcgctggccgagctgatccggcatccggacgtgctcaggaaggcccagcaggagctcgacgccgtcgtcggccgcgaccgcctcgtctccgagtcggacctcccgcgcctcacgtacctcacggcggtgatcaaggagacgttccgtctgcacccgtccacgccgctgtcgctgccccgcgtcgccgccgaggagtgcgaggtggacgggttccgcatccccgccggcaccacgctgctggtgaacgtgtgggcgatcgcccgagacccggaggcgtggcccgagcctctcgagttccggcccggccgcttcctcccgggcggctcgcacgcgggagtcgatgtcaaagggagcgacttcgagctcatcccgttcggcgccggccggagaatctgcgcgggcctcagctggggtctgcggatggtcacgctcatgacggccacgctggtgcacgccctggactgggacctcgccgacggcatgaccgcggacaagctggacatggaggaggcctacgggctcaccctgcagcgcgccgtgccgttaatggtccgcccagcacccagactgctgccgtctgcttacgcagagtagaaatcgatgctcgccggccggccatatccatgccgtccgtatgcatggatgcatggtcaaataaataagcgttgtacgtgggtatcggtgtcacaaactcacaatgtgtatcatgtattgcttcgtcagtggcgtgtgtaagcgtccgtttttttttgtattttattctttttccagaaaaaatcaccgttgaaatcgc

SEQ ID NO: 29338 - protein, 534 aa, Zea mays subsp. mays
  peptide (1)..(534): Ceres Seq. ID no. 12373189
  misc_feature (55)..(521): Pfam Name: Pfam Description:  Cytochrome P450
  misc_feature (20)..(532): NCBI GI NO: 37532650 NR Description: putative flavonoid 3'-hydroxylase
  misc_feature (24)..(532): NCBI GI NO: 12231880 NR Description: putative flavonoid 3'-hydroxylase
  misc_feature (20)..(532): NCBI GI NO: 27151498 NR Description: Flavonoid 3'-monooxygenase
  misc_feature (24)..(532): NCBI GI NO: 15241483 NR Description: flavonoid 3'-hydroxylase
  misc_feature (26)..(532): NCBI GI NO: 14278925 NR Description: flavonoid 3'-hydroxylase [Perilla frutescens]
  misc_feature (24)..(532): NCBI GI NO: 12231886 NR Description: flavonoid 3'-hydroxylase [Matthiola incana]
  misc_feature (23)..(533): NCBI GI NO: 18148451 NR Description: flavonoid 3'-hydroxylase [Glycine max]
  misc_feature (23)..(532): NCBI GI NO: 19910935 NR Description: flavonoid 3'-hydroxylase [Torenia hybrida]
  misc_feature (21)..(530): NCBI GI NO: 12231914 NR Description: flavonoid 3'-hydroxylase [Pelargonium x hortorum]
  misc_feature (51)..(534): NCBI GI NO: 37531412 NR Description: putative cytochrome P450
QSNNAKRASREPSGPSSQSMDVPLPLLLGSVAVSLVVWCLLLRRGGAGKGKRPLPPGPRGWPVLGNLPQVGAKPHHTMCALAREYGPLFRLRFGSAEVVVAASARVAAQFLRAHDANFSNRPPNSGAEHVAYNYQDLVFAPYGSRWRALRKLCALHLFSAKALDDLRGVREGEVALMVRELARQGERERAAVALGQVANVCATNTLARATVGRRVFAVDGGEGAREFKEMVVELMQLAGVFNVGDFVPALAWLDPQGVVGRMKRLHRRYDDMMNGIIRERKAAEEGKDLLSVLLARMREQQPLAEGDDTRFNETDIKALLLNLFTAGTDTTSSTVEWALAELIRHPDVLRKAQQELDAVVGRDRLVSESDLPRLTYLTAVIKETFRLHPSTPLSLPRVAAEECEVDGFRIPAGTTLLVNVWAIARDPEAWPEPLEFRPGRFLPGGSHAGVDVKGSDFELIPFGAGRRICAGLSWGLRMVTLMTATLVHALDWDLADGMTADKLDMEEAYGLTLQRAVPLMVRPAPRLLPSAYAE

SEQ ID NO: 29339 - protein, 515 aa, Zea mays subsp. mays
  peptide (1)..(515): Ceres Seq. ID no. 12373190
  misc_feature (36)..(502): Pfam Name: Pfam Description:  Cytochrome P450
  misc_feature (1)..(513): NCBI GI NO: 37532650 NR Description: putative flavonoid 3'-hydroxylase
  misc_feature (5)..(513): NCBI GI NO: 12231880 NR Description: putative flavonoid 3'-hydroxylase
  misc_feature (1)..(513): NCBI GI NO: 27151498 NR Description: Flavonoid 3'-monooxygenase
  misc_feature (5)..(513): NCBI GI NO: 15241483 NR Description: flavonoid 3'-hydroxylase
  misc_feature (7)..(513): NCBI GI NO: 14278925 NR Description: flavonoid 3'-hydroxylase [Perilla frutescens]
  misc_feature (5)..(513): NCBI GI NO: 12231886 NR Description: flavonoid 3'-hydroxylase [Matthiola incana]
  misc_feature (4)..(514): NCBI GI NO: 18148451 NR Description: flavonoid 3'-hydroxylase [Glycine max]
  misc_feature (4)..(513): NCBI GI NO: 19910935 NR Description: flavonoid 3'-hydroxylase [Torenia hybrida]
  misc_feature (2)..(511): NCBI GI NO: 12231914 NR Description: flavonoid 3'-hydroxylase [Pelargonium x hortorum]
  misc_feature (32)..(515): NCBI GI NO: 37531412 NR Description: putative cytochrome P450
MDVPLPLLLGSVAVSLVVWCLLLRRGGAGKGKRPLPPGPRGWPVLGNLPQVGAKPHHTMCALAREYGPLFRLRFGSAEVVVAASARVAAQFLRAHDANFSNRPPNSGAEHVAYNYQDLVFAPYGSRWRALRKLCALHLFSAKALDDLRGVREGEVALMVRELARQGERERAAVALGQVANVCATNTLARATVGRRVFAVDGGEGAREFKEMVVELMQLAGVFNVGDFVPALAWLDPQGVVGRMKRLHRRYDDMMNGIIRERKAAEEGKDLLSVLLARMREQQPLAEGDDTRFNETDIKALLLNLFTAGTDTTSSTVEWALAELIRHPDVLRKAQQELDAVVGRDRLVSESDLPRLTYLTAVIKETFRLHPSTPLSLPRVAAEECEVDGFRIPAGTTLLVNVWAIARDPEAWPEPLEFRPGRFLPGGSHAGVDVKGSDFELIPFGAGRRICAGLSWGLRMVTLMTATLVHALDWDLADGMTADKLDMEEAYGLTLQRAVPLMVRPAPRLLPSAYAE

SEQ ID NO: 29340 - protein, 457 aa, Zea mays subsp. mays
  peptide (1)..(457): Ceres Seq. ID no. 12373191
  misc_feature (1)..(444): Pfam Name: Pfam Description:  Cytochrome P450
  misc_feature (1)..(455): NCBI GI NO: 37532650 NR Description: putative flavonoid 3'-hydroxylase
  misc_feature (1)..(455): NCBI GI NO: 12231880 NR Description: putative flavonoid 3'-hydroxylase
  misc_feature (1)..(455): NCBI GI NO: 27151498 NR Description: Flavonoid 3'-monooxygenase
  misc_feature (1)..(455): NCBI GI NO: 15241483 NR Description: flavonoid 3'-hydroxylase
  misc_feature (1)..(455): NCBI GI NO: 14278925 NR Description: flavonoid 3'-hydroxylase [Perilla frutescens]
  misc_feature (1)..(455): NCBI GI NO: 12231886 NR Description: flavonoid 3'-hydroxylase [Matthiola incana]
  misc_feature (1)..(456): NCBI GI NO: 18148451 NR Description: flavonoid 3'-hydroxylase [Glycine max]
  misc_feature (1)..(455): NCBI GI NO: 19910935 NR Description: flavonoid 3'-hydroxylase [Torenia hybrida]
  misc_feature (1)..(453): NCBI GI NO: 12231914 NR Description: flavonoid 3'-hydroxylase [Pelargonium x hortorum]
  misc_feature (1)..(457): NCBI GI NO: 37531412 NR Description: putative cytochrome P450
MCALAREYGPLFRLRFGSAEVVVAASARVAAQFLRAHDANFSNRPPNSGAEHVAYNYQDLVFAPYGSRWRALRKLCALHLFSAKALDDLRGVREGEVALMVRELARQGERERAAVALGQVANVCATNTLARATVGRRVFAVDGGEGAREFKEMVVELMQLAGVFNVGDFVPALAWLDPQGVVGRMKRLHRRYDDMMNGIIRERKAAEEGKDLLSVLLARMREQQPLAEGDDTRFNETDIKALLLNLFTAGTDTTSSTVEWALAELIRHPDVLRKAQQELDAVVGRDRLVSESDLPRLTYLTAVIKETFRLHPSTPLSLPRVAAEECEVDGFRIPAGTTLLVNVWAIARDPEAWPEPLEFRPGRFLPGGSHAGVDVKGSDFELIPFGAGRRICAGLSWGLRMVTLMTATLVHALDWDLADGMTADKLDMEEAYGLTLQRAVPLMVRPAPRLLPSAYAE

SEQ ID NO: 29341 - DNA, 1269 bp, Zea mays subsp. mays
  misc_feature (1)..(1269): Ceres Seq. ID no. 12408669
cttgattggctcgtgaaatccatgggcgggcgcaagatgcgggcgtccatgacgacactgctgatccgcctcgtgctcaccgtcgccctcctgggcgacgaggcggcgcggcggtgcgcggcgttcaacccacgcgtgctgttcacggtgaagcccgacccgatcgtgctgcgggaccaccgcggcgcgctgctcacggggaaccacaccgtcaacctgctcttctacgggcgcttcaccgcagcgcaacgcgcgatcgtcgtcgacttcgtccgttccctctcggacgcgagcgcgcctcgcccggagccgccgggggcaccgccgtccgtggcggcgtggtggtgcaccatccggctctaccgcggcggcggcgcgcggctgcggctcggcaggcagatcatcgacgagcgcatgtcgctgggccggggccctctctctccgggcaacgtcacggcgctggcgcgggccgcggggcaccaccggggcgccatcaccgcagtgctcacggccgccgacgtccccgtggcgtccttctgcgtgtcgcgctgcggcgcccacggccacgaccgcggcggcacgcacggcagggcgcggtacacctacctgtgggcggggaatccggcgcagcagtgccccggccaatgcgcgtggccgttccacctgccgacgtacggtccccagaccccgccgctggtgccacccaacggcgacgtcggcgtcgacggcatggtcatcagcctcgccgccctcctcgccggcacggtcaccaacccgtacggggacgggtactaccagggcgacgctggcaccggcgccgggctggaggctgccacggtgtgcgccgggatcttcgggaccgggtcctaccccggctaccccgggaagctgctcacagacccggccaccggcgcgagctacaacgtcgtcgggctaggcgggaggaagtacctgctcccggcattgtgggatccggcgacctcccagtgcaagacacttgtccagacgtgacaggggtgaggggtgacgcccgcggaccgtggtgcggggagaatgtccaatgcaagggcctgcctgctgcagaagggaggaaaaataaatgcctcatttactatttccattccttattgcatgtacttgttgtctgtcctaccagcagagattgtatgatgtatttggtggatgtctatgttaatggaatttgaacgacatgcttaaatatatggtcttgaaactaaatcacatgtgtctagaatatgatttatctag

SEQ ID NO: 29342 - protein, 336 aa, Zea mays subsp. mays
  peptide (1)..(336): Ceres Seq. ID no. 12408670
  misc_feature (57)..(334): Pfam Name: Pfam Description:  Phosphate-induced protein 1 conserved region
  misc_feature (42)..(334): NCBI GI NO: 31074969 NR Description: erg-1 [Solanum tuberosum]
  misc_feature (40)..(334): NCBI GI NO: 15237656 NR Description: phi-1-like protein; protein id: At5g64260
  misc_feature (17)..(334): NCBI GI NO: 21593043 NR Description: putative phi-1-like phosphate-induced protein
  misc_feature (17)..(334): NCBI GI NO: 15236667 NR Description: putative phi-1-like phosphate-induced protein
  misc_feature (60)..(333): NCBI GI NO: 15219504 NR Description: phosphate-induced
  misc_feature (39)..(334): NCBI GI NO: 3759184 NR Description: phi-1 [Nicotiana tabacum]
  misc_feature (65)..(334): NCBI GI NO: 15242420 NR Description: putative protein; protein id: At5g09440
  misc_feature (149)..(333): NCBI GI NO: 13194680 NR Description: phosphate-induced protein 1-like protein
  misc_feature (99)..(336): NCBI GI NO: 37533672 NR Description: putative phosphate-induced protein
  misc_feature (60)..(263): NCBI GI NO: 11762144 NR Description: At1g35140 [Arabidopsis thaliana]
LDWLVKSMGGRKMRASMTTLLIRLVLTVALLGDEAARRCAAFNPRVLFTVKPDPIVLRDHRGALLTGNHTVNLLFYGRFTAAQRAIVVDFVRSLSDASAPRPEPPGAPPSVAAWWCTIRLYRGGGARLRLGRQIIDERMSLGRGPLSPGNVTALARAAGHHRGAITAVLTAADVPVASFCVSRCGAHGHDRGGTHGRARYTYLWAGNPAQQCPGQCAWPFHLPTYGPQTPPLVPPNGDVGVDGMVISLAALLAGTVTNPYGDGYYQGDAGTGAGLEAATVCAGIFGTGSYPGYPGKLLTDPATGASYNVVGLGGRKYLLPALWDPATSQCKTLVQT

SEQ ID NO: 29343 - protein, 329 aa, Zea mays subsp. mays
  peptide (1)..(329): Ceres Seq. ID no. 12408671
  misc_feature (50)..(327): Pfam Name: Pfam Description:  Phosphate-induced protein 1 conserved region
  misc_feature (35)..(327): NCBI GI NO: 31074969 NR Description: erg-1 [Solanum tuberosum]
  misc_feature (33)..(327): NCBI GI NO: 15237656 NR Description: phi-1-like protein; protein id: At5g64260
  misc_feature (10)..(327): NCBI GI NO: 21593043 NR Description: putative phi-1-like phosphate-induced protein
  misc_feature (10)..(327): NCBI GI NO: 15236667 NR Description: putative phi-1-like phosphate-induced protein
  misc_feature (53)..(326): NCBI GI NO: 15219504 NR Description: phosphate-induced
  misc_feature (32)..(327): NCBI GI NO: 3759184 NR Description: phi-1 [Nicotiana tabacum]
  misc_feature (58)..(327): NCBI GI NO: 15242420 NR Description: putative protein; protein id: At5g09440
  misc_feature (142)..(326): NCBI GI NO: 13194680 NR Description: phosphate-induced protein 1-like protein
  misc_feature (92)..(329): NCBI GI NO: 37533672 NR Description: putative phosphate-induced protein
  misc_feature (53)..(256): NCBI GI NO: 11762144 NR Description: At1g35140 [Arabidopsis thaliana]
MGGRKMRASMTTLLIRLVLTVALLGDEAARRCAAFNPRVLFTVKPDPIVLRDHRGALLTGNHTVNLLFYGRFTAAQRAIVVDFVRSLSDASAPRPEPPGAPPSVAAWWCTIRLYRGGGARLRLGRQIIDERMSLGRGPLSPGNVTALARAAGHHRGAITAVLTAADVPVASFCVSRCGAHGHDRGGTHGRARYTYLWAGNPAQQCPGQCAWPFHLPTYGPQTPPLVPPNGDVGVDGMVISLAALLAGTVTNPYGDGYYQGDAGTGAGLEAATVCAGIFGTGSYPGYPGKLLTDPATGASYNVVGLGGRKYLLPALWDPATSQCKTLVQT

SEQ ID NO: 29344 - protein, 324 aa, Zea mays subsp. mays
  peptide (1)..(324): Ceres Seq. ID no. 12408672
  misc_feature (45)..(322): Pfam Name: Pfam Description:  Phosphate-induced protein 1 conserved region
  misc_feature (30)..(322): NCBI GI NO: 31074969 NR Description: erg-1 [Solanum tuberosum]
  misc_feature (28)..(322): NCBI GI NO: 15237656 NR Description: phi-1-like protein; protein id: At5g64260
  misc_feature (5)..(322): NCBI GI NO: 21593043 NR Description: putative phi-1-like phosphate-induced protein
  misc_feature (5)..(322): NCBI GI NO: 15236667 NR Description: putative phi-1-like phosphate-induced protein
  misc_feature (48)..(321): NCBI GI NO: 15219504 NR Description: phosphate-induced
  misc_feature (27)..(322): NCBI GI NO: 3759184 NR Description: phi-1 [Nicotiana tabacum]
  misc_feature (53)..(322): NCBI GI NO: 15242420 NR Description: putative protein; protein id: At5g09440
  misc_feature (137)..(321): NCBI GI NO: 13194680 NR Description: phosphate-induced protein 1-like protein
  misc_feature (87)..(324): NCBI GI NO: 37533672 NR Description: putative phosphate-induced protein
  misc_feature (48)..(251): NCBI GI NO: 11762144 NR Description: At1g35140 [Arabidopsis thaliana]
MRASMTTLLIRLVLTVALLGDEAARRCAAFNPRVLFTVKPDPIVLRDHRGALLTGNHTVNLLFYGRFTAAQRAIVVDFVRSLSDASAPRPEPPGAPPSVAAWWCTIRLYRGGGARLRLGRQIIDERMSLGRGPLSPGNVTALARAAGHHRGAITAVLTAADVPVASFCVSRCGAHGHDRGGTHGRARYTYLWAGNPAQQCPGQCAWPFHLPTYGPQTPPLVPPNGDVGVDGMVISLAALLAGTVTNPYGDGYYQGDAGTGAGLEAATVCAGIFGTGSYPGYPGKLLTDPATGASYNVVGLGGRKYLLPALWDPATSQCKTLVQT

SEQ ID NO: 29345 - DNA, 1787 bp, Zea mays subsp. mays
  misc_feature (1)..(1787): Ceres Seq. ID no. 12406298
aaaggattcccaaccccaaccccaaccccccaagaagcaccgcgcagaaccctctgctcctctcaccctcacgctccaaggcggcggcgccatgcacggcggaggcgcggcctcgcccgatgccgccatatgcatctccccagaagctgggcccatcgtcggggtcgcccccgccgggatcagggtcgaaaactgctacgtgttcaagagccggctgcaggagtatgctcagagggttggcattccaaccccggagtaccacacgctgaaagaaggcccgtctcatgaacctgtcttcaagtccacagtgttcgttaataataccaagtatgaatcgctgcctgggttcttcagccggaaggctgcagaacagtctgccgcggaagttgcgctcatggagatagccatgtccgctccggtgaccgaaattaggaacatgccagcagttcaagaaactggactgtgcaagaatctccttcaggagtatgctcagaagatgaattatgccattccatcttatatttgcactaaacaagcttcgggtgtagctcctttcgtatgcagtgttgagattggtggcatcctatacattggtgctgcagctaggacaaagaaggaggcagagataaaagctgcccgaactgctcttcttgcaatccaaagtcaatcagaaggtggtgcaaatggtgccaaaaagtacattgttgttcctgggcaaaggccagataaggaggcgaataaaaatccaactgaaacccccataccacttagagtcaagaagcgtggttccaggaagaaatggaacaagaggaaattcaggaggatggctgaccgaattgttgatgctggaaaggatgcagaggggcttggaacgcttgtacatgatgactatgaggaagctagaagaataggatatgagttacctacagatactgctatggttcaatttaacaaggaagttgtaatgacacaacctggtgaaggagataggatagtacaattggagccacccagagatcctgcagagtttcaatataacaaggaagctagaagtgttgaacaggacccacccagagatcctgcagaggtccaacataacaaggaagctagaagtgttgaacaggacccacccagagatcctgcagaggtccaacataacaaggaagctagaactgtcgaacaggacccacccagcaacactgaagtgtggaagcctgacaataaggctacaactacagagcaggagtcggtgagcgcttacatagcattgagatctaatggggattctacagatgtggaggcggcaccaggcgataccttgatgatgcagggcgaggagtcggaagccacaatgcaagaagcatctcacgctggtgaacaggcccagcctaactaggaacctgaaagcaaaaaaaacttcctgaacaggaagaccgaaatgtaggtcgaatgcatgcattgctgtaggagaataagtccgctggaggtacatgagcctaaaataatttgtggagtggtggttgactccagttgtaagtgccttccagagtgtaccggcatgcccaaaactgaaatttccggtttagatagaattgggggcgcggaagagggtgccatgtgtgtgtgtgtgtgttgcctgtggatggaggaattgatgggagtatgtgaactgatgtagctagtctatgtttgttaccattgatgatatgattgtgtttggtcatgttttcactgtcatatttgttgacgaccagcacttgcatgagcattggattcgaggtagcctg

SEQ ID NO: 29346 - protein, 464 aa, Zea mays subsp. mays
  peptide (1)..(464): Ceres Seq. ID no. 12406299
  misc_feature (68)..(134): Pfam Name: Pfam Description:  Double-stranded RNA binding motif
  misc_feature (51)..(463): NCBI GI NO: 9229939 NR Description: dsRNA-binding protein ODB1
  misc_feature (62)..(322): NCBI GI NO: 27262831 NR Description: dsRNA-binding protein
  misc_feature (62)..(322): NCBI GI NO: 27262837 NR Description: dsRNA-binding protein
  misc_feature (62)..(322): NCBI GI NO: 27262835 NR Description: dsRNA-binding protein
  misc_feature (62)..(282): NCBI GI NO: 27262829 NR Description: dsRNA-binding protein [Brassica rapa subsp. rapa]
  misc_feature (62)..(277): NCBI GI NO: 8346542 NR Description: BcpLH protein [Brassica rapa]
  misc_feature (62)..(322): NCBI GI NO: 27262833 NR Description: dsRNA-binding protein
  misc_feature (62)..(322): NCBI GI NO: 9967526 NR Description: RBP2 protein [Brassica oleracea var. capitata]
  misc_feature (62)..(271): NCBI GI NO: 18391056 NR Description: expressed protein; protein id: At1g09700
  misc_feature (67)..(215): NCBI GI NO: 37535422 NR Description: putative extensin
KDSQPQPQPPKKHRAEPSAPLTLTLQGGGAMHGGGAASPDAAICISPEAGPIVGVAPAGIRVENCYVFKSRLQEYAQRVGIPTPEYHTLKEGPSHEPVFKSTVFVNNTKYESLPGFFSRKAAEQSAAEVALMEIAMSAPVTEIRNMPAVQETGLCKNLLQEYAQKMNYAIPSYICTKQASGVAPFVCSVEIGGILYIGAAARTKKEAEIKAARTALLAIQSQSEGGANGAKKYIVVPGQRPDKEANKNPTETPIPLRVKKRGSRKKWNKRKFRRMADRIVDAGKDAEGLGTLVHDDYEEARRIGYELPTDTAMVQFNKEVVMTQPGEGDRIVQLEPPRDPAEFQYNKEARSVEQDPPRDPAEVQHNKEARSVEQDPPRDPAEVQHNKEARTVEQDPPSNTEVWKPDNKATTTEQESVSAYIALRSNGDSTDVEAAPGDTLMMQGEESEATMQEASHAGEQAQPN

SEQ ID NO: 29347 - protein, 434 aa, Zea mays subsp. mays
  peptide (1)..(434): Ceres Seq. ID no. 12406300
  misc_feature (38)..(104): Pfam Name: Pfam Description:  Double-stranded RNA binding motif
  misc_feature (21)..(433): NCBI GI NO: 9229939 NR Description: dsRNA-binding protein ODB1
  misc_feature (32)..(292): NCBI GI NO: 27262831 NR Description: dsRNA-binding protein
  misc_feature (32)..(292): NCBI GI NO: 27262837 NR Description: dsRNA-binding protein
  misc_feature (32)..(292): NCBI GI NO: 27262835 NR Description: dsRNA-binding protein
  misc_feature (32)..(252): NCBI GI NO: 27262829 NR Description: dsRNA-binding protein [Brassica rapa subsp. rapa]
  misc_feature (32)..(247): NCBI GI NO: 8346542 NR Description: BcpLH protein [Brassica rapa]
  misc_feature (32)..(292): NCBI GI NO: 27262833 NR Description: dsRNA-binding protein
  misc_feature (32)..(292): NCBI GI NO: 9967526 NR Description: RBP2 protein [Brassica oleracea var. capitata]
  misc_feature (32)..(241): NCBI GI NO: 18391056 NR Description: expressed protein; protein id: At1g09700
  misc_feature (37)..(185): NCBI GI NO: 37535422 NR Description: putative extensin
MHGGGAASPDAAICISPEAGPIVGVAPAGIRVENCYVFKSRLQEYAQRVGIPTPEYHTLKEGPSHEPVFKSTVFVNNTKYESLPGFFSRKAAEQSAAEVALMEIAMSAPVTEIRNMPAVQETGLCKNLLQEYAQKMNYAIPSYICTKQASGVAPFVCSVEIGGILYIGAAARTKKEAEIKAARTALLAIQSQSEGGANGAKKYIVVPGQRPDKEANKNPTETPIPLRVKKRGSRKKWNKRKFRRMADRIVDAGKDAEGLGTLVHDDYEEARRIGYELPTDTAMVQFNKEVVMTQPGEGDRIVQLEPPRDPAEFQYNKEARSVEQDPPRDPAEVQHNKEARSVEQDPPRDPAEVQHNKEARTVEQDPPSNTEVWKPDNKATTTEQESVSAYIALRSNGDSTDVEAAPGDTLMMQGEESEATMQEASHAGEQAQPN

SEQ ID NO: 29348 - protein, 333 aa, Zea mays subsp. mays
  peptide (1)..(333): Ceres Seq. ID no. 12406301
  misc_feature (1)..(332): NCBI GI NO: 9229939 NR Description: dsRNA-binding protein ODB1
  misc_feature (1)..(191): NCBI GI NO: 27262831 NR Description: dsRNA-binding protein
  misc_feature (1)..(191): NCBI GI NO: 27262835 NR Description: dsRNA-binding protein
  misc_feature (1)..(191): NCBI GI NO: 27262837 NR Description: dsRNA-binding protein
  misc_feature (1)..(151): NCBI GI NO: 27262829 NR Description: dsRNA-binding protein [Brassica rapa subsp. rapa]
  misc_feature (1)..(146): NCBI GI NO: 8346542 NR Description: BcpLH protein [Brassica rapa]
  misc_feature (1)..(191): NCBI GI NO: 27262833 NR Description: dsRNA-binding protein
  misc_feature (1)..(191): NCBI GI NO: 9967526 NR Description: RBP2 protein [Brassica oleracea var. capitata]
  misc_feature (1)..(140): NCBI GI NO: 18391056 NR Description: expressed protein; protein id: At1g09700
  misc_feature (1)..(84): NCBI GI NO: 37535422 NR Description: putative extensin
MEIAMSAPVTEIRNMPAVQETGLCKNLLQEYAQKMNYAIPSYICTKQASGVAPFVCSVEIGGILYIGAAARTKKEAEIKAARTALLAIQSQSEGGANGAKKYIVVPGQRPDKEANKNPTETPIPLRVKKRGSRKKWNKRKFRRMADRIVDAGKDAEGLGTLVHDDYEEARRIGYELPTDTAMVQFNKEVVMTQPGEGDRIVQLEPPRDPAEFQYNKEARSVEQDPPRDPAEVQHNKEARSVEQDPPRDPAEVQHNKEARTVEQDPPSNTEVWKPDNKATTTEQESVSAYIALRSNGDSTDVEAAPGDTLMMQGEESEATMQEASHAGEQAQPN

SEQ ID NO: 29349 - DNA, 2066 bp, Zea mays subsp. mays
  misc_feature (1)..(2066): Ceres Seq. ID no. 12344306
ctccatggccgttaagcccacatccatcatcgccgcctccgccacagcacgccatggagaccagcaagtcgccaccgctctactcggcgccgcgggagccctctgccacgacagtgatgctgtgtccgtgcctggcgttcttcctcctcgctctcatcatcacctccatcgcactcactgtccactttcgcctctactgccacactcctcttgcccacctcatctccccgcaccgctgcccccaccacatctgacctccgtctccgcccgcatcgctggcgtggtcctgcttcccagaggcgtgttccctctgctgccgccgagatcccgatacgttatgggttcccctctcctcgcgacgccggcatgcggggcttacgacgtgctctggggcttcgcagccggaaggttcctctccatcttggctgcctccgacgaagatcagggctcgtcggagcaggaggcggctgcgagcaacccggagggcgtggaccgcgtctgcgcggccatcgcggacgtcgtcgcctccggtgccgacgcgaacctggaggcggcgctatccgcgctctcgccaccgctctgcgaagcggtcgtgctcgctgtgctccaccgcttcaagcacgcacataggccgtcctaccgcttcttcaggtgggccacagtgtccggtggctttacccacaccaccattacctactgcaagatgttacacatcttaggcaagacgaggcagttcgagtcgatggttgcgatgatccaagagatggggaaggcgggggccctgtccatggacgccttcaaggttgccattaagtccttcgctgcggctggtgagatcaagaatgcggttggcgtgttcgagttgatgagaaagaacggtttcgatgatggggtggaatcattcaattgcttgctcgttgctttagccaaagagggattaggtagggaggccaggcaggtgtttgacaaaatgcatggccagtactctccagacctgcgctcttatactgcactgatgctggcatggtgcaatgcgaggaatctggttgaggcggggcgggtttggaatgagatgctggagaagggaatggatccagatgttgttgtccacaacacaatgattgaggggttgctgcgtgggcagaggcgacccgaggccgtgaagatgtttgagctgatgaaggcaaaggggcctccaccaaatgtgtggacttacacaatgttaatccgtgaccattgtaagcaggggaagatggacatggcaatggagtgctttgaggagatgcaggaggctaaatgccaaccagatgttgctacctatacatgtttgctggttggatatgggaatgcaaaacaaatggacagagtgactgctgtgttggaggagatgacacagaagggatgcccccctgatgctcggacttacaatgcactgattaagttgctaacaaataggaatatgccagacgatgctgcaaggatatacaagaagatgatcaagaagggacttgagcccacaatccatacttacaacatgatgatgaagtcatatttcgttggtgatagcaactatgcaatgggttgtgcagtgtgggaggagatgcaccagaggggtatttgccctgatgtgaactcttacacagtgttcattaatcggcatatacgacatggcaggccagaggaggcatataaatatatcgaggagatgattaataaagggatgaaagctccacaaatagactataataagtttgctgcagatttctcaaaggctgggaaaccagatatattgtttgagttggctcagaaagtgaaatttgctgggaaattagatgtatctaatgtgttctatcagtgggcagatagaatgaagagtcgggtgaagagaaatgtaccttcagattggtaatagaatgttctaagattactatgctgccagcaggaatgtggcatgctgtgatggtgcttgaaatttgattactaaggagaactgctacctttttcagtttgccattgtacggtaatgtgccattgaagaattgcgtgcgttaatatccgttggtctg

SEQ ID NO: 29350 - protein, 635 aa, Zea mays subsp. mays
  peptide (1)..(635): Ceres Seq. ID no. 12344307
  misc_feature (508)..(542): Pfam Name: Pfam Description:  PPR repeat
  misc_feature (144)..(634): NCBI GI NO: 15228767 NR Description: putative protein; protein id: At3g62470.1
  misc_feature (144)..(634): NCBI GI NO: 15228788 NR Description: putative protein; protein id: At3g62540.1
  misc_feature (144)..(634): NCBI GI NO: 15241508 NR Description: putative protein; protein id: At5g14820.1
  misc_feature (327)..(634): NCBI GI NO: 11357982 NR Description: hypothetical protein T12C14
  misc_feature (175)..(604): NCBI GI NO: 14488357 NR Description: unknown protein
  misc_feature (159)..(629): NCBI GI NO: 15222719 NR Description: hypothetical protein; protein id: At1g26500.1
  misc_feature (182)..(604): NCBI GI NO: 15229604 NR Description: putative protein; protein id: At3g49730.1
  misc_feature (150)..(604): NCBI GI NO: 15223926 NR Description: hypothetical protein; protein id: At1g77360.1
  misc_feature (150)..(604): NCBI GI NO: 15223927 NR Description: hypothetical protein; protein id: At1g71060.1
  misc_feature (182)..(574): NCBI GI NO: 15239161 NR Description: putative protein; protein id: At5g65820.1
SMAVKPTSIIAASATARHGDQQVATALLGAAGALCHDSDAVSVPGVLPPRSHHHLHRTHCPLSPLLPHSSCPPHLPAPLPPPHLTSVSARIAGVVLLPRGVFPLLPPRSRYVMGSPLLATPACGAYDVLWGFAAGRFLSILAASDEDQGSSEQEAAASNPEGVDRVCAAIADVVASGADANLEAALSALSPPLCEAVVLAVLHRFKHAHRPSYRFFRWATVSGGFTHTTITYCKMLHILGKTRQFESMVAMIQEMGKAGALSMDAFKVAIKSFAAAGEIKNAVGVFELMRKNGFDDGVESFNCLLVALAKEGLGREARQVFDKMHGQYSPDLRSYTALMLAWCNARNLVEAGRVWNEMLEKGMDPDVVVHNTMIEGLLRGQRRPEAVKMFELMKAKGPPPNVWTYTMLIRDHCKQGKMDMAMECFEEMQEAKCQPDVATYTCLLVGYGNAKQMDRVTAVLEEMTQKGCPPDARTYNALIKLLTNRNMPDDAARIYKKMIKKGLEPTIHTYNMMMKSYFVGDSNYAMGCAVWEEMHQRGICPDVNSYTVFINRHIRHGRPEEAYKYIEEMINKGMKAPQIDYNKFAADFSKAGKPDILFELAQKVKFAGKLDVSNVFYQWADRMKSRVKRNVPSDW

SEQ ID NO: 29351 - protein, 634 aa, Zea mays subsp. mays
  peptide (1)..(634): Ceres Seq. ID no. 12344308
  misc_feature (507)..(541): Pfam Name: Pfam Description:  PPR repeat
  misc_feature (143)..(633): NCBI GI NO: 15228767 NR Description: putative protein; protein id: At3g62470.1
  misc_feature (143)..(633): NCBI GI NO: 15228788 NR Description: putative protein; protein id: At3g62540.1
  misc_feature (143)..(633): NCBI GI NO: 15241508 NR Description: putative protein; protein id: At5g14820.1
  misc_feature (326)..(633): NCBI GI NO: 11357982 NR Description: hypothetical protein T12C14
  misc_feature (174)..(603): NCBI GI NO: 14488357 NR Description: unknown protein
  misc_feature (158)..(628): NCBI GI NO: 15222719 NR Description: hypothetical protein; protein id: At1g26500.1
  misc_feature (181)..(603): NCBI GI NO: 15229604 NR Description: putative protein; protein id: At3g49730.1
  misc_feature (149)..(603): NCBI GI NO: 15223926 NR Description: hypothetical protein; protein id: At1g77360.1
  misc_feature (149)..(603): NCBI GI NO: 15223927 NR Description: hypothetical protein; protein id: At1g71060.1
  misc_feature (181)..(573): NCBI GI NO: 15239161 NR Description: putative protein; protein id: At5g65820.1
MAVKPTSIIAASATARHGDQQVATALLGAAGALCHDSDAVSVPGVLPPRSHHHLHRTHCPLSPLLPHSSCPPHLPAPLPPPHLTSVSARIAGVVLLPRGVFPLLPPRSRYVMGSPLLATPACGAYDVLWGFAAGRFLSILAASDEDQGSSEQEAAASNPEGVDRVCAAIADVVASGADANLEAALSALSPPLCEAVVLAVLHRFKHAHRPSYRFFRWATVSGGFTHTTITYCKMLHILGKTRQFESMVAMIQEMGKAGALSMDAFKVAIKSFAAAGEIKNAVGVFELMRKNGFDDGVESFNCLLVALAKEGLGREARQVFDKMHGQYSPDLRSYTALMLAWCNARNLVEAGRVWNEMLEKGMDPDVVVHNTMIEGLLRGQRRPEAVKMFELMKAKGPPPNVWTYTMLIRDHCKQGKMDMAMECFEEMQEAKCQPDVATYTCLLVGYGNAKQMDRVTAVLEEMTQKGCPPDARTYNALIKLLTNRNMPDDAARIYKKMIKKGLEPTIHTYNMMMKSYFVGDSNYAMGCAVWEEMHQRGICPDVNSYTVFINRHIRHGRPEEAYKYIEEMINKGMKAPQIDYNKFAADFSKAGKPDILFELAQKVKFAGKLDVSNVFYQWADRMKSRVKRNVPSDW

SEQ ID NO: 29352 - protein, 523 aa, Zea mays subsp. mays
  peptide (1)..(523): Ceres Seq. ID no. 12344309
  misc_feature (396)..(430): Pfam Name: Pfam Description:  PPR repeat
  misc_feature (32)..(522): NCBI GI NO: 15228767 NR Description: putative protein; protein id: At3g62470.1
  misc_feature (32)..(522): NCBI GI NO: 15228788 NR Description: putative protein; protein id: At3g62540.1
  misc_feature (32)..(522): NCBI GI NO: 15241508 NR Description: putative protein; protein id: At5g14820.1
  misc_feature (215)..(522): NCBI GI NO: 11357982 NR Description: hypothetical protein T12C14
  misc_feature (63)..(492): NCBI GI NO: 14488357 NR Description: unknown protein
  misc_feature (47)..(517): NCBI GI NO: 15222719 NR Description: hypothetical protein; protein id: At1g26500.1
  misc_feature (70)..(492): NCBI GI NO: 15229604 NR Description: putative protein; protein id: At3g49730.1
  misc_feature (38)..(492): NCBI GI NO: 15223926 NR Description: hypothetical protein; protein id: At1g77360.1
  misc_feature (38)..(492): NCBI GI NO: 15223927 NR Description: hypothetical protein; protein id: At1g71060.1
  misc_feature (70)..(462): NCBI GI NO: 15239161 NR Description: putative protein; protein id: At5g65820.1
MGSPLLATPACGAYDVLWGFAAGRFLSILAASDEDQGSSEQEAAASNPEGVDRVCAAIADVVASGADANLEAALSALSPPLCEAVVLAVLHRFKHAHRPSYRFFRWATVSGGFTHTTITYCKMLHILGKTRQFESMVAMIQEMGKAGALSMDAFKVAIKSFAAAGEIKNAVGVFELMRKNGFDDGVESFNCLLVALAKEGLGREARQVFDKMHGQYSPDLRSYTALMLAWCNARNLVEAGRVWNEMLEKGMDPDVVVHNTMIEGLLRGQRRPEAVKMFELMKAKGPPPNVWTYTMLIRDHCKQGKMDMAMECFEEMQEAKCQPDVATYTCLLVGYGNAKQMDRVTAVLEEMTQKGCPPDARTYNALIKLLTNRNMPDDAARIYKKMIKKGLEPTIHTYNMMMKSYFVGDSNYAMGCAVWEEMHQRGICPDVNSYTVFINRHIRHGRPEEAYKYIEEMINKGMKAPQIDYNKFAADFSKAGKPDILFELAQKVKFAGKLDVSNVFYQWADRMKSRVKRNVPSDW

SEQ ID NO: 29353 - DNA, 1554 bp, Zea mays subsp. mays
  misc_feature (1)..(1554): Ceres Seq. ID no. 12367443
gtcgaacacatacctaattatcacctgtaagccagctgaaccacatctcgtcgtgcacatccggagcccgggaacacacacacacattgccatggccatgcccatgcccaagcccgtcctgagcctgctcgtgcacctacacgccgccgtcctgttccttcccgccccggccggcggcgcggtctacaacgttctgcgctacggcgcgcgccccgacggcgtgacggacgcggcggggcccttcctccgcgcgtgggcggacgcctgccgctcgcccctcccggccgccatgtacgtgccgccagggaggtacctggtgcggagcgccacgttcaccggcccgtgccacagccgcgccgtgacgttcgccgtcgccggcacggtcgtcgcccccgcggcctacggcgcgcgcggctcgtcggggaggtggatcacgttcgagaacatggacggcctcgtcgtcgccggcggcggcacgctggacggccgcggcagggcgctctggacctgcagacagcgcgggcagcgcgactgtccgacccccacgtccactctgacgatcgccaactccaaggacgtggtggtggcccgggctgcggtcggtggacagcgagctgttccacgtggtggtgctgcagtgccacggcgtgacggtgcgcggggtgacggtggaggcgccggcggacagccccaacaccgacggcatccacctacacatgtccacccacgtgtcggtgtacgacgccaggatcagcaccggcgacgactgcatctccatcggccccggccaactctcacctctggatcgagcgcgtcgcctgcggccccggccacggcatcagcatcgggagcctgggcaagcagcagggcacggaggtggaggcggtgcagaacgtgacggtgaagacgacgtggttcaccggcaccatgaacgggctgcggatcaagacgtggggcggctccaagcgcggcttcgtcacgggcgtcaccttcgccgactccaccatgtccggcgtggacaaccccatcattatcgaccagaactactgccccgccagcagcggctgccccggcgccggccggagctccagcatcaggatcagcgacgtgcggtacgtgggcatccggggctcgtccgccacgccggtggccgtcaacttcgactgcagccggagctacccctgcagtggcatcagcctgcaggacgtggcgctgacgtaccagaaccgggccgccgccaagtcctactgccggaacgtgcaggggaccgcgctcggcctcgtgctgccgccgagctgcctctgatcagacgatcgaccttgcaacttacattgccggccggacgcagcagttcagttagctgcatgcgttgtcacgtgtatatagatgcatatgtcgagtgtattatgtacggagtatgtggggagtgcttagactaggagaacattacgagcttcttctgacagtagatggttatatagtcgatatatgttggttcttttctttaacccttcacctttttcgcagcacgattattatatgagcgagtttttt

SEQ ID NO: 29354 - protein, 298 aa, Zea mays subsp. mays
  peptide (1)..(298): Ceres Seq. ID no. 12367444
  misc_feature (89)..(195): Pfam Name: Pfam Description:  Glycosyl hydrolases family 28
  misc_feature (35)..(195): NCBI GI NO: 34907530 NR Description: putative endopolygalacturonase
  misc_feature (31)..(196): NCBI GI NO: 24475519 NR Description: polygalacturonase [Pyrus communis]
  misc_feature (55)..(199): NCBI GI NO: 3747093 NR Description: endopolygalacturonase [Prunus persica]
  misc_feature (55)..(199): NCBI GI NO: 1346705 NR Description: POLYGALACTURONASE PRECURSOR (PG) (PECTINASE)
  misc_feature (42)..(196): NCBI GI NO: 3834451 NR Description: polygalacturonase 7 [Lycopersicon esculentum]
  misc_feature (64)..(199): NCBI GI NO: 30349275 NR Description: endopolygalacturonase [Prunus persica]
  misc_feature (33)..(195): NCBI GI NO: 7435394 NR Description: probable polygalacturonase (EC 3.2.1.15) - tomato
  misc_feature (40)..(195): NCBI GI NO: 7435389 NR Description: polygalacturonase (EC 3
  misc_feature (50)..(200): NCBI GI NO: 1362096 NR Description: polygalacturonase precursor - tomato
  misc_feature (61)..(200): NCBI GI NO: 2459811 NR Description: polygalacturonase 1 [Lycopersicon esculentum]
SNTYLIITCKPAEPHLVVHIRSPGTHTHIAMAMPMPKPVLSLLVHLHAAVLFLPAPAGGAVYNVLRYGARPDGVTDAAGPFLRAWADACRSPLPAAMYVPPGRYLVRSATFTGPCHSRAVTFAVAGTVVAPAAYGARGSSGRWITFENMDGLVVAGGGTLDGRGRALWTCRQRGQRDCPTPTSTLTIANSKDVVVARAAVGGQRAVPRGGAAVPRRDGARGDGGGAGGQPQHRRHPPTHVHPRVGVRRQDQHRRRLHLHRPRPTLTSGSSASPAAPATASASGAWASSRARRWRRCRT

SEQ ID NO: 29355 - protein, 268 aa, Zea mays subsp. mays
  peptide (1)..(268): Ceres Seq. ID no. 12367445
  misc_feature (59)..(165): Pfam Name: Pfam Description:  Glycosyl hydrolases family 28
  misc_feature (5)..(165): NCBI GI NO: 34907530 NR Description: putative endopolygalacturonase
  misc_feature (1)..(166): NCBI GI NO: 24475519 NR Description: polygalacturonase [Pyrus communis]
  misc_feature (25)..(169): NCBI GI NO: 3747093 NR Description: endopolygalacturonase [Prunus persica]
  misc_feature (25)..(169): NCBI GI NO: 1346705 NR Description: POLYGALACTURONASE PRECURSOR (PG) (PECTINASE)
  misc_feature (12)..(166): NCBI GI NO: 3834451 NR Description: polygalacturonase 7 [Lycopersicon esculentum]
  misc_feature (34)..(169): NCBI GI NO: 30349275 NR Description: endopolygalacturonase [Prunus persica]
  misc_feature (3)..(165): NCBI GI NO: 7435394 NR Description: probable polygalacturonase (EC 3.2.1.15) - tomato
  misc_feature (10)..(165): NCBI GI NO: 7435389 NR Description: polygalacturonase (EC 3
  misc_feature (20)..(170): NCBI GI NO: 1362096 NR Description: polygalacturonase precursor - tomato
  misc_feature (31)..(170): NCBI GI NO: 2459811 NR Description: polygalacturonase 1 [Lycopersicon esculentum]
MAMPMPKPVLSLLVHLHAAVLFLPAPAGGAVYNVLRYGARPDGVTDAAGPFLRAWADACRSPLPAAMYVPPGRYLVRSATFTGPCHSRAVTFAVAGTVVAPAAYGARGSSGRWITFENMDGLVVAGGGTLDGRGRALWTCRQRGQRDCPTPTSTLTIANSKDVVVARAAVGGQRAVPRGGAAVPRRDGARGDGGGAGGQPQHRRHPPTHVHPRVGVRRQDQHRRRLHLHRPRPTLTSGSSASPAAPATASASGAWASSRARRWRRCRT

SEQ ID NO: 29356 - protein, 266 aa, Zea mays subsp. mays
  peptide (1)..(266): Ceres Seq. ID no. 12367446
  misc_feature (57)..(163): Pfam Name: Pfam Description:  Glycosyl hydrolases family 28
  misc_feature (3)..(163): NCBI GI NO: 34907530 NR Description: putative endopolygalacturonase
  misc_feature (1)..(164): NCBI GI NO: 24475519 NR Description: polygalacturonase [Pyrus communis]
  misc_feature (23)..(167): NCBI GI NO: 3747093 NR Description: endopolygalacturonase [Prunus persica]
  misc_feature (23)..(167): NCBI GI NO: 1346705 NR Description: POLYGALACTURONASE PRECURSOR (PG) (PECTINASE)
  misc_feature (10)..(164): NCBI GI NO: 3834451 NR Description: polygalacturonase 7 [Lycopersicon esculentum]
  misc_feature (32)..(167): NCBI GI NO: 30349275 NR Description: endopolygalacturonase [Prunus persica]
  misc_feature (1)..(163): NCBI GI NO: 7435394 NR Description: probable polygalacturonase (EC 3.2.1.15) - tomato
  misc_feature (8)..(163): NCBI GI NO: 7435389 NR Description: polygalacturonase (EC 3
  misc_feature (18)..(168): NCBI GI NO: 1362096 NR Description: polygalacturonase precursor - tomato
  misc_feature (29)..(168): NCBI GI NO: 2459811 NR Description: polygalacturonase 1 [Lycopersicon esculentum]
MPMPKPVLSLLVHLHAAVLFLPAPAGGAVYNVLRYGARPDGVTDAAGPFLRAWADACRSPLPAAMYVPPGRYLVRSATFTGPCHSRAVTFAVAGTVVAPAAYGARGSSGRWITFENMDGLVVAGGGTLDGRGRALWTCRQRGQRDCPTPTSTLTIANSKDVVVARAAVGGQRAVPRGGAAVPRRDGARGDGGGAGGQPQHRRHPPTHVHPRVGVRRQDQHRRRLHLHRPRPTLTSGSSASPAAPATASASGAWASSRARRWRRCRT

SEQ ID NO: 29357 - DNA, 1229 bp, Zea mays subsp. mays
  misc_feature (1)..(1229): Ceres Seq. ID no. 12408661
ataataacgctgcacctcttttcatttcaccatctcctgcccccttaaaaaaagactcaccgtcgacacgccctcccgtcccgagagttctgaatcgaaaccgtcggccacgagagcagtgcgaggcgcccaccgcgatggctcgaaccaagcaccaggccgtgaggaagacggcggagaagcccaagaagaagctccagttcgagcgctcaggtggtgcgagtacctcggcgacgccggtgagcgcgtgcgtgcggggatcagttccctccttttgccttttttgtgggctgctcttacttgcttgcaagctgtttgatggaatgcaggaaagggctgctgggaccgggggaagagcggcgtctggaggtgactcagttaagaagacgaaaccacgccaccgctggcggccagggactgtagcgctgcgggagatcaggaagtaccagaagtccactgaaccgctcatcccctttgcgcctttcgtccgtgtggtgagggagttaaccaatttcgtaacaaacgggaaagtagagcgctataccgcagaagccctccttgcgctgcaagaggcagcagaattccacttgatagaactgtttgaaatggcgaatctgtgtgccatccatgccaagcgtgtcacaatcatgcaaaaggacatacaacttgcaaggcgtatcggaggaaggcgttgggcatgatatataatatccattctgattgcatcattcttgtgaatttgtttgtaggagctagacattagtgttgttgaatgctgcatggttcctaatccttttcgcagtctaacatctgtggagttagtatgttacatggcaacagctgaacatctgtggactataactatatggcaacagccgaagattgtgtctgtgggataactggttgttttggttgctcttcagtagtttgtttgcttcagtctgcagtatggactatggagtaaactgcatgctgaaacccgaaccactgctgaaacggcagttgccaggatagcaggagggcctttatgcacagtggaattgagtagagaactgagtaaaccatggttctttctccttttgaactggaacacacacagttggatcttgtttctcttcttatgccattgtcatcgtgtttataaggggtgtaaatggtacaaatattatctgcccgtattcacatttgatctatctaagaaggctgaaatccgatccgtattcgagtcg

SEQ ID NO: 29358 - protein, 232 aa, Zea mays subsp. mays
  peptide (1)..(232): Ceres Seq. ID no. 12408662
  misc_feature (110)..(230): Pfam Name: Pfam Description:  Core histone H2A/H2B/H3/H4
  misc_feature (110)..(232): NCBI GI NO: 21668094 NR Description: centromeric histone h3-like protein [Zea mays]
  misc_feature (46)..(86): NCBI GI NO: 21668094 NR Description: centromeric histone h3-like protein [Zea mays]
  misc_feature (107)..(231): NCBI GI NO: 40365140 NR Description: centromeric histone 3
  misc_feature (46)..(82): NCBI GI NO: 40365140 NR Description: centromeric histone 3
  misc_feature (120)..(230): NCBI GI NO: 17532993 NR Description: Histone H3 (15.3 kD) [Caenorhabditis elegans]
  misc_feature (120)..(230): NCBI GI NO: 122090 NR Description: Histone H3
  misc_feature (111)..(230): NCBI GI NO: 4574208 NR Description: histone H3 [Tortula ruralis]
  misc_feature (120)..(230): NCBI GI NO: 2119018 NR Description: histone H3
  misc_feature (120)..(230): NCBI GI NO: 6686276 NR Description: HISTONE H3
  misc_feature (46)..(231): NCBI GI NO: 33146136 NR Description: histone H3 like protein [Arabis gemmifera]
NNAAPLFISPSPAPLKKDSPSTRPPVPRVLNRNRRPREQCEAPTAMARTKHQAVRKTAEKPKKKLQFERSGGASTSATPVSACVRGSVPSFCLFCGLLLLACKLFDGMQERAAGTGGRAASGGDSVKKTKPRHRWRPGTVALREIRKYQKSTEPLIPFAPFVRVVRELTNFVTNGKVERYTAEALLALQEAAEFHLIELFEMANLCAIHAKRVTIMQKDIQLARRIGGRRWA

SEQ ID NO: 29359 - protein, 187 aa, Zea mays subsp. mays
  peptide (1)..(187): Ceres Seq. ID no. 12408663
  misc_feature (65)..(185): Pfam Name: Pfam Description:  Core histone H2A/H2B/H3/H4
  misc_feature (65)..(187): NCBI GI NO: 21668094 NR Description: centromeric histone h3-like protein [Zea mays]
  misc_feature (1)..(41): NCBI GI NO: 21668094 NR Description: centromeric histone h3-like protein [Zea mays]
  misc_feature (62)..(186): NCBI GI NO: 40365140 NR Description: centromeric histone 3
  misc_feature (1)..(37): NCBI GI NO: 40365140 NR Description: centromeric histone 3
  misc_feature (75)..(185): NCBI GI NO: 17532993 NR Description: Histone H3 (15.3 kD) [Caenorhabditis elegans]
  misc_feature (75)..(185): NCBI GI NO: 122090 NR Description: Histone H3
  misc_feature (66)..(185): NCBI GI NO: 4574208 NR Description: histone H3 [Tortula ruralis]
  misc_feature (75)..(185): NCBI GI NO: 2119018 NR Description: histone H3
  misc_feature (75)..(185): NCBI GI NO: 6686276 NR Description: HISTONE H3
  misc_feature (1)..(186): NCBI GI NO: 33146136 NR Description: histone H3 like protein [Arabis gemmifera]
MARTKHQAVRKTAEKPKKKLQFERSGGASTSATPVSACVRGSVPSFCLFCGLLLLACKLFDGMQERAAGTGGRAASGGDSVKKTKPRHRWRPGTVALREIRKYQKSTEPLIPFAPFVRVVRELTNFVTNGKVERYTAEALLALQEAAEFHLIELFEMANLCAIHAKRVTIMQKDIQLARRIGGRRWA

SEQ ID NO: 29360 - protein, 125 aa, Zea mays subsp. mays
  peptide (1)..(125): Ceres Seq. ID no. 12408664
  misc_feature (3)..(123): Pfam Name: Pfam Description:  Core histone H2A/H2B/H3/H4
  misc_feature (3)..(125): NCBI GI NO: 21668094 NR Description: centromeric histone h3-like protein [Zea mays]
  misc_feature (1)..(124): NCBI GI NO: 40365140 NR Description: centromeric histone 3
  misc_feature (13)..(123): NCBI GI NO: 17532993 NR Description: Histone H3 (15.3 kD) [Caenorhabditis elegans]
  misc_feature (13)..(123): NCBI GI NO: 122090 NR Description: Histone H3
  misc_feature (4)..(123): NCBI GI NO: 4574208 NR Description: histone H3 [Tortula ruralis]
  misc_feature (13)..(123): NCBI GI NO: 2119018 NR Description: histone H3
  misc_feature (13)..(123): NCBI GI NO: 6686276 NR Description: HISTONE H3
  misc_feature (1)..(124): NCBI GI NO: 33146136 NR Description: histone H3 like protein [Arabis gemmifera]
  misc_feature (6)..(123): NCBI GI NO: 38564127 NR Description: histone 3 [Drosophila pseudoobscura]
  misc_feature (23)..(123): NCBI GI NO: 81850 NR Description: histone H3 (clone pH3c-1) - alfalfa (fragment)
MQERAAGTGGRAASGGDSVKKTKPRHRWRPGTVALREIRKYQKSTEPLIPFAPFVRVVRELTNFVTNGKVERYTAEALLALQEAAEFHLIELFEMANLCAIHAKRVTIMQKDIQLARRIGGRRWA

SEQ ID NO: 29361 - DNA, 1805 bp, Zea mays subsp. mays
  misc_feature (1)..(1805): Ceres Seq. ID no. 12408657
aagtcctgctagctccataaaggcgcagccggccggctggccggtagcagtcagccagccagccagccatggagacggcctccttcctctcagtggcgctggccctggcggccctcgtccccgtctcgctgctccttgtgaaccggcccctctacggcaaactgcccccggggccgcggcggcgtcccgtggtgggtaacctgttcgacgtgcagcccgtgcggtgccggtgctaccaggagtgggcgcgccggtacgggcccatcatgacggtgtggctgggcacgtcgcccacggtggtggtgtccacgtcggagctggccaaggaggtgctcaagacccacgaccagcagctcgccgaccgctgccgggaccgctccaccgagagcttcagccgaggcggccaggacctcatctgggccgactacggcccccactacatcaaggtgcgcaagctctgcaacctcgagctcttcacgcagcgccgcctcgaggcgctcaggcccatccgcgaggacgaggtcaccgccatggtcgagtccgtctacaaagccgtcaccgcgcctggcagtgcagggaagccgttggttgtaaagaaccacctctcgatggtggccttcaacaacatcacgcggctggccttcgggaagcggttcgtggacgcggccggcgagctggacgagcaagggcgcgagttcaaggggatcgtccacaacggcatcaagatcggtgcgtccctctccatcgcgcagcacatcccgtggctacgctggctggccccggtcgacgagcaggccttcaaagcccacggcgaacggcgcgaccgcctcaccgtgaagatcatggaggagcacgccagggccctcaagcagcgcggcgcccagcagcacttcgtcgacgcgctcttcactctcagggacaagtacgacctcagcgatgacaccgtcataggcctcctctgggacatgatcaccgccggcacggacacgacggtgatctcggtggagtgggcgatggcggagctgctgaggaaccccagagtgcaggagaagctgcaggaggagctggaccgtgtcgtcggccgcgaccgggtcctgtcggagacggacttcccgaacctgccttacctgcaggccgtcgtcaaggagtccctgcgcctgcacccgccgacgccgctgatgctcccccacagggccagcgccagcgtcaagatcgccggctacgacatccccaagggcgccaacgtcgtcgtcaacgtgtgggcggtggcgcgcgaccccgaggtgtgggacagcccgctcgagttccggccggagcggttcctccgggagaacatcgacatcaagggcgccgacttccgcgtgctgccgttcggcgccggccgccgggtgtgccccggcgcgcagctcgggatcaacctcgtggcgtccatgatcggccacatgctgcaccacttcacgtggacgctgccgagcgggacctgtcccgaggacgtgagcatgatggagtcccccgggctcgtcaccttcatggccacgccgctgcaggccgtcgccacgccgcgcctggacaaggaggaactgtacaggcgtgtcccttcggacgtgtgagccgtcggcgtcctggcatctgctgcgttccctgttttgaaacctgctgctgctgttgcgaatttgtgtaccattaactattcgctggtgatgtacgtgtcatagtcgtgtacgagcattttgtgtactgcagaacttgatcgctgagcatacacttttgcccggtagtaatttacaatttcagcattgcaaatt

SEQ ID NO: 29362 - protein, 513 aa, Zea mays subsp. mays
  peptide (1)..(513): Ceres Seq. ID no. 12408658
  misc_feature (33)..(487): Pfam Name: Pfam Description:  Cytochrome P450
  misc_feature (1)..(513): NCBI GI NO: 5915857 NR Description: Cytochrome P450 98A1
  misc_feature (5)..(513): NCBI GI NO: 30688445 NR Description: cytochrome P450 98A3 [Arabidopsis thaliana]
  misc_feature (11)..(513): NCBI GI NO: 5915858 NR Description: Cytochrome P450 98A2
  misc_feature (7)..(513): NCBI GI NO: 22651521 NR Description: p-coumaroyl shikimate 3'-hydroxylase isoform 2
  misc_feature (7)..(513): NCBI GI NO: 22651519 NR Description: p-coumaroyl shikimate 3'-hydroxylase isoform 1
  misc_feature (11)..(510): NCBI GI NO: 17978651 NR Description: p-coumarate 3-hydroxylase [Pinus taeda]
  misc_feature (9)..(513): NCBI GI NO: 26522472 NR Description: cytochrome P-450 [Lithospermum erythrorhizon]
  misc_feature (26)..(509): NCBI GI NO: 27650337 NR Description: putative cytochrome P450
  misc_feature (19)..(511): NCBI GI NO: 17978831 NR Description: p-coumarate 3-hydroxylase [Sesamum indicum]
  misc_feature (155)..(513): NCBI GI NO: 20196936 NR Description: putative cytochrome P450 [Arabidopsis thaliana]
METASFLSVALALAALVPVSLLLVNRPLYGKLPPGPRRRPVVGNLFDVQPVRCRCYQEWARRYGPIMTVWLGTSPTVVVSTSELAKEVLKTHDQQLADRCRDRSTESFSRGGQDLIWADYGPHYIKVRKLCNLELFTQRRLEALRPIREDEVTAMVESVYKAVTAPGSAGKPLVVKNHLSMVAFNNITRLAFGKRFVDAAGELDEQGREFKGIVHNGIKIGASLSIAQHIPWLRWLAPVDEQAFKAHGERRDRLTVKIMEEHARALKQRGAQQHFVDALFTLRDKYDLSDDTVIGLLWDMITAGTDTTVISVEWAMAELLRNPRVQEKLQEELDRVVGRDRVLSETDFPNLPYLQAVVKESLRLHPPTPLMLPHRASASVKIAGYDIPKGANVVVNVWAVARDPEVWDSPLEFRPERFLRENIDIKGADFRVLPFGAGRRVCPGAQLGINLVASMIGHMLHHFTWTLPSGTCPEDVSMMESPGLVTFMATPLQAVATPRLDKEELYRRVPSDV

SEQ ID NO: 29363 - protein, 447 aa, Zea mays subsp. mays
  peptide (1)..(447): Ceres Seq. ID no. 12408659
  misc_feature (1)..(421): Pfam Name: Pfam Description:  Cytochrome P450
  misc_feature (1)..(447): NCBI GI NO: 5915857 NR Description: Cytochrome P450 98A1
  misc_feature (1)..(447): NCBI GI NO: 30688445 NR Description: cytochrome P450 98A3 [Arabidopsis thaliana]
  misc_feature (1)..(447): NCBI GI NO: 5915858 NR Description: Cytochrome P450 98A2
  misc_feature (1)..(447): NCBI GI NO: 22651521 NR Description: p-coumaroyl shikimate 3'-hydroxylase isoform 2
  misc_feature (1)..(447): NCBI GI NO: 22651519 NR Description: p-coumaroyl shikimate 3'-hydroxylase isoform 1
  misc_feature (1)..(444): NCBI GI NO: 17978651 NR Description: p-coumarate 3-hydroxylase [Pinus taeda]
  misc_feature (1)..(447): NCBI GI NO: 26522472 NR Description: cytochrome P-450 [Lithospermum erythrorhizon]
  misc_feature (1)..(443): NCBI GI NO: 27650337 NR Description: putative cytochrome P450
  misc_feature (1)..(445): NCBI GI NO: 17978831 NR Description: p-coumarate 3-hydroxylase [Sesamum indicum]
  misc_feature (89)..(447): NCBI GI NO: 20196936 NR Description: putative cytochrome P450 [Arabidopsis thaliana]
MTVWLGTSPTVVVSTSELAKEVLKTHDQQLADRCRDRSTESFSRGGQDLIWADYGPHYIKVRKLCNLELFTQRRLEALRPIREDEVTAMVESVYKAVTAPGSAGKPLVVKNHLSMVAFNNITRLAFGKRFVDAAGELDEQGREFKGIVHNGIKIGASLSIAQHIPWLRWLAPVDEQAFKAHGERRDRLTVKIMEEHARALKQRGAQQHFVDALFTLRDKYDLSDDTVIGLLWDMITAGTDTTVISVEWAMAELLRNPRVQEKLQEELDRVVGRDRVLSETDFPNLPYLQAVVKESLRLHPPTPLMLPHRASASVKIAGYDIPKGANVVVNVWAVARDPEVWDSPLEFRPERFLRENIDIKGADFRVLPFGAGRRVCPGAQLGINLVASMIGHMLHHFTWTLPSGTCPEDVSMMESPGLVTFMATPLQAVATPRLDKEELYRRVPSDV

SEQ ID NO: 29364 - protein, 359 aa, Zea mays subsp. mays
  peptide (1)..(359): Ceres Seq. ID no. 12408660
  misc_feature (1)..(333): Pfam Name: Pfam Description:  Cytochrome P450
  misc_feature (1)..(359): NCBI GI NO: 5915857 NR Description: Cytochrome P450 98A1
  misc_feature (1)..(359): NCBI GI NO: 30688445 NR Description: cytochrome P450 98A3 [Arabidopsis thaliana]
  misc_feature (1)..(359): NCBI GI NO: 5915858 NR Description: Cytochrome P450 98A2
  misc_feature (1)..(359): NCBI GI NO: 22651521 NR Description: p-coumaroyl shikimate 3'-hydroxylase isoform 2
  misc_feature (1)..(359): NCBI GI NO: 22651519 NR Description: p-coumaroyl shikimate 3'-hydroxylase isoform 1
  misc_feature (1)..(356): NCBI GI NO: 17978651 NR Description: p-coumarate 3-hydroxylase [Pinus taeda]
  misc_feature (1)..(359): NCBI GI NO: 26522472 NR Description: cytochrome P-450 [Lithospermum erythrorhizon]
  misc_feature (1)..(355): NCBI GI NO: 27650337 NR Description: putative cytochrome P450
  misc_feature (1)..(357): NCBI GI NO: 17978831 NR Description: p-coumarate 3-hydroxylase [Sesamum indicum]
  misc_feature (1)..(359): NCBI GI NO: 20196936 NR Description: putative cytochrome P450 [Arabidopsis thaliana]
MVESVYKAVTAPGSAGKPLVVKNHLSMVAFNNITRLAFGKRFVDAAGELDEQGREFKGIVHNGIKIGASLSIAQHIPWLRWLAPVDEQAFKAHGERRDRLTVKIMEEHARALKQRGAQQHFVDALFTLRDKYDLSDDTVIGLLWDMITAGTDTTVISVEWAMAELLRNPRVQEKLQEELDRVVGRDRVLSETDFPNLPYLQAVVKESLRLHPPTPLMLPHRASASVKIAGYDIPKGANVVVNVWAVARDPEVWDSPLEFRPERFLRENIDIKGADFRVLPFGAGRRVCPGAQLGINLVASMIGHMLHHFTWTLPSGTCPEDVSMMESPGLVTFMATPLQAVATPRLDKEELYRRVPSDV

SEQ ID NO: 29365 - DNA, 1655 bp, Zea mays subsp. mays
  misc_feature (1)..(1655): Ceres Seq. ID no. 12347506
gaggccttgcctgcctgccttgtttccccaaccccctcggaccctcacatcttcctcggtctctccgccgcccaccacctccatccccctcctctctttatacgccaccgcggcggggcttcccccatccctctgtccgttcgctgcattgctcccctaaccgttcggccaggagacagcggagagggcagagatggcggccgcgtccttcaccgccgccaagttcctggcgccggtggccgcgagatccggcggagagagggcgcccccgctccccgccggcgcctcgtcctcctccttcgccaggaccctgcgccgcggcgcggtgcaccacccgcgcctgcgcaccgcgctcgccgtctcctccgacctgctcgctgggaacaaggccgcgcaggccgccgccgcgcatccggcggttacacgggaagaggcactggagctgtatgaggacatggttcttggccgtgtattcgaggacatgtgtgcacaaatgtactaccgtggcaagatgtttggtttcgtccacctttacaatggccaggaggctgtctccactggcttcatcaaacttctgaaccaagctgactgtgttgttagcacataccgtgatcatgtccatgcgctgtccaagggcgtcccggcacgttctgtcatggctgagctctttggcaaggccacaggctgctgccgtggacagggtggttccatgcacatgttctctgctccccacaacctcctgggaggctttgccttcatcggagagggcattcctgttgccactggtgcagcctttgctgctaagtaccgtcatgaggtgctcaaggagtctggccctgatgggcttgatgtcacattggcgttctttggcgatggtacctgtaataatggccagttctttgagtgtctgaacatggcacagctttggaagcttcctattgtgtttgttgtggagaataacctgtgggcaattggaatgtcacacattagggctacatcggacccagagatttggaagaaggggccagcatttggaatgcctggggtgcatgttgatggtatggatgtcctgaaggtcagggaggttgctaaggaggcaattgagagggcaaggagaggtgaagggccaaccctagtcgagtgtgaaacatacaggttccggggtcactcccttgcagacccagatgagctcaggaagcctgatgagaaaacacactacgccgcaagggattctatcacggccttgaagaagtacatcatagagcagaacctcgcaaccgaatccgagctgaagagcatcgagaagaagatcgacgatgtcgttgaggaggctgtcgagtttgctgacgcgagcccgcatccgccgcgcagccagctgttggagaacgtgtttgccgaccccaaaggctttggtatcggccccgatgggaagtacaggtgcgaggatcccaagttcacccaaggcactgcccaagtttaaggaggttaatctgcgctctgtaccactgtgcttgagttctctagttttgtcgatcccagtgtcatgttaaggatactgtatgcataaggcggtccatttctttggctcttaggcttgtgtctgatactattgtgtaatttattcgaatgctcaactgatgcccatgttttatggc

SEQ ID NO: 29366 - protein, 428 aa, Zea mays subsp. mays
  peptide (1)..(428): Ceres Seq. ID no. 12347507
  misc_feature (86)..(393): Pfam Name: Pfam Description:  Dehydrogenase E1 component
  misc_feature (2)..(428): NCBI GI NO: 38344868 NR Description: OSJNBa0020P07.11
  misc_feature (3)..(428): NCBI GI NO: 15223294 NR Description: pyruvate dehydrogenase E1 alpha subunit
  misc_feature (3)..(417): NCBI GI NO: 6715645 NR Description: T25K16.8 [Arabidopsis thaliana]
  misc_feature (72)..(402): NCBI GI NO: 17230200 NR Description: pyruvate dehydrogenase E1 component, alpha subunit
  misc_feature (76)..(402): NCBI GI NO: 23128827 NR Description: hypothetical protein [Nostoc punctiforme]
  misc_feature (76)..(402): NCBI GI NO: 11465733 NR Description: pyruvate dehydrogenase E1 component alpha subunit
  misc_feature (72)..(402): NCBI GI NO: 16331186 NR Description: pyruvate dehydrogenase E1 component, alpha subunit
  misc_feature (76)..(402): NCBI GI NO: 23041416 NR Description: hypothetical protein
  misc_feature (69)..(402): NCBI GI NO: 37522413 NR Description: pyruvate dehydrogenase E1 alpha-subunit
  misc_feature (75)..(402): NCBI GI NO: 22298712 NR Description: pyruvate dehydrogenase E1 component, alpha subunit
MAAASFTAAKFLAPVAARSGGERAPPLPAGASSSSFARTLRRGAVHHPRLRTALAVSSDLLAGNKAAQAAAAHPAVTREEALELYEDMVLGRVFEDMCAQMYYRGKMFGFVHLYNGQEAVSTGFIKLLNQADCVVSTYRDHVHALSKGVPARSVMAELFGKATGCCRGQGGSMHMFSAPHNLLGGFAFIGEGIPVATGAAFAAKYRHEVLKESGPDGLDVTLAFFGDGTCNNGQFFECLNMAQLWKLPIVFVVENNLWAIGMSHIRATSDPEIWKKGPAFGMPGVHVDGMDVLKVREVAKEAIERARRGEGPTLVECETYRFRGHSLADPDELRKPDEKTHYAARDSITALKKYIIEQNLATESELKSIEKKIDDVVEEAVEFADASPHPPRSQLLENVFADPKGFGIGPDGKYRCEDPKFTQGTAQV

SEQ ID NO: 29367 - protein, 341 aa, Zea mays subsp. mays
  peptide (1)..(341): Ceres Seq. ID no. 12347508
  misc_feature (1)..(306): Pfam Name: Pfam Description:  Dehydrogenase E1 component
  misc_feature (1)..(341): NCBI GI NO: 38344868 NR Description: OSJNBa0020P07.11
  misc_feature (1)..(341): NCBI GI NO: 15223294 NR Description: pyruvate dehydrogenase E1 alpha subunit
  misc_feature (1)..(330): NCBI GI NO: 6715645 NR Description: T25K16.8 [Arabidopsis thaliana]
  misc_feature (1)..(315): NCBI GI NO: 17230200 NR Description: pyruvate dehydrogenase E1 component, alpha subunit
  misc_feature (1)..(315): NCBI GI NO: 23128827 NR Description: hypothetical protein [Nostoc punctiforme]
  misc_feature (1)..(315): NCBI GI NO: 11465733 NR Description: pyruvate dehydrogenase E1 component alpha subunit
  misc_feature (1)..(315): NCBI GI NO: 16331186 NR Description: pyruvate dehydrogenase E1 component, alpha subunit
  misc_feature (1)..(315): NCBI GI NO: 23041416 NR Description: hypothetical protein
  misc_feature (1)..(315): NCBI GI NO: 37522413 NR Description: pyruvate dehydrogenase E1 alpha-subunit
  misc_feature (1)..(315): NCBI GI NO: 22298712 NR Description: pyruvate dehydrogenase E1 component, alpha subunit
MVLGRVFEDMCAQMYYRGKMFGFVHLYNGQEAVSTGFIKLLNQADCVVSTYRDHVHALSKGVPARSVMAELFGKATGCCRGQGGSMHMFSAPHNLLGGFAFIGEGIPVATGAAFAAKYRHEVLKESGPDGLDVTLAFFGDGTCNNGQFFECLNMAQLWKLPIVFVVENNLWAIGMSHIRATSDPEIWKKGPAFGMPGVHVDGMDVLKVREVAKEAIERARRGEGPTLVECETYRFRGHSLADPDELRKPDEKTHYAARDSITALKKYIIEQNLATESELKSIEKKIDDVVEEAVEFADASPHPPRSQLLENVFADPKGFGIGPDGKYRCEDPKFTQGTAQV

SEQ ID NO: 29368 - protein, 332 aa, Zea mays subsp. mays
  peptide (1)..(332): Ceres Seq. ID no. 12347509
  misc_feature (1)..(297): Pfam Name: Pfam Description:  Dehydrogenase E1 component
  misc_feature (1)..(332): NCBI GI NO: 38344868 NR Description: OSJNBa0020P07.11
  misc_feature (1)..(332): NCBI GI NO: 15223294 NR Description: pyruvate dehydrogenase E1 alpha subunit
  misc_feature (1)..(321): NCBI GI NO: 6715645 NR Description: T25K16.8 [Arabidopsis thaliana]
  misc_feature (1)..(306): NCBI GI NO: 17230200 NR Description: pyruvate dehydrogenase E1 component, alpha subunit
  misc_feature (1)..(306): NCBI GI NO: 23128827 NR Description: hypothetical protein [Nostoc punctiforme]
  misc_feature (1)..(306): NCBI GI NO: 11465733 NR Description: pyruvate dehydrogenase E1 component alpha subunit
  misc_feature (1)..(306): NCBI GI NO: 16331186 NR Description: pyruvate dehydrogenase E1 component, alpha subunit
  misc_feature (1)..(306): NCBI GI NO: 23041416 NR Description: hypothetical protein
  misc_feature (1)..(306): NCBI GI NO: 37522413 NR Description: pyruvate dehydrogenase E1 alpha-subunit
  misc_feature (1)..(306): NCBI GI NO: 22298712 NR Description: pyruvate dehydrogenase E1 component, alpha subunit
MCAQMYYRGKMFGFVHLYNGQEAVSTGFIKLLNQADCVVSTYRDHVHALSKGVPARSVMAELFGKATGCCRGQGGSMHMFSAPHNLLGGFAFIGEGIPVATGAAFAAKYRHEVLKESGPDGLDVTLAFFGDGTCNNGQFFECLNMAQLWKLPIVFVVENNLWAIGMSHIRATSDPEIWKKGPAFGMPGVHVDGMDVLKVREVAKEAIERARRGEGPTLVECETYRFRGHSLADPDELRKPDEKTHYAARDSITALKKYIIEQNLATESELKSIEKKIDDVVEEAVEFADASPHPPRSQLLENVFADPKGFGIGPDGKYRCEDPKFTQGTAQV

SEQ ID NO: 29369 - DNA, 1825 bp, Zea mays subsp. mays
  misc_feature (1)..(1825): Ceres Seq. ID no. 13498687
tagaacatcctaatcgaaaaacagcacgcataggacgaactaccgatgcaagctgcgatcgatcagtcaccgcatctccggttccgcgcaggcatggacgacaagtcctgctacgtggccaccggcctctccctggcggccatcctcctcgtcctccaccgcctcgtggtccgtgctggcggcaaggggaacgccgccgcgcggcggtgtgcctcctagccctcccgccgtcccgttcctcgggcacctccacctgctagcatcggagtgccctctccactcgtcgctggcccgcctcgcggcgcgccacggccccgtgctctcgctgcgcctgggctcccgcgccgccgtggtggtgtcgtcgccggagtgcgccgaggcgtgcttcacggagcacgacgtggcgttcgccaaccgccccagactgacctcgcaggcgctggcctccttcggcggcgccgcgctggccgtgtctagctacgggccctactggcgcaacctccggcgcgtggccgccgtgcgcctcctctccacgcaccgcgtggcgtgcatgtgccccgtcatctcggccgaggtgcgcgccatgctgcgccgggtggggcgtgcggccgaggcggcggggcgcgtccagctcaaggccagcctgttcgagctctccctcagcgtgctcatggagaccatcgcgcagaccaagacgtcgcgcgccgacgacgcggacgatgccgtgtcgcccgaggcgcacgagttccggcggatcgtcgacgagatcctgccctacctcggcgccaccaacctgtgggactacctgccgctcctgcggcggttcgacgtgctcggggtgaggaacaagatcagggacgttgtcggcaggagggacgccttcctgcagcggctcatcgacgcggagcggcggaggctggacggcgacggtgacggcgacgacggcgagaagaagagcatgatcgccgtgatgctctcgctgcagaagtcggagccggacgtgtacacggacaccatgatcatggcactgtgcgggaacttgtttacagccggaacggagacgacgtcgtccacgatagaatgggccatgtcgctgttgctgaaccacccggacgcgctgaagaaggccgaggcagagatcgaggcggccgtgggcgcgtcccgcctcatcaccatggacgacgtgcccgggctgggctacctgcagtgcgtcatcaacgagacgctgcgcctgtacccggtggccccgctgctgctgccgcacgagtcggcggcggactgcacggtcggcggctacgacgtgccccgcggcacgctgctgttcgtcaacgcgtacgccatccacagggacccggcggcgtgggaggagccggacgagttcaggccggagcggttccgcgacggcaaggccgagggccggctgatgctgccgttcgggatgggacggcgcaggtgccccggggagacactcgcgctgcggaccgccggcctcgtgctcgccacgctcatccagtgcttccactgggacaggatcgatggcgctgagatcgacatgaccgagagcggcgggctcaccatgccccgggccgtcccgttggaggccacctgcaagcctcgcgaagccatgcgtcatgttcttcagcagctctgattggtctatgtgctaaacattctcatccctattctctcttgtgtgtgtggcagtacgaacagcacgtgctagctaaataagctgcgagcaatagctatccgcgtaacagtatggttcgtcaaagttgttatctttcaaaagttatctagtactataaacaaattgttcgtgtcg

SEQ ID NO: 29370 - protein, 366 aa, Zea mays subsp. mays
  peptide (1)..(366): Ceres Seq. ID no. 13498688
  misc_feature (1)..(366): NCBI GI NO: 13661746 NR Description: putative cytochrome P450 [Lolium rigidum]
  misc_feature (1)..(366): NCBI GI NO: 13661748 NR Description: putative cytochrome P450 [Lolium rigidum]
  misc_feature (1)..(366): NCBI GI NO: 13661744 NR Description: putative cytochrome P450 [Lolium rigidum]
  misc_feature (1)..(366): NCBI GI NO: 14488353 NR Description: putative cytochrome P450
  misc_feature (1)..(366): NCBI GI NO: 14488355 NR Description: putative cytochrome P450
  misc_feature (1)..(366): NCBI GI NO: 14488373 NR Description: putative cytochrome P450
  misc_feature (1)..(365): NCBI GI NO: 14488358 NR Description: putative cytochrome P450
  misc_feature (1)..(366): NCBI GI NO: 3059131 NR Description: cytochrome P450 [Helianthus tuberosus]
  misc_feature (1)..(366): NCBI GI NO: 7430635 NR Description: cytochrome P450 (EC 1
  misc_feature (1)..(366): NCBI GI NO: 38344454 NR Description: OSJNBa0017P10.2
MCPVISAEVRAMLRRVGRAAEAAGRVQLKASLFELSLSVLMETIAQTKTSRADDADDAVSPEAHEFRRIVDEILPYLGATNLWDYLPLLRRFDVLGVRNKIRDVVGRRDAFLQRLIDAERRRLDGDGDGDDGEKKSMIAVMLSLQKSEPDVYTDTMIMALCGNLFTAGTETTSSTIEWAMSLLLNHPDALKKAEAEIEAAVGASRLITMDDVPGLGYLQCVINETLRLYPVAPLLLPHESAADCTVGGYDVPRGTLLFVNAYAIHRDPAAWEEPDEFRPERFRDGKAEGRLMLPFGMGRRRCPGETLALRTAGLVLATLIQCFHWDRIDGAEIDMTESGGLTMPRAVPLEATCKPREAMRHVLQQL

SEQ ID NO: 29371 - protein, 355 aa, Zea mays subsp. mays
  peptide (1)..(355): Ceres Seq. ID no. 13498689
  misc_feature (1)..(355): NCBI GI NO: 13661746 NR Description: putative cytochrome P450 [Lolium rigidum]
  misc_feature (1)..(355): NCBI GI NO: 13661748 NR Description: putative cytochrome P450 [Lolium rigidum]
  misc_feature (1)..(355): NCBI GI NO: 13661744 NR Description: putative cytochrome P450 [Lolium rigidum]
  misc_feature (1)..(355): NCBI GI NO: 14488353 NR Description: putative cytochrome P450
  misc_feature (1)..(355): NCBI GI NO: 14488355 NR Description: putative cytochrome P450
  misc_feature (1)..(355): NCBI GI NO: 14488373 NR Description: putative cytochrome P450
  misc_feature (1)..(354): NCBI GI NO: 14488358 NR Description: putative cytochrome P450
  misc_feature (1)..(355): NCBI GI NO: 3059131 NR Description: cytochrome P450 [Helianthus tuberosus]
  misc_feature (1)..(355): NCBI GI NO: 7430635 NR Description: cytochrome P450 (EC 1
  misc_feature (1)..(355): NCBI GI NO: 38344454 NR Description: OSJNBa0017P10.2
MLRRVGRAAEAAGRVQLKASLFELSLSVLMETIAQTKTSRADDADDAVSPEAHEFRRIVDEILPYLGATNLWDYLPLLRRFDVLGVRNKIRDVVGRRDAFLQRLIDAERRRLDGDGDGDDGEKKSMIAVMLSLQKSEPDVYTDTMIMALCGNLFTAGTETTSSTIEWAMSLLLNHPDALKKAEAEIEAAVGASRLITMDDVPGLGYLQCVINETLRLYPVAPLLLPHESAADCTVGGYDVPRGTLLFVNAYAIHRDPAAWEEPDEFRPERFRDGKAEGRLMLPFGMGRRRCPGETLALRTAGLVLATLIQCFHWDRIDGAEIDMTESGGLTMPRAVPLEATCKPREAMRHVLQQL

SEQ ID NO: 29372 - protein, 326 aa, Zea mays subsp. mays
  peptide (1)..(326): Ceres Seq. ID no. 13498690
  misc_feature (1)..(326): NCBI GI NO: 13661746 NR Description: putative cytochrome P450 [Lolium rigidum]
  misc_feature (1)..(326): NCBI GI NO: 13661748 NR Description: putative cytochrome P450 [Lolium rigidum]
  misc_feature (1)..(326): NCBI GI NO: 13661744 NR Description: putative cytochrome P450 [Lolium rigidum]
  misc_feature (1)..(326): NCBI GI NO: 14488353 NR Description: putative cytochrome P450
  misc_feature (1)..(326): NCBI GI NO: 14488355 NR Description: putative cytochrome P450
  misc_feature (1)..(326): NCBI GI NO: 14488373 NR Description: putative cytochrome P450
  misc_feature (1)..(325): NCBI GI NO: 14488358 NR Description: putative cytochrome P450
  misc_feature (1)..(326): NCBI GI NO: 3059131 NR Description: cytochrome P450 [Helianthus tuberosus]
  misc_feature (1)..(326): NCBI GI NO: 7430635 NR Description: cytochrome P450 (EC 1
  misc_feature (1)..(326): NCBI GI NO: 38344454 NR Description: OSJNBa0017P10.2
METIAQTKTSRADDADDAVSPEAHEFRRIVDEILPYLGATNLWDYLPLLRRFDVLGVRNKIRDVVGRRDAFLQRLIDAERRRLDGDGDGDDGEKKSMIAVMLSLQKSEPDVYTDTMIMALCGNLFTAGTETTSSTIEWAMSLLLNHPDALKKAEAEIEAAVGASRLITMDDVPGLGYLQCVINETLRLYPVAPLLLPHESAADCTVGGYDVPRGTLLFVNAYAIHRDPAAWEEPDEFRPERFRDGKAEGRLMLPFGMGRRRCPGETLALRTAGLVLATLIQCFHWDRIDGAEIDMTESGGLTMPRAVPLEATCKPREAMRHVLQQL

SEQ ID NO: 29373 - DNA, 936 bp, Zea mays subsp. mays; identical to SEQ ID NO: 24070
  misc_feature (1)..(936): Ceres Seq. ID no. 13564260

SEQ ID NO: 29374 - protein, 212 aa, Zea mays subsp. mays; identical to SEQ ID NO: 24071
  peptide (1)..(212): Ceres Seq. ID no. 13564261
  misc_feature (51)..(87): Pfam Name: Pfam Description:  QXW lectin repeat
  misc_feature (27)..(111): NCBI GI NO: 7489571 NR Description: r40c1 protein - rice
  misc_feature (27)..(111): NCBI GI NO: 34902150 NR Description: Putative r40c1 protein - rice
  misc_feature (27)..(111): NCBI GI NO: 7489572 NR Description: r40g2 protein - rice (fragment)
  misc_feature (27)..(111): NCBI GI NO: 34394517 NR Description: r40g2 protein
  misc_feature (48)..(111): NCBI GI NO: 7489573 NR Description: r40g3 protein - rice
  misc_feature (44)..(111): NCBI GI NO: 34394517 NR Description: r40g2 protein
  misc_feature (44)..(111): NCBI GI NO: 34394518 NR Description: putative r40c2 protein
  misc_feature (44)..(111): NCBI GI NO: 7489572 NR Description: r40g2 protein - rice (fragment)
  misc_feature (41)..(111): NCBI GI NO: 34894060 NR Description: putative r40c1 protein
  misc_feature (88)..(111): NCBI GI NO: 34394518 NR Description: putative r40c2 protein

SEQ ID NO: 29375 - protein, 186 aa, Zea mays subsp. mays; identical to SEQ ID NO: 24072
  peptide (1)..(186): Ceres Seq. ID no. 13564262
  misc_feature (25)..(61): Pfam Name: Pfam Description:  QXW lectin repeat
  misc_feature (1)..(85): NCBI GI NO: 7489571 NR Description: r40c1 protein - rice
  misc_feature (1)..(85): NCBI GI NO: 34902150 NR Description: Putative r40c1 protein - rice
  misc_feature (1)..(85): NCBI GI NO: 7489572 NR Description: r40g2 protein - rice (fragment)
  misc_feature (1)..(85): NCBI GI NO: 34394517 NR Description: r40g2 protein
  misc_feature (22)..(85): NCBI GI NO: 7489573 NR Description: r40g3 protein - rice
  misc_feature (18)..(85): NCBI GI NO: 34394517 NR Description: r40g2 protein
  misc_feature (18)..(85): NCBI GI NO: 34394518 NR Description: putative r40c2 protein
  misc_feature (18)..(85): NCBI GI NO: 7489572 NR Description: r40g2 protein - rice (fragment)
  misc_feature (15)..(85): NCBI GI NO: 34894060 NR Description: putative r40c1 protein
  misc_feature (62)..(85): NCBI GI NO: 34394518 NR Description: putative r40c2 protein

SEQ ID NO: 29376 - protein, 125 aa, Zea mays subsp. mays; identical to SEQ ID NO: 24073
  peptide (1)..(125): Ceres Seq. ID no. 13564263
  misc_feature (1)..(24): NCBI GI NO: 7489571 NR Description: r40c1 protein - rice
  misc_feature (1)..(24): NCBI GI NO: 34902150 NR Description: Putative r40c1 protein - rice
  misc_feature (1)..(24): NCBI GI NO: 7489572 NR Description: r40g2 protein - rice (fragment)
  misc_feature (1)..(24): NCBI GI NO: 34394517 NR Description: r40g2 protein
  misc_feature (1)..(24): NCBI GI NO: 7489573 NR Description: r40g3 protein - rice
  misc_feature (1)..(24): NCBI GI NO: 34394517 NR Description: r40g2 protein
  misc_feature (1)..(24): NCBI GI NO: 34394518 NR Description: putative r40c2 protein
  misc_feature (1)..(24): NCBI GI NO: 7489572 NR Description: r40g2 protein - rice (fragment)
  misc_feature (1)..(24): NCBI GI NO: 34894060 NR Description: putative r40c1 protein
  misc_feature (1)..(24): NCBI GI NO: 34394518 NR Description: putative r40c2 protein

SEQ ID NO: 29377 - DNA, 1417 bp, Zea mays subsp. mays
  misc_feature (1)..(1417): Ceres Seq. ID no. 12408649
aggtgacaaatccacgcggagtccgctgaaattttggtcgccccatgcccgttctagacgccatggacgatgcggcggcggcggcggtagataggcacggcggcttctagaccgtctccgttttctgcgcgttggccgtcgggggaagtacacaataaacaaagcaagagcagaggtgcaactgggctgctgtgtcctctgcctcttctccttcctgtcgttctgcgctgccccgacccccgagtgcccctggtcttgtcctcctctccctgctgacctcggagcggagcggagcaagcagccgccaggagggaaggatccatggccgggagatcgcggtacgacaaccccttcgaggagggcggcgccgacgaggtcaaccctttcgcggaccaagctaagagaggaggatcgagtgctcagtccggctactctggtggcgcgttctacacgacgcaatcgcaacgccctgctcctcctagcacacgcctttcgcctcttcctcctgaacctgccgacttctacaacgacttcgctaccccggtggatatccccatggacacaaacaaggacatgaagacaagggagaaggagcttctggccaaggaggccgagctgaacaggcgtgagaaggaaataaaaaggcgagaagatgctgcggcacgagctggtgtcgtgttggaagagaagaactggcccccgtttttccccatcattcataacgatatcggcaacgagatacctgtccatctgcaaagaacgctgtacgtcgcgttcgcgtcgctcttagggttggtcttgtgcctgttttggaacataatctgcgttaccgctgcctgggcaaaagggtcaggtccaaagatatggtttctcgcaatcatatacttcatcctcggatgccccggtgcatactacctttggtaccggccactataccgcgcaatgaggaacgagagcgctctcaagttcggatggtttttcctcttctacttggttcatatcgccttctgcgcgtacgcagctgtttctccttcaattctcttcgtgggaaaatcgttaaccgggattttgccagcaatcaacttgataggcgacagcgtcattgttgggatcttctacttcattggctttgcattgttctgcctggaggctttgctaagcgtgtgggtcattcagcgcgtctacctgtacttccgagggagcgggaaagaagcggagatgaggcgtgaagcagcacgcggtgcagcgagggcagcgttttgatgaaagccgtatatagatgatatattatatatataggcacgacatacatacactgttcataatagtttgaagtgttttaggtcaacaggcatgtgtgtacagtagggttggcgtcctgtattacttctagttaaaagacgcaaggttttgagtc

SEQ ID NO: 29378 - protein, 313 aa, Zea mays subsp. mays
  peptide (1)..(313): Ceres Seq. ID no. 12408650
  misc_feature (121)..(295): Pfam Name: Pfam Description:  SCAMP family
  misc_feature (1)..(313): NCBI GI NO: 34899754 NR Description: putative secretory carrier membrane protein
  misc_feature (50)..(313): NCBI GI NO: 7109232 NR Description: secretory carrier membrane protein [Oryza sativa]
  misc_feature (49)..(312): NCBI GI NO: 15219893 NR Description: secretory carrier membrane protein
  misc_feature (50)..(312): NCBI GI NO: 15226410 NR Description: putative secretory carrier-associated membraneprotein
  misc_feature (54)..(312): NCBI GI NO: 3941289 NR Description: similarity to SCAMP37 [Pisum sativum]
  misc_feature (50)..(312): NCBI GI NO: 15220305 NR Description: secretory carrier membrane protein, putative
  misc_feature (52)..(312): NCBI GI NO: 18379111 NR Description: expressed protein; protein id: At1g03550
  misc_feature (59)..(294): NCBI GI NO: 15222550 NR Description: secretory carrier membrane protein, putative
  misc_feature (50)..(312): NCBI GI NO: 25402653 NR Description: hypothetical protein
  misc_feature (61)..(294): NCBI GI NO: 38347080 NR Description: OSJNBa0006A01.21
MAGRSRYDNPFEEGGADEVNPFADQAKRGGSSAQSGYSGGAFYTTQSQRPAPPSTRLSPLPPEPADFYNDFATPVDIPMDTNKDMKTREKELLAKEAELNRREKEIKRREDAAARAGVVLEEKNWPPFFPIIHNDIGNEIPVHLQRTLYVAFASLLGLVLCLFWNIICVTAAWAKGSGPKIWFLAIIYFILGCPGAYYLWYRPLYRAMRNESALKFGWFFLFYLVHIAFCAYAAVSPSILFVGKSLTGILPAINLIGDSVIVGIFYFIGFALFCLEALLSVWVIQRVYLYFRGSGKEAEMRREAARGAARAAF

SEQ ID NO: 29379 - protein, 235 aa, Zea mays subsp. mays
  peptide (1)..(235): Ceres Seq. ID no. 12408651
  misc_feature (43)..(217): Pfam Name: Pfam Description:  SCAMP family
  misc_feature (1)..(235): NCBI GI NO: 34899754 NR Description: putative secretory carrier membrane protein
  misc_feature (1)..(235): NCBI GI NO: 7109232 NR Description: secretory carrier membrane protein [Oryza sativa]
  misc_feature (1)..(234): NCBI GI NO: 15219893 NR Description: secretory carrier membrane protein
  misc_feature (1)..(234): NCBI GI NO: 15226410 NR Description: putative secretory carrier-associated membraneprotein
  misc_feature (1)..(234): NCBI GI NO: 3941289 NR Description: similarity to SCAMP37 [Pisum sativum]
  misc_feature (1)..(234): NCBI GI NO: 15220305 NR Description: secretory carrier membrane protein, putative
  misc_feature (1)..(234): NCBI GI NO: 18379111 NR Description: expressed protein; protein id: At1g03550
  misc_feature (1)..(216): NCBI GI NO: 15222550 NR Description: secretory carrier membrane protein, putative
  misc_feature (1)..(234): NCBI GI NO: 25402653 NR Description: hypothetical protein
  misc_feature (1)..(216): NCBI GI NO: 38347080 NR Description: OSJNBa0006A01.21
MDTNKDMKTREKELLAKEAELNRREKEIKRREDAAARAGVVLEEKNWPPFFPIIHNDIGNEIPVHLQRTLYVAFASLLGLVLCLFWNIICVTAAWAKGSGPKIWFLAIIYFILGCPGAYYLWYRPLYRAMRNESALKFGWFFLFYLVHIAFCAYAAVSPSILFVGKSLTGILPAINLIGDSVIVGIFYFIGFALFCLEALLSVWVIQRVYLYFRGSGKEAEMRREAARGAARAAF

SEQ ID NO: 29380 - protein, 229 aa, Zea mays subsp. mays
  peptide (1)..(229): Ceres Seq. ID no. 12408652
  misc_feature (37)..(211): Pfam Name: Pfam Description:  SCAMP family
  misc_feature (1)..(229): NCBI GI NO: 34899754 NR Description: putative secretory carrier membrane protein
  misc_feature (1)..(229): NCBI GI NO: 7109232 NR Description: secretory carrier membrane protein [Oryza sativa]
  misc_feature (1)..(228): NCBI GI NO: 15219893 NR Description: secretory carrier membrane protein
  misc_feature (1)..(228): NCBI GI NO: 15226410 NR Description: putative secretory carrier-associated membraneprotein
  misc_feature (1)..(228): NCBI GI NO: 3941289 NR Description: similarity to SCAMP37 [Pisum sativum]
  misc_feature (1)..(228): NCBI GI NO: 15220305 NR Description: secretory carrier membrane protein, putative
  misc_feature (1)..(228): NCBI GI NO: 18379111 NR Description: expressed protein; protein id: At1g03550
  misc_feature (1)..(210): NCBI GI NO: 15222550 NR Description: secretory carrier membrane protein, putative
  misc_feature (1)..(228): NCBI GI NO: 25402653 NR Description: hypothetical protein
  misc_feature (1)..(210): NCBI GI NO: 38347080 NR Description: OSJNBa0006A01.21
MKTREKELLAKEAELNRREKEIKRREDAAARAGVVLEEKNWPPFFPIIHNDIGNEIPVHLQRTLYVAFASLLGLVLCLFWNIICVTAAWAKGSGPKIWFLAIIYFILGCPGAYYLWYRPLYRAMRNESALKFGWFFLFYLVHIAFCAYAAVSPSILFVGKSLTGILPAINLIGDSVIVGIFYFIGFALFCLEALLSVWVIQRVYLYFRGSGKEAEMRREAARGAARAAF

SEQ ID NO: 29381 - DNA, 1629 bp, Zea mays subsp. mays
  misc_feature (1)..(1629): Ceres Seq. ID no. 12408645
accaccgtgacagttctattaacttgacgagacaaaaggggggaaagttctcctcctacaatcctacctccagtgatgtcagtaccaccgccggccggcggcggcgccatcatcaacgaggtcctcaccgacgacgagctccgcgcagtgctcaggcggctggggcccgaggcggagcgggacgcgttcgggctcgtgtgccgccgctggctccggatccagagctccgagcggcggcgcctgcgcgcgcgcgccggcccggacatgctgcgccgcctcgctgcacgcttccctggtgtcctggatctcgacctctctcagtcgccctcccgctccttctaccctggggtcatcgacgacgacctcaactttatcgccagcagcttccgcaacctgcgtgtcctcgcgctgcagaactgcaaaggtatctctgatgtcggagttgccaaattgggagatggactgccatcctctacagtcccttgatgtttctcgctgcataaagctgagtgacaaaggtttgaaggcggttgcactagggtgcaaaaaattgagtcagctgcaaatcatgggatgcaaattagtaacagataatttattgactgctctatcaaagagctgcctgcaattggtagaacttggagctgcgggatgtaacagcataacagatgctggtatatctgctctggctgatggctgtcatcacataaaatcactagacataagcaaatgcaacaaagttagtgatcctggagtctgtaagatcgctgaggtttcttcatcatgcttggtgtcaataaagctattggactgcagcaaggtgggagataagtccatctattcgttagctaagttttgcagtaacctagagactcttgtcattggtggatgtcggaacattagcgatggctccatacaagcacttgctcttgcctgctccagtagcttaaggagcctgagaatggactggtgcttgaaaataacagacacatcattgcaaagcctgctgtctaactgtaaacttcttgtagccattgatgtcggatgttgtgaccagataaccgacaatgcattcatggacggggaaggatacgggtttcagtctgaactgagagttttgaagatcagcagctgtgttcggctcacagttgcaggggtcggcagagtgattgaatccttcaaggctcttgagtacttggatgttcggtcatgccctcaggttacaagggacagctgcgagcaagctggagtgcagtttcctgctggctgtaaggtgaatttcgatggcagtttgctggaatctgatccatctgctgagatgttcttctaaaatgtgatctcggttgaaatcagatttagtgtgaactgcaaaactaagatttgaagagctcggtcatggaggcgagtgcttgacattgctgctgatctttcactgtcaaaatctatgcaagaacctgagaccacaacggatgcaagccatgatcatattcagtacccaattcaatatgcatgtgatttaatctgtagaaagtagcgcaaaagaccatgaaataagttgtctgaccaaagaacgtatttgcattatgtattgtgccagtgcagcgggtgtattaaaaaaatgtgcatttt

SEQ ID NO: 29382 - protein, 298 aa, Zea mays subsp. mays
  peptide (1)..(298): Ceres Seq. ID no. 12408646
  misc_feature (14)..(291): NCBI GI NO: 15237286 NR Description: putative protein; protein id: At5g23340
  misc_feature (11)..(210): NCBI GI NO: 15237286 NR Description: putative protein; protein id: At5g23340
  misc_feature (14)..(264): NCBI GI NO: 15237286 NR Description: putative protein; protein id: At5g23340
  misc_feature (11)..(276): NCBI GI NO: 26336707 NR Description: unnamed protein product [Mus musculus]
  misc_feature (14)..(264): NCBI GI NO: 18414458 NR Description: F-box protein family, AtFBL4; protein id:At4g15475
  misc_feature (11)..(276): NCBI GI NO: 30519963 NR Description: F-box and leucine-rich repeat protein 2
  misc_feature (11)..(276): NCBI GI NO: 5919219 NR Description: leucine-rich repeats containing F-box protein FBL3
  misc_feature (11)..(276): NCBI GI NO: 6063090 NR Description: F-box protein FBL2 [Homo sapiens]
  misc_feature (11)..(276): NCBI GI NO: 16306582 NR Description: F-box and leucine-rich repeat protein 2
  misc_feature (11)..(276): NCBI GI NO: 7022695 NR Description: unnamed protein product [Homo sapiens]
MSELPNWEMDCHPLQSLDVSRCIKLSDKGLKAVALGCKKLSQLQIMGCKLVTDNLLTALSKSCLQLVELGAAGCNSITDAGISALADGCHHIKSLDISKCNKVSDPGVCKIAEVSSSCLVSIKLLDCSKVGDKSIYSLAKFCSNLETLVIGGCRNISDGSIQALALACSSSLRSLRMDWCLKITDTSLQSLLSNCKLLVAIDVGCCDQITDNAFMDGEGYGFQSELRVLKISSCVRLTVAGVGRVIESFKALEYLDVRSCPQVTRDSCEQAGVQFPAGCKVNFDGSLLESDPSAEMFF

SEQ ID NO: 29383 - protein, 290 aa, Zea mays subsp. mays
  peptide (1)..(290): Ceres Seq. ID no. 12408647
  misc_feature (6)..(283): NCBI GI NO: 15237286 NR Description: putative protein; protein id: At5g23340
  misc_feature (3)..(202): NCBI GI NO: 15237286 NR Description: putative protein; protein id: At5g23340
  misc_feature (6)..(256): NCBI GI NO: 15237286 NR Description: putative protein; protein id: At5g23340
  misc_feature (3)..(268): NCBI GI NO: 26336707 NR Description: unnamed protein product [Mus musculus]
  misc_feature (6)..(256): NCBI GI NO: 18414458 NR Description: F-box protein family, AtFBL4; protein id:At4g15475
  misc_feature (3)..(268): NCBI GI NO: 30519963 NR Description: F-box and leucine-rich repeat protein 2
  misc_feature (3)..(268): NCBI GI NO: 5919219 NR Description: leucine-rich repeats containing F-box protein FBL3
  misc_feature (3)..(268): NCBI GI NO: 16306582 NR Description: F-box and leucine-rich repeat protein 2
  misc_feature (3)..(268): NCBI GI NO: 6063090 NR Description: F-box protein FBL2 [Homo sapiens]
  misc_feature (3)..(268): NCBI GI NO: 7022695 NR Description: unnamed protein product [Homo sapiens]
MDCHPLQSLDVSRCIKLSDKGLKAVALGCKKLSQLQIMGCKLVTDNLLTALSKSCLQLVELGAAGCNSITDAGISALADGCHHIKSLDISKCNKVSDPGVCKIAEVSSSCLVSIKLLDCSKVGDKSIYSLAKFCSNLETLVIGGCRNISDGSIQALALACSSSLRSLRMDWCLKITDTSLQSLLSNCKLLVAIDVGCCDQITDNAFMDGEGYGFQSELRVLKISSCVRLTVAGVGRVIESFKALEYLDVRSCPQVTRDSCEQAGVQFPAGCKVNFDGSLLESDPSAEMFF

SEQ ID NO: 29384 - protein, 253 aa, Zea mays subsp. mays
  peptide (1)..(253): Ceres Seq. ID no. 12408648
  misc_feature (1)..(246): NCBI GI NO: 15237286 NR Description: putative protein; protein id: At5g23340
  misc_feature (1)..(165): NCBI GI NO: 15237286 NR Description: putative protein; protein id: At5g23340
  misc_feature (1)..(219): NCBI GI NO: 15237286 NR Description: putative protein; protein id: At5g23340
  misc_feature (1)..(231): NCBI GI NO: 26336707 NR Description: unnamed protein product [Mus musculus]
  misc_feature (1)..(219): NCBI GI NO: 18414458 NR Description: F-box protein family, AtFBL4; protein id:At4g15475
  misc_feature (1)..(231): NCBI GI NO: 30519963 NR Description: F-box and leucine-rich repeat protein 2
  misc_feature (1)..(231): NCBI GI NO: 5919219 NR Description: leucine-rich repeats containing F-box protein FBL3
  misc_feature (1)..(231): NCBI GI NO: 6063090 NR Description: F-box protein FBL2 [Homo sapiens]
  misc_feature (1)..(231): NCBI GI NO: 7022695 NR Description: unnamed protein product [Homo sapiens]
  misc_feature (1)..(231): NCBI GI NO: 16306582 NR Description: F-box and leucine-rich repeat protein 2
MGCKLVTDNLLTALSKSCLQLVELGAAGCNSITDAGISALADGCHHIKSLDISKCNKVSDPGVCKIAEVSSSCLVSIKLLDCSKVGDKSIYSLAKFCSNLETLVIGGCRNISDGSIQALALACSSSLRSLRMDWCLKITDTSLQSLLSNCKLLVAIDVGCCDQITDNAFMDGEGYGFQSELRVLKISSCVRLTVAGVGRVIESFKALEYLDVRSCPQVTRDSCEQAGVQFPAGCKVNFDGSLLESDPSAEMFF

SEQ ID NO: 29385 - DNA, 1203 bp, Zea mays subsp. mays
  misc_feature (1)..(1203): Ceres Seq. ID no. 12408641
aaggcgcaaaagccatcaacctctgcagctacaggacagcgtgcttgtgagtggctgtgcttccgtaggggtagtagggtgcttgcgttgcgttgcagtgcagaggacactgacggacggcgaagaatcgaagatggaggcgtacgctgctggagccaagttcgactgcttgctgttcgacatggacgacactctgtacccgctgagccttggcatcaacctagcatgccgcaagaacatacaggagtacatgctgaagaagctgcggatcgaggagagccaggtccccaggatgtgcctggacctgtacagggagtatgggaccacaatggccggcctcaaggttttggggtacgatttcgactacgacgacttccacgcctgcgtgcacgggacgctgccgtacgagaaggtgaagcctgacccggtgctcaggcagctgctgctttccctgccgcagaggaagatcatcttcaccaactccgacaaggcccacgcggccagagtcctggagaagctcggcctccaggactgcttccaagggatcgtctgcttcgagacactgaacccgccaccaccaaccgagaccgagaagaacagtggcagtgctgggacgatcctgtgcaagccctcgctggcgtccatggaagccgtcatcgagatcgccaagctcgacgccgagagaacggtgttctttgacgacagcacgcgcaacatcgccgcagggaaggccgccggtttccgcaccgtcatcgtggggagctcggcgctggtgccaggggcggacgtggcgctggagagcatccacaacatcaaggaggcgctgccggagctctgggaggttgccgccgccgctgccgccggcgaccgcgtcgacgccgtcctccggtccaccaccgccgtggagaccacagtgattgcctgagcaataataccatatgacaaatgacattaaccgtcacggactcacggccacgtaatataatgctggcgtgtagtatttcttgtgacgtgcaaattaaaatgacttggaatgtggtgtgcctgattaagtaccgaccgaggtaactaatactactgtatatgacagaccagaactttactggtaataaggtttgtatagctcatccctgtcggcccgtgcttttttatggcgcggtccgtggtgcaaatggatgccacgtactgaatacaaataaatat

SEQ ID NO: 29386 - protein, 307 aa, Zea mays subsp. mays
  peptide (1)..(307): Ceres Seq. ID no. 12408642
  misc_feature (54)..(255): Pfam Name: Pfam Description:  haloacid dehalogenase-like hydrolase
  misc_feature (45)..(307): NCBI GI NO: 34913328 NR Description: contains ESTsAU088644
  misc_feature (45)..(194): NCBI GI NO: 40714684 NR Description: expressed protein
  misc_feature (206)..(307): NCBI GI NO: 40714684 NR Description: expressed protein
  misc_feature (51)..(280): NCBI GI NO: 11279021 NR Description: hypothetical protein F21F14
  misc_feature (53)..(190): NCBI GI NO: 7406669 NR Description: putative ripening-related protein [Vitis vinifera]
  misc_feature (196)..(307): NCBI GI NO: 7406669 NR Description: putative ripening-related protein [Vitis vinifera]
  misc_feature (49)..(200): NCBI GI NO: 15241720 NR Description: putative protein; protein id: At5g02230
  misc_feature (49)..(200): NCBI GI NO: 21593165 NR Description: unknown [Arabidopsis thaliana]
  misc_feature (206)..(307): NCBI GI NO: 15241720 NR Description: putative protein; protein id: At5g02230
  misc_feature (206)..(307): NCBI GI NO: 21593165 NR Description: unknown [Arabidopsis thaliana]
RRKSHQPLQLQDSVLVSGCASVGVVGCLRCVAVQRTLTDGEESKMEAYAAGAKFDCLLFDMDDTLYPLSLGINLACRKNIQEYMLKKLRIEESQVPRMCLDLYREYGTTMAGLKVLGYDFDYDDFHACVHGTLPYEKVKPDPVLRQLLLSLPQRKIIFTNSDKAHAARVLEKLGLQDCFQGIVCFETLNPPPPTETEKNSGSAGTILCKPSLASMEAVIEIAKLDAERTVFFDDSTRNIAAGKAAGFRTVIVGSSALVPGADVALESIHNIKEALPELWEVAAAAAAGDRVDAVLRSTTAVETTVIA

SEQ ID NO: 29387 - protein, 263 aa, Zea mays subsp. mays
  peptide (1)..(263): Ceres Seq. ID no. 12408643
  misc_feature (10)..(211): Pfam Name: Pfam Description:  haloacid dehalogenase-like hydrolase
  misc_feature (1)..(263): NCBI GI NO: 34913328 NR Description: contains ESTsAU088644
  misc_feature (1)..(150): NCBI GI NO: 40714684 NR Description: expressed protein
  misc_feature (162)..(263): NCBI GI NO: 40714684 NR Description: expressed protein
  misc_feature (7)..(236): NCBI GI NO: 11279021 NR Description: hypothetical protein F21F14
  misc_feature (9)..(146): NCBI GI NO: 7406669 NR Description: putative ripening-related protein [Vitis vinifera]
  misc_feature (152)..(263): NCBI GI NO: 7406669 NR Description: putative ripening-related protein [Vitis vinifera]
  misc_feature (5)..(156): NCBI GI NO: 15241720 NR Description: putative protein; protein id: At5g02230
  misc_feature (5)..(156): NCBI GI NO: 21593165 NR Description: unknown [Arabidopsis thaliana]
  misc_feature (162)..(263): NCBI GI NO: 15241720 NR Description: putative protein; protein id: At5g02230
  misc_feature (162)..(263): NCBI GI NO: 21593165 NR Description: unknown [Arabidopsis thaliana]
MEAYAAGAKFDCLLFDMDDTLYPLSLGINLACRKNIQEYMLKKLRIEESQVPRMCLDLYREYGTTMAGLKVLGYDFDYDDFHACVHGTLPYEKVKPDPVLRQLLLSLPQRKIIFTNSDKAHAARVLEKLGLQDCFQGIVCFETLNPPPPTETEKNSGSAGTILCKPSLASMEAVIEIAKLDAERTVFFDDSTRNIAAGKAAGFRTVIVGSSALVPGADVALESIHNIKEALPELWEVAAAAAAGDRVDAVLRSTTAVETTVIA

SEQ ID NO: 29388 - protein, 247 aa, Zea mays subsp. mays
  peptide (1)..(247): Ceres Seq. ID no. 12408644
  misc_feature (1)..(195): Pfam Name: Pfam Description:  haloacid dehalogenase-like hydrolase
  misc_feature (1)..(247): NCBI GI NO: 34913328 NR Description: contains ESTsAU088644
  misc_feature (1)..(134): NCBI GI NO: 40714684 NR Description: expressed protein
  misc_feature (146)..(247): NCBI GI NO: 40714684 NR Description: expressed protein
  misc_feature (1)..(220): NCBI GI NO: 11279021 NR Description: hypothetical protein F21F14
  misc_feature (1)..(130): NCBI GI NO: 7406669 NR Description: putative ripening-related protein [Vitis vinifera]
  misc_feature (136)..(247): NCBI GI NO: 7406669 NR Description: putative ripening-related protein [Vitis vinifera]
  misc_feature (1)..(140): NCBI GI NO: 15241720 NR Description: putative protein; protein id: At5g02230
  misc_feature (1)..(140): NCBI GI NO: 21593165 NR Description: unknown [Arabidopsis thaliana]
  misc_feature (146)..(247): NCBI GI NO: 15241720 NR Description: putative protein; protein id: At5g02230
  misc_feature (146)..(247): NCBI GI NO: 21593165 NR Description: unknown [Arabidopsis thaliana]
MDDTLYPLSLGINLACRKNIQEYMLKKLRIEESQVPRMCLDLYREYGTTMAGLKVLGYDFDYDDFHACVHGTLPYEKVKPDPVLRQLLLSLPQRKIIFTNSDKAHAARVLEKLGLQDCFQGIVCFETLNPPPPTETEKNSGSAGTILCKPSLASMEAVIEIAKLDAERTVFFDDSTRNIAAGKAAGFRTVIVGSSALVPGADVALESIHNIKEALPELWEVAAAAAAGDRVDAVLRSTTAVETTVIA

SEQ ID NO: 29389 - DNA, 1458 bp, Zea mays subsp. mays
  misc_feature (1)..(1458): Ceres Seq. ID no. 12408637
aagcgaaacaaacggcgtgacgggagccaagagcccgagagcgccctccgcggccgccgcaccgcgtcgtcgttgtccccagccaacccaacccagcgcaatcccaaacgaatccagccccacctcagccgctgcgcggacctccgaatcccggcgccggtgcgcgcagggcaccgcagggcgcggcgcggccatggacatggacagcgtggagtgcctctccctcccggacgctgccatggacgtggacgacatcgaaggccgcccgcaccacggccatctcggcctcccgctccaccccgcccacctcccatcctcaggtgccggccgcgcgttccccaaggtgaatgccgggggcgccgtggcgggcccggcgggagcggcgggcacagcaggagcaggcgtggggccgccggcgaccagcgtgcacgagctgctcgagtgccccgtctgcaccaactccatgttcccgccaatccatcagtgtcaaaatggacatactttgtgttcgacatgcaaggccagggtgcacaacaggtgccctacatgcagacaagagcttggtgatatcaggtgcttagcattggaaaaagtagcagagtcacttgagcttccctgtaagtactgctctttagggtgcccagagatcttcccatactacagcaagataaagcacgaagcacagtgcagcttcaggccatatacctgcccctatgctggttctgaatgtgctgtggctggtgatattccattccttgttgcacatttgagggatgatcacaaagtcgatatgcacagcggctgcacgttcaaccatagatatgtcaagtccaacccgcgagaggttgaaaacgccacctggatgcttacggtattccattgttttgggcagtacttctgcctgcacttcgaggcattccagctcggaatggctccagtctacatggctttcctccggttcatgggtgatgagaatgatgcgaggaactacacatatagcctagaggttggtggtaacgggaggaagatggtgtgggaaggtactcctagaagcatccgtgacagccaccgcaaggtccgtgacagccatgatggcctcatcatccagaggaacatggcgctgttcttctcgggcggtgacaggaaggagctgaagctgagggtgactgggcggatctggaaggagcagaccaacccggacggggcctgcattcctaacctttgcagctgagcaagggagacgtttggaaagcaaaaaagaaagaaaatacggtgctgtttggctggcttgtctcaaaattgccacgttatgctttcatcatagtgtctgccgttaaaatgttgtagtagtaaaatcgtagggtgtaaaatgttttcttgtaaagtcattgtgtataccaaccaaattcaagaaagcttacaagttggcccataaatgcatgtgctacgttcttgtgt

SEQ ID NO: 29390 - protein, 409 aa, Zea mays subsp. mays
  peptide (1)..(409): Ceres Seq. ID no. 12408638
  misc_feature (59)..(409): NCBI GI NO: 34904390 NR Description: unnamed protein product
  misc_feature (131)..(407): NCBI GI NO: 11291752 NR Description: seven in absentia-like protein
  misc_feature (131)..(407): NCBI GI NO: 18412133 NR Description: seven in absentia-like protein
  misc_feature (65)..(406): NCBI GI NO: 11291753 NR Description: SINAH1 protein [imported] - upland cotton
  misc_feature (131)..(407): NCBI GI NO: 21536945 NR Description: seven in absentia-like protein
  misc_feature (138)..(409): NCBI GI NO: 20136190 NR Description: ring finger E3 ligase SINAT5
  misc_feature (112)..(409): NCBI GI NO: 15234306 NR Description: putative zinc finger protein; protein id:At4g27880
  misc_feature (138)..(376): NCBI GI NO: 11291755 NR Description: SINA1 protein [imported] - Vitis vinifera
  misc_feature (141)..(396): NCBI GI NO: 33354205 NR Description: putative developmental protein sina
  misc_feature (141)..(396): NCBI GI NO: 34899096 NR Description: similar to RING zinc finger protein
SETNGVTGAKSPRAPSAAAAPRRRCPQPTQPSAIPNESSPTSAAARTSESRRRCAQGTAGRGAAMDMDSVECLSLPDAAMDVDDIEGRPHHGHLGLPLHPAHLPSSGAGRAFPKVNAGGAVAGPAGAAGTAGAGVGPPATSVHELLECPVCTNSMFPPIHQCQNGHTLCSTCKARVHNRCPTCRQELGDIRCLALEKVAESLELPCKYCSLGCPEIFPYYSKIKHEAQCSFRPYTCPYAGSECAVAGDIPFLVAHLRDDHKVDMHSGCTFNHRYVKSNPREVENATWMLTVFHCFGQYFCLHFEAFQLGMAPVYMAFLRFMGDENDARNYTYSLEVGGNGRKMVWEGTPRSIRDSHRKVRDSHDGLIIQRNMALFFSGGDRKELKLRVTGRIWKEQTNPDGACIPNLCS

SEQ ID NO: 29391 - protein, 345 aa, Zea mays subsp. mays
  peptide (1)..(345): Ceres Seq. ID no. 12408639
  misc_feature (1)..(345): NCBI GI NO: 34904390 NR Description: unnamed protein product
  misc_feature (67)..(343): NCBI GI NO: 11291752 NR Description: seven in absentia-like protein
  misc_feature (67)..(343): NCBI GI NO: 18412133 NR Description: seven in absentia-like protein
  misc_feature (1)..(342): NCBI GI NO: 11291753 NR Description: SINAH1 protein [imported] - upland cotton
  misc_feature (67)..(343): NCBI GI NO: 21536945 NR Description: seven in absentia-like protein
  misc_feature (74)..(345): NCBI GI NO: 20136190 NR Description: ring finger E3 ligase SINAT5
  misc_feature (48)..(345): NCBI GI NO: 15234306 NR Description: putative zinc finger protein; protein id:At4g27880
  misc_feature (74)..(312): NCBI GI NO: 11291755 NR Description: SINA1 protein [imported] - Vitis vinifera
  misc_feature (77)..(332): NCBI GI NO: 33354205 NR Description: putative developmental protein sina
  misc_feature (77)..(332): NCBI GI NO: 34899096 NR Description: similar to RING zinc finger protein
MDMDSVECLSLPDAAMDVDDIEGRPHHGHLGLPLHPAHLPSSGAGRAFPKVNAGGAVAGPAGAAGTAGAGVGPPATSVHELLECPVCTNSMFPPIHQCQNGHTLCSTCKARVHNRCPTCRQELGDIRCLALEKVAESLELPCKYCSLGCPEIFPYYSKIKHEAQCSFRPYTCPYAGSECAVAGDIPFLVAHLRDDHKVDMHSGCTFNHRYVKSNPREVENATWMLTVFHCFGQYFCLHFEAFQLGMAPVYMAFLRFMGDENDARNYTYSLEVGGNGRKMVWEGTPRSIRDSHRKVRDSHDGLIIQRNMALFFSGGDRKELKLRVTGRIWKEQTNPDGACIPNLCS

SEQ ID NO: 29392 - protein, 343 aa, Zea mays subsp. mays
  peptide (1)..(343): Ceres Seq. ID no. 12408640
  misc_feature (1)..(343): NCBI GI NO: 34904390 NR Description: unnamed protein product
  misc_feature (65)..(341): NCBI GI NO: 11291752 NR Description: seven in absentia-like protein
  misc_feature (65)..(341): NCBI GI NO: 18412133 NR Description: seven in absentia-like protein
  misc_feature (1)..(340): NCBI GI NO: 11291753 NR Description: SINAH1 protein [imported] - upland cotton
  misc_feature (65)..(341): NCBI GI NO: 21536945 NR Description: seven in absentia-like protein
  misc_feature (72)..(343): NCBI GI NO: 20136190 NR Description: ring finger E3 ligase SINAT5
  misc_feature (46)..(343): NCBI GI NO: 15234306 NR Description: putative zinc finger protein; protein id:At4g27880
  misc_feature (72)..(310): NCBI GI NO: 11291755 NR Description: SINA1 protein [imported] - Vitis vinifera
  misc_feature (75)..(330): NCBI GI NO: 33354205 NR Description: putative developmental protein sina
  misc_feature (75)..(330): NCBI GI NO: 34899096 NR Description: similar to RING zinc finger protein
MDSVECLSLPDAAMDVDDIEGRPHHGHLGLPLHPAHLPSSGAGRAFPKVNAGGAVAGPAGAAGTAGAGVGPPATSVHELLECPVCTNSMFPPIHQCQNGHTLCSTCKARVHNRCPTCRQELGDIRCLALEKVAESLELPCKYCSLGCPEIFPYYSKIKHEAQCSFRPYTCPYAGSECAVAGDIPFLVAHLRDDHKVDMHSGCTFNHRYVKSNPREVENATWMLTVFHCFGQYFCLHFEAFQLGMAPVYMAFLRFMGDENDARNYTYSLEVGGNGRKMVWEGTPRSIRDSHRKVRDSHDGLIIQRNMALFFSGGDRKELKLRVTGRIWKEQTNPDGACIPNLCS

SEQ ID NO: 29393 - DNA, 1335 bp, Zea mays subsp. mays
  misc_feature (1)..(1335): Ceres Seq. ID no. 12408633
aaaaaaaactcaaacaaactcaagcctgccctgccctgccttgttaagcaaagcaacccagctgcgagacacgagagctagctagagagagatggcggccacggtttcgtccttcccggtggtgaacatggagaagctggagaccgaggagagggccacggccatggaggtcatccgcgacggctgcgagaactggggcttcttcgagctgctgaaccacggcatctcgcacgagctgatggacgaggtggagcggctgaccaaggcgcactacgccaccttccgggaggccaagttccaggagttcgcggcccggacgctggaggccggcgagaagggcgccgacgtcaaggacgtggactgggagagcaccttcttcgtccgccacctcccggcctccaacctcgccgacctccccgacgtcgacgaccgctacaggcaggtgatggagcagttcgcatcggagatccggaagctgtcggagaggctgctggacctgctgtgcgagaacctgggcctggagcccgggtacctgaaggcggccttcgcggggtcggacggcccgacgttcggcaccaaggtgagcgcgtacccgccgtgcccgcgcccggacctcgtcgacggccttcgcgcgcacaccgacgccggcggcatcgtgctgctgttccaggacgaccaggtgagcggcctgcagctgctcaggggcggggagtgggtggacgtgccgcccatgcgccacgccatcgtcgccaacgtcggcgaccagctggaggtcatcaccaacgggcggtacaagagcgtcatgcaccgcgtgctcacgcgccccgacggcaaccgcatgtccgtcgcgtccttctacaacccgggcgccgacgccgtcatcttcccggcgcccgcgctcgtcggcgccgccgaggaggaccgcgccgaggccgcgtacccgagcttcgtgttcgaggactacatgaacctgtacgtgcgccacaagttcgaggccaaggagcccaggttcgaggccatgaagtcggccatcgccaccgcgtgagaaagactgccttccgctgccggcttccttcgtggcgtcaagccttgaggcttgaacgaacaacgtacgtccatgtgcttatagtggcacagttgtgtgtgtaactaccgatcgtggaacggcctaatgtatttcggttgcctcagatcgatctatatgtgcgtatacattatgtactcaaaagtgtgtagcgtctggttaatgtacgagcagtgtgtatgtgaccaggacccggtgtgtagttgctactactaccatatccggtgaatgatcaaaccttttggtgtatt

SEQ ID NO: 29394 - protein, 317 aa, Zea mays subsp. mays
  peptide (1)..(317): Ceres Seq. ID no. 12408634
  misc_feature (158)..(258): Pfam Name: II Pfam Description: 2OG-Fe
  misc_feature (3)..(313): NCBI GI NO: 7433198 NR Description: probable 1-aminocyclopropane-1-carboxylate oxidase
  misc_feature (1)..(312): NCBI GI NO: 12862572 NR Description: 1-aminocyclopropane-1-carboxylate oxidase
  misc_feature (1)..(312): NCBI GI NO: 2492612 NR Description: 1-aminocyclopropane-1-carboxylate oxidase 1
  misc_feature (5)..(316): NCBI GI NO: 1326182 NR Description: 1-aminocyclopropane-1-carboxylate oxidase
  misc_feature (5)..(316): NCBI GI NO: 2769652 NR Description: ACC oxidase [Musa acuminata]
  misc_feature (5)..(316): NCBI GI NO: 38043946 NR Description: 1-aminocyclopropane-1-carboxylate oxidase
  misc_feature (7)..(312): NCBI GI NO: 1771345 NR Description: 1-aminocyclopropane-1-carboxylate oxidase
  misc_feature (7)..(317): NCBI GI NO: 25452785 NR Description: 1-aminocyclopropane-1-carboxylate oxidase 2
  misc_feature (5)..(312): NCBI GI NO: 398994 NR Description: 1-aminocyclopropane-1-carboxylate oxidase
  misc_feature (7)..(317): NCBI GI NO: 398996 NR Description: 1-aminocyclopropane-1-carboxylate oxidase 1
MAATVSSFPVVNMEKLETEERATAMEVIRDGCENWGFFELLNHGISHELMDEVERLTKAHYATFREAKFQEFAARTLEAGEKGADVKDVDWESTFFVRHLPASNLADLPDVDDRYRQVMEQFASEIRKLSERLLDLLCENLGLEPGYLKAAFAGSDGPTFGTKVSAYPPCPRPDLVDGLRAHTDAGGIVLLFQDDQVSGLQLLRGGEWVDVPPMRHAIVANVGDQLEVITNGRYKSVMHRVLTRPDGNRMSVASFYNPGADAVIFPAPALVGAAEEDRAEAAYPSFVFEDYMNLYVRHKFEAKEPRFEAMKSAIATA

SEQ ID NO: 29395 - protein, 305 aa, Zea mays subsp. mays
  peptide (1)..(305): Ceres Seq. ID no. 12408635
  misc_feature (146)..(246): Pfam Name: II Pfam Description: 2OG-Fe
  misc_feature (1)..(301): NCBI GI NO: 7433198 NR Description: probable 1-aminocyclopropane-1-carboxylate oxidase
  misc_feature (1)..(300): NCBI GI NO: 12862572 NR Description: 1-aminocyclopropane-1-carboxylate oxidase
  misc_feature (1)..(300): NCBI GI NO: 2492612 NR Description: 1-aminocyclopropane-1-carboxylate oxidase 1
  misc_feature (1)..(304): NCBI GI NO: 1326182 NR Description: 1-aminocyclopropane-1-carboxylate oxidase
  misc_feature (1)..(304): NCBI GI NO: 2769652 NR Description: ACC oxidase [Musa acuminata]
  misc_feature (1)..(304): NCBI GI NO: 38043946 NR Description: 1-aminocyclopropane-1-carboxylate oxidase
  misc_feature (1)..(300): NCBI GI NO: 1771345 NR Description: 1-aminocyclopropane-1-carboxylate oxidase
  misc_feature (1)..(305): NCBI GI NO: 25452785 NR Description: 1-aminocyclopropane-1-carboxylate oxidase 2
  misc_feature (1)..(300): NCBI GI NO: 398994 NR Description: 1-aminocyclopropane-1-carboxylate oxidase
  misc_feature (1)..(305): NCBI GI NO: 398996 NR Description: 1-aminocyclopropane-1-carboxylate oxidase 1
MEKLETEERATAMEVIRDGCENWGFFELLNHGISHELMDEVERLTKAHYATFREAKFQEFAARTLEAGEKGADVKDVDWESTFFVRHLPASNLADLPDVDDRYRQVMEQFASEIRKLSERLLDLLCENLGLEPGYLKAAFAGSDGPTFGTKVSAYPPCPRPDLVDGLRAHTDAGGIVLLFQDDQVSGLQLLRGGEWVDVPPMRHAIVANVGDQLEVITNGRYKSVMHRVLTRPDGNRMSVASFYNPGADAVIFPAPALVGAAEEDRAEAAYPSFVFEDYMNLYVRHKFEAKEPRFEAMKSAIATA

SEQ ID NO: 29396 - protein, 293 aa, Zea mays subsp. mays
  peptide (1)..(293): Ceres Seq. ID no. 12408636
  misc_feature (134)..(234): Pfam Name: II Pfam Description: 2OG-Fe
  misc_feature (1)..(289): NCBI GI NO: 7433198 NR Description: probable 1-aminocyclopropane-1-carboxylate oxidase
  misc_feature (1)..(288): NCBI GI NO: 12862572 NR Description: 1-aminocyclopropane-1-carboxylate oxidase
  misc_feature (1)..(288): NCBI GI NO: 2492612 NR Description: 1-aminocyclopropane-1-carboxylate oxidase 1
  misc_feature (1)..(292): NCBI GI NO: 1326182 NR Description: 1-aminocyclopropane-1-carboxylate oxidase
  misc_feature (1)..(292): NCBI GI NO: 2769652 NR Description: ACC oxidase [Musa acuminata]
  misc_feature (1)..(292): NCBI GI NO: 38043946 NR Description: 1-aminocyclopropane-1-carboxylate oxidase
  misc_feature (1)..(288): NCBI GI NO: 1771345 NR Description: 1-aminocyclopropane-1-carboxylate oxidase
  misc_feature (1)..(293): NCBI GI NO: 25452785 NR Description: 1-aminocyclopropane-1-carboxylate oxidase 2
  misc_feature (1)..(288): NCBI GI NO: 398994 NR Description: 1-aminocyclopropane-1-carboxylate oxidase
  misc_feature (1)..(293): NCBI GI NO: 398996 NR Description: 1-aminocyclopropane-1-carboxylate oxidase 1
MEVIRDGCENWGFFELLNHGISHELMDEVERLTKAHYATFREAKFQEFAARTLEAGEKGADVKDVDWESTFFVRHLPASNLADLPDVDDRYRQVMEQFASEIRKLSERLLDLLCENLGLEPGYLKAAFAGSDGPTFGTKVSAYPPCPRPDLVDGLRAHTDAGGIVLLFQDDQVSGLQLLRGGEWVDVPPMRHAIVANVGDQLEVITNGRYKSVMHRVLTRPDGNRMSVASFYNPGADAVIFPAPALVGAAEEDRAEAAYPSFVFEDYMNLYVRHKFEAKEPRFEAMKSAIATA

SEQ ID NO: 29397 - DNA, 1252 bp, Zea mays subsp. mays
  misc_feature (1)..(1252): Ceres Seq. ID no. 12343013
ttaccattacggcattacctacaccgtcgcctaatttgccaacgcccgccgccgttccgatggaaaccgccgagccggcgcgcgtccaagccctcgctgaggccggcgtgttccgcctcccggcgcagtacatccagccgcctgagcacagaccgaccccctcgccttctcctattgccgcggcgctctccgtgccggtcgtcgacctctcaacctccaccgccaccgacgccgtccgcgccgcgtgcgcggactggggcgcctttcacgtggtcggccacggcgtgccgggggagctcctcgacgcggtgcgcgcggcagggctcgcgttcttccgcgcgcccatggaggacaagctccggttcgcctgcgacccggccaggggcgccgcctcggaagggtacggcagccgcatgctcgccaacgacgactccgtgctcgactggcgcgactactttgaccaccacacgctcccggagtcccgctgtgatcccgcccgctggcccgacttcgtccccggttacagagatactattgcaaaatacagccacagcatgaaggatcttgctaaaaaattgttgtgcatcatctcagaaaatctgagcctgccaccatcttatatacaagaggcggttggagaagttttccagaacattactattagctactattctccgtgtccacaacctgatcttgctcttgggttacaatctcattctgatatgggcgcaataacacttctgatacaagatgatgttggtgggcttgaagtattaaaggatggaatgtggatacctgtgcctgctttgcgtgatggcatccttgtgattctcgctgatcagacagagatcatcaccaatggaagatacaagagttcagttcatcgagctgttgtcaatgctgagcgtgcccgcttatcagtagcaacattttatgatccatcaaaatcaaggaaaatatgcactgccccgcagcttgtgagtgagaatgaaccacaaaagtatcgggatgtaatttatggtgactatgtctcatcttggtatagcaaaggtccagagggcaagcgaaacatcgatgccctcctgattcagcactagagccataggtatgccttaaaacagggttgggccactcatctgtttcctaaacttctaatgcatgtacaatatatcagtttccaactttaaacaatcaggataaggaaaccaacttgtatactggatgcagtgcaataaagtaccttttcattgtc

SEQ ID NO: 29398 - protein, 364 aa, Zea mays subsp. mays
  peptide (1)..(364): Ceres Seq. ID no. 12343014
  misc_feature (214)..(313): Pfam Name: II Pfam Description: 2OG-Fe
  misc_feature (20)..(363): NCBI GI NO: 34898354 NR Description: Similar to leucoanthocyanidindioxygenase
  misc_feature (20)..(361): NCBI GI NO: 20260150 NR Description: strong similarity to naringenin 3-dioxygenase
  misc_feature (103)..(361): NCBI GI NO: 11045078 NR Description: naringenin 3-dioxygenase like protein
  misc_feature (103)..(361): NCBI GI NO: 18414636 NR Description: naringenin 3-dioxygenase like protein
  misc_feature (115)..(361): NCBI GI NO: 7433202 NR Description: hypothetical protein - Arabidopsis thaliana
  misc_feature (115)..(361): NCBI GI NO: 21593639 NR Description: naringenin 3-dioxygenase like protein
  misc_feature (24)..(362): NCBI GI NO: 15224472 NR Description: putative anthocyanidin synthase
  misc_feature (24)..(362): NCBI GI NO: 21554535 NR Description: putative anthocyanidin synthase
  misc_feature (21)..(282): NCBI GI NO: 34907994 NR Description: leucoanthocyanidin dioxygenase-like protein
  misc_feature (279)..(360): NCBI GI NO: 34907994 NR Description: leucoanthocyanidin dioxygenase-like protein
TITALPTPSPNLPTPAAVPMETAEPARVQALAEAGVFRLPAQYIQPPEHRPTPSPSPIAAALSVPVVDLSTSTATDAVRAACADWGAFHVVGHGVPGELLDAVRAAGLAFFRAPMEDKLRFACDPARGAASEGYGSRMLANDDSVLDWRDYFDHHTLPESRCDPARWPDFVPGYRDTIAKYSHSMKDLAKKLLCIISENLSLPPSYIQEAVGEVFQNITISYYSPCPQPDLALGLQSHSDMGAITLLIQDDVGGLEVLKDGMWIPVPALRDGILVILADQTEIITNGRYKSSVHRAVVNAERARLSVATFYDPSKSRKICTAPQLVSENEPQKYRDVIYGDYVSSWYSKGPEGKRNIDALLIQH

SEQ ID NO: 29399 - protein, 345 aa, Zea mays subsp. mays
  peptide (1)..(345): Ceres Seq. ID no. 12343015
  misc_feature (195)..(294): Pfam Name: II Pfam Description: 2OG-Fe
  misc_feature (1)..(344): NCBI GI NO: 34898354 NR Description: Similar to leucoanthocyanidindioxygenase
  misc_feature (1)..(342): NCBI GI NO: 20260150 NR Description: strong similarity to naringenin 3-dioxygenase
  misc_feature (84)..(342): NCBI GI NO: 11045078 NR Description: naringenin 3-dioxygenase like protein
  misc_feature (84)..(342): NCBI GI NO: 18414636 NR Description: naringenin 3-dioxygenase like protein
  misc_feature (96)..(342): NCBI GI NO: 7433202 NR Description: hypothetical protein - Arabidopsis thaliana
  misc_feature (96)..(342): NCBI GI NO: 21593639 NR Description: naringenin 3-dioxygenase like protein
  misc_feature (5)..(343): NCBI GI NO: 15224472 NR Description: putative anthocyanidin synthase
  misc_feature (5)..(343): NCBI GI NO: 21554535 NR Description: putative anthocyanidin synthase
  misc_feature (2)..(263): NCBI GI NO: 34907994 NR Description: leucoanthocyanidin dioxygenase-like protein
  misc_feature (260)..(341): NCBI GI NO: 34907994 NR Description: leucoanthocyanidin dioxygenase-like protein
METAEPARVQALAEAGVFRLPAQYIQPPEHRPTPSPSPIAAALSVPVVDLSTSTATDAVRAACADWGAFHVVGHGVPGELLDAVRAAGLAFFRAPMEDKLRFACDPARGAASEGYGSRMLANDDSVLDWRDYFDHHTLPESRCDPARWPDFVPGYRDTIAKYSHSMKDLAKKLLCIISENLSLPPSYIQEAVGEVFQNITISYYSPCPQPDLALGLQSHSDMGAITLLIQDDVGGLEVLKDGMWIPVPALRDGILVILADQTEIITNGRYKSSVHRAVVNAERARLSVATFYDPSKSRKICTAPQLVSENEPQKYRDVIYGDYVSSWYSKGPEGKRNIDALLIQH

SEQ ID NO: 29400 - protein, 250 aa, Zea mays subsp. mays
  peptide (1)..(250): Ceres Seq. ID no. 12343016
  misc_feature (100)..(199): Pfam Name: II Pfam Description: 2OG-Fe
  misc_feature (1)..(249): NCBI GI NO: 34898354 NR Description: Similar to leucoanthocyanidindioxygenase
  misc_feature (1)..(247): NCBI GI NO: 20260150 NR Description: strong similarity to naringenin 3-dioxygenase
  misc_feature (1)..(247): NCBI GI NO: 11045078 NR Description: naringenin 3-dioxygenase like protein
  misc_feature (1)..(247): NCBI GI NO: 18414636 NR Description: naringenin 3-dioxygenase like protein
  misc_feature (1)..(247): NCBI GI NO: 7433202 NR Description: hypothetical protein - Arabidopsis thaliana
  misc_feature (1)..(247): NCBI GI NO: 21593639 NR Description: naringenin 3-dioxygenase like protein
  misc_feature (1)..(248): NCBI GI NO: 15224472 NR Description: putative anthocyanidin synthase
  misc_feature (1)..(248): NCBI GI NO: 21554535 NR Description: putative anthocyanidin synthase
  misc_feature (1)..(168): NCBI GI NO: 34907994 NR Description: leucoanthocyanidin dioxygenase-like protein
  misc_feature (165)..(246): NCBI GI NO: 34907994 NR Description: leucoanthocyanidin dioxygenase-like protein
MEDKLRFACDPARGAASEGYGSRMLANDDSVLDWRDYFDHHTLPESRCDPARWPDFVPGYRDTIAKYSHSMKDLAKKLLCIISENLSLPPSYIQEAVGEVFQNITISYYSPCPQPDLALGLQSHSDMGAITLLIQDDVGGLEVLKDGMWIPVPALRDGILVILADQTEIITNGRYKSSVHRAVVNAERARLSVATFYDPSKSRKICTAPQLVSENEPQKYRDVIYGDYVSSWYSKGPEGKRNIDALLIQH

SEQ ID NO: 29401 - DNA, 1774 bp, Zea mays subsp. mays
  misc_feature (1)..(1774): Ceres Seq. ID no. 12349251
aatcgaaaatttggtcgaaataaacaagcagagcagaaaaccccccacacgctttagttggccgtccgtccgtccgtctctgaggagcacacagcagtcgattttaaactgcagctacagaggtcaggtcaggggacacagcctgagcggctggctggcgggggctagcgagcggcgccacagcgcagcacgcagagagccagggcggcggccatggcgagcgcggcgagtggcggcggcgggtcgctgaagcggatgggcccgctccgggtacagtactacatcgtgatgggcgcggtggcagcggcggtggtgctggccacgctgcgctacatgccggggccagccgtcccggcgaccaccgcccgtaccagcggaggcggcgtcgtgcgctcggccccagcagccgcggccgtccctgtgcccgtgcccgccgtggaggtagaaacgggggaggatgagcaggcgcagaggaggaggaggaggaggaagaagaagggtgacggggtcgtgctcttcaacttcggcgactccaacagcgacacgggcggcgtggcggcggtcatggggatccgcatcgcgccgccggagggcagggcctacttccaccaccccacggggcggctctccgacggacgcgtcatcctcgacttcatctgtgagagcctgggcatgccgcacctgagtccgttcatgaagccgctgggctccaacttctccaacggcgtcaacttcgccattgcagggtccacggccatgccgggagtaaccaccttctcgctggacgtgcaggtggatcagttcgtcttcttcaaggagagatgcctcgactccatcgagagaggtgagagtgccccgattgttgagaaggcgttcccagatgctatatacaccatggacatcgggcacaacgatataaacggtgttctccacttgccctatcatacaatgctcgaaaatctccccccagtaattgctgaaatcaagaaagccatcgagaggttgcacgagaatggagccaggaagttctggatacatggaacgggagcattagggtgcatgcctcagaagctttctatgccgagggatgacgacagcgacctcgatgagcatggatgcatcgcaagcattaataatgtctgcaagaagttcaattccttgctgagtgaagccttggacgagctgcgtttgacactgaaaagttcgactatcgtctttgtggatatgttcgctatcaagtatgatcttgttgccaaccacacgaaatatgggattgagaagccattgatgacatgttgtggtcatggaggccccccttacaactatgaccccaaggagagctgcatgacttcggacaaatacctgtgcaagcttggcgaaaagttcataagctgggacggggttcacttcactgatgctgcaaatggcattgtggcttccaaagtactcagtggtgagtacaacattcccagggtcaagctggccagcctcgtccccgttccaaaatctgacgattaatggtgatgcagcaccttaattggcctttagtttggcctatcaaggatgatgaagatgaaactactaacaaaactgacaccaccgaagtttaattattttgaggttcttacgttacatccattgtagaagaagactttccttttgtttacttctctttttgtacaatcggcgcatatgtatatcctagggttaatatatggcgatgcaggtgtctgtaccatgtataattttctttttgaattttgggtctgttggc

SEQ ID NO: 29402 - protein, 434 aa, Zea mays subsp. mays
  peptide (1)..(434): Ceres Seq. ID no. 12349252
  misc_feature (101)..(411): Pfam Name: Pfam Description:  GDSL-like Lipase/Acylhydrolase
  misc_feature (6)..(427): NCBI GI NO: 34894838 NR Description: putative lipase homolog
  misc_feature (51)..(421): NCBI GI NO: 34894866 NR Description: putative lipase homolog
  misc_feature (100)..(419): NCBI GI NO: 15217506 NR Description: putative lipase; protein id: At1g09390.1
  misc_feature (100)..(419): NCBI GI NO: 15223585 NR Description: nodule-specific protein, putative
  misc_feature (150)..(422): NCBI GI NO: 34894844 NR Description: putative lipase homolog
  misc_feature (105)..(400): NCBI GI NO: 25336281 NR Description: lipase-like protein Lip-4
  misc_feature (100)..(262): NCBI GI NO: 15228721 NR Description: putative protein; protein id: At3g62280.1
  misc_feature (286)..(423): NCBI GI NO: 15228721 NR Description: putative protein; protein id: At3g62280.1
  misc_feature (101)..(419): NCBI GI NO: 25405771 NR Description: hypothetical protein T22H22.20
  misc_feature (102)..(419): NCBI GI NO: 18405064 NR Description: early nodule-specific protein, putative
MASAASGGGGSLKRMGPLRVQYYIVMGAVAAAVVLATLRYMPGPAVPATTARTSGGGVVRSAPAAAAVPVPVPAVEVETGEDEQAQRRRRRRKKKGDGVVLFNFGDSNSDTGGVAAVMGIRIAPPEGRAYFHHPTGRLSDGRVILDFICESLGMPHLSPFMKPLGSNFSNGVNFAIAGSTAMPGVTTFSLDVQVDQFVFFKERCLDSIERGESAPIVEKAFPDAIYTMDIGHNDINGVLHLPYHTMLENLPPVIAEIKKAIERLHENGARKFWIHGTGALGCMPQKLSMPRDDDSDLDEHGCIASINNVCKKFNSLLSEALDELRLTLKSSTIVFVDMFAIKYDLVANHTKYGIEKPLMTCCGHGGPPYNYDPKESCMTSDKYLCKLGEKFISWDGVHFTDAANGIVASKVLSGEYNIPRVKLASLVPVPKSDD

SEQ ID NO: 29403 - protein, 420 aa, Zea mays subsp. mays
  peptide (1)..(420): Ceres Seq. ID no. 12349253
  misc_feature (87)..(397): Pfam Name: Pfam Description:  GDSL-like Lipase/Acylhydrolase
  misc_feature (1)..(413): NCBI GI NO: 34894838 NR Description: putative lipase homolog
  misc_feature (37)..(407): NCBI GI NO: 34894866 NR Description: putative lipase homolog
  misc_feature (86)..(405): NCBI GI NO: 15217506 NR Description: putative lipase; protein id: At1g09390.1
  misc_feature (86)..(405): NCBI GI NO: 15223585 NR Description: nodule-specific protein, putative
  misc_feature (136)..(408): NCBI GI NO: 34894844 NR Description: putative lipase homolog
  misc_feature (91)..(386): NCBI GI NO: 25336281 NR Description: lipase-like protein Lip-4
  misc_feature (86)..(248): NCBI GI NO: 15228721 NR Description: putative protein; protein id: At3g62280.1
  misc_feature (272)..(409): NCBI GI NO: 15228721 NR Description: putative protein; protein id: At3g62280.1
  misc_feature (87)..(405): NCBI GI NO: 25405771 NR Description: hypothetical protein T22H22.20
  misc_feature (88)..(405): NCBI GI NO: 18405064 NR Description: early nodule-specific protein, putative
MGPLRVQYYIVMGAVAAAVVLATLRYMPGPAVPATTARTSGGGVVRSAPAAAAVPVPVPAVEVETGEDEQAQRRRRRRKKKGDGVVLFNFGDSNSDTGGVAAVMGIRIAPPEGRAYFHHPTGRLSDGRVILDFICESLGMPHLSPFMKPLGSNFSNGVNFAIAGSTAMPGVTTFSLDVQVDQFVFFKERCLDSIERGESAPIVEKAFPDAIYTMDIGHNDINGVLHLPYHTMLENLPPVIAEIKKAIERLHENGARKFWIHGTGALGCMPQKLSMPRDDDSDLDEHGCIASINNVCKKFNSLLSEALDELRLTLKSSTIVFVDMFAIKYDLVANHTKYGIEKPLMTCCGHGGPPYNYDPKESCMTSDKYLCKLGEKFISWDGVHFTDAANGIVASKVLSGEYNIPRVKLASLVPVPKSDD

SEQ ID NO: 29404 - protein, 409 aa, Zea mays subsp. mays
  peptide (1)..(409): Ceres Seq. ID no. 12349254
  misc_feature (76)..(386): Pfam Name: Pfam Description:  GDSL-like Lipase/Acylhydrolase
  misc_feature (1)..(402): NCBI GI NO: 34894838 NR Description: putative lipase homolog
  misc_feature (26)..(396): NCBI GI NO: 34894866 NR Description: putative lipase homolog
  misc_feature (75)..(394): NCBI GI NO: 15217506 NR Description: putative lipase; protein id: At1g09390.1
  misc_feature (75)..(394): NCBI GI NO: 15223585 NR Description: nodule-specific protein, putative
  misc_feature (125)..(397): NCBI GI NO: 34894844 NR Description: putative lipase homolog
  misc_feature (80)..(375): NCBI GI NO: 25336281 NR Description: lipase-like protein Lip-4
  misc_feature (75)..(237): NCBI GI NO: 15228721 NR Description: putative protein; protein id: At3g62280.1
  misc_feature (261)..(398): NCBI GI NO: 15228721 NR Description: putative protein; protein id: At3g62280.1
  misc_feature (76)..(394): NCBI GI NO: 25405771 NR Description: hypothetical protein T22H22.20
  misc_feature (77)..(394): NCBI GI NO: 18405064 NR Description: early nodule-specific protein, putative
MGAVAAAVVLATLRYMPGPAVPATTARTSGGGVVRSAPAAAAVPVPVPAVEVETGEDEQAQRRRRRRKKKGDGVVLFNFGDSNSDTGGVAAVMGIRIAPPEGRAYFHHPTGRLSDGRVILDFICESLGMPHLSPFMKPLGSNFSNGVNFAIAGSTAMPGVTTFSLDVQVDQFVFFKERCLDSIERGESAPIVEKAFPDAIYTMDIGHNDINGVLHLPYHTMLENLPPVIAEIKKAIERLHENGARKFWIHGTGALGCMPQKLSMPRDDDSDLDEHGCIASINNVCKKFNSLLSEALDELRLTLKSSTIVFVDMFAIKYDLVANHTKYGIEKPLMTCCGHGGPPYNYDPKESCMTSDKYLCKLGEKFISWDGVHFTDAANGIVASKVLSGEYNIPRVKLASLVPVPKSDD

SEQ ID NO: 29405 - DNA, 1291 bp, Zea mays subsp. mays
  misc_feature (1)..(1291): Ceres Seq. ID no. 13494949
gtttgtgatgaagcactgtcgtcgcccatgacgggaaaacggctccatatacgtactactaacgtacacaccacagcgactctccggccatgcagttgccggctgcacaacttgtgcaagtgcatgcatgcatggatttggatccatgcatggccacagcccacagcccacaggggaggggaaggtgaggccgcgccgcgaggaaccgcgtcgaccttgtcgtcgatgttggcttgcaaggcgagcccgagccggccgtgcgtcgtcccccttgtttgcctgctggtggtggcggccgcagtcgtcgtcgtcgctgcctcggcgccgccggcggaggcggcgttcgacgacaactacgtggcgcagtggggtagagatggttatcaccttgtcgtccggggcacgggaggcgaatgtcaccatggaccagagctctggtgcccgggttccggtccaagtccacgtacggctcagggttcttccacatgaggatgaagctgccctccgggtacacggccggcgtcgtcacgaccttctacctcatctcgcagccggaggatgggagccgcgacgaggtggacttggagttcctgggcgacaaggccggcgtgcccatcaccctccagaccaacgtcttcgtcgacggccgcggcgacagggagcagcggacgcgcctctggttcgaccccgccgccgacttccacgactacaagatcctctggaacccataccagctcgtgatgttcgtggacgacacgccggtccgggtgctgaggaacctgacgggcgccgtgccggggtacccgttcccggggaagcagacgatgctgatccgcgcgagcgtgtgggacggctccgactgggccacggacggcggccggaccaaggtggactggtccaggggccccttcaccgccggctaccggggcttcgacgtcgacggctgcgccaacaacgggagcgacgcgtgccaatcgcccgacctatggtggaacgccgccgagtaccggaacatcaccgcggagcagcgggcggcgtacgaggacgtgaagaggagttacatgaactacgactactgcgccgataaggccaggtttaacagcaccaccgtacccattgaatgcaactacgcttgagaagccagttaggagtggcggcgttgtatatcaacggtttatatatatatattatatatatatacacacacacgaaaaagatatgtcttcttatttgttgcaagggtttaaatatgcaaatgcttataaggactaaaaaaatatatttccatgtc

SEQ ID NO: 29406 - protein, 319 aa, Zea mays subsp. mays
  peptide (1)..(319): Ceres Seq. ID no. 13494950
MHGFGSMHGHSPQPTGEGKVRPRREEPRRPCRRCWLARRARAGRASSPLFACWWWRPQSSSSLPRRRRRRRRSTTTTWRSGVEMVITLSSGAREANVTMDQSSGARVPVQVHVRLRVLPHEDEAALRVHGRRRHDLLPHLAAGGWEPRRGGLGVPGRQGRRAHHPPDQRLRRRPRRQGAADAPLVRPRRRLPRLQDPLEPIPARDVRGRHAGPGAEEPDGRRAGVPVPGEADDADPRERVGRLRLGHGRRPDQGGLVQGPLHRRLPGLRRRRLRQQRERRVPIARPMVERRRVPEHHRGAAGGVRGREEELHELRLLRR

SEQ ID NO: 29407 - protein, 313 aa, Zea mays subsp. mays
  peptide (1)..(313): Ceres Seq. ID no. 13494951
MHGHSPQPTGEGKVRPRREEPRRPCRRCWLARRARAGRASSPLFACWWWRPQSSSSLPRRRRRRRRSTTTTWRSGVEMVITLSSGAREANVTMDQSSGARVPVQVHVRLRVLPHEDEAALRVHGRRRHDLLPHLAAGGWEPRRGGLGVPGRQGRRAHHPPDQRLRRRPRRQGAADAPLVRPRRRLPRLQDPLEPIPARDVRGRHAGPGAEEPDGRRAGVPVPGEADDADPRERVGRLRLGHGRRPDQGGLVQGPLHRRLPGLRRRRLRQQRERRVPIARPMVERRRVPEHHRGAAGGVRGREEELHELRLLRR

SEQ ID NO: 29408 - protein, 240 aa, Zea mays subsp. mays
  peptide (1)..(240): Ceres Seq. ID no. 13494952
  misc_feature (11)..(162): Pfam Name: Pfam Description:  Glycosyl hydrolases family 16
  misc_feature (11)..(237): NCBI GI NO: 15230246 NR Description: xyloglucan endotransglycosylase, putative
  misc_feature (11)..(239): NCBI GI NO: 22328589 NR Description: xyloglucan endotransglycosylase, putative
  misc_feature (11)..(239): NCBI GI NO: 38605518 NR Description: Putative xyloglucan endotransglucosylase/hydrolaseprotein 1 precursor
  misc_feature (11)..(239): NCBI GI NO: 15235587 NR Description: xyloglucan endotransglycosylase, putative
  misc_feature (11)..(237): NCBI GI NO: 5070246 NR Description: xyloglucan endo-transglycosylase-like protein
  misc_feature (11)..(237): NCBI GI NO: 15240733 NR Description: xyloglucan endotransglycosylase (EXGT-A4)
  misc_feature (11)..(237): NCBI GI NO: 22947847 NR Description: xyloglucan endotransglycosylase
  misc_feature (11)..(237): NCBI GI NO: 15225605 NR Description: xyloglucan endotransglycosylase (ext/EXGT-A1)
  misc_feature (11)..(237): NCBI GI NO: 27228078 NR Description: xyloglucan endotransglycosylase precursor
  misc_feature (11)..(237): NCBI GI NO: 950299 NR Description: xyloglucan endotransglycosylase precursor
MSPWTRALVPGFRSKSTYGSGFFHMRMKLPSGYTAGVVTTFYLISQPEDGSRDEVDLEFLGDKAGVPITLQTNVFVDGRGDREQRTRLWFDPAADFHDYKILWNPYQLVMFVDDTPVRVLRNLTGAVPGYPFPGKQTMLIRASVWDGSDWATDGGRTKVDWSRGPFTAGYRGFDVDGCANNGSDACQSPDLWWNAAEYRNITAEQRAAYEDVKRSYMNYDYCADKARFNSTTVPIECNYA

SEQ ID NO: 29409 - DNA, 1467 bp, Zea mays subsp. mays
  misc_feature (1)..(1467): Ceres Seq. ID no. 12408629
atccgagttgccagccaattttgcatccccaccaccaatccaccaccccacacccagtgacagagacagaaggccggacggctacgcgacgcgacggagatggagcacacgaatcatcgccgccgccgtcaagctttggccaccgtgtcggcgacgacgacgctcctgctgcttctcctctgcctcgcggcgttgacgacggcagaggcgctgcgcgagcacagggacgagggcggcgctagcagcagtggcggaagcggaagcggctgcggcagcaacgccgccggcggcaagcaatcgccggccgtgtgggtgttcggggactcgtacgcggacacggggaacctgggcgacctcgggcgggagctgacccgcgagtggtacgacccgtacgggaccaccttccccggccggcccgccggccgcttctccgacggccgcgtcctcaccgacttcatagcctccgcgatgggagtgccaacgccggtggcgtacaagctgcgcaggggcgccgcgcgcgggctcgtggcgcgcggcatgaacttcgccgtcggcggcgcgggcgtgctggacaccggcaacttccagcgcaacatcggcgagcagatcgacctgttccaggcgcagcgcccgccgccgccgtcgccctccgcccgcggctgcgacgccggggtcgccgtcgtcgtcgtctccggcaacgactactcctacgccgccgacaaggacaacagcacaagcgccgcgatcgcctacatcccagcggtggtgcggcagctccgggagcagctgcggcggctgcgcgacgaggcgggcatgcgcaaggtggtggtcaccaacctgcaccccatggggtgcacgccgctcttcacccgcgctctcaactacacggcctgcgacccgctggccaacgccggcgccgcgcagcacaacgcggcgcttcagtccgtgctcgccgcgctcgacccggccaaccgcaccttcctcctcctcgacctcaacacgcccttcgccgccttagtcgacggcgcggcggcggcgacggcggaggagaggttcgcggagccgaggcggccgtgctgcgagagcttcagcgccgacggccactgcgggcagcaggacgacagcggcaggcggcagtacacgctgtgtagcgacccgagcaagcatttttactgggacgacgtccacccgacgcaggccgcgtgggccgccgtctcccgaacgttcaggcccatgattcaaggagttccttctgtctacctgatcacagctttgtttcgatcagatgagataaaaactagcactacttatcaaaagaaccaatcaatcaagggtggagagctaaccgagttgttggattagtgaaattctcctgtcattgttactctaaaaatggctggattttttgtattaaaaaaaatccacggtgcgagatgttggaataaaaaagcgatcttcagttcagtg

SEQ ID NO: 29410 - protein, 420 aa, Zea mays subsp. mays
  peptide (1)..(420): Ceres Seq. ID no. 12408630
  misc_feature (70)..(372): Pfam Name: Pfam Description:  GDSL-like Lipase/Acylhydrolase
  misc_feature (70)..(377): NCBI GI NO: 15242811 NR Description: putative protein; protein id: At5g03610
  misc_feature (70)..(372): NCBI GI NO: 10241432 NR Description: putative lipase/acylhydrolase
  misc_feature (70)..(372): NCBI GI NO: 15232799 NR Description: putative lipase acylhydrolase
  misc_feature (70)..(372): NCBI GI NO: 28393114 NR Description: putative lipase acylhydrolase
  misc_feature (58)..(372): NCBI GI NO: 15242810 NR Description: putative protein; protein id: At5g03600.1
  misc_feature (64)..(378): NCBI GI NO: 20260298 NR Description: unknown protein [Arabidopsis thaliana]
  misc_feature (121)..(372): NCBI GI NO: 6143883 NR Description: unknown protein [Arabidopsis thaliana]
  misc_feature (55)..(375): NCBI GI NO: 34903978 NR Description: unnamed protein product
  misc_feature (68)..(373): NCBI GI NO: 18390708 NR Description: expressed protein; protein id: At1g06990
  misc_feature (68)..(373): NCBI GI NO: 25336267 NR Description: hypothetical protein
MEHTNHRRRRQALATVSATTTLLLLLLCLAALTTAEALREHRDEGGASSSGGSGSGCGSNAAGGKQSPAVWVFGDSYADTGNLGDLGRELTREWYDPYGTTFPGRPAGRFSDGRVLTDFIASAMGVPTPVAYKLRRGAARGLVARGMNFAVGGAGVLDTGNFQRNIGEQIDLFQAQRPPPPSPSARGCDAGVAVVVVSGNDYSYAADKDNSTSAAIAYIPAVVRQLREQLRRLRDEAGMRKVVVTNLHPMGCTPLFTRALNYTACDPLANAGAAQHNAALQSVLAALDPANRTFLLLDLNTPFAALVDGAAAATAEERFAEPRRPCCESFSADGHCGQQDDSGRRQYTLCSDPSKHFYWDDVHPTQAAWAAVSRTFRPMIQGVPSVYLITALFRSDEIKTSTTYQKNQSIKGGELTELLD

SEQ ID NO: 29411 - protein, 297 aa, Zea mays subsp. mays
  peptide (1)..(297): Ceres Seq. ID no. 12408631
  misc_feature (1)..(249): Pfam Name: Pfam Description:  GDSL-like Lipase/Acylhydrolase
  misc_feature (1)..(254): NCBI GI NO: 15242811 NR Description: putative protein; protein id: At5g03610
  misc_feature (1)..(249): NCBI GI NO: 10241432 NR Description: putative lipase/acylhydrolase
  misc_feature (1)..(249): NCBI GI NO: 15232799 NR Description: putative lipase acylhydrolase
  misc_feature (1)..(249): NCBI GI NO: 28393114 NR Description: putative lipase acylhydrolase
  misc_feature (1)..(249): NCBI GI NO: 15242810 NR Description: putative protein; protein id: At5g03600.1
  misc_feature (1)..(255): NCBI GI NO: 20260298 NR Description: unknown protein [Arabidopsis thaliana]
  misc_feature (1)..(249): NCBI GI NO: 6143883 NR Description: unknown protein [Arabidopsis thaliana]
  misc_feature (1)..(252): NCBI GI NO: 34903978 NR Description: unnamed protein product
  misc_feature (1)..(250): NCBI GI NO: 18390708 NR Description: expressed protein; protein id: At1g06990
  misc_feature (1)..(250): NCBI GI NO: 25336267 NR Description: hypothetical protein
MGVPTPVAYKLRRGAARGLVARGMNFAVGGAGVLDTGNFQRNIGEQIDLFQAQRPPPPSPSARGCDAGVAVVVVSGNDYSYAADKDNSTSAAIAYIPAVVRQLREQLRRLRDEAGMRKVVVTNLHPMGCTPLFTRALNYTACDPLANAGAAQHNAALQSVLAALDPANRTFLLLDLNTPFAALVDGAAAATAEERFAEPRRPCCESFSADGHCGQQDDSGRRQYTLCSDPSKHFYWDDVHPTQAAWAAVSRTFRPMIQGVPSVYLITALFRSDEIKTSTTYQKNQSIKGGELTELLD

SEQ ID NO: 29412 - protein, 274 aa, Zea mays subsp. mays
  peptide (1)..(274): Ceres Seq. ID no. 12408632
  misc_feature (1)..(226): Pfam Name: Pfam Description:  GDSL-like Lipase/Acylhydrolase
  misc_feature (1)..(231): NCBI GI NO: 15242811 NR Description: putative protein; protein id: At5g03610
  misc_feature (1)..(226): NCBI GI NO: 10241432 NR Description: putative lipase/acylhydrolase
  misc_feature (1)..(226): NCBI GI NO: 15232799 NR Description: putative lipase acylhydrolase
  misc_feature (1)..(226): NCBI GI NO: 28393114 NR Description: putative lipase acylhydrolase
  misc_feature (1)..(226): NCBI GI NO: 15242810 NR Description: putative protein; protein id: At5g03600.1
  misc_feature (1)..(232): NCBI GI NO: 20260298 NR Description: unknown protein [Arabidopsis thaliana]
  misc_feature (1)..(226): NCBI GI NO: 6143883 NR Description: unknown protein [Arabidopsis thaliana]
  misc_feature (1)..(229): NCBI GI NO: 34903978 NR Description: unnamed protein product
  misc_feature (1)..(227): NCBI GI NO: 18390708 NR Description: expressed protein; protein id: At1g06990
  misc_feature (1)..(227): NCBI GI NO: 25336267 NR Description: hypothetical protein
MNFAVGGAGVLDTGNFQRNIGEQIDLFQAQRPPPPSPSARGCDAGVAVVVVSGNDYSYAADKDNSTSAAIAYIPAVVRQLREQLRRLRDEAGMRKVVVTNLHPMGCTPLFTRALNYTACDPLANAGAAQHNAALQSVLAALDPANRTFLLLDLNTPFAALVDGAAAATAEERFAEPRRPCCESFSADGHCGQQDDSGRRQYTLCSDPSKHFYWDDVHPTQAAWAAVSRTFRPMIQGVPSVYLITALFRSDEIKTSTTYQKNQSIKGGELTELLD

SEQ ID NO: 29413 - DNA, 1407 bp, Zea mays subsp. mays
  misc_feature (1)..(1407): Ceres Seq. ID no. 12344326
aataaaccccgcgccgccgctgccgcctcctgtcccggtcggatcctccgcgccgctcgcgccgccctcatcttcccagccccaacgcgacgcaccacaagggccctcgccatgtcgaagaaagtaggacgagcgaagaaagcagcgggcggcggcgagctgtcccgcttcctggagtcgcatctccagaccattagcgacaccttccagatgatggcggagtcggctccgggggccttggaccggacggagtggtctgaggtcgttaagctcggcgaccaggtctccaggcaggccaccgtcgctggaatgctctggagcggtgacttgcctgatgtagagaccctcaaagagaacatcgttgcttatttcaacatcctacagggatttcttttggtttgccacggaagcatggtcggtgctgggcctactctacacaagtccatctttgggtctgcaaaagacgtggttgactctagcttctcattgttcaagcatgctgtctctgcttatgaatctcgcagccctgaccgcaacacaactataccccaggtcacaggaactgtatgggaagcttgtgctgctctcaagaaggtgcctgcatcaaactgcattgccataggacgagccatgaccaggataggtgtgtgtctgaaagatgttctccgagaaatgaatgagctccctattggtgattctggtgttagtactgctgagaagtcttccaatggtgttgtcgacacaacgagttgttctgatagagatgagaggtctgatcttgatttagatgatgatgacgacgacgacgacgacgagttcactgaagaagaggttgctgttgccaagttggttattaacgtggtatctgattccttggttgtagtgaaagaggcaattcgtttcattactggtttgctcaggagctctggtaacaaagacaaagatgaggacaaagttgagccaatggagaaattgctgagccactgcaaggagatcgcggaccaggtcaatgatcttggggcttctgtatacccaccacaagactcgtctgagatggagctcgctataaaaagactgtacaatggcatcaacgggatgcgcaaggaaatagggaacctcggtggcgcacctgagagcacctttgccgcccttgaaggattcgaaaagtgccttggatctctgcgggccaggttagctgatgatgtggtgaacgagatggaaggtcttaatattagccattagcacgtactgttcagatttttccatagcagtgttatgccagtatatcttctggttttgcacgatggaaggagcttctgtggtttcagtaaatgaggcgtccggtctctgtactgatggcgttgttgcgggtcatcgattgtaaaggaagtgggcctggattgctgc

SEQ ID NO: 29414 - protein, 413 aa, Zea mays subsp. mays
  peptide (1)..(413): Ceres Seq. ID no. 12344327
  misc_feature (53)..(411): NCBI GI NO: 15219987 NR Description: unknown protein; protein id: At1g22970
  misc_feature (53)..(237): NCBI GI NO: 15223962 NR Description: unknown protein; protein id: At1g71150.1
  misc_feature (42)..(228): NCBI GI NO: 18395185 NR Description: unknown protein; protein id: At1g22980.1
  misc_feature (105)..(228): NCBI GI NO: 25372690 NR Description: F19G10.7 protein - Arabidopsis thaliana
  misc_feature (218)..(407): NCBI GI NO: 15223962 NR Description: unknown protein; protein id: At1g71150.1
NKPRAAAAASCPGRILRAARAALIFPAPTRRTTRALAMSKKVGRAKKAAGGGELSRFLESHLQTISDTFQMMAESAPGALDRTEWSEVVKLGDQVSRQATVAGMLWSGDLPDVETLKENIVAYFNILQGFLLVCHGSMVGAGPTLHKSIFGSAKDVVDSSFSLFKHAVSAYESRSPDRNTTIPQVTGTVWEACAALKKVPASNCIAIGRAMTRIGVCLKDVLREMNELPIGDSGVSTAEKSSNGVVDTTSCSDRDERSDLDLDDDDDDDDDEFTEEEVAVAKLVINVVSDSLVVVKEAIRFITGLLRSSGNKDKDEDKVEPMEKLLSHCKEIADQVNDLGASVYPPQDSSEMELAIKRLYNGINGMRKEIGNLGGAPESTFAALEGFEKCLGSLRARLADDVVNEMEGLNISH

SEQ ID NO: 29415 - protein, 376 aa, Zea mays subsp. mays
  peptide (1)..(376): Ceres Seq. ID no. 12344328
  misc_feature (16)..(374): NCBI GI NO: 15219987 NR Description: unknown protein; protein id: At1g22970
  misc_feature (16)..(200): NCBI GI NO: 15223962 NR Description: unknown protein; protein id: At1g71150.1
  misc_feature (5)..(191): NCBI GI NO: 18395185 NR Description: unknown protein; protein id: At1g22980.1
  misc_feature (68)..(191): NCBI GI NO: 25372690 NR Description: F19G10.7 protein - Arabidopsis thaliana
  misc_feature (181)..(370): NCBI GI NO: 15223962 NR Description: unknown protein; protein id: At1g71150.1
MSKKVGRAKKAAGGGELSRFLESHLQTISDTFQMMAESAPGALDRTEWSEVVKLGDQVSRQATVAGMLWSGDLPDVETLKENIVAYFNILQGFLLVCHGSMVGAGPTLHKSIFGSAKDVVDSSFSLFKHAVSAYESRSPDRNTTIPQVTGTVWEACAALKKVPASNCIAIGRAMTRIGVCLKDVLREMNELPIGDSGVSTAEKSSNGVVDTTSCSDRDERSDLDLDDDDDDDDDEFTEEEVAVAKLVINVVSDSLVVVKEAIRFITGLLRSSGNKDKDEDKVEPMEKLLSHCKEIADQVNDLGASVYPPQDSSEMELAIKRLYNGINGMRKEIGNLGGAPESTFAALEGFEKCLGSLRARLADDVVNEMEGLNISH

SEQ ID NO: 29416 - protein, 343 aa, Zea mays subsp. mays
  peptide (1)..(343): Ceres Seq. ID no. 12344329
  misc_feature (1)..(341): NCBI GI NO: 15219987 NR Description: unknown protein; protein id: At1g22970
  misc_feature (1)..(167): NCBI GI NO: 15223962 NR Description: unknown protein; protein id: At1g71150.1
  misc_feature (1)..(158): NCBI GI NO: 18395185 NR Description: unknown protein; protein id: At1g22980.1
  misc_feature (35)..(158): NCBI GI NO: 25372690 NR Description: F19G10.7 protein - Arabidopsis thaliana
  misc_feature (148)..(337): NCBI GI NO: 15223962 NR Description: unknown protein; protein id: At1g71150.1
MMAESAPGALDRTEWSEVVKLGDQVSRQATVAGMLWSGDLPDVETLKENIVAYFNILQGFLLVCHGSMVGAGPTLHKSIFGSAKDVVDSSFSLFKHAVSAYESRSPDRNTTIPQVTGTVWEACAALKKVPASNCIAIGRAMTRIGVCLKDVLREMNELPIGDSGVSTAEKSSNGVVDTTSCSDRDERSDLDLDDDDDDDDDEFTEEEVAVAKLVINVVSDSLVVVKEAIRFITGLLRSSGNKDKDEDKVEPMEKLLSHCKEIADQVNDLGASVYPPQDSSEMELAIKRLYNGINGMRKEIGNLGGAPESTFAALEGFEKCLGSLRARLADDVVNEMEGLNISH

SEQ ID NO: 29417 - DNA, 1388 bp, Zea mays subsp. mays
  misc_feature (1)..(1388): Ceres Seq. ID no. 12364160
  misc_feature (346)..(346): n is a, c, t, g, unknown, or other
aaaacatcctcctctcctcgcagacatcttatccctcccgatcgaggccccgtttcctcctcctccggccaccgcacttagctgtcttaacttgccgttcggttcgcagcctcacgcccatggctaggaagtgctctagctgtgggaacaacggccacaactcgaggacctgcagcgggcacggcgccgggggcgggggcgtgaggctgttcggggtgcagctgcacgtggggtcctcgcccgtggccatgaagaagtgcttcagcatggagtgcctgtcgtcgtcggcgtccgccgcgccggcgtactacgcggccgctctccgccgcgaccaacagcgcctcgncgtcggcctcctcctcctcgtcgctcgtctcggtggaggaggcccccgagaagatggcccacgggtacctctccgacgggctcatgggcagggcggcgcaggagaggaagaagggcgttccatggacggaggacgagcacaggcgattcctggcgggcctggagaagctcgggaagggcgactggcgaggcatctcccggcacttcgtgacgacgcggaccccgacgcaggtggccagccacgcccagaagtacttcctccggcagagcagcctgacgcacaagaagcgcaggtccagcctcttcgacgtggtggagaacgccgagagggcggcgacgagctccatcaagggcatggagcgcctgcggctcaaggacgccatcacgaccgcgaccgcgactggctccgcagaacccggaaccgggacgacggcacagctcccgccggccctgtcgctcggcgtcggcaggcccaccagcgaggcccgaccacgccgcgctgcctccgagcagcctgctgtccctgcagctgccgcggtgctcgggcgggaattgggccgcacggcgccgagcctggcccctggcgccgccgaaacacagccacccttcttcgtcgctgacggcggcaaaggctggtggcctggcgccggacctggagctgaagatctcgaccgcccggcagagcgagcaccagcagcaggtccagatggggccatcgctgccgccgccgccgccgccgccgcagaggacgccctttctggggaccatcagggtcacatgacatgaccggcaaagacggcggcggttagtagggaatatcctgctggtaggagaagagcttttgcccatctgaagctggagaaggttgcttcaaaagataggacggggtgggaaaactggaaagaaggaagcttttggcagcgtgtgcgtgtgtgtgtgttgctggcacctggcagtggcagccgagacgacgatggcgtcgtgtatcatgtgggtgttgtgtatatcatatcatcatcatccgaaagatggaaactttactg

SEQ ID NO: 29418 - protein, 320 aa, Zea mays subsp. mays
  peptide (1)..(320): Ceres Seq. ID no. 12364161
  misc_feature (42)..(59): Pfam Name: Pfam Description:  Zinc knuckle
  misc_feature (40)..(105): NCBI GI NO: 34906444 NR Description: P0671B11.14
  misc_feature (40)..(78): NCBI GI NO: 34912404 NR Description: putative Myb-related transcription factor
  misc_feature (40)..(95): NCBI GI NO: 34906364 NR Description: unnamed protein product
  misc_feature (40)..(107): NCBI GI NO: 15241963 NR Description: putative protein; protein id: At5g56840.1
  misc_feature (40)..(93): NCBI GI NO: 15238083 NR Description: Myb-related transcription activator-like
  misc_feature (34)..(81): NCBI GI NO: 15240300 NR Description: transcriptional activator - like protein
  misc_feature (115)..(115): Xaa is any aa, unknown or other
NILLSSQTSYPSRSRPRFLLLRPPHLAVLTCRSVRSLTPMARKCSSCGNNGHNSRTCSGHGAGGGGVRLFGVQLHVGSSPVAMKKCFSMECLSSSASAAPAYYAAALRRDQQRLXVGLLLLVARLGGGGPREDGPRVPLRRAHGQGGAGEEEGRSMDGGRAQAIPGGPGEAREGRLARHLPALRDDADPDAGGQPRPEVLPPAEQPDAQEAQVQPLRRGGERREGGDELHQGHGAPAAQGRHHDRDRDWLRRTRNRDDGTAPAGPVARRRQAHQRGPTTPRCLRAACCPCSCRGARAGIGPHGAEPGPWRRRNTATLLRR

SEQ ID NO: 29419 - protein, 281 aa, Zea mays subsp. mays
  peptide (1)..(281): Ceres Seq. ID no. 12364162
  misc_feature (3)..(20): Pfam Name: Pfam Description:  Zinc knuckle
  misc_feature (1)..(66): NCBI GI NO: 34906444 NR Description: P0671B11.14
  misc_feature (1)..(39): NCBI GI NO: 34912404 NR Description: putative Myb-related transcription factor
  misc_feature (1)..(56): NCBI GI NO: 34906364 NR Description: unnamed protein product
  misc_feature (1)..(68): NCBI GI NO: 15241963 NR Description: putative protein; protein id: At5g56840.1
  misc_feature (1)..(54): NCBI GI NO: 15238083 NR Description: Myb-related transcription activator-like
  misc_feature (1)..(42): NCBI GI NO: 15240300 NR Description: transcriptional activator - like protein
  misc_feature (76)..(76): Xaa is any aa, unknown or other
MARKCSSCGNNGHNSRTCSGHGAGGGGVRLFGVQLHVGSSPVAMKKCFSMECLSSSASAAPAYYAAALRRDQQRLXVGLLLLVARLGGGGPREDGPRVPLRRAHGQGGAGEEEGRSMDGGRAQAIPGGPGEAREGRLARHLPALRDDADPDAGGQPRPEVLPPAEQPDAQEAQVQPLRRGGERREGGDELHQGHGAPAAQGRHHDRDRDWLRRTRNRDDGTAPAGPVARRRQAHQRGPTTPRCLRAACCPCSCRGARAGIGPHGAEPGPWRRRNTATLLRR

SEQ ID NO: 29420 - protein, 243 aa, Zea mays subsp. mays
  peptide (1)..(243): Ceres Seq. ID no. 12364163
  misc_feature (21)..(68): Pfam Name: Pfam Description:  Myb-like DNA-binding domain
  misc_feature (1)..(98): NCBI GI NO: 34906444 NR Description: P0671B11.14
  misc_feature (1)..(118): NCBI GI NO: 34912404 NR Description: putative Myb-related transcription factor
  misc_feature (17)..(116): NCBI GI NO: 34906364 NR Description: unnamed protein product
  misc_feature (4)..(96): NCBI GI NO: 15241963 NR Description: putative protein; protein id: At5g56840.1
  misc_feature (1)..(87): NCBI GI NO: 15238083 NR Description: Myb-related transcription activator-like
  misc_feature (1)..(91): NCBI GI NO: 12406995 NR Description: MCB2 protein [Hordeum vulgare subsp. vulgare]
  misc_feature (4)..(111): NCBI GI NO: 15240300 NR Description: transcriptional activator - like protein
  misc_feature (1)..(184): NCBI GI NO: 28812130 NR Description: P0443G08.23
  misc_feature (1)..(87): NCBI GI NO: 24850307 NR Description: transcription factor MYBS3
  misc_feature (1)..(87): NCBI GI NO: 37536856 NR Description: putative Myb-related protein
MAHGYLSDGLMGRAAQERKKGVPWTEDEHRRFLAGLEKLGKGDWRGISRHFVTTRTPTQVASHAQKYFLRQSSLTHKKRRSSLFDVVENAERAATSSIKGMERLRLKDAITTATATGSAEPGTGTTAQLPPALSLGVGRPTSEARPRRAASEQPAVPAAAAVLGRELGRTAPSLAPGAAETQPPFFVADGGKGWWPGAGPGAEDLDRPAERAPAAGPDGAIAAAAAAAAAEDALSGDHQGHMT

SEQ ID NO: 29421 - DNA, 1542 bp, Zea mays subsp. mays
  misc_feature (1)..(1542): Ceres Seq. ID no. 12365770
agtccccgtgcgccacgccacctgccagtactagctcgcccgctcgatcgcgcccatcaatcaatcaattctcgacctcactactcgatctcgtctcatcagtgtgagtgtccgagcacggcagcacgcgcaatggacgctctgctcgtgactacgaccttcctcgtccccgtgggtggcgctcctcctcgggtccgggtccgggtccgcggcggcgctgccgcgcgccttcttcgtgttcggtaactccctcgtggacaacggcaacaacaactacctgatgacgacggcgcgcgccgacgcgccgccctacgggatcgacttccccacgcacatggccacggggcggttctccaacgggctgaacatccccgacatcatcagcgagcacctcggctcccagcccgcgctgccgtacctgagccccgacctccgcggcgcccagctcctggtcggcgccaacttcgcgtccgccggcgtcggcatcctcaacgacaccgacatacagttcgtgaacatcatcaggatcggacagcagctgcgcaacttccaggagtaccagcagaggctggcggcgttcgtcggcgaggacgcggcgcggcaggccgtcaacgacgcgctcgtgctcatcacgctcggcggcaacgacttcgtcaacaactactacctggtgcccttctccgtccgctctcgccagtttgccatccaggactacgtcccctacctcatctccgagtacaggaagatcctcacgcggctgtacgagctcggggcccggcgcgtggtggtgacgggcaccgggatgatcgggtgcgtgccggcggagctcgccatgcacagcgtcgacggcgagtgcgcgcgcgacctcacggaggcggccgacctcttcaacccgcagctggtgcagatgctctccgagctcaacgccgacatcggcgccgacgtcttcatcgccgccaacaccaaccgggtcagcttcgacttcatgttcaacccgcaggactacgggttcgtgacgtccaaggtggcatgctgcgggcagggcccctacaacgggatcgggctgtgcacgccggcgtccaacgtgtgccccaaccgggacgtgtacgcgtactgggacgcgttccaccccacggagcgcgccaaccggatcatcgtcggccagttcatgcacggatccaccgaccacatcagccccatgaacatcagcaccatcctcgccatggacaacaggaactaggccctgcgcgtggcgtgcctcgacctcgatccatccatctctagccggctgggattgagatgccaatctgcactgccatggatccgtcccgacactggcagctataatactacgagacgacacacatagctactgcatgcatgcgtaatactactagtataagttcgtgtcattggtaattggttatgttcatgaagcttcttttttgtggtttagattgacgtgaattgatggtgagaaattaatcctttattagagatgcatgggttcaatataatacagctgtatgtcaagtttcttcg

SEQ ID NO: 29422 - protein, 319 aa, Zea mays subsp. mays
  peptide (1)..(319): Ceres Seq. ID no. 12365771
  misc_feature (1)..(295): Pfam Name: Pfam Description:  GDSL-like Lipase/Acylhydrolase
  misc_feature (1)..(318): NCBI GI NO: 32489520 NR Description: OSJNBa0043L24.11
  misc_feature (1)..(317): NCBI GI NO: 15229265 NR Description: putative GDSL-motif lipase/acylhydrolase
  misc_feature (1)..(316): NCBI GI NO: 22758315 NR Description: putative early nodulin gene (Enod) related protein
  misc_feature (1)..(316): NCBI GI NO: 37535146 NR Description: putative early nodulin gene (Enod) related protein
  misc_feature (1)..(317): NCBI GI NO: 15242808 NR Description: putative protein; protein id: At5g33370
  misc_feature (1)..(316): NCBI GI NO: 28071322 NR Description: P0705A05.30
  misc_feature (1)..(318): NCBI GI NO: 15235421 NR Description: Proline-rich APG - like protein
  misc_feature (1)..(315): NCBI GI NO: 15238814 NR Description: putative protein; protein id: At5g18430.1
  misc_feature (1)..(312): NCBI GI NO: 34909504 NR Description: putative GDSL-motif lipase/hydrolase-like protein
  misc_feature (1)..(315): NCBI GI NO: 15227849 NR Description: putative GDSL-motif lipase/hydrolase
MTTARADAPPYGIDFPTHMATGRFSNGLNIPDIISEHLGSQPALPYLSPDLRGAQLLVGANFASAGVGILNDTDIQFVNIIRIGQQLRNFQEYQQRLAAFVGEDAARQAVNDALVLITLGGNDFVNNYYLVPFSVRSRQFAIQDYVPYLISEYRKILTRLYELGARRVVVTGTGMIGCVPAELAMHSVDGECARDLTEAADLFNPQLVQMLSELNADIGADVFIAANTNRVSFDFMFNPQDYGFVTSKVACCGQGPYNGIGLCTPASNVCPNRDVYAYWDAFHPTERANRIIVGQFMHGSTDHISPMNISTILAMDNRN

SEQ ID NO: 29423 - protein, 301 aa, Zea mays subsp. mays
  peptide (1)..(301): Ceres Seq. ID no. 12365772
  misc_feature (1)..(277): Pfam Name: Pfam Description:  GDSL-like Lipase/Acylhydrolase
  misc_feature (1)..(300): NCBI GI NO: 32489520 NR Description: OSJNBa0043L24.11
  misc_feature (1)..(299): NCBI GI NO: 15229265 NR Description: putative GDSL-motif lipase/acylhydrolase
  misc_feature (1)..(298): NCBI GI NO: 22758315 NR Description: putative early nodulin gene (Enod) related protein
  misc_feature (1)..(298): NCBI GI NO: 37535146 NR Description: putative early nodulin gene (Enod) related protein
  misc_feature (1)..(299): NCBI GI NO: 15242808 NR Description: putative protein; protein id: At5g33370
  misc_feature (1)..(298): NCBI GI NO: 28071322 NR Description: P0705A05.30
  misc_feature (1)..(300): NCBI GI NO: 15235421 NR Description: Proline-rich APG - like protein
  misc_feature (1)..(297): NCBI GI NO: 15238814 NR Description: putative protein; protein id: At5g18430.1
  misc_feature (1)..(294): NCBI GI NO: 34909504 NR Description: putative GDSL-motif lipase/hydrolase-like protein
  misc_feature (1)..(297): NCBI GI NO: 15227849 NR Description: putative GDSL-motif lipase/hydrolase
MATGRFSNGLNIPDIISEHLGSQPALPYLSPDLRGAQLLVGANFASAGVGILNDTDIQFVNIIRIGQQLRNFQEYQQRLAAFVGEDAARQAVNDALVLITLGGNDFVNNYYLVPFSVRSRQFAIQDYVPYLISEYRKILTRLYELGARRVVVTGTGMIGCVPAELAMHSVDGECARDLTEAADLFNPQLVQMLSELNADIGADVFIAANTNRVSFDFMFNPQDYGFVTSKVACCGQGPYNGIGLCTPASNVCPNRDVYAYWDAFHPTERANRIIVGQFMHGSTDHISPMNISTILAMDNRN

SEQ ID NO: 29424 - DNA, 1673 bp, Zea mays subsp. mays
  misc_feature (1)..(1673): Ceres Seq. ID no. 12369078
atagaccccgcgcatggacggcctccatccactccgcccagcacccgcacctcgtcagtcgtcaccgagaagcagaagcagcagctgctgcctgctggtcgttcgttcgcctcgttctctccgcctccccccaccccccgcctcgcttcctcctccgcgcttccttcgccgaggcgtcagcgtcagcgagggcgtataaagcgctccccctccgcgcgcgtccgcacaatcgccaccgcctctccgctcctcgacaagaccaatggcggctgctgcgtcctccgctctgcacgccgttggcgccgtcgcctccgccaagcctagatccgtcgcccccgcggtggcgacgaggaggagcgtgcgcgtggcgcccgcggccaagcgaggaccaggctcgggaggaggcaggctcgtggctcgcagcgccgttgcagccaaggcggatgaggcggccgcggcggcgggatccaagtcaggcggccatgagttgctgatgtttgaggcccttcgtgaagccttgatagaagagatgaatttggatccaacagtgtgcgtcatgggtgaagatgttggtcattatggaggttcatacaaggtgaccaaagggttggctgagatgttcggagatctccgggtccttgatacccctatcgccgagaactccttcactggcatgggagttggagcagcaatgaaggggctgaggcctgttgtggaaggcatgaacatgggtttccttctccttgcctacaaccagatctcgaacaactgcggcatgcttcactacacctcaggcggccagttcaagatcccggtcgtgatccgaggccccggcggtgtcggtcgccagctcggtgccgagcactcgcagcggctagagtcgtacttccagtcgattcctggccttcagatggttgcctgctccactccttacaacgcaaagggcctgatgaaggcggccataaggagcgagaaccccgtggtgctgtttgagcacgtcctcttgtacaacctgaaggagaaaatccccgacgaggagtacatctgctgcctggaggaggcggagatggtgcggccaggtgagcacgtgaccatcctcacgtactcccgcatgaggtaccacgtgatgcaggctgccaagacgctggtgaacaaggggtacgaccccgaggtcatcgacatcaggtcgctgaagccgttcgacctgcacacgatcgggaactcgatcaagaagacccaccgcgtgctgatcgtggaggagtgcatgcggacgggcggcatcggcgccagcctgcggtcggccatcatcgacaacttctgggactacctggacgcccccatcatgtgcctgtcgtcgcaggacgtgccgaccccgtacgccgcgacgctggaggacgccaccgtggtgcagcccgcgcagatcgtggccgccgtcgagcagatctgccaatgatcagtgatatcatggctttgttgagtacctgatctgtggagtcagattaccgtggttttgtttctctgtcgcatcgcgactgtcaccgtgccttagacaagacatgtttttgtattttgcaacgcagaagccatactcgtactggatgccgtttgtgggtggcctatttgttcattgtgcaaagttggatgccatactcgtacactattattatcaggtt

SEQ ID NO: 29425 - protein, 396 aa, Zea mays subsp. mays
  peptide (1)..(396): Ceres Seq. ID no. 12369079
  misc_feature (265)..(387): Pfam Name: Pfam Description:  Transketolase, C-terminal domain
  misc_feature (3)..(396): NCBI GI NO: 15226781 NR Description: putative pyruvate dehydrogenase E1 beta subunit
  misc_feature (3)..(396): NCBI GI NO: 21593379 NR Description: putative pyruvate dehydrogenase E1 beta subunit
  misc_feature (2)..(396): NCBI GI NO: 2454184 NR Description: pyruvate dehydrogenase E1 beta subunit
  misc_feature (2)..(396): NCBI GI NO: 15220670 NR Description: pyruvate dehydrogenase E1 beta subunit, putative
  misc_feature (110)..(396): NCBI GI NO: 2982328 NR Description: pyruvate dehydrogenase E1 beta subunit
  misc_feature (75)..(396): NCBI GI NO: 22711921 NR Description: pyruvate dehydrogenase E1 component beta subunit
  misc_feature (75)..(396): NCBI GI NO: 22297748 NR Description: pyruvate dehydrogenase E1 component beta subunit
  misc_feature (75)..(394): NCBI GI NO: 23041427 NR Description: hypothetical protein
  misc_feature (75)..(394): NCBI GI NO: 17227618 NR Description: pyruvate dehydrogenase E1 beta subunit
  misc_feature (75)..(394): NCBI GI NO: 16330037 NR Description: pyruvate dehydrogenase E1 beta subunit
MAAAASSALHAVGAVASAKPRSVAPAVATRRSVRVAPAAKRGPGSGGGRLVARSAVAAKADEAAAAAGSKSGGHELLMFEALREALIEEMNLDPTVCVMGEDVGHYGGSYKVTKGLAEMFGDLRVLDTPIAENSFTGMGVGAAMKGLRPVVEGMNMGFLLLAYNQISNNCGMLHYTSGGQFKIPVVIRGPGGVGRQLGAEHSQRLESYFQSIPGLQMVACSTPYNAKGLMKAAIRSENPVVLFEHVLLYNLKEKIPDEEYICCLEEAEMVRPGEHVTILTYSRMRYHVMQAAKTLVNKGYDPEVIDIRSLKPFDLHTIGNSIKKTHRVLIVEECMRTGGIGASLRSAIIDNFWDYLDAPIMCLSSQDVPTPYAATLEDATVVQPAQIVAAVEQICQ

SEQ ID NO: 29426 - protein, 319 aa, Zea mays subsp. mays
  peptide (1)..(319): Ceres Seq. ID no. 12369080
  misc_feature (188)..(310): Pfam Name: Pfam Description:  Transketolase, C-terminal domain
  misc_feature (1)..(319): NCBI GI NO: 15226781 NR Description: putative pyruvate dehydrogenase E1 beta subunit
  misc_feature (1)..(319): NCBI GI NO: 21593379 NR Description: putative pyruvate dehydrogenase E1 beta subunit
  misc_feature (1)..(319): NCBI GI NO: 2454184 NR Description: pyruvate dehydrogenase E1 beta subunit
  misc_feature (1)..(319): NCBI GI NO: 15220670 NR Description: pyruvate dehydrogenase E1 beta subunit, putative
  misc_feature (33)..(319): NCBI GI NO: 2982328 NR Description: pyruvate dehydrogenase E1 beta subunit
  misc_feature (1)..(319): NCBI GI NO: 22711921 NR Description: pyruvate dehydrogenase E1 component beta subunit
  misc_feature (1)..(319): NCBI GI NO: 22297748 NR Description: pyruvate dehydrogenase E1 component beta subunit
  misc_feature (1)..(317): NCBI GI NO: 23041427 NR Description: hypothetical protein
  misc_feature (1)..(317): NCBI GI NO: 17227618 NR Description: pyruvate dehydrogenase E1 beta subunit
  misc_feature (1)..(317): NCBI GI NO: 16330037 NR Description: pyruvate dehydrogenase E1 beta subunit
MFEALREALIEEMNLDPTVCVMGEDVGHYGGSYKVTKGLAEMFGDLRVLDTPIAENSFTGMGVGAAMKGLRPVVEGMNMGFLLLAYNQISNNCGMLHYTSGGQFKIPVVIRGPGGVGRQLGAEHSQRLESYFQSIPGLQMVACSTPYNAKGLMKAAIRSENPVVLFEHVLLYNLKEKIPDEEYICCLEEAEMVRPGEHVTILTYSRMRYHVMQAAKTLVNKGYDPEVIDIRSLKPFDLHTIGNSIKKTHRVLIVEECMRTGGIGASLRSAIIDNFWDYLDAPIMCLSSQDVPTPYAATLEDATVVQPAQIVAAVEQICQ

SEQ ID NO: 29427 - protein, 307 aa, Zea mays subsp. mays
  peptide (1)..(307): Ceres Seq. ID no. 12369081
  misc_feature (176)..(298): Pfam Name: Pfam Description:  Transketolase, C-terminal domain
  misc_feature (1)..(307): NCBI GI NO: 15226781 NR Description: putative pyruvate dehydrogenase E1 beta subunit
  misc_feature (1)..(307): NCBI GI NO: 21593379 NR Description: putative pyruvate dehydrogenase E1 beta subunit
  misc_feature (1)..(307): NCBI GI NO: 2454184 NR Description: pyruvate dehydrogenase E1 beta subunit
  misc_feature (1)..(307): NCBI GI NO: 15220670 NR Description: pyruvate dehydrogenase E1 beta subunit, putative
  misc_feature (21)..(307): NCBI GI NO: 2982328 NR Description: pyruvate dehydrogenase E1 beta subunit
  misc_feature (1)..(307): NCBI GI NO: 22711921 NR Description: pyruvate dehydrogenase E1 component beta subunit
  misc_feature (1)..(307): NCBI GI NO: 22297748 NR Description: pyruvate dehydrogenase E1 component beta subunit
  misc_feature (1)..(305): NCBI GI NO: 23041427 NR Description: hypothetical protein
  misc_feature (1)..(305): NCBI GI NO: 17227618 NR Description: pyruvate dehydrogenase E1 beta subunit
  misc_feature (1)..(305): NCBI GI NO: 16330037 NR Description: pyruvate dehydrogenase E1 beta subunit
MNLDPTVCVMGEDVGHYGGSYKVTKGLAEMFGDLRVLDTPIAENSFTGMGVGAAMKGLRPVVEGMNMGFLLLAYNQISNNCGMLHYTSGGQFKIPVVIRGPGGVGRQLGAEHSQRLESYFQSIPGLQMVACSTPYNAKGLMKAAIRSENPVVLFEHVLLYNLKEKIPDEEYICCLEEAEMVRPGEHVTILTYSRMRYHVMQAAKTLVNKGYDPEVIDIRSLKPFDLHTIGNSIKKTHRVLIVEECMRTGGIGASLRSAIIDNFWDYLDAPIMCLSSQDVPTPYAATLEDATVVQPAQIVAAVEQICQ

SEQ ID NO: 29428 - DNA, 1102 bp, Zea mays subsp. mays
  misc_feature (1)..(1102): Ceres Seq. ID no. 12413211
  misc_feature (800)..(800): n is a, c, t, g, unknown, or other
ataaaactaacccacctaaaaccacggtccacgaccctcgcttcacttgtcacggactcgcgtccacaaaccacaaccagctcactcaagaacaaagaacccaacccatggcttctcccaagccgctcctcctgctcgccacctcgttcctgagctgcggcctcctggtggccgccgacttacgccccaatgaccctgaccgtggtgaacaactgcccctacccggtgtggccgggcatccaggccaactccgggcacgacgtcctggagggcggcggcttcttcctcccgccgctctcccacaagtccttcccggcgccggcccacccctggtccggccgcatctgggcgcgcacgggctgcgcgggcgccggcgcgcagctccactgcgccacgggcgactgcggcgggcggctccagtgcggcgggctcggcggcgcggcgcccgcgacgctggcgcaggtgaacctccaccacggcaacgaccagacctcgtacggcgtgagcgtggtggacggcttcaacgtgggcctgtccgtgaccccgcacgagggccgcggcaactgccccgtcctcgcctgccgcaagaacctcaccgagacctgccccggcgagctgcagctgcgctccccggccggcagcgtcctcgcgtgcaagagcggctgcgaggccttccgcaccgacgagctgtgctgccgcaacatgtacaacagcccgcacacctgccgcgcctccaagtactcggagttcttcaagcgagagtgcccgcaggccttcacctacgcgcacgacagcccctngctcacccacgagtgcgccgcgccgcgcgagctcaaggtcatcttctgccactagagctcggagctcggagggcgccgccgccgtcaacaagtgtcgctagtagaggtagtaggatttgcggtgcgtgtgttgtctagtgtgtgctggaatagctgtggctgtgttcccgtcgtgtctgtggcctgtgtaggctgtctgtagtatactgggttgttggatgtatgcgttctggccgcaagactgatgtcatgctgttgctgcttactacagtttgcagtctgaaataaaaacttgtttgatg

SEQ ID NO: 29429 - protein, 311 aa, Zea mays subsp. mays
  peptide (1)..(311): Ceres Seq. ID no. 12413212
  misc_feature (266)..(266): Xaa is any aa, unknown or other
KTNPPKTTVHDPRFTCHGLASTNHNQLTQEQRTQPMASPKPLLLLATSFLSCGLLVAADLRPNDPDRGEQLPLPGVAGHPGQLRARRPGGRRLLPPAALPQVLPGAGPPLVRPHLGAHGLRGRRRAAPLRHGRLRRAAPVRRARRRGARDAGAGEPPPRQRPDLVRRERGGRLQRGPVRDPARGPRQLPRPRLPQEPHRDLPRRAAAALPGRQRPRVQERLRGLPHRRAVLPQHVQQPAHLPRLQVLGVLQARVPAGLHLRARQPXAHPRVRRAARAQGHLLPLELGARRAPPPSTSVASRGSRICGACVV

SEQ ID NO: 29430 - protein, 276 aa, Zea mays subsp. mays
  peptide (1)..(276): Ceres Seq. ID no. 12413213
  misc_feature (231)..(231): Xaa is any aa, unknown or other
MASPKPLLLLATSFLSCGLLVAADLRPNDPDRGEQLPLPGVAGHPGQLRARRPGGRRLLPPAALPQVLPGAGPPLVRPHLGAHGLRGRRRAAPLRHGRLRRAAPVRRARRRGARDAGAGEPPPRQRPDLVRRERGGRLQRGPVRDPARGPRQLPRPRLPQEPHRDLPRRAAAALPGRQRPRVQERLRGLPHRRAVLPQHVQQPAHLPRLQVLGVLQARVPAGLHLRARQPXAHPRVRRAARAQGHLLPLELGARRAPPPSTSVASRGSRICGACVV

SEQ ID NO: 29431 - protein, 221 aa, Zea mays subsp. mays
  peptide (1)..(221): Ceres Seq. ID no. 12413214
  misc_feature (7)..(221): Pfam Name: Pfam Description:  Thaumatin family
  misc_feature (1)..(221): NCBI GI NO: 34908134 NR Description: osmotin-like protein
  misc_feature (1)..(221): NCBI GI NO: 5823278 NR Description: osmotin-like protein [Benincasa hispida]
  misc_feature (3)..(221): NCBI GI NO: 2501182 NR Description: OSMOTIN-LIKE PROTEIN PRECURSOR
  misc_feature (3)..(221): NCBI GI NO: 27373045 NR Description: cytokinin-binding protein [Brassica oleracea]
  misc_feature (3)..(221): NCBI GI NO: 15226956 NR Description: putative thaumatin; protein id: At2g28790
  misc_feature (3)..(221): NCBI GI NO: 27373047 NR Description: cytokinin binding protein [Arabidopsis thaliana]
  misc_feature (3)..(221): NCBI GI NO: 21554129 NR Description: putative thaumatin [Arabidopsis thaliana]
  misc_feature (2)..(220): NCBI GI NO: 37531042 NR Description: putative thaumatin-like protein
  misc_feature (2)..(220): NCBI GI NO: 7442175 NR Description: thaumatin-like protein - turnip
  misc_feature (2)..(220): NCBI GI NO: 15221033 NR Description: pathogenesis-related group 5 protein, putative
  misc_feature (204)..(204): Xaa is any aa, unknown or other
MTLTVVNNCPYPVWPGIQANSGHDVLEGGGFFLPPLSHKSFPAPAHPWSGRIWARTGCAGAGAQLHCATGDCGGRLQCGGLGGAAPATLAQVNLHHGNDQTSYGVSVVDGFNVGLSVTPHEGRGNCPVLACRKNLTETCPGELQLRSPAGSVLACKSGCEAFRTDELCCRNMYNSPHTCRASKYSEFFKRECPQAFTYAHDSPXLTHECAAPRELKVIFCH

SEQ ID NO: 29432 - DNA, 600 bp, Zea mays subsp. mays
  misc_feature (1)..(600): Ceres Seq. ID no. 12365691
ggcaccagagtcatcgcggcgtgttcaaatcccacaatcttcttgtagcacaccactgtcttcgtccaactcggcggcgatgtctgggcgcggcaagggcggcaaggggctgggcaagggtggtgcgaaacgccaccgtaaggttctccgcgacaacatccagggtatcacgaagccggcaatccggaggctggcgaggaggggcggcgtgaagcgtatctccgggcttatctacgaggagacccgcggcgtgctcaagatcttcctcgagaatgtcatccgcgacgcggtcacctacaccgagcacgctcgccgcaagaccgtcaccgccatggatgttgtgtacgccctcaagcgccagggccgcactctgtacgggttcggtggttgagcgcatctcttccctcgtctgcagcggctgccggtggcgtttcctcagttccctctgccttgcttggcttgatgtagagagttatcagattaaaatatctctgatgtgcttcgttattgggtggaatcatgtgtcccagcagtgctgggaaatcgagatcaagatgtatctttctttgcagtaatgaaatgttaaaatcgagatcaaaa

SEQ ID NO: 29433 - protein, 129 aa, Zea mays subsp. mays
  peptide (1)..(129): Ceres Seq. ID no. 12365692
  misc_feature (21)..(129): NCBI GI NO: 34876368 NR Description: similar to germinal histone H4 gene
  misc_feature (27)..(129): NCBI GI NO: 15226944 NR Description: histone H4; protein id: At2g28740
  misc_feature (21)..(129): NCBI GI NO: 17540668 NR Description: Histone H4 family member [Caenorhabditis elegans]
  misc_feature (27)..(129): NCBI GI NO: 462243 NR Description: Histone H4
  misc_feature (27)..(129): NCBI GI NO: 1806283 NR Description: Histone H4 homologue [Sesbania rostrata]
  misc_feature (27)..(129): NCBI GI NO: 4504301 NR Description: H4 histone family, member A [Homo sapiens]
  misc_feature (27)..(129): NCBI GI NO: 27692960 NR Description: Similar to germinal histone H4 gene [Mus musculus]
  misc_feature (27)..(129): NCBI GI NO: 27692935 NR Description: Similar to germinal histone H4 gene [Mus musculus]
  misc_feature (27)..(129): NCBI GI NO: 37590121 NR Description: Hist1h4h protein [Mus musculus]
  misc_feature (27)..(129): NCBI GI NO: 17352498 NR Description: histone H4; Bicoid interacting protein 2; histone
APESSRRVQIPQSSCSTPLSSSNSAAMSGRGKGGKGLGKGGAKRHRKVLRDNIQGITKPAIRRLARRGGVKRISGLIYEETRGVLKIFLENVIRDAVTYTEHARRKTVTAMDVVYALKRQGRTLYGFGG

SEQ ID NO: 29434 - protein, 103 aa, Zea mays subsp. mays; identical to SEQ ID NO: 1499
  peptide (1)..(103): Ceres Seq. ID no. 12365693
  misc_feature (1)..(103): NCBI GI NO: 34876368 NR Description: similar to germinal histone H4 gene
  misc_feature (1)..(103): NCBI GI NO: 15226944 NR Description: histone H4; protein id: At2g28740
  misc_feature (1)..(103): NCBI GI NO: 17540668 NR Description: Histone H4 family member [Caenorhabditis elegans]
  misc_feature (1)..(103): NCBI GI NO: 462243 NR Description: Histone H4
  misc_feature (1)..(103): NCBI GI NO: 1806283 NR Description: Histone H4 homologue [Sesbania rostrata]
  misc_feature (1)..(103): NCBI GI NO: 4504301 NR Description: H4 histone family, member A [Homo sapiens]
  misc_feature (1)..(103): NCBI GI NO: 27692960 NR Description: Similar to germinal histone H4 gene [Mus musculus]
  misc_feature (1)..(103): NCBI GI NO: 27692935 NR Description: Similar to germinal histone H4 gene [Mus musculus]
  misc_feature (1)..(103): NCBI GI NO: 37590121 NR Description: Hist1h4h protein [Mus musculus]
  misc_feature (1)..(103): NCBI GI NO: 17352498 NR Description: histone H4; Bicoid interacting protein 2; histone

SEQ ID NO: 29435 - protein, 100 aa, Zea mays subsp. mays
  peptide (1)..(100): Ceres Seq. ID no. 12365694
MSSATRSPTPSTLAARPSPPWMLCTPSSARAALCTGSVVERISSLVCSGCRWRFLSSLCLAWLDVESYQIKISLMCFVIGWNHVSQQCWEIEIKMYLSLQ

SEQ ID NO: 29436 - DNA, 1068 bp, Zea mays subsp. mays
  misc_feature (1)..(1068): Ceres Seq. ID no. 12373184
atctctctctctctctctcttcctgcgcccacacgcacgtttccactccgaccgggccagagccccgccgggcagtttccgttcgctgttgcgatccacctcctgcctgcacatcccctcccccgagttcgagccggagggccgaagagtagatctgcggcggcggccagaggatggccgtcaactgggagctgcggggctgctgcgaccacgaccagaggatcttcatcgccgccgtcggcgtctccaccgtcgtcatcctcctcctctggaggacgttcctgctcacgccgttcaagctcatcaccgtcttcctccacgagaccagccacgcgcttgcctgcaagctcacttgcggcgatgtagaaggcatgcaggtccatgcgaatgagggtggcgttactcaaacccggggtggcatatattggataatcttgcccgctggatatctgggttcatcattttggggaatggtcttcatacttgcatccacaaatctcctcactacaagaattgcagcgggttgtttcatacttgcattgtttattgttctttttgttgcagaaaatgtaagacttgtttgaattgtgcagtggtttcttcgctggctctgccttggattcattgtgttcattgctgttgtttgggtcatacaagaatttacatctttccatgttctgaaatatgtgatcttattcataggtgtgatgaacagcttattttcagtttacgatatttatgatgacttgatatcccgaagagttaacacaagtgatgctgaaaagtttgctgaaatctgcccttgcccctgcaatggttttgcatggggtgttatatggggattcatctcgtttatctttctctgcgcttcaatataccttggactggtcatattgtcttgagggttcgccattttgatctgacaatcgactctggttggctttttcgaagcttcgttgctcgaggttttggttcaagcttacaaggttctggtggttgtacagtatacatgtgcagggtaaacatgtacatccattataagttaatttggtggggattattcatggg

SEQ ID NO: 29437 - protein, 136 aa, Zea mays subsp. mays
  peptide (1)..(136): Ceres Seq. ID no. 12373185
  misc_feature (4)..(136): NCBI GI NO: 15219816 NR Description: hypothetical protein; protein id: At1g67060.1
  misc_feature (1)..(136): NCBI GI NO: 23619420 NR Description: hypothetical protein, conserved
  misc_feature (12)..(136): NCBI GI NO: 40740899 NR Description: hypothetical protein AN4854.2
  misc_feature (67)..(136): NCBI GI NO: 23485893 NR Description: hypothetical protein [Plasmodium yoelii yoelii]
  misc_feature (4)..(64): NCBI GI NO: 26449599 NR Description: unknown protein [Arabidopsis thaliana]
  misc_feature (16)..(136): NCBI GI NO: 24212750 NR Description: conserved hypothetical protein
MAVNWELRGCCDHDQRIFIAAVGVSTVVILLLWRTFLLTPFKLITVFLHETSHALACKLTCGDVEGMQVHANEGGVTQTRGGIYWIILPAGYLGSSFWGMVFILASTNLLTTRIAAGCFILALFIVLFVAENVRLV

SEQ ID NO: 29438 - protein, 129 aa, Zea mays subsp. mays
  peptide (1)..(129): Ceres Seq. ID no. 12373186
SLSLSLFLRPHARFHSDRARAPPGSFRSLLRSTSCLHIPSPEFEPEGRRVDLRRRPEDGRQLGAAGLLRPRPEDLHRRRRRLHRRHPPPLEDVPAHAVQAHHRLPPRDQPRACLQAHLRRCRRHAGPCE

SEQ ID NO: 29439 - protein, 121 aa, Zea mays subsp. mays
  peptide (1)..(121): Ceres Seq. ID no. 12373187
  misc_feature (61)..(120): Pfam Name: Pfam Description:  Lipoprotein amino terminal region
ISLSLSLPAPTRTFPLRPGQSPAGQFPFAVAIHLLPAHPLPRVRAGGPKSRSAAAARGWPSTGSCGAAATTTRGSSSPPSASPPSSSSSSGGRSCSRRSSSSPSSSTRPATRLPASSLAAM

SEQ ID NO: 29440 - DNA, 1754 bp, Zea mays subsp. mays
  misc_feature (1)..(1754): Ceres Seq. ID no. 12344330
aagtagtgcttttcttctcttgtcacgttcacggggcggccgatcgaccgttcacctcgcccgacggcccaagcagcccatgtcttcgtcgggcccctccccggcgacgggaatccacgcgtcgccgccgttgggccttttgccggcgacgggaacccatcacaccaggtcatggggcaaaacaacctccacaagttttactggttctaccaccaaacatgagcagagcttgcatggaaatgttaagccgttgcaattggcggcaaatgaatcctctcgtttggcttacagaagtccagcacttaaaaaccagtggaatcttcctgctagttcttcctccactaatgtggttaccacctttgatgataacgaacacgtgtcttccagtgttattgaagaaaaagttggagtactgttattaaaccttggtggtccagagacacttgacgatgttcaaccatttttattcaacctatttgctgatccagatatcattcgactccctaggctcttcaggtttcttcaaagaccactggccaaacttatttctacttttagagctcctaagagtaaagaagggtatgcttcaattggtggtgggtcgccgttaaggaaaattactgatgaacaggcgaatgctttgaagattgccctggaaaagaaaaaattgaacgcaaacatatatgttgggatgcggtattggtaccctttcacagaagaggccattgatcaaattaaaaaggataagattaccaagctcgttgttcttcccctttaccctcagtactccatatcaacaagtgggtcaagcattcgtgttctccaagacattgtcaaggaagattcatatttttctggtttgccaatttccattattgaatcatggtaccaacgagatggctatgtgaaatcaatgtctgacctaattgaaaaggagctctccgccttctccaatcctgaagaggttatgatattcttcagtgcacatggtgtgccacttacctatgttgaggatgctggagatccttacagagatcagatggaggattgtattgctttgatcatgggggagttaagatcaagaggaatcttaaatagtcacactttggcgtaccagagtcgggtggggccagttcaatggctgaagccatatactgatgaagttttagtagaacttggtcaaaagggtgtgaagagcctcctggctgttccagtaagctttgtgagtgagcacatcgagacattggaagaaattgacatggagtacaaggagttggctctggaatcaggcatcaagaactggggtcgggttcctgctcttggatgcacttcaacattcatctccgaccttgcagatgctgtcgtcgaagccctgccctctgcttcagcgctcgcgaccagaaagcctgacgacatcgattccagcatggacctgacgcattacctcaccaagatgctgtttggctcaatcttggcatttgtcctgctgctatcaccaaggctagtttccgccttccggagcaccatgctttaagtttttctccaaagcactaaatttgagattgagaatgagatatttcattttggacctttttttcctccttaatagaatgatgtgcagttcttctgctcgttccagagaaaaaaataactgctaggaactcacaaggtagtaggggattgcaaaagggatgtgaacagctgttttgatcgaagttgtctataaataccgtgctcacggactctgtattttg

SEQ ID NO: 29441 - protein, 510 aa, Zea mays subsp. mays
  peptide (1)..(510): Ceres Seq. ID no. 12344331
  misc_feature (134)..(458): Pfam Name: Pfam Description:  Ferrochelatase
  misc_feature (55)..(509): NCBI GI NO: 7437214 NR Description: probable ferrochelatase (EC 4.99.1.1) - barley
  misc_feature (55)..(509): NCBI GI NO: 1170242 NR Description: Ferrochelatase II, chloroplast precursor
  misc_feature (128)..(510): NCBI GI NO: 1170239 NR Description: Ferrochelatase II, chloroplast precursor
  misc_feature (90)..(507): NCBI GI NO: 30690097 NR Description: ferrochelatase-I [Arabidopsis thaliana]
  misc_feature (93)..(465): NCBI GI NO: 3913808 NR Description: Ferrochelatase II, chloroplast precursor
  misc_feature (116)..(465): NCBI GI NO: 12082085 NR Description: ferrochelatase [Cucumis sativus]
  misc_feature (132)..(465): NCBI GI NO: 7437212 NR Description: probable ferrochelatase (EC 4.99.1.1) - potato
  misc_feature (130)..(465): NCBI GI NO: 15147828 NR Description: ferrochelatase [Nicotiana tabacum]
  misc_feature (77)..(465): NCBI GI NO: 15227742 NR Description: putative ferrochelatase precusor
  misc_feature (77)..(465): NCBI GI NO: 2623990 NR Description: ferrochelatase [Arabidopsis thaliana]
SSAFLLLSRSRGGRSTVHLARRPKQPMSSSGPSPATGIHASPPLGLLPATGTHHTRSWGKTTSTSFTGSTTKHEQSLHGNVKPLQLAANESSRLAYRSPALKNQWNLPASSSSTNVVTTFDDNEHVSSSVIEEKVGVLLLNLGGPETLDDVQPFLFNLFADPDIIRLPRLFRFLQRPLAKLISTFRAPKSKEGYASIGGGSPLRKITDEQANALKIALEKKKLNANIYVGMRYWYPFTEEAIDQIKKDKITKLVVLPLYPQYSISTSGSSIRVLQDIVKEDSYFSGLPISIIESWYQRDGYVKSMSDLIEKELSAFSNPEEVMIFFSAHGVPLTYVEDAGDPYRDQMEDCIALIMGELRSRGILNSHTLAYQSRVGPVQWLKPYTDEVLVELGQKGVKSLLAVPVSFVSEHIETLEEIDMEYKELALESGIKNWGRVPALGCTSTFISDLADAVVEALPSASALATRKPDDIDSSMDLTHYLTKMLFGSILAFVLLLSPRLVSAFRSTML

SEQ ID NO: 29442 - protein, 484 aa, Zea mays subsp. mays
  peptide (1)..(484): Ceres Seq. ID no. 12344332
  misc_feature (108)..(432): Pfam Name: Pfam Description:  Ferrochelatase
  misc_feature (29)..(483): NCBI GI NO: 7437214 NR Description: probable ferrochelatase (EC 4.99.1.1) - barley
  misc_feature (29)..(483): NCBI GI NO: 1170242 NR Description: Ferrochelatase II, chloroplast precursor
  misc_feature (102)..(484): NCBI GI NO: 1170239 NR Description: Ferrochelatase II, chloroplast precursor
  misc_feature (64)..(481): NCBI GI NO: 30690097 NR Description: ferrochelatase-I [Arabidopsis thaliana]
  misc_feature (67)..(439): NCBI GI NO: 3913808 NR Description: Ferrochelatase II, chloroplast precursor
  misc_feature (90)..(439): NCBI GI NO: 12082085 NR Description: ferrochelatase [Cucumis sativus]
  misc_feature (106)..(439): NCBI GI NO: 7437212 NR Description: probable ferrochelatase (EC 4.99.1.1) - potato
  misc_feature (104)..(439): NCBI GI NO: 15147828 NR Description: ferrochelatase [Nicotiana tabacum]
  misc_feature (51)..(439): NCBI GI NO: 15227742 NR Description: putative ferrochelatase precusor
  misc_feature (51)..(439): NCBI GI NO: 2623990 NR Description: ferrochelatase [Arabidopsis thaliana]
MSSSGPSPATGIHASPPLGLLPATGTHHTRSWGKTTSTSFTGSTTKHEQSLHGNVKPLQLAANESSRLAYRSPALKNQWNLPASSSSTNVVTTFDDNEHVSSSVIEEKVGVLLLNLGGPETLDDVQPFLFNLFADPDIIRLPRLFRFLQRPLAKLISTFRAPKSKEGYASIGGGSPLRKITDEQANALKIALEKKKLNANIYVGMRYWYPFTEEAIDQIKKDKITKLVVLPLYPQYSISTSGSSIRVLQDIVKEDSYFSGLPISIIESWYQRDGYVKSMSDLIEKELSAFSNPEEVMIFFSAHGVPLTYVEDAGDPYRDQMEDCIALIMGELRSRGILNSHTLAYQSRVGPVQWLKPYTDEVLVELGQKGVKSLLAVPVSFVSEHIETLEEIDMEYKELALESGIKNWGRVPALGCTSTFISDLADAVVEALPSASALATRKPDDIDSSMDLTHYLTKMLFGSILAFVLLLSPRLVSAFRSTML

SEQ ID NO: 29443 - protein, 280 aa, Zea mays subsp. mays
  peptide (1)..(280): Ceres Seq. ID no. 12344333
  misc_feature (1)..(228): Pfam Name: Pfam Description:  Ferrochelatase
  misc_feature (1)..(279): NCBI GI NO: 7437214 NR Description: probable ferrochelatase (EC 4.99.1.1) - barley
  misc_feature (1)..(279): NCBI GI NO: 1170242 NR Description: Ferrochelatase II, chloroplast precursor
  misc_feature (1)..(280): NCBI GI NO: 1170239 NR Description: Ferrochelatase II, chloroplast precursor
  misc_feature (1)..(277): NCBI GI NO: 30690097 NR Description: ferrochelatase-I [Arabidopsis thaliana]
  misc_feature (1)..(235): NCBI GI NO: 3913808 NR Description: Ferrochelatase II, chloroplast precursor
  misc_feature (1)..(235): NCBI GI NO: 12082085 NR Description: ferrochelatase [Cucumis sativus]
  misc_feature (1)..(235): NCBI GI NO: 7437212 NR Description: probable ferrochelatase (EC 4.99.1.1) - potato
  misc_feature (1)..(235): NCBI GI NO: 15147828 NR Description: ferrochelatase [Nicotiana tabacum]
  misc_feature (1)..(235): NCBI GI NO: 15227742 NR Description: putative ferrochelatase precusor
  misc_feature (1)..(235): NCBI GI NO: 2623990 NR Description: ferrochelatase [Arabidopsis thaliana]
MRYWYPFTEEAIDQIKKDKITKLVVLPLYPQYSISTSGSSIRVLQDIVKEDSYFSGLPISIIESWYQRDGYVKSMSDLIEKELSAFSNPEEVMIFFSAHGVPLTYVEDAGDPYRDQMEDCIALIMGELRSRGILNSHTLAYQSRVGPVQWLKPYTDEVLVELGQKGVKSLLAVPVSFVSEHIETLEEIDMEYKELALESGIKNWGRVPALGCTSTFISDLADAVVEALPSASALATRKPDDIDSSMDLTHYLTKMLFGSILAFVLLLSPRLVSAFRSTML

SEQ ID NO: 29444 - DNA, 1192 bp, Zea mays subsp. mays
  misc_feature (1)..(1192): Ceres Seq. ID no. 12343186
acaccgtccaccggcacgtccaccggctccatggcgctccacgccgtctcctccgcggcggtctcctccccgttgcgctctctctcacgcagcctcccccagcgcccaggctgtggttgtttaccaaagcagtccgtcatgatttactccacaaaatttgcaagacctcaggctggaccggtggacttcgctggcaggcctctggttcttggacgctcggacaagagagcagttttgatgcatgccactattgaagaaatcgaagcggagaaatccctcatcgaagaccaagctaaagaaaagatggagaaggcaatcgaaacagtccaagctaacttcaacactgtgaggacaggacgtgcaaacccggccatgcttgaccggattgaggttgagtactacggaactccagtaaacttgaagagcattgcacagataagcactccagatgcaacttctcttcttattcaaccatatgataagtcaagcctcaagcttattgagaaaactatagttgctgcaaatcttggtgtgacaccaagcaatgatggagaagtaatacgagtgactgtcccaccattgacatctgatcgcagaaaggaattatcaaagacagtagctaaattagctgaagatggcaaggttgctataaggaacataagaagagatgcaatcaaagcttatgataaactagagaaggaaaagaagctttctgaggacaatgtgaaagatttatcagctgatttacaaaaagtcacagatgagtacatgaaaaagatcgaatccatccagaagcagaaggaacaggaactgatgaaaatttagacctcaagctgactgtatggctggtgaggagtaaccgcctccgtgaagcatggacccctgcatatgttggtgtttctgaagcaatttgtttggttcatggctttggcgtctcggcgctgcgccagggatgcacgttttgaatcaggcgctttgctggaacttttgggtgcacacaagttgagacaatgctgctgctgctgtgtgtgtgtgtttttagattaagacaatgctgctgtgttttttctttgagattaagacaatgctgttgcgtgtgttcttctcgttttctgtaatgttcgtaaatagtctcttcgtcgccgtgttgtctgactgctacattgtcaatatttcaaaacatacatctctg

SEQ ID NO: 29445 - protein, 274 aa, Zea mays subsp. mays
  peptide (1)..(274): Ceres Seq. ID no. 12343187
  misc_feature (108)..(272): Pfam Name: Pfam Description:  Ribosome recycling factor
  misc_feature (13)..(274): NCBI GI NO: 34394208 NR Description: putative Ribosome recycling factor
  misc_feature (11)..(274): NCBI GI NO: 7388105 NR Description: Ribosome recycling factor, chloroplast precursor
  misc_feature (19)..(274): NCBI GI NO: 18412657 NR Description: putative protein; protein id: At3g63190
  misc_feature (50)..(274): NCBI GI NO: 7404451 NR Description: RIBOSOME RECYCLING FACTOR, CHLOROPLAST PRECURSOR
  misc_feature (19)..(274): NCBI GI NO: 11277801 NR Description: hypothetical protein F16M2
  misc_feature (120)..(274): NCBI GI NO: 629661 NR Description: ribosome releasing factor - carrot
  misc_feature (97)..(274): NCBI GI NO: 17228703 NR Description: ribosome recycling factor [Nostoc sp. PCC 7120]
  misc_feature (99)..(274): NCBI GI NO: 22297803 NR Description: ribosome releasing factor
  misc_feature (93)..(274): NCBI GI NO: 23126085 NR Description: hypothetical protein [Nostoc punctiforme]
  misc_feature (97)..(274): NCBI GI NO: 23041074 NR Description: hypothetical protein
TPSTGTSTGSMALHAVSSAAVSSPLRSLSRSLPQRPGCGCLPKQSVMIYSTKFARPQAGPVDFAGRPLVLGRSDKRAVLMHATIEEIEAEKSLIEDQAKEKMEKAIETVQANFNTVRTGRANPAMLDRIEVEYYGTPVNLKSIAQISTPDATSLLIQPYDKSSLKLIEKTIVAANLGVTPSNDGEVIRVTVPPLTSDRRKELSKTVAKLAEDGKVAIRNIRRDAIKAYDKLEKEKKLSEDNVKDLSADLQKVTDEYMKKIESIQKQKEQELMKI

SEQ ID NO: 29446 - protein, 264 aa, Zea mays subsp. mays
  peptide (1)..(264): Ceres Seq. ID no. 12343188
  misc_feature (98)..(262): Pfam Name: Pfam Description:  Ribosome recycling factor
  misc_feature (3)..(264): NCBI GI NO: 34394208 NR Description: putative Ribosome recycling factor
  misc_feature (1)..(264): NCBI GI NO: 7388105 NR Description: Ribosome recycling factor, chloroplast precursor
  misc_feature (9)..(264): NCBI GI NO: 18412657 NR Description: putative protein; protein id: At3g63190
  misc_feature (40)..(264): NCBI GI NO: 7404451 NR Description: RIBOSOME RECYCLING FACTOR, CHLOROPLAST PRECURSOR
  misc_feature (9)..(264): NCBI GI NO: 11277801 NR Description: hypothetical protein F16M2
  misc_feature (110)..(264): NCBI GI NO: 629661 NR Description: ribosome releasing factor - carrot
  misc_feature (87)..(264): NCBI GI NO: 17228703 NR Description: ribosome recycling factor [Nostoc sp. PCC 7120]
  misc_feature (89)..(264): NCBI GI NO: 22297803 NR Description: ribosome releasing factor
  misc_feature (83)..(264): NCBI GI NO: 23126085 NR Description: hypothetical protein [Nostoc punctiforme]
  misc_feature (87)..(264): NCBI GI NO: 23041074 NR Description: hypothetical protein
MALHAVSSAAVSSPLRSLSRSLPQRPGCGCLPKQSVMIYSTKFARPQAGPVDFAGRPLVLGRSDKRAVLMHATIEEIEAEKSLIEDQAKEKMEKAIETVQANFNTVRTGRANPAMLDRIEVEYYGTPVNLKSIAQISTPDATSLLIQPYDKSSLKLIEKTIVAANLGVTPSNDGEVIRVTVPPLTSDRRKELSKTVAKLAEDGKVAIRNIRRDAIKAYDKLEKEKKLSEDNVKDLSADLQKVTDEYMKKIESIQKQKEQELMKI

SEQ ID NO: 29447 - protein, 228 aa, Zea mays subsp. mays
  peptide (1)..(228): Ceres Seq. ID no. 12343189
  misc_feature (62)..(226): Pfam Name: Pfam Description:  Ribosome recycling factor
  misc_feature (1)..(228): NCBI GI NO: 34394208 NR Description: putative Ribosome recycling factor
  misc_feature (1)..(228): NCBI GI NO: 7388105 NR Description: Ribosome recycling factor, chloroplast precursor
  misc_feature (1)..(228): NCBI GI NO: 18412657 NR Description: putative protein; protein id: At3g63190
  misc_feature (4)..(228): NCBI GI NO: 7404451 NR Description: RIBOSOME RECYCLING FACTOR, CHLOROPLAST PRECURSOR
  misc_feature (1)..(228): NCBI GI NO: 11277801 NR Description: hypothetical protein F16M2
  misc_feature (74)..(228): NCBI GI NO: 629661 NR Description: ribosome releasing factor - carrot
  misc_feature (51)..(228): NCBI GI NO: 17228703 NR Description: ribosome recycling factor [Nostoc sp. PCC 7120]
  misc_feature (53)..(228): NCBI GI NO: 22297803 NR Description: ribosome releasing factor
  misc_feature (47)..(228): NCBI GI NO: 23126085 NR Description: hypothetical protein [Nostoc punctiforme]
  misc_feature (51)..(228): NCBI GI NO: 23041074 NR Description: hypothetical protein
MIYSTKFARPQAGPVDFAGRPLVLGRSDKRAVLMHATIEEIEAEKSLIEDQAKEKMEKAIETVQANFNTVRTGRANPAMLDRIEVEYYGTPVNLKSIAQISTPDATSLLIQPYDKSSLKLIEKTIVAANLGVTPSNDGEVIRVTVPPLTSDRRKELSKTVAKLAEDGKVAIRNIRRDAIKAYDKLEKEKKLSEDNVKDLSADLQKVTDEYMKKIESIQKQKEQELMKI

SEQ ID NO: 29448 - DNA, 1421 bp, Zea mays subsp. mays
  misc_feature (1)..(1421): Ceres Seq. ID no. 12408617
cagacacctaaacgatgacacagcgtgcacccaccaccaccaccagcgccgactgccgagcgccggccgcgataccgtcgtgtcccccctccccaccgcattagcgccggccgacaaaattactaggtgcttaatttaactagtggccctaggcgtgaaacttcaccagctccgccactgcccatggccaacggctttccggaccctcgctgcgtcgtcctcaccgccgacgctgcccgatccctcgtcggattccgtcgacgccttcctcttcgactgcgatggcgtcatttggaagggagatatgctcattgaaggggtcccagagacgatggagctactgaggaaactgggaaagaaattagtttttgtaacaaataactctagaaagtcaagaaggcaatactcaaagaaattcagatcacttggacttgaagttactgaggaagagatttttacatcatcgtttgcggcagccatgttcttgaagttaaataattttcctccagaaaagaaggtttatgttgttggtgaagatggaatcttggaagagctcaagttagctggttttgaatgttttggtggtccggaggatggcaagaaaaacataaagttggaggcggatttctactttgaacatgacaaaagtgttggagctgtcattgttggacttgatcagtacttcaattattataaaatgcagtatgcaagaacatgtattagtgagaaccctggctgctttttcattgcgaccaaccgtgatccaaccgggcatatgacatctgcccaagaatggccaggagctggagctatggttgctgcagtaagctgctcagtacagaaagaacccattgttgttggaaaaccttcaggctttttgatggacttcctcttgaaaagcttcaatctggagacgtcaaggatgtgcatggttggtgatagactggacacggacatactatttggccagaacaccggctgcaagaccctccttgttttgtctggttgcactgccttaccagaagtgcaggatgctcgtaacaatatccatccagatctctacacaaacagcgtgtatgatctagttgggttactgcagaagtaattctccttggccgcgttgcagcgcaatctcagcacgctttggatagcgcctatcagcaatttattacgtggattacttgcatgaagccatgtgttcttgaaacaacaattttgaactttctttggggtaacctgtttgacagtaacaaaatctttcaattggatcctacaaattagaccaatttgacaaccttgtaagcgtggctgtaaagctttaaatctggcaacttgattcccttgctggaaaatatattggttggagtatggaattgtacagaatcgaattgtaatgaagcaacgtgttgtactttgttgct

SEQ ID NO: 29449 - protein, 266 aa, Zea mays subsp. mays
  peptide (1)..(266): Ceres Seq. ID no. 12408618
  misc_feature (1)..(234): Pfam Name: Pfam Description:  haloacid dehalogenase-like hydrolase
  misc_feature (1)..(265): NCBI GI NO: 21593203 NR Description: 4-nitrophenylphosphatase-like protein
  misc_feature (1)..(265): NCBI GI NO: 10177912 NR Description: 4-nitrophenylphosphatase-like protein
  misc_feature (1)..(265): NCBI GI NO: 15238800 NR Description: 4-nitrophenylphosphatase-like protein
  misc_feature (1)..(263): NCBI GI NO: 38345235 NR Description: OSJNBa0084K20.14
  misc_feature (1)..(261): NCBI GI NO: 15239406 NR Description: p-nitrophenylphosphatase-like protein
  misc_feature (1)..(261): NCBI GI NO: 26450878 NR Description: putative p-nitrophenylphosphatase
  misc_feature (1)..(238): NCBI GI NO: 8953699 NR Description: 4-nitrophenylphosphatase-like
  misc_feature (1)..(266): NCBI GI NO: 15982558 NR Description: phosphoglycolate phosphatase precursor
  misc_feature (1)..(261): NCBI GI NO: 23612522 NR Description: 4-nitrophenylphosphatase, putative
  misc_feature (1)..(265): NCBI GI NO: 28277794 NR Description: Unknown (protein for MGC:56011) [Danio rerio]
MLIEGVPETMELLRKLGKKLVFVTNNSRKSRRQYSKKFRSLGLEVTEEEIFTSSFAAAMFLKLNNFPPEKKVYVVGEDGILEELKLAGFECFGGPEDGKKNIKLEADFYFEHDKSVGAVIVGLDQYFNYYKMQYARTCISENPGCFFIATNRDPTGHMTSAQEWPGAGAMVAAVSCSVQKEPIVVGKPSGFLMDFLLKSFNLETSRMCMVGDRLDTDILFGQNTGCKTLLVLSGCTALPEVQDARNNIHPDLYTNSVYDLVGLLQK

SEQ ID NO: 29450 - protein, 257 aa, Zea mays subsp. mays
  peptide (1)..(257): Ceres Seq. ID no. 12408619
  misc_feature (1)..(225): Pfam Name: Pfam Description:  haloacid dehalogenase-like hydrolase
  misc_feature (1)..(256): NCBI GI NO: 21593203 NR Description: 4-nitrophenylphosphatase-like protein
  misc_feature (1)..(256): NCBI GI NO: 10177912 NR Description: 4-nitrophenylphosphatase-like protein
  misc_feature (1)..(256): NCBI GI NO: 15238800 NR Description: 4-nitrophenylphosphatase-like protein
  misc_feature (1)..(254): NCBI GI NO: 38345235 NR Description: OSJNBa0084K20.14
  misc_feature (1)..(252): NCBI GI NO: 15239406 NR Description: p-nitrophenylphosphatase-like protein
  misc_feature (1)..(252): NCBI GI NO: 26450878 NR Description: putative p-nitrophenylphosphatase
  misc_feature (1)..(229): NCBI GI NO: 8953699 NR Description: 4-nitrophenylphosphatase-like
  misc_feature (1)..(257): NCBI GI NO: 15982558 NR Description: phosphoglycolate phosphatase precursor
  misc_feature (1)..(252): NCBI GI NO: 23612522 NR Description: 4-nitrophenylphosphatase, putative
  misc_feature (1)..(256): NCBI GI NO: 28277794 NR Description: Unknown (protein for MGC:56011) [Danio rerio]
MELLRKLGKKLVFVTNNSRKSRRQYSKKFRSLGLEVTEEEIFTSSFAAAMFLKLNNFPPEKKVYVVGEDGILEELKLAGFECFGGPEDGKKNIKLEADFYFEHDKSVGAVIVGLDQYFNYYKMQYARTCISENPGCFFIATNRDPTGHMTSAQEWPGAGAMVAAVSCSVQKEPIVVGKPSGFLMDFLLKSFNLETSRMCMVGDRLDTDILFGQNTGCKTLLVLSGCTALPEVQDARNNIHPDLYTNSVYDLVGLLQK

SEQ ID NO: 29451 - protein, 208 aa, Zea mays subsp. mays
  peptide (1)..(208): Ceres Seq. ID no. 12408620
  misc_feature (1)..(176): Pfam Name: Pfam Description:  haloacid dehalogenase-like hydrolase
  misc_feature (1)..(207): NCBI GI NO: 21593203 NR Description: 4-nitrophenylphosphatase-like protein
  misc_feature (1)..(207): NCBI GI NO: 10177912 NR Description: 4-nitrophenylphosphatase-like protein
  misc_feature (1)..(207): NCBI GI NO: 15238800 NR Description: 4-nitrophenylphosphatase-like protein
  misc_feature (1)..(205): NCBI GI NO: 38345235 NR Description: OSJNBa0084K20.14
  misc_feature (1)..(203): NCBI GI NO: 15239406 NR Description: p-nitrophenylphosphatase-like protein
  misc_feature (1)..(203): NCBI GI NO: 26450878 NR Description: putative p-nitrophenylphosphatase
  misc_feature (1)..(180): NCBI GI NO: 8953699 NR Description: 4-nitrophenylphosphatase-like
  misc_feature (1)..(208): NCBI GI NO: 15982558 NR Description: phosphoglycolate phosphatase precursor
  misc_feature (1)..(203): NCBI GI NO: 23612522 NR Description: 4-nitrophenylphosphatase, putative
  misc_feature (1)..(207): NCBI GI NO: 28277794 NR Description: Unknown (protein for MGC:56011) [Danio rerio]
MFLKLNNFPPEKKVYVVGEDGILEELKLAGFECFGGPEDGKKNIKLEADFYFEHDKSVGAVIVGLDQYFNYYKMQYARTCISENPGCFFIATNRDPTGHMTSAQEWPGAGAMVAAVSCSVQKEPIVVGKPSGFLMDFLLKSFNLETSRMCMVGDRLDTDILFGQNTGCKTLLVLSGCTALPEVQDARNNIHPDLYTNSVYDLVGLLQK

SEQ ID NO: 29452 - DNA, 1369 bp, Zea mays subsp. mays
  misc_feature (1)..(1369): Ceres Seq. ID no. 12408614
ttttaaagaaaagctccccccatccacgaacaaaagatcgcgaagcgagagggaatgatggaggcataggcactagcacctcctcgcctccacctccgtcctcttcgatcccgtccaatcccccgcgccccggcgcccctctccgccggcggctttgctgggtcccgcgctcctcctcctcctaggctgttctggttggggctgcggcggagggaactaggtaagggggaaggaaaggggaggtttgagggagagcgcagcggcagcggcagcagcgatgccatcgcccggatctggaccgccagatctcgcagctgcgggattgcaagttcctgcctgaggcggaggtcaaaacgctatgcgagcaggccaaggcgatcctcatggaggagtggaacgtgcagcccgtgcgttgccccgtcactgtctgcggcgacatccacggccagttctacgacctcatcgagctctttcgcatcggtggcgacgcgcccgacaccaactacctctttatgggcgactacgtcgaccgtggctactactcagtggagactgtgtccttattggtggctctaaaagtacgttatagagacagaatcacaatattgagaggaaatcatgagagtagacaaataactcaagtgtatggcttctatgatgaatgcttgcggaaatatggaaatgcaaatgtgtggaagtactttacagacttgtttgattatttgcctctcacagctcttatagaaaatcagatcttctgcctacatggtggtctctctccatcactggatactttggataatgtccgctcccttgatcgcatacaagaggtcccgcatgaaggacctatgtgtgatcttttgtggtctgacccggatgacagatgtggatggggaatttcaccaaggggtgctggatacacatttggccaagatattgcacaacaattcaaccatacaaatgggctaagtcttatttcaagagctcatcaacttgtaatggaagggttcaattggtgccaggataagaacgttgtgacagtgttcagcgcgcctaactattgctaccgatgcgggaacatggctgcgatcctcgaaattggcgagaacatggatcagaacttcctccaattcgacccagctccgcggcagattgagccggacatgacgcgcaagaccccagactactttttgtaatcagcatgctggctttctttcaacttgtctactgcagcgccagcacctgtagatctccttagaaaatggtgtttcctctagccgccttgtacccccatcattcttttggtgtggagattttattgccgcttctcagaacattgaggttgttgaaagtacatggcattgggtct

SEQ ID NO: 29453 - protein, 270 aa, Zea mays subsp. mays
  peptide (1)..(270): Ceres Seq. ID no. 12408615
  misc_feature (11)..(206): Pfam Name: Pfam Description:  Calcineurin-like phosphoesterase
  misc_feature (1)..(270): NCBI GI NO: 11134285 NR Description: Serine/threonine protein phosphatase PP2A-1catalytic subunit
  misc_feature (1)..(270): NCBI GI NO: 11134222 NR Description: Serine/threonine protein phosphatase PP2A-3catalytic subunit
  misc_feature (1)..(270): NCBI GI NO: 7435122 NR Description: probable phosphoprotein phosphatase (EC 3
  misc_feature (1)..(270): NCBI GI NO: 10638985 NR Description: protein phosphatase 2A [Fagus sylvatica]
  misc_feature (1)..(270): NCBI GI NO: 7248359 NR Description: type 2A protein phosphatase-1 [Vicia faba]
  misc_feature (1)..(270): NCBI GI NO: 15218524 NR Description: serine/threonine protein phosphatase, PP2A
  misc_feature (1)..(270): NCBI GI NO: 15218928 NR Description: serine/threonine protein phosphatase PP2A
  misc_feature (1)..(270): NCBI GI NO: 21593150 NR Description: serine/threonine protein phosphatase type 2A
  misc_feature (1)..(270): NCBI GI NO: 15222511 NR Description: serine/threonine protein phosphatase type 2A
  misc_feature (1)..(270): NCBI GI NO: 11133825 NR Description: Serine/threonine protein phosphatase PP2A catalytic subunit
MEEWNVQPVRCPVTVCGDIHGQFYDLIELFRIGGDAPDTNYLFMGDYVDRGYYSVETVSLLVALKVRYRDRITILRGNHESRQITQVYGFYDECLRKYGNANVWKYFTDLFDYLPLTALIENQIFCLHGGLSPSLDTLDNVRSLDRIQEVPHEGPMCDLLWSDPDDRCGWGISPRGAGYTFGQDIAQQFNHTNGLSLISRAHQLVMEGFNWCQDKNVVTVFSAPNYCYRCGNMAAILEIGENMDQNFLQFDPAPRQIEPDMTRKTPDYFL

SEQ ID NO: 29454 - protein, 227 aa, Zea mays subsp. mays
  peptide (1)..(227): Ceres Seq. ID no. 12408616
  misc_feature (1)..(163): Pfam Name: Pfam Description:  Calcineurin-like phosphoesterase
  misc_feature (1)..(227): NCBI GI NO: 11134285 NR Description: Serine/threonine protein phosphatase PP2A-1catalytic subunit
  misc_feature (1)..(227): NCBI GI NO: 11134222 NR Description: Serine/threonine protein phosphatase PP2A-3catalytic subunit
  misc_feature (1)..(227): NCBI GI NO: 7435122 NR Description: probable phosphoprotein phosphatase (EC 3
  misc_feature (1)..(227): NCBI GI NO: 10638985 NR Description: protein phosphatase 2A [Fagus sylvatica]
  misc_feature (1)..(227): NCBI GI NO: 7248359 NR Description: type 2A protein phosphatase-1 [Vicia faba]
  misc_feature (1)..(227): NCBI GI NO: 15218524 NR Description: serine/threonine protein phosphatase, PP2A
  misc_feature (1)..(227): NCBI GI NO: 15218928 NR Description: serine/threonine protein phosphatase PP2A
  misc_feature (1)..(227): NCBI GI NO: 21593150 NR Description: serine/threonine protein phosphatase type 2A
  misc_feature (1)..(227): NCBI GI NO: 15222511 NR Description: serine/threonine protein phosphatase type 2A
  misc_feature (1)..(227): NCBI GI NO: 11133825 NR Description: Serine/threonine protein phosphatase PP2A catalytic subunit
MGDYVDRGYYSVETVSLLVALKVRYRDRITILRGNHESRQITQVYGFYDECLRKYGNANVWKYFTDLFDYLPLTALIENQIFCLHGGLSPSLDTLDNVRSLDRIQEVPHEGPMCDLLWSDPDDRCGWGISPRGAGYTFGQDIAQQFNHTNGLSLISRAHQLVMEGFNWCQDKNVVTVFSAPNYCYRCGNMAAILEIGENMDQNFLQFDPAPRQIEPDMTRKTPDYFL

SEQ ID NO: 29455 - DNA, 1760 bp, Zea mays subsp. mays
  misc_feature (1)..(1760): Ceres Seq. ID no. 12423851
aaaaccgaccggcctcgctttcgccggttacccggtcaaacgcatcaaccgccggcacgtctccgatcggatcacgatggctgccccgtgcccccgccggtcaggccaggtcgcgtggtcacgtgcgacgcgcatgccgtcctcggccggcgccccagccccctcgccgtgtccttttattctcccccgcctcaccgcccgcatccccaattcacgcccccaccacgacttccgtgctcgccgccttctcggactaggggggttcggctcgagatctgatttcgggcgccggaggactacatggaggttagggagatggcgatggccgcggcggctgcggctgcggcgtccggcgggggaggcgtcaagctgccgccgcccaatcccaacctgccctacagggaggactgctggagcgacggcgagacggcagctctcgtctccgcctggggcagccgctacgtcgagctcaaccgcggtaacctgcgccagaagcagtggcaggaggtggcggacgccgtcaactcgcgccggggagcctccgcgcggcgccgcccgccgcgcaccgacatccagtgcaagaaccgcgtcgataccctcaagaagaagtacaaggccgagctcgcccgcaacgcgccgtccgcctggtcctacttccccgagctcgaccgcctcgtcggcccaaccctcagcgcctccgcctccaagagacccttggcgtctctgcctcctcaattcgctttgcccatgcatccaccagccgtgcggaggcccccgtcgccttcgccgtcatcgtcctccccgccgcagccgcctatggctttgcctctacccaattaccgccgtgggtccccgctccctgctgctgccctcatccagaaggaagccgcggctgctgcggctgctgcgtctgattcagaggactccgatgatgcggctggcggcaataatcacaaattgccccggtcgccttcgcgctcggtgtcgtcactctctgccagtaacaagaagcgctgcagagatgaggctggcagcagtgctgacaaaggtttcagagagttagcaagggcgatcgaagcttttgcggagatgtatgagcgtgtggagagtgctaagcaaaagcatgtggtggagatggagcgccagcgaattgaattcctgaagcaactggaggtgaaacgcatggagaatttcgttgatgcccatgtgaagctggctagagcaaagcgcacgaagaagactacagggggtgctgccgacggtgctggtggtatggagttggttgccaccgttgctgcgctgcctttcgtctccacctccaccttcctctgatattgaggaagagtttagagaaagagggagcaaaaaatggtggtccaaggaagcaagctaatccgaaagatagcaagtgaagcgtttggccgggcgtttgggtggtgcgaatttctgggtgatcaaaactggaatgtggattctgcagttggagatagcctttcttttagttgatgacttgaatctgtgccttttgttttcgcctgtctgtcgtgatctggttgtaaataagaaagtcttatgccgctagtcgcaggtcgaactttatcttctatcctaggccctctacttatctaggttgatagtgtaaggtgtctagatagagatctgacctaattgctattctgtcggatcgtttgatcgcgatggatgtcgttgttctgaaactttcctatttcctaatgaaatagggggcttcgccccttcgt

SEQ ID NO: 29456 - protein, 353 aa, Zea mays subsp. mays
  peptide (1)..(353): Ceres Seq. ID no. 12423852
  misc_feature (173)..(238): NCBI GI NO: 6523547 NR Description: hydroxyproline-rich glycoprotein DZ-HRGP
  misc_feature (118)..(231): NCBI GI NO: 13592175 NR Description: ppg3 [Leishmania major]
  misc_feature (118)..(231): NCBI GI NO: 13592175 NR Description: ppg3 [Leishmania major]
  misc_feature (117)..(233): NCBI GI NO: 13592175 NR Description: ppg3 [Leishmania major]
  misc_feature (147)..(238): NCBI GI NO: 81286 NR Description: extensin - Volvox carteri (fragment)
  misc_feature (118)..(233): NCBI GI NO: 13592175 NR Description: ppg3 [Leishmania major]
  misc_feature (180)..(238): NCBI GI NO: 6523547 NR Description: hydroxyproline-rich glycoprotein DZ-HRGP
  misc_feature (147)..(238): NCBI GI NO: 20138131 NR Description: Vegetative cell wall protein gp1 precursor
  misc_feature (117)..(233): NCBI GI NO: 5420387 NR Description: proteophosphoglycan [Leishmania major]
  misc_feature (117)..(231): NCBI GI NO: 13592175 NR Description: ppg3 [Leishmania major]
KPTGLAFAGYPVKRINRRHVSDRITMAAPCPRRSGQVAWSRATRMPSSAGAPAPSPCPFILPRLTARIPNSRPHHDFRARRLLGLGGFGSRSDFGRRRTTWRLGRWRWPRRLRLRRPAGEASSCRRPIPTCPTGRTAGATARRQLSSPPGAAATSSSTAVTCARSSGRRWRTPSTRAGEPPRGAARRAPTSSARTASIPSRRSTRPSSPATRRPPGPTSPSSTASSAQPSAPPPPRDPWRLCLLNSLCPCIHQPCGGPRRLRRHRPPRRSRLWLCLYPITAVGPRSLLLPSSRRKPRLLRLLRLIQRTPMMRLAAIITNCPGRLRARCRHSLPVTRSAAEMRLAAVLTKVSES

SEQ ID NO: 29457 - protein, 343 aa, Zea mays subsp. mays
  peptide (1)..(343): Ceres Seq. ID no. 12423853
  misc_feature (23)..(343): NCBI GI NO: 34911060 NR Description: putative 6b-interacting protein 1
  misc_feature (27)..(324): NCBI GI NO: 11357442 NR Description: hypothetical protein F14P22
  misc_feature (27)..(326): NCBI GI NO: 30694843 NR Description: expressed protein [Arabidopsis thaliana]
  misc_feature (34)..(134): NCBI GI NO: 10178132 NR Description: gb|AAF01512
  misc_feature (34)..(134): NCBI GI NO: 18414919 NR Description: putative protein; protein id: At5g05550
  misc_feature (34)..(134): NCBI GI NO: 30680994 NR Description: expressed protein [Arabidopsis thaliana]
  misc_feature (241)..(315): NCBI GI NO: 10178132 NR Description: gb|AAF01512
  misc_feature (241)..(315): NCBI GI NO: 18414919 NR Description: putative protein; protein id: At5g05550
  misc_feature (241)..(315): NCBI GI NO: 30680994 NR Description: expressed protein [Arabidopsis thaliana]
  misc_feature (110)..(310): NCBI GI NO: 15231799 NR Description: hypothetical protein; protein id: At3g14180
MEVREMAMAAAAAAAASGGGGVKLPPPNPNLPYREDCWSDGETAALVSAWGSRYVELNRGNLRQKQWQEVADAVNSRRGASARRRPPRTDIQCKNRVDTLKKKYKAELARNAPSAWSYFPELDRLVGPTLSASASKRPLASLPPQFALPMHPPAVRRPPSPSPSSSSPPQPPMALPLPNYRRGSPLPAAALIQKEAAAAAAAASDSEDSDDAAGGNNHKLPRSPSRSVSSLSASNKKRCRDEAGSSADKGFRELARAIEAFAEMYERVESAKQKHVVEMERQRIEFLKQLEVKRMENFVDAHVKLARAKRTKKTTGGAADGAGGMELVATVAALPFVSTSTFL

SEQ ID NO: 29458 - protein, 338 aa, Zea mays subsp. mays
  peptide (1)..(338): Ceres Seq. ID no. 12423854
  misc_feature (18)..(338): NCBI GI NO: 34911060 NR Description: putative 6b-interacting protein 1
  misc_feature (22)..(319): NCBI GI NO: 11357442 NR Description: hypothetical protein F14P22
  misc_feature (22)..(321): NCBI GI NO: 30694843 NR Description: expressed protein [Arabidopsis thaliana]
  misc_feature (29)..(129): NCBI GI NO: 10178132 NR Description: gb|AAF01512
  misc_feature (29)..(129): NCBI GI NO: 30680994 NR Description: expressed protein [Arabidopsis thaliana]
  misc_feature (29)..(129): NCBI GI NO: 18414919 NR Description: putative protein; protein id: At5g05550
  misc_feature (236)..(310): NCBI GI NO: 10178132 NR Description: gb|AAF01512
  misc_feature (236)..(310): NCBI GI NO: 30680994 NR Description: expressed protein [Arabidopsis thaliana]
  misc_feature (236)..(310): NCBI GI NO: 18414919 NR Description: putative protein; protein id: At5g05550
  misc_feature (105)..(305): NCBI GI NO: 15231799 NR Description: hypothetical protein; protein id: At3g14180
MAMAAAAAAAASGGGGVKLPPPNPNLPYREDCWSDGETAALVSAWGSRYVELNRGNLRQKQWQEVADAVNSRRGASARRRPPRTDIQCKNRVDTLKKKYKAELARNAPSAWSYFPELDRLVGPTLSASASKRPLASLPPQFALPMHPPAVRRPPSPSPSSSSPPQPPMALPLPNYRRGSPLPAAALIQKEAAAAAAAASDSEDSDDAAGGNNHKLPRSPSRSVSSLSASNKKRCRDEAGSSADKGFRELARAIEAFAEMYERVESAKQKHVVEMERQRIEFLKQLEVKRMENFVDAHVKLARAKRTKKTTGGAADGAGGMELVATVAALPFVSTSTFL

SEQ ID NO: 29459 - DNA, 997 bp, Zea mays subsp. mays
  misc_feature (1)..(997): Ceres Seq. ID no. 12352560
gattcactcacgaattccccattcccttccctatcgcatcgcatcgagagccaggccagccagccacctctgcttggtctccatggccgccgcgctcaggtccccggcctcggccaaggtctcgagccccgccgccgcctccaaggtgcgccaggcgtccagagtcgcggtgggcgggttccggcagcatccccggagccgtggcggccccgtggccgtgcgggcgtcgctgttctcgcccaagcccgcggcggccaaggacgcgcggccgaccaaggtgcaggagctgtacgtgtacgagatgaacgagcgggaccgcgagagcccggcgtacctgcgcctcagcgccaagcagacggagaacgcgctgggcgacctggtccccttcacaaacaaggtttacaacggcagcctggacaagcggctgggcatcaccgccggcatctgcgtgctcatccagcacgtccccgaccgcaacggcgaccggtacgaggccatctacagcttctacttcggcgactacggccacatctcggtgcagggcgcgtacctgacctacgaggagtcgtacctggccgtcacgggcggctccggcgtcttcgagggcgcctacggccaggtcaagctccaccagatcgtcttccccttcaagatcttctacaccttctacctccggggcatcccggacctgcccagggacctgctctgcacgcccgtcccgccctcccccaccgtcgagcccacgcccgccgccagggccgccgagccgcacgcctgcgtcaacaactacaccaactgactcatcaattccagcccaggaaccatctctgcctgccgtgcctgtccccccctgctcctcactcgatttgtatgtttgtatggcttagggttcttcgattcgtacgcgcgtgcgtggtagcaccaataaagacgcgatcgatcgagttgtgtacttgtgtcacccttgaacaaacaatgagatatttgtttgtcgtcg

SEQ ID NO: 29460 - protein, 332 aa, Zea mays subsp. mays
  peptide (1)..(332): Ceres Seq. ID no. 12352561
DSLTNSPFPSLSHRIESQASQPPLLGLHGRRAQVPGLGQGLEPRRRLQGAPGVQSRGGRVPAASPEPWRPRGRAGVAVLAQARGGQGRAADQGAGAVRVRDERAGPREPGVPAPQRQADGERAGRPGPLHKQGLQRQPGQAAGHHRRHLRAHPARPRPQRRPVRGHLQLLLRRLRPHLGAGRVPDLRGVVPGRHGRLRRLRGRLRPGQAPPDRLPLQDLLHLLPPGHPGPAQGPALHARPALPHRRAHARRQGRRAARLRQQLHQLTHQFQPRNHLCLPCLSPPAPHSICMFVWLRVLRFVRACVVAPIKTRSIELCTCVTLEQTMRYLFVV

SEQ ID NO: 29461 - protein, 265 aa, Zea mays subsp. mays
  peptide (1)..(265): Ceres Seq. ID no. 12352562
  misc_feature (86)..(265): Pfam Name: Pfam Description:  Allene oxide cyclase
  misc_feature (28)..(265): NCBI GI NO: 39980760 NR Description: allene oxide cyclase [Zea mays]
  misc_feature (28)..(265): NCBI GI NO: 21727906 NR Description: allene oxide cyclase
  misc_feature (31)..(265): NCBI GI NO: 40643247 NR Description: allene oxide cyclase [Hordeum vulgare]
  misc_feature (27)..(265): NCBI GI NO: 8977961 NR Description: allene oxide cyclase [Lycopersicon esculentum]
  misc_feature (75)..(265): NCBI GI NO: 40644132 NR Description: allene oxide cyclase [Medicago truncatula]
  misc_feature (27)..(265): NCBI GI NO: 40644130 NR Description: allene oxide cyclase [Nicotiana tabacum]
  misc_feature (78)..(265): NCBI GI NO: 1362093 NR Description: hypothetical protein
  misc_feature (27)..(263): NCBI GI NO: 23956574 NR Description: allene oxide cyclase [Solanum tuberosum]
  misc_feature (88)..(265): NCBI GI NO: 16416376 NR Description: mangrin [Bruguiera sexangula]
  misc_feature (86)..(265): NCBI GI NO: 18404658 NR Description: expressed protein; protein id: At3g25780
IHSRIPHSLPYRIASRARPASHLCLVSMAAALRSPASAKVSSPAAASKVRQASRVAVGGFRQHPRSRGGPVAVRASLFSPKPAAAKDARPTKVQELYVYEMNERDRESPAYLRLSAKQTENALGDLVPFTNKVYNGSLDKRLGITAGICVLIQHVPDRNGDRYEAIYSFYFGDYGHISVQGAYLTYEESYLAVTGGSGVFEGAYGQVKLHQIVFPFKIFYTFYLRGIPDLPRDLLCTPVPPSPTVEPTPAARAAEPHACVNNYTN

SEQ ID NO: 29462 - protein, 238 aa, Zea mays subsp. mays
  peptide (1)..(238): Ceres Seq. ID no. 12352563
  misc_feature (59)..(238): Pfam Name: Pfam Description:  Allene oxide cyclase
  misc_feature (1)..(238): NCBI GI NO: 39980760 NR Description: allene oxide cyclase [Zea mays]
  misc_feature (1)..(238): NCBI GI NO: 21727906 NR Description: allene oxide cyclase
  misc_feature (4)..(238): NCBI GI NO: 40643247 NR Description: allene oxide cyclase [Hordeum vulgare]
  misc_feature (1)..(238): NCBI GI NO: 8977961 NR Description: allene oxide cyclase [Lycopersicon esculentum]
  misc_feature (48)..(238): NCBI GI NO: 40644132 NR Description: allene oxide cyclase [Medicago truncatula]
  misc_feature (1)..(238): NCBI GI NO: 40644130 NR Description: allene oxide cyclase [Nicotiana tabacum]
  misc_feature (51)..(238): NCBI GI NO: 1362093 NR Description: hypothetical protein
  misc_feature (1)..(236): NCBI GI NO: 23956574 NR Description: allene oxide cyclase [Solanum tuberosum]
  misc_feature (61)..(238): NCBI GI NO: 16416376 NR Description: mangrin [Bruguiera sexangula]
  misc_feature (59)..(238): NCBI GI NO: 18404658 NR Description: expressed protein; protein id: At3g25780
MAAALRSPASAKVSSPAAASKVRQASRVAVGGFRQHPRSRGGPVAVRASLFSPKPAAAKDARPTKVQELYVYEMNERDRESPAYLRLSAKQTENALGDLVPFTNKVYNGSLDKRLGITAGICVLIQHVPDRNGDRYEAIYSFYFGDYGHISVQGAYLTYEESYLAVTGGSGVFEGAYGQVKLHQIVFPFKIFYTFYLRGIPDLPRDLLCTPVPPSPTVEPTPAARAAEPHACVNNYTN

SEQ ID NO: 29463 - DNA, 1192 bp, Zea mays subsp. mays
  misc_feature (1)..(1192): Ceres Seq. ID no. 12346157
gtatctcctctctggacgaacagatcctctctggacgaacagaaaggttaccagcagcaccacggcgagatctccccttggcgggccaaaaccgacggcgagcttcaccggcgttggtcggctccaatctcttcgccgttttattttcctcccaggttaaggttgcaggcttttagcttgggattctgaaagatggggacctcttctggcgcgaatttccatcagcaacctcctccgacccaggggatgttgcctccaaggcatggtccacgcccctcagggttgcagacctcgctctcgctggcctcttcggagcaggttggctcgcctgacatgcaggagcctggttcaaactcggagccagggcatgattccgccactgagagcgccagttccaaagacacatggccagctgagccgaaccagagcaatggtggggtggctgccagtgatgttgtgagtaaggcggcggagaaggaggtggcaaatggtgtatccaagccgcaggttatccatggaccctcctcccgtgtgagtgggatgcttctgcgggaggttgcacgggagagggttgatctggtcgctgagaagatgaagatgatgtcggatgagcacctagaggaggtcaagaatgagctcaggtcgattctggagggcactggaggttctcaccacatcgaggagttcttgtacttgcagaagcttgtccaggacaggcatgatttgacaccatccatgctttcagtggcacaccatgtgcagcttgagatccttgttgcaatcaagactggaatacaggcctttctgcaccccagtgttaccattccacacaatcgcttggtggaggtcttcttgtacaagaggtgccggaacattgcttgccagagtgctctccctgctgaggagtgcagatgcaacgtgtgcgctagcaggaatggtttttgcaacctgtgcatgtgtgtcatctgcaacaagtttgattttgaggtcaatacatgccgtttgattggctgtgatttttgctctcactggacacatacagattgtgcaattcacaatggccagatcggaatgggacaatcagtgaaaagcagcattggtcatgctgaaatgctttttaggtgccgagcttgccagaggacctcagagctgctgggttgggttaaggatgtcttccaacaatgcgctcctg

SEQ ID NO: 29464 - protein, 333 aa, Zea mays subsp. mays
  peptide (1)..(333): Ceres Seq. ID no. 12346158
  misc_feature (19)..(332): NCBI GI NO: 30385711 NR Description: Potyvirus VPg interacting protein
  misc_feature (37)..(332): NCBI GI NO: 18398053 NR Description: expressed protein; protein id: At3g07780
  misc_feature (53)..(332): NCBI GI NO: 15238905 NR Description: putative protein; protein id: At5g48160.1
  misc_feature (93)..(332): NCBI GI NO: 30385713 NR Description: Potyvirus VPg interacting protein [Pisum sativum]
  misc_feature (86)..(332): NCBI GI NO: 18394157 NR Description: expressed protein; protein id: At1g14740
  misc_feature (86)..(332): NCBI GI NO: 25402780 NR Description: protein F10B6.14 [imported] - Arabidopsis thaliana
  misc_feature (38)..(328): NCBI GI NO: 30695820 NR Description: expressed protein [Arabidopsis thaliana]
  misc_feature (38)..(328): NCBI GI NO: 28973711 NR Description: unknown protein [Arabidopsis thaliana]
  misc_feature (38)..(328): NCBI GI NO: 15229445 NR Description: putative protein; protein id: At3g63500.1
MGTSSGANFHQQPPPTQGMLPPRHGPRPSGLQTSLSLASSEQVGSPDMQEPGSNSEPGHDSATESASSKDTWPAEPNQSNGGVAASDVVSKAAEKEVANGVSKPQVIHGPSSRVSGMLLREVARERVDLVAEKMKMMSDEHLEEVKNELRSILEGTGGSHHIEEFLYLQKLVQDRHDLTPSMLSVAHHVQLEILVAIKTGIQAFLHPSVTIPHNRLVEVFLYKRCRNIACQSALPAEECRCNVCASRNGFCNLCMCVICNKFDFEVNTCRLIGCDFCSHWTHTDCAIHNGQIGMGQSVKSSIGHAEMLFRCRACQRTSELLGWVKDVFQQCAP

SEQ ID NO: 29465 - protein, 315 aa, Zea mays subsp. mays
  peptide (1)..(315): Ceres Seq. ID no. 12346159
  misc_feature (1)..(314): NCBI GI NO: 30385711 NR Description: Potyvirus VPg interacting protein
  misc_feature (19)..(314): NCBI GI NO: 18398053 NR Description: expressed protein; protein id: At3g07780
  misc_feature (35)..(314): NCBI GI NO: 15238905 NR Description: putative protein; protein id: At5g48160.1
  misc_feature (75)..(314): NCBI GI NO: 30385713 NR Description: Potyvirus VPg interacting protein [Pisum sativum]
  misc_feature (68)..(314): NCBI GI NO: 18394157 NR Description: expressed protein; protein id: At1g14740
  misc_feature (68)..(314): NCBI GI NO: 25402780 NR Description: protein F10B6.14 [imported] - Arabidopsis thaliana
  misc_feature (20)..(310): NCBI GI NO: 30695820 NR Description: expressed protein [Arabidopsis thaliana]
  misc_feature (20)..(310): NCBI GI NO: 28973711 NR Description: unknown protein [Arabidopsis thaliana]
  misc_feature (20)..(310): NCBI GI NO: 15229445 NR Description: putative protein; protein id: At3g63500.1
MLPPRHGPRPSGLQTSLSLASSEQVGSPDMQEPGSNSEPGHDSATESASSKDTWPAEPNQSNGGVAASDVVSKAAEKEVANGVSKPQVIHGPSSRVSGMLLREVARERVDLVAEKMKMMSDEHLEEVKNELRSILEGTGGSHHIEEFLYLQKLVQDRHDLTPSMLSVAHHVQLEILVAIKTGIQAFLHPSVTIPHNRLVEVFLYKRCRNIACQSALPAEECRCNVCASRNGFCNLCMCVICNKFDFEVNTCRLIGCDFCSHWTHTDCAIHNGQIGMGQSVKSSIGHAEMLFRCRACQRTSELLGWVKDVFQQCAP

SEQ ID NO: 29466 - protein, 286 aa, Zea mays subsp. mays
  peptide (1)..(286): Ceres Seq. ID no. 12346160
  misc_feature (1)..(285): NCBI GI NO: 30385711 NR Description: Potyvirus VPg interacting protein
  misc_feature (1)..(285): NCBI GI NO: 18398053 NR Description: expressed protein; protein id: At3g07780
  misc_feature (6)..(285): NCBI GI NO: 15238905 NR Description: putative protein; protein id: At5g48160.1
  misc_feature (46)..(285): NCBI GI NO: 30385713 NR Description: Potyvirus VPg interacting protein [Pisum sativum]
  misc_feature (39)..(285): NCBI GI NO: 18394157 NR Description: expressed protein; protein id: At1g14740
  misc_feature (39)..(285): NCBI GI NO: 25402780 NR Description: protein F10B6.14 [imported] - Arabidopsis thaliana
  misc_feature (1)..(281): NCBI GI NO: 30695820 NR Description: expressed protein [Arabidopsis thaliana]
  misc_feature (1)..(281): NCBI GI NO: 28973711 NR Description: unknown protein [Arabidopsis thaliana]
  misc_feature (1)..(281): NCBI GI NO: 15229445 NR Description: putative protein; protein id: At3g63500.1
MQEPGSNSEPGHDSATESASSKDTWPAEPNQSNGGVAASDVVSKAAEKEVANGVSKPQVIHGPSSRVSGMLLREVARERVDLVAEKMKMMSDEHLEEVKNELRSILEGTGGSHHIEEFLYLQKLVQDRHDLTPSMLSVAHHVQLEILVAIKTGIQAFLHPSVTIPHNRLVEVFLYKRCRNIACQSALPAEECRCNVCASRNGFCNLCMCVICNKFDFEVNTCRLIGCDFCSHWTHTDCAIHNGQIGMGQSVKSSIGHAEMLFRCRACQRTSELLGWVKDVFQQCAP

SEQ ID NO: 29467 - DNA, 1422 bp, Zea mays subsp. mays
  misc_feature (1)..(1422): Ceres Seq. ID no. 12356590
attctccaccttcttcaaaggttcaactcagagaggagagaactagagaaagatccccacccccaggcgacgcgaccggcgagccccgaaaccctaggtcgcgcgacccgggcagcgcgcttctgcgtgactgcgtgtctttcggggaggggacagcgttaggacgcgacgaggttagcgaggccgtctggccgactataagcggaagaatctcctccgaagccttcctagagctgtgaagagcgcgtggatctcctggatttgcagactcgaggggagctgagacaagacatgggttggggaatatccaggttgattggactgaaggctgctgccctgctttctgtagcatgttttttccaaggactaggagtgacccttatctcatttcctctcatatatgcatccataattgcaatactagtctcgatagcttcccgcccatctattgatcttcctttactccttggcaaggcatccgatggaagttttccattgtggtcatggatcatcttctcaccatttcttcttttcattcacctgttcgtgctgctacggagatttgtgaaaaacgagcccttatacactgaggttgcagatggtgtgtttgttggagggtggccttcttcagttgaacacctgccaccaggtgaccccgcgatcatagattgcacgtgcgagctgccaaaaagctcgactatctctaacaatgcatatttgtgcattgctacctgggacacgagggctcctcagccatcacagattgagtctgccgtgcaatgggctgtgagaaagcggtcacagaacaagcctgtctatgtccactgtgcctatggtcatggcagaagtgtctgtgtgatgtgtgcgcttcttgtcgcattagggttcgctgaagattggaaagctgctgcacaaatgatccgtgagaagcgaccttctattagcatgaatactcttcaccgcaaaagcttggaggaatggtcaaaacatttgctctcctctaaaagaagtggggaatcagatgtgagttctgttatacattcggattataaccggaaataaaattgaaccagcaagggacaggcgtgttcagttgctgtgacattgaagatgcattacattcggtagtattgtttgctgctgtcctagtgaatgcctatggttcattttaaattatccttttgtggcatttgtgttgtaaaaactatatgtatcaaattatattagtactgtaggtttacccggctagttcttcaaggaagatgtactgtccttgtctccttttttctgataccagtgcccttgcctctcatcgaatgcttgccagggaagtgctgttgccggaccctttggggcgagaaaaccctgcattcttgcattcctgctgggttctcatttatagctatatgtgatatgtttcgt

SEQ ID NO: 29468 - protein, 256 aa, Zea mays subsp. mays
  peptide (1)..(256): Ceres Seq. ID no. 12356591
  misc_feature (99)..(230): Pfam Name: Pfam Description:  Dual specificity phosphatase, catalytic domain
  misc_feature (1)..(256): NCBI GI NO: 34908470 NR Description: P0489B03.9
  misc_feature (60)..(230): NCBI GI NO: 3041758 NR Description: unnamed protein product [Escherichia coli]
  misc_feature (60)..(230): NCBI GI NO: 16129372 NR Description: putative enzymes [Escherichia coli K12]
  misc_feature (11)..(232): NCBI GI NO: 28896859 NR Description: hypothetical protein
  misc_feature (60)..(230): NCBI GI NO: 15801736 NR Description: putative enzymes [Escherichia coli O157:H7 EDL933]
  misc_feature (60)..(230): NCBI GI NO: 26247698 NR Description: Hypothetical protein ynbD
  misc_feature (28)..(237): NCBI GI NO: 23030039 NR Description: hypothetical protein
  misc_feature (13)..(227): NCBI GI NO: 21241287 NR Description: conserved hypothetical protein
  misc_feature (72)..(227): NCBI GI NO: 32037532 NR Description: hypothetical protein
MGWGISRLIGLKAAALLSVACFFQGLGVTLISFPLIYASIIAILVSIASRPSIDLPLLLGKASDGSFPLWSWIIFSPFLLFIHLFVLLRRFVKNEPLYTEVADGVFVGGWPSSVEHLPPGDPAIIDCTCELPKSSTISNNAYLCIATWDTRAPQPSQIESAVQWAVRKRSQNKPVYVHCAYGHGRSVCVMCALLVALGFAEDWKAAAQMIREKRPSISMNTLHRKSLEEWSKHLLSSKRSGESDVSSVIHSDYNRK

SEQ ID NO: 29469 - DNA, 1502 bp, Zea mays subsp. mays
  misc_feature (1)..(1502): Ceres Seq. ID no. 12381206
ctcaatctcctctccttgtccactggcttgggcgtgcctttgcgtgcgacgggagctaggaatccacggcatcggaaaagtggccgcctgaagaaccgatttctccaagatttttttgtccatcctatcgcttgcaggatcggattcgccgtctctggccatggttctcgccggcctccgccggcacgtcggccagttcttgaccagcagtaatgagcttatggcggcgtcgctctcggccgtgagctgcgcggacgaggtgcagaaggcggagggggcggggtgccgtgacgacgccgcggcgctgcggctcaagaaggtggccatggcggcgatactggtggccggggtgctcggggtggtcctgccgctcgcagggcggaagcggcgcgcgctgcgcacggacagcgccgcgttcctggcggccaaggcgttcgccgccggggtcatcctggccacggggttcgtccacatgcttcacgacgccgagcacgcgctgtccagcccgtgcctccccgccgcgccgtggcgacggttcccagtccccgggttcgtcgccatggccgccgcgctagccacgctggtgctcgacttcctggccaccaggttttacgaggccaagcatcgcgacgaggccgcgcgcgtcaaggtggccgccgccgccgcactggttgcgacctcctctgggagcgacgaggacatcaccgtggtcaccgtcgacgaggacgagcgcaaggccccgctgttgcaaacgcactgccatggacacggtcacagccacagccacagccatgtgcatgagccggtgcaagtagagggtagcgagggggaggtgtcggcacatgtgcgctctattgtcgtgtcacagatactggagatggggattgtgtcacactctgtgatcatcggattgtcactgggagtgtcgcggagcccatgcacaatcaggccacttgtcgcagcacttgcattccaccagttcttcgaggggtttgcactaggtgggtgcattgctcaggcacaattcaagaacctttcagcagttctaatggcatctttcttcgccatcacaacaccggcaggaatagctgctggggcaggcatgaccacattctacaatcccaatagcccaagggcccttgtggtcgagggcattcttgactcggtatctgctggcattctcatatacatgtcactagtggatctcattgctgtagatttcttgggtggaaagatgacagggaccctgcgacagcaagtgatggcatacatcgcattgttcctcggtgcgctctctatgtcatcacttgcaatatgggcttgagacctgcccttgatgaaatatcagacaaaagatgaagtagtgtccatatatagaatgtctgtggtatatgtacagttttaatgtgtagtattcatgcactgttttttaagggcatgaaaaaaaaaaacaccgctgatgtactcaagggtgaactatgtggtttctttaatcgatgatc

SEQ ID NO: 29470 - protein, 387 aa, Zea mays subsp. mays
  peptide (1)..(387): Ceres Seq. ID no. 12381207
  misc_feature (6)..(387): NCBI GI NO: 30526082 NR Description: putative ZIP-like zinc transporter
  misc_feature (21)..(387): NCBI GI NO: 40888862 NR Description: TPA: putative ZIP-like protein
  misc_feature (188)..(387): NCBI GI NO: 18406954 NR Description: putative iron-regulated transporter
  misc_feature (19)..(214): NCBI GI NO: 18406954 NR Description: putative iron-regulated transporter
  misc_feature (237)..(387): NCBI GI NO: 40888856 NR Description: TPA: putative ZIP-like protein
  misc_feature (21)..(154): NCBI GI NO: 40888856 NR Description: TPA: putative ZIP-like protein
  misc_feature (188)..(387): NCBI GI NO: 21553732 NR Description: putative iron-regulated transporter
  misc_feature (21)..(214): NCBI GI NO: 21553732 NR Description: putative iron-regulated transporter
  misc_feature (19)..(387): NCBI GI NO: 30682009 NR Description: metal transporter, putative (ZIP4)
  misc_feature (19)..(387): NCBI GI NO: 14582255 NR Description: ZIP-like zinc transporter [Thlaspi caerulescens]
MVLAGLRRHVGQFLTSSNELMAASLSAVSCADEVQKAEGAGCRDDAAALRLKKVAMAAILVAGVLGVVLPLAGRKRRALRTDSAAFLAAKAFAAGVILATGFVHMLHDAEHALSSPCLPAAPWRRFPVPGFVAMAAALATLVLDFLATRFYEAKHRDEAARVKVAAAAALVATSSGSDEDITVVTVDEDERKAPLLQTHCHGHGHSHSHSHVHEPVQVEGSEGEVSAHVRSIVVSQILEMGIVSHSVIIGLSLGVSRSPCTIRPLVAALAFHQFFEGFALGGCIAQAQFKNLSAVLMASFFAITTPAGIAAGAGMTTFYNPNSPRALVVEGILDSVSAGILIYMSLVDLIAVDFLGGKMTGTLRQQVMAYIALFLGALSMSSLAIWA

SEQ ID NO: 29471 - protein, 367 aa, Zea mays subsp. mays
  peptide (1)..(367): Ceres Seq. ID no. 12381208
  misc_feature (1)..(367): NCBI GI NO: 30526082 NR Description: putative ZIP-like zinc transporter
  misc_feature (1)..(367): NCBI GI NO: 40888862 NR Description: TPA: putative ZIP-like protein
  misc_feature (168)..(367): NCBI GI NO: 18406954 NR Description: putative iron-regulated transporter
  misc_feature (1)..(194): NCBI GI NO: 18406954 NR Description: putative iron-regulated transporter
  misc_feature (217)..(367): NCBI GI NO: 40888856 NR Description: TPA: putative ZIP-like protein
  misc_feature (1)..(134): NCBI GI NO: 40888856 NR Description: TPA: putative ZIP-like protein
  misc_feature (168)..(367): NCBI GI NO: 21553732 NR Description: putative iron-regulated transporter
  misc_feature (1)..(194): NCBI GI NO: 21553732 NR Description: putative iron-regulated transporter
  misc_feature (1)..(367): NCBI GI NO: 30682009 NR Description: metal transporter, putative (ZIP4)
  misc_feature (1)..(367): NCBI GI NO: 14582255 NR Description: ZIP-like zinc transporter [Thlaspi caerulescens]
MAASLSAVSCADEVQKAEGAGCRDDAAALRLKKVAMAAILVAGVLGVVLPLAGRKRRALRTDSAAFLAAKAFAAGVILATGFVHMLHDAEHALSSPCLPAAPWRRFPVPGFVAMAAALATLVLDFLATRFYEAKHRDEAARVKVAAAAALVATSSGSDEDITVVTVDEDERKAPLLQTHCHGHGHSHSHSHVHEPVQVEGSEGEVSAHVRSIVVSQILEMGIVSHSVIIGLSLGVSRSPCTIRPLVAALAFHQFFEGFALGGCIAQAQFKNLSAVLMASFFAITTPAGIAAGAGMTTFYNPNSPRALVVEGILDSVSAGILIYMSLVDLIAVDFLGGKMTGTLRQQVMAYIALFLGALSMSSLAIWA

SEQ ID NO: 29472 - protein, 332 aa, Zea mays subsp. mays
  peptide (1)..(332): Ceres Seq. ID no. 12381209
  misc_feature (1)..(332): NCBI GI NO: 30526082 NR Description: putative ZIP-like zinc transporter
  misc_feature (1)..(332): NCBI GI NO: 40888862 NR Description: TPA: putative ZIP-like protein
  misc_feature (133)..(332): NCBI GI NO: 18406954 NR Description: putative iron-regulated transporter
  misc_feature (1)..(159): NCBI GI NO: 18406954 NR Description: putative iron-regulated transporter
  misc_feature (182)..(332): NCBI GI NO: 40888856 NR Description: TPA: putative ZIP-like protein
  misc_feature (1)..(99): NCBI GI NO: 40888856 NR Description: TPA: putative ZIP-like protein
  misc_feature (133)..(332): NCBI GI NO: 21553732 NR Description: putative iron-regulated transporter
  misc_feature (1)..(159): NCBI GI NO: 21553732 NR Description: putative iron-regulated transporter
  misc_feature (1)..(332): NCBI GI NO: 30682009 NR Description: metal transporter, putative (ZIP4)
  misc_feature (1)..(332): NCBI GI NO: 14582255 NR Description: ZIP-like zinc transporter [Thlaspi caerulescens]
MAAILVAGVLGVVLPLAGRKRRALRTDSAAFLAAKAFAAGVILATGFVHMLHDAEHALSSPCLPAAPWRRFPVPGFVAMAAALATLVLDFLATRFYEAKHRDEAARVKVAAAAALVATSSGSDEDITVVTVDEDERKAPLLQTHCHGHGHSHSHSHVHEPVQVEGSEGEVSAHVRSIVVSQILEMGIVSHSVIIGLSLGVSRSPCTIRPLVAALAFHQFFEGFALGGCIAQAQFKNLSAVLMASFFAITTPAGIAAGAGMTTFYNPNSPRALVVEGILDSVSAGILIYMSLVDLIAVDFLGGKMTGTLRQQVMAYIALFLGALSMSSLAIWA

SEQ ID NO: 29473 - DNA, 1547 bp, Zea mays subsp. mays
  misc_feature (1)..(1547): Ceres Seq. ID no. 12365695
ttcttggtttgctagagagaggaaaaacaaaaaaacaaaaaaaacagtctagatggctgctgctatagatctgtcaggggaggagctgatgagagcactcgagccttttatccgggatgcctctgctcacggatccagtccgctcctccacccgcaccagccacttagcccctcgtcgccgttctccttccaccaagctgtcgccgtcgccgccgcctcctcctacggaggaaactacccgttcgccgcgcccgacgaggcgggccagctgagcccttcccagatgcagtacatccaggcccgcctccacctgcagcgtcgccaggcgcagacctccgtgctgggcccgcgtgcccagcccatgaaggcgtcggcgtccgcggcccccgccccggcgcggccgcagaagctgtacccgcggcgtgcggcagcggcactggggcaagtgggtggcggagatccggctcccgcgcaaccgcacccggctctggctcggcaccttcgacaccgccgaggaggcggcgctggcctacgaccaggccgcctaccgcctccgcggcgacgcggcgcgcctcaacttccccgacaacgccgcctcccgcggcccgctccacgcctccgtcgacgccaagctccagagcctgtgccagagcatcgccgcgtccaagaagggcgccaagaagccagcctccgccgcagctgccgcgtcgtcgtccgcccccaccagcaactgctgctcctcgccgtcgtccgacgacgcgacctcgtcctgcctcgagtccgccaccgagtcctcgtgcccgtccccgtccacgtcgccgtccgcctcgcccgggccgacggtgccggagatgcagcagctggacttcagcgaggcgccgtgggacgaggccgccggcttcgcgctcaccaagtacccgtcgtacgagatcgactgggactccctcctcgccaattaatcgtcgccccctgttggctggctggctggctcccttcctacccacactgccgtcgtgcagctggaggagggttaaagaaggttaacggccgtcgcgcagatgggattttagacatcctgcgcgggcactagttggatcattagtgctaatccccgtccgtccgttcgttcgttcgttctgtgtagatgtccgtccgattcgtttggtccttgtcactggtgagtcagttgtagatctcgggttatttagggtttggttctccggaggaggagagaaccacaaccgacgggaagccggcgtttttgtgtccggcgttctccggcggtggccggtacgtgtcacactggtcagtgaccccaccccccccggccgttcaggtgtccgttgttctggtagctgtttcttgtgctagatggtgtgctgtgctctacaggttgtaaagagcagcacggtgtgatgtgaaggagatgcttgtcaagcagtagtactccgtatgtatgttgtaaaatcagctagctagctgtgtccaggagttgtaatttgatgaactgctactgttggtgctactattgtatggtttattgttgt

SEQ ID NO: 29474 - protein, 345 aa, Zea mays subsp. mays
  peptide (1)..(345): Ceres Seq. ID no. 12365696
  misc_feature (34)..(121): NCBI GI NO: 37572971 NR Description: AP2-domain DRE binding factor DBF1
MAAAIDLSGEELMRALEPFIRDASAHGSSPLLHPHQPLSPSSPFSFHQAVAVAAASSYGGNYPFAAPDEAGQLSPSQMQYIQARLHLQRRQAQTSVLGPRAQPMKASASAAPAPARPQKLYPRRAAAALGQVGGGDPAPAQPHPALARHLRHRRGGGAGLRPGRLPPPRRRGAPQLPRQRRLPRPAPRLRRRQAPEPVPEHRRVQEGRQEASLRRSCRVVVRPHQQLLLLAVVRRRDLVLPRVRHRVLVPVPVHVAVRLARADGAGDAAAGLQRGAVGRGRRLRAHQVPVVRDRLGLPPRQLIVAPCWLAGWLPSYPHCRRAAGGGLKKVNGRRADGILDILRGH

SEQ ID NO: 29475 - protein, 333 aa, Zea mays subsp. mays
  peptide (1)..(333): Ceres Seq. ID no. 12365697
  misc_feature (22)..(109): NCBI GI NO: 37572971 NR Description: AP2-domain DRE binding factor DBF1
MRALEPFIRDASAHGSSPLLHPHQPLSPSSPFSFHQAVAVAAASSYGGNYPFAAPDEAGQLSPSQMQYIQARLHLQRRQAQTSVLGPRAQPMKASASAAPAPARPQKLYPRRAAAALGQVGGGDPAPAQPHPALARHLRHRRGGGAGLRPGRLPPPRRRGAPQLPRQRRLPRPAPRLRRRQAPEPVPEHRRVQEGRQEASLRRSCRVVVRPHQQLLLLAVVRRRDLVLPRVRHRVLVPVPVHVAVRLARADGAGDAAAGLQRGAVGRGRRLRAHQVPVVRDRLGLPPRQLIVAPCWLAGWLPSYPHCRRAAGGGLKKVNGRRADGILDILRGH

SEQ ID NO: 29476 - protein, 268 aa, Zea mays subsp. mays
  peptide (1)..(268): Ceres Seq. ID no. 12365698
  misc_feature (1)..(44): NCBI GI NO: 37572971 NR Description: AP2-domain DRE binding factor DBF1
MQYIQARLHLQRRQAQTSVLGPRAQPMKASASAAPAPARPQKLYPRRAAAALGQVGGGDPAPAQPHPALARHLRHRRGGGAGLRPGRLPPPRRRGAPQLPRQRRLPRPAPRLRRRQAPEPVPEHRRVQEGRQEASLRRSCRVVVRPHQQLLLLAVVRRRDLVLPRVRHRVLVPVPVHVAVRLARADGAGDAAAGLQRGAVGRGRRLRAHQVPVVRDRLGLPPRQLIVAPCWLAGWLPSYPHCRRAAGGGLKKVNGRRADGILDILRGH

SEQ ID NO: 29477 - DNA, 1003 bp, Zea mays subsp. mays
  misc_feature (1)..(1003): Ceres Seq. ID no. 12407190
acactctcctctcctgtctatccactttccactccttcactgccctccgtctccctcccctcccccctttgctcgccatggccatggcgacctccaccttctccccgcgtcccgccagcctcaggcccctgcgggcgggcggcaagcccgtcggactcctccccttcccgcgccgcctcgcctgtgccaccgccgccggggaggcgccgcccgtggagcagcgggacaaggcggagccggcccccgccgcggcctccaacggggccgccgtcaagtacgaggccccgccgccgcccgcgccagcgccggtcccggccttccgggacgccaggtgggtcaacggcacctgggacctcgccaagttcgacaagggcagcggcgtcgactgggacgccgtcatcgacgccgaggccaggagaaggagatggctcgaagactatccggaggcgactaacacagacgaggctgtcgtcttcgacacttccattattccatggtgggcttggatgaaacgcttccaccttcccgaagccgagaagctaaatggtcgcgccgccatggtcggcttcttcatggcctacttcgtggacagcttgacgggcgcgggcctcgtcgaccagatgggcaacttcttctgcaagacgctgctgttcgccgccgtcgcaggcgtgctgctggtcaggaaaaacgaggacgtcgagtcgctgaagaagctcgtcgacgagaccacgttctatgacaggcagtggcaggcgacctggcaagatgactccgctgggggaccaaacaactagttcagagttggggtacaaaaaaattagcttatctatttcctcggccttcttgttttccctgtgtagtgagaacttttttttgtttttgtttttgacaaacgcaatgatctacgtcatgttgtaagattgtatgaaaaataattctgcagtttcagtttttttttaaaaaaaccgataatattcagacatggtaatttattcacatatcg

SEQ ID NO: 29478 - protein, 263 aa, Zea mays subsp. mays
  peptide (1)..(263): Ceres Seq. ID no. 12407191
  misc_feature (13)..(258): NCBI GI NO: 8978078 NR Description: Lil3 protein [Arabidopsis thaliana]
  misc_feature (13)..(258): NCBI GI NO: 30695110 NR Description: Lil3 protein [Arabidopsis thaliana]
  misc_feature (62)..(256): NCBI GI NO: 7485188 NR Description: hypothetical protein - Arabidopsis thaliana
  misc_feature (62)..(256): NCBI GI NO: 18414927 NR Description: Lil3 protein; protein id: At4g17600
  misc_feature (62)..(256): NCBI GI NO: 21555799 NR Description: Lil3 protein [Arabidopsis thaliana]
TLLSCLSTFHSFTALRLPPLPPLLAMAMATSTFSPRPASLRPLRAGGKPVGLLPFPRRLACATAAGEAPPVEQRDKAEPAPAAASNGAAVKYEAPPPPAPAPVPAFRDARWVNGTWDLAKFDKGSGVDWDAVIDAEARRRRWLEDYPEATNTDEAVVFDTSIIPWWAWMKRFHLPEAEKLNGRAAMVGFFMAYFVDSLTGAGLVDQMGNFFCKTLLFAAVAGVLLVRKNEDVESLKKLVDETTFYDRQWQATWQDDSAGGPNN

SEQ ID NO: 29479 - protein, 238 aa, Zea mays subsp. mays
  peptide (1)..(238): Ceres Seq. ID no. 12407192
  misc_feature (1)..(233): NCBI GI NO: 8978078 NR Description: Lil3 protein [Arabidopsis thaliana]
  misc_feature (1)..(233): NCBI GI NO: 30695110 NR Description: Lil3 protein [Arabidopsis thaliana]
  misc_feature (37)..(231): NCBI GI NO: 7485188 NR Description: hypothetical protein - Arabidopsis thaliana
  misc_feature (37)..(231): NCBI GI NO: 18414927 NR Description: Lil3 protein; protein id: At4g17600
  misc_feature (37)..(231): NCBI GI NO: 21555799 NR Description: Lil3 protein [Arabidopsis thaliana]
MAMATSTFSPRPASLRPLRAGGKPVGLLPFPRRLACATAAGEAPPVEQRDKAEPAPAAASNGAAVKYEAPPPPAPAPVPAFRDARWVNGTWDLAKFDKGSGVDWDAVIDAEARRRRWLEDYPEATNTDEAVVFDTSIIPWWAWMKRFHLPEAEKLNGRAAMVGFFMAYFVDSLTGAGLVDQMGNFFCKTLLFAAVAGVLLVRKNEDVESLKKLVDETTFYDRQWQATWQDDSAGGPNN

SEQ ID NO: 29480 - protein, 236 aa, Zea mays subsp. mays
  peptide (1)..(236): Ceres Seq. ID no. 12407193
  misc_feature (1)..(231): NCBI GI NO: 8978078 NR Description: Lil3 protein [Arabidopsis thaliana]
  misc_feature (1)..(231): NCBI GI NO: 30695110 NR Description: Lil3 protein [Arabidopsis thaliana]
  misc_feature (35)..(229): NCBI GI NO: 7485188 NR Description: hypothetical protein - Arabidopsis thaliana
  misc_feature (35)..(229): NCBI GI NO: 18414927 NR Description: Lil3 protein; protein id: At4g17600
  misc_feature (35)..(229): NCBI GI NO: 21555799 NR Description: Lil3 protein [Arabidopsis thaliana]
MATSTFSPRPASLRPLRAGGKPVGLLPFPRRLACATAAGEAPPVEQRDKAEPAPAAASNGAAVKYEAPPPPAPAPVPAFRDARWVNGTWDLAKFDKGSGVDWDAVIDAEARRRRWLEDYPEATNTDEAVVFDTSIIPWWAWMKRFHLPEAEKLNGRAAMVGFFMAYFVDSLTGAGLVDQMGNFFCKTLLFAAVAGVLLVRKNEDVESLKKLVDETTFYDRQWQATWQDDSAGGPNN

SEQ ID NO: 29481 - DNA, 1038 bp, Zea mays subsp. mays
  misc_feature (1)..(1038): Ceres Seq. ID no. 12402461
ctcagccccttccccggccattcgagcgccgccctgctcttgctcggctgcccttgcccactacggcctcttgatttctccctccattccgatatataagcgaaaaaaatccgataagccaagccaaacccaaacccaaccatggcgtgcatgccggctgtgtctgcccccgtcgtcctcgcgccggcaccggcgtcgacccgcacccacctctgctactcaacggaaatgcgacgcggcgcgctctccctccgtcccgcccgcgctatccccacgttgaggctcggcggccaccgcgacgcccgtggcgctgtcgtcgtccgcgccactgcggcagagggagccgtggagctgcaggccaaggtgacgagcaagtgcttcttcgacgtggaggtcggcggggagcctgcgggccgcattgtcatcgggctcttcggagaggtcgtacctaagaccatcgacaacttccgtgcgctctgcactggtgagaaagggtacggctacaagggctgctccttccaccggatcatcaaggactttatgattcaaggcggagacttccagcaaaacaatggtactggtgggagaagtatttatggtgaatgctttgatgatgaaaattttacactgaagcatgttggtcctggtgtgctaagcatggcaaatgctggccccaacacaaatggaagtcaatttttcatttgcactgtgaagacaccgtggttggacaaccgtcacgtcgtgtttggacatgtattagaggggatggacgtggtgaagcagcttgaatcgcaagagaccagcaggtccgatactcccaagcagccttgccgaatcgttaactgcggcgaggtccccctggacagctgagcgagcgaaatgctcttggtgagtttgaacctgaggtcttcccttacgttagagcgtcgacgcccatttgtgctagcatcattcagtcagttgagttatgtgtacgtgccgtgacggaagtttaattactcagatgtggacacattaccagttaatagcaacgaattg

SEQ ID NO: 29482 - protein, 242 aa, Zea mays subsp. mays
  peptide (1)..(242): Ceres Seq. ID no. 12402462
  misc_feature (1)..(241): NCBI GI NO: 34902534 NR Description: putative peptidyl-prolyl cis-trans isomerase
  misc_feature (13)..(242): NCBI GI NO: 15228674 NR Description: peptidylprolyl isomerase ROC4
  misc_feature (13)..(242): NCBI GI NO: 21555831 NR Description: peptidylprolyl isomerase ROC4
  misc_feature (13)..(242): NCBI GI NO: 11762200 NR Description: AT3g62030 [Arabidopsis thaliana]
  misc_feature (44)..(241): NCBI GI NO: 6014889 NR Description: Peptidyl-prolyl cis-trans isomerase
  misc_feature (1)..(240): NCBI GI NO: 37788312 NR Description: cyclophilin-like protein [Triticum aestivum]
  misc_feature (6)..(240): NCBI GI NO: 37788308 NR Description: cyclophilin-like protein [Triticum aestivum]
  misc_feature (65)..(240): NCBI GI NO: 15240008 NR Description: peptidyl-prolyl isomerase protein
  misc_feature (65)..(240): NCBI GI NO: 21593963 NR Description: peptidylprolyl isomerase-like protein
  misc_feature (70)..(240): NCBI GI NO: 9955556 NR Description: peptidylprolyl isomerase-like protein
MACMPAVSAPVVLAPAPASTRTHLCYSTEMRRGALSLRPARAIPTLRLGGHRDARGAVVVRATAAEGAVELQAKVTSKCFFDVEVGGEPAGRIVIGLFGEVVPKTIDNFRALCTGEKGYGYKGCSFHRIIKDFMIQGGDFQQNNGTGGRSIYGECFDDENFTLKHVGPGVLSMANAGPNTNGSQFFICTVKTPWLDNRHVVFGHVLEGMDVVKQLESQETSRSDTPKQPCRIVNCGEVPLDS

SEQ ID NO: 29483 - protein, 239 aa, Zea mays subsp. mays
  peptide (1)..(239): Ceres Seq. ID no. 12402463
  misc_feature (1)..(238): NCBI GI NO: 34902534 NR Description: putative peptidyl-prolyl cis-trans isomerase
  misc_feature (10)..(239): NCBI GI NO: 15228674 NR Description: peptidylprolyl isomerase ROC4
  misc_feature (10)..(239): NCBI GI NO: 21555831 NR Description: peptidylprolyl isomerase ROC4
  misc_feature (10)..(239): NCBI GI NO: 11762200 NR Description: AT3g62030 [Arabidopsis thaliana]
  misc_feature (41)..(238): NCBI GI NO: 6014889 NR Description: Peptidyl-prolyl cis-trans isomerase
  misc_feature (1)..(237): NCBI GI NO: 37788312 NR Description: cyclophilin-like protein [Triticum aestivum]
  misc_feature (3)..(237): NCBI GI NO: 37788308 NR Description: cyclophilin-like protein [Triticum aestivum]
  misc_feature (62)..(237): NCBI GI NO: 15240008 NR Description: peptidyl-prolyl isomerase protein
  misc_feature (62)..(237): NCBI GI NO: 21593963 NR Description: peptidylprolyl isomerase-like protein
  misc_feature (67)..(237): NCBI GI NO: 9955556 NR Description: peptidylprolyl isomerase-like protein
MPAVSAPVVLAPAPASTRTHLCYSTEMRRGALSLRPARAIPTLRLGGHRDARGAVVVRATAAEGAVELQAKVTSKCFFDVEVGGEPAGRIVIGLFGEVVPKTIDNFRALCTGEKGYGYKGCSFHRIIKDFMIQGGDFQQNNGTGGRSIYGECFDDENFTLKHVGPGVLSMANAGPNTNGSQFFICTVKTPWLDNRHVVFGHVLEGMDVVKQLESQETSRSDTPKQPCRIVNCGEVPLDS

SEQ ID NO: 29484 - protein, 213 aa, Zea mays subsp. mays
  peptide (1)..(213): Ceres Seq. ID no. 12402464
  misc_feature (1)..(212): NCBI GI NO: 34902534 NR Description: putative peptidyl-prolyl cis-trans isomerase
  misc_feature (1)..(213): NCBI GI NO: 15228674 NR Description: peptidylprolyl isomerase ROC4
  misc_feature (1)..(213): NCBI GI NO: 21555831 NR Description: peptidylprolyl isomerase ROC4
  misc_feature (1)..(213): NCBI GI NO: 11762200 NR Description: AT3g62030 [Arabidopsis thaliana]
  misc_feature (15)..(212): NCBI GI NO: 6014889 NR Description: Peptidyl-prolyl cis-trans isomerase
  misc_feature (1)..(211): NCBI GI NO: 37788312 NR Description: cyclophilin-like protein [Triticum aestivum]
  misc_feature (1)..(211): NCBI GI NO: 37788308 NR Description: cyclophilin-like protein [Triticum aestivum]
  misc_feature (36)..(211): NCBI GI NO: 15240008 NR Description: peptidyl-prolyl isomerase protein
  misc_feature (36)..(211): NCBI GI NO: 21593963 NR Description: peptidylprolyl isomerase-like protein
  misc_feature (41)..(211): NCBI GI NO: 9955556 NR Description: peptidylprolyl isomerase-like protein
MRRGALSLRPARAIPTLRLGGHRDARGAVVVRATAAEGAVELQAKVTSKCFFDVEVGGEPAGRIVIGLFGEVVPKTIDNFRALCTGEKGYGYKGCSFHRIIKDFMIQGGDFQQNNGTGGRSIYGECFDDENFTLKHVGPGVLSMANAGPNTNGSQFFICTVKTPWLDNRHVVFGHVLEGMDVVKQLESQETSRSDTPKQPCRIVNCGEVPLDS

SEQ ID NO: 29485 - DNA, 984 bp, Zea mays subsp. mays
  misc_feature (1)..(984): Ceres Seq. ID no. 12401112
catttgctccaagtcccaaatactagcaggcggcaggcggccaagaccggtgtccctcgacgacctgccgagtgccgaggcaagcaagacgcgaggaggctgtaagcctgccatcagcagcggcgatggcgggcgccgaggtgggagaagacaagtaccgctccttcatccacggcgagggcgagagggacaccgtgtggaggtacggcgccccgcccaactacgacgtggtcaacaagctcttcgaggaggagaggactcaggtgtggcccgagggctcgctggaggagaaggtgcagcggttgctcaagagctgggagatggagctggtgcacaaggtgcggcccgaggaccagaagaccgtcaactcggagaaatactctgccagcaccaacgggatgagcgctctgacccgggccgaggtgatggccatcggcggctacaacaacttcctgcgcaccaagctgcccccggagcaccgcatctacgacccggacagcgagaccgtggagtccgccatggccaccttcaccacggccttcccgcggggcttcgccatcgaggtgctcgacgtctacagcggcccgcccaggatcgccttcaagttccgccactggggctacatggaggggcccttcaagggccacccgccgcacggccagcgggtcgagctcttcggcgtctgcatcttccatgttgacgaagacatgaaggtggacaagtcagagtacttctacgagcgcggcaacttcctcgccggcttcttgagtgcccctgcccctgatggctcaggcggttgccccgtgatgcgcgggaactgaatgggcctgcaatgggacattggaagactaggcattggaacattgggattattagcattagcgatcccgaatccgcttttattacggtttaataattccatcatgtaacatgacacttgcatttgtgtttgaataaacatgtcgttgcttcgacatattagcg

SEQ ID NO: 29486 - protein, 232 aa, Zea mays subsp. mays
  peptide (1)..(232): Ceres Seq. ID no. 12401113
ICSKSQILAGGRRPRPVSLDDLPSAEASKTRGGCKPAISSGDGGRRGGRRQVPLLHPRRGREGHRVEVRRPAQLRRGQQALRGGEDSGVARGLAGGEGAAVAQELGDGAGAQGAARGPEDRQLGEILCQHQRDERSDPGRGDGHRRLQQLPAHQAAPGAPHLRPGQRDRGVRHGHLHHGLPAGLRHRGARRLQRPAQDRLQVPPLGLHGGALQGPPAARPAGRALRRLHLPC

SEQ ID NO: 29487 - protein, 231 aa, Zea mays subsp. mays
  peptide (1)..(231): Ceres Seq. ID no. 12401114
  misc_feature (1)..(231): NCBI GI NO: 34904656 NR Description: putative pathogenesis related protein
  misc_feature (1)..(230): NCBI GI NO: 1346809 NR Description: Pathogen-related protein
  misc_feature (1)..(231): NCBI GI NO: 34904652 NR Description: putative pathogenesis related protein
  misc_feature (1)..(144): NCBI GI NO: 100602 NR Description: infection-related protein - barley
  misc_feature (7)..(217): NCBI GI NO: 34910862 NR Description: putative pathogenesis related protein
  misc_feature (1)..(217): NCBI GI NO: 34910864 NR Description: putative pathogenesis related protein
  misc_feature (9)..(217): NCBI GI NO: 18412106 NR Description: expressed protein; protein id: At1g78780
  misc_feature (18)..(217): NCBI GI NO: 25372796 NR Description: hypothetical protein F9K20.18
  misc_feature (66)..(217): NCBI GI NO: 30699354 NR Description: expressed protein [Arabidopsis thaliana]
  misc_feature (22)..(226): NCBI GI NO: 17227713 NR Description: similar to pathogenesis related protein
MAGAEVGEDKYRSFIHGEGERDTVWRYGAPPNYDVVNKLFEEERTQVWPEGSLEEKVQRLLKSWEMELVHKVRPEDQKTVNSEKYSASTNGMSALTRAEVMAIGGYNNFLRTKLPPEHRIYDPDSETVESAMATFTTAFPRGFAIEVLDVYSGPPRIAFKFRHWGYMEGPFKGHPPHGQRVELFGVCIFHVDEDMKVDKSEYFYERGNFLAGFLSAPAPDGSGGCPVMRGN

SEQ ID NO: 29488 - protein, 166 aa, Zea mays subsp. mays
  peptide (1)..(166): Ceres Seq. ID no. 12401115
  misc_feature (1)..(166): NCBI GI NO: 34904656 NR Description: putative pathogenesis related protein
  misc_feature (1)..(165): NCBI GI NO: 1346809 NR Description: Pathogen-related protein
  misc_feature (1)..(166): NCBI GI NO: 34904652 NR Description: putative pathogenesis related protein
  misc_feature (1)..(79): NCBI GI NO: 100602 NR Description: infection-related protein - barley
  misc_feature (1)..(152): NCBI GI NO: 34910862 NR Description: putative pathogenesis related protein
  misc_feature (1)..(152): NCBI GI NO: 34910864 NR Description: putative pathogenesis related protein
  misc_feature (1)..(152): NCBI GI NO: 18412106 NR Description: expressed protein; protein id: At1g78780
  misc_feature (1)..(152): NCBI GI NO: 25372796 NR Description: hypothetical protein F9K20.18
  misc_feature (1)..(152): NCBI GI NO: 30699354 NR Description: expressed protein [Arabidopsis thaliana]
  misc_feature (1)..(161): NCBI GI NO: 17227713 NR Description: similar to pathogenesis related protein
MELVHKVRPEDQKTVNSEKYSASTNGMSALTRAEVMAIGGYNNFLRTKLPPEHRIYDPDSETVESAMATFTTAFPRGFAIEVLDVYSGPPRIAFKFRHWGYMEGPFKGHPPHGQRVELFGVCIFHVDEDMKVDKSEYFYERGNFLAGFLSAPAPDGSGGCPVMRGN

SEQ ID NO: 29489 - DNA, 881 bp, Zea mays subsp. mays
  misc_feature (1)..(881): Ceres Seq. ID no. 12341797
tctctctttcttccccagcaatgcaattccgcagacagacgcaggcggcaggcggcaggcggcggcgcaccgcaccgcttcttcctcttctatctctcatctacagccttcgctgcgccgccatggccaccacccgcttgctgccgctgctccgacgccgcctcgccgccgcaatcgccggatcgcctgctccctactccctccgaggaccctcatttcctgcaccagcagctgcagggctaaggtccctcctaacagttgctggagcgagcgatactgcaacagaaccccaggaccaacagcattccgaaacaactcccccgccggcttctgtcccgacaccggagtccggtctcaaagtcagggacacctccaacctgaagatctcaccaaggcatgacctcgccatgatctttacgtgcaaggtgtgcgagaccaggtccatgaagatggccagcagggactcgtacgagaacggagtcgtggtcgtgcggtgcggtggctgcaacaacctccacctcatggcggacaggcttggctggtttggggagccagggagcatcgaggacttcctagcgacgcaaggggaggaggtgaagaaaggttcgacagatactatcagctttactttggacgacttggctgggtctcaggtcagttctaaggggccttccgaacaaaattaatatgatagtgtttggtccagtaagaacctgtagaagcctctctttactataaagaagatgcgcgtgtcacctgtgtgttgaagaaaaaaacgcctctagaagcctaccttaactgttgcacctgtagttctgcttaacttcatggcttttcatgtgtagctttcgagcccatcaaatatgcgatgttgttattct

SEQ ID NO: 29490 - protein, 227 aa, Zea mays subsp. mays
  peptide (1)..(227): Ceres Seq. ID no. 12341798
  misc_feature (134)..(198): Pfam Name: Pfam Description:  DNL zinc finger
  misc_feature (82)..(221): NCBI GI NO: 29028810 NR Description: At3g54830 [Arabidopsis thaliana]
  misc_feature (134)..(213): NCBI GI NO: 23485607 NR Description: Drosophila melanogaster CG12379 gene product
  misc_feature (127)..(200): NCBI GI NO: 31212801 NR Description: ENSANGP00000021116 [Anopheles gambiae]
  misc_feature (136)..(204): NCBI GI NO: 12835133 NR Description: unnamed protein product [Mus musculus]
  misc_feature (134)..(198): NCBI GI NO: 24642261 NR Description: CG12379-PA [Drosophila melanogaster]
  misc_feature (134)..(203): NCBI GI NO: 17553552 NR Description: Protein required for cell viability like
  misc_feature (136)..(200): NCBI GI NO: 34853079 NR Description: similar to CG12379-PA [Rattus norvegicus]
  misc_feature (134)..(213): NCBI GI NO: 23509418 NR Description: hypothetical protein [Plasmodium falciparum 3D7]
  misc_feature (122)..(207): NCBI GI NO: 19113862 NR Description: hypothetical protein [Schizosaccharomyces pombe]
  misc_feature (39)..(183): NCBI GI NO: 21912576 NR Description: hypothetical protein [Taenia solium]
SLSSPAMQFRRQTQAAGGRRRRTAPLLPLLSLIYSLRCAAMATTRLLPLLRRRLAAAIAGSPAPYSLRGPSFPAPAAAGLRSLLTVAGASDTATEPQDQQHSETTPPPASVPTPESGLKVRDTSNLKISPRHDLAMIFTCKVCETRSMKMASRDSYENGVVVVRCGGCNNLHLMADRLGWFGEPGSIEDFLATQGEEVKKGSTDTISFTLDDLAGSQVSSKGPSEQN

SEQ ID NO: 29491 - protein, 221 aa, Zea mays subsp. mays
  peptide (1)..(221): Ceres Seq. ID no. 12341799
  misc_feature (128)..(192): Pfam Name: Pfam Description:  DNL zinc finger
  misc_feature (76)..(215): NCBI GI NO: 29028810 NR Description: At3g54830 [Arabidopsis thaliana]
  misc_feature (128)..(207): NCBI GI NO: 23485607 NR Description: Drosophila melanogaster CG12379 gene product
  misc_feature (121)..(194): NCBI GI NO: 31212801 NR Description: ENSANGP00000021116 [Anopheles gambiae]
  misc_feature (130)..(198): NCBI GI NO: 12835133 NR Description: unnamed protein product [Mus musculus]
  misc_feature (128)..(192): NCBI GI NO: 24642261 NR Description: CG12379-PA [Drosophila melanogaster]
  misc_feature (128)..(197): NCBI GI NO: 17553552 NR Description: Protein required for cell viability like
  misc_feature (130)..(194): NCBI GI NO: 34853079 NR Description: similar to CG12379-PA [Rattus norvegicus]
  misc_feature (128)..(207): NCBI GI NO: 23509418 NR Description: hypothetical protein [Plasmodium falciparum 3D7]
  misc_feature (116)..(201): NCBI GI NO: 19113862 NR Description: hypothetical protein [Schizosaccharomyces pombe]
  misc_feature (33)..(177): NCBI GI NO: 21912576 NR Description: hypothetical protein [Taenia solium]
MQFRRQTQAAGGRRRRTAPLLPLLSLIYSLRCAAMATTRLLPLLRRRLAAAIAGSPAPYSLRGPSFPAPAAAGLRSLLTVAGASDTATEPQDQQHSETTPPPASVPTPESGLKVRDTSNLKISPRHDLAMIFTCKVCETRSMKMASRDSYENGVVVVRCGGCNNLHLMADRLGWFGEPGSIEDFLATQGEEVKKGSTDTISFTLDDLAGSQVSSKGPSEQN

SEQ ID NO: 29492 - protein, 187 aa, Zea mays subsp. mays
  peptide (1)..(187): Ceres Seq. ID no. 12341800
  misc_feature (94)..(158): Pfam Name: Pfam Description:  DNL zinc finger
  misc_feature (42)..(181): NCBI GI NO: 29028810 NR Description: At3g54830 [Arabidopsis thaliana]
  misc_feature (94)..(173): NCBI GI NO: 23485607 NR Description: Drosophila melanogaster CG12379 gene product
  misc_feature (87)..(160): NCBI GI NO: 31212801 NR Description: ENSANGP00000021116 [Anopheles gambiae]
  misc_feature (96)..(164): NCBI GI NO: 12835133 NR Description: unnamed protein product [Mus musculus]
  misc_feature (94)..(158): NCBI GI NO: 24642261 NR Description: CG12379-PA [Drosophila melanogaster]
  misc_feature (94)..(163): NCBI GI NO: 17553552 NR Description: Protein required for cell viability like
  misc_feature (96)..(160): NCBI GI NO: 34853079 NR Description: similar to CG12379-PA [Rattus norvegicus]
  misc_feature (94)..(173): NCBI GI NO: 23509418 NR Description: hypothetical protein [Plasmodium falciparum 3D7]
  misc_feature (82)..(167): NCBI GI NO: 19113862 NR Description: hypothetical protein [Schizosaccharomyces pombe]
  misc_feature (1)..(143): NCBI GI NO: 21912576 NR Description: hypothetical protein [Taenia solium]
MATTRLLPLLRRRLAAAIAGSPAPYSLRGPSFPAPAAAGLRSLLTVAGASDTATEPQDQQHSETTPPPASVPTPESGLKVRDTSNLKISPRHDLAMIFTCKVCETRSMKMASRDSYENGVVVVRCGGCNNLHLMADRLGWFGEPGSIEDFLATQGEEVKKGSTDTISFTLDDLAGSQVSSKGPSEQN

SEQ ID NO: 29493 - DNA, 1207 bp, Zea mays subsp. mays
  misc_feature (1)..(1207): Ceres Seq. ID no. 13492697
aaccatttggacaccgatccatccatccatccagccccgtacgtgtctcgctggccgtccgtatatatagagagaggcatcggagattggccgccacgttgccatcgcgcgcggcgcccgccggccaaggccaaccatgctggcgagggctcctccgccgcggcccgtgctccagcggcgtttgcatcgcccgcgcacatccaagagccgccgccgtcgcggccaggccggggacgacgaggacgacgacgacggtcgcggcggcggcggcagaggccgcttctaacgggtcagcggcggcggccgtcgcagggatcagcagcagcagcagcgcgctggtgacctcgaccgtcgggaaatcgacgaacatcctgtggcatgagtgcgccatcgggcagaaggagcgacagggtctgctgaaccagaagggctgcgtcgtgtggatcactggcctaagcggttcagggaaaagcacgctcgcgtgcgcgctgagccgcgagctgcacggcagaggccacctcacgtacgtcctcgacggcgacaacctcaggcacgggctgaacagggacctcagcttcggagcagaggaccgcgccgagaacatccgcagagtaggggaagtagcgaagctgttcgccgacgctggcctcgtctgcatcgccagcctcatatcgccctacagaagcgaccgaagcgcgtgtcgcgatctgctgcccaagcactcgtttatcgaggtgttcctggacgtgccgcttcaagtgtgcgaagccagggaccccaaaggcctctacaagctcgcacgcgccggcaaaatcaaagggttcaccggcatcgacgatccttacgaaccgccgtcggactgtgagatagtgatccagtgtaaagtcggcgactgcccttcgcctgaatcgatggctggtcacgttgtgtcgtaccttgagacgaatggtttcctccaggactagacatggaatgcgatcgatgcgtctgatgtgtatatatgtagcagcagccggagcggcattgccaaggctgtgtaatctcatggctgtctttctctttaagaccaaaacaaacaagagatggcagtgtaaaaaggaaaaaaaaaactgcgtctgacagagtcgctgaatcaaccatgcttctgataaaagctattgtttgtaggtacggcgttgattcttacgacatttatgacaatgctttc

SEQ ID NO: 29494 - protein, 320 aa, Zea mays subsp. mays
  peptide (1)..(320): Ceres Seq. ID no. 13492698
  misc_feature (142)..(296): Pfam Name: Pfam Description:  Adenylylsulphate kinase
  misc_feature (115)..(320): NCBI GI NO: 15228666 NR Description: adenylylsulfate kinase -related
  misc_feature (64)..(320): NCBI GI NO: 34393551 NR Description: putative adenosine-5'-phosphosulfate kinase
  misc_feature (112)..(319): NCBI GI NO: 7387809 NR Description: Adenylylsulfate kinase, chloroplast precursor
  misc_feature (115)..(319): NCBI GI NO: 15225999 NR Description: adenosine phosphosulfate kinase -related
  misc_feature (115)..(319): NCBI GI NO: 21553403 NR Description: putative adenosine phosphosulfate kinase
  misc_feature (103)..(320): NCBI GI NO: 6563285 NR Description: adenosine-5'-phosphosulfate kinase [Zea mays]
  misc_feature (107)..(319): NCBI GI NO: 9757873 NR Description: adenylylsulfate kinase-like protein
  misc_feature (107)..(319): NCBI GI NO: 18425199 NR Description: adenylylsulfate kinase-related protein
  misc_feature (107)..(319): NCBI GI NO: 21537248 NR Description: adenylylsulfate kinase-like protein
  misc_feature (119)..(319): NCBI GI NO: 15236087 NR Description: adenosine-5-phosphosulfate-kinase
PFGHRSIHPSSPVRVSLAVRIYRERHRRLAATLPSRAAPAGQGQPCWRGLLRRGPCSSGVCIARAHPRAAAVAARPGTTRTTTTVAAAAAEAASNGSAAAAVAGISSSSSALVTSTVGKSTNILWHECAIGQKERQGLLNQKGCVVWITGLSGSGKSTLACALSRELHGRGHLTYVLDGDNLRHGLNRDLSFGAEDRAENIRRVGEVAKLFADAGLVCIASLISPYRSDRSACRDLLPKHSFIEVFLDVPLQVCEARDPKGLYKLARAGKIKGFTGIDDPYEPPSDCEIVIQCKVGDCPSPESMAGHVVSYLETNGFLQD

SEQ ID NO: 29495 - DNA, 1047 bp, Zea mays subsp. mays
  misc_feature (1)..(1047): Ceres Seq. ID no. 12343255
ctaatcgaaaaaccctatgttcatgccaccatggaagggcttcgtattggagcaccgattatgcaggtttatcatgagaaatcttttatcttacctgatgtttcaagggtgcttgcttgcctttatgagaaggatgtcaagtttgagactcacacagcctcatacaggagcctactcggattgcaggcatcatctcatgctccagttccattctatgaaggccctacttttctagaagaatccagagaaatctgccgttatatagcagaaaagtatgaaaatcaaggatatccgttcctccttggaaaggatgcccttgagagggcttcaattgaacaatggctccacaacgaggagcatgctttcaaccctccgagccgggccttgttctttcatttggcctttcccctgggtgaaggagaagatgatgatattgatgttcatacaaggaagctagaagaggttctggaagtttatgagcaaaggctcagtgacagcgaattccttgttggaaacaagttcactcttgccgaccttgttcacctgccaaattcccactatatcaaagcatctaacaagtttctttacctttatgattcgaggaaaaatgtaaggaggtggtgggatgctatttctgaccggagttcttggaagaaagtgctgaggtatatgaagagcgtggaggagaagaacaaacaagaagaactcaagaagcagcagcagcagcaggaagaggctcctagaacctccaccgacccaactcgggtagactcgagaaagcagagcagaacagagcctcggacaatattggttcctcctgctgataacgagtcatcagcttcgatagttcctcgaacaaagaagcctcttcctggtgatcacttagtgtctactcaacaaattgatggtgttggtatgccagccacaaattgatggtgatggtcgtcttagtggtgtttgtcttgtcttttattgtttggttctttaacaagagttatatttttaccttctgaccaaagagttgtttaacaggatagtcattgtacg

SEQ ID NO: 29496 - protein, 310 aa, Zea mays subsp. mays
  peptide (1)..(310): Ceres Seq. ID no. 12343256
  misc_feature (11)..(310): NCBI GI NO: 11385483 NR Description: glutathione S-transferase GST 16 [Zea mays]
  misc_feature (11)..(295): NCBI GI NO: 32490475 NR Description: putative protein kinase
  misc_feature (33)..(135): NCBI GI NO: 37536564 NR Description: putative glutathione S-transferase
  misc_feature (149)..(220): NCBI GI NO: 37536564 NR Description: putative glutathione S-transferase
  misc_feature (33)..(161): NCBI GI NO: 11385479 NR Description: glutathione S-transferase GST 14 [Zea mays]
  misc_feature (150)..(220): NCBI GI NO: 11385479 NR Description: glutathione S-transferase GST 14 [Zea mays]
  misc_feature (33)..(225): NCBI GI NO: 11385469 NR Description: glutathione S-transferase GST 9 [Zea mays]
  misc_feature (150)..(276): NCBI GI NO: 22758271 NR Description: Putative glutathione S-transferase
  misc_feature (33)..(135): NCBI GI NO: 22758271 NR Description: Putative glutathione S-transferase
  misc_feature (33)..(225): NCBI GI NO: 11385475 NR Description: glutathione S-transferase GST 12 [Zea mays]
LIEKPYVHATMEGLRIGAPIMQVYHEKSFILPDVSRVLACLYEKDVKFETHTASYRSLLGLQASSHAPVPFYEGPTFLEESREICRYIAEKYENQGYPFLLGKDALERASIEQWLHNEEHAFNPPSRALFFHLAFPLGEGEDDDIDVHTRKLEEVLEVYEQRLSDSEFLVGNKFTLADLVHLPNSHYIKASNKFLYLYDSRKNVRRWWDAISDRSSWKKVLRYMKSVEEKNKQEELKKQQQQQEEAPRTSTDPTRVDSRKQSRTEPRTILVPPADNESSASIVPRTKKPLPGDHLVSTQQIDGVGMPATN

SEQ ID NO: 29497 - protein, 300 aa, Zea mays subsp. mays
  peptide (1)..(300): Ceres Seq. ID no. 12343257
  misc_feature (1)..(300): NCBI GI NO: 11385483 NR Description: glutathione S-transferase GST 16 [Zea mays]
  misc_feature (1)..(285): NCBI GI NO: 32490475 NR Description: putative protein kinase
  misc_feature (23)..(125): NCBI GI NO: 37536564 NR Description: putative glutathione S-transferase
  misc_feature (139)..(210): NCBI GI NO: 37536564 NR Description: putative glutathione S-transferase
  misc_feature (23)..(151): NCBI GI NO: 11385479 NR Description: glutathione S-transferase GST 14 [Zea mays]
  misc_feature (140)..(210): NCBI GI NO: 11385479 NR Description: glutathione S-transferase GST 14 [Zea mays]
  misc_feature (23)..(215): NCBI GI NO: 11385469 NR Description: glutathione S-transferase GST 9 [Zea mays]
  misc_feature (140)..(266): NCBI GI NO: 22758271 NR Description: Putative glutathione S-transferase
  misc_feature (23)..(125): NCBI GI NO: 22758271 NR Description: Putative glutathione S-transferase
  misc_feature (23)..(215): NCBI GI NO: 11385475 NR Description: glutathione S-transferase GST 12 [Zea mays]
MEGLRIGAPIMQVYHEKSFILPDVSRVLACLYEKDVKFETHTASYRSLLGLQASSHAPVPFYEGPTFLEESREICRYIAEKYENQGYPFLLGKDALERASIEQWLHNEEHAFNPPSRALFFHLAFPLGEGEDDDIDVHTRKLEEVLEVYEQRLSDSEFLVGNKFTLADLVHLPNSHYIKASNKFLYLYDSRKNVRRWWDAISDRSSWKKVLRYMKSVEEKNKQEELKKQQQQQEEAPRTSTDPTRVDSRKQSRTEPRTILVPPADNESSASIVPRTKKPLPGDHLVSTQQIDGVGMPATN

SEQ ID NO: 29498 - protein, 290 aa, Zea mays subsp. mays
  peptide (1)..(290): Ceres Seq. ID no. 12343258
  misc_feature (1)..(290): NCBI GI NO: 11385483 NR Description: glutathione S-transferase GST 16 [Zea mays]
  misc_feature (1)..(275): NCBI GI NO: 32490475 NR Description: putative protein kinase
  misc_feature (13)..(115): NCBI GI NO: 37536564 NR Description: putative glutathione S-transferase
  misc_feature (129)..(200): NCBI GI NO: 37536564 NR Description: putative glutathione S-transferase
  misc_feature (13)..(141): NCBI GI NO: 11385479 NR Description: glutathione S-transferase GST 14 [Zea mays]
  misc_feature (130)..(200): NCBI GI NO: 11385479 NR Description: glutathione S-transferase GST 14 [Zea mays]
  misc_feature (13)..(205): NCBI GI NO: 11385469 NR Description: glutathione S-transferase GST 9 [Zea mays]
  misc_feature (130)..(256): NCBI GI NO: 22758271 NR Description: Putative glutathione S-transferase
  misc_feature (13)..(115): NCBI GI NO: 22758271 NR Description: Putative glutathione S-transferase
  misc_feature (13)..(205): NCBI GI NO: 11385475 NR Description: glutathione S-transferase GST 12 [Zea mays]
MQVYHEKSFILPDVSRVLACLYEKDVKFETHTASYRSLLGLQASSHAPVPFYEGPTFLEESREICRYIAEKYENQGYPFLLGKDALERASIEQWLHNEEHAFNPPSRALFFHLAFPLGEGEDDDIDVHTRKLEEVLEVYEQRLSDSEFLVGNKFTLADLVHLPNSHYIKASNKFLYLYDSRKNVRRWWDAISDRSSWKKVLRYMKSVEEKNKQEELKKQQQQQEEAPRTSTDPTRVDSRKQSRTEPRTILVPPADNESSASIVPRTKKPLPGDHLVSTQQIDGVGMPATN

SEQ ID NO: 29499 - DNA, 1738 bp, Zea mays subsp. mays
  misc_feature (1)..(1738): Ceres Seq. ID no. 12413950
gcacgagaccattacctagaacatcctaatcgaaaaaaacccctcacactcccatccagccgccaccaggtgcagagtctttcgtcatctcttctccggcgaagaacccccagtcgcccaccagatcacttgttaaactttgttgaggggtgatggcggtttctttcgcaaacctcaactccgaggcagggcttaaaaagcttgatgagtaccttctcactcgcagctacatcactggctaccaagcttccaaggatgaggaggaaatgggtgacaaggaggaagaagcggagctggatgggagaggagggaatggtgtggaggatgaattcctgaaaatagatgaattgacggagttcctggagaagggtgaagaagaggagtatggtgatggagccaaacggagagagaagtcagtgaaaaactggatggttgagagtgacaatgaggatgaagatgaggatcaattggatttagaagattttgaggatgatgacgaggatggtgaagcaggcggtggagatattctgtataaagatttttttgagagtggacacaacaagcaagctaagaagagagatggttccacaaagaaagttcaattcaaggatgaagcacatgaagttgaactccatgacagtgagaatgatgatggaaatgatgaacaagaacatggtctctcaactcacgaaaaggagcgtctgaagatgcgtactaaaatagagcaaatggagaaagctaatcttgaacccagcacgtggaccatgcagggagaggttactgcttctaggaggcccaaaaacagtgccctagaagtggaccttgattttgagcacaatgtaagacctgcccctgtaataaccgaggaagtgacagcttcccttgaagaaatgataaagaaaagaatcgcagagagtcattttgatgatgttgagaagccgtctctcttgccatctaaagctccaaaggagcacaaggaactggatgaaactaagagcaagaagggtcttgctgaactgtatgaggatgactatgcacaaaaagcaggcattgcacctgccccactttctatttcagatgaactaaaggaagaggcaaatactttatttaagaggatatgtttgaaattggatgcgctatcgcatttccactttgctccaaagccagtcattgaggatatgtctgtgcaagcaaatgtgcctgctttagccatggaagagattgcacctgtagctgtttcggatgctgcaatgcttgcccctgaagagatctttgaaggaaaaggtgatgttaaggaagagggggaacttacacaggctgagcgcaagagaagaagagctaacaagaaaaggagatatgcagcatcccataaggagaggacagcgccagccaagttgcagaaagattaaactcaatgtttttttctcactagtttctaaatggtacaagagcgataaactggcaatacatattttccaaattttgtattgtaccctctgctagtagcttttacatgaacagtaaaatgtggccatttatatttctacagaagcacacaagttcgagagttttgatttgctgaagtgcaattttgagagtgcaaaaaaagacttgtctgttgaaccctaggtatcggtagaaacatcatcctacgacctaaccgacctaaccgatggttatggttatgagtataattttctttccagctattgcaattgaagtcggtcatattcaatct

SEQ ID NO: 29500 - protein, 418 aa, Zea mays subsp. mays
  peptide (1)..(418): Ceres Seq. ID no. 12413951
  misc_feature (31)..(404): Pfam Name: Pfam Description:  Mpp10 protein
  misc_feature (31)..(404): NCBI GI NO: 18425086 NR Description: expressed protein; protein id: At5g66540
  misc_feature (38)..(415): NCBI GI NO: 29351667 NR Description: similar to U3 small nucleolar ribonucleoproteinprotein
  misc_feature (38)..(415): NCBI GI NO: 34856326 NR Description: similar to U3 small nucleolar ribonucleoproteinprotein MPP10
  misc_feature (41)..(415): NCBI GI NO: 2230873 NR Description: M phase phosphoprotein 10 [Homo sapiens]
  misc_feature (26)..(418): NCBI GI NO: 28175284 NR Description: Unknown (protein for IMAGE:5543289)
  misc_feature (95)..(405): NCBI GI NO: 6322461 NR Description: part of small
  misc_feature (14)..(409): NCBI GI NO: 19920954 NR Description: CG13097-PA [Drosophila melanogaster]
  misc_feature (5)..(409): NCBI GI NO: 19114546 NR Description: putative component of the U3 small nucleolarribonucleoprotein
  misc_feature (193)..(415): NCBI GI NO: 21312690 NR Description: RIKEN cDNA 2810453H10 [Mus musculus]
  misc_feature (13)..(390): NCBI GI NO: 40740848 NR Description: hypothetical protein AN4298.2
MAVSFANLNSEAGLKKLDEYLLTRSYITGYQASKDEEEMGDKEEEAELDGRGGNGVEDEFLKIDELTEFLEKGEEEEYGDGAKRREKSVKNWMVESDNEDEDEDQLDLEDFEDDDEDGEAGGGDILYKDFFESGHNKQAKKRDGSTKKVQFKDEAHEVELHDSENDDGNDEQEHGLSTHEKERLKMRTKIEQMEKANLEPSTWTMQGEVTASRRPKNSALEVDLDFEHNVRPAPVITEEVTASLEEMIKKRIAESHFDDVEKPSLLPSKAPKEHKELDETKSKKGLAELYEDDYAQKAGIAPAPLSISDELKEEANTLFKRICLKLDALSHFHFAPKPVIEDMSVQANVPALAMEEIAPVAVSDAAMLAPEEIFEGKGDVKEEGELTQAERKRRRANKKRRYAASHKERTAPAKLQKD

SEQ ID NO: 29501 - protein, 380 aa, Zea mays subsp. mays
  peptide (1)..(380): Ceres Seq. ID no. 12413952
  misc_feature (1)..(366): Pfam Name: Pfam Description:  Mpp10 protein
  misc_feature (1)..(366): NCBI GI NO: 18425086 NR Description: expressed protein; protein id: At5g66540
  misc_feature (1)..(377): NCBI GI NO: 29351667 NR Description: similar to U3 small nucleolar ribonucleoproteinprotein
  misc_feature (1)..(377): NCBI GI NO: 34856326 NR Description: similar to U3 small nucleolar ribonucleoproteinprotein MPP10
  misc_feature (3)..(377): NCBI GI NO: 2230873 NR Description: M phase phosphoprotein 10 [Homo sapiens]
  misc_feature (1)..(380): NCBI GI NO: 28175284 NR Description: Unknown (protein for IMAGE:5543289)
  misc_feature (57)..(367): NCBI GI NO: 6322461 NR Description: part of small
  misc_feature (1)..(371): NCBI GI NO: 19920954 NR Description: CG13097-PA [Drosophila melanogaster]
  misc_feature (1)..(371): NCBI GI NO: 19114546 NR Description: putative component of the U3 small nucleolarribonucleoprotein
  misc_feature (155)..(377): NCBI GI NO: 21312690 NR Description: RIKEN cDNA 2810453H10 [Mus musculus]
  misc_feature (1)..(352): NCBI GI NO: 40740848 NR Description: hypothetical protein AN4298.2
MGDKEEEAELDGRGGNGVEDEFLKIDELTEFLEKGEEEEYGDGAKRREKSVKNWMVESDNEDEDEDQLDLEDFEDDDEDGEAGGGDILYKDFFESGHNKQAKKRDGSTKKVQFKDEAHEVELHDSENDDGNDEQEHGLSTHEKERLKMRTKIEQMEKANLEPSTWTMQGEVTASRRPKNSALEVDLDFEHNVRPAPVITEEVTASLEEMIKKRIAESHFDDVEKPSLLPSKAPKEHKELDETKSKKGLAELYEDDYAQKAGIAPAPLSISDELKEEANTLFKRICLKLDALSHFHFAPKPVIEDMSVQANVPALAMEEIAPVAVSDAAMLAPEEIFEGKGDVKEEGELTQAERKRRRANKKRRYAASHKERTAPAKLQKD

SEQ ID NO: 29502 - protein, 326 aa, Zea mays subsp. mays
  peptide (1)..(326): Ceres Seq. ID no. 12413953
  misc_feature (1)..(312): Pfam Name: Pfam Description:  Mpp10 protein
  misc_feature (1)..(312): NCBI GI NO: 18425086 NR Description: expressed protein; protein id: At5g66540
  misc_feature (1)..(323): NCBI GI NO: 29351667 NR Description: similar to U3 small nucleolar ribonucleoproteinprotein
  misc_feature (1)..(323): NCBI GI NO: 34856326 NR Description: similar to U3 small nucleolar ribonucleoproteinprotein MPP10
  misc_feature (1)..(323): NCBI GI NO: 2230873 NR Description: M phase phosphoprotein 10 [Homo sapiens]
  misc_feature (1)..(326): NCBI GI NO: 28175284 NR Description: Unknown (protein for IMAGE:5543289)
  misc_feature (3)..(313): NCBI GI NO: 6322461 NR Description: part of small
  misc_feature (1)..(317): NCBI GI NO: 19920954 NR Description: CG13097-PA [Drosophila melanogaster]
  misc_feature (1)..(317): NCBI GI NO: 19114546 NR Description: putative component of the U3 small nucleolarribonucleoprotein
  misc_feature (101)..(323): NCBI GI NO: 21312690 NR Description: RIKEN cDNA 2810453H10 [Mus musculus]
  misc_feature (1)..(298): NCBI GI NO: 40740848 NR Description: hypothetical protein AN4298.2
MVESDNEDEDEDQLDLEDFEDDDEDGEAGGGDILYKDFFESGHNKQAKKRDGSTKKVQFKDEAHEVELHDSENDDGNDEQEHGLSTHEKERLKMRTKIEQMEKANLEPSTWTMQGEVTASRRPKNSALEVDLDFEHNVRPAPVITEEVTASLEEMIKKRIAESHFDDVEKPSLLPSKAPKEHKELDETKSKKGLAELYEDDYAQKAGIAPAPLSISDELKEEANTLFKRICLKLDALSHFHFAPKPVIEDMSVQANVPALAMEEIAPVAVSDAAMLAPEEIFEGKGDVKEEGELTQAERKRRRANKKRRYAASHKERTAPAKLQKD

SEQ ID NO: 29503 - DNA, 1443 bp, Zea mays subsp. mays
  misc_feature (1)..(1443): Ceres Seq. ID no. 12373180
agcattctagttctactgctgatcttctgcatggccatggtgaggaacccaagagaccttgaaacatactaggagtactagcagtagaggatttaaacctatcttggagtttgcaactggtatcttcttgcaagatcccaaggccaccgtaagatttgttgcagcgtgagacaggagctgcggctgcggaggaagtgagcaaaagcatggatctttccggcacgcagggcgagctgccgatggcaacaatgcacgccggcgggtcgccgtacctggggctgcaccacgggcacccacagcagcacaaccatggcgcgaacggccggcacatgtcgccgccggatgtggtggcggaggaggccaagaaccggcagctggcggtggtgcccgtgggcacaggaggcggaggcggggcaggggtgaggtaccgcgagtgcctgaagaaccacgcggctgccatcggcgggagcgcgacggacgggtgcggcgagttcatgcccgcgggcgaggaggggtcgctggacgcgctccggtgctcggcgtgcgggtgccaccgcaacttccaccgcaaggagccgccgggcggcgacgggcggcagctgtacgggcaccaccaccaccacccgctgagcccgctggccgcggtgcacccccaccatcaccgggggctgctggtggcggcgcttcccccggcgccgacgcgcatggtgatgccgctgagcgccgccatgcaccatcaccagcagccgccgcagcagcaccacagctcggcgtcagcggactccgacgacgcacacgtgccaggggtgcgcgggggggaggtgcagcagcagcagcaggcaccggcacggaagcggttccggaccaagttcaccgcggagcagaaggcccggatgctggggttcgcggaggacgccgggtggcggctgcagaagctggacgaggcggcggtgcagcgcttctgccaggaggtcggcgtgaagcggcgcgtgctcaaggtgtggatgcacaacaacaagcacaccctggcgcggcgcggccacgccgggctccccggcgacccggagctgctggggccgcacgacggccagctcggcatgccgctcccggagccggcggcggagcccgcagttgctgctgcggctgcggctggacttggagtgaccgaccaagccatgtctttcgggactggacgacattgatcaagagagtctaatgctgactgaatcagccttgcggcatagggaagctgttttctttgttaatctgctgctgatctcatcaatctagccgtagctttagctgcatttgcattccactgttccatccatcctagctatccatcaaccacaaactgatgatgcggagtctccatggatttctattccttgttgatttctgtagctgctctccccgctcttgactttaattttttagtgctcg

SEQ ID NO: 29504 - protein, 331 aa, Zea mays subsp. mays
  peptide (1)..(331): Ceres Seq. ID no. 12373181
  misc_feature (72)..(126): Pfam Name: Pfam Description:  ZF-HD protein dimerisation region
  misc_feature (65)..(277): NCBI GI NO: 13374061 NR Description: ZF-HD homeobox protein [Flaveria bidentis]
  misc_feature (62)..(166): NCBI GI NO: 15233925 NR Description: putative protein; protein id: At4g24660
  misc_feature (178)..(277): NCBI GI NO: 15233925 NR Description: putative protein; protein id: At4g24660
  misc_feature (72)..(282): NCBI GI NO: 15223757 NR Description: hypothetical protein; protein id: At1g14440
  misc_feature (72)..(279): NCBI GI NO: 15226993 NR Description: hypothetical protein; protein id: At2g02540
  misc_feature (72)..(279): NCBI GI NO: 20148768 NR Description: hypothetical protein At2g02540/T822.16
  misc_feature (66)..(287): NCBI GI NO: 5091602 NR Description: 10A19I.6 [Oryza sativa]
  misc_feature (150)..(277): NCBI GI NO: 13277218 NR Description: ZF-HD homeobox protein [Flaveria bidentis]
  misc_feature (71)..(149): NCBI GI NO: 13277218 NR Description: ZF-HD homeobox protein [Flaveria bidentis]
  misc_feature (74)..(281): NCBI GI NO: 18421904 NR Description: putative protein; protein id: At5g39760
MDLSGTQGELPMATMHAGGSPYLGLHHGHPQQHNHGANGRHMSPPDVVAEEAKNRQLAVVPVGTGGGGGAGVRYRECLKNHAAAIGGSATDGCGEFMPAGEEGSLDALRCSACGCHRNFHRKEPPGGDGRQLYGHHHHHPLSPLAAVHPHHHRGLLVAALPPAPTRMVMPLSAAMHHHQQPPQQHHSSASADSDDAHVPGVRGGEVQQQQQAPARKRFRTKFTAEQKARMLGFAEDAGWRLQKLDEAAVQRFCQEVGVKRRVLKVWMHNNKHTLARRGHAGLPGDPELLGPHDGQLGMPLPEPAAEPAVAAAAAAGLGVTDQAMSFGTGRH

SEQ ID NO: 29505 - protein, 320 aa, Zea mays subsp. mays
  peptide (1)..(320): Ceres Seq. ID no. 12373182
  misc_feature (61)..(115): Pfam Name: Pfam Description:  ZF-HD protein dimerisation region
  misc_feature (54)..(266): NCBI GI NO: 13374061 NR Description: ZF-HD homeobox protein [Flaveria bidentis]
  misc_feature (51)..(155): NCBI GI NO: 15233925 NR Description: putative protein; protein id: At4g24660
  misc_feature (167)..(266): NCBI GI NO: 15233925 NR Description: putative protein; protein id: At4g24660
  misc_feature (61)..(271): NCBI GI NO: 15223757 NR Description: hypothetical protein; protein id: At1g14440
  misc_feature (61)..(268): NCBI GI NO: 15226993 NR Description: hypothetical protein; protein id: At2g02540
  misc_feature (61)..(268): NCBI GI NO: 20148768 NR Description: hypothetical protein At2g02540/T822.16
  misc_feature (55)..(276): NCBI GI NO: 5091602 NR Description: 10A19I.6 [Oryza sativa]
  misc_feature (139)..(266): NCBI GI NO: 13277218 NR Description: ZF-HD homeobox protein [Flaveria bidentis]
  misc_feature (60)..(138): NCBI GI NO: 13277218 NR Description: ZF-HD homeobox protein [Flaveria bidentis]
  misc_feature (63)..(270): NCBI GI NO: 18421904 NR Description: putative protein; protein id: At5g39760
MATMHAGGSPYLGLHHGHPQQHNHGANGRHMSPPDVVAEEAKNRQLAVVPVGTGGGGGAGVRYRECLKNHAAAIGGSATDGCGEFMPAGEEGSLDALRCSACGCHRNFHRKEPPGGDGRQLYGHHHHHPLSPLAAVHPHHHRGLLVAALPPAPTRMVMPLSAAMHHHQQPPQQHHSSASADSDDAHVPGVRGGEVQQQQQAPARKRFRTKFTAEQKARMLGFAEDAGWRLQKLDEAAVQRFCQEVGVKRRVLKVWMHNNKHTLARRGHAGLPGDPELLGPHDGQLGMPLPEPAAEPAVAAAAAAGLGVTDQAMSFGTGRH

SEQ ID NO: 29506 - protein, 317 aa, Zea mays subsp. mays
  peptide (1)..(317): Ceres Seq. ID no. 12373183
  misc_feature (58)..(112): Pfam Name: Pfam Description:  ZF-HD protein dimerisation region
  misc_feature (51)..(263): NCBI GI NO: 13374061 NR Description: ZF-HD homeobox protein [Flaveria bidentis]
  misc_feature (48)..(152): NCBI GI NO: 15233925 NR Description: putative protein; protein id: At4g24660
  misc_feature (164)..(263): NCBI GI NO: 15233925 NR Description: putative protein; protein id: At4g24660
  misc_feature (58)..(268): NCBI GI NO: 15223757 NR Description: hypothetical protein; protein id: At1g14440
  misc_feature (58)..(265): NCBI GI NO: 15226993 NR Description: hypothetical protein; protein id: At2g02540
  misc_feature (58)..(265): NCBI GI NO: 20148768 NR Description: hypothetical protein At2g02540/T822.16
  misc_feature (52)..(273): NCBI GI NO: 5091602 NR Description: 10A19I.6 [Oryza sativa]
  misc_feature (136)..(263): NCBI GI NO: 13277218 NR Description: ZF-HD homeobox protein [Flaveria bidentis]
  misc_feature (57)..(135): NCBI GI NO: 13277218 NR Description: ZF-HD homeobox protein [Flaveria bidentis]
  misc_feature (60)..(267): NCBI GI NO: 18421904 NR Description: putative protein; protein id: At5g39760
MHAGGSPYLGLHHGHPQQHNHGANGRHMSPPDVVAEEAKNRQLAVVPVGTGGGGGAGVRYRECLKNHAAAIGGSATDGCGEFMPAGEEGSLDALRCSACGCHRNFHRKEPPGGDGRQLYGHHHHHPLSPLAAVHPHHHRGLLVAALPPAPTRMVMPLSAAMHHHQQPPQQHHSSASADSDDAHVPGVRGGEVQQQQQAPARKRFRTKFTAEQKARMLGFAEDAGWRLQKLDEAAVQRFCQEVGVKRRVLKVWMHNNKHTLARRGHAGLPGDPELLGPHDGQLGMPLPEPAAEPAVAAAAAAGLGVTDQAMSFGTGRH

SEQ ID NO: 29507 - DNA, 1229 bp, Zea mays subsp. mays
  misc_feature (1)..(1229): Ceres Seq. ID no. 12353971
ctttttgtgttgctctaaccctttcggctgcgctgcgcacgtcccctcccacgagaaacaccccacgtctcaagctgcccctttctcaccgccacggccgccacgcgcagcagcaaccgagcaggagcgcagccagcaagctcaggcccgagccctactgcaaccgccgctgctaccgcactgaacaccatggccgacccggcggagcaccgtccagcggaggaggacgaggaagccgcggcggccggcgaggatgaggacaccggcgctcaggtcgcgcccatcgtgaagctggaggaggtcgccgttaccaccggagaggaggacgaggacgtacttgtcgacatgaaggcgaagctctaccggttcgacaaggaggcgaaccagtggaaagaacgtggcacaggcactgtgaagctgcttaagcacaaggagaccgccaaggtccgcctcgtcatgcgtcaggcgaagacgcttaagatctgtgctaaccatcttgtggtggcgacgactaagatgcaggagcacgcagggagcgacaagtcgtgcgtgtggcacgcgctggacttcgccgacggtgagctcaaggaggagatgtttgctatccgttttggatctgtcgagaattgcaagaagttcaaggacactgttgaagagatagctgaagagcaaggaaagaccgaggtgaaagaaaacgaggaagtctccattgccgccgcagatttggtacagaagttaacagtgacagaggctagcaaggagggagatgcagaggaagaggaggctcctgcatctgaccataagaaggatgctaaagggtaaagattgaaggcaaacaaggccaaatgattatgattccattcatttcgttgtcaaggttcatcttccccacaaattttcattacaaagtttcattgcattttctcctgagatgatttgtgtgtgtgtgtgtgtgtgtgtgtgttgggtgaaatctgagttgtcagtcatctacatgtctttcttggttgttagacttattctcagtcgcctgtttatctgggatggctaggtacatcatgtttgtacaattatttggggttgattttggaatggctctaaagctcgagatgagatagatggtatcatggtagttattagtgatgatttcttttcgcttcttgttcgttcgttctgaaataatatgggatgctttgttatacttgttgatccattattagcttgatgcg

SEQ ID NO: 29508 - protein, 210 aa, Zea mays subsp. mays
  peptide (1)..(210): Ceres Seq. ID no. 12353972
  misc_feature (39)..(159): Pfam Name: Pfam Description:  RanBP1 domain
  misc_feature (1)..(209): NCBI GI NO: 14091665 NR Description: Ran binding protein-1 [Lycopersicon esculentum]
  misc_feature (5)..(210): NCBI GI NO: 15222310 NR Description: Ran-binding protein
  misc_feature (5)..(209): NCBI GI NO: 2058282 NR Description: atranbp1a [Arabidopsis thaliana]
  misc_feature (1)..(209): NCBI GI NO: 8843780 NR Description: contains similarity to small GTPase Ran bindingprotein 1~gene_id:MZN1
  misc_feature (1)..(209): NCBI GI NO: 30697102 NR Description: Ran binding protein 1 homolog - like
  misc_feature (7)..(208): NCBI GI NO: 2058284 NR Description: atranbp1b [Arabidopsis thaliana]
  misc_feature (6)..(208): NCBI GI NO: 20260400 NR Description: Ran binding protein [Arabidopsis thaliana]
  misc_feature (7)..(208): NCBI GI NO: 15227700 NR Description: Ran binding protein
  misc_feature (5)..(210): NCBI GI NO: 5106769 NR Description: Ran-binding protein siRanBP [Arabidopsis thaliana]
  misc_feature (1)..(163): NCBI GI NO: 6320205 NR Description: Yeast Ran Binder #1
MADPAEHRPAEEDEEAAAAGEDEDTGAQVAPIVKLEEVAVTTGEEDEDVLVDMKAKLYRFDKEANQWKERGTGTVKLLKHKETAKVRLVMRQAKTLKICANHLVVATTKMQEHAGSDKSCVWHALDFADGELKEEMFAIRFGSVENCKKFKDTVEEIAEEQGKTEVKENEEVSIAAADLVQKLTVTEASKEGDAEEEEAPASDHKKDAKG

SEQ ID NO: 29509 - protein, 158 aa, Zea mays subsp. mays
  peptide (1)..(158): Ceres Seq. ID no. 12353973
  misc_feature (1)..(107): Pfam Name: Pfam Description:  RanBP1 domain
  misc_feature (1)..(157): NCBI GI NO: 14091665 NR Description: Ran binding protein-1 [Lycopersicon esculentum]
  misc_feature (1)..(158): NCBI GI NO: 15222310 NR Description: Ran-binding protein
  misc_feature (1)..(157): NCBI GI NO: 2058282 NR Description: atranbp1a [Arabidopsis thaliana]
  misc_feature (1)..(157): NCBI GI NO: 8843780 NR Description: contains similarity to small GTPase Ran bindingprotein 1~gene_id:MZN1
  misc_feature (1)..(157): NCBI GI NO: 30697102 NR Description: Ran binding protein 1 homolog - like
  misc_feature (1)..(156): NCBI GI NO: 2058284 NR Description: atranbp1b [Arabidopsis thaliana]
  misc_feature (1)..(156): NCBI GI NO: 20260400 NR Description: Ran binding protein [Arabidopsis thaliana]
  misc_feature (1)..(156): NCBI GI NO: 15227700 NR Description: Ran binding protein
  misc_feature (1)..(158): NCBI GI NO: 5106769 NR Description: Ran-binding protein siRanBP [Arabidopsis thaliana]
  misc_feature (1)..(111): NCBI GI NO: 6320205 NR Description: Yeast Ran Binder #1
MKAKLYRFDKEANQWKERGTGTVKLLKHKETAKVRLVMRQAKTLKICANHLVVATTKMQEHAGSDKSCVWHALDFADGELKEEMFAIRFGSVENCKKFKDTVEEIAEEQGKTEVKENEEVSIAAADLVQKLTVTEASKEGDAEEEEAPASDHKKDAKG

SEQ ID NO: 29510 - protein, 121 aa, Zea mays subsp. mays
  peptide (1)..(121): Ceres Seq. ID no. 12353974
  misc_feature (1)..(70): Pfam Name: Pfam Description:  RanBP1 domain
  misc_feature (1)..(120): NCBI GI NO: 14091665 NR Description: Ran binding protein-1 [Lycopersicon esculentum]
  misc_feature (1)..(121): NCBI GI NO: 15222310 NR Description: Ran-binding protein
  misc_feature (1)..(120): NCBI GI NO: 2058282 NR Description: atranbp1a [Arabidopsis thaliana]
  misc_feature (1)..(120): NCBI GI NO: 8843780 NR Description: contains similarity to small GTPase Ran bindingprotein 1~gene_id:MZN1
  misc_feature (1)..(120): NCBI GI NO: 30697102 NR Description: Ran binding protein 1 homolog - like
  misc_feature (1)..(119): NCBI GI NO: 2058284 NR Description: atranbp1b [Arabidopsis thaliana]
  misc_feature (1)..(119): NCBI GI NO: 20260400 NR Description: Ran binding protein [Arabidopsis thaliana]
  misc_feature (1)..(119): NCBI GI NO: 15227700 NR Description: Ran binding protein
  misc_feature (1)..(121): NCBI GI NO: 5106769 NR Description: Ran-binding protein siRanBP [Arabidopsis thaliana]
  misc_feature (1)..(74): NCBI GI NO: 6320205 NR Description: Yeast Ran Binder #1
MRQAKTLKICANHLVVATTKMQEHAGSDKSCVWHALDFADGELKEEMFAIRFGSVENCKKFKDTVEEIAEEQGKTEVKENEEVSIAAADLVQKLTVTEASKEGDAEEEEAPASDHKKDAKG

SEQ ID NO: 29511 - DNA, 1318 bp, Zea mays subsp. mays
  misc_feature (1)..(1318): Ceres Seq. ID no. 12566620
agtcgtccagctggtttgcctcccacacaaagggtaaaacggccggaacgctaaaatctcaccccttccgcttggaagttggaacccatcgccgcctccatcgctacacaccacgacgcagcgcccgattccgccggccagcaacgatgcagagctccctcgcccggccgccggtactggccggatgcggcgagagacggggcctggcagccgtggcacggtgccgcgctgaggcggcggcgcccgtgtggacggcgtccagggcgcctgtggggccgtacaccgggagggacccggaggtgaagaagcccgcgtggctgcggcagcgcgctgcgcagggggagaagtacgctcgcctgcgggagtccatcggcgagctcaagctcaacaccgtctgcgtcgaggcacaatgccccaacatcggcgagtgttggaacggaggtggaggggccggcggcgaaggggacggcatcgcgacggccaccatcatggtgcttggtgacacctgcacgcgcgggtgtcgattctgcgctgtgaagaccagcaacaaaccgccgccgcctgatcccctggagcctctgaacacggctttggctgttgcaagctggggtgtagattatgttgtgctaaccagtgtcgatagagatgacttacctgatggtggaagtagccattttgctcagacagtgaaagctttaaaggagctcaaacctggaatactggtggagtgcttaacctcggattttcgaggtgacctggaggctatctcatctttggcaaactctggcctagatgtttatgcacacaacattgaaaccgtgaggagtctacagagggttgtgagggatccccgggcagggtatgatcagagcttagcagttctcaagcatgcaaaaggttccagggaggacatgattacgaagtcttctatcatgcttggtcttggagagactgatgaagaggtgaaacaagccatgatggatctacgggcaattggtgttgacatccttactttgggacagtacttgcagccatcagaaagacatctaacagtaagagagtatgtgactccccaaaagttccaattttggaaggagtatggagaatcggtgggtttccgatatgttgctagcggacccttggttcggtcttcctaccgtgcaggagagctatttgtccaaaatttagtcagaaataacaaaactgagtcgtccatggatccgtacgcagaaataacaaaatctaactaaatatcttgtgccagagcaatccatgggatcagtacacactgtttgttaagagcagcaaacaagagtag

SEQ ID NO: 29512 - protein, 415 aa, Zea mays subsp. mays
  peptide (1)..(415): Ceres Seq. ID no. 12566621
  misc_feature (163)..(328): Pfam Name: Pfam Description:  Radical SAM superfamily
  misc_feature (49)..(400): NCBI GI NO: 34909890 NR Description: putative lipoic acid synthase-like protein
  misc_feature (90)..(403): NCBI GI NO: 18415808 NR Description: lipoic acid synthase - like protein
  misc_feature (90)..(403): NCBI GI NO: 21553591 NR Description: lipoic acid synthase-like protein
  misc_feature (100)..(404): NCBI GI NO: 33989742 NR Description: Unknown (protein for MGC:66080) [Danio rerio]
  misc_feature (100)..(404): NCBI GI NO: 13277380 NR Description: lipoic acid synthetase [Mus musculus]
  misc_feature (100)..(402): NCBI GI NO: 37577166 NR Description: lipoic acid synthetase isoform 1 precursor
  misc_feature (100)..(402): NCBI GI NO: 34978347 NR Description: Lipoic acid synthetase, mitochondrial precursor
  misc_feature (100)..(404): NCBI GI NO: 26327671 NR Description: unnamed protein product [Mus musculus]
  misc_feature (95)..(400): NCBI GI NO: 17737685 NR Description: Lipoic acid synthase CG5231-PA
  misc_feature (92)..(402): NCBI GI NO: 23482377 NR Description: lipoic acid synthetase, putative
SSSWFASHTKGKTAGTLKSHPFRLEVGTHRRLHRYTPRRSARFRRPATMQSSLARPPVLAGCGERRGLAAVARCRAEAAAPVWTASRAPVGPYTGRDPEVKKPAWLRQRAAQGEKYARLRESIGELKLNTVCVEAQCPNIGECWNGGGGAGGEGDGIATATIMVLGDTCTRGCRFCAVKTSNKPPPPDPLEPLNTALAVASWGVDYVVLTSVDRDDLPDGGSSHFAQTVKALKELKPGILVECLTSDFRGDLEAISSLANSGLDVYAHNIETVRSLQRVVRDPRAGYDQSLAVLKHAKGSREDMITKSSIMLGLGETDEEVKQAMMDLRAIGVDILTLGQYLQPSERHLTVREYVTPQKFQFWKEYGESVGFRYVASGPLVRSSYRAGELFVQNLVRNNKTESSMDPYAEITKSN

SEQ ID NO: 29513 - protein, 367 aa, Zea mays subsp. mays
  peptide (1)..(367): Ceres Seq. ID no. 12566622
  misc_feature (115)..(280): Pfam Name: Pfam Description:  Radical SAM superfamily
  misc_feature (1)..(352): NCBI GI NO: 34909890 NR Description: putative lipoic acid synthase-like protein
  misc_feature (42)..(355): NCBI GI NO: 18415808 NR Description: lipoic acid synthase - like protein
  misc_feature (42)..(355): NCBI GI NO: 21553591 NR Description: lipoic acid synthase-like protein
  misc_feature (52)..(356): NCBI GI NO: 33989742 NR Description: Unknown (protein for MGC:66080) [Danio rerio]
  misc_feature (52)..(356): NCBI GI NO: 13277380 NR Description: lipoic acid synthetase [Mus musculus]
  misc_feature (52)..(354): NCBI GI NO: 37577166 NR Description: lipoic acid synthetase isoform 1 precursor
  misc_feature (52)..(354): NCBI GI NO: 34978347 NR Description: Lipoic acid synthetase, mitochondrial precursor
  misc_feature (52)..(356): NCBI GI NO: 26327671 NR Description: unnamed protein product [Mus musculus]
  misc_feature (47)..(352): NCBI GI NO: 17737685 NR Description: Lipoic acid synthase CG5231-PA
  misc_feature (44)..(354): NCBI GI NO: 23482377 NR Description: lipoic acid synthetase, putative
MQSSLARPPVLAGCGERRGLAAVARCRAEAAAPVWTASRAPVGPYTGRDPEVKKPAWLRQRAAQGEKYARLRESIGELKLNTVCVEAQCPNIGECWNGGGGAGGEGDGIATATIMVLGDTCTRGCRFCAVKTSNKPPPPDPLEPLNTALAVASWGVDYVVLTSVDRDDLPDGGSSHFAQTVKALKELKPGILVECLTSDFRGDLEAISSLANSGLDVYAHNIETVRSLQRVVRDPRAGYDQSLAVLKHAKGSREDMITKSSIMLGLGETDEEVKQAMMDLRAIGVDILTLGQYLQPSERHLTVREYVTPQKFQFWKEYGESVGFRYVASGPLVRSSYRAGELFVQNLVRNNKTESSMDPYAEITKSN

SEQ ID NO: 29514 - protein, 253 aa, Zea mays subsp. mays
  peptide (1)..(253): Ceres Seq. ID no. 12566623
  misc_feature (1)..(166): Pfam Name: Pfam Description:  Radical SAM superfamily
  misc_feature (1)..(238): NCBI GI NO: 34909890 NR Description: putative lipoic acid synthase-like protein
  misc_feature (1)..(241): NCBI GI NO: 18415808 NR Description: lipoic acid synthase - like protein
  misc_feature (1)..(241): NCBI GI NO: 21553591 NR Description: lipoic acid synthase-like protein
  misc_feature (1)..(242): NCBI GI NO: 33989742 NR Description: Unknown (protein for MGC:66080) [Danio rerio]
  misc_feature (1)..(242): NCBI GI NO: 13277380 NR Description: lipoic acid synthetase [Mus musculus]
  misc_feature (1)..(240): NCBI GI NO: 37577166 NR Description: lipoic acid synthetase isoform 1 precursor
  misc_feature (1)..(240): NCBI GI NO: 34978347 NR Description: Lipoic acid synthetase, mitochondrial precursor
  misc_feature (1)..(242): NCBI GI NO: 26327671 NR Description: unnamed protein product [Mus musculus]
  misc_feature (1)..(238): NCBI GI NO: 17737685 NR Description: Lipoic acid synthase CG5231-PA
  misc_feature (1)..(240): NCBI GI NO: 23482377 NR Description: lipoic acid synthetase, putative
MVLGDTCTRGCRFCAVKTSNKPPPPDPLEPLNTALAVASWGVDYVVLTSVDRDDLPDGGSSHFAQTVKALKELKPGILVECLTSDFRGDLEAISSLANSGLDVYAHNIETVRSLQRVVRDPRAGYDQSLAVLKHAKGSREDMITKSSIMLGLGETDEEVKQAMMDLRAIGVDILTLGQYLQPSERHLTVREYVTPQKFQFWKEYGESVGFRYVASGPLVRSSYRAGELFVQNLVRNNKTESSMDPYAEITKSN

SEQ ID NO: 29515 - DNA, 592 bp, Zea mays subsp. mays
  misc_feature (1)..(592): Ceres Seq. ID no. 12566081
acgttcctcgcacggcggaggcaaacaaaccctagccgccaggcgcaggcggtcagggagcgagtaccgagcgccccagttcacacgtgagatgtcagaatacaagaacgtcgttggggggaggctaaagctgaagggtaaggcactggatgtgaaggaaggtggagtcaagaagaaaaaaaagaagcatcagcttgaagagtcgtctcagattgagcacgatgagctccacaaagggggaaactctggcttaccagctgatcacaacaatgagcttattgaagctgatgcttctttttttttcttctttcttcctagtattttcttcccttctcttcgcatcatatgatgattccttagtgtctagctgctgtttttgtgtaaacctctgtaagtttcctgttccatcacatatgagtaaggcctttttgtttctttttatttaagtaaaagatccatcttttatgtactgtcgtggcagttttattatactatgtctgaacaaggcctattcactatgtaagccaaacataaacactatccaggtgacctggttgtgatgactacagtaataagtaactgaataattttt

SEQ ID NO: 29516 - protein, 115 aa, Zea mays subsp. mays
  peptide (1)..(115): Ceres Seq. ID no. 12566082
  misc_feature (31)..(79): NCBI GI NO: 18394403 NR Description: expressed protein; protein id: At1g16810
RSSHGGGKQTLAARRRRSGSEYRAPQFTREMSEYKNVVGGRLKLKGKALDVKEGGVKKKKKKHQLEESSQIEHDELHKGGNSGLPADHNNELIEADASFFFFFLPSIFFPSLRII

SEQ ID NO: 29517 - protein, 85 aa, Zea mays subsp. mays
  peptide (1)..(85): Ceres Seq. ID no. 12566083
  misc_feature (1)..(49): NCBI GI NO: 18394403 NR Description: expressed protein; protein id: At1g16810
MSEYKNVVGGRLKLKGKALDVKEGGVKKKKKKHQLEESSQIEHDELHKGGNSGLPADHNNELIEADASFFFFFLPSIFFPSLRII

SEQ ID NO: 29518 - protein, 74 aa, Zea mays subsp. mays
  peptide (1)..(74): Ceres Seq. ID no. 12566084
MSSTKGETLAYQLITTMSLLKLMLLFFSSFFLVFSSLLFASYDDSLVSSCCFCVNLCKFPVPSHMSKAFLFLFI

SEQ ID NO: 29519 - DNA, 1829 bp, Zea mays subsp. mays
  misc_feature (1)..(1829): Ceres Seq. ID no. 12594668
tctggtctttgcaacaaaaaccctgttcatcaagttgcgaacaaaattttgaatatgatttgccgaaaaatgaataaaggtgtggtatcgtcaagtactctttcatccacttctagttgtagtgtcagtggttcctctgtaagtgcatcagatgatccttgccaaaggcctgctgtttctggttgggaatttttagaagctgttccttttgttcttgaagctgttctgacagcatgtgctcatgggcagctttctagccgagacttgactacaagcttaagggatctcgtggactttttgcctgcttctcttgctgcaattgtgagctacttctcagcagaaattacacgaggaatctggaaacctgtcccaatgaatggaattgaatggcctagtcccggtgcttctcttcattccattgaagctgaagtaaaggaaattcttgcctctgctggtgttcagattaacagctgctatccacgtggtgtgccaccaatgcttcctttacctatggctgcacttgtcagcttgacgattacatttaagctagataggagtttggagtacattcaaggggtcattggacaggcgctagagaactgtgcaggggggagttcctggccaagcatgcccattattggggcattgtggacacagaaagtgcgaagatggcatgacttcatcgtcctctcttgtatgcgttctccattcggcagagacaaagatgcagttgcgcagctcatccaaagttgcttctcgtcctttctgcagtcttcatccagtggttctgatataattgcaaaccgtggagttggggctttactaggggactcaatcacgaatcaaggtcttaggctcccaatggcacctggtttcatctacttgagaacatgtcgaactttccatgacacttactttgttagtgaagtgatccttaagcaagtgattgagtgggctcacaaacttgcaaacggatggtgtttcaatggtcctccgcagttgaaatcagggcggacaccactatcttgtgcagcatccatggtgcagcaggtcgcgttgcttggtggaggtctcctatgcatagcaggtggaccacttgtggtccaggtgttgtatgaggaaacactgccaacactgctgctatcagccagagatcagagtttgaaaggccctgggccagtttctagcacactccaaggttacgccatggccaacatgctcttctactgtggtagcctgctttggggagcggataggacttctcctgtcatgaaattgtccttcctctcgaggcggccacgggtggtgagaacccacatggatttcatagctggtgtgttggacggacacattcttctgggctgtgacccgggtacgtggaaagcgtatgtgtcgcaatttatgttcctggtggtgaaatttgttccgtcatggttgcgggacataaagctggacacgctaaagaagatagcagctggacttcggagctggcacgaacacgaccttgctctgtctcttcttgaacgaggaggaccacaagcaatctctgttgtagtcgagacctttctgtaatccttccgtttggacattttgcccccacctgacatagcagccgccgttaagggtttgtagttggtgatctgaggtctagctgaagtaatccggatgacccttttgatccagaattacacttgtgctacccgggtaactgatgtttatctcatgtatggcgagctcatcggggttttcgtgaatccaatacggaagaacatgcaacctactagggtgtacttcagccctaacatgtataacatgtgggaagttcatgt

SEQ ID NO: 29520 - protein, 523 aa, Zea mays subsp. mays
  peptide (1)..(523): Ceres Seq. ID no. 12594669
  misc_feature (1)..(523): NCBI GI NO: 33146668 NR Description: unknown protein
  misc_feature (1)..(523): NCBI GI NO: 33146669 NR Description: unknown protein
  misc_feature (1)..(511): NCBI GI NO: 15229478 NR Description: unknown protein; protein id: At3g23590.1
  misc_feature (1)..(511): NCBI GI NO: 26449340 NR Description: unknown protein [Arabidopsis thaliana]
  misc_feature (1)..(521): NCBI GI NO: 18407529 NR Description: unknown protein; protein id: At2g48110.1
  misc_feature (1)..(521): NCBI GI NO: 25370851 NR Description: hypothetical protein At2g48110
  misc_feature (193)..(521): NCBI GI NO: 1223579 NR Description: cDNA101 [Arabidopsis thaliana]
  misc_feature (210)..(523): NCBI GI NO: 34394478 NR Description: unknown protein
  misc_feature (1)..(183): NCBI GI NO: 20197556 NR Description: unknown protein [Arabidopsis thaliana]
SGLCNKNPVHQVANKILNMICRKMNKGVVSSSTLSSTSSCSVSGSSVSASDDPCQRPAVSGWEFLEAVPFVLEAVLTACAHGQLSSRDLTTSLRDLVDFLPASLAAIVSYFSAEITRGIWKPVPMNGIEWPSPGASLHSIEAEVKEILASAGVQINSCYPRGVPPMLPLPMAALVSLTITFKLDRSLEYIQGVIGQALENCAGGSSWPSMPIIGALWTQKVRRWHDFIVLSCMRSPFGRDKDAVAQLIQSCFSSFLQSSSSGSDIIANRGVGALLGDSITNQGLRLPMAPGFIYLRTCRTFHDTYFVSEVILKQVIEWAHKLANGWCFNGPPQLKSGRTPLSCAASMVQQVALLGGGLLCIAGGPLVVQVLYEETLPTLLLSARDQSLKGPGPVSSTLQGYAMANMLFYCGSLLWGADRTSPVMKLSFLSRRPRVVRTHMDFIAGVLDGHILLGCDPGTWKAYVSQFMFLVVKFVPSWLRDIKLDTLKKIAAGLRSWHEHDLALSLLERGGPQAISVVVETFL

SEQ ID NO: 29521 - protein, 505 aa, Zea mays subsp. mays
  peptide (1)..(505): Ceres Seq. ID no. 12594670
  misc_feature (1)..(505): NCBI GI NO: 33146668 NR Description: unknown protein
  misc_feature (1)..(505): NCBI GI NO: 33146669 NR Description: unknown protein
  misc_feature (1)..(493): NCBI GI NO: 15229478 NR Description: unknown protein; protein id: At3g23590.1
  misc_feature (1)..(493): NCBI GI NO: 26449340 NR Description: unknown protein [Arabidopsis thaliana]
  misc_feature (1)..(503): NCBI GI NO: 18407529 NR Description: unknown protein; protein id: At2g48110.1
  misc_feature (1)..(503): NCBI GI NO: 25370851 NR Description: hypothetical protein At2g48110
  misc_feature (175)..(503): NCBI GI NO: 1223579 NR Description: cDNA101 [Arabidopsis thaliana]
  misc_feature (192)..(505): NCBI GI NO: 34394478 NR Description: unknown protein
  misc_feature (1)..(165): NCBI GI NO: 20197556 NR Description: unknown protein [Arabidopsis thaliana]
MICRKMNKGVVSSSTLSSTSSCSVSGSSVSASDDPCQRPAVSGWEFLEAVPFVLEAVLTACAHGQLSSRDLTTSLRDLVDFLPASLAAIVSYFSAEITRGIWKPVPMNGIEWPSPGASLHSIEAEVKEILASAGVQINSCYPRGVPPMLPLPMAALVSLTITFKLDRSLEYIQGVIGQALENCAGGSSWPSMPIIGALWTQKVRRWHDFIVLSCMRSPFGRDKDAVAQLIQSCFSSFLQSSSSGSDIIANRGVGALLGDSITNQGLRLPMAPGFIYLRTCRTFHDTYFVSEVILKQVIEWAHKLANGWCFNGPPQLKSGRTPLSCAASMVQQVALLGGGLLCIAGGPLVVQVLYEETLPTLLLSARDQSLKGPGPVSSTLQGYAMANMLFYCGSLLWGADRTSPVMKLSFLSRRPRVVRTHMDFIAGVLDGHILLGCDPGTWKAYVSQFMFLVVKFVPSWLRDIKLDTLKKIAAGLRSWHEHDLALSLLERGGPQAISVVVETFL

SEQ ID NO: 29522 - protein, 500 aa, Zea mays subsp. mays
  peptide (1)..(500): Ceres Seq. ID no. 12594671
  misc_feature (1)..(500): NCBI GI NO: 33146668 NR Description: unknown protein
  misc_feature (1)..(500): NCBI GI NO: 33146669 NR Description: unknown protein
  misc_feature (1)..(488): NCBI GI NO: 15229478 NR Description: unknown protein; protein id: At3g23590.1
  misc_feature (1)..(488): NCBI GI NO: 26449340 NR Description: unknown protein [Arabidopsis thaliana]
  misc_feature (1)..(498): NCBI GI NO: 18407529 NR Description: unknown protein; protein id: At2g48110.1
  misc_feature (1)..(498): NCBI GI NO: 25370851 NR Description: hypothetical protein At2g48110
  misc_feature (170)..(498): NCBI GI NO: 1223579 NR Description: cDNA101 [Arabidopsis thaliana]
  misc_feature (187)..(500): NCBI GI NO: 34394478 NR Description: unknown protein
  misc_feature (1)..(160): NCBI GI NO: 20197556 NR Description: unknown protein [Arabidopsis thaliana]
MNKGVVSSSTLSSTSSCSVSGSSVSASDDPCQRPAVSGWEFLEAVPFVLEAVLTACAHGQLSSRDLTTSLRDLVDFLPASLAAIVSYFSAEITRGIWKPVPMNGIEWPSPGASLHSIEAEVKEILASAGVQINSCYPRGVPPMLPLPMAALVSLTITFKLDRSLEYIQGVIGQALENCAGGSSWPSMPIIGALWTQKVRRWHDFIVLSCMRSPFGRDKDAVAQLIQSCFSSFLQSSSSGSDIIANRGVGALLGDSITNQGLRLPMAPGFIYLRTCRTFHDTYFVSEVILKQVIEWAHKLANGWCFNGPPQLKSGRTPLSCAASMVQQVALLGGGLLCIAGGPLVVQVLYEETLPTLLLSARDQSLKGPGPVSSTLQGYAMANMLFYCGSLLWGADRTSPVMKLSFLSRRPRVVRTHMDFIAGVLDGHILLGCDPGTWKAYVSQFMFLVVKFVPSWLRDIKLDTLKKIAAGLRSWHEHDLALSLLERGGPQAISVVVETFL

SEQ ID NO: 29523 - DNA, 1668 bp, Zea mays subsp. mays
  misc_feature (1)..(1668): Ceres Seq. ID no. 12373504
gttgcctctccttttcacccgttcctcgtctccctcctgcggtcctgccccccctcccctgcagccgctccctccatggcgtccttcgtcgtgcaccaccacggttcgccgctggacagggagggcaaggtcaagatgtccgccctggccctgaggagtagcctcaggccgtgcgaggccgccgaggaggtcggggccgggcaggcgtggtgcagaggcgcggacatgggcgtcgccgcctttgtcgacgagttctccgtggaggacttgctggacctcgaggacctctgcgaggttgacaaggactgcgccgagctgggcgacacggtgccggcggcggagtctgtgcaggaaggggacaaggtgtccagtgactcccacgggtcgtcggtgctgtcctacgagctcatgacgctcccggttccgcacccgatgattgacctcccgttgccggcccatgacgccgaggagctggagtgggtgtcccgtatcatggacgactcgctcgccgagctcccgccgccaccgaagctacccgcggcgccgttgggagctgcgcggcggccgctggaaggcgcagtggcaggccctatgcggagcccgaccacgaccatatgcgcgctgtcgacggaggcgctagtgccggtgacgagggcgaagcgcagcaagcgctcgcgtggctccgtgtggtcgctgtccggcggagcgcccctgtcggagtcgacgtcgtcgtcttccacggccaccacgtcgtcctgctcctcgtccgcctctttctcgccgctgttactccttccggcggacccgtccctcgtcctatcctcgcacctcctcgacgagacgccgcggcccaagaagaagtccaagcacgggaagcatggcaagagcggcaagcccaagaagcgcggccgcaagccgaagcaccaccccaagccgccccagttctcgggcggcgccgcctacgcgccggcccagggcgaccggcgctgcagccattgcggcgtgcagaagacgccgcagtggcgcgcgggccccgagggcgccaagacgctgtgcaacgcgtgcggggtccgttacaagtccgggcggctgctcccggagtaccgtccggcttgcagccccaccttcgtgagcagcatacactccaactcccaccgcaaggtgctggagatgcgccgcaagaaggatggcgaccttggtcagctcccgctcccagtcccggccgcgcttctgcttgggccggccgtcgagtcgttctagccggcgctgtacattttttcgtccgcgggtggagctgtttaacctgctgtaccgtacttggttttttttttctttctcttccacttctatatttagtagttgtgctgtactatttagctagagctctgaattgtagaagctttattaggtcgagttaggtagtagagattaagatttccatggttgattaggattgttagggtatgtatggccatagtacttgtggtagtagttaagaacttggtgaggtgtttggcctgacctacgaggaatgatgttgtcatgtcgaggcgctgctggcaccagtgacaagaaagttaggcgtgccttggcgcggaacatggaactgtctgccttgttgtaatcgagagtgtcaggcgagtaagaaagtgattgtttgcattgccg

SEQ ID NO: 29524 - protein, 419 aa, Zea mays subsp. mays
  peptide (1)..(419): Ceres Seq. ID no. 12373505
  misc_feature (39)..(302): NCBI GI NO: 38344977 NR Description: OSJNBa0011L07.7
  misc_feature (323)..(419): NCBI GI NO: 38344977 NR Description: OSJNBa0011L07.7
  misc_feature (86)..(223): NCBI GI NO: 15232355 NR Description: GATA zinc finger protein; protein id: At3g60530
  misc_feature (310)..(396): NCBI GI NO: 15232355 NR Description: GATA zinc finger protein; protein id: At3g60530
  misc_feature (83)..(396): NCBI GI NO: 34909448 NR Description: OSJNBa0014K08.18
  misc_feature (281)..(396): NCBI GI NO: 15225399 NR Description: GATA zinc finger protein; protein id: At2g45050.1
  misc_feature (86)..(176): NCBI GI NO: 15225399 NR Description: GATA zinc finger protein; protein id: At2g45050.1
  misc_feature (213)..(394): NCBI GI NO: 15451574 NR Description: Putative GATA-1 zinc finger protein [Oryza sativa]
  misc_feature (306)..(396): NCBI GI NO: 15239343 NR Description: GATA zinc finger protein; protein id: At5g66320.1
  misc_feature (48)..(167): NCBI GI NO: 15236172 NR Description: GATA transcription factor 3; protein id:At4g34680
VASPFHPFLVSLLRSCPPSPAAAPSMASFVVHHHGSPLDREGKVKMSALALRSSLRPCEAAEEVGAGQAWCRGADMGVAAFVDEFSVEDLLDLEDLCEVDKDCAELGDTVPAAESVQEGDKVSSDSHGSSVLSYELMTLPVPHPMIDLPLPAHDAEELEWVSRIMDDSLAELPPPPKLPAAPLGAARRPLEGAVAGPMRSPTTTICALSTEALVPVTRAKRSKRSRGSVWSLSGGAPLSESTSSSSTATTSSCSSSASFSPLLLLPADPSLVLSSHLLDETPRPKKKSKHGKHGKSGKPKKRGRKPKHHPKPPQFSGGAAYAPAQGDRRCSHCGVQKTPQWRAGPEGAKTLCNACGVRYKSGRLLPEYRPACSPTFVSSIHSNSHRKVLEMRRKKDGDLGQLPLPVPAALLLGPAVESF

SEQ ID NO: 29525 - protein, 394 aa, Zea mays subsp. mays
  peptide (1)..(394): Ceres Seq. ID no. 12373506
  misc_feature (14)..(277): NCBI GI NO: 38344977 NR Description: OSJNBa0011L07.7
  misc_feature (298)..(394): NCBI GI NO: 38344977 NR Description: OSJNBa0011L07.7
  misc_feature (61)..(198): NCBI GI NO: 15232355 NR Description: GATA zinc finger protein; protein id: At3g60530
  misc_feature (285)..(371): NCBI GI NO: 15232355 NR Description: GATA zinc finger protein; protein id: At3g60530
  misc_feature (58)..(371): NCBI GI NO: 34909448 NR Description: OSJNBa0014K08.18
  misc_feature (256)..(371): NCBI GI NO: 15225399 NR Description: GATA zinc finger protein; protein id: At2g45050.1
  misc_feature (61)..(151): NCBI GI NO: 15225399 NR Description: GATA zinc finger protein; protein id: At2g45050.1
  misc_feature (188)..(369): NCBI GI NO: 15451574 NR Description: Putative GATA-1 zinc finger protein [Oryza sativa]
  misc_feature (281)..(371): NCBI GI NO: 15239343 NR Description: GATA zinc finger protein; protein id: At5g66320.1
  misc_feature (23)..(142): NCBI GI NO: 15236172 NR Description: GATA transcription factor 3; protein id:At4g34680
MASFVVHHHGSPLDREGKVKMSALALRSSLRPCEAAEEVGAGQAWCRGADMGVAAFVDEFSVEDLLDLEDLCEVDKDCAELGDTVPAAESVQEGDKVSSDSHGSSVLSYELMTLPVPHPMIDLPLPAHDAEELEWVSRIMDDSLAELPPPPKLPAAPLGAARRPLEGAVAGPMRSPTTTICALSTEALVPVTRAKRSKRSRGSVWSLSGGAPLSESTSSSSTATTSSCSSSASFSPLLLLPADPSLVLSSHLLDETPRPKKKSKHGKHGKSGKPKKRGRKPKHHPKPPQFSGGAAYAPAQGDRRCSHCGVQKTPQWRAGPEGAKTLCNACGVRYKSGRLLPEYRPACSPTFVSSIHSNSHRKVLEMRRKKDGDLGQLPLPVPAALLLGPAVESF

SEQ ID NO: 29526 - protein, 374 aa, Zea mays subsp. mays
  peptide (1)..(374): Ceres Seq. ID no. 12373507
  misc_feature (1)..(257): NCBI GI NO: 38344977 NR Description: OSJNBa0011L07.7
  misc_feature (278)..(374): NCBI GI NO: 38344977 NR Description: OSJNBa0011L07.7
  misc_feature (41)..(178): NCBI GI NO: 15232355 NR Description: GATA zinc finger protein; protein id: At3g60530
  misc_feature (265)..(351): NCBI GI NO: 15232355 NR Description: GATA zinc finger protein; protein id: At3g60530
  misc_feature (38)..(351): NCBI GI NO: 34909448 NR Description: OSJNBa0014K08.18
  misc_feature (236)..(351): NCBI GI NO: 15225399 NR Description: GATA zinc finger protein; protein id: At2g45050.1
  misc_feature (41)..(131): NCBI GI NO: 15225399 NR Description: GATA zinc finger protein; protein id: At2g45050.1
  misc_feature (168)..(349): NCBI GI NO: 15451574 NR Description: Putative GATA-1 zinc finger protein [Oryza sativa]
  misc_feature (261)..(351): NCBI GI NO: 15239343 NR Description: GATA zinc finger protein; protein id: At5g66320.1
  misc_feature (3)..(122): NCBI GI NO: 15236172 NR Description: GATA transcription factor 3; protein id:At4g34680
MSALALRSSLRPCEAAEEVGAGQAWCRGADMGVAAFVDEFSVEDLLDLEDLCEVDKDCAELGDTVPAAESVQEGDKVSSDSHGSSVLSYELMTLPVPHPMIDLPLPAHDAEELEWVSRIMDDSLAELPPPPKLPAAPLGAARRPLEGAVAGPMRSPTTTICALSTEALVPVTRAKRSKRSRGSVWSLSGGAPLSESTSSSSTATTSSCSSSASFSPLLLLPADPSLVLSSHLLDETPRPKKKSKHGKHGKSGKPKKRGRKPKHHPKPPQFSGGAAYAPAQGDRRCSHCGVQKTPQWRAGPEGAKTLCNACGVRYKSGRLLPEYRPACSPTFVSSIHSNSHRKVLEMRRKKDGDLGQLPLPVPAALLLGPAVESF

SEQ ID NO: 29527 - DNA, 1545 bp, Zea mays subsp. mays
  misc_feature (1)..(1545): Ceres Seq. ID no. 12352572
aaatcacctgttcccgcgacctcctccccggcgtacctccagtctccagagatccacacgaccacaccgacccaccaccatctgcatcggcaatggacgccgcgccacccaccataaccaagtccccgccgtccctggttccaccagcggggcccactcccggtggttccctcccgctctcctccatcgacaagaccgccgccgtccgtgtctccgtcgacttcatccaggtcttccccgcccctacgtcggggaaggaggactggagcccctcatctgcgatcgcggccatgcgcgagggctttgccagggcgctcgtgccgtactaccctatcgccggccgcatcgccgagcccgtgcctggtgagcctgagattgagtgcacgggggaaggggtgtggttcgtggaggctgaggcaagctgctccctcgaggaggcgcgtaacctcgagcgcccgctgtgcatcccgaaggaggagctgctcccgcgtccgccggccggtgtgcgcgtggaggacaccctgctgctcgcgcaggttacaaagttcacatgtggtgggttttctgtgggcatttgcttcagtcacttggtgttcgacgggcagggtgctgcgcaatttctgaaagcagttggtgagatggctaggggcctccctgagccatcgatcaagccaatctgggctcgtgatgccatccccaacccacctaagccacccctaggcccgccaccgtcattcaccgcattcaacttcgagaaatcagtcgtcgagatcgctctggacagcatcaagcgcgtgaaggatcaagttgcaagcgaaaccaaccagaagtgttccactttcgacgtggtcaccgccatgatcttcaaatgtcgcgccttggcagtcgacttcgcacctgacgctgaggttcgcctgggctttgcagccagcactcgccacctgctgagcaatgtgctgccctccgtcgatggctactacgggaactgtgtgtacccaggtggtctcaccaagaccagccaggaggtgaaggaagcttcactggtggagatcgtgaccgcgatcagggaggccaaggaggctctgtcgtcgaggttcctcgactggttgagcggcggcgccaaggagaaccactacaacgtgtcgctggactacggcaccctcgtcgtgaccgactggagccacgtgggtttcaacgacgttgactacgggttcggtgagccaagctacgtgttcaccctgaacgacgacgtgaacatcgttccctccgttgtgtacctgaagcctcccaagccgaagcagggcatcaggctggtgctgcagtgcgtggaagggcggcactctgccgtgttcagcgaggagctgcagaagcacgcatagagcgagtgtattccatcccacagtggagattgttgtattttgttgtgtcgaattgctgcccccggaatttgcttgcaataagatagggttggcacgtgtttatactctgtactgttatctcagcacgttacattatacatgtattgagtgagtattgacagtggtg

SEQ ID NO: 29528 - protein, 458 aa, Zea mays subsp. mays
  peptide (1)..(458): Ceres Seq. ID no. 12352573
  misc_feature (38)..(456): Pfam Name: Pfam Description:  Transferase family
  misc_feature (34)..(458): NCBI GI NO: 34912654 NR Description: putative acetyl transferase
  misc_feature (28)..(458): NCBI GI NO: 34912652 NR Description: putative acetyl transferase
  misc_feature (38)..(450): NCBI GI NO: 34906304 NR Description: unnamed protein product
  misc_feature (33)..(454): NCBI GI NO: 34906150 NR Description: putative 0-deacetylbaccatin III-10-O-acetyltransferase
  misc_feature (37)..(452): NCBI GI NO: 15228696 NR Description: putative protein; protein id: At3g62160.1
  misc_feature (186)..(458): NCBI GI NO: 18558566 NR Description: putative 0-deacetylbaccatin III-10-O-acetyltransferase-like protein
  misc_feature (38)..(454): NCBI GI NO: 38347149 NR Description: OSJNBa0039G19.9
  misc_feature (38)..(442): NCBI GI NO: 28558088 NR Description: 3'-N-debenzoyl-2'-deoxytaxol N-benzoyltransferase
  misc_feature (38)..(455): NCBI GI NO: 38346537 NR Description: OSJNBa0040D17.12
  misc_feature (38)..(454): NCBI GI NO: 37530684 NR Description: putative O-deacetylbaccatin III-10-0-acetyltransferase
ITCSRDLLPGVPPVSRDPHDHTDPPPSASAMDAAPPTITKSPPSLVPPAGPTPGGSLPLSSIDKTAAVRVSVDFIQVFPAPTSGKEDWSPSSAIAAMREGFARALVPYYPIAGRIAEPVPGEPEIECTGEGVWFVEAEASCSLEEARNLERPLCIPKEELLPRPPAGVRVEDTLLLAQVTKFTCGGFSVGICFSHLVFDGQGAAQFLKAVGEMARGLPEPSIKPIWARDAIPNPPKPPLGPPPSFTAFNFEKSVVEIALDSIKRVKDQVASETNQKCSTFDVVTAMIFKCRALAVDFAPDAEVRLGFAASTRHLLSNVLPSVDGYYGNCVYPGGLTKTSQEVKEASLVEIVTAIREAKEALSSRFLDWLSGGAKENHYNVSLDYGTLVVTDWSHVGFNDVDYGFGEPSYVFTLNDDVNIVPSVVYLKPPKPKQGIRLVLQCVEGRHSAVFSEELQKHA

SEQ ID NO: 29529 - protein, 428 aa, Zea mays subsp. mays
  peptide (1)..(428): Ceres Seq. ID no. 12352574
  misc_feature (8)..(426): Pfam Name: Pfam Description:  Transferase family
  misc_feature (4)..(428): NCBI GI NO: 34912654 NR Description: putative acetyl transferase
  misc_feature (1)..(428): NCBI GI NO: 34912652 NR Description: putative acetyl transferase
  misc_feature (8)..(420): NCBI GI NO: 34906304 NR Description: unnamed protein product
  misc_feature (3)..(424): NCBI GI NO: 34906150 NR Description: putative 0-deacetylbaccatin III-10-O-acetyltransferase
  misc_feature (7)..(422): NCBI GI NO: 15228696 NR Description: putative protein; protein id: At3g62160.1
  misc_feature (156)..(428): NCBI GI NO: 18558566 NR Description: putative 0-deacetylbaccatin III-10-O-acetyltransferase-like protein
  misc_feature (8)..(424): NCBI GI NO: 38347149 NR Description: OSJNBa0039G19.9
  misc_feature (8)..(412): NCBI GI NO: 28558088 NR Description: 3'-N-debenzoyl-2'-deoxytaxol N-benzoyltransferase
  misc_feature (8)..(425): NCBI GI NO: 38346537 NR Description: OSJNBa0040D17.12
  misc_feature (8)..(424): NCBI GI NO: 37530684 NR Description: putative O-deacetylbaccatin III-10-0-acetyltransferase
MDAAPPTITKSPPSLVPPAGPTPGGSLPLSSIDKTAAVRVSVDFIQVFPAPTSGKEDWSPSSAIAAMREGFARALVPYYPIAGRIAEPVPGEPEIECTGEGVWFVEAEASCSLEEARNLERPLCIPKEELLPRPPAGVRVEDTLLLAQVTKFTCGGFSVGICFSHLVFDGQGAAQFLKAVGEMARGLPEPSIKPIWARDAIPNPPKPPLGPPPSFTAFNFEKSVVEIALDSIKRVKDQVASETNQKCSTFDVVTAMIFKCRALAVDFAPDAEVRLGFAASTRHLLSNVLPSVDGYYGNCVYPGGLTKTSQEVKEASLVEIVTAIREAKEALSSRFLDWLSGGAKENHYNVSLDYGTLVVTDWSHVGFNDVDYGFGEPSYVFTLNDDVNIVPSVVYLKPPKPKQGIRLVLQCVEGRHSAVFSEELQKHA

SEQ ID NO: 29530 - protein, 362 aa, Zea mays subsp. mays
  peptide (1)..(362): Ceres Seq. ID no. 12352575
  misc_feature (1)..(360): Pfam Name: Pfam Description:  Transferase family
  misc_feature (1)..(362): NCBI GI NO: 34912654 NR Description: putative acetyl transferase
  misc_feature (1)..(362): NCBI GI NO: 34912652 NR Description: putative acetyl transferase
  misc_feature (1)..(354): NCBI GI NO: 34906304 NR Description: unnamed protein product
  misc_feature (1)..(358): NCBI GI NO: 34906150 NR Description: putative 0-deacetylbaccatin III-10-O-acetyltransferase
  misc_feature (1)..(356): NCBI GI NO: 15228696 NR Description: putative protein; protein id: At3g62160.1
  misc_feature (90)..(362): NCBI GI NO: 18558566 NR Description: putative 0-deacetylbaccatin III-10-O-acetyltransferase-like protein
  misc_feature (1)..(358): NCBI GI NO: 38347149 NR Description: OSJNBa0039G19.9
  misc_feature (1)..(346): NCBI GI NO: 28558088 NR Description: 3'-N-debenzoyl-2'-deoxytaxol N-benzoyltransferase
  misc_feature (1)..(359): NCBI GI NO: 38346537 NR Description: OSJNBa0040D17.12
  misc_feature (1)..(358): NCBI GI NO: 37530684 NR Description: putative O-deacetylbaccatin III-10-0-acetyltransferase
MREGFARALVPYYPIAGRIAEPVPGEPEIECTGEGVWFVEAEASCSLEEARNLERPLCIPKEELLPRPPAGVRVEDTLLLAQVTKFTCGGFSVGICFSHLVFDGQGAAQFLKAVGEMARGLPEPSIKPIWARDAIPNPPKPPLGPPPSFTAFNFEKSVVEIALDSIKRVKDQVASETNQKCSTFDVVTAMIFKCRALAVDFAPDAEVRLGFAASTRHLLSNVLPSVDGYYGNCVYPGGLTKTSQEVKEASLVEIVTAIREAKEALSSRFLDWLSGGAKENHYNVSLDYGTLVVTDWSHVGFNDVDYGFGEPSYVFTLNDDVNIVPSVVYLKPPKPKQGIRLVLQCVEGRHSAVFSEELQKHA

SEQ ID NO: 29531 - DNA, 1228 bp, Zea mays subsp. mays
  misc_feature (1)..(1228): Ceres Seq. ID no. 12345382
ctctctgtcgcatttcccgtcctgtccttcccttacccggcggcttaaaccctagttctcactcccatcgccgcttcagctccgccgcagcagatggagttctggggtctcgaggtcaagcctggttccactgttaagtgtgagcctggatatggctttgtgctgcacctttcccaggctgctcttggggaatcgaagaagagtgataatgccttgatgtatgtcaaaattgatgatcagaaacttgccattggaaccctctctgttgacaagaacccacacatacaatttgatctggttttcgataaagagtttgagctgtcgcacacatcaaaaactaccagcgtcttcttcactggctacaaggttgagcagccattcgaggaagatgagccttcttccacaatggatcttgattctgaagatgaagacgaggagcgggatgttccagtagtcaaggaaaatggcaaagctgatgggaagaaacagaaaagtcaagaaaaggcagttgctgcaccttcaaaatcaagtccggattccaagaagagcaaggatgacgatgattctgatgaggacgagactgatgattctgatgaggatgagacggacgattctgatgagggtttatcttctgaagaaggcgatgatgattcaagtgatgaagatgataccagtgacgatgaggaggaagacactccaactcctaagaagcctgaggtaggcaagaagagagctgctgaaagttccgtgctgaaaactcctctatctgataagaaagcaaaggttgccacaccgtcatctcagaagacaggtggcaagaagggcgccgccgtccatgtggcaactccacacccagcaaaaggcaagaccattgtaaacaatgacaaatcggtcaagtctccaaaatctgcgccaaaatctggtgtcccttgcaaatcgtgcagcaagtcattcatcagtcagacggcacttcaggctcactcgaaggcgaagcatgggggcaagtgagtcgcaggtccaatagagtcaacaacaaatgcgaaacatgggagaggagggtaagcgagagtctcgaaagagtgtcggtggaagtaggcctaaccttattttgtttagagacgggctatgcgttcgatgtagcaaaacaaggctgtggtttgtgtacttcaatatttgggttgtgtgtttcgaatttttttttgaacgtgtctcggattgttgtggtgcc

SEQ ID NO: 29532 - protein, 304 aa, Zea mays subsp. mays
  peptide (1)..(304): Ceres Seq. ID no. 12345383
  misc_feature (19)..(200): Pfam Name: Pfam Description:  Nucleoplasmin
  misc_feature (1)..(304): NCBI GI NO: 7716950 NR Description: histone deacetylase 2 isoform c [Zea mays]
  misc_feature (1)..(302): NCBI GI NO: 7489751 NR Description: histone deacetylase (EC 3
  misc_feature (1)..(304): NCBI GI NO: 7716948 NR Description: histone deacetylase 2 isoform b [Zea mays]
  misc_feature (1)..(304): NCBI GI NO: 7804960 NR Description: putative histone deacetylase HD2 [Oryza sativa]
  misc_feature (1)..(304): NCBI GI NO: 22597156 NR Description: nucleolar histone deacetylase HD2-P39
  misc_feature (1)..(269): NCBI GI NO: 25352191 NR Description: probable histone deacetylase (EC 3.5.1.-)
  misc_feature (1)..(269): NCBI GI NO: 30688577 NR Description: histone deacetylase-related protein
  misc_feature (1)..(301): NCBI GI NO: 11282318 NR Description: histone deacetylase-like protein
  misc_feature (1)..(281): NCBI GI NO: 14550106 NR Description: HD2 type histone deacetylase HDA106 [Zea mays]
  misc_feature (1)..(301): NCBI GI NO: 7804963 NR Description: putative histone deacetylase HD2c
MEFWGLEVKPGSTVKCEPGYGFVLHLSQAALGESKKSDNALMYVKIDDQKLAIGTLSVDKNPHIQFDLVFDKEFELSHTSKTTSVFFTGYKVEQPFEEDEPSSTMDLDSEDEDEERDVPVVKENGKADGKKQKSQEKAVAAPSKSSPDSKKSKDDDDSDEDETDDSDEDETDDSDEGLSSEEGDDDSSDEDDTSDDEEEDTPTPKKPEVGKKRAAESSVLKTPLSDKKAKVATPSSQKTGGKKGAAVHVATPHPAKGKTIVNNDKSVKSPKSAPKSGVPCKSCSKSFISQTALQAHSKAKHGGK

SEQ ID NO: 29533 - protein, 263 aa, Zea mays subsp. mays
  peptide (1)..(263): Ceres Seq. ID no. 12345384
  misc_feature (1)..(159): Pfam Name: Pfam Description:  Nucleoplasmin
  misc_feature (1)..(263): NCBI GI NO: 7716950 NR Description: histone deacetylase 2 isoform c [Zea mays]
  misc_feature (1)..(261): NCBI GI NO: 7489751 NR Description: histone deacetylase (EC 3
  misc_feature (1)..(263): NCBI GI NO: 7716948 NR Description: histone deacetylase 2 isoform b [Zea mays]
  misc_feature (1)..(263): NCBI GI NO: 7804960 NR Description: putative histone deacetylase HD2 [Oryza sativa]
  misc_feature (1)..(263): NCBI GI NO: 22597156 NR Description: nucleolar histone deacetylase HD2-P39
  misc_feature (1)..(228): NCBI GI NO: 25352191 NR Description: probable histone deacetylase (EC 3.5.1.-)
  misc_feature (1)..(228): NCBI GI NO: 30688577 NR Description: histone deacetylase-related protein
  misc_feature (1)..(260): NCBI GI NO: 11282318 NR Description: histone deacetylase-like protein
  misc_feature (1)..(240): NCBI GI NO: 14550106 NR Description: HD2 type histone deacetylase HDA106 [Zea mays]
  misc_feature (1)..(260): NCBI GI NO: 7804963 NR Description: putative histone deacetylase HD2c
MYVKIDDQKLAIGTLSVDKNPHIQFDLVFDKEFELSHTSKTTSVFFTGYKVEQPFEEDEPSSTMDLDSEDEDEERDVPVVKENGKADGKKQKSQEKAVAAPSKSSPDSKKSKDDDDSDEDETDDSDEDETDDSDEGLSSEEGDDDSSDEDDTSDDEEEDTPTPKKPEVGKKRAAESSVLKTPLSDKKAKVATPSSQKTGGKKGAAVHVATPHPAKGKTIVNNDKSVKSPKSAPKSGVPCKSCSKSFISQTALQAHSKAKHGGK

SEQ ID NO: 29534 - protein, 200 aa, Zea mays subsp. mays
  peptide (1)..(200): Ceres Seq. ID no. 12345385
  misc_feature (1)..(96): Pfam Name: Pfam Description:  Nucleoplasmin
  misc_feature (1)..(200): NCBI GI NO: 7716950 NR Description: histone deacetylase 2 isoform c [Zea mays]
  misc_feature (1)..(198): NCBI GI NO: 7489751 NR Description: histone deacetylase (EC 3
  misc_feature (1)..(200): NCBI GI NO: 7716948 NR Description: histone deacetylase 2 isoform b [Zea mays]
  misc_feature (1)..(200): NCBI GI NO: 7804960 NR Description: putative histone deacetylase HD2 [Oryza sativa]
  misc_feature (1)..(200): NCBI GI NO: 22597156 NR Description: nucleolar histone deacetylase HD2-P39
  misc_feature (1)..(165): NCBI GI NO: 25352191 NR Description: probable histone deacetylase (EC 3.5.1.-)
  misc_feature (1)..(165): NCBI GI NO: 30688577 NR Description: histone deacetylase-related protein
  misc_feature (1)..(197): NCBI GI NO: 11282318 NR Description: histone deacetylase-like protein
  misc_feature (1)..(177): NCBI GI NO: 14550106 NR Description: HD2 type histone deacetylase HDA106 [Zea mays]
  misc_feature (1)..(197): NCBI GI NO: 7804963 NR Description: putative histone deacetylase HD2c
MDLDSEDEDEERDVPVVKENGKADGKKQKSQEKAVAAPSKSSPDSKKSKDDDDSDEDETDDSDEDETDDSDEGLSSEEGDDDSSDEDDTSDDEEEDTPTPKKPEVGKKRAAESSVLKTPLSDKKAKVATPSSQKTGGKKGAAVHVATPHPAKGKTIVNNDKSVKSPKSAPKSGVPCKSCSKSFISQTALQAHSKAKHGGK

SEQ ID NO: 29535 - DNA, 954 bp, Zea mays subsp. mays
  misc_feature (1)..(954): Ceres Seq. ID no. 12343259
gccatgttcttgttttagttttccatgctctacatattgtatcaaattgttgcatggatgaggtttccatgctctctagattgatgtaaagatgaaagttaccttacctggagtacatgatgcctctggatttttctagctacttatcagtagcacattgtataccgagatgtgtttgtgatgttattttagtagtgtgataagtgttgtctgttatgctcttaaatggaggcatttgaccatccaatttagcttttctatgtgaagtcaatgaagcagaacctcttttttttgtgtgtgcacaaccacggcaatcctacgagccataaaccagagctagtactgaacaatttcactacacgccttggtcatcgtgttggaaggatgatccagtctctcttccctcaagatcccaatttccgcgggcgccgtgttgtgaccttccacaaccagcgagactacatatttttccgccatcacaggtacatcttcgagacaaaagaaaagaaggttgcttcgaaggaaaagacatctggaagcaaaagcggatctgagaagcagcaagtgatttgtcggcttcaggaatgtgggcctcgcttcaccctcaagctgctcaccttgcagcatgggaccttcgacacgaggagcggggagtacgagtgggttcacaagccggatatggatacgagcaggcggagattcttcttgtgatgccccaactccatcctgcggaacttcttttcttaaaaaaaagactttgacccctgttttgctgaagcagttttgtggaaccatcagtgagcagcaagtgatacggacttttatttttattttttattgttctggtttcggcgccagtgcgttggacaccaaaaccaaaagtgccggatgctccgatcctaaggcctgaacagtctatgcctccgtgatcagattaactcagatgattatccg

SEQ ID NO: 29536 - protein, 146 aa, Zea mays subsp. mays
  peptide (1)..(146): Ceres Seq. ID no. 12343260
  misc_feature (10)..(146): NCBI GI NO: 18411672 NR Description: expressed protein; protein id: At4g01560
  misc_feature (10)..(140): NCBI GI NO: 7485389 NR Description: hypothetical protein F11O4
  misc_feature (16)..(85): NCBI GI NO: 27371215 NR Description: Similar to RNA processing factor 1
  misc_feature (103)..(146): NCBI GI NO: 27371215 NR Description: Similar to RNA processing factor 1
  misc_feature (15)..(85): NCBI GI NO: 33440502 NR Description: Unknown (protein for IMAGE:5694049) [Mus musculus]
  misc_feature (103)..(146): NCBI GI NO: 33440502 NR Description: Unknown (protein for IMAGE:5694049) [Mus musculus]
  misc_feature (15)..(85): NCBI GI NO: 11360239 NR Description: hypothetical protein DKFZp761G0415
  misc_feature (15)..(85): NCBI GI NO: 17225079 NR Description: RNA processing factor 1 [Homo sapiens]
  misc_feature (15)..(85): NCBI GI NO: 13376605 NR Description: RNA processing factor 1 [Homo sapiens]
  misc_feature (103)..(146): NCBI GI NO: 11360239 NR Description: hypothetical protein DKFZp761G0415
MKQNLFFLCVHNHGNPTSHKPELVLNNFTTRLGHRVGRMIQSLFPQDPNFRGRRVVTFHNQRDYIFFRHHRYIFETKEKKVASKEKTSGSKSGSEKQQVICRLQECGPRFTLKLLTLQHGTFDTRSGEYEWVHKPDMDTSRRRFFL

SEQ ID NO: 29537 - protein, 108 aa, Zea mays subsp. mays
  peptide (1)..(108): Ceres Seq. ID no. 12343261
  misc_feature (1)..(108): NCBI GI NO: 18411672 NR Description: expressed protein; protein id: At4g01560
  misc_feature (1)..(102): NCBI GI NO: 7485389 NR Description: hypothetical protein F11O4
  misc_feature (1)..(47): NCBI GI NO: 27371215 NR Description: Similar to RNA processing factor 1
  misc_feature (65)..(108): NCBI GI NO: 27371215 NR Description: Similar to RNA processing factor 1
  misc_feature (1)..(47): NCBI GI NO: 33440502 NR Description: Unknown (protein for IMAGE:5694049) [Mus musculus]
  misc_feature (65)..(108): NCBI GI NO: 33440502 NR Description: Unknown (protein for IMAGE:5694049) [Mus musculus]
  misc_feature (1)..(47): NCBI GI NO: 11360239 NR Description: hypothetical protein DKFZp761G0415
  misc_feature (1)..(47): NCBI GI NO: 17225079 NR Description: RNA processing factor 1 [Homo sapiens]
  misc_feature (1)..(47): NCBI GI NO: 13376605 NR Description: RNA processing factor 1 [Homo sapiens]
  misc_feature (65)..(108): NCBI GI NO: 11360239 NR Description: hypothetical protein DKFZp761G0415
MIQSLFPQDPNFRGRRVVTFHNQRDYIFFRHHRYIFETKEKKVASKEKTSGSKSGSEKQQVICRLQECGPRFTLKLLTLQHGTFDTRSGEYEWVHKPDMDTSRRRFFL

SEQ ID NO: 29538 - protein, 94 aa, Zea mays subsp. mays
  peptide (1)..(94): Ceres Seq. ID no. 12343262
MGPSTRGAGSTSGFTSRIWIRAGGDSSCDAPTPSCGTSFLKKKTLTPVLLKQFCGTISEQQVIRTFIFIFYCSGFGASALDTKTKSAGCSDPKA

SEQ ID NO: 29539 - DNA, 1079 bp, Zea mays subsp. mays
  misc_feature (1)..(1079): Ceres Seq. ID no. 12402905
aagctcttgaggagatgctgcaatgaaacatggctcctctgtctcctagactggtagtgcccgtagacgtgaagaagctgccgcgggagcaaaaggtccctctccacaaccgctggcacccggatatccctcctgtcgctgatgtaaccgaaggggaattgttccgcgttgagatggtcgattggagtggagggcgggttagggatgataactctgcagatgatctgaaattcatggatttcacaattgctcattatcttagtgggcccctaagaatagttgattctgaaggggttccagcttcaccaggtgatcttctcgcggtagaaatctgcaaccttggcccacttcctggcgacgagtggggttacaccgcaatacttgaaagggagaatggaggtggattcttaactgaccacttccctagcgcaagaaaagccatctggtatttcgaaggaatctacgcatgctccccgcagataccaggtgttcgttttccaggattgactcatcctggtgttgtgggaactgcaccgtcacttgagctcctaaatatatggaatgaaagagagaaaagtttgtctgagacaagcccggagactattaaactgtgtgaagttctacaccagaggccccttgctcatttaccgacccctgaaaattgcttacttgggaaggtccaagaagggactgctgaatggcacataattgcaaacgaagcggccagaactattgctggaagggaaaatggcgggaattgcgacataaagaacctaagcagaggctccagaatttatctaccagtgtttgtcgaaggagcaaacctcagcactggtgacatgcacttctcccagggggacggcgagatttcgctgtgtggagcaattgaaatgagcgggttccttgagctcaagtaattctgttcttatttacacttcagcactacatgatagtatgacatctcgcattcatcgagcagacctaagtgcttggttcgaggaatgagctagtccatcatcttatcacatctcacttttttgtttcgtttgtggagtgaaatgagatcataaccttatttc

SEQ ID NO: 29540 - protein, 295 aa, Zea mays subsp. mays
  peptide (1)..(295): Ceres Seq. ID no. 12402906
  misc_feature (8)..(295): Pfam Name: Pfam Description:  Acetamidase/Formamidase family
  misc_feature (1)..(295): NCBI GI NO: 34909818 NR Description: putative formamidase
  misc_feature (1)..(295): NCBI GI NO: 14334654 NR Description: putative formamidase [Arabidopsis thaliana]
  misc_feature (1)..(295): NCBI GI NO: 18420071 NR Description: formamidase - like protein; protein id:At4g37560
  misc_feature (1)..(295): NCBI GI NO: 18420069 NR Description: formamidase - like protein; protein id:At4g37550
  misc_feature (1)..(295): NCBI GI NO: 21592429 NR Description: formamidase-like protein [Arabidopsis thaliana]
  misc_feature (1)..(202): NCBI GI NO: 7488106 NR Description: probable formamidase (EC 3
  misc_feature (210)..(295): NCBI GI NO: 7488106 NR Description: probable formamidase (EC 3
  misc_feature (4)..(295): NCBI GI NO: 19115927 NR Description: formamidase-like protein
  misc_feature (1)..(294): NCBI GI NO: 32421387 NR Description: hypothetical protein [Neurospora crassa]
  misc_feature (7)..(295): NCBI GI NO: 3913682 NR Description: Formamidase (Formamide amidohydrolase)
MAPLSPRLVVPVDVKKLPREQKVPLHNRWHPDIPPVADVTEGELFRVEMVDWSGGRVRDDNSADDLKFMDFTIAHYLSGPLRIVDSEGVPASPGDLLAVEICNLGPLPGDEWGYTAILERENGGGFLTDHFPSARKAIWYFEGIYACSPQIPGVRFPGLTHPGVVGTAPSLELLNIWNEREKSLSETSPETIKLCEVLHQRPLAHLPTPENCLLGKVQEGTAEWHIIANEAARTIAGRENGGNCDIKNLSRGSRIYLPVFVEGANLSTGDMHFSQGDGEISLCGAIEMSGFLELK

SEQ ID NO: 29541 - protein, 247 aa, Zea mays subsp. mays
  peptide (1)..(247): Ceres Seq. ID no. 12402907
  misc_feature (1)..(247): Pfam Name: Pfam Description:  Acetamidase/Formamidase family
  misc_feature (1)..(247): NCBI GI NO: 34909818 NR Description: putative formamidase
  misc_feature (1)..(247): NCBI GI NO: 14334654 NR Description: putative formamidase [Arabidopsis thaliana]
  misc_feature (1)..(247): NCBI GI NO: 18420071 NR Description: formamidase - like protein; protein id:At4g37560
  misc_feature (1)..(247): NCBI GI NO: 18420069 NR Description: formamidase - like protein; protein id:At4g37550
  misc_feature (1)..(247): NCBI GI NO: 21592429 NR Description: formamidase-like protein [Arabidopsis thaliana]
  misc_feature (1)..(154): NCBI GI NO: 7488106 NR Description: probable formamidase (EC 3
  misc_feature (162)..(247): NCBI GI NO: 7488106 NR Description: probable formamidase (EC 3
  misc_feature (1)..(247): NCBI GI NO: 19115927 NR Description: formamidase-like protein
  misc_feature (1)..(246): NCBI GI NO: 32421387 NR Description: hypothetical protein [Neurospora crassa]
  misc_feature (1)..(247): NCBI GI NO: 3913682 NR Description: Formamidase (Formamide amidohydrolase)
MVDWSGGRVRDDNSADDLKFMDFTIAHYLSGPLRIVDSEGVPASPGDLLAVEICNLGPLPGDEWGYTAILERENGGGFLTDHFPSARKAIWYFEGIYACSPQIPGVRFPGLTHPGVVGTAPSLELLNIWNEREKSLSETSPETIKLCEVLHQRPLAHLPTPENCLLGKVQEGTAEWHIIANEAARTIAGRENGGNCDIKNLSRGSRIYLPVFVEGANLSTGDMHFSQGDGEISLCGAIEMSGFLELK

SEQ ID NO: 29542 - protein, 227 aa, Zea mays subsp. mays
  peptide (1)..(227): Ceres Seq. ID no. 12402908
  misc_feature (1)..(227): Pfam Name: Pfam Description:  Acetamidase/Formamidase family
  misc_feature (1)..(227): NCBI GI NO: 34909818 NR Description: putative formamidase
  misc_feature (1)..(227): NCBI GI NO: 14334654 NR Description: putative formamidase [Arabidopsis thaliana]
  misc_feature (1)..(227): NCBI GI NO: 18420071 NR Description: formamidase - like protein; protein id:At4g37560
  misc_feature (1)..(227): NCBI GI NO: 18420069 NR Description: formamidase - like protein; protein id:At4g37550
  misc_feature (1)..(227): NCBI GI NO: 21592429 NR Description: formamidase-like protein [Arabidopsis thaliana]
  misc_feature (1)..(134): NCBI GI NO: 7488106 NR Description: probable formamidase (EC 3
  misc_feature (142)..(227): NCBI GI NO: 7488106 NR Description: probable formamidase (EC 3
  misc_feature (1)..(227): NCBI GI NO: 19115927 NR Description: formamidase-like protein
  misc_feature (1)..(226): NCBI GI NO: 32421387 NR Description: hypothetical protein [Neurospora crassa]
  misc_feature (1)..(227): NCBI GI NO: 3913682 NR Description: Formamidase (Formamide amidohydrolase)
MDFTIAHYLSGPLRIVDSEGVPASPGDLLAVEICNLGPLPGDEWGYTAILERENGGGFLTDHFPSARKAIWYFEGIYACSPQIPGVRFPGLTHPGVVGTAPSLELLNIWNEREKSLSETSPETIKLCEVLHQRPLAHLPTPENCLLGKVQEGTAEWHIIANEAARTIAGRENGGNCDIKNLSRGSRIYLPVFVEGANLSTGDMHFSQGDGEISLCGAIEMSGFLELK

SEQ ID NO: 29543 - DNA, 972 bp, Zea mays subsp. mays
  misc_feature (1)..(972): Ceres Seq. ID no. 12365773
agatcactggcagtcgcaagtagcaacccgcatcacgagttcacccacgctccccgcacaggcacagctcactagcgaccagggagttcaaacaagaggcaacaagaacgaacccacgcgaacgccaaagttcgctttgcttggttcgggccgctgcaccgccattgttgatctgttctccttctccttggaggagaaagaagagggggagaggaatgatggggcggacgagcgtggcggcggcggcggccctgctggtgctggcggcgtgcgcggctctgccggcgaggacggcggcgaacaagatcagcatcaactggaagcccaacgtgaactacaccgactggctgaagcagcacagccccttctacaaggacgactggctggtgttctactacacggcgggggcaggcggacgtggtgcaggtggacgaggtgggctacaacaagtgcgactccaccaacgccatctacaactacagcaaggggcgcagcttcgccttccagctcaacgagaccaagacctactacttcatctgcagctacggctactgcttcggcgggatgcgcctcgccatcaaggccgagaagctgccgccgccgtccccgccgccgtccgccagcgaccgctccgccgccgccatcgccgccttcgccaggtcccacgcgcccgtcatttacgccgccgtcgccgtgctcgccgcgctcctcaggatggtctagctgggaagaatctacccgccggccccttcgttggttcgaattgggactccttttttttgttcgttcatcctctccatctttttccgtagtgtgcttgggctctcaagaggagcagtagctggtggcggtgctggagtgctgcgttgggttcattaattaattagcggtgtggatttgccgaagcgattgattgagctgagattgatttttcaagtgtgaagaactctagctgccttgctgaattaaagt

SEQ ID NO: 29544 - protein, 279 aa, Zea mays subsp. mays
  peptide (1)..(279): Ceres Seq. ID no. 12365774
  misc_feature (144)..(241): Pfam Name: Pfam Description:  Glycoprotein GG/GX
  misc_feature (150)..(234): NCBI GI NO: 13265426 NR Description: At2g14890 [Arabidopsis thaliana]
  misc_feature (150)..(234): NCBI GI NO: 15226024 NR Description: arabinogalactan-protein
  misc_feature (148)..(234): NCBI GI NO: 25404769 NR Description: hypothetical protein F14K14.17
  misc_feature (140)..(241): NCBI GI NO: 8886076 NR Description: chitinase [Ajellomyces capsulatus]
  misc_feature (148)..(234): NCBI GI NO: 22330504 NR Description: arabinogalactan-protein, putative
  misc_feature (151)..(249): NCBI GI NO: 38345019 NR Description: OSJNBa0029H02.3
  misc_feature (148)..(237): NCBI GI NO: 81286 NR Description: extensin - Volvox carteri (fragment)
DHWQSQVATRITSSPTLPAQAQLTSDQGVQTRGNKNEPTRTPKFALLGSGRCTAIVDLFSFSLEEKEEGERNDGADERGGGGGPAGAGGVRGSAGEDGGEQDQHQLEAQRELHRLAEAAQPLLQGRLAGVLLHGGGRRTWCRWTRWATTSATPPTPSTTTARGAASPSSSTRPRPTTSSAATATASAGCASPSRPRSCRRRPRRRPPATAPPPPSPPSPGPTRPSFTPPSPCSPRSSGWSSWEESTRRPLRWFELGLLFFVRSSSPSFSVVCLGSQEEQ

SEQ ID NO: 29545 - protein, 198 aa, Zea mays subsp. mays
  peptide (1)..(198): Ceres Seq. ID no. 12365775
  misc_feature (11)..(64): NCBI GI NO: 13236660 NR Description: putative blue copper-binding protein
  misc_feature (14)..(64): NCBI GI NO: 38175738 NR Description: blue copper-binding protein-like
  misc_feature (14)..(64): NCBI GI NO: 34915266 NR Description: contains EST AU197337
MMGRTSVAAAAALLVLAACAALPARTAANKISINWKPNVNYTDWLKQHSPFYKDDWLVFYYTAGAGGRGAGGRGGLQQVRLHQRHLQLQQGAQLRLPAQRDQDLLLHLQLRLLLRRDAPRHQGREAAAAVPAAVRQRPLRRRHRRLRQVPRARHLRRRRRARRAPQDGLAGKNLPAGPFVGSNWDSFFLFVHPLHLFP

SEQ ID NO: 29546 - protein, 197 aa, Zea mays subsp. mays
  peptide (1)..(197): Ceres Seq. ID no. 12365776
  misc_feature (10)..(63): NCBI GI NO: 13236660 NR Description: putative blue copper-binding protein
  misc_feature (13)..(63): NCBI GI NO: 38175738 NR Description: blue copper-binding protein-like
  misc_feature (13)..(63): NCBI GI NO: 34915266 NR Description: contains EST AU197337
MGRTSVAAAAALLVLAACAALPARTAANKISINWKPNVNYTDWLKQHSPFYKDDWLVFYYTAGAGGRGAGGRGGLQQVRLHQRHLQLQQGAQLRLPAQRDQDLLLHLQLRLLLRRDAPRHQGREAAAAVPAAVRQRPLRRRHRRLRQVPRARHLRRRRRARRAPQDGLAGKNLPAGPFVGSNWDSFFLFVHPLHLFP

SEQ ID NO: 29547 - DNA, 1024 bp, Zea mays subsp. mays
  misc_feature (1)..(1024): Ceres Seq. ID no. 13498207
  misc_feature (122)..(122): n is a, c, t, g, unknown, or other
  misc_feature (434)..(434): n is a, c, t, g, unknown, or other
  misc_feature (419)..(419): n is a, c, t, g, unknown, or other
  misc_feature (757)..(757): n is a, c, t, g, unknown, or other
atcagtagctagctgttcgaagctttcagccgagcaccatcgtcacagtcagtagtagctaagcatatttctttctccgagtgatttgcgctgagcgatcagttcatccagagcgagcggantgaagctgagctgagcgagcttgcgtcgttgcttgagagaccctgccatggcttcccaccaggacaaggctagctaccaggccggcgaaaccaaggcccgcaccgaggagaagaccgggcaggcggtgggggcgaccaaggacacggcgcaacgccaaggaccgggcggcggacgcggcggggcacgcggcgggcaagggccaggacgccaaggaggccaccaagcagaaggcgtccgacaccggcagctacctgggcaagaagaccgacgaggccaagcacaaggccggcgagacnacggaggcgaccaancagaaggccggcgagacgacggaggcgaccaagcagaaggccggcgagacgacggaggccgccaggcagaaggcagccgacgccatggaggcagccaagcagaaggccgccgaggccgggcagtacgccaaggacaccgccgtctccggcaaggacaagtccggtggcgtcatccagcaggccactgagcaggtgaagagcgcggcggcgggcgccaaggacgcggtgatgagcacgctggggatgggcggggacgacaagcagggcgacgccaacaccaacaccaacactaacaccaacaccaacaccaacaaggacacctntaccatcaccagggatcactagacgcatgtatgcacacgcacttggtccgatcctgtcgtccgtgaccctgtttgcttgtttcgcgagtccagtatgggttttgtgcatgttcccagtgtcatggtttccttttctacgaatttggtgttgtaattttgatttgcaggtacgttgctgtgttttttctgcgtcatcaagtgtctgtaaacgagtcgggcgggtttgagtgtcctttgttgtgataataaagttggtaaatcgtaatt

SEQ ID NO: 29548 - protein, 150 aa, Zea mays subsp. mays
  peptide (1)..(150): Ceres Seq. ID no. 13498208
  misc_feature (38)..(150): Pfam Name: Pfam Description:  S-antigen protein
  misc_feature (1)..(35): NCBI GI NO: 20126724 NR Description: late embryogenesis-abundant protein
  misc_feature (1)..(129): NCBI GI NO: 7387829 NR Description: Late embryogenesis abundant protein, group 3 (LEA)
  misc_feature (11)..(150): NCBI GI NO: 23480318 NR Description: Drosop hila melanogaster CG8797 gene product-related
  misc_feature (1)..(150): NCBI GI NO: 23480318 NR Description: Drosop hila melanogaster CG8797 gene product-related
  misc_feature (13)..(150): NCBI GI NO: 30793991 NR Description: unknown protein [Arabidopsis thaliana]
  misc_feature (5)..(150): NCBI GI NO: 23480318 NR Description: Drosop hila melanogaster CG8797 gene product-related
  misc_feature (13)..(150): NCBI GI NO: 15224564 NR Description: glycine-rich protein [Arabidopsis thaliana]
  misc_feature (24)..(150): NCBI GI NO: 10954052 NR Description: ovarian fibroin-like substance-3 [Cyprinus carpio]
  misc_feature (1)..(123): NCBI GI NO: 7489493 NR Description: LEA protein - rice
  misc_feature (38)..(150): NCBI GI NO: 10954052 NR Description: ovarian fibroin-like substance-3 [Cyprinus carpio]
  misc_feature (84)..(84): Xaa is any aa, unknown or other
  misc_feature (89)..(89): Xaa is any aa, unknown or other
MASHQDKASYQAGETKARTEEKTGQAVGATKDTAQRQGPGGGRGGARGGQGPGRQGGHQAEGVRHRQLPGQEDRRGQAQGRRDXGGDQXEGRRDDGGDQAEGRRDDGGRQAEGSRRHGGSQAEGRRGRAVRQGHRRLRQGQVRWRHPAGH

SEQ ID NO: 29549 - protein, 86 aa, Zea mays subsp. mays
  peptide (1)..(86): Ceres Seq. ID no. 13498209
  misc_feature (1)..(86): NCBI GI NO: 7387829 NR Description: Late embryogenesis abundant protein, group 3 (LEA)
  misc_feature (1)..(86): NCBI GI NO: 7489493 NR Description: LEA protein - rice
  misc_feature (1)..(86): NCBI GI NO: 4105441 NR Description: group 3 LEA protein [Oryza sativa]
  misc_feature (1)..(86): NCBI GI NO: 7489569 NR Description: protein LEA type 1 - rice
  misc_feature (1)..(86): NCBI GI NO: 25989705 NR Description: LEA1 protein [Triticum aestivum]
  misc_feature (1)..(86): NCBI GI NO: 7387828 NR Description: Late embryogenesis abundant protein, group 3
  misc_feature (1)..(52): NCBI GI NO: 1808678 NR Description: hypothetical protein [Sporobolus stapfianus]
  misc_feature (1)..(84): NCBI GI NO: 20126724 NR Description: late embryogenesis-abundant protein
  misc_feature (1)..(86): NCBI GI NO: 126081 NR Description: ABA-inducible protein PHV A1
  misc_feature (1)..(86): NCBI GI NO: 25989707 NR Description: LEA3 protein [Triticum aestivum]
  misc_feature (80)..(80): Xaa is any aa, unknown or other
MEAAKQKAAEAGQYAKDTAVSGKDKSGGVIQQATEQVKSAAAGAKDAVMSTLGMGGDDKQGDANTNTNTNTNTNTNKDTXTITRDH

SEQ ID NO: 29550 - DNA, 1045 bp, Zea mays subsp. mays
  misc_feature (1)..(1045): Ceres Seq. ID no. 12402172
  misc_feature (261)..(261): n is a, c, t, g, unknown, or other
gaagggtcgaactaggcccgtcagagaatcagagctctgaggctgctcacatcaggccaccaccaacccctcacgtcggcggtggcgtcgtcggcgaaggcagagatggcgtccgtggccgcggcggaggtcgcggcggcggcgctccggtcggtgctgtcgcgcgcgcagcaggcggcggcgcgggcggggcgcgcgccggggtccgtgcgcgtggtggcggtgagcaagaccaagccggtgcctgtcatccggggcgtntacgacgcgggccaccgctgcttcggcgagaactacgtccaggagctcatcgacaaggcgcctcagcttcctgaggatattgagtggcacttcattgggaatctgcaaagcaacaaagccagagccctacttgctggcgtgccaaaccttgatatggttgagagtgtcgatgatgagaagattgctaaccgtcttgatcgagtggtagctgacttggggagaaaacctcttaaggttttggtccaagtcaacactagtggagaagaatcgaaatttggagtagatccctcaggatgcatggaactagcaaagcatgtcaaactgaactgcccgaaccttgtgttctctggtctgatgacaattgggatgcttgattactcctcaacccctgagaatttcaaggcgctggctaactgccgggaagaggtgtgcaaggagcttggaatacccgaagagcagtgcgaattgtctatgggcatgtcggctgattttgaacaagcgattgaaatgggaagcacaaatgtaagagttgggtcaaccatatttggtgcaagagaatacccaaagaagaactagggtgtttaactatatttggtgcccaaagaactagggtgcttatgcattcctgtcatgatggtagtggcacagaatctgcaacagatccaaatctgatgatgcatcatatatgtgcagttgtgtgcccattctactcagcttaaaacattttgacacccttttttggcccaaagtatcaataaggaaagttaataaaaagcattagacc

SEQ ID NO: 29551 - protein, 243 aa, Zea mays subsp. mays
  peptide (1)..(243): Ceres Seq. ID no. 12402173
  misc_feature (20)..(239): Pfam Name: Pfam Description:  Alanine racemase, N-terminal domain
  misc_feature (1)..(242): NCBI GI NO: 30682530 NR Description: Proline synthetase associated protein -related
  misc_feature (1)..(242): NCBI GI NO: 18391333 NR Description: putative Proline synthetase associated protein
  misc_feature (1)..(242): NCBI GI NO: 14030629 NR Description: AT4g26860/F10M23_200 [Arabidopsis thaliana]
  misc_feature (1)..(242): NCBI GI NO: 18416879 NR Description: putative Proline synthetase associated protein
  misc_feature (1)..(186): NCBI GI NO: 7445224 NR Description: hypothetical protein F10M23
  misc_feature (173)..(242): NCBI GI NO: 7445224 NR Description: hypothetical protein F10M23
  misc_feature (3)..(242): NCBI GI NO: 6005842 NR Description: proline synthetase co-transcribed homolog
  misc_feature (7)..(242): NCBI GI NO: 16930823 NR Description: proline synthetase co-transcribed [Mus musculus]
  misc_feature (1)..(242): NCBI GI NO: 11359716 NR Description: conserved hypothetical protein
  misc_feature (1)..(242): NCBI GI NO: 34879017 NR Description: similar to Proline synthetase associated
  misc_feature (52)..(52): Xaa is any aa, unknown or other
MASVAAAEVAAAALRSVLSRAQQAAARAGRAPGSVRVVAVSKTKPVPVIRGXYDAGHRCFGENYVQELIDKAPQLPEDIEWHFIGNLQSNKARALLAGVPNLDMVESVDDEKIANRLDRVVADLGRKPLKVLVQVNTSGEESKFGVDPSGCMELAKHVKLNCPNLVFSGLMTIGMLDYSSTPENFKALANCREEVCKELGIPEEQCELSMGMSADFEQAIEMGSTNVRVGSTIFGAREYPKKN

SEQ ID NO: 29552 - protein, 140 aa, Zea mays subsp. mays
  peptide (1)..(140): Ceres Seq. ID no. 12402174
  misc_feature (1)..(136): Pfam Name: Pfam Description:  Alanine racemase, N-terminal domain
  misc_feature (1)..(139): NCBI GI NO: 30682530 NR Description: Proline synthetase associated protein -related
  misc_feature (1)..(139): NCBI GI NO: 18391333 NR Description: putative Proline synthetase associated protein
  misc_feature (1)..(139): NCBI GI NO: 14030629 NR Description: AT4g26860/F10M23_200 [Arabidopsis thaliana]
  misc_feature (1)..(139): NCBI GI NO: 18416879 NR Description: putative Proline synthetase associated protein
  misc_feature (1)..(83): NCBI GI NO: 7445224 NR Description: hypothetical protein F10M23
  misc_feature (70)..(139): NCBI GI NO: 7445224 NR Description: hypothetical protein F10M23
  misc_feature (1)..(139): NCBI GI NO: 6005842 NR Description: proline synthetase co-transcribed homolog
  misc_feature (1)..(139): NCBI GI NO: 16930823 NR Description: proline synthetase co-transcribed [Mus musculus]
  misc_feature (1)..(139): NCBI GI NO: 11359716 NR Description: conserved hypothetical protein
  misc_feature (1)..(139): NCBI GI NO: 34879017 NR Description: similar to Proline synthetase associated
MVESVDDEKIANRLDRVVADLGRKPLKVLVQVNTSGEESKFGVDPSGCMELAKHVKLNCPNLVFSGLMTIGMLDYSSTPENFKALANCREEVCKELGIPEEQCELSMGMSADFEQAIEMGSTNVRVGSTIFGAREYPKKN

SEQ ID NO: 29553 - DNA, 1115 bp, Zea mays subsp. mays
  misc_feature (1)..(1115): Ceres Seq. ID no. 12353939
agtcccgattcccgaacaagagcgaggccgcactcccccacgagtccactctccgaccgcacgctccgcgacgcgatggccgcgctccgcctcgcctccttcaccctccgccccgccgccgccgccgccgcctcttccggcgcgactccatcggctccccggtccgcctctttctccagcgtggcgcgggggctcccctccctccgcctggccccgccccgccgccgccgcggggacctcgccaggccccgcgccgcggccgaggccgcggcggagagctacgcgtccgcgctgtcggaggtggccgtcgagaacggcaccctcgagcagacggtctccgacctcgagaagctggagaagatcttctccgacgaggccgtcgccgagttcttcgacaaccccaccgtcccgcgcgaggagaaggccgagctcatcggcgagatcgccaagtcgtccgagcttcagccgcacgtcgtcaacttcctcaacgtcgtcgtcgacaacttccgcgcgtccatcgtgccgcagatcgtcgtcgagttcgagaacgtctacaactcgctcacgggcaccgaggtcgccaccgtcacctccgtcgtgcagctcgagtcgcaggacctcgcgcagatcgcgcagcacgtccagaagatgaccggcgccaagaacgtccgcctcaagacgcagctcgacccggcgctcatcgccggcttcaccgtgcagtacggccgcgacggctccaacttgatcgacatgagcgtccggaagcagatcgaggagatcgcgtccgagttcgagttgcccgccgtcccgctcgaagtctgaggccggcttgaggcgtccatcctcgccctcgaagctatagctgcggctactgtctcaaggaaccaagcgggaatgttggcactgtccccttcagtcagacctgcggatcaacggcggtggctccaaatctccaatactactacatatgaacggacactatttttgtgcgtttctgttgacgggaacctgtgtagttctttctcctttttttccctgtggttgacagacacagacactgtaatatgtttattaaaaacactcatctatatagctgagtgtgcacctcttctctc

SEQ ID NO: 29554 - protein, 276 aa, Zea mays subsp. mays
  peptide (1)..(276): Ceres Seq. ID no. 12353940
  misc_feature (80)..(276): Pfam Name: Pfam Description:  HlyD family secretion protein
  misc_feature (9)..(259): NCBI GI NO: 79833 NR Description: hypothetical 119
SRFPNKSEAALPHESTLRPHAPRRDGRAPPRLLHPPPRRRRRRLFRRDSIGSPVRLFLQRGAGAPLPPPGPAPPPPRGPRQAPRRGRGRGGELRVRAVGGGRRERHPRADGLRPREAGEDLLRRGRRRVLRQPHRPARGEGRAHRRDRQVVRASAARRQLPQRRRRQLPRVHRAADRRRVRERLQLAHGHRGRHRHLRRAARVAGPRADRAARPEDDRRQERPPQDAARPGAHRRLHRAVRPRRLQLDRHERPEADRGDRVRVRVARRPARSLRPA

SEQ ID NO: 29555 - protein, 273 aa, Zea mays subsp. mays
  peptide (1)..(273): Ceres Seq. ID no. 12353941
  misc_feature (90)..(264): Pfam Name: OSCP Pfam Description: ATP synthase delta
  misc_feature (26)..(273): NCBI GI NO: 1168587 NR Description: ATP synthase delta chain, chloroplast precursor
  misc_feature (89)..(273): NCBI GI NO: 1084479 NR Description: H+-transporting two-sector ATPase (EC 3
  misc_feature (26)..(273): NCBI GI NO: 416681 NR Description: ATP synthase delta chain, chloroplast precursor
  misc_feature (26)..(273): NCBI GI NO: 170098 NR Description: ATP synthase delta subunit precursor
  misc_feature (26)..(273): NCBI GI NO: 114584 NR Description: ATP synthase delta chain, chloroplast precursor
  misc_feature (56)..(271): NCBI GI NO: 15233985 NR Description: H+-transporting ATP synthase-like protein
  misc_feature (56)..(271): NCBI GI NO: 18491181 NR Description: putative H+-transporting ATP synthase
  misc_feature (55)..(273): NCBI GI NO: 399082 NR Description: ATP synthase delta chain, chloroplast precursor
  misc_feature (140)..(271): NCBI GI NO: 1480014 NR Description: putative delta subunit of ATP synthase
  misc_feature (69)..(263): NCBI GI NO: 5902612 NR Description: ATP synthase-delta chain
SPDSRTRARPHSPTSPLSDRTLRDAMAALRLASFTLRPAAAAAASSGATPSAPRSASFSSVARGLPSLRLAPPRRRRGDLARPRAAAEAAAESYASALSEVAVENGTLEQTVSDLEKLEKIFSDEAVAEFFDNPTVPREEKAELIGEIAKSSELQPHVVNFLNVVVDNFRASIVPQIVVEFENVYNSLTGTEVATVTSVVQLESQDLAQIAQHVQKMTGAKNVRLKTQLDPALIAGFTVQYGRDGSNLIDMSVRKQIEEIASEFELPAVPLEV

SEQ ID NO: 29556 - protein, 248 aa, Zea mays subsp. mays
  peptide (1)..(248): Ceres Seq. ID no. 12353942
  misc_feature (65)..(239): Pfam Name: OSCP Pfam Description: ATP synthase delta
  misc_feature (1)..(248): NCBI GI NO: 1168587 NR Description: ATP synthase delta chain, chloroplast precursor
  misc_feature (64)..(248): NCBI GI NO: 1084479 NR Description: H+-transporting two-sector ATPase (EC 3
  misc_feature (1)..(248): NCBI GI NO: 416681 NR Description: ATP synthase delta chain, chloroplast precursor
  misc_feature (1)..(248): NCBI GI NO: 170098 NR Description: ATP synthase delta subunit precursor
  misc_feature (1)..(248): NCBI GI NO: 114584 NR Description: ATP synthase delta chain, chloroplast precursor
  misc_feature (31)..(246): NCBI GI NO: 15233985 NR Description: H+-transporting ATP synthase-like protein
  misc_feature (31)..(246): NCBI GI NO: 18491181 NR Description: putative H+-transporting ATP synthase
  misc_feature (30)..(248): NCBI GI NO: 399082 NR Description: ATP synthase delta chain, chloroplast precursor
  misc_feature (115)..(246): NCBI GI NO: 1480014 NR Description: putative delta subunit of ATP synthase
  misc_feature (44)..(238): NCBI GI NO: 5902612 NR Description: ATP synthase-delta chain
MAALRLASFTLRPAAAAAASSGATPSAPRSASFSSVARGLPSLRLAPPRRRRGDLARPRAAAEAAAESYASALSEVAVENGTLEQTVSDLEKLEKIFSDEAVAEFFDNPTVPREEKAELIGEIAKSSELQPHVVNFLNVVVDNFRASIVPQIVVEFENVYNSLTGTEVATVTSVVQLESQDLAQIAQHVQKMTGAKNVRLKTQLDPALIAGFTVQYGRDGSNLIDMSVRKQIEEIASEFELPAVPLEV

SEQ ID NO: 29557 - DNA, 721 bp, Zea mays subsp. mays
  misc_feature (1)..(721): Ceres Seq. ID no. 12403367
acggagtcaccacgaacctatcgactttttatctccagatccagattagctaccacggcaccgccagcccggacggctataaagacgaggcccacctcgaaatcgacggcgatgaagaagaccagttcccctctcctgatcgtcctgttcctcacagcagcagccatggcggccgagccggagaagcaggcggcccccgcggcacaggagacggccgtgcacatcgtgtacgttgaccgccccgaggacgccgaccctgaggagttccacatccgcaccctcacccccgtcctcggcagcgaacagaaggccagggacgcagtgctctaccactacaagaacgccgccagcggcttctccgcgaagctcaccccccagcaggtcaaggatctcaaggagcaaccaggtgttctccaggttgtgccgagccagacttaccagctacatggtcctgggtctggcactcaccagggcacgacacacaccttgggccttatgtgaaggcgtatgagaatcaagaagactgtgtttagtatggctgtatggcacaggtctgacgaatgtgtatagtacagtactatgtaagaataagggacgtatcgtctatatactgctttgcgcatgttcagccctgttctaaagcttgtaatgcaccaatgcgtatgtttcaatacaatgacaagtatgctatcttgtttggtgcttgttcgatccgtgtttc

SEQ ID NO: 29558 - protein, 166 aa, Zea mays subsp. mays
  peptide (1)..(166): Ceres Seq. ID no. 12403368
  misc_feature (73)..(149): Pfam Name: Pfam Description:  Subtilisin N-terminal Region
  misc_feature (50)..(154): NCBI GI NO: 18409953 NR Description: expressed protein; protein id: At1g71950
  misc_feature (50)..(154): NCBI GI NO: 21593285 NR Description: unknown [Arabidopsis thaliana]
  misc_feature (46)..(151): NCBI GI NO: 3204125 NR Description: putative Pi starvation-induced protein
  misc_feature (70)..(149): NCBI GI NO: 7489176 NR Description: pit2 protein
  misc_feature (41)..(146): NCBI GI NO: 34394844 NR Description: unknown protein
  misc_feature (48)..(148): NCBI GI NO: 28376696 NR Description: putative Pi starvation induced protein
  misc_feature (67)..(162): NCBI GI NO: 18416719 NR Description: subtilisin-like serine protease
  misc_feature (65)..(148): NCBI GI NO: 4115920 NR Description: similar to the subtilase family of serine proteases
  misc_feature (65)..(148): NCBI GI NO: 18413353 NR Description: subtilisin-like serine protease
  misc_feature (65)..(148): NCBI GI NO: 7435680 NR Description: subtilisin-like proteinase homolog T4F9
TESPRTYRLFISRSRLATTAPPARTAIKTRPTSKSTAMKKTSSPLLIVLFLTAAAMAAEPEKQAAPAAQETAVHIVYVDRPEDADPEEFHIRTLTPVLGSEQKARDAVLYHYKNAASGFSAKLTPQQVKDLKEQPGVLQVVPSQTYQLHGPGSGTHQGTTHTLGLM

SEQ ID NO: 29559 - protein, 129 aa, Zea mays subsp. mays
  peptide (1)..(129): Ceres Seq. ID no. 12403369
  misc_feature (36)..(112): Pfam Name: Pfam Description:  Subtilisin N-terminal Region
  misc_feature (13)..(117): NCBI GI NO: 18409953 NR Description: expressed protein; protein id: At1g71950
  misc_feature (13)..(117): NCBI GI NO: 21593285 NR Description: unknown [Arabidopsis thaliana]
  misc_feature (9)..(114): NCBI GI NO: 3204125 NR Description: putative Pi starvation-induced protein
  misc_feature (33)..(112): NCBI GI NO: 7489176 NR Description: pit2 protein
  misc_feature (4)..(109): NCBI GI NO: 34394844 NR Description: unknown protein
  misc_feature (11)..(111): NCBI GI NO: 28376696 NR Description: putative Pi starvation induced protein
  misc_feature (30)..(125): NCBI GI NO: 18416719 NR Description: subtilisin-like serine protease
  misc_feature (28)..(111): NCBI GI NO: 4115920 NR Description: similar to the subtilase family of serine proteases
  misc_feature (28)..(111): NCBI GI NO: 18413353 NR Description: subtilisin-like serine protease
  misc_feature (28)..(111): NCBI GI NO: 7435680 NR Description: subtilisin-like proteinase homolog T4F9
MKKTSSPLLIVLFLTAAAMAAEPEKQAAPAAQETAVHIVYVDRPEDADPEEFHIRTLTPVLGSEQKARDAVLYHYKNAASGFSAKLTPQQVKDLKEQPGVLQVVPSQTYQLHGPGSGTHQGTTHTLGLM

SEQ ID NO: 29560 - protein, 111 aa, Zea mays subsp. mays
  peptide (1)..(111): Ceres Seq. ID no. 12403370
  misc_feature (18)..(94): Pfam Name: Pfam Description:  Subtilisin N-terminal Region
  misc_feature (1)..(99): NCBI GI NO: 18409953 NR Description: expressed protein; protein id: At1g71950
  misc_feature (1)..(99): NCBI GI NO: 21593285 NR Description: unknown [Arabidopsis thaliana]
  misc_feature (1)..(96): NCBI GI NO: 3204125 NR Description: putative Pi starvation-induced protein
  misc_feature (15)..(94): NCBI GI NO: 7489176 NR Description: pit2 protein
  misc_feature (1)..(91): NCBI GI NO: 34394844 NR Description: unknown protein
  misc_feature (1)..(93): NCBI GI NO: 28376696 NR Description: putative Pi starvation induced protein
  misc_feature (12)..(107): NCBI GI NO: 18416719 NR Description: subtilisin-like serine protease
  misc_feature (10)..(93): NCBI GI NO: 4115920 NR Description: similar to the subtilase family of serine proteases
  misc_feature (10)..(93): NCBI GI NO: 18413353 NR Description: subtilisin-like serine protease
  misc_feature (10)..(93): NCBI GI NO: 7435680 NR Description: subtilisin-like proteinase homolog T4F9
MAAEPEKQAAPAAQETAVHIVYVDRPEDADPEEFHIRTLTPVLGSEQKARDAVLYHYKNAASGFSAKLTPQQVKDLKEQPGVLQVVPSQTYQLHGPGSGTHQGTTHTLGLM

SEQ ID NO: 29561 - DNA, 825 bp, Zea mays subsp. mays
  misc_feature (1)..(825): Ceres Seq. ID no. 12404319
actctattcccattccaagcccccgctctcggattcccgacgacgagctcagagctcctcctctcctcccctgctcggtgttcgacgcaacagctgccgccatgtctgccgccaaccagctcgccgccctcgtcagcaacatgtacgccacgggtttgcttgacgatcagttccagcagctccagatgctccagaacgccagtactcctgacttcgtctccgaggtcgtcacgctcttctgccaggacggcgagcggatcatcggagagctggccaaactgttggagaaacccaacgtggattttgacagggttgacgcctttgtgcatcagctcaaaggaagcagtgcaagtattggtgctcagaaggttaagaacacttgcattcagttccgcgaatcctgtcagcagaagagcaaagatgggtgcctcaagacactggagacagtgaagattaacttctatgacctgcgtgacaagtttcagaccatgcttcagctgcagcgtcaggtcaatggctgtccccccagcaagtgaacaagatggtggagtggagcttcatgttgggatgatgcgtgcatctttcaagttccagaacattctgaataagctcctcaattggcttctaggaagtctgtaatagcttagcagcaagattagcgttgacaccaccgtagcagaagtcaatgtcgtcgtttttgtgtcaccgtcttagtcgtaagtgtccgtgctgggtgatggatctcctgcaagcagttgcaagtggtccatttactatgtagtagtggctctgaataatctatatcttagcaatgaatttggcaac

SEQ ID NO: 29562 - protein, 177 aa, Zea mays subsp. mays
  peptide (1)..(177): Ceres Seq. ID no. 12404320
  misc_feature (34)..(177): NCBI GI NO: 22036126 NR Description: his-containing phosphotransfer protein [Zea mays]
  misc_feature (34)..(177): NCBI GI NO: 6009622 NR Description: histidine-containing phosphotransfer protein
  misc_feature (32)..(175): NCBI GI NO: 33637786 NR Description: two-component phosphorelay mediator HP2
  misc_feature (32)..(177): NCBI GI NO: 33637784 NR Description: two-component phosphorelay mediator HP1
  misc_feature (32)..(170): NCBI GI NO: 5689238 NR Description: histidine-containing phosphotransfer protein
  misc_feature (46)..(170): NCBI GI NO: 15233079 NR Description: two-component phosphorelay mediator, putative
  misc_feature (30)..(170): NCBI GI NO: 18379097 NR Description: putative AHP2; protein id: At1g03430
  misc_feature (46)..(170): NCBI GI NO: 13774348 NR Description: histidine-containing phosphotransfer protein
  misc_feature (30)..(170): NCBI GI NO: 21593802 NR Description: putative AHP2 [Arabidopsis thaliana]
  misc_feature (28)..(170): NCBI GI NO: 15228686 NR Description: ATHP2, putative; protein id: At3g29350
SIPIPSPRSRIPDDELRAPPLLPCSVFDATAAAMSAANQLAALVSNMYATGLLDDQFQQLQMLQNASTPDFVSEVVTLFCQDGERIIGELAKLLEKPNVDFDRVDAFVHQLKGSSASIGAQKVKNTCIQFRESCQQKSKDGCLKTLETVKINFYDLRDKFQTMLQLQRQVNGCPPSK

SEQ ID NO: 29563 - protein, 149 aa, Zea mays subsp. mays
  peptide (1)..(149): Ceres Seq. ID no. 12404321
TLFPFQAPALGFPTTSSELLLSSPARCSTQQLPPCLPPTSSPPSSATCTPRVCLTISSSSSRCSRTPVLLTSSPRSSRSSARTASGSSESWPNCWRNPTWILTGLTPLCISSKEAVQVLVLRRLRTLAFSSANPVSRRAKMGASRHWRQ

SEQ ID NO: 29564 - protein, 144 aa, Zea mays subsp. mays
  peptide (1)..(144): Ceres Seq. ID no. 12404322
  misc_feature (1)..(144): NCBI GI NO: 22036126 NR Description: his-containing phosphotransfer protein [Zea mays]
  misc_feature (1)..(144): NCBI GI NO: 6009622 NR Description: histidine-containing phosphotransfer protein
  misc_feature (1)..(142): NCBI GI NO: 33637786 NR Description: two-component phosphorelay mediator HP2
  misc_feature (1)..(144): NCBI GI NO: 33637784 NR Description: two-component phosphorelay mediator HP1
  misc_feature (1)..(137): NCBI GI NO: 5689238 NR Description: histidine-containing phosphotransfer protein
  misc_feature (13)..(137): NCBI GI NO: 15233079 NR Description: two-component phosphorelay mediator, putative
  misc_feature (1)..(137): NCBI GI NO: 18379097 NR Description: putative AHP2; protein id: At1g03430
  misc_feature (13)..(137): NCBI GI NO: 13774348 NR Description: histidine-containing phosphotransfer protein
  misc_feature (1)..(137): NCBI GI NO: 21593802 NR Description: putative AHP2 [Arabidopsis thaliana]
  misc_feature (1)..(137): NCBI GI NO: 15228686 NR Description: ATHP2, putative; protein id: At3g29350
MSAANQLAALVSNMYATGLLDDQFQQLQMLQNASTPDFVSEVVTLFCQDGERIIGELAKLLEKPNVDFDRVDAFVHQLKGSSASIGAQKVKNTCIQFRESCQQKSKDGCLKTLETVKINFYDLRDKFQTMLQLQRQVNGCPPSK

SEQ ID NO: 29565 - DNA, 1116 bp, Zea mays subsp. mays
  misc_feature (1)..(1116): Ceres Seq. ID no. 13498100
gaatgagaccagttgccctctgccccaggcaaagctgcagctgcagctgccacagcggtgaccacgcacgctgcaccgcaccgcaccgacgggtgagacctgctgtgtccaccaaccgtgagcccagcaggcgaccgacgacgctagcttagactaggaaccaacaatggccacgcgccacctgctcctcctcctgctcgccgcgctgctcccggcggcggccacggcggacccggacgcggtgcaggactactgcgtgccggacacgggcggcgggcgcgggcgcgggcgggccgtggatctagcgctgctcccgtcctacccgtgcaggagccccgccaacctgacggcggcggacttcgccttcgcgggcgtgcgcgccgcgggcaacttctccgcggacacggggttcgcgggggtgtcggtgacccccgcgcagttcccggcgctgcacaccctcggcgtgtccttcgcgcgcgccgacctgtccgcggcgggcggggtcaacccgccgcactaccacccgcgcgccaccgagacggcgctggtcctggccggccgcgtctacgcgggattcgtcgactcgggcggccgcgtcttcgccaaggtgctcgagaaaggggaggtcatggtgttcccgcgcgccatggtgcacttccagatgaacgtcggcgacgagccggccacggtgtacggcaccttcaacagcgagaaccccggcatcgtgcgcatcccggcgaccgtgttcgggtccgggatcaaggacgccgtcctcgagagggcgttcggcctcgagccggaggagctccgccggctccagaagaggttcgggcctcctcccaagaccaagacggcggagatggacgattgatcggaagatcaggcactcgcgatcaagggggacatgattaattgattagttatattaagagcagcagactttgtgatctctggaatatatctccttccatttgttaatgtctgtatgaattatttggcggtggacggtggttatcatggaccgataatgccggtacgtacagatgggatgggcatgtggggttaggtgtcacattcaattgtctacgagatgtttatgggtttatatatattgtt

SEQ ID NO: 29566 - protein, 234 aa, Zea mays subsp. mays
  peptide (1)..(234): Ceres Seq. ID no. 13498101
  misc_feature (68)..(214): Pfam Name: Pfam Description:  Cupin
  misc_feature (8)..(223): NCBI GI NO: 15232830 NR Description: germin-like protein family [Arabidopsis thaliana]
  misc_feature (8)..(221): NCBI GI NO: 27529869 NR Description: germin-like protein [Barbula unguiculata]
  misc_feature (8)..(222): NCBI GI NO: 4996622 NR Description: germin-like protein [Atriplex lentiformis]
  misc_feature (6)..(223): NCBI GI NO: 34904670 NR Description: putative germin protein
  misc_feature (1)..(221): NCBI GI NO: 7447330 NR Description: probable oxalate oxidase (EC 1.2.3.4) - rice
  misc_feature (6)..(222): NCBI GI NO: 15241589 NR Description: germin-like protein, putative
  misc_feature (6)..(222): NCBI GI NO: 18202909 NR Description: Putative germin-like protein subfamily 1 member 12precursor
  misc_feature (1)..(226): NCBI GI NO: 15230582 NR Description: germin-like protein (GLP8) [Arabidopsis thaliana]
  misc_feature (6)..(223): NCBI GI NO: 18203442 NR Description: Rhicadhesin receptor precursor
  misc_feature (6)..(226): NCBI GI NO: 21592538 NR Description: germin-like protein [Arabidopsis thaliana]
MATRHLLLLLLAALLPAAATADPDAVQDYCVPDTGGGRGRGRAVDLALLPSYPCRSPANLTAADFAFAGVRAAGNFSADTGFAGVSVTPAQFPALHTLGVSFARADLSAAGGVNPPHYHPRATETALVLAGRVYAGFVDSGGRVFAKVLEKGEVMVFPRAMVHFQMNVGDEPATVYGTFNSENPGIVRIPATVFGSGIKDAVLERAFGLEPEELRRLQKRFGPPPKTKTAEMDD

SEQ ID NO: 29567 - DNA, 849 bp, Zea mays subsp. mays
  misc_feature (1)..(849): Ceres Seq. ID no. 13498110
  misc_feature (197)..(197): n is a, c, t, g, unknown, or other
acgatctctatttcccatttccgggcggctcccgttctccacctcaattattgcccacccatccccgctccctcctctcctctcctcccgtcccacccatctcctcgcaccagcgccgggggaatggcggccgcgctgtggacgctggtggtggcggtggccctgtcggcggcgctggcctcgaaccgccccgtggngcgggcggcgacggcggcggcggaggcggcgaacgaggtgctccgcgcgcaccagctgccggggggcctgctgccggcggggatcacggcgttccggcacgacgccgccacgggagcgttcgaggcccggctggacgcgccctgcacggcgcgcttcgaggtcggcctccgctacaacgccaccgtctccggggtcatcagccccggccagatcgcccgacatctccggcgtcgccgcgcaggacctcttcatgtggttccccgtccacgacatcaaggtcgacatcccctcctccggcgtcatctacttcaacgtcggcgtcgtcaagaagcacctcccgctcgccgtcttcgacgcgccgccggcttgcacgcccgacccgctcctgcagcggctggaggacgtgggcgagggcggattggccgtggtgggcgccgcggcgtcccggcgatgatgggtggaggagacggaggagggttcgacggcgccggcgagccaggatcacgagcgcagttttgagaggagaacgggcgatcgccggccttcttcgatgcacatagatagcgtgggcatttccatctgttttctttttctgcttcctactagtggctacactagtaaccaacctcgtctatcattgttcgtttcgcc

SEQ ID NO: 29568 - protein, 251 aa, Zea mays subsp. mays
  peptide (1)..(251): Ceres Seq. ID no. 13498111
  misc_feature (32)..(97): Pfam Name: Pfam Description:  Bindin
  misc_feature (39)..(196): NCBI GI NO: 24643731 NR Description: CG10918-PA [Drosophila melanogaster]
  misc_feature (40)..(177): NCBI GI NO: 9453857 NR Description: EBNA-1 [Cynomolgus Epstein-Barr Virus TsB-B6]
  misc_feature (7)..(119): NCBI GI NO: 9625624 NR Description: nuclear antigen EBNA1 [Human herpesvirus 4]
  misc_feature (40)..(110): NCBI GI NO: 7106228 NR Description: flagelliform silk protein
  misc_feature (40)..(180): NCBI GI NO: 9453859 NR Description: EBNA-1 [Cynomolgus Epstein-Barr Virus Si-IIA]
  misc_feature (39)..(178): NCBI GI NO: 18025496 NR Description: EBNA-1 [cercopithicine herpesvirus 15]
  misc_feature (40)..(115): NCBI GI NO: 322647 NR Description: glycine-rich protein GRP22 - rape
  misc_feature (40)..(95): NCBI GI NO: 322647 NR Description: glycine-rich protein GRP22 - rape
  misc_feature (7)..(119): NCBI GI NO: 24652652 NR Description: CG13214-PA [Drosophila melanogaster]
  misc_feature (40)..(121): NCBI GI NO: 24652652 NR Description: CG13214-PA [Drosophila melanogaster]
  misc_feature (65)..(65): Xaa is any aa, unknown or other
DLYFPFPGGSRSPPQLLPTHPRSLLSSPPVPPISSHQRRGNGGRAVDAGGGGGPVGGAGLEPPRXAGGDGGGGGGERGAPRAPAAGGPAAGGDHGVPARRRHGSVRGPAGRALHGALRGRPPLQRHRLRGHQPRPDRPTSPASPRRTSSCGSPSTTSRSTSPPPASSTSTSASSRSTSRSPSSTRRRLARPTRSCSGWRTWARADWPWWAPRRPGDDGWRRRRRVRRRRRARITSAVLRGERAIAGLLRCT

SEQ ID NO: 29569 - protein, 238 aa, Zea mays subsp. mays
  peptide (1)..(238): Ceres Seq. ID no. 13498112
  misc_feature (68)..(138): Pfam Name: Pfam Description:  Protein of unknown function, DUF538
  misc_feature (68)..(138): NCBI GI NO: 34906900 NR Description: P0470A12.30
  misc_feature (50)..(138): NCBI GI NO: 18397959 NR Description: expressed protein [Arabidopsis thaliana]
  misc_feature (50)..(138): NCBI GI NO: 6041854 NR Description: unknown protein [Arabidopsis thaliana]
  misc_feature (49)..(137): NCBI GI NO: 6041844 NR Description: unknown protein [Arabidopsis thaliana]
  misc_feature (49)..(137): NCBI GI NO: 22330911 NR Description: expressed protein [Arabidopsis thaliana]
  misc_feature (49)..(137): NCBI GI NO: 21592465 NR Description: unknown [Arabidopsis thaliana]
  misc_feature (78)..(137): NCBI GI NO: 9759120 NR Description: gb|AAF02163
  misc_feature (78)..(137): NCBI GI NO: 18417957 NR Description: expressed protein [Arabidopsis thaliana]
  misc_feature (78)..(137): NCBI GI NO: 21536941 NR Description: unknown [Arabidopsis thaliana]
  misc_feature (42)..(137): NCBI GI NO: 34898576 NR Description: P0534A03.14
  misc_feature (66)..(66): Xaa is any aa, unknown or other
TISISHFRAAPVLHLNYCPPIPAPSSPLLPSHPSPRTSAGGMAAALWTLVVAVALSAALASNRPVXRAATAAAEAANEVLRAHQLPGGLLPAGITAFRHDAATGAFEARLDAPCTARFEVGLRYNATVSGVISPGQIARHLRRRRAGPLHVVPRPRHQGRHPLLRRHLLQRRRRQEAPPARRLRRAAGLHARPAPAAAGGRGRGRIGRGGRRGVPAMMGGGDGGGFDGAGEPGSRAQF

SEQ ID NO: 29570 - protein, 216 aa, Zea mays subsp. mays
  peptide (1)..(216): Ceres Seq. ID no. 13498113
  misc_feature (136)..(194): Pfam Name: Pfam Description:  Protein of unknown function, DUF538
  misc_feature (136)..(215): NCBI GI NO: 34906900 NR Description: P0470A12.30
  misc_feature (130)..(199): NCBI GI NO: 18397959 NR Description: expressed protein [Arabidopsis thaliana]
  misc_feature (130)..(191): NCBI GI NO: 6041854 NR Description: unknown protein [Arabidopsis thaliana]
  misc_feature (130)..(189): NCBI GI NO: 6041844 NR Description: unknown protein [Arabidopsis thaliana]
  misc_feature (130)..(189): NCBI GI NO: 22330911 NR Description: expressed protein [Arabidopsis thaliana]
  misc_feature (130)..(189): NCBI GI NO: 21592465 NR Description: unknown [Arabidopsis thaliana]
  misc_feature (130)..(190): NCBI GI NO: 9759120 NR Description: gb|AAF02163
  misc_feature (130)..(190): NCBI GI NO: 18417957 NR Description: expressed protein [Arabidopsis thaliana]
  misc_feature (130)..(190): NCBI GI NO: 21536941 NR Description: unknown [Arabidopsis thaliana]
  misc_feature (140)..(191): NCBI GI NO: 34898576 NR Description: P0534A03.14
  misc_feature (66)..(66): Xaa is any aa, unknown or other
RSLFPISGRLPFSTSIIAHPSPLPPLLSSRPTHLLAPAPGEWRPRCGRWWWRWPCRRRWPRTAPWXGRRRRRRRRRTRCSARTSCRGACCRRGSRRSGTTPPRERSRPGWTRPARRASRSASATTPPSPGSSAPARSPDISGVAAQDLFMWFPVHDIKVDIPSSGVIYFNVGVVKKHLPLAVFDAPPACTPDPLLQRLEDVGEGGLAVVGAAASRR

SEQ ID NO: 29571 - protein, 197 aa, Zea mays subsp. mays
  peptide (1)..(197): Ceres Seq. ID no. 13498114
  misc_feature (27)..(97): Pfam Name: Pfam Description:  Protein of unknown function, DUF538
  misc_feature (27)..(97): NCBI GI NO: 34906900 NR Description: P0470A12.30
  misc_feature (9)..(97): NCBI GI NO: 18397959 NR Description: expressed protein [Arabidopsis thaliana]
  misc_feature (9)..(97): NCBI GI NO: 6041854 NR Description: unknown protein [Arabidopsis thaliana]
  misc_feature (8)..(96): NCBI GI NO: 6041844 NR Description: unknown protein [Arabidopsis thaliana]
  misc_feature (8)..(96): NCBI GI NO: 22330911 NR Description: expressed protein [Arabidopsis thaliana]
  misc_feature (8)..(96): NCBI GI NO: 21592465 NR Description: unknown [Arabidopsis thaliana]
  misc_feature (37)..(96): NCBI GI NO: 9759120 NR Description: gb|AAF02163
  misc_feature (37)..(96): NCBI GI NO: 18417957 NR Description: expressed protein [Arabidopsis thaliana]
  misc_feature (37)..(96): NCBI GI NO: 21536941 NR Description: unknown [Arabidopsis thaliana]
  misc_feature (1)..(96): NCBI GI NO: 34898576 NR Description: P0534A03.14
  misc_feature (25)..(25): Xaa is any aa, unknown or other
MAAALWTLVVAVALSAALASNRPVXRAATAAAEAANEVLRAHQLPGGLLPAGITAFRHDAATGAFEARLDAPCTARFEVGLRYNATVSGVISPGQIARHLRRRRAGPLHVVPRPRHQGRHPLLRRHLLQRRRRQEAPPARRLRRAAGLHARPAPAAAGGRGRGRIGRGGRRGVPAMMGGGDGGGFDGAGEPGSRAQF

SEQ ID NO: 29572 - DNA, 1099 bp, Zea mays subsp. mays
  misc_feature (1)..(1099): Ceres Seq. ID no. 12403084
acacttctccattccattgcggttctgcgagcccctacctccctgtggtgcttggccatggcggactaccacttcgtgtataaggacgtggagggggcgagcacagagtgggacgacatccagcgccgcctcgggaacttgcccccgaagccggagcccttcaagccgccgcccttcgccccgaaggttgacgccgacgagcagcccaagtccaaggaatggcttgacgtgcgcgagcccgaagagctcgaggaactagaggacgatctggatgacgaccgcttcctcgagaagtacaggaagatgaggctcgcagagctgagggaagccgcaaaagccgcgcgatttggtactatacttcccatcactggctccgacttcgtgcgggaggtatcgcaggcacaatcagatgtttgggttgtggtcttcctctacaaggatgggatacctgaatgtggattgcttcagaattgtttggaagaattggctactaggtatccagcgacgaagtttgttaaaattatctccacagactgcatccccaactacccagataggaatgttcctacaatactggtgtataacaacagtgctgtcaaagggacttatgttggtttgcagaagtttggtggaaagagatgcacacctgaatctgttgcgttagccctttgccagtcagacccggtactgaatgatgggcatggtggcagcgattcatctcggggcaatgtcttcgaaggtgttcgcaggaagttcatagagaaggttgtggcccagcatgaagagcgggaagaagaggacagtgactaagctaatacttgtgtttgttttccgcagctggcggatccaatttggttccaatgtttactgatcttatgtgatttttgtgggtgaaatttgccagagttttctgatacctggctgtgcggctgaagtttttgaaagttcacgggtcttattgcctacctttcagctgtaacacagctccattattatattgttaagagatcagagatgattagtgcacttgtataattgcatgagaaaaaatccagccaaactttgaatccacagtatttcactatcttgaacatttccc

SEQ ID NO: 29573 - protein, 269 aa, Zea mays subsp. mays
  peptide (1)..(269): Ceres Seq. ID no. 12403085
  misc_feature (20)..(269): NCBI GI NO: 34906294 NR Description: unnamed protein product
  misc_feature (20)..(267): NCBI GI NO: 15241349 NR Description: putative protein; protein id: At5g14240
  misc_feature (20)..(267): NCBI GI NO: 21593265 NR Description: unknown [Arabidopsis thaliana]
  misc_feature (33)..(232): NCBI GI NO: 13129044 NR Description: IAP-associated factor VIAF1; phosducin-like 2
  misc_feature (33)..(229): NCBI GI NO: 31560120 NR Description: IAP-associated factor VIAF1 [Mus musculus]
  misc_feature (33)..(229): NCBI GI NO: 12835481 NR Description: unnamed protein product [Mus musculus]
  misc_feature (33)..(229): NCBI GI NO: 34875632 NR Description: similar to IAP-associated factor VIAF1
  misc_feature (33)..(232): NCBI GI NO: 9957067 NR Description: IAP-associated factor Viaf1 [Danio rerio]
  misc_feature (33)..(232): NCBI GI NO: 40555753 NR Description: Unknown (protein for MGC:73170) [Danio rerio]
  misc_feature (35)..(229): NCBI GI NO: 32966896 NR Description: IAP-associated factor Viaf1
TLLHSIAVLRAPTSLWCLAMADYHFVYKDVEGASTEWDDIQRRLGNLPPKPEPFKPPPFAPKVDADEQPKSKEWLDVREPEELEELEDDLDDDRFLEKYRKMRLAELREAAKAARFGTILPITGSDFVREVSQAQSDVWVVVFLYKDGIPECGLLQNCLEELATRYPATKFVKIISTDCIPNYPDRNVPTILVYNNSAVKGTYVGLQKFGGKRCTPESVALALCQSDPVLNDGHGGSDSSRGNVFEGVRRKFIEKVVAQHEEREEEDSD

SEQ ID NO: 29574 - protein, 250 aa, Zea mays subsp. mays
  peptide (1)..(250): Ceres Seq. ID no. 12403086
  misc_feature (1)..(250): NCBI GI NO: 34906294 NR Description: unnamed protein product
  misc_feature (1)..(248): NCBI GI NO: 15241349 NR Description: putative protein; protein id: At5g14240
  misc_feature (1)..(248): NCBI GI NO: 21593265 NR Description: unknown [Arabidopsis thaliana]
  misc_feature (14)..(213): NCBI GI NO: 13129044 NR Description: IAP-associated factor VIAF1; phosducin-like 2
  misc_feature (14)..(210): NCBI GI NO: 31560120 NR Description: IAP-associated factor VIAF1 [Mus musculus]
  misc_feature (14)..(210): NCBI GI NO: 12835481 NR Description: unnamed protein product [Mus musculus]
  misc_feature (14)..(210): NCBI GI NO: 34875632 NR Description: similar to IAP-associated factor VIAF1
  misc_feature (14)..(213): NCBI GI NO: 9957067 NR Description: IAP-associated factor Viaf1 [Danio rerio]
  misc_feature (14)..(213): NCBI GI NO: 40555753 NR Description: Unknown (protein for MGC:73170) [Danio rerio]
  misc_feature (16)..(210): NCBI GI NO: 32966896 NR Description: IAP-associated factor Viaf1
MADYHFVYKDVEGASTEWDDIQRRLGNLPPKPEPFKPPPFAPKVDADEQPKSKEWLDVREPEELEELEDDLDDDRFLEKYRKMRLAELREAAKAARFGTILPITGSDFVREVSQAQSDVWVVVFLYKDGIPECGLLQNCLEELATRYPATKFVKIISTDCIPNYPDRNVPTILVYNNSAVKGTYVGLQKFGGKRCTPESVALALCQSDPVLNDGHGGSDSSRGNVFEGVRRKFIEKVVAQHEEREEEDSD

SEQ ID NO: 29575 - protein, 168 aa, Zea mays subsp. mays
  peptide (1)..(168): Ceres Seq. ID no. 12403087
  misc_feature (1)..(168): NCBI GI NO: 34906294 NR Description: unnamed protein product
  misc_feature (1)..(166): NCBI GI NO: 15241349 NR Description: putative protein; protein id: At5g14240
  misc_feature (1)..(166): NCBI GI NO: 21593265 NR Description: unknown [Arabidopsis thaliana]
  misc_feature (1)..(131): NCBI GI NO: 13129044 NR Description: IAP-associated factor VIAF1; phosducin-like 2
  misc_feature (1)..(128): NCBI GI NO: 31560120 NR Description: IAP-associated factor VIAF1 [Mus musculus]
  misc_feature (1)..(128): NCBI GI NO: 12835481 NR Description: unnamed protein product [Mus musculus]
  misc_feature (1)..(128): NCBI GI NO: 34875632 NR Description: similar to IAP-associated factor VIAF1
  misc_feature (1)..(131): NCBI GI NO: 9957067 NR Description: IAP-associated factor Viaf1 [Danio rerio]
  misc_feature (1)..(131): NCBI GI NO: 40555753 NR Description: Unknown (protein for MGC:73170) [Danio rerio]
  misc_feature (1)..(128): NCBI GI NO: 32966896 NR Description: IAP-associated factor Viaf1
MRLAELREAAKAARFGTILPITGSDFVREVSQAQSDVWVVVFLYKDGIPECGLLQNCLEELATRYPATKFVKIISTDCIPNYPDRNVPTILVYNNSAVKGTYVGLQKFGGKRCTPESVALALCQSDPVLNDGHGGSDSSRGNVFEGVRRKFIEKVVAQHEEREEEDSD

SEQ ID NO: 29576 - DNA, 1036 bp, Zea mays subsp. mays
  misc_feature (1)..(1036): Ceres Seq. ID no. 12401998
actagtagtgctgtgtctaatagttctagtgtcgtgccgggccggacggcagtttggccatctataactgtacaccatatagcaccaatcactccgcagtgcagacgcagcgcatgcaggtagcaatggcgggggagacgaagaagggcctggtgctgctggacttctgggtgagcccgttcgggcagcgctgccgcatcgcgctggcggagaagggcatcgcctacgagtactcggagcaggagctgctgggcggcgccaagagcgacatcctcctccgctccaacccggtgcacaagaagatccccgtgctcctccacgacggccgccccgtctgcgagtccctcgtcatcctcgagtacctcgaggaggccttcccggaggcctcccccaggctgctccccgacgccgcctacgcgcgcgcgcaggcccgcttctgggcggcctactccgacaaggtctacaaggccggcacgcggctgtggaagctcaggggcgacgcgcgggcgcaggcgcgcgccgagatcgtgcaggtggtccggaacctcgacggcgagctaggggacaaggccttcttcggcggcgaggcgttcgggttcgtggacgtggcgctcgtgcccttcgtgccgtggctccccagctacgagcggtacggggacttcagcgtggcggagatcgcgcccaggctggcggcgtgggcgcgccggtgcgcgcagcgggagagcgtggccaggacccttcacccgccggaaaaggtggacgagttcatcaacctgctcaagaagacctacggcatcgagtagtagagcggactactactagcagaggagatggtaccggccgtacgtacgtggctgccatgcagtttttgtttcggtttgtttaaacgggactccatgaatggatggaactcttcttgggctccgtgtgctacatacacatctgtaaaggtgaactaaaatcacggtaaaaactcggaaattagtttgtaaagggtccagcccccctcctttataaatagagaggtatacggctg

SEQ ID NO: 29577 - protein, 229 aa, Zea mays subsp. mays
  peptide (1)..(229): Ceres Seq. ID no. 12401999
  misc_feature (5)..(229): NCBI GI NO: 11385489 NR Description: glutathione S-transferase GST 19 [Zea mays]
  misc_feature (5)..(229): NCBI GI NO: 6683765 NR Description: glutathione-S-transferase [Hordeum vulgare]
  misc_feature (5)..(229): NCBI GI NO: 20067417 NR Description: glutathione transferase [Triticum aestivum]
  misc_feature (5)..(229): NCBI GI NO: 20067419 NR Description: glutathione transferase [Triticum aestivum]
  misc_feature (5)..(229): NCBI GI NO: 20067415 NR Description: glutathione transferase [Triticum aestivum]
  misc_feature (5)..(229): NCBI GI NO: 7447304 NR Description: glutathione transferase (EC 2.5.1.18) - maize
  misc_feature (13)..(227): NCBI GI NO: 4468796 NR Description: GST6 protein [Zea mays]
  misc_feature (10)..(229): NCBI GI NO: 33357806 NR Description: Chain A, Crystal Structure Solution Of Rice Gst1
  misc_feature (13)..(227): NCBI GI NO: 11177831 NR Description: putative glutathione S-transferase OsGSTU5
  misc_feature (10)..(229): NCBI GI NO: 7447301 NR Description: glutathione transferase (EC 2.5.1.18) - rice
MQVAMAGETKKGLVLLDFWVSPFGQRCRIALAEKGIAYEYSEQELLGGAKSDILLRSNPVHKKIPVLLHDGRPVCESLVILEYLEEAFPEASPRLLPDAAYARAQARFWAAYSDKVYKAGTRLWKLRGDARAQARAEIVQVVRNLDGELGDKAFFGGEAFGFVDVALVPFVPWLPSYERYGDFSVAEIAPRLAAWARRCAQRESVARTLHPPEKVDEFINLLKKTYGIE

SEQ ID NO: 29578 - protein, 225 aa, Zea mays subsp. mays
  peptide (1)..(225): Ceres Seq. ID no. 12402000
  misc_feature (1)..(225): NCBI GI NO: 11385489 NR Description: glutathione S-transferase GST 19 [Zea mays]
  misc_feature (1)..(225): NCBI GI NO: 6683765 NR Description: glutathione-S-transferase [Hordeum vulgare]
  misc_feature (1)..(225): NCBI GI NO: 20067417 NR Description: glutathione transferase [Triticum aestivum]
  misc_feature (1)..(225): NCBI GI NO: 20067419 NR Description: glutathione transferase [Triticum aestivum]
  misc_feature (1)..(225): NCBI GI NO: 20067415 NR Description: glutathione transferase [Triticum aestivum]
  misc_feature (1)..(225): NCBI GI NO: 7447304 NR Description: glutathione transferase (EC 2.5.1.18) - maize
  misc_feature (9)..(223): NCBI GI NO: 4468796 NR Description: GST6 protein [Zea mays]
  misc_feature (6)..(225): NCBI GI NO: 33357806 NR Description: Chain A, Crystal Structure Solution Of Rice Gst1
  misc_feature (9)..(223): NCBI GI NO: 11177831 NR Description: putative glutathione S-transferase OsGSTU5
  misc_feature (6)..(225): NCBI GI NO: 7447301 NR Description: glutathione transferase (EC 2.5.1.18) - rice
MAGETKKGLVLLDFWVSPFGQRCRIALAEKGIAYEYSEQELLGGAKSDILLRSNPVHKKIPVLLHDGRPVCESLVILEYLEEAFPEASPRLLPDAAYARAQARFWAAYSDKVYKAGTRLWKLRGDARAQARAEIVQVVRNLDGELGDKAFFGGEAFGFVDVALVPFVPWLPSYERYGDFSVAEIAPRLAAWARRCAQRESVARTLHPPEKVDEFINLLKKTYGIE

SEQ ID NO: 29579 - DNA, 796 bp, Zea mays subsp. mays
  misc_feature (1)..(796): Ceres Seq. ID no. 12595084
ccatcgccccccacaccgtctcctccacaacacgctcctcacctcgcggcgactcttgccaggcattcctccgcgaaaaacgcatccgctccaaggggagttgatcgagaagcgttggtggacatgggtcagatccagtactccgagaagtacttcgacgacacctacgagtacaggcacgtcgtcctcccgcccgaggtcgccaagctcctccccaagaaccgtctcctgtccgagaacgagtggcgcgcgatcggagtgcagcagagccgcgggtgggtgcactacgcgatccaccgcccggagccgcacatcatgctgttccgccgcccgatcaactaccagcagcagcaggaggcggctgccgcgcagatgctggccaagtgagcccccggtggccagggcggcgaccaggaacgtttaaaaccctaaccccctttccatctctaaaaggggcgtcgctgttctgttgatcaattcctctatgctgttagttggaaacttcgggtgtagttggtggatttgctggtgtgtgccttgtgttcgtggaaattcctgtgaaggaactgccatgtgttaggctgttaccatgcccattttcttaatactatgtgttgactgtgatcaagatggcactcatgcagggatgatatttaatctgtttgacgtgatctttgtaatggtgtgatctggttagtagcactgatatcatgtttaatctgttatgtgtgatggtcagtatggtcatggtgattttgcatgatgagaattgttacctagtgatctaagtttagtc

SEQ ID NO: 29580 - protein, 140 aa, Zea mays subsp. mays
  peptide (1)..(140): Ceres Seq. ID no. 12595085
HRPPHRLLHNTLLTSRRLLPGIPPRKTHPLQGELIEKRWWTWVRSSTPRSTSTTPTSTGTSSSRPRSPSSSPRTVSCPRTSGARSECSRAAGGCTTRSTARSRTSCCSAARSTTSSSRRRLPRRCWPSEPPVARAATRNV

SEQ ID NO: 29581 - protein, 128 aa, Zea mays subsp. mays
  peptide (1)..(128): Ceres Seq. ID no. 12595086
  misc_feature (42)..(113): Pfam Name: Pfam Description:  Cyclin-dependent kinase regulatory subunit
  misc_feature (42)..(128): NCBI GI NO: 15451612 NR Description: Putative cyclin-dependent kinase regulatory subunit
  misc_feature (42)..(128): NCBI GI NO: 15226294 NR Description: CDK-subunit 1; protein id: At2g27960
  misc_feature (42)..(128): NCBI GI NO: 40641585 NR Description: putative cyclin-dependent kinase regulatory subunit
  misc_feature (42)..(124): NCBI GI NO: 15226297 NR Description: CDK-subunit 2; protein id: At2g27970.1
  misc_feature (42)..(121): NCBI GI NO: 27435806 NR Description: CKS1 protein
  misc_feature (45)..(112): NCBI GI NO: 2493727 NR Description: PROBABLE CYCLIN-DEPENDENT KINASES REGULATORYSUBUNIT
  misc_feature (44)..(127): NCBI GI NO: 21355377 NR Description: CG9790-PA [Drosophila melanogaster]
  misc_feature (44)..(118): NCBI GI NO: 13384804 NR Description: RIKEN cDNA 1110038L14 [Mus musculus]
  misc_feature (44)..(118): NCBI GI NO: 4502859 NR Description: CDC28 protein kinase 2; CKS1(S
  misc_feature (36)..(111): NCBI GI NO: 2493729 NR Description: CYCLIN-DEPENDENT KINASES REGULATORY SUBUNIT
PSPPTPSPPQHAPHLAATLARHSSAKNASAPRGVDREALVDMGQIQYSEKYFDDTYEYRHVVLPPEVAKLLPKNRLLSENEWRAIGVQQSRGWVHYAIHRPEPHIMLFRRPINYQQQQEAAAAQMLAK

SEQ ID NO: 29582 - protein, 87 aa, Zea mays subsp. mays
  peptide (1)..(87): Ceres Seq. ID no. 12595087
  misc_feature (1)..(72): Pfam Name: Pfam Description:  Cyclin-dependent kinase regulatory subunit
  misc_feature (1)..(87): NCBI GI NO: 15451612 NR Description: Putative cyclin-dependent kinase regulatory subunit
  misc_feature (1)..(87): NCBI GI NO: 15226294 NR Description: CDK-subunit 1; protein id: At2g27960
  misc_feature (1)..(87): NCBI GI NO: 40641585 NR Description: putative cyclin-dependent kinase regulatory subunit
  misc_feature (1)..(83): NCBI GI NO: 15226297 NR Description: CDK-subunit 2; protein id: At2g27970.1
  misc_feature (1)..(80): NCBI GI NO: 27435806 NR Description: CKS1 protein
  misc_feature (4)..(71): NCBI GI NO: 2493727 NR Description: PROBABLE CYCLIN-DEPENDENT KINASES REGULATORYSUBUNIT
  misc_feature (3)..(86): NCBI GI NO: 21355377 NR Description: CG9790-PA [Drosophila melanogaster]
  misc_feature (3)..(77): NCBI GI NO: 13384804 NR Description: RIKEN cDNA 1110038L14 [Mus musculus]
  misc_feature (3)..(77): NCBI GI NO: 4502859 NR Description: CDC28 protein kinase 2; CKS1(S
  misc_feature (1)..(70): NCBI GI NO: 2493729 NR Description: CYCLIN-DEPENDENT KINASES REGULATORY SUBUNIT
MGQIQYSEKYFDDTYEYRHVVLPPEVAKLLPKNRLLSENEWRAIGVQQSRGWVHYAIHRPEPHIMLFRRPINYQQQQEAAAAQMLAK

SEQ ID NO: 29583 - DNA, 832 bp, Zea mays subsp. mays
  misc_feature (1)..(832): Ceres Seq. ID no. 12404307
atcctagaaggaaacaggaacaggcagctctgaaagactgaaactcacggccatggccatcctgggcgccctcaggctcgcgccgtctccacccgccctcgccggcgctgcgccaccggctacgtcgccgtctgcggctgtacgctcctccgtgcacttccacctcgccaatgccggcgccgccgcgctcgtcgccgcctcgctcctcgccgccgaccccgccgtggctttcattggaggaggaccgtacgggaagcaggtgacgcgggggcaggacctcaccggcaaggacttcagcggccagacactcatcaagcaggacttcaagacgtctatactgaggcaggcgaacttcaaaggcgcgaacctgctcggcgcgagcttcttcgatgcagacctcacaagcgctgatctctctgacgctgatcttagaggcgctgatttgtcgctggcgaatttaacgaaggcaaacttatcaaatgccaacttagaaggggcacttgccactgggaacacttctttcaaaggtgccgacataactggggcagattttaccgatgtgccgctgcgagatgatcaacgggagtacctctgcaaaatcgctgacggagtaaattcaaccactggaaacccaacaaaggagactctgttctgcagctgatcgacggaaggacctgggacttgtgacttattcaacgtcttgataaacttgcatctgctgctgtaagcacgtgaggaatgtaaattgagttatagagggttcctagaaataataactggtaattacgtgtaaatcaaccaacaataaaagtgtgtgctgccctttgaatgt

SEQ ID NO: 29584 - protein, 202 aa, Zea mays subsp. mays
  peptide (1)..(202): Ceres Seq. ID no. 12404308
  misc_feature (94)..(133): Pfam Name: 8 copies Pfam Description: Pentapeptide repeats
  misc_feature (3)..(201): NCBI GI NO: 34895746 NR Description: P0024G09.19
  misc_feature (24)..(202): NCBI GI NO: 18406661 NR Description: thylakoid lumen pentapeptide repeat family protein
  misc_feature (24)..(165): NCBI GI NO: 18406663 NR Description: thylakoid lumen pentapeptide repeat family protein
  misc_feature (59)..(201): NCBI GI NO: 23128511 NR Description: hypothetical protein [Nostoc punctiforme]
  misc_feature (43)..(201): NCBI GI NO: 33865584 NR Description: conserved hypothetical protein
  misc_feature (76)..(201): NCBI GI NO: 17230824 NR Description: hypothetical protein [Nostoc sp. PCC 7120]
  misc_feature (72)..(201): NCBI GI NO: 16331083 NR Description: unknown protein [Synechocystis sp. PCC 6803]
  misc_feature (64)..(201): NCBI GI NO: 22298403 NR Description: ORF_ID:tll0860~hypothetical protein
  misc_feature (57)..(201): NCBI GI NO: 23039927 NR Description: hypothetical protein
  misc_feature (101)..(202): NCBI GI NO: 7486947 NR Description: hypothetical protein At2g44920
MAILGALRLAPSPPALAGAAPPATSPSAAVRSSVHFHLANAGAAALVAASLLAADPAVAFIGGGPYGKQVTRGQDLTGKDFSGQTLIKQDFKTSILRQANFKGANLLGASFFDADLTSADLSDADLRGADLSLANLTKANLSNANLEGALATGNTSFKGADITGADFTDVPLRDDQREYLCKIADGVNSTTGNPTKETLFCS

SEQ ID NO: 29585 - DNA, 666 bp, Zea mays subsp. mays
  misc_feature (1)..(666): Ceres Seq. ID no. 12403251
gccggtaggagcggaggagacggcgtctcgccgctcgcttcgtttccgccttccccctcccgcaaagtcgccgccggctcgcattcgtggttccgcgtgggggtccggggaaacgcgacgagagaggcggaagcgatggcgaagtcgtgcaaggggttggccatggagctcgtcaagtgtctcagcgagacccactgcgtcaaggtgcagaaaaggccgtacaaggagtgcgctggggagaaggtgcccaacattaccagcgagtgcgctggcctgcgggagacctacttcaactgcaagaggggccaggttgacatgcgggcccgaatacgcgggaacaagggatactagtgatgtgcctgcaatatccacaatcagttttggtttctagccatgcttctgtgacattgaggtgtaatgataacatggtttagtgtgcccgtgttctgtttttgataggtgaggggaactcacaacacacgtggcttcaattgatgaggggagtgcattcatgtctacattctattacatttgatattccctctgttttaaattgtttgacgttttgttactatgatctatgcgtgtagcaaaagttaatctatggtccgtttggtttagctgtagattcctgaaaatctaattctagccgtgaaagttgcagcg

SEQ ID NO: 29586 - protein, 129 aa, Zea mays subsp. mays
  peptide (1)..(129): Ceres Seq. ID no. 12403252
PVGAEETASRRSLRFRLPPPAKSPPARIRGSAWGSGETRRERRKRWRSRARGWPWSSSSVSARPTASRCRKGRTRSALGRRCPTLPASALACGRPTSTARGARLTCGPEYAGTRDTSDVPAISTISFGF

SEQ ID NO: 29587 - protein, 116 aa, Zea mays subsp. mays
  peptide (1)..(116): Ceres Seq. ID no. 12403253
  misc_feature (46)..(116): NCBI GI NO: 26452537 NR Description: unknown protein [Arabidopsis thaliana]
  misc_feature (42)..(115): NCBI GI NO: 17509739 NR Description: Assembly cytochrome oxidase like (10.8 kD)
  misc_feature (49)..(116): NCBI GI NO: 24653548 NR Description: CG13018-PA [Drosophila melanogaster]
  misc_feature (42)..(115): NCBI GI NO: 39592432 NR Description: Hypothetical protein CBG07988
AGRSGGDGVSPLASFPPSPSRKVAAGSHSWFRVGVRGNATREAEAMAKSCKGLAMELVKCLSETHCVKVQKRPYKECAGEKVPNITSECAGLRETYFNCKRGQVDMRARIRGNKGY

SEQ ID NO: 29588 - protein, 71 aa, Zea mays subsp. mays
  peptide (1)..(71): Ceres Seq. ID no. 12403254
  misc_feature (1)..(71): NCBI GI NO: 26452537 NR Description: unknown protein [Arabidopsis thaliana]
  misc_feature (1)..(70): NCBI GI NO: 17509739 NR Description: Assembly cytochrome oxidase like (10.8 kD)
  misc_feature (4)..(71): NCBI GI NO: 24653548 NR Description: CG13018-PA [Drosophila melanogaster]
  misc_feature (1)..(70): NCBI GI NO: 39592432 NR Description: Hypothetical protein CBG07988
MAKSCKGLAMELVKCLSETHCVKVQKRPYKECAGEKVPNITSECAGLRETYFNCKRGQVDMRARIRGNKGY

SEQ ID NO: 29589 - DNA, 832 bp, Zea mays subsp. mays
  misc_feature (1)..(832): Ceres Seq. ID no. 12351256
aacggttcacacttcacagcccacatcaacaaatggccaggaaagaagtgacgctcctgctcttcctcgtgctgcttgtcgcagccgtcgaggcacagctgcacgacgagcctacggcggccgctgtcgggcggcggcgtggcgcgaaggccgccacggcgccgacgcacctccacttcttcttccacgacacggtgagcggcaagtcgccgacggcggtacgcgtggtgagcccgccggcgtcgtcgccgtcgcccgtgttcgggatggtgaacgtgatggacgacccgctgacggaagggccggagcaagggtcggcccccgtcggccgcgcccagggcctgtacatggggtccgaccaggccaagatcggcttcctgcaggccatgaacctcgtgttcaccgcgggggactacaacggcagcacgctcgcgctgctcggccgcaactgcccgctcgacgccgtccgcgagctccccgtcgtcggcggcacgggcgcgttccgcttcgcccgcggctacgcgctgctgcgcacccactggctcgacttcgccaccggcgacgccaccgtcgagtacgacgtctacgtcacggactagctaattaataacgtaccgccttgctagccctcaccctcactgatgagtgccataagcattactacaaagacaggaccacgcaacaacaatggtgccaataaaggctttgaagcatgcttcgccacagagcgcctgctttttcttttaaaaccagcattttcgtttcagcttatatatatatttatagaacgcatgatctgtatccaatacaagcttcagaacccctttatgtt

SEQ ID NO: 29590 - protein, 201 aa, Zea mays subsp. mays
  peptide (1)..(201): Ceres Seq. ID no. 12351257
  misc_feature (30)..(186): NCBI GI NO: 18958209 NR Description: subtilisin-like protease PR1G
TVHTSQPTSTNGQERSDAPALPRAACRSRRGTAARRAYGGRCRAAAWREGRHGADAPPLLLPRHGERQVADGGTRGEPAGVVAVARVRDGERDGRPADGRAGARVGPRRPRPGPVHGVRPGQDRLPAGHEPRVHRGGLQRQHARAARPQLPARRRPRAPRRRRHGRVPLRPRLRAAAHPLARLRHRRRHRRVRRLRHGLAN

SEQ ID NO: 29591 - protein, 198 aa, Zea mays subsp. mays
  peptide (1)..(198): Ceres Seq. ID no. 12351258
  misc_feature (55)..(196): Pfam Name: Pfam Description:  Dirigent-like protein
  misc_feature (18)..(196): NCBI GI NO: 15218836 NR Description: disease resistance response protein-related/dirigent protein-related
  misc_feature (11)..(196): NCBI GI NO: 15238982 NR Description: disease resistance response protein-related
  misc_feature (55)..(196): NCBI GI NO: 15219966 NR Description: disease resistance response protein-related
  misc_feature (14)..(196): NCBI GI NO: 15238980 NR Description: disease resistance response protein-related
  misc_feature (11)..(196): NCBI GI NO: 15239779 NR Description: disease resistance response protein-related/dirigent protein-related
  misc_feature (18)..(196): NCBI GI NO: 15222673 NR Description: disease resistance response protein-related/dirigent protein-related
  misc_feature (18)..(196): NCBI GI NO: 22135914 NR Description: unknown protein [Arabidopsis thaliana]
  misc_feature (14)..(196): NCBI GI NO: 15231302 NR Description: disease resistance response protein-related/dirigent protein-related
  misc_feature (11)..(196): NCBI GI NO: 30681257 NR Description: disease resistance response protein-related/dirigent protein-related
  misc_feature (11)..(193): NCBI GI NO: 25412014 NR Description: probable disease resistance response protein
RFTLHSPHQQMARKEVTLLLFLVLLVAAVEAQLHDEPTAAAVGRRRGAKAATAPTHLHFFFHDTVSGKSPTAVRVVSPPASSPSPVFGMVNVMDDPLTEGPEQGSAPVGRAQGLYMGSDQAKIGFLQAMNLVFTAGDYNGSTLALLGRNCPLDAVRELPVVGGTGAFRFARGYALLRTHWLDFATGDATVEYDVYVTD

SEQ ID NO: 29592 - protein, 188 aa, Zea mays subsp. mays
  peptide (1)..(188): Ceres Seq. ID no. 12351259
  misc_feature (45)..(186): Pfam Name: Pfam Description:  Dirigent-like protein
  misc_feature (8)..(186): NCBI GI NO: 15218836 NR Description: disease resistance response protein-related/dirigent protein-related
  misc_feature (1)..(186): NCBI GI NO: 15238982 NR Description: disease resistance response protein-related
  misc_feature (45)..(186): NCBI GI NO: 15219966 NR Description: disease resistance response protein-related
  misc_feature (4)..(186): NCBI GI NO: 15238980 NR Description: disease resistance response protein-related
  misc_feature (1)..(186): NCBI GI NO: 15239779 NR Description: disease resistance response protein-related/dirigent protein-related
  misc_feature (8)..(186): NCBI GI NO: 15222673 NR Description: disease resistance response protein-related/dirigent protein-related
  misc_feature (8)..(186): NCBI GI NO: 22135914 NR Description: unknown protein [Arabidopsis thaliana]
  misc_feature (4)..(186): NCBI GI NO: 15231302 NR Description: disease resistance response protein-related/dirigent protein-related
  misc_feature (1)..(186): NCBI GI NO: 30681257 NR Description: disease resistance response protein-related/dirigent protein-related
  misc_feature (1)..(183): NCBI GI NO: 25412014 NR Description: probable disease resistance response protein
MARKEVTLLLFLVLLVAAVEAQLHDEPTAAAVGRRRGAKAATAPTHLHFFFHDTVSGKSPTAVRVVSPPASSPSPVFGMVNVMDDPLTEGPEQGSAPVGRAQGLYMGSDQAKIGFLQAMNLVFTAGDYNGSTLALLGRNCPLDAVRELPVVGGTGAFRFARGYALLRTHWLDFATGDATVEYDVYVTD

SEQ ID NO: 29593 - DNA, 809 bp, Zea mays subsp. mays
  misc_feature (1)..(809): Ceres Seq. ID no. 12352576
atgatgtccgggaaacaaatcctatccccgccgcctacgccggccgttcgcgctcacctagtcaccacattcgttctcgccgtggacgcgcgcgcgtgaggtgagtgagaccaccacgccagacaagaattaatggccctggagacgtgcttcagagcgtgggcgctgcacgccgcccctgctggcagcaagaacaggctcctcgtctgcagcagcggcggtaacctggtgctgccttcgaagcgggtcgcggccgcgccgctgtccgtcggccgcgtcgccacgcgccgggcgcggcacgtctgccagtccaagaacgccgtggacgaagtgctggtggcggacgagaagaactgggacgggatggtgatggcgtgcgagacgccggtgctggtggagttctgggcgccgtggtgcgggccgtgccggatgatcgcgccggtgatcgacgagctggccaaggactacgccggcaagatcatgtgctgcaaggtgaacacggacgacagccccaacgtggcatccacctacggcatccgcagcatccccaccgtgctcatcttcaagggcggcgagaagaaggagagcgtcatcggcgccgtccccaagtccacgctcaccaccctcatcgacaagtacatcggtagtagctcatgagcgcgcgagagaggcagcccatgtctcgtgatgtgcccccgagctgcatctgcatgcatgggatactgggatcgatgatacatgtgcccagctcgcgcataaacaccatgtatctctagccttgcccttgcatatatatggatggatatatg

SEQ ID NO: 29594 - protein, 174 aa, Zea mays subsp. mays
  peptide (1)..(174): Ceres Seq. ID no. 12352577
  misc_feature (1)..(173): NCBI GI NO: 3334376 NR Description: Thioredoxin M-type, chloroplast precursor (TRX-M)
  misc_feature (1)..(172): NCBI GI NO: 11135474 NR Description: Thioredoxin M-type, chloroplast precursor (TRX-M)
  misc_feature (1)..(172): NCBI GI NO: 11135471 NR Description: Thioredoxin M-type, chloroplast precursor (TRX-M)
  misc_feature (1)..(170): NCBI GI NO: 1351239 NR Description: Thioredoxin M-type, chloroplast precursor (TRX-M)
  misc_feature (1)..(170): NCBI GI NO: 1388088 NR Description: thioredoxin m
  misc_feature (1)..(170): NCBI GI NO: 21354 NR Description: thioredoxin M precursor (AA -67 to 114)
  misc_feature (45)..(170): NCBI GI NO: 15594012 NR Description: putative thioredoxin m2 [Pisum sativum]
  misc_feature (1)..(170): NCBI GI NO: 2507458 NR Description: Thioredoxin M-type, chloroplast precursor (TRX-M)
  misc_feature (27)..(170): NCBI GI NO: 15236327 NR Description: putative M-type thioredoxin; protein id:At4g03520
  misc_feature (27)..(170): NCBI GI NO: 6539610 NR Description: thioredoxin m2 [Arabidopsis thaliana]
MALETCFRAWALHAAPAGSKNRLLVCSSGGNLVLPSKRVAAAPLSVGRVATRRARHVCQSKNAVDEVLVADEKNWDGMVMACETPVLVEFWAPWCGPCRMIAPVIDELAKDYAGKIMCCKVNTDDSPNVASTYGIRSIPTVLIFKGGEKKESVIGAVPKSTLTTLIDKYIGSSS

SEQ ID NO: 29595 - protein, 97 aa, Zea mays subsp. mays
  peptide (1)..(97): Ceres Seq. ID no. 12352578
  misc_feature (1)..(96): NCBI GI NO: 3334376 NR Description: Thioredoxin M-type, chloroplast precursor (TRX-M)
  misc_feature (1)..(95): NCBI GI NO: 11135474 NR Description: Thioredoxin M-type, chloroplast precursor (TRX-M)
  misc_feature (1)..(95): NCBI GI NO: 11135471 NR Description: Thioredoxin M-type, chloroplast precursor (TRX-M)
  misc_feature (1)..(93): NCBI GI NO: 1351239 NR Description: Thioredoxin M-type, chloroplast precursor (TRX-M)
  misc_feature (1)..(93): NCBI GI NO: 1388088 NR Description: thioredoxin m
  misc_feature (1)..(93): NCBI GI NO: 21354 NR Description: thioredoxin M precursor (AA -67 to 114)
  misc_feature (1)..(93): NCBI GI NO: 15594012 NR Description: putative thioredoxin m2 [Pisum sativum]
  misc_feature (1)..(93): NCBI GI NO: 2507458 NR Description: Thioredoxin M-type, chloroplast precursor (TRX-M)
  misc_feature (1)..(93): NCBI GI NO: 15236327 NR Description: putative M-type thioredoxin; protein id:At4g03520
  misc_feature (1)..(93): NCBI GI NO: 6539610 NR Description: thioredoxin m2 [Arabidopsis thaliana]
MVMACETPVLVEFWAPWCGPCRMIAPVIDELAKDYAGKIMCCKVNTDDSPNVASTYGIRSIPTVLIFKGGEKKESVIGAVPKSTLTTLIDKYIGSSS

SEQ ID NO: 29596 - protein, 95 aa, Zea mays subsp. mays
  peptide (1)..(95): Ceres Seq. ID no. 12352579
  misc_feature (1)..(94): NCBI GI NO: 3334376 NR Description: Thioredoxin M-type, chloroplast precursor (TRX-M)
  misc_feature (1)..(93): NCBI GI NO: 11135474 NR Description: Thioredoxin M-type, chloroplast precursor (TRX-M)
  misc_feature (1)..(93): NCBI GI NO: 11135471 NR Description: Thioredoxin M-type, chloroplast precursor (TRX-M)
  misc_feature (1)..(91): NCBI GI NO: 1351239 NR Description: Thioredoxin M-type, chloroplast precursor (TRX-M)
  misc_feature (1)..(91): NCBI GI NO: 1388088 NR Description: thioredoxin m
  misc_feature (1)..(91): NCBI GI NO: 21354 NR Description: thioredoxin M precursor (AA -67 to 114)
  misc_feature (1)..(91): NCBI GI NO: 15594012 NR Description: putative thioredoxin m2 [Pisum sativum]
  misc_feature (1)..(91): NCBI GI NO: 2507458 NR Description: Thioredoxin M-type, chloroplast precursor (TRX-M)
  misc_feature (1)..(91): NCBI GI NO: 15236327 NR Description: putative M-type thioredoxin; protein id:At4g03520
  misc_feature (1)..(91): NCBI GI NO: 6539610 NR Description: thioredoxin m2 [Arabidopsis thaliana]
MACETPVLVEFWAPWCGPCRMIAPVIDELAKDYAGKIMCCKVNTDDSPNVASTYGIRSIPTVLIFKGGEKKESVIGAVPKSTLTTLIDKYIGSSS

SEQ ID NO: 29597 - DNA, 1170 bp, Zea mays subsp. mays
  misc_feature (1)..(1170): Ceres Seq. ID no. 13498164
acacctgaggctgcggcctttgtgccatccaggggtcgtcgtcgtcactctctccctctcgccctcgccatcgccctcgcggtctcgccgcggcataaacaaaacaagcaaagcaaggcaaaggcaaaggcaaaaccccacctcctcgctccgcacctcgtcgtctgcttttcctcggtgcggaacacaagcccctgccgcctccattaccgggctgtgcctgtgcgaggctgcgagcgtggtggctgtgtctggctttgcggcggcggcggtgatggtggtggagatggacggaggcgtgggagtagcagcaggaggaggaggaggagcgcagacgccggcgccggcgccgccgcggcggtggcgcttggcggacgagcggtgcgacctgcgcgccatggagacggactacgtgcggcggttccaccggcacgagccccgcgaccaccagtgctcctccgccgtcgccaagcacatcaaggcgcctgtccaccttgtctggtccctggtgaggcggttcgaccagccacagctcttcaagcccttcgtgagccggtgtgagatgaaggggaacatcgagatcggtagcgtcagggaggtcaacgtcaagtccgggctgccggccacaagaagcacggagaggctcgagctgttagacgacgacgagcgcattctcagcgtcaggttcgttggaggcgatcacaggctgcagaactactcctccatcctcaccgtccacccggaggtcatcgacggccggccagggacgctcgtcatcgagtccttcgtcgtcgacgtccccgacggcaacaccaaggacgagacctgctacttcgtggaggcgctgctcaagtgcaacctccggtcactcgcggaggtgtccgagggccaggtcatcatggaccagacggagccccttgaccggtgaataatgagtcggaccattatattgcattgcattctgtgtacgcgtagacctgttctccaatgcatggagcccctaggttcttgggaaactgctatgccgcgttcaaagtcaagttctttttcccccctccttgcgattgtgttttgctgttcttctctggcgttgtatgtcgcagagggagaagtgcagagtatgatgtgcttgatgaaaattgaaagaaaaaaaaagaatttagaactgcg

SEQ ID NO: 29598 - protein, 308 aa, Zea mays subsp. mays
  peptide (1)..(308): Ceres Seq. ID no. 13498165
  misc_feature (150)..(291): Pfam Name: Pfam Description:  Pathogenesis-related protein Bet v I family
  misc_feature (134)..(304): NCBI GI NO: 15238661 NR Description: expressed protein [Arabidopsis thaliana]
  misc_feature (133)..(304): NCBI GI NO: 18378830 NR Description: expressed protein [Arabidopsis thaliana]
  misc_feature (133)..(304): NCBI GI NO: 21593547 NR Description: unknown [Arabidopsis thaliana]
  misc_feature (133)..(304): NCBI GI NO: 25348264 NR Description: hypothetical protein F6F3
  misc_feature (138)..(306): NCBI GI NO: 18411513 NR Description: expressed protein [Arabidopsis thaliana]
  misc_feature (138)..(306): NCBI GI NO: 21593105 NR Description: unknown [Arabidopsis thaliana]
  misc_feature (129)..(295): NCBI GI NO: 30687786 NR Description: expressed protein [Arabidopsis thaliana]
  misc_feature (129)..(295): NCBI GI NO: 7486961 NR Description: hypothetical protein T13J8
  misc_feature (166)..(306): NCBI GI NO: 7486358 NR Description: hypothetical protein F3I3
  misc_feature (140)..(295): NCBI GI NO: 18404709 NR Description: expressed protein [Arabidopsis thaliana]
HLRLRPLCHPGVVVVTLSLSPSPSPSRSRRGINKTSKARQRQRQNPTSSLRTSSSAFPRCGTQAPAASITGLCLCEAASVVAVSGFAAAAVMVVEMDGGVGVAAGGGGGAQTPAPAPPRRWRLADERCDLRAMETDYVRRFHRHEPRDHQCSSAVAKHIKAPVHLVWSLVRRFDQPQLFKPFVSRCEMKGNIEIGSVREVNVKSGLPATRSTERLELLDDDERILSVRFVGGDHRLQNYSSILTVHPEVIDGRPGTLVIESFVVDVPDGNTKDETCYFVEALLKCNLRSLAEVSEGQVIMDQTEPLDR

SEQ ID NO: 29599 - protein, 217 aa, Zea mays subsp. mays
  peptide (1)..(217): Ceres Seq. ID no. 13498166
  misc_feature (59)..(200): Pfam Name: Pfam Description:  Pathogenesis-related protein Bet v I family
  misc_feature (43)..(213): NCBI GI NO: 15238661 NR Description: expressed protein [Arabidopsis thaliana]
  misc_feature (42)..(213): NCBI GI NO: 18378830 NR Description: expressed protein [Arabidopsis thaliana]
  misc_feature (42)..(213): NCBI GI NO: 25348264 NR Description: hypothetical protein F6F3
  misc_feature (42)..(213): NCBI GI NO: 21593547 NR Description: unknown [Arabidopsis thaliana]
  misc_feature (47)..(215): NCBI GI NO: 18411513 NR Description: expressed protein [Arabidopsis thaliana]
  misc_feature (47)..(215): NCBI GI NO: 21593105 NR Description: unknown [Arabidopsis thaliana]
  misc_feature (38)..(204): NCBI GI NO: 30687786 NR Description: expressed protein [Arabidopsis thaliana]
  misc_feature (38)..(204): NCBI GI NO: 7486961 NR Description: hypothetical protein T13J8
  misc_feature (75)..(215): NCBI GI NO: 7486358 NR Description: hypothetical protein F3I3
  misc_feature (49)..(204): NCBI GI NO: 18404709 NR Description: expressed protein [Arabidopsis thaliana]
MVVEMDGGVGVAAGGGGGAQTPAPAPPRRWRLADERCDLRAMETDYVRRFHRHEPRDHQCSSAVAKHIKAPVHLVWSLVRRFDQPQLFKPFVSRCEMKGNIEIGSVREVNVKSGLPATRSTERLELLDDDERILSVRFVGGDHRLQNYSSILTVHPEVIDGRPGTLVIESFVVDVPDGNTKDETCYFVEALLKCNLRSLAEVSEGQVIMDQTEPLDR

SEQ ID NO: 29600 - protein, 213 aa, Zea mays subsp. mays
  peptide (1)..(213): Ceres Seq. ID no. 13498167
  misc_feature (55)..(196): Pfam Name: Pfam Description:  Pathogenesis-related protein Bet v I family
  misc_feature (39)..(209): NCBI GI NO: 15238661 NR Description: expressed protein [Arabidopsis thaliana]
  misc_feature (38)..(209): NCBI GI NO: 18378830 NR Description: expressed protein [Arabidopsis thaliana]
  misc_feature (38)..(209): NCBI GI NO: 25348264 NR Description: hypothetical protein F6F3
  misc_feature (38)..(209): NCBI GI NO: 21593547 NR Description: unknown [Arabidopsis thaliana]
  misc_feature (43)..(211): NCBI GI NO: 18411513 NR Description: expressed protein [Arabidopsis thaliana]
  misc_feature (43)..(211): NCBI GI NO: 21593105 NR Description: unknown [Arabidopsis thaliana]
  misc_feature (34)..(200): NCBI GI NO: 30687786 NR Description: expressed protein [Arabidopsis thaliana]
  misc_feature (34)..(200): NCBI GI NO: 7486961 NR Description: hypothetical protein T13J8
  misc_feature (71)..(211): NCBI GI NO: 7486358 NR Description: hypothetical protein F3I3
  misc_feature (45)..(200): NCBI GI NO: 18404709 NR Description: expressed protein [Arabidopsis thaliana]
MDGGVGVAAGGGGGAQTPAPAPPRRWRLADERCDLRAMETDYVRRFHRHEPRDHQCSSAVAKHIKAPVHLVWSLVRRFDQPQLFKPFVSRCEMKGNIEIGSVREVNVKSGLPATRSTERLELLDDDERILSVRFVGGDHRLQNYSSILTVHPEVIDGRPGTLVIESFVVDVPDGNTKDETCYFVEALLKCNLRSLAEVSEGQVIMDQTEPLDR

SEQ ID NO: 29601 - DNA, 978 bp, Zea mays subsp. mays
  misc_feature (1)..(978): Ceres Seq. ID no. 12402449
  misc_feature (365)..(365): n is a, c, t, g, unknown, or other
  misc_feature (348)..(348): n is a, c, t, g, unknown, or other
tccccgctccccaccacggtgccaccgttcccgtgcgtcgctgcaccaccaccgtagcctcctcctctcacccggacgcggccgagccagaatggttagcgagcaacaagctcctgcgcggaggtggtggtggagggcagcgaggcggcggcggaggtgcccgtggagagcgaggaggcggccgcgcccaaggcggaggagcaactggatgacgaggcgccggtcgtcgaggacgtcaaggaagacgaggacgaggatgaggacgacgacgacgacgacgacgctgacgatgatgacgccgatggaggcgccggcgcaaccgagggcaccaagcagagccggagcgangaagaagagccgcaagncatgatgaagctcggaatgaaacccgtcaccggcgtcaccaggataaccatcaaaagagccaagaacatactgttcgtggtctcgaagccggacgtcttcaagagcccgacgtcggagacgtacgtgatattcggcgaggccaagatagaggacctgagctcccagctgcaggcgcaggccgcgcagcagttcaggatgcaggacctcagcaaggtgatggccaagcaggacgcggccgccgccgcggcggcgccggccgacgaggaggaggaggtcgacgaggccgggatagagccccgcgacatcgacctcgtcatgacgcaggccagcgtcacccgcgccaaggccgtcaaggctctcaaggcgcacgacggcgacatcgtcagcgccatcatggagctcacggcctgatcatgatataccagtgcaatgccgtacggccgtttcttcctcgttattgcagtctgcttcgtccagcgtcgctgttcatttttgggatttgcataaaagacgagctttgaataagagatgtactgtttgttcaccgtatgaacgtttttgcatcatgtcagtttccggattattattattgccactccttaagttgttatg

SEQ ID NO: 29602 - protein, 136 aa, Zea mays subsp. mays
  peptide (1)..(136): Ceres Seq. ID no. 12402450
  misc_feature (1)..(51): Pfam Name: Pfam Description:  NAC domain
  misc_feature (1)..(136): NCBI GI NO: 34902238 NR Description: Putative nascent polypeptide associated complexalpha chain
  misc_feature (1)..(123): NCBI GI NO: 34911462 NR Description: putative nascent polypeptide associated complexalpha chain
  misc_feature (1)..(135): NCBI GI NO: 15229149 NR Description: alpha NAC-like protein; protein id: At3g49470
  misc_feature (1)..(135): NCBI GI NO: 13899101 NR Description: alpha NAC-like protein [Arabidopsis thaliana]
  misc_feature (1)..(135): NCBI GI NO: 15230476 NR Description: nascent polypeptide associated complex alpha chain
  misc_feature (1)..(135): NCBI GI NO: 34907258 NR Description: putative nascent polypeptide associated complexalpha chain
  misc_feature (1)..(135): NCBI GI NO: 15235122 NR Description: putative alpha NAC; protein id: At4g10480
  misc_feature (1)..(135): NCBI GI NO: 6752882 NR Description: nascent polypeptide associated complex alpha chain
  misc_feature (1)..(135): NCBI GI NO: 18398710 NR Description: expressed protein; protein id: At1g33040
  misc_feature (1)..(135): NCBI GI NO: 21536597 NR Description: putative alpha NAC [Arabidopsis thaliana]
MMKLGMKPVTGVTRITIKRAKNILFVVSKPDVFKSPTSETYVIFGEAKIEDLSSQLQAQAAQQFRMQDLSKVMAKQDAAAAAAAPADEEEEVDEAGIEPRDIDLVMTQASVTRAKAVKALKAHDGDIVSAIMELTA

SEQ ID NO: 29603 - protein, 135 aa, Zea mays subsp. mays
  peptide (1)..(135): Ceres Seq. ID no. 12402451
  misc_feature (1)..(50): Pfam Name: Pfam Description:  NAC domain
  misc_feature (1)..(135): NCBI GI NO: 34902238 NR Description: Putative nascent polypeptide associated complexalpha chain
  misc_feature (1)..(122): NCBI GI NO: 34911462 NR Description: putative nascent polypeptide associated complexalpha chain
  misc_feature (1)..(134): NCBI GI NO: 15229149 NR Description: alpha NAC-like protein; protein id: At3g49470
  misc_feature (1)..(134): NCBI GI NO: 13899101 NR Description: alpha NAC-like protein [Arabidopsis thaliana]
  misc_feature (1)..(134): NCBI GI NO: 15230476 NR Description: nascent polypeptide associated complex alpha chain
  misc_feature (1)..(134): NCBI GI NO: 34907258 NR Description: putative nascent polypeptide associated complexalpha chain
  misc_feature (1)..(134): NCBI GI NO: 15235122 NR Description: putative alpha NAC; protein id: At4g10480
  misc_feature (1)..(134): NCBI GI NO: 6752882 NR Description: nascent polypeptide associated complex alpha chain
  misc_feature (1)..(134): NCBI GI NO: 18398710 NR Description: expressed protein; protein id: At1g33040
  misc_feature (1)..(134): NCBI GI NO: 21536597 NR Description: putative alpha NAC [Arabidopsis thaliana]
MKLGMKPVTGVTRITIKRAKNILFVVSKPDVFKSPTSETYVIFGEAKIEDLSSQLQAQAAQQFRMQDLSKVMAKQDAAAAAAAPADEEEEVDEAGIEPRDIDLVMTQASVTRAKAVKALKAHDGDIVSAIMELTA

SEQ ID NO: 29604 - protein, 131 aa, Zea mays subsp. mays
  peptide (1)..(131): Ceres Seq. ID no. 12402452
  misc_feature (1)..(46): Pfam Name: Pfam Description:  NAC domain
  misc_feature (1)..(131): NCBI GI NO: 34902238 NR Description: Putative nascent polypeptide associated complexalpha chain
  misc_feature (1)..(118): NCBI GI NO: 34911462 NR Description: putative nascent polypeptide associated complexalpha chain
  misc_feature (1)..(130): NCBI GI NO: 15229149 NR Description: alpha NAC-like protein; protein id: At3g49470
  misc_feature (1)..(130): NCBI GI NO: 13899101 NR Description: alpha NAC-like protein [Arabidopsis thaliana]
  misc_feature (1)..(130): NCBI GI NO: 15230476 NR Description: nascent polypeptide associated complex alpha chain
  misc_feature (1)..(130): NCBI GI NO: 34907258 NR Description: putative nascent polypeptide associated complexalpha chain
  misc_feature (1)..(130): NCBI GI NO: 15235122 NR Description: putative alpha NAC; protein id: At4g10480
  misc_feature (1)..(130): NCBI GI NO: 6752882 NR Description: nascent polypeptide associated complex alpha chain
  misc_feature (1)..(130): NCBI GI NO: 18398710 NR Description: expressed protein; protein id: At1g33040
  misc_feature (1)..(130): NCBI GI NO: 21536597 NR Description: putative alpha NAC [Arabidopsis thaliana]
MKPVTGVTRITIKRAKNILFVVSKPDVFKSPTSETYVIFGEAKIEDLSSQLQAQAAQQFRMQDLSKVMAKQDAAAAAAAPADEEEEVDEAGIEPRDIDLVMTQASVTRAKAVKALKAHDGDIVSAIMELTA

SEQ ID NO: 29605 - DNA, 1155 bp, Zea mays subsp. mays
  misc_feature (1)..(1155): Ceres Seq. ID no. 12353947
agtaacgcctttctccaagcctgagcactccatccactactttactcaaagtctagagctagctttttgctttgctcaccagacaaaccgcagcagatggcgtcgacgatcatggccgccacctcccgcatcgtcgcggccaagacgccgtttcttggccagggtcgcgccgccgccgccgccgccaatgccagccccctccgcgacgtcgccgccgccgctgctggcggccggatcaccatgggcaacgacctgtggtacggcccggaccgcgtcaagtacctgggccccttctccgcccagacgccctcgtacctgaccggcgagttccccggcgactacggctgggacaccgccgggctgtccgcggacccggaggcgttcgcgcggaacagggcgctggaggtgatccacgggcggtgggcgatgctgggtgcgctgggctgcatcaccccggaggtgctggagaagtgggtgcgcgtggacttcaaggagcccgtgtggttcaaggccggcgcgcagatcttctcggagggcgggctggactacctgggcaaccccaacctggtgcacgcgcagagcatcctggccgtgctcggcttccaggtcatcctcatgggcctcgtcgagggcttccgcatcaacggcctcgacggcgtcggcgagggcaacaacctctaccccggcggccagtacttcgacccgctgggcctcgccgacgaccccgtcaccttcgccgagctcaaggtcaaggagatcaagaacggccgcctcgccatgttctccatgttcggcttcttcgtccaggccatcgtcaccggcaaggggcccctcgagaacctgctcgaccacctcgacgaccccgtcgccaacaacgcctgggtctacgccaccaagttcgcaccagggtcttaagctagctaccgggccgcggcgtgccaggacattgtgttgtacactactcgtttctgtcgtgatctgtaccatgaacgaatgcaaatattcttgtgctctcccagaaggaacgaactggactagttttgctcttccattccatgtatactctgcttcagcatatatgtagttgtgtctactggtttttgcagttgttaactgatttgcgtccatatatgaggttgtgtctacttttttttt

SEQ ID NO: 29606 - protein, 272 aa, Zea mays subsp. mays
  peptide (1)..(272): Ceres Seq. ID no. 12353948
  misc_feature (69)..(239): Pfam Name: Pfam Description:  Chlorophyll A-B binding protein
  misc_feature (1)..(272): NCBI GI NO: 115793 NR Description: Chlorophyll A-B binding protein of LHCII type III
  misc_feature (1)..(272): NCBI GI NO: 34393384 NR Description: putative chlorophyll A-B binding protein of LHCIItype III
  misc_feature (1)..(272): NCBI GI NO: 4689380 NR Description: LHCII type III chlorophyll a/b binding protein
  misc_feature (5)..(272): NCBI GI NO: 479406 NR Description: chlorophyll a/b-binding protein - garden pea
  misc_feature (6)..(272): NCBI GI NO: 6644196 NR Description: chlorophyll a/b-binding protein [Daucus carota]
  misc_feature (1)..(272): NCBI GI NO: 115794 NR Description: Chlorophyll A-B binding protein 13
  misc_feature (1)..(272): NCBI GI NO: 15239602 NR Description: light-harvesting chlorophyll a/b binding protein
  misc_feature (52)..(272): NCBI GI NO: 405617 NR Description: LHCII Type III chlorophyll a/b binding protein
  misc_feature (1)..(270): NCBI GI NO: 7443222 NR Description: chlorophyll A/b-binding protein type III Lhcb3
  misc_feature (43)..(271): NCBI GI NO: 115796 NR Description: Chlorophyll A-B binding protein
MASTIMAATSRIVAAKTPFLGQGRAAAAAANASPLRDVAAAAAGGRITMGNDLWYGPDRVKYLGPFSAQTPSYLTGEFPGDYGWDTAGLSADPEAFARNRALEVIHGRWAMLGALGCITPEVLEKWVRVDFKEPVWFKAGAQIFSEGGLDYLGNPNLVHAQSILAVLGFQVILMGLVEGFRINGLDGVGEGNNLYPGGQYFDPLGLADDPVTFAELKVKEIKNGRLAMFSMFGFFVQAIVTGKGPLENLLDHLDDPVANNAWVYATKFAPGS

SEQ ID NO: 29607 - protein, 267 aa, Zea mays subsp. mays
  peptide (1)..(267): Ceres Seq. ID no. 12353949
  misc_feature (64)..(234): Pfam Name: Pfam Description:  Chlorophyll A-B binding protein
  misc_feature (1)..(267): NCBI GI NO: 115793 NR Description: Chlorophyll A-B binding protein of LHCII type III
  misc_feature (1)..(267): NCBI GI NO: 34393384 NR Description: putative chlorophyll A-B binding protein of LHCIItype III
  misc_feature (1)..(267): NCBI GI NO: 4689380 NR Description: LHCII type III chlorophyll a/b binding protein
  misc_feature (1)..(267): NCBI GI NO: 479406 NR Description: chlorophyll a/b-binding protein - garden pea
  misc_feature (1)..(267): NCBI GI NO: 6644196 NR Description: chlorophyll a/b-binding protein [Daucus carota]
  misc_feature (1)..(267): NCBI GI NO: 115794 NR Description: Chlorophyll A-B binding protein 13
  misc_feature (1)..(267): NCBI GI NO: 15239602 NR Description: light-harvesting chlorophyll a/b binding protein
  misc_feature (47)..(267): NCBI GI NO: 405617 NR Description: LHCII Type III chlorophyll a/b binding protein
  misc_feature (1)..(265): NCBI GI NO: 7443222 NR Description: chlorophyll A/b-binding protein type III Lhcb3
  misc_feature (38)..(266): NCBI GI NO: 115796 NR Description: Chlorophyll A-B binding protein
MAATSRIVAAKTPFLGQGRAAAAAANASPLRDVAAAAAGGRITMGNDLWYGPDRVKYLGPFSAQTPSYLTGEFPGDYGWDTAGLSADPEAFARNRALEVIHGRWAMLGALGCITPEVLEKWVRVDFKEPVWFKAGAQIFSEGGLDYLGNPNLVHAQSILAVLGFQVILMGLVEGFRINGLDGVGEGNNLYPGGQYFDPLGLADDPVTFAELKVKEIKNGRLAMFSMFGFFVQAIVTGKGPLENLLDHLDDPVANNAWVYATKFAPGS

SEQ ID NO: 29608 - protein, 224 aa, Zea mays subsp. mays
  peptide (1)..(224): Ceres Seq. ID no. 12353950
  misc_feature (21)..(191): Pfam Name: Pfam Description:  Chlorophyll A-B binding protein
  misc_feature (1)..(224): NCBI GI NO: 115793 NR Description: Chlorophyll A-B binding protein of LHCII type III
  misc_feature (1)..(224): NCBI GI NO: 34393384 NR Description: putative chlorophyll A-B binding protein of LHCIItype III
  misc_feature (1)..(224): NCBI GI NO: 4689380 NR Description: LHCII type III chlorophyll a/b binding protein
  misc_feature (1)..(224): NCBI GI NO: 479406 NR Description: chlorophyll a/b-binding protein - garden pea
  misc_feature (1)..(224): NCBI GI NO: 6644196 NR Description: chlorophyll a/b-binding protein [Daucus carota]
  misc_feature (1)..(224): NCBI GI NO: 115794 NR Description: Chlorophyll A-B binding protein 13
  misc_feature (1)..(224): NCBI GI NO: 15239602 NR Description: light-harvesting chlorophyll a/b binding protein
  misc_feature (4)..(224): NCBI GI NO: 405617 NR Description: LHCII Type III chlorophyll a/b binding protein
  misc_feature (1)..(222): NCBI GI NO: 7443222 NR Description: chlorophyll A/b-binding protein type III Lhcb3
  misc_feature (1)..(223): NCBI GI NO: 115796 NR Description: Chlorophyll A-B binding protein
MGNDLWYGPDRVKYLGPFSAQTPSYLTGEFPGDYGWDTAGLSADPEAFARNRALEVIHGRWAMLGALGCITPEVLEKWVRVDFKEPVWFKAGAQIFSEGGLDYLGNPNLVHAQSILAVLGFQVILMGLVEGFRINGLDGVGEGNNLYPGGQYFDPLGLADDPVTFAELKVKEIKNGRLAMFSMFGFFVQAIVTGKGPLENLLDHLDDPVANNAWVYATKFAPGS

SEQ ID NO: 29609 - DNA, 804 bp, Zea mays subsp. mays
  misc_feature (1)..(804): Ceres Seq. ID no. 12348060
gaaaattgaaaaccctataatcctccccaaaggcccaaacctatcgcccgtacgagactgcgccgccgttgccgtctcctcctccgtcccatcactctgctgctcgcgcactctcacctgcccgcgccgtcttcgaccgccaccaagatgaacaaggagaggctcatgaagatggccggcgccgtccgcaccggcggcaagggcaccatgcgcaggaagaagaaggctgtacacaagacggtcaccacggacgacaagaggctgcagggcactctcaagagagtaggggtcaacaccatccctgcaatcgaggaggtgaacatattcaaggacgatctcgtcatccagttcttgaaccccaaagtgcaagcttccatcgcagcaaacacatgggtggtcagtggatctccacagacgaaaaagctacaggatgttctccctgggatcattaaccagcttggccctgacaacatggagcacctgaagaggattgccgaggagatgcagaagcaggtggctgctgccggtgcggcagcacaggtcaaggaagacaacgatgacgatgttccagagcttgttcctggagagacttttgaagaagtagctcaggagacaaaagcctgatcataggctctaaatagtgaaatgttactgcaccaatgctgtgaggtcatggttttcgtgtgatggcactcttcttcctcccctcctaggccagccccagccactctttgtgttcgctgttggaaacttttagtttctccatctcaagcttttacctaaggttgtgcatgttgagatgcc

SEQ ID NO: 29610 - protein, 158 aa, Zea mays subsp. mays
  peptide (1)..(158): Ceres Seq. ID no. 12348061
  misc_feature (34)..(92): Pfam Name: Pfam Description:  NAC domain
  misc_feature (1)..(158): NCBI GI NO: 27573340 NR Description: putative transcription factor
  misc_feature (1)..(158): NCBI GI NO: 33945882 NR Description: transcription factor homolog BTF3-like protein
  misc_feature (1)..(155): NCBI GI NO: 24431603 NR Description: Putative transcription factor
  misc_feature (1)..(155): NCBI GI NO: 29367567 NR Description: putative transcription factor BTF3
  misc_feature (1)..(157): NCBI GI NO: 37535464 NR Description: putative transcription factor
  misc_feature (1)..(158): NCBI GI NO: 15220876 NR Description: transcription factor, putative
  misc_feature (1)..(158): NCBI GI NO: 16323127 NR Description: At1g17880/F2H15_10 [Arabidopsis thaliana]
  misc_feature (1)..(155): NCBI GI NO: 15219413 NR Description: putative transcription factor BTF3
  misc_feature (1)..(155): NCBI GI NO: 21537065 NR Description: putative transcription factor BTF3
  misc_feature (9)..(158): NCBI GI NO: 25956272 NR Description: unnamed protein product [Lotus japonicus]
MNKERLMKMAGAVRTGGKGTMRRKKKAVHKTVTTDDKRLQGTLKRVGVNTIPAIEEVNIFKDDLVIQFLNPKVQASIAANTWVVSGSPQTKKLQDVLPGIINQLGPDNMEHLKRIAEEMQKQVAAAGAAAQVKEDNDDDVPELVPGETFEEVAQETKA

SEQ ID NO: 29611 - protein, 152 aa, Zea mays subsp. mays
  peptide (1)..(152): Ceres Seq. ID no. 12348062
  misc_feature (28)..(86): Pfam Name: Pfam Description:  NAC domain
  misc_feature (1)..(152): NCBI GI NO: 27573340 NR Description: putative transcription factor
  misc_feature (1)..(152): NCBI GI NO: 33945882 NR Description: transcription factor homolog BTF3-like protein
  misc_feature (1)..(149): NCBI GI NO: 24431603 NR Description: Putative transcription factor
  misc_feature (1)..(149): NCBI GI NO: 29367567 NR Description: putative transcription factor BTF3
  misc_feature (1)..(151): NCBI GI NO: 37535464 NR Description: putative transcription factor
  misc_feature (1)..(152): NCBI GI NO: 15220876 NR Description: transcription factor, putative
  misc_feature (1)..(152): NCBI GI NO: 16323127 NR Description: At1g17880/F2H15_10 [Arabidopsis thaliana]
  misc_feature (1)..(149): NCBI GI NO: 15219413 NR Description: putative transcription factor BTF3
  misc_feature (1)..(149): NCBI GI NO: 21537065 NR Description: putative transcription factor BTF3
  misc_feature (3)..(152): NCBI GI NO: 25956272 NR Description: unnamed protein product [Lotus japonicus]
MKMAGAVRTGGKGTMRRKKKAVHKTVTTDDKRLQGTLKRVGVNTIPAIEEVNIFKDDLVIQFLNPKVQASIAANTWVVSGSPQTKKLQDVLPGIINQLGPDNMEHLKRIAEEMQKQVAAAGAAAQVKEDNDDDVPELVPGETFEEVAQETKA

SEQ ID NO: 29612 - protein, 150 aa, Zea mays subsp. mays
  peptide (1)..(150): Ceres Seq. ID no. 12348063
  misc_feature (26)..(84): Pfam Name: Pfam Description:  NAC domain
  misc_feature (1)..(150): NCBI GI NO: 27573340 NR Description: putative transcription factor
  misc_feature (1)..(150): NCBI GI NO: 33945882 NR Description: transcription factor homolog BTF3-like protein
  misc_feature (1)..(147): NCBI GI NO: 24431603 NR Description: Putative transcription factor
  misc_feature (1)..(147): NCBI GI NO: 29367567 NR Description: putative transcription factor BTF3
  misc_feature (1)..(149): NCBI GI NO: 37535464 NR Description: putative transcription factor
  misc_feature (1)..(150): NCBI GI NO: 15220876 NR Description: transcription factor, putative
  misc_feature (1)..(150): NCBI GI NO: 16323127 NR Description: At1g17880/F2H15_10 [Arabidopsis thaliana]
  misc_feature (1)..(147): NCBI GI NO: 15219413 NR Description: putative transcription factor BTF3
  misc_feature (1)..(147): NCBI GI NO: 21537065 NR Description: putative transcription factor BTF3
  misc_feature (1)..(150): NCBI GI NO: 25956272 NR Description: unnamed protein product [Lotus japonicus]
MAGAVRTGGKGTMRRKKKAVHKTVTTDDKRLQGTLKRVGVNTIPAIEEVNIFKDDLVIQFLNPKVQASIAANTWVVSGSPQTKKLQDVLPGIINQLGPDNMEHLKRIAEEMQKQVAAAGAAAQVKEDNDDDVPELVPGETFEEVAQETKA

SEQ ID NO: 29613 - DNA, 1002 bp, Zea mays subsp. mays
  misc_feature (1)..(1002): Ceres Seq. ID no. 12341801
gggatctggatctctcctctctcgtctgcaccgcgagtccgcgactccgcaccaagcaaatcccctgcccccaaaatattgctagggattcgaggggaggaaaatccaggcgcccaggcctggcaatccgttcgtcggagaggccatgagctcggcgcaggatccgttctacatcgtccgggaggagatccaggagtcgattgataaattgcaaagtaacttccaccgctgggagcaaactgcttcaaacacaggagaatatgttcatctgacaaaggagcttctgaccagctgtgaaagcatcgagtggcaggtagatgagctggaaaagacaatctcagttgcatcaagggatccatcatactatggacttgatgaagttgaactttccagacgaagaaactggactggttctgctcataagcaggttggtacagttaagagagctattgaaaagggcaagagcaatgtagcaacttcaaaataccaggatacaagcaggaccaaccactattctgcccaagataatgatgactttatctcttcagaatcagataggcagcttctactcatgaggcagcaggatgaagaacttgacgagctcagtgaaagtgttcaaaggattggtggctaggactaaccatacacgaagagctgtctggacaggaaaggatcctaaacgacttaagcttggagatggagactacttccaacagacttgatttcgtgcagaaaagagtggccatggtgatgaagaaggccggcatcaagggtcagatcatgctgatcgtgttcctggttgttctgttcatcattctttttgttttggtgttcttgacatagccaagtgcaccagggtcctcgattttctccctcccatttgttgtgcctccctccctagtacgaacataagtatacgtgctggagctatcctttataaatcccgattttaatgcattttgttctgcgtgagatcaccgtcattggaacggtgttatggtt

SEQ ID NO: 29614 - protein, 162 aa, Zea mays subsp. mays
  peptide (1)..(162): Ceres Seq. ID no. 12341802
  misc_feature (47)..(162): NCBI GI NO: 34905840 NR Description: putative syntaxin
  misc_feature (1)..(56): NCBI GI NO: 34905840 NR Description: putative syntaxin
  misc_feature (1)..(162): NCBI GI NO: 18396813 NR Description: syntaxin SYP6 family; protein id: At1g28490
  misc_feature (1)..(162): NCBI GI NO: 18175840 NR Description: unknown protein [Arabidopsis thaliana]
  misc_feature (1)..(161): NCBI GI NO: 498040 NR Description: ORF
  misc_feature (1)..(106): NCBI GI NO: 6560768 NR Description: F3M18.7 [Arabidopsis thaliana]
  misc_feature (56)..(162): NCBI GI NO: 6560768 NR Description: F3M18.7 [Arabidopsis thaliana]
  misc_feature (4)..(161): NCBI GI NO: 20148776 NR Description: syntaxin 6 [Chlamydomonas reinhardtii]
  misc_feature (3)..(129): NCBI GI NO: 24652619 NR Description: Syntaxin 6 CG7736-PC
  misc_feature (3)..(142): NCBI GI NO: 13928922 NR Description: syntaxin 6 [Rattus norvegicus]
MSSAQDPFYIVREEIQESIDKLQSNFHRWEQTASNTGEYVHLTKELLTSCESIEWQVDELEKTISVASRDPSYYGLDEVELSRRRNWTGSAHKQVGTVKRAIEKGKSNVATSKYQDTSRTNHYSAQDNDDFISSESDRQLLLMRQQDEELDELSESVQRIGG

SEQ ID NO: 29615 - DNA, 629 bp, Zea mays subsp. mays
  misc_feature (1)..(629): Ceres Seq. ID no. 12402244
attgcgaagcctcacgtctccagcaccgggccaccggcggcgaggtcgcgcgagcgcaggcaggggtggtactgggaggggaggaggggaagaaggaggtgactgcgatgtcgagccggttctggaggtggtacgcggaccggcagttccacaagtgggagaagacggtgctgtgggacatggtggagccctaccgcccgccgcgctccttcgcgccactcgtcggcacctacgtcgccgccttctacaccggcgtcgtcggggccgccgtcaccgagcagctctacaaggagaagtactgggaggatcaccccggcgaggcggtgccgatcatgccgcccaagttctactgggggccttggagggtgatgaacggagaagttccgcgcttcattcagccgcccgacgaggccaagacggcgtaggagcttcgagcttgcttcaaaacttctcagaagaagcatgtatctggtctcgatcgaaaaaaagaaattggagcccttcttttgtgcctctcccactctcctggttgtacgcctgtacctgtctgtctggaatacacgagtaagataagatcaggagaactgaagacctcaaataaagaaaaaaatcagaaaacgttggcatgg

SEQ ID NO: 29616 - protein, 188 aa, Zea mays subsp. mays
  peptide (1)..(188): Ceres Seq. ID no. 12402245
LRSLTSPAPGHRRRGRASAGRGGTGRGGGEEGGDCDVEPVLEVVRGPAVPQVGEDGAVGHGGALPPAALLRATRRHLRRRLLHRRRRGRRHRAALQGEVLGGSPRRGGADHAAQVLLGALEGDERRSSALHSAARRGQDGVGASSLLQNFSEEACIWSRSKKRNWSPSFVPLPLSWLYACTCLSGIHE

SEQ ID NO: 29617 - protein, 140 aa, Zea mays subsp. mays
  peptide (1)..(140): Ceres Seq. ID no. 12402246
  misc_feature (38)..(126): NCBI GI NO: 18417439 NR Description: putative protein; protein id: At4g29660
  misc_feature (38)..(122): NCBI GI NO: 7487097 NR Description: hypothetical protein T16L4
CEASRLQHRATGGEVARAQAGVVLGGEEGKKEVTAMSSRFWRWYADRQFHKWEKTVLWDMVEPYRPPRSFAPLVGTYVAAFYTGVVGAAVTEQLYKEKYWEDHPGEAVPIMPPKFYWGPWRVMNGEVPRFIQPPDEAKTA

SEQ ID NO: 29618 - protein, 105 aa, Zea mays subsp. mays
  peptide (1)..(105): Ceres Seq. ID no. 12402247
  misc_feature (3)..(91): NCBI GI NO: 18417439 NR Description: putative protein; protein id: At4g29660
  misc_feature (3)..(87): NCBI GI NO: 7487097 NR Description: hypothetical protein T16L4
MSSRFWRWYADRQFHKWEKTVLWDMVEPYRPPRSFAPLVGTYVAAFYTGVVGAAVTEQLYKEKYWEDHPGEAVPIMPPKFYWGPWRVMNGEVPRFIQPPDEAKTA

SEQ ID NO: 29619 - DNA, 725 bp, Zea mays subsp. mays
  misc_feature (1)..(725): Ceres Seq. ID no. 12402897
attgtcatctggggcagggcaggggagggcaggagaagctatctattggccatctatccagcagccgctctccccagccccactctctccatctagagctccctaactgcaccggccgccacaccaccgtaccccgacccctcgacaacaatggccaccgtcctaggcagcccccgcgcgccggccttcttcttctcgccgtcctccctccgtgccgcgccggcgcccaccgccgtggcgctgcctgcggccaaggtgggcatcatgggccgtagcgccagcagcaggggcaggctgcgcgcgcaggccacctacaacgtgaagctgatcacgccggagggggaggtggagctgcaggtgcccgacgacgtgtacatcctggaccaggccgaggaggacggcatcgacctgccctactcctgccgcgcggggtcctgctcctcctgcgccggcaaggtcgtctccggctccgtggaccagtccgaccagagctacctcgacgacggccagatcgccgccggctgggtgctcacctgccacgcctaccccacctctgacgtcgtcatcgagacgcacaaggaggaggagctcaccggcgcataatcattcatgcccatccatctctatctctgtgggtcgtcgttgtgtgtaatttgagtacgcgcgtacacgtactgcttttgtttcatttgagcactgttcgtgtaagcgtcgagttgccctgc

SEQ ID NO: 29620 - protein, 150 aa, Zea mays subsp. mays
  peptide (1)..(150): Ceres Seq. ID no. 12402898
  misc_feature (60)..(135): Pfam Name: Pfam Description:  2Fe-2S iron-sulfur cluster binding domain
  misc_feature (1)..(150): NCBI GI NO: 119928 NR Description: Ferredoxin I, chloroplast precursor (Fd I)
  misc_feature (1)..(147): NCBI GI NO: 119961 NR Description: Ferredoxin V, chloroplast precursor (Fd V)
  misc_feature (16)..(148): NCBI GI NO: 462081 NR Description: Ferredoxin, chloroplast precursor
  misc_feature (53)..(150): NCBI GI NO: 13096166 NR Description: Chain B
  misc_feature (17)..(147): NCBI GI NO: 18698985 NR Description: anti-disease protein 1 [Oryza sativa]
  misc_feature (17)..(147): NCBI GI NO: 29337209 NR Description: Ferredoxin I, chloroplast precursor
  misc_feature (3)..(147): NCBI GI NO: 7430752 NR Description: ferredoxin [2Fe-2S] 2 - maize
  misc_feature (17)..(148): NCBI GI NO: 2305115 NR Description: ferredoxin [Oryza sativa]
  misc_feature (18)..(147): NCBI GI NO: 15219837 NR Description: ferrodoxin precursor; protein id: At1g60950
  misc_feature (53)..(148): NCBI GI NO: 34921267 NR Description: Ferredoxin
MATVLGSPRAPAFFFSPSSLRAAPAPTAVALPAAKVGIMGRSASSRGRLRAQATYNVKLITPEGEVELQVPDDVYILDQAEEDGIDLPYSCRAGSCSSCAGKVVSGSVDQSDQSYLDDGQIAAGWVLTCHAYPTSDVVIETHKEEELTGA

SEQ ID NO: 29621 - protein, 112 aa, Zea mays subsp. mays
  peptide (1)..(112): Ceres Seq. ID no. 12402899
  misc_feature (22)..(97): Pfam Name: Pfam Description:  2Fe-2S iron-sulfur cluster binding domain
  misc_feature (1)..(112): NCBI GI NO: 119928 NR Description: Ferredoxin I, chloroplast precursor (Fd I)
  misc_feature (1)..(109): NCBI GI NO: 119961 NR Description: Ferredoxin V, chloroplast precursor (Fd V)
  misc_feature (1)..(110): NCBI GI NO: 462081 NR Description: Ferredoxin, chloroplast precursor
  misc_feature (15)..(112): NCBI GI NO: 13096166 NR Description: Chain B
  misc_feature (1)..(109): NCBI GI NO: 18698985 NR Description: anti-disease protein 1 [Oryza sativa]
  misc_feature (1)..(109): NCBI GI NO: 29337209 NR Description: Ferredoxin I, chloroplast precursor
  misc_feature (1)..(109): NCBI GI NO: 7430752 NR Description: ferredoxin [2Fe-2S] 2 - maize
  misc_feature (1)..(110): NCBI GI NO: 2305115 NR Description: ferredoxin [Oryza sativa]
  misc_feature (1)..(109): NCBI GI NO: 15219837 NR Description: ferrodoxin precursor; protein id: At1g60950
  misc_feature (15)..(110): NCBI GI NO: 34921267 NR Description: Ferredoxin
MGRSASSRGRLRAQATYNVKLITPEGEVELQVPDDVYILDQAEEDGIDLPYSCRAGSCSSCAGKVVSGSVDQSDQSYLDDGQIAAGWVLTCHAYPTSDVVIETHKEEELTGA

SEQ ID NO: 29622 - protein, 90 aa, Zea mays subsp. mays
  peptide (1)..(90): Ceres Seq. ID no. 12402900
CHLGQGRGGQEKLSIGHLSSSRSPQPHSLHLELPNCTGRHTTVPRPLDNNGHRPRQPPRAGLLLLAVLPPCRAGAHRRGAACGQGGHHGP

SEQ ID NO: 29623 - DNA, 877 bp, Zea mays subsp. mays
  misc_feature (1)..(877): Ceres Seq. ID no. 13493480
aaaaaaaatttagcggccaccgacgaccggccggccgtgcacccttcgcactactactgcgcccgcggacggcgtcagaggagcagcacccagcagcatggcctgcaccaggaggcagttgtggtgggcatgcctgctggcggcgtggtgctgcgccggcgccgccgcggccgcccagccgccggcggcggacgcggacccgctgcagagcaggtgccagggggactttgggaagctgacggactgcatggactacgcgacggggcacgcggcgtcgccctcgtccacctgctgcggcgacgccggcggcacgcagaaggcgcgcccggagtgcctctgctacatcatccagcaggtgcacgcggggcgcgaccaggtgcagtcgctcggcctgcgcttcgaccgcctcctggcgctccccgccgcctgcagcctccccaacgccaacgtctcgctctgcatcaacctgctgaacctgaagccgggctcgccagactacgcgctgttcgccaacgcctccaagatcacgccatcagccggaggcagcccggcgagcgacaccgccgccggcagcgccgttatcaggctccaggctggggtccgaggcagcgtcgcgctcgccgtggtctctgcgatcgtctcgtcagtcttctgatccgaccgatctcctcagaggactagaggagaagcagcggttcttacactccgtgtggattcgtcgttctcatgttgcgttccactcgtcgatgtctattttgtatttgtaccccacataaaaaaaatagatccagatgatacttgtttcccccgtccctgtggctttaactgtaacctcggatgtttgaattagctaattatgtataactctcatcgcgtc

SEQ ID NO: 29624 - protein, 226 aa, Zea mays subsp. mays
  peptide (1)..(226): Ceres Seq. ID no. 13493481
KKNLAATDDRPAVHPSHYYCARGRRQRSSTQQHGLHQEAVVVGMPAGGVVLRRRRRGRPAAGGGRGPAAEQVPGGLWEADGLHGLRDGARGVALVHLLRRRRRHAEGAPGVPLLHHPAGARGARPGAVARPALRPPPGAPRRLQPPQRQRLALHQPAEPEAGLARLRAVRQRLQDHAISRRQPGERHRRRQRRYQAPGWGPRQRRARRGLCDRLVSLLIRPISSED

SEQ ID NO: 29625 - protein, 185 aa, Zea mays subsp. mays
  peptide (1)..(185): Ceres Seq. ID no. 13493482
  misc_feature (40)..(121): Pfam Name: Pfam Description:  Protease inhibitor/seed storage/LTP family
  misc_feature (22)..(182): NCBI GI NO: 21553541 NR Description: lipid transfer protein, putative
  misc_feature (22)..(182): NCBI GI NO: 15217777 NR Description: lipid transfer protein - related
  misc_feature (14)..(159): NCBI GI NO: 28269449 NR Description: putative protease inhibitor
  misc_feature (11)..(184): NCBI GI NO: 25553602 NR Description: OJ1656_E11.34
  misc_feature (37)..(185): NCBI GI NO: 25553595 NR Description: OJ1656_E11.26
  misc_feature (13)..(160): NCBI GI NO: 34394084 NR Description: lipid transfer protein-like
  misc_feature (14)..(182): NCBI GI NO: 28269454 NR Description: putative protease inhibitor
  misc_feature (11)..(185): NCBI GI NO: 25553588 NR Description: OJ1656_E11.14
  misc_feature (40)..(132): NCBI GI NO: 15229756 NR Description: protease inhibitor/seed storage/lipid transfer
  misc_feature (40)..(132): NCBI GI NO: 21617892 NR Description: lipid-transfer protein-like protein
MACTRRQLWWACLLAAWCCAGAAAAAQPPAADADPLQSRCQGDFGKLTDCMDYATGHAASPSSTCCGDAGGTQKARPECLCYIIQQVHAGRDQVQSLGLRFDRLLALPAACSLPNANVSLCINLLNLKPGSPDYALFANASKITPSAGGSPASDTAAGSAVIRLQAGVRGSVALAVVSAIVSSVF

SEQ ID NO: 29626 - protein, 183 aa, Zea mays subsp. mays
  peptide (1)..(183): Ceres Seq. ID no. 13493483
MPAGGVVLRRRRRGRPAAGGGRGPAAEQVPGGLWEADGLHGLRDGARGVALVHLLRRRRRHAEGAPGVPLLHHPAGARGARPGAVARPALRPPPGAPRRLQPPQRQRLALHQPAEPEAGLARLRAVRQRLQDHAISRRQPGERHRRRQRRYQAPGWGPRQRRARRGLCDRLVSLLIRPISSED

SEQ ID NO: 29627 - DNA, 1067 bp, Zea mays subsp. mays
  misc_feature (1)..(1067): Ceres Seq. ID no. 12345390
tcgcattccccctcgatcggcctccctcccccaagatcctccactcgatcccaaacaaaccaacaaatccatccatcgcacatggacgcgttcttctcggcctcctccgcgtcggcgccctacggctacggcgccggcggatggagctacgactcgctcaagaacttccgccagatcacccctgccgtccagacccacctcaagctcgtctacctcaccctgtgcgcggcgctggcctcgtcggcggtgggcgcttacctgcacgtggtctggaacatcggcgggacgctgacaatgctcggttgcgtcggcagcatcgcctggctcttctcggtgcccgtctacgaggagaggaagaggtatgggctgctgatggcggctgccctcctggaaggcgcttcggtcggacccctcgtcaagctcgccgtggaatttgacccaagcatcctggtgacggcgttcgtggggactgccatcgcgttcgcgtgcttctccggcgcggccatggtggccaggcgcagggagtacctctacctgggcgggctgctctcgtcggggctctccatcctgctctggctgcagctcgccgcctccatcttcggccactccgcaaccagcttcatgttcgaggtctacttcgggctgctcatcttcctgggctacatggtgtacgacacgcaggagatcatcgagagggcgcaccgcggcgacatggaccacgtcaagcacgccctcaccctcttcaccgacttcgtggccgtcctcgtccgcgtcctcgtcatcatgctcaagaacgcggccgacaagtcggaggacaagaagaggaagaagaggtcgtgagcgtcgagaacggaagctctcccacatgcataggagtaactgccagggttccttcctggggtggaagtgtggaactgagcttgaatgttaagaagtgttcctttgttctcttcctctcttgatgactctgtaaatagctatgtcaatctggttaagtttggtttggttgcatgtgcctgtgttcgctgccctttggatagaatgcaaattaaagatgttgctattgc

SEQ ID NO: 29628 - protein, 279 aa, Zea mays subsp. mays
  peptide (1)..(279): Ceres Seq. ID no. 12345391
  misc_feature (57)..(266): Pfam Name: Pfam Description:  Uncharacterised protein family UPF0005
  misc_feature (28)..(279): NCBI GI NO: 12229685 NR Description: Bax inhibitor-1 (BI-1) (OsBI-1)
  misc_feature (28)..(278): NCBI GI NO: 13940165 NR Description: BAX inhibitor 1 [Hordeum vulgare subsp. vulgare]
  misc_feature (28)..(279): NCBI GI NO: 21593125 NR Description: Bax inhibitor-1 like [Arabidopsis thaliana]
  misc_feature (28)..(279): NCBI GI NO: 14719274 NR Description: Bax inhibitor 1 [Brassica napus]
  misc_feature (28)..(279): NCBI GI NO: 15238017 NR Description: Bax inhibitor-1 like; protein id: At5g47120
  misc_feature (30)..(279): NCBI GI NO: 14719276 NR Description: Bax inhibitor 1 [Nicotiana tabacum]
  misc_feature (32)..(276): NCBI GI NO: 17981376 NR Description: bax inhibitor-like protein [Brassica oleracea]
  misc_feature (45)..(185): NCBI GI NO: 27526517 NR Description: putative BAX inhibitor 1
  misc_feature (48)..(275): NCBI GI NO: 15236582 NR Description: Bax inhibitor-1-like protein; protein id:At4g17580
  misc_feature (49)..(274): NCBI GI NO: 21311961 NR Description: testis enhanced gene transcript; Bax inhibitor-1
SHSPSIGLPPPRSSTRSQTNQQIHPSHMDAFFSASSASAPYGYGAGGWSYDSLKNFRQITPAVQTHLKLVYLTLCAALASSAVGAYLHVVWNIGGTLTMLGCVGSIAWLFSVPVYEERKRYGLLMAAALLEGASVGPLVKLAVEFDPSILVTAFVGTAIAFACFSGAAMVARRREYLYLGGLLSSGLSILLWLQLAASIFGHSATSFMFEVYFGLLIFLGYMVYDTQEIIERAHRGDMDHVKHALTLFTDFVAVLVRVLVIMLKNAADKSEDKKRKKRS

SEQ ID NO: 29629 - protein, 252 aa, Zea mays subsp. mays
  peptide (1)..(252): Ceres Seq. ID no. 12345392
  misc_feature (30)..(239): Pfam Name: Pfam Description:  Uncharacterised protein family UPF0005
  misc_feature (1)..(252): NCBI GI NO: 12229685 NR Description: Bax inhibitor-1 (BI-1) (OsBI-1)
  misc_feature (1)..(251): NCBI GI NO: 13940165 NR Description: BAX inhibitor 1 [Hordeum vulgare subsp. vulgare]
  misc_feature (1)..(252): NCBI GI NO: 21593125 NR Description: Bax inhibitor-1 like [Arabidopsis thaliana]
  misc_feature (1)..(252): NCBI GI NO: 14719274 NR Description: Bax inhibitor 1 [Brassica napus]
  misc_feature (1)..(252): NCBI GI NO: 15238017 NR Description: Bax inhibitor-1 like; protein id: At5g47120
  misc_feature (3)..(252): NCBI GI NO: 14719276 NR Description: Bax inhibitor 1 [Nicotiana tabacum]
  misc_feature (5)..(249): NCBI GI NO: 17981376 NR Description: bax inhibitor-like protein [Brassica oleracea]
  misc_feature (18)..(158): NCBI GI NO: 27526517 NR Description: putative BAX inhibitor 1
  misc_feature (21)..(248): NCBI GI NO: 15236582 NR Description: Bax inhibitor-1-like protein; protein id:At4g17580
  misc_feature (22)..(247): NCBI GI NO: 21311961 NR Description: testis enhanced gene transcript; Bax inhibitor-1
MDAFFSASSASAPYGYGAGGWSYDSLKNFRQITPAVQTHLKLVYLTLCAALASSAVGAYLHVVWNIGGTLTMLGCVGSIAWLFSVPVYEERKRYGLLMAAALLEGASVGPLVKLAVEFDPSILVTAFVGTAIAFACFSGAAMVARRREYLYLGGLLSSGLSILLWLQLAASIFGHSATSFMFEVYFGLLIFLGYMVYDTQEIIERAHRGDMDHVKHALTLFTDFVAVLVRVLVIMLKNAADKSEDKKRKKRS

SEQ ID NO: 29630 - protein, 181 aa, Zea mays subsp. mays
  peptide (1)..(181): Ceres Seq. ID no. 12345393
  misc_feature (1)..(168): Pfam Name: Pfam Description:  Uncharacterised protein family UPF0005
  misc_feature (1)..(181): NCBI GI NO: 12229685 NR Description: Bax inhibitor-1 (BI-1) (OsBI-1)
  misc_feature (1)..(180): NCBI GI NO: 13940165 NR Description: BAX inhibitor 1 [Hordeum vulgare subsp. vulgare]
  misc_feature (1)..(181): NCBI GI NO: 21593125 NR Description: Bax inhibitor-1 like [Arabidopsis thaliana]
  misc_feature (1)..(181): NCBI GI NO: 14719274 NR Description: Bax inhibitor 1 [Brassica napus]
  misc_feature (1)..(181): NCBI GI NO: 15238017 NR Description: Bax inhibitor-1 like; protein id: At5g47120
  misc_feature (1)..(181): NCBI GI NO: 14719276 NR Description: Bax inhibitor 1 [Nicotiana tabacum]
  misc_feature (1)..(178): NCBI GI NO: 17981376 NR Description: bax inhibitor-like protein [Brassica oleracea]
  misc_feature (1)..(87): NCBI GI NO: 27526517 NR Description: putative BAX inhibitor 1
  misc_feature (1)..(177): NCBI GI NO: 15236582 NR Description: Bax inhibitor-1-like protein; protein id:At4g17580
  misc_feature (1)..(176): NCBI GI NO: 21311961 NR Description: testis enhanced gene transcript; Bax inhibitor-1
MLGCVGSIAWLFSVPVYEERKRYGLLMAAALLEGASVGPLVKLAVEFDPSILVTAFVGTAIAFACFSGAAMVARRREYLYLGGLLSSGLSILLWLQLAASIFGHSATSFMFEVYFGLLIFLGYMVYDTQEIIERAHRGDMDHVKHALTLFTDFVAVLVRVLVIMLKNAADKSEDKKRKKRS

SEQ ID NO: 29631 - DNA, 528 bp, Zea mays subsp. mays
  misc_feature (1)..(528): Ceres Seq. ID no. 13564769
gtttctttttaggctgtcgaagtatcaagacggcagaacagggtgagggaatctactgggaatggcgatatggtatcaaaattggaagctgccgagtacaagcttgaagaactgaagtcaaacatggtgggattagggaaggaagctattgcagcaatgtcggctgttgaggctcagcagcaacggttgaccttacagcgtctcattgcactggttgaggctgagagaacttaccatcagagagttctggagatacttgacaaattggaagaagaaatggtgtctgagcgccaaaaaattgaagcacccccgactccagcagctgaaaaattatataccaccaccagcaccaccatcttatgatgaaattaatggagcatttgcatccacttctgttaacgagtcagtccaatctgtcgatttcttccttggagaggcccttgattcatttaatgctgaaagtgagtttgagcttaccttgtcagctggtgacattgtaattgtccgaaagatctcaagcaatggttg

SEQ ID NO: 29632 - protein, 97 aa, Zea mays subsp. mays
  peptide (1)..(97): Ceres Seq. ID no. 13564770
  misc_feature (1)..(86): NCBI GI NO: 38344978 NR Description: OSJNBa0011L07.8
  misc_feature (1)..(86): NCBI GI NO: 37535998 NR Description: unknown protein
  misc_feature (1)..(85): NCBI GI NO: 18418491 NR Description: SH3 domain-containing protein 2
  misc_feature (1)..(93): NCBI GI NO: 21928139 NR Description: AT4g18060/F15J5_30 [Arabidopsis thaliana]
  misc_feature (1)..(93): NCBI GI NO: 22328762 NR Description: SH3 domain-containing protein 3
  misc_feature (1)..(78): NCBI GI NO: 34902022 NR Description: unknown protein
  misc_feature (1)..(81): NCBI GI NO: 15221714 NR Description: SH3 domain-containing protein 1
  misc_feature (1)..(57): NCBI GI NO: 7485521 NR Description: hypothetical protein F15J5
  misc_feature (1)..(83): NCBI GI NO: 16974680 NR Description: SH3 domain-containing protein 3
  misc_feature (1)..(87): NCBI GI NO: 22093679 NR Description: putative SH3
MVSKLEAAEYKLEELKSNMVGLGKEAIAAMSAVEAQQQRLTLQRLIALVEAERTYHQRVLEILDKLEEEMVSERQKIEAPPTPAAEKLYTTTSTTIL

SEQ ID NO: 29633 - protein, 79 aa, Zea mays subsp. mays
  peptide (1)..(79): Ceres Seq. ID no. 13564771
  misc_feature (1)..(68): NCBI GI NO: 38344978 NR Description: OSJNBa0011L07.8
  misc_feature (1)..(68): NCBI GI NO: 37535998 NR Description: unknown protein
  misc_feature (1)..(67): NCBI GI NO: 18418491 NR Description: SH3 domain-containing protein 2
  misc_feature (1)..(75): NCBI GI NO: 21928139 NR Description: AT4g18060/F15J5_30 [Arabidopsis thaliana]
  misc_feature (1)..(75): NCBI GI NO: 22328762 NR Description: SH3 domain-containing protein 3
  misc_feature (1)..(60): NCBI GI NO: 34902022 NR Description: unknown protein
  misc_feature (1)..(63): NCBI GI NO: 15221714 NR Description: SH3 domain-containing protein 1
  misc_feature (1)..(39): NCBI GI NO: 7485521 NR Description: hypothetical protein F15J5
  misc_feature (1)..(65): NCBI GI NO: 16974680 NR Description: SH3 domain-containing protein 3
  misc_feature (1)..(69): NCBI GI NO: 22093679 NR Description: putative SH3
MVGLGKEAIAAMSAVEAQQQRLTLQRLIALVEAERTYHQRVLEILDKLEEEMVSERQKIEAPPTPAAEKLYTTTSTTIL

SEQ ID NO: 29634 - protein, 68 aa, Zea mays subsp. mays
  peptide (1)..(68): Ceres Seq. ID no. 13564772
  misc_feature (1)..(57): NCBI GI NO: 38344978 NR Description: OSJNBa0011L07.8
  misc_feature (1)..(57): NCBI GI NO: 37535998 NR Description: unknown protein
  misc_feature (1)..(56): NCBI GI NO: 18418491 NR Description: SH3 domain-containing protein 2
  misc_feature (1)..(64): NCBI GI NO: 21928139 NR Description: AT4g18060/F15J5_30 [Arabidopsis thaliana]
  misc_feature (1)..(64): NCBI GI NO: 22328762 NR Description: SH3 domain-containing protein 3
  misc_feature (1)..(49): NCBI GI NO: 34902022 NR Description: unknown protein
  misc_feature (1)..(52): NCBI GI NO: 15221714 NR Description: SH3 domain-containing protein 1
  misc_feature (1)..(28): NCBI GI NO: 7485521 NR Description: hypothetical protein F15J5
  misc_feature (1)..(54): NCBI GI NO: 16974680 NR Description: SH3 domain-containing protein 3
  misc_feature (1)..(58): NCBI GI NO: 22093679 NR Description: putative SH3
MSAVEAQQQRLTLQRLIALVEAERTYHQRVLEILDKLEEEMVSERQKIEAPPTPAAEKLYTTTSTTIL

SEQ ID NO: 29635 - DNA, 1192 bp, Zea mays subsp. mays
  misc_feature (1)..(1192): Ceres Seq. ID no. 12376433
gcacgagaccattacctagaacatcctaatcgaaaagtccctgcaccgacgccgcccgcccgcctccgtgcgctgcactgaatctgacagcgcccgtcctgcagcggccggcgaggaagagctctcggcgagagggcgagcgatggcggcggcaatgccggcgctgctgctggtggtggccacggcgatgatgttctcccccgccgccgcccgcattcccggcgtgtacggcggcggcggctggcagagcgcgcacgccacgttctacggcggcagcgacgcctcgggcaccatgggcggcgcctgcgggtacggcaacctgtacagccaggggtacggcgtgaacaacgcggcgctgagcacggcgctgttcaaccaggggctgagctgcggcgcgtgcttcgagatcaagtgcgaggaccagcccgggtggcggtggtgccgcccggggagcccctccatcctggtgacggccaccaacttctgcccgcccaactacgcgctgccctccgacgacggcggctggtgcaacccgccccgcccccacttcgacctcgccatgcccatgttcctccacatcgccgagtaccgcgccggcatcgtccccgtcacctaccgccgggtgccgtgccgcaagtccggcggcgtgcggttcaccatcaacggcttccggtacttcaacctggtgctgatcaccaacgtggccggcgcgggggacgtggtgcgcgcgagcgtgaaggcgtcgggcgccggggagtggatgcccatgtcgcggaactggggccagaactggcagtccagcgccatcctcgtcggccaggcgctctccttccgcgtcaccggcagcgaccgccgcacctccacctcctggaacgccgccccgcgggactggcgcttcggccagaccttcgagggcaagaacttcagggtctgagactctgagctcaggccgcgagtggcggcgagaagaagccagagctcaaggccttcttccgccgtactatatataccgtgattactgctgctagtagtcggtataaagcgcgtgttagggtggtgggaatgtacgtgaatgcccgtttagggtcacgccgtctcgccctggttcaagtactctctggaaaaaaaaggggagcctttttcttctgaacatgtgcggacaaaagggagataagtatggtgattggatgct

SEQ ID NO: 29636 - protein, 263 aa, Zea mays subsp. mays
  peptide (1)..(263): Ceres Seq. ID no. 12376434
  misc_feature (169)..(247): Pfam Name: Pfam Description:  Pollen allergen
  misc_feature (1)..(263): NCBI GI NO: 34897422 NR Description: alpha-expansin
  misc_feature (3)..(263): NCBI GI NO: 20502784 NR Description: expansin 11 precursor [Rumex palustris]
  misc_feature (3)..(263): NCBI GI NO: 20502786 NR Description: expansin 12 precursor [Rumex palustris]
  misc_feature (1)..(263): NCBI GI NO: 1076531 NR Description: pollen allergen homolog, hypothetical
  misc_feature (3)..(263): NCBI GI NO: 20502782 NR Description: expansin 10 precursor [Rumex palustris]
  misc_feature (8)..(263): NCBI GI NO: 29467509 NR Description: expansin [Pyrus communis]
  misc_feature (5)..(263): NCBI GI NO: 16923359 NR Description: alpha-expansin 6 precursor [Cucumis sativus]
  misc_feature (8)..(263): NCBI GI NO: 15225530 NR Description: expansin, putative; protein id: At2g39700
  misc_feature (1)..(263): NCBI GI NO: 21314549 NR Description: alpha-expansin precursor [Gossypium hirsutum]
  misc_feature (7)..(263): NCBI GI NO: 38046726 NR Description: alpha-expansin 1
MAAAMPALLLVVATAMMFSPAAARIPGVYGGGGWQSAHATFYGGSDASGTMGGACGYGNLYSQGYGVNNAALSTALFNQGLSCGACFEIKCEDQPGWRWCRPGSPSILVTATNFCPPNYALPSDDGGWCNPPRPHFDLAMPMFLHIAEYRAGIVPVTYRRVPCRKSGGVRFTINGFRYFNLVLITNVAGAGDVVRASVKASGAGEWMPMSRNWGQNWQSSAILVGQALSFRVTGSDRRTSTSWNAAPRDWRFGQTFEGKNFRV

SEQ ID NO: 29637 - protein, 259 aa, Zea mays subsp. mays
  peptide (1)..(259): Ceres Seq. ID no. 12376435
  misc_feature (165)..(243): Pfam Name: Pfam Description:  Pollen allergen
  misc_feature (1)..(259): NCBI GI NO: 34897422 NR Description: alpha-expansin
  misc_feature (1)..(259): NCBI GI NO: 20502784 NR Description: expansin 11 precursor [Rumex palustris]
  misc_feature (1)..(259): NCBI GI NO: 20502786 NR Description: expansin 12 precursor [Rumex palustris]
  misc_feature (1)..(259): NCBI GI NO: 1076531 NR Description: pollen allergen homolog, hypothetical
  misc_feature (1)..(259): NCBI GI NO: 20502782 NR Description: expansin 10 precursor [Rumex palustris]
  misc_feature (4)..(259): NCBI GI NO: 29467509 NR Description: expansin [Pyrus communis]
  misc_feature (1)..(259): NCBI GI NO: 16923359 NR Description: alpha-expansin 6 precursor [Cucumis sativus]
  misc_feature (4)..(259): NCBI GI NO: 15225530 NR Description: expansin, putative; protein id: At2g39700
  misc_feature (1)..(259): NCBI GI NO: 21314549 NR Description: alpha-expansin precursor [Gossypium hirsutum]
  misc_feature (3)..(259): NCBI GI NO: 38046726 NR Description: alpha-expansin 1
MPALLLVVATAMMFSPAAARIPGVYGGGGWQSAHATFYGGSDASGTMGGACGYGNLYSQGYGVNNAALSTALFNQGLSCGACFEIKCEDQPGWRWCRPGSPSILVTATNFCPPNYALPSDDGGWCNPPRPHFDLAMPMFLHIAEYRAGIVPVTYRRVPCRKSGGVRFTINGFRYFNLVLITNVAGAGDVVRASVKASGAGEWMPMSRNWGQNWQSSAILVGQALSFRVTGSDRRTSTSWNAAPRDWRFGQTFEGKNFRV

SEQ ID NO: 29638 - protein, 248 aa, Zea mays subsp. mays
  peptide (1)..(248): Ceres Seq. ID no. 12376436
  misc_feature (154)..(232): Pfam Name: Pfam Description:  Pollen allergen
  misc_feature (1)..(248): NCBI GI NO: 34897422 NR Description: alpha-expansin
  misc_feature (1)..(248): NCBI GI NO: 20502784 NR Description: expansin 11 precursor [Rumex palustris]
  misc_feature (1)..(248): NCBI GI NO: 20502786 NR Description: expansin 12 precursor [Rumex palustris]
  misc_feature (1)..(248): NCBI GI NO: 1076531 NR Description: pollen allergen homolog, hypothetical
  misc_feature (1)..(248): NCBI GI NO: 20502782 NR Description: expansin 10 precursor [Rumex palustris]
  misc_feature (1)..(248): NCBI GI NO: 29467509 NR Description: expansin [Pyrus communis]
  misc_feature (1)..(248): NCBI GI NO: 16923359 NR Description: alpha-expansin 6 precursor [Cucumis sativus]
  misc_feature (1)..(248): NCBI GI NO: 15225530 NR Description: expansin, putative; protein id: At2g39700
  misc_feature (1)..(248): NCBI GI NO: 21314549 NR Description: alpha-expansin precursor [Gossypium hirsutum]
  misc_feature (1)..(248): NCBI GI NO: 38046726 NR Description: alpha-expansin 1
MMFSPAAARIPGVYGGGGWQSAHATFYGGSDASGTMGGACGYGNLYSQGYGVNNAALSTALFNQGLSCGACFEIKCEDQPGWRWCRPGSPSILVTATNFCPPNYALPSDDGGWCNPPRPHFDLAMPMFLHIAEYRAGIVPVTYRRVPCRKSGGVRFTINGFRYFNLVLITNVAGAGDVVRASVKASGAGEWMPMSRNWGQNWQSSAILVGQALSFRVTGSDRRTSTSWNAAPRDWRFGQTFEGKNFRV

SEQ ID NO: 29639 - DNA, 750 bp, Zea mays subsp. mays
  misc_feature (1)..(750): Ceres Seq. ID no. 12351001
agggattaccttacattcttttgcttggggaacagggaggtgaagatggatggtgagtatgaaccttcaggtcgtccgcttgatgggacagactacgctcgggcgcagaatgcacgtcgcttcatgatctacgttcactctaagatgatgatagtcgacgacgaatacatcatcgttggatctgccaacatcaaccagcgctcaatggatgggggcagggactcggagatcgccatgggcgcgtaccagccgtgccacctgaacaccaaaggccaggtcgcccggggtcaggtccacggcttccggatgtcgctgtggtacgagcacctcggcatgctacacgacgatttcctcaacccgggaagcctggagtgtgttcggagggtaaaccagatggcagacaggtattgggacctctacgctggcgacagcctcgacgccgacctccctgggcacctgctcaggtacccagtcaccgtcacgaaggagggcacggtgacagagctcccgggggccaagttcttccccgacacacaggcgcttgtgcttggggcgctatcgaaactgcctcctattctcactacatagagaaaccttctgtactgttgccatgtgacgtttgcgggctgaattggttgaggtttttgctactccgtattatgctacaactggtagtgttattgtatggtttcttcctaataatagtatttatagttttggacttatctaaaatagtatttatatgtgtcc

SEQ ID NO: 29640 - protein, 195 aa, Zea mays subsp. mays
  peptide (1)..(195): Ceres Seq. ID no. 12351002
  misc_feature (41)..(68): Pfam Name: Pfam Description:  Phospholipase D. Active site motif
  misc_feature (1)..(195): NCBI GI NO: 3914365 NR Description: Phospholipase D alpha 2
  misc_feature (1)..(195): NCBI GI NO: 8699600 NR Description: phospholipase D [Oryza sativa]
  misc_feature (1)..(195): NCBI GI NO: 2499710 NR Description: Phospholipase D alpha 1 precursor
  misc_feature (1)..(195): NCBI GI NO: 7488899 NR Description: phospholipase D (EC 3.1.4.4) - castor bean
  misc_feature (1)..(195): NCBI GI NO: 15219031 NR Description: phospholipase D, putative; protein id: At1g52570.1
  misc_feature (1)..(194): NCBI GI NO: 8699598 NR Description: phospholipase D [Oryza sativa]
  misc_feature (1)..(195): NCBI GI NO: 4867805 NR Description: phospholipase D1 [Craterostigma plantagineum]
  misc_feature (1)..(195): NCBI GI NO: 4867803 NR Description: phospholipase D2 [Craterostigma plantagineum]
  misc_feature (1)..(195): NCBI GI NO: 13124446 NR Description: Phospholipase D alpha 2 precursor
  misc_feature (1)..(195): NCBI GI NO: 3914360 NR Description: Phospholipase D alpha 1
RDYLTFFCLGNREVKMDGEYEPSGRPLDGTDYARAQNARRFMIYVHSKMMIVDDEYIIVGSANINQRSMDGGRDSEIAMGAYQPCHLNTKGQVARGQVHGFRMSLWYEHLGMLHDDFLNPGSLECVRRVNQMADRYWDLYAGDSLDADLPGHLLRYPVTVTKEGTVTELPGAKFFPDTQALVLGALSKLPPILTT

SEQ ID NO: 29641 - protein, 180 aa, Zea mays subsp. mays
  peptide (1)..(180): Ceres Seq. ID no. 12351003
  misc_feature (26)..(53): Pfam Name: Pfam Description:  Phospholipase D. Active site motif
  misc_feature (1)..(180): NCBI GI NO: 3914365 NR Description: Phospholipase D alpha 2
  misc_feature (1)..(180): NCBI GI NO: 8699600 NR Description: phospholipase D [Oryza sativa]
  misc_feature (1)..(180): NCBI GI NO: 2499710 NR Description: Phospholipase D alpha 1 precursor
  misc_feature (1)..(180): NCBI GI NO: 7488899 NR Description: phospholipase D (EC 3.1.4.4) - castor bean
  misc_feature (1)..(180): NCBI GI NO: 15219031 NR Description: phospholipase D, putative; protein id: At1g52570.1
  misc_feature (1)..(179): NCBI GI NO: 8699598 NR Description: phospholipase D [Oryza sativa]
  misc_feature (1)..(180): NCBI GI NO: 4867805 NR Description: phospholipase D1 [Craterostigma plantagineum]
  misc_feature (1)..(180): NCBI GI NO: 4867803 NR Description: phospholipase D2 [Craterostigma plantagineum]
  misc_feature (1)..(180): NCBI GI NO: 13124446 NR Description: Phospholipase D alpha 2 precursor
  misc_feature (1)..(180): NCBI GI NO: 3914360 NR Description: Phospholipase D alpha 1
MDGEYEPSGRPLDGTDYARAQNARRFMIYVHSKMMIVDDEYIIVGSANINQRSMDGGRDSEIAMGAYQPCHLNTKGQVARGQVHGFRMSLWYEHLGMLHDDFLNPGSLECVRRVNQMADRYWDLYAGDSLDADLPGHLLRYPVTVTKEGTVTELPGAKFFPDTQALVLGALSKLPPILTT

SEQ ID NO: 29642 - protein, 154 aa, Zea mays subsp. mays
  peptide (1)..(154): Ceres Seq. ID no. 12351004
  misc_feature (1)..(27): Pfam Name: Pfam Description:  Phospholipase D. Active site motif
  misc_feature (1)..(154): NCBI GI NO: 3914365 NR Description: Phospholipase D alpha 2
  misc_feature (1)..(154): NCBI GI NO: 8699600 NR Description: phospholipase D [Oryza sativa]
  misc_feature (1)..(154): NCBI GI NO: 2499710 NR Description: Phospholipase D alpha 1 precursor
  misc_feature (1)..(154): NCBI GI NO: 7488899 NR Description: phospholipase D (EC 3.1.4.4) - castor bean
  misc_feature (1)..(154): NCBI GI NO: 15219031 NR Description: phospholipase D, putative; protein id: At1g52570.1
  misc_feature (1)..(153): NCBI GI NO: 8699598 NR Description: phospholipase D [Oryza sativa]
  misc_feature (1)..(154): NCBI GI NO: 4867805 NR Description: phospholipase D1 [Craterostigma plantagineum]
  misc_feature (1)..(154): NCBI GI NO: 4867803 NR Description: phospholipase D2 [Craterostigma plantagineum]
  misc_feature (1)..(154): NCBI GI NO: 13124446 NR Description: Phospholipase D alpha 2 precursor
  misc_feature (1)..(154): NCBI GI NO: 3914360 NR Description: Phospholipase D alpha 1
MIYVHSKMMIVDDEYIIVGSANINQRSMDGGRDSEIAMGAYQPCHLNTKGQVARGQVHGFRMSLWYEHLGMLHDDFLNPGSLECVRRVNQMADRYWDLYAGDSLDADLPGHLLRYPVTVTKEGTVTELPGAKFFPDTQALVLGALSKLPPILTT

SEQ ID NO: 29643 - DNA, 1130 bp, Zea mays subsp. mays
  misc_feature (1)..(1130): Ceres Seq. ID no. 12388641
aaatcttgttactgacaaactgaactttggggccatgaacatgtggtttttgctgaatccacctggggatgcaacaatccatgtggaaaatgttgatgacttcaaatggttaaactcttcttactgccctgttctgaagcagcttgagtctgcagccatgaaagaatattatttcaaggctgatcgtccgaaaacactctctgctggttcttctaatctgaagtatcgaaacccaaaatatttgtccatgctcaatcatctaagattttacctcccacaagtctatcccaagctgaataaaattcttttcctggatgatgatatagttgtccagagggacctaactggactctgggaggttgatcttaatggaaatgtaaatggagccgtggaaacatgtggagagagttttcaccgatttgataagtacctaaatttctcaaacccaaatattgctcagaattttgatcctaatgcatgtggttgggcttatggaatgaacatgtttgatctggaagaatggaagaagaaagacattactggaatttaccacaaatggcagaacatgaacgagaacaggctgctctggaaactggggacattgccaccagggcttctaactttttacaagctgacacaccctctggacaaatcatggcatgtgcttggcttagggtacaatccaaccattgagcgctcagagatagacaatgctgctgtcatccactacaatggtaacatgaagccctggctggaaattgcaatgataaagtatcggccttactggacaaagtacatcaattatcagcattcctacattcatggatgcaagatcagccaatagaaaccaccctcagatattcttctgtgatgaacattgaagttggatgggactcaaaatgaaatcagtataactatcacatgttctttattcgtgttatattagatttgttagttatcacgtgtatgtagtttcgtcgcccttttgtggtgctttctcccctagctcattgttggttcttgtccctttttgtcatgaaaagaatgatgagctctatgattctcatcagctgataaatgtaatgtctgaatttctgtcggtggcaaattaatgatcccattcaaacggc

SEQ ID NO: 29644 - protein, 280 aa, Zea mays subsp. mays
  peptide (1)..(280): Ceres Seq. ID no. 12388642
  misc_feature (1)..(280): NCBI GI NO: 7271113 NR Description: 68 kDa protein [Cicer arietinum]
  misc_feature (1)..(280): NCBI GI NO: 15233046 NR Description: putative protein; protein id: At3g61130
  misc_feature (1)..(280): NCBI GI NO: 7485958 NR Description: hypothetical protein F22I13
  misc_feature (1)..(280): NCBI GI NO: 30691875 NR Description: glycosyltransferase family 8
  misc_feature (1)..(280): NCBI GI NO: 37533460 NR Description: hypothetical protein
  misc_feature (1)..(279): NCBI GI NO: 10177914 NR Description: emb|CAB71043
  misc_feature (1)..(279): NCBI GI NO: 18422837 NR Description: putative protein; protein id: At5g47780
  misc_feature (1)..(217): NCBI GI NO: 14517362 NR Description: AT3g61130/T20K12_30 [Arabidopsis thaliana]
  misc_feature (1)..(279): NCBI GI NO: 38423965 NR Description: putative glycosyltransferase
  misc_feature (1)..(276): NCBI GI NO: 15230806 NR Description: glycosyl transferase, putative
NLVTDKLNFGAMNMWFLLNPPGDATIHVENVDDFKWLNSSYCPVLKQLESAAMKEYYFKADRPKTLSAGSSNLKYRNPKYLSMLNHLRFYLPQVYPKLNKILFLDDDIVVQRDLTGLWEVDLNGNVNGAVETCGESFHRFDKYLNFSNPNIAQNFDPNACGWAYGMNMFDLEEWKKKDITGIYHKWQNMNENRLLWKLGTLPPGLLTFYKLTHPLDKSWHVLGLGYNPTIERSEIDNAAVIHYNGNMKPWLEIAMIKYRPYWTKYINYQHSYIHGCKISQ

SEQ ID NO: 29645 - protein, 269 aa, Zea mays subsp. mays
  peptide (1)..(269): Ceres Seq. ID no. 12388643
  misc_feature (1)..(269): NCBI GI NO: 7271113 NR Description: 68 kDa protein [Cicer arietinum]
  misc_feature (1)..(269): NCBI GI NO: 15233046 NR Description: putative protein; protein id: At3g61130
  misc_feature (1)..(269): NCBI GI NO: 7485958 NR Description: hypothetical protein F22I13
  misc_feature (1)..(269): NCBI GI NO: 30691875 NR Description: glycosyltransferase family 8
  misc_feature (1)..(269): NCBI GI NO: 37533460 NR Description: hypothetical protein
  misc_feature (1)..(268): NCBI GI NO: 10177914 NR Description: emb|CAB71043
  misc_feature (1)..(268): NCBI GI NO: 18422837 NR Description: putative protein; protein id: At5g47780
  misc_feature (1)..(206): NCBI GI NO: 14517362 NR Description: AT3g61130/T20K12_30 [Arabidopsis thaliana]
  misc_feature (1)..(268): NCBI GI NO: 38423965 NR Description: putative glycosyltransferase
  misc_feature (1)..(265): NCBI GI NO: 15230806 NR Description: glycosyl transferase, putative
MNMWFLLNPPGDATIHVENVDDFKWLNSSYCPVLKQLESAAMKEYYFKADRPKTLSAGSSNLKYRNPKYLSMLNHLRFYLPQVYPKLNKILFLDDDIVVQRDLTGLWEVDLNGNVNGAVETCGESFHRFDKYLNFSNPNIAQNFDPNACGWAYGMNMFDLEEWKKKDITGIYHKWQNMNENRLLWKLGTLPPGLLTFYKLTHPLDKSWHVLGLGYNPTIERSEIDNAAVIHYNGNMKPWLEIAMIKYRPYWTKYINYQHSYIHGCKISQ

SEQ ID NO: 29646 - protein, 267 aa, Zea mays subsp. mays
  peptide (1)..(267): Ceres Seq. ID no. 12388644
  misc_feature (1)..(267): NCBI GI NO: 7271113 NR Description: 68 kDa protein [Cicer arietinum]
  misc_feature (1)..(267): NCBI GI NO: 15233046 NR Description: putative protein; protein id: At3g61130
  misc_feature (1)..(267): NCBI GI NO: 7485958 NR Description: hypothetical protein F22I13
  misc_feature (1)..(267): NCBI GI NO: 30691875 NR Description: glycosyltransferase family 8
  misc_feature (1)..(267): NCBI GI NO: 37533460 NR Description: hypothetical protein
  misc_feature (1)..(266): NCBI GI NO: 10177914 NR Description: emb|CAB71043
  misc_feature (1)..(266): NCBI GI NO: 18422837 NR Description: putative protein; protein id: At5g47780
  misc_feature (1)..(204): NCBI GI NO: 14517362 NR Description: AT3g61130/T20K12_30 [Arabidopsis thaliana]
  misc_feature (1)..(266): NCBI GI NO: 38423965 NR Description: putative glycosyltransferase
  misc_feature (1)..(263): NCBI GI NO: 15230806 NR Description: glycosyl transferase, putative
MWFLLNPPGDATIHVENVDDFKWLNSSYCPVLKQLESAAMKEYYFKADRPKTLSAGSSNLKYRNPKYLSMLNHLRFYLPQVYPKLNKILFLDDDIVVQRDLTGLWEVDLNGNVNGAVETCGESFHRFDKYLNFSNPNIAQNFDPNACGWAYGMNMFDLEEWKKKDITGIYHKWQNMNENRLLWKLGTLPPGLLTFYKLTHPLDKSWHVLGLGYNPTIERSEIDNAAVIHYNGNMKPWLEIAMIKYRPYWTKYINYQHSYIHGCKISQ

SEQ ID NO: 29647 - DNA, 767 bp, Zea mays subsp. mays
  misc_feature (1)..(767): Ceres Seq. ID no. 12353983
aataacggagacgaagagagcagaagcgaagagcagcggcgcaaaggaaagggagccatgctcgcctcgccggcgctcgccggcgcccactccttcgcggcgtccgtgtatggaaacatcctcgtcccctcgcctcccgtccccgcgccggcacgtcgcgcggcgctgtccgtcgtcgccaaggtcaaggtggccactccccaggacgaccgcatcgcccgccacgtccgcctccgcaagaaggtaagtggcaccactgagaggccgaggttgagtgttttccgctcaaacaaacatctgtacgctcaagtcatcgacgacacaaagcaatgtactctggcttcagcttcaaccatgcacaaatctctctccaaggaatttgaatactcagctgggccaacgatcgaaatagcacaaaagatcggtgaggtgattgccaagtcttgcttggagaaagggatcaacaaggttgtcttcgaccgaggtggtttcctctaccatggccgcataaaggctctcgctgattctgccagggagcacgggcttgaattctgagtcgtccaggcgtttgttcatatctccaggatcacctgtaatcttcttttttttttctctccatatgccgaacagattgtagtcactcgccttgttctgcatggtgcaaagccatggccactcgttgaccatgtcacgttttttttccatttcgtaagagtcttgtgttctgacgtttatgaggacatatcatgtgcaatcactcattttgg

SEQ ID NO: 29648 - protein, 184 aa, Zea mays subsp. mays
  peptide (1)..(184): Ceres Seq. ID no. 12353984
  misc_feature (66)..(184): Pfam Name: Pfam Description:  Ribosomal L18p/L5e family
  misc_feature (20)..(184): NCBI GI NO: 34897318 NR Description: putative ribosomal protein L18 [Oryza sativa]
  misc_feature (57)..(184): NCBI GI NO: 15221153 NR Description: ribosomal protein L18, putative
  misc_feature (71)..(184): NCBI GI NO: 132724 NR Description: 50S RIBOSOMAL PROTEIN L18
  misc_feature (71)..(184): NCBI GI NO: 143423 NR Description: ribosomal protein L18
  misc_feature (71)..(184): NCBI GI NO: 1172978 NR Description: 50S ribosomal protein L18
  misc_feature (71)..(184): NCBI GI NO: 16077200 NR Description: ribosomal protein L18 [Bacillus subtilis]
  misc_feature (62)..(184): NCBI GI NO: 15644232 NR Description: ribosomal protein L18 [Thermotoga maritima]
  misc_feature (66)..(184): NCBI GI NO: 23042783 NR Description: hypothetical protein
  misc_feature (62)..(184): NCBI GI NO: 3980238 NR Description: ribosomal protein L18 [Thermotoga maritima]
  misc_feature (71)..(184): NCBI GI NO: 21398084 NR Description: Ribosomal_L18p, Ribosomal L18p/L5e family
NNGDEESRSEEQRRKGKGAMLASPALAGAHSFAASVYGNILVPSPPVPAPARRAALSVVAKVKVATPQDDRIARHVRLRKKVSGTTERPRLSVFRSNKHLYAQVIDDTKQCTLASASTMHKSLSKEFEYSAGPTIEIAQKIGEVIAKSCLEKGINKVVFDRGGFLYHGRIKALADSAREHGLEF

SEQ ID NO: 29649 - protein, 165 aa, Zea mays subsp. mays
  peptide (1)..(165): Ceres Seq. ID no. 12353985
  misc_feature (47)..(165): Pfam Name: Pfam Description:  Ribosomal L18p/L5e family
  misc_feature (1)..(165): NCBI GI NO: 34897318 NR Description: putative ribosomal protein L18 [Oryza sativa]
  misc_feature (38)..(165): NCBI GI NO: 15221153 NR Description: ribosomal protein L18, putative
  misc_feature (52)..(165): NCBI GI NO: 132724 NR Description: 50S RIBOSOMAL PROTEIN L18
  misc_feature (52)..(165): NCBI GI NO: 143423 NR Description: ribosomal protein L18
  misc_feature (52)..(165): NCBI GI NO: 1172978 NR Description: 50S ribosomal protein L18
  misc_feature (52)..(165): NCBI GI NO: 16077200 NR Description: ribosomal protein L18 [Bacillus subtilis]
  misc_feature (43)..(165): NCBI GI NO: 15644232 NR Description: ribosomal protein L18 [Thermotoga maritima]
  misc_feature (47)..(165): NCBI GI NO: 23042783 NR Description: hypothetical protein
  misc_feature (43)..(165): NCBI GI NO: 3980238 NR Description: ribosomal protein L18 [Thermotoga maritima]
  misc_feature (52)..(165): NCBI GI NO: 21398084 NR Description: Ribosomal_L18p, Ribosomal L18p/L5e family
MLASPALAGAHSFAASVYGNILVPSPPVPAPARRAALSVVAKVKVATPQDDRIARHVRLRKKVSGTTERPRLSVFRSNKHLYAQVIDDTKQCTLASASTMHKSLSKEFEYSAGPTIEIAQKIGEVIAKSCLEKGINKVVFDRGGFLYHGRIKALADSAREHGLEF

SEQ ID NO: 29650 - DNA, 847 bp, Zea mays subsp. mays
  misc_feature (1)..(847): Ceres Seq. ID no. 12344815
agagcttgcaaacaccaccagcgaaaacgtcgtggccagccatcccggtgtcgtctcgcgttctacagcctctgcatcccgcgttctacagccaccgctgtcgtcgccgtcctagactcctagatccgtcagcttaacgagctccattccttcgaggccagccatcccggtgtctcagcagcggcggcggcggcgtcgagctcttgctttctgtgggaggacgcatggcgatgtctgcggggcgtgggctcttggtcctcttcttctctgccgccgtagtggctgagctcgcctctgccgcgaacggtcctttcctgtccgatagcgtcttccagtcgagcgccggatctacagggaggagcttgctgcaggtcaagaatagttgccctgtgaactttgagttccaaaactacacaatcatcacaagcaagtgcaaaggaccgaagtttccagccagccaatgctgtgccgcactcaaggaattcgcgtgcccttttaacaattacctcaatgacgagagcaatgaatgtgcatcgacaatgttcagctacatcaacctctatggcaagtatccaccaggtctgttttccagcgagtgcaaagaaggcaagatggggctttcttgcgcagatgtcccccggaaggacagttccactgcaaacagtggttatcgcgcccaaagcagcttgcttgcgttgattaatgtcttgagtgtgatagcagcgttgttctactgaactacagctccattcatttcccacaaagatggtgtgttacaactgttgaggcttgagttgcaccttttggtgcttatggctatgggttggcttcctgattctttcttttg

SEQ ID NO: 29651 - protein, 170 aa, Zea mays subsp. mays
  peptide (1)..(170): Ceres Seq. ID no. 12344816
  misc_feature (12)..(169): NCBI GI NO: 15241141 NR Description: putative protein; protein id: At5g56170.1
  misc_feature (1)..(165): NCBI GI NO: 3868853 NR Description: GPI-anchored protein [Vigna radiata]
  misc_feature (27)..(169): NCBI GI NO: 30681101 NR Description: expressed protein [Arabidopsis thaliana]
  misc_feature (22)..(162): NCBI GI NO: 15235244 NR Description: putative GPI-anchored protein
  misc_feature (50)..(169): NCBI GI NO: 25337807 NR Description: hypothetical protein At2g20700
  misc_feature (50)..(162): NCBI GI NO: 38603910 NR Description: At4g28280 [Arabidopsis thaliana]
  misc_feature (9)..(134): NCBI GI NO: 10241671 NR Description: hypothetical protein
  misc_feature (15)..(134): NCBI GI NO: 38345028 NR Description: OSJNBa0029H02.12
  misc_feature (20)..(134): NCBI GI NO: 10241672 NR Description: hypothetical protein
  misc_feature (20)..(134): NCBI GI NO: 38345027 NR Description: OSJNBa0029H02.11
MAMSAGRGLLVLFFSAAVVAELASAANGPFLSDSVFQSSAGSTGRSLLQVKNSCPVNFEFQNYTIITSKCKGPKFPASQCCAALKEFACPFNNYLNDESNECASTMFSYINLYGKYPPGLFSSECKEGKMGLSCADVPRKDSSTANSGYRAQSSLLALINVLSVIAALFY

SEQ ID NO: 29652 - protein, 168 aa, Zea mays subsp. mays
  peptide (1)..(168): Ceres Seq. ID no. 12344817
  misc_feature (10)..(167): NCBI GI NO: 15241141 NR Description: putative protein; protein id: At5g56170.1
  misc_feature (1)..(163): NCBI GI NO: 3868853 NR Description: GPI-anchored protein [Vigna radiata]
  misc_feature (25)..(167): NCBI GI NO: 30681101 NR Description: expressed protein [Arabidopsis thaliana]
  misc_feature (20)..(160): NCBI GI NO: 15235244 NR Description: putative GPI-anchored protein
  misc_feature (48)..(167): NCBI GI NO: 25337807 NR Description: hypothetical protein At2g20700
  misc_feature (48)..(160): NCBI GI NO: 38603910 NR Description: At4g28280 [Arabidopsis thaliana]
  misc_feature (7)..(132): NCBI GI NO: 10241671 NR Description: hypothetical protein
  misc_feature (13)..(132): NCBI GI NO: 38345028 NR Description: OSJNBa0029H02.12
  misc_feature (18)..(132): NCBI GI NO: 10241672 NR Description: hypothetical protein
  misc_feature (18)..(132): NCBI GI NO: 38345027 NR Description: OSJNBa0029H02.11
MSAGRGLLVLFFSAAVVAELASAANGPFLSDSVFQSSAGSTGRSLLQVKNSCPVNFEFQNYTIITSKCKGPKFPASQCCAALKEFACPFNNYLNDESNECASTMFSYINLYGKYPPGLFSSECKEGKMGLSCADVPRKDSSTANSGYRAQSSLLALINVLSVIAALFY

SEQ ID NO: 29653 - DNA, 720 bp, Zea mays subsp. mays
  misc_feature (1)..(720): Ceres Seq. ID no. 12402889
ctcctgttcccgtccaaagtgtggcgttgtcacttgttgtcaggctaccggaccaaactgcgtgctccggcctccgtgagaggagagagggtagagccagaggagttgggcgcgcagcaggatgagcggggaggaggccgacggctccaagccccaaggaggcggtgtacactacggcaccttccaggggccgcccagctacccgcccccgcgcccgccgccgagcctctccgcccaccaccgcggcgactaccaggccgttcccgctcgagattacgaggcaggtgtgcggggacgtagccatgatcgacttccctgttgtggcattggttttggatggttcctgttcatagtcggtttcttccttggtgccattccctggtacgttggagcctttctgctgtgctgttccagagttgattacagggagaaaccaggttatgtcgcatgtgttgcagcggctatcctcgctacaattgctgttatcattggggcggcagctggaactcatgttctttgattttttttagcttacaaggctatcctcccaaactagcccttactgttatcatttgggcggcagctggaagtggaagtggaactcatgttttttttagcttacattgtattgtcattgtacatacatacagtagtacatggtgtccatgtgtcgaagaaatcgtgcaatcaacatcgtaatggatgtctgttctgcattcg

SEQ ID NO: 29654 - protein, 132 aa, Zea mays subsp. mays
  peptide (1)..(132): Ceres Seq. ID no. 12402890
  misc_feature (18)..(128): NCBI GI NO: 18394436 NR Description: expressed protein; protein id: At1g17080
  misc_feature (25)..(131): NCBI GI NO: 21554011 NR Description: unknown [Arabidopsis thaliana]
  misc_feature (25)..(131): NCBI GI NO: 18404524 NR Description: expressed protein; protein id: At1g53560
  misc_feature (21)..(131): NCBI GI NO: 18400450 NR Description: Expressed protein; protein id: At3g14595
  misc_feature (21)..(131): NCBI GI NO: 21554784 NR Description: unknown [Arabidopsis thaliana]
  misc_feature (14)..(131): NCBI GI NO: 18397305 NR Description: 60S ribosomal protein L18A, putative
  misc_feature (14)..(131): NCBI GI NO: 21593837 NR Description: 60S ribosomal protein L18A, putative
  misc_feature (14)..(113): NCBI GI NO: 25518134 NR Description: probable 60S ribosomal protein L18A - Arabidopsisthaliana
MSGEEADGSKPQGGGVHYGTFQGPPSYPPPRPPPSLSAHHRGDYQAVPARDYEAGVRGRSHDRLPCCGIGFGWFLFIVGFFLGAIPWYVGAFLLCCSRVDYREKPGYVACVAAAILATIAVIIGAAAGTHVL

SEQ ID NO: 29655 - protein, 99 aa, Zea mays subsp. mays
  peptide (1)..(99): Ceres Seq. ID no. 12402891
LLFPSKVWRCHLLSGYRTKLRAPASVRGERVEPEELGAQQDERGGGRRLQAPRRRCTLRHLPGAAQLPAPAPAAEPLRPPPRRLPGRSRSRLRGRCAGT

SEQ ID NO: 29656 - protein, 83 aa, Zea mays subsp. mays
  peptide (1)..(83): Ceres Seq. ID no. 12402892
MCCSGYPRYNCCYHWGGSWNSCSLIFFSLQGYPPKLALTVIIWAAAGSGSGTHVFFSLHCIVIVHTYSSTWCPCVEEIVQSTS

SEQ ID NO: 29657 - DNA, 946 bp, Zea mays subsp. mays
  misc_feature (1)..(946): Ceres Seq. ID no. 13493291
aaggcccagatcaaaagaaaagagcagcggagcggagcatgctcttcctccggtgccagcctcgcgtctcgtccccgtccgcatccgcgtccgcgccgccttttcgtccccgcgtcggcgtcgcggctccactgggcgtacgcgtcaccggcggaaggcgagggcaggcggtggtcgcgatggcgtccgccgacgcgcgcttggcggggattgcctcctccatccgcgtcatccccgacttccccaagccagggatcatgttccaggacatcacgacactgctgctcgaccccaaggcgttgacaccatcgacgtcttcgttgagcggtacaaggaccaagggatcaccgtagttgctggtgtggaagctagagggttcatttttggtcctcctatcgctctagccatcagtgcgaaatttgtacctttgaggaagcctaagaagttgccaggcgaggtgatctccgaagaatattctctggaatacggaactgacaagatagagatgcatgttggagctgtacaggccaacgatcgggctcttgtagtcgatgatcttattgccaccggtggaacactctgtgcagctgtcaaacttattgaacgtgttggagcaaaggttgttgagtgtgcttgcgtcattgaattggcagaactgaagggccgagacaaacttggggacaggccagtttttgttcttgtcgaagcagatgcttgagcggaacttgggacttctcttctcagtgagttagagttggtgctgttgatgctacctctctgtcaacaacaaagtttcccatgttggctatattcttgctgacacgtaataaagtttcattccaaattgtgatcccctgaatgatttgtcaatgtagacatgattgctggtccttgtatactgtggcttattattcacatcaattaaggataatcctgattggagctc

SEQ ID NO: 29658 - protein, 238 aa, Zea mays subsp. mays
  peptide (1)..(238): Ceres Seq. ID no. 13493292
  misc_feature (97)..(237): NCBI GI NO: 2499932 NR Description: Adenine phosphoribosyltransferase 1 (APRT)
  misc_feature (97)..(237): NCBI GI NO: 9711921 NR Description: Adenine phosphoribosyltransferase
  misc_feature (101)..(238): NCBI GI NO: 32492063 NR Description: adenine phosphoribosyltransferase [Brassica napus]
  misc_feature (101)..(238): NCBI GI NO: 18396344 NR Description: adenine phosphoribosyltransferase 1, APRT
  misc_feature (101)..(238): NCBI GI NO: 30689934 NR Description: adenine phosphoribosyltransferase 1, APRT
  misc_feature (149)..(238): NCBI GI NO: 25286872 NR Description: protein F17L21.24
  misc_feature (101)..(150): NCBI GI NO: 25286872 NR Description: protein F17L21.24
  misc_feature (101)..(235): NCBI GI NO: 15235709 NR Description: adenine phosphoribosyltransferase (EC 2
  misc_feature (101)..(235): NCBI GI NO: 21536749 NR Description: adenine phosphoribosyltransferase (EC 2
  misc_feature (101)..(235): NCBI GI NO: 15234553 NR Description: adenine phosphoribosyltransferase -related
RPRSKEKSSGAEHALPPVPASRLVPVRIRVRAAFSSPRRRRGSTGRTRHRRKARAGGGRDGVRRRALGGDCLLHPRHPRLPQARDHVPGHHDTAARPQGVDTIDVFVERYKDQGITVVAGVEARGFIFGPPIALAISAKFVPLRKPKKLPGEVISEEYSLEYGTDKIEMHVGAVQANDRALVVDDLIATGGTLCAAVKLIERVGAKVVECACVIELAELKGRDKLGDRPVFVLVEADA

SEQ ID NO: 29659 - DNA, 567 bp, Zea mays subsp. mays
  misc_feature (1)..(567): Ceres Seq. ID no. 13491118
gccatctgcaaacctacttctatactttcaggaggatgtatctgtggtagatcattggcttgtcagtggcacgcattatgctagaactagcgaggagtggctaaaacgtatggacaagagcatcacttcagtaaggctgatcttcgaggaaacttatgggaaggaatcgactaccaaatggatagcttattggcggacgttcttcatctcggtagctgaactttttggatacaacaatggagatgaatggatggttgcccattacttgttccgaaagaagtagaggctactgcttggaagtacccaatcaaaaatcaatgttttcagtaattttgtcatgtacactgacgaacaactccttttctggcacgtagttgtatctcgtaccgacttcgtagtggtttcaaaaacaaaatctggaatccctgttgtgaaatttcatcttggacagcgcctgcatatgctttgcagagttacgctaattcttgcaactatgccttcagatgtttgtagagttaggctcattcttgaaagaaaacaaaggattgtttttttagataataatgg

SEQ ID NO: 29660 - protein, 93 aa, Zea mays subsp. mays
  peptide (1)..(93): Ceres Seq. ID no. 13491119
  misc_feature (1)..(92): Pfam Name: Pfam Description:  Cyclopropane-fatty-acyl-phospholipid synthase
  misc_feature (1)..(93): NCBI GI NO: 18418151 NR Description: expressed protein [Arabidopsis thaliana]
  misc_feature (1)..(93): NCBI GI NO: 26451688 NR Description: unknown protein [Arabidopsis thaliana]
  misc_feature (1)..(93): NCBI GI NO: 21593795 NR Description: coclaurine N-methyltransferase
  misc_feature (1)..(93): NCBI GI NO: 30689611 NR Description: expressed protein [Arabidopsis thaliana]
  misc_feature (1)..(93): NCBI GI NO: 7486450 NR Description: hypothetical protein F4I10
  misc_feature (1)..(86): NCBI GI NO: 8698899 NR Description: putative protein [Pyrus pyrifolia]
  misc_feature (1)..(93): NCBI GI NO: 16754879 NR Description: coclaurine N-methyltransferase [Coptis japonica]
  misc_feature (2)..(93): NCBI GI NO: 33413898 NR Description: S-adenosyl-L-methionine: coclaurine N-methyltransferase
  misc_feature (1)..(93): NCBI GI NO: 39997416 NR Description: cyclopropane-fatty-acyl-phospholipid synthase
  misc_feature (1)..(93): NCBI GI NO: 22988437 NR Description: hypothetical protein [Burkholderia fungorum]
PSANLLLYFQEDVSVVDHWLVSGTHYARTSEEWLKRMDKSITSVRLIFEETYGKESTTKWIAYWRTFFISVAELFGYNNGDEWMVAHYLFRKK

SEQ ID NO: 29661 - protein, 76 aa, Zea mays subsp. mays
  peptide (1)..(76): Ceres Seq. ID no. 13491120
MYTDEQLLFWHVVVSRTDFVVVSKTKSGIPVVKFHLGQRLHMLCRVTLILATMPSDVCRVRLILERKQRIVFLDNN

SEQ ID NO: 29662 - protein, 57 aa, Zea mays subsp. mays
  peptide (1)..(57): Ceres Seq. ID no. 13491121
  misc_feature (1)..(56): Pfam Name: Pfam Description:  Cyclopropane-fatty-acyl-phospholipid synthase
  misc_feature (1)..(57): NCBI GI NO: 18418151 NR Description: expressed protein [Arabidopsis thaliana]
  misc_feature (1)..(57): NCBI GI NO: 26451688 NR Description: unknown protein [Arabidopsis thaliana]
  misc_feature (1)..(57): NCBI GI NO: 21593795 NR Description: coclaurine N-methyltransferase
  misc_feature (1)..(57): NCBI GI NO: 30689611 NR Description: expressed protein [Arabidopsis thaliana]
  misc_feature (1)..(57): NCBI GI NO: 7486450 NR Description: hypothetical protein F4I10
  misc_feature (1)..(50): NCBI GI NO: 8698899 NR Description: putative protein [Pyrus pyrifolia]
  misc_feature (1)..(57): NCBI GI NO: 16754879 NR Description: coclaurine N-methyltransferase [Coptis japonica]
  misc_feature (1)..(57): NCBI GI NO: 33413898 NR Description: S-adenosyl-L-methionine: coclaurine N-methyltransferase
  misc_feature (1)..(57): NCBI GI NO: 39997416 NR Description: cyclopropane-fatty-acyl-phospholipid synthase
  misc_feature (1)..(57): NCBI GI NO: 22988437 NR Description: hypothetical protein [Burkholderia fungorum]
MDKSITSVRLIFEETYGKESTTKWIAYWRTFFISVAELFGYNNGDEWMVAHYLFRKK

SEQ ID NO: 29663 - DNA, 919 bp, Zea mays subsp. mays; identical to SEQ ID NO: 26165
  misc_feature (1)..(919): Ceres Seq. ID no. 12412873

SEQ ID NO: 29664 - protein, 209 aa, Zea mays subsp. mays; identical to SEQ ID NO: 26166
  peptide (1)..(209): Ceres Seq. ID no. 12412874
  misc_feature (1)..(55): Pfam Name: a.k.a. RRM, RBD, or RNP domain Pfam Description: RNA recognition motif.
  misc_feature (1)..(209): NCBI GI NO: 15220241 NR Description: RNA binding protein 47
  misc_feature (1)..(202): NCBI GI NO: 15594035 NR Description: nucleic acid binding protein [Nicotiana tabacum]
  misc_feature (1)..(209): NCBI GI NO: 15220233 NR Description: RNA binding protein 47
  misc_feature (67)..(209): NCBI GI NO: 7489196 NR Description: RNA binding protein homolog - common tobacco
  misc_feature (67)..(209): NCBI GI NO: 9663769 NR Description: RNA Binding Protein 47 [Nicotiana plumbaginifolia]
  misc_feature (1)..(81): NCBI GI NO: 7489196 NR Description: RNA binding protein homolog - common tobacco
  misc_feature (1)..(81): NCBI GI NO: 9663769 NR Description: RNA Binding Protein 47 [Nicotiana plumbaginifolia]
  misc_feature (67)..(209): NCBI GI NO: 7489112 NR Description: DNA binding protein ACBF - common tobacco
  misc_feature (1)..(81): NCBI GI NO: 7489112 NR Description: DNA binding protein ACBF - common tobacco
  misc_feature (67)..(209): NCBI GI NO: 40804404 NR Description: DNA-binding protein [Lycopersicon esculentum]

SEQ ID NO: 29665 - protein, 170 aa, Zea mays subsp. mays; identical to SEQ ID NO: 26167
  peptide (1)..(170): Ceres Seq. ID no. 12412875
  misc_feature (1)..(170): NCBI GI NO: 15220241 NR Description: RNA binding protein 47
  misc_feature (1)..(163): NCBI GI NO: 15594035 NR Description: nucleic acid binding protein [Nicotiana tabacum]
  misc_feature (1)..(170): NCBI GI NO: 15220233 NR Description: RNA binding protein 47
  misc_feature (28)..(170): NCBI GI NO: 7489196 NR Description: RNA binding protein homolog - common tobacco
  misc_feature (28)..(170): NCBI GI NO: 9663769 NR Description: RNA Binding Protein 47 [Nicotiana plumbaginifolia]
  misc_feature (1)..(42): NCBI GI NO: 7489196 NR Description: RNA binding protein homolog - common tobacco
  misc_feature (1)..(42): NCBI GI NO: 9663769 NR Description: RNA Binding Protein 47 [Nicotiana plumbaginifolia]
  misc_feature (28)..(170): NCBI GI NO: 7489112 NR Description: DNA binding protein ACBF - common tobacco
  misc_feature (1)..(42): NCBI GI NO: 7489112 NR Description: DNA binding protein ACBF - common tobacco
  misc_feature (28)..(170): NCBI GI NO: 40804404 NR Description: DNA-binding protein [Lycopersicon esculentum]

SEQ ID NO: 29666 - protein, 167 aa, Zea mays subsp. mays; identical to SEQ ID NO: 26168
  peptide (1)..(167): Ceres Seq. ID no. 12412876
  misc_feature (1)..(167): NCBI GI NO: 15220241 NR Description: RNA binding protein 47
  misc_feature (1)..(160): NCBI GI NO: 15594035 NR Description: nucleic acid binding protein [Nicotiana tabacum]
  misc_feature (1)..(167): NCBI GI NO: 15220233 NR Description: RNA binding protein 47
  misc_feature (25)..(167): NCBI GI NO: 7489196 NR Description: RNA binding protein homolog - common tobacco
  misc_feature (25)..(167): NCBI GI NO: 9663769 NR Description: RNA Binding Protein 47 [Nicotiana plumbaginifolia]
  misc_feature (1)..(39): NCBI GI NO: 7489196 NR Description: RNA binding protein homolog - common tobacco
  misc_feature (1)..(39): NCBI GI NO: 9663769 NR Description: RNA Binding Protein 47 [Nicotiana plumbaginifolia]
  misc_feature (25)..(167): NCBI GI NO: 7489112 NR Description: DNA binding protein ACBF - common tobacco
  misc_feature (1)..(39): NCBI GI NO: 7489112 NR Description: DNA binding protein ACBF - common tobacco
  misc_feature (25)..(167): NCBI GI NO: 40804404 NR Description: DNA-binding protein [Lycopersicon esculentum]

SEQ ID NO: 29667 - DNA, 1125 bp, Zea mays subsp. mays
  misc_feature (1)..(1125): Ceres Seq. ID no. 12353975
acttgtttccagcatacgtagctagtgcaactgcaagctccggatcctcctcatatcagctataaattaaaaggtcgtgacaggtgaggccgcgccgcgaggaaccgcgtcgaccttgtcgtcgatgttggcttgcaaggcgagcccgagccggccgtgcgtcgtcccccttgtttgcctgctggtggtggcggccgcagtcgtcgtcgtcgctgcctcggcgccgccggcggaggcggcgttcgacgacaactacgtggcgcagtggggtagagatggttatcaccttgtcgtccggggcacggaggcgaatgtcaccatggaccagagctctggtgccgggttccggtccaagtccacgtacggctcagggttcttccacatgaggatgaagctgccctccgggtacacggccggcgtcgtcacgaccttctacctcatctcgcagccggaggatgggagccgcgacgaggtggacttggagttcctgggcgacaaggccggcgtgcccatcaccctccagaccaacgtcttcgtcgacggccgcggcgacagggagcagcggacgcgcctctggttcgaccccgccgccgacttccacgactacaagatcctctggaacccataccagctcgtgatgttcgtggacgacacgccggtccgggtgctgaggaacctgacgggcgccgtgccggggtacccgttcccggggaagcagacgatgctgatccgcgcgagcgtgtgggacggctccgactgggccacggacggcggccggaccaaggtggactggtccaggggccccttcaccgccggctaccggggcttcgacgtcgacggctgcgccaacaacgggagcgacgcgtgccaatcgcccgacctatggtggaacgccgccgagtaccggaacatcaccgcggagcagcgggcggcgtacgaggacgtgaagaggagttacatgaactacgactactgcgccgataaggccaggtttaacagcaccaccgtacccattgaatgcaactacgcttgagaagccagttaggagtggcggcgttgtatatcaacggtttatatatatatattatatatatatacacacacacgaaaaagatatgtcttctc

SEQ ID NO: 29668 - protein, 302 aa, Zea mays subsp. mays
  peptide (1)..(302): Ceres Seq. ID no. 12353976
  misc_feature (40)..(224): Pfam Name: Pfam Description:  Glycosyl hydrolases family 16
  misc_feature (40)..(299): NCBI GI NO: 15230246 NR Description: xyloglucan endotransglycosylase, putative
  misc_feature (36)..(301): NCBI GI NO: 22328589 NR Description: xyloglucan endotransglycosylase, putative
  misc_feature (36)..(301): NCBI GI NO: 38605518 NR Description: Putative xyloglucan endotransglucosylase/hydrolaseprotein 1 precursor
  misc_feature (18)..(301): NCBI GI NO: 15235587 NR Description: xyloglucan endotransglycosylase, putative
  misc_feature (19)..(299): NCBI GI NO: 38605539 NR Description: Probable xyloglucan endotransglucosylase/hydrolaseprecursor
  misc_feature (19)..(299): NCBI GI NO: 1885310 NR Description: Endoxyloglucan transferase (EXT)
  misc_feature (17)..(299): NCBI GI NO: 15240733 NR Description: xyloglucan endotransglycosylase
  misc_feature (20)..(299): NCBI GI NO: 27228078 NR Description: xyloglucan endotransglycosylase precursor
  misc_feature (18)..(299): NCBI GI NO: 38605156 NR Description: Xyloglucan endotransglucosylase/hydrolase protein Aprecursor
  misc_feature (16)..(299): NCBI GI NO: 15225605 NR Description: xyloglucan endotransglycosylase
MLACKASPSRPCVVPLVCLLVVAAAVVVVAASAPPAEAAFDDNYVAQWGRDGYHLVVRGTEANVTMDQSSGAGFRSKSTYGSGFFHMRMKLPSGYTAGVVTTFYLISQPEDGSRDEVDLEFLGDKAGVPITLQTNVFVDGRGDREQRTRLWFDPAADFHDYKILWNPYQLVMFVDDTPVRVLRNLTGAVPGYPFPGKQTMLIRASVWDGSDWATDGGRTKVDWSRGPFTAGYRGFDVDGCANNGSDACQSPDLWWNAAEYRNITAEQRAAYEDVKRSYMNYDYCADKARFNSTTVPIECNYA

SEQ ID NO: 29669 - protein, 237 aa, Zea mays subsp. mays
  peptide (1)..(237): Ceres Seq. ID no. 12353977
  misc_feature (1)..(159): Pfam Name: Pfam Description:  Glycosyl hydrolases family 16
  misc_feature (1)..(234): NCBI GI NO: 15230246 NR Description: xyloglucan endotransglycosylase, putative
  misc_feature (1)..(236): NCBI GI NO: 22328589 NR Description: xyloglucan endotransglycosylase, putative
  misc_feature (1)..(236): NCBI GI NO: 38605518 NR Description: Putative xyloglucan endotransglucosylase/hydrolaseprotein 1 precursor
  misc_feature (1)..(236): NCBI GI NO: 15235587 NR Description: xyloglucan endotransglycosylase, putative
  misc_feature (1)..(234): NCBI GI NO: 38605539 NR Description: Probable xyloglucan endotransglucosylase/hydrolaseprecursor
  misc_feature (1)..(234): NCBI GI NO: 1885310 NR Description: Endoxyloglucan transferase (EXT)
  misc_feature (1)..(234): NCBI GI NO: 15240733 NR Description: xyloglucan endotransglycosylase
  misc_feature (1)..(234): NCBI GI NO: 27228078 NR Description: xyloglucan endotransglycosylase precursor
  misc_feature (1)..(234): NCBI GI NO: 38605156 NR Description: Xyloglucan endotransglucosylase/hydrolase protein Aprecursor
  misc_feature (1)..(234): NCBI GI NO: 15225605 NR Description: xyloglucan endotransglycosylase
MDQSSGAGFRSKSTYGSGFFHMRMKLPSGYTAGVVTTFYLISQPEDGSRDEVDLEFLGDKAGVPITLQTNVFVDGRGDREQRTRLWFDPAADFHDYKILWNPYQLVMFVDDTPVRVLRNLTGAVPGYPFPGKQTMLIRASVWDGSDWATDGGRTKVDWSRGPFTAGYRGFDVDGCANNGSDACQSPDLWWNAAEYRNITAEQRAAYEDVKRSYMNYDYCADKARFNSTTVPIECNYA

SEQ ID NO: 29670 - protein, 216 aa, Zea mays subsp. mays
  peptide (1)..(216): Ceres Seq. ID no. 12353978
  misc_feature (1)..(138): Pfam Name: Pfam Description:  Glycosyl hydrolases family 16
  misc_feature (1)..(213): NCBI GI NO: 15230246 NR Description: xyloglucan endotransglycosylase, putative
  misc_feature (1)..(215): NCBI GI NO: 22328589 NR Description: xyloglucan endotransglycosylase, putative
  misc_feature (1)..(215): NCBI GI NO: 38605518 NR Description: Putative xyloglucan endotransglucosylase/hydrolaseprotein 1 precursor
  misc_feature (1)..(215): NCBI GI NO: 15235587 NR Description: xyloglucan endotransglycosylase, putative
  misc_feature (1)..(213): NCBI GI NO: 38605539 NR Description: Probable xyloglucan endotransglucosylase/hydrolaseprecursor
  misc_feature (1)..(213): NCBI GI NO: 1885310 NR Description: Endoxyloglucan transferase (EXT)
  misc_feature (1)..(213): NCBI GI NO: 15240733 NR Description: xyloglucan endotransglycosylase
  misc_feature (1)..(213): NCBI GI NO: 27228078 NR Description: xyloglucan endotransglycosylase precursor
  misc_feature (1)..(213): NCBI GI NO: 38605156 NR Description: Xyloglucan endotransglucosylase/hydrolase protein Aprecursor
  misc_feature (1)..(213): NCBI GI NO: 15225605 NR Description: xyloglucan endotransglycosylase
MRMKLPSGYTAGVVTTFYLISQPEDGSRDEVDLEFLGDKAGVPITLQTNVFVDGRGDREQRTRLWFDPAADFHDYKILWNPYQLVMFVDDTPVRVLRNLTGAVPGYPFPGKQTMLIRASVWDGSDWATDGGRTKVDWSRGPFTAGYRGFDVDGCANNGSDACQSPDLWWNAAEYRNITAEQRAAYEDVKRSYMNYDYCADKARFNSTTVPIECNYA

SEQ ID NO: 29671 - DNA, 1023 bp, Zea mays subsp. mays
  misc_feature (1)..(1023): Ceres Seq. ID no. 12340874
atttgcctatttccggtgcaggcagtctggcagagcgagcaggcaggcaactgggccagagtcagacaggcctgcccgccacgccgtcccgacggccatggcccgacccttctcttccccacacatcccgtcttcatcctgggtgactcgccgccctcctccctggacctcctcaccgtccgtctccaccacgagaactagcgcctcgtctattaccgcgtgcagaccgcgccgcagggcagtcgcgccggcggcctccctccacctcggcccgggggagatcgccgagctcgcgcgcaacaaggttttgattgcggcgacagtggcgagcgcgatcgggcagctgtccaagcccttcacctcggtcaagaatgggggcgtcggcgccggccttgacctcaggaccgtcttccgctccggagggatgccctccacccactccgcgagtgttgttgcagttgctacttcgcttgggctagaaagggggtttgcagactccatatttggaatgtcagtggtgtttgcagcaattgtaatgtatgatgctcagggagtaagaagagaagtgggcaaccacgccaagatcttgaacaggttttggatcctcaaagagaaggtacctctggagtattctgaagtggacatggcagctcctgggtttgtttcggtcaccgaggaagcgagctccaacgcgagcccctccttgaagcgcggttctagcaccgaatcaccaagggtgaatgggctccgtgggtcagagcctgagctgacagagctgaagcaggcttgcgtagaggaggattaccggttgagtgaatctgttggccacacggagcttcaggtcacagtcggcgccctgttgggttttgctgtaagcttagcagtgtatgcaacactgtaacggaccttttcatatcacgtccttgattgattacacatttacacttttttttacacagaaacaatacatgcggtttattgttcccaccgtttaaatcagaaatgcctatgctagctcgtttc

SEQ ID NO: 29672 - protein, 299 aa, Zea mays subsp. mays
  peptide (1)..(299): Ceres Seq. ID no. 12340875
  misc_feature (95)..(248): Pfam Name: Pfam Description:  Divergent PAP2 family
  misc_feature (60)..(248): NCBI GI NO: 18399713 NR Description: Expressed protein; protein id: At3g12685
  misc_feature (60)..(248): NCBI GI NO: 11994410 NR Description: emb|CAB71107
  misc_feature (94)..(198): NCBI GI NO: 22297563 NR Description: ORF_ID:tll0019~hypothetical protein
  misc_feature (96)..(198): NCBI GI NO: 15672981 NR Description: conserved hypothetical protein
  misc_feature (100)..(208): NCBI GI NO: 29150195 NR Description: putative protein
  misc_feature (100)..(208): NCBI GI NO: 38344227 NR Description: OJ991113_30.3
  misc_feature (80)..(197): NCBI GI NO: 11357463 NR Description: hypothetical protein F15G16
  misc_feature (93)..(198): NCBI GI NO: 17227710 NR Description: hypothetical protein [Nostoc sp. PCC 7120]
  misc_feature (100)..(210): NCBI GI NO: 7486375 NR Description: hypothetical protein F3I6
  misc_feature (100)..(210): NCBI GI NO: 9743358 NR Description: F21J9.1 [Arabidopsis thaliana]
FAYFRCRQSGRASRQATGPESDRPARHAVPTAMARPFSSPHIPSSSWVTRRPPPWTSSPSVSTTRTSASSITACRPRRRAVAPAASLHLGPGEIAELARNKVLIAATVASAIGQLSKPFTSVKNGGVGAGLDLRTVFRSGGMPSTHSASVVAVATSLGLERGFADSIFGMSVVFAAIVMYDAQGVRREVGNHAKILNRFWILKEKVPLEYSEVDMAAPGFVSVTEEASSNASPSLKRGSSTESPRVNGLRGSEPELTELKQACVEEDYRLSESVGHTELQVTVGALLGFAVSLAVYATL

SEQ ID NO: 29673 - protein, 267 aa, Zea mays subsp. mays
  peptide (1)..(267): Ceres Seq. ID no. 12340876
  misc_feature (63)..(216): Pfam Name: Pfam Description:  Divergent PAP2 family
  misc_feature (28)..(216): NCBI GI NO: 18399713 NR Description: Expressed protein; protein id: At3g12685
  misc_feature (28)..(216): NCBI GI NO: 11994410 NR Description: emb|CAB71107
  misc_feature (62)..(166): NCBI GI NO: 22297563 NR Description: ORF_ID:tll0019~hypothetical protein
  misc_feature (64)..(166): NCBI GI NO: 15672981 NR Description: conserved hypothetical protein
  misc_feature (68)..(176): NCBI GI NO: 29150195 NR Description: putative protein
  misc_feature (68)..(176): NCBI GI NO: 38344227 NR Description: OJ991113_30.3
  misc_feature (48)..(165): NCBI GI NO: 11357463 NR Description: hypothetical protein F15G16
  misc_feature (61)..(166): NCBI GI NO: 17227710 NR Description: hypothetical protein [Nostoc sp. PCC 7120]
  misc_feature (68)..(178): NCBI GI NO: 7486375 NR Description: hypothetical protein F3I6
  misc_feature (68)..(178): NCBI GI NO: 9743358 NR Description: F21J9.1 [Arabidopsis thaliana]
MARPFSSPHIPSSSWVTRRPPPWTSSPSVSTTRTSASSITACRPRRRAVAPAASLHLGPGEIAELARNKVLIAATVASAIGQLSKPFTSVKNGGVGAGLDLRTVFRSGGMPSTHSASVVAVATSLGLERGFADSIFGMSVVFAAIVMYDAQGVRREVGNHAKILNRFWILKEKVPLEYSEVDMAAPGFVSVTEEASSNASPSLKRGSSTESPRVNGLRGSEPELTELKQACVEEDYRLSESVGHTELQVTVGALLGFAVSLAVYATL

SEQ ID NO: 29674 - protein, 158 aa, Zea mays subsp. mays
  peptide (1)..(158): Ceres Seq. ID no. 12340877
  misc_feature (1)..(107): Pfam Name: Pfam Description:  Divergent PAP2 family
  misc_feature (1)..(107): NCBI GI NO: 18399713 NR Description: Expressed protein; protein id: At3g12685
  misc_feature (1)..(107): NCBI GI NO: 11994410 NR Description: emb|CAB71107
  misc_feature (1)..(57): NCBI GI NO: 22297563 NR Description: ORF_ID:tll0019~hypothetical protein
  misc_feature (1)..(57): NCBI GI NO: 15672981 NR Description: conserved hypothetical protein
  misc_feature (1)..(67): NCBI GI NO: 29150195 NR Description: putative protein
  misc_feature (1)..(67): NCBI GI NO: 38344227 NR Description: OJ991113_30.3
  misc_feature (1)..(56): NCBI GI NO: 11357463 NR Description: hypothetical protein F15G16
  misc_feature (1)..(57): NCBI GI NO: 17227710 NR Description: hypothetical protein [Nostoc sp. PCC 7120]
  misc_feature (1)..(69): NCBI GI NO: 7486375 NR Description: hypothetical protein F3I6
  misc_feature (1)..(69): NCBI GI NO: 9743358 NR Description: F21J9.1 [Arabidopsis thaliana]
MPSTHSASVVAVATSLGLERGFADSIFGMSVVFAAIVMYDAQGVRREVGNHAKILNRFWILKEKVPLEYSEVDMAAPGFVSVTEEASSNASPSLKRGSSTESPRVNGLRGSEPELTELKQACVEEDYRLSESVGHTELQVTVGALLGFAVSLAVYATL

SEQ ID NO: 29675 - DNA, 943 bp, Zea mays subsp. mays
  misc_feature (1)..(943): Ceres Seq. ID no. 12403364
ggttggaggctagagcttgcaaacaccaccagcgaagacgtcgtggcgcgcatgtgggcggtctctgcaccccgcgtcccaccgccaccgctactgtcgtagtcctagatccgacagcctcacgagctacattccctcgaggccggccttcccggtgtctcagcagcggcggcgcatggcgatggctgcggggcgtgggctcttggccctcttctcggtcgtcgtagtggctgggctcacctctgcggcaaatggtcctttcctgtccgatagcgtcttccagccgagcgccggatctacagggaggagcttactgcaggccaataacagttgccccgtgaactttgagttccaaaactacacaatcatcacaagcaagtgcaaagggccaaagtttccagccggcccatgctgtgccgcactcaaggagttcgcgtgcccttactatacgtacctcaatgacgagagcaacgactgtgcatcgacaatgttcagctacatcaacctgtatggcaagtatccaccgggcctgttctccagcgagtgcaaagaaggcaagcaggggctctcttgcgcagatgtcctcgagagagacagtgccactgcaagcagtggtcatcacgctcaaatcagcttgcttgcgttgattactttcttgagtgtggtagtagcgttgttccactgaactatatatgcattctcccaaatatggtgtgttacaactaatgaggtttgaattgcaccttttggtgctcatggtgggattctaggttcttcctttttgtgtgtaaagtctcacataatgttattcatggcctattgcatactctttttaattcaatttaatatggcagcgggtctgattaaggctatgactagtagatcgtccgtatgaccgtacaaaaatattgtttacattatagactattgttttacattgtgt

SEQ ID NO: 29676 - protein, 169 aa, Zea mays subsp. mays
  peptide (1)..(169): Ceres Seq. ID no. 12403365
  misc_feature (11)..(168): NCBI GI NO: 15241141 NR Description: putative protein; protein id: At5g56170.1
  misc_feature (10)..(168): NCBI GI NO: 3868853 NR Description: GPI-anchored protein [Vigna radiata]
  misc_feature (9)..(169): NCBI GI NO: 15235244 NR Description: putative GPI-anchored protein
  misc_feature (9)..(168): NCBI GI NO: 30681101 NR Description: expressed protein [Arabidopsis thaliana]
  misc_feature (52)..(168): NCBI GI NO: 25337807 NR Description: hypothetical protein At2g20700
  misc_feature (52)..(169): NCBI GI NO: 38603910 NR Description: At4g28280 [Arabidopsis thaliana]
  misc_feature (30)..(133): NCBI GI NO: 10241672 NR Description: hypothetical protein
  misc_feature (9)..(133): NCBI GI NO: 38345028 NR Description: OSJNBa0029H02.12
  misc_feature (14)..(133): NCBI GI NO: 10241671 NR Description: hypothetical protein
  misc_feature (30)..(133): NCBI GI NO: 38345027 NR Description: OSJNBa0029H02.11
MAMAAGRGLLALFSVVVVAGLTSAANGPFLSDSVFQPSAGSTGRSLLQANNSCPVNFEFQNYTIITSKCKGPKFPAGPCCAALKEFACPYYTYLNDESNDCASTMFSYINLYGKYPPGLFSSECKEGKQGLSCADVLERDSATASSGHHAQISLLALITFLSVVVALFH

SEQ ID NO: 29677 - protein, 167 aa, Zea mays subsp. mays
  peptide (1)..(167): Ceres Seq. ID no. 12403366
  misc_feature (9)..(166): NCBI GI NO: 15241141 NR Description: putative protein; protein id: At5g56170.1
  misc_feature (8)..(166): NCBI GI NO: 3868853 NR Description: GPI-anchored protein [Vigna radiata]
  misc_feature (7)..(167): NCBI GI NO: 15235244 NR Description: putative GPI-anchored protein
  misc_feature (7)..(166): NCBI GI NO: 30681101 NR Description: expressed protein [Arabidopsis thaliana]
  misc_feature (50)..(166): NCBI GI NO: 25337807 NR Description: hypothetical protein At2g20700
  misc_feature (50)..(167): NCBI GI NO: 38603910 NR Description: At4g28280 [Arabidopsis thaliana]
  misc_feature (28)..(131): NCBI GI NO: 10241672 NR Description: hypothetical protein
  misc_feature (7)..(131): NCBI GI NO: 38345028 NR Description: OSJNBa0029H02.12
  misc_feature (12)..(131): NCBI GI NO: 10241671 NR Description: hypothetical protein
  misc_feature (28)..(131): NCBI GI NO: 38345027 NR Description: OSJNBa0029H02.11
MAAGRGLLALFSVVVVAGLTSAANGPFLSDSVFQPSAGSTGRSLLQANNSCPVNFEFQNYTIITSKCKGPKFPAGPCCAALKEFACPYYTYLNDESNDCASTMFSYINLYGKYPPGLFSSECKEGKQGLSCADVLERDSATASSGHHAQISLLALITFLSVVVALFH

SEQ ID NO: 29678 - DNA, 874 bp, Zea mays subsp. mays
  misc_feature (1)..(874): Ceres Seq. ID no. 12353951
gcaatttcgtttgaaacagttcagttctcacaaaaaaaagagaaagccctgaagtttcatggattcaagaatttccatctgcggtggcgcctgcgggtacggcgacctggacatcttcaggtacgggcgctacacgacggggctgagcgcggcgctgttcgggcgcggcggcgcctgcggcggctgctacgagctgcggtgcgtcaaccacatccagtggtgcctccggggcagccccacggtggtggtgacggcgacggacttctgcccggccaacatgggcctcgccgacgacgacgccggcggctggtgcaacttcccgcgggagcacctcgagctgtcggaggcctcgttcctccgcgtcgccaaggccaaggccggcatcgtgccgggtgcagttccggagggtgagctgcgacagggccggcggcatggcggttcaccatcaccggtagcgcccacttcctgcaggtgctcatcaccaacgtggcggcggacggcgaggtggcggccgtgaaggtgaaggggtcgaggacggggtggatcccgatggggcggaactggggccagaactggcagtgcgacgccgacctccgcgcccagccgccttccgggaggccagcttcggccacgccacgctagacatcaagaaccggacgcacgcctactactcgtggcaccgcaaccatgacggcgcgaaggtcgtcgctgacggcgtctggttcaccaacaggtactggatgcccaccgacgacgacacaaactgacgatcaccgccgcagagggaacaaattactgatagatcagcgtagcacgttcctgagctagccccgccccctttatgttctccaattcagtaatgcaatgcgttttt

SEQ ID NO: 29679 - protein, 152 aa, Zea mays subsp. mays
  peptide (1)..(152): Ceres Seq. ID no. 12353952
  misc_feature (2)..(126): NCBI GI NO: 15233735 NR Description: expansin, putative; protein id: At4g38210
  misc_feature (9)..(111): NCBI GI NO: 16517043 NR Description: alpha-expansin [Oryza sativa]
  misc_feature (1)..(113): NCBI GI NO: 14193759 NR Description: alpha-expansin 5 [Zea mays]
  misc_feature (9)..(111): NCBI GI NO: 21314543 NR Description: alpha-expansin precursor [Gossypium hirsutum]
  misc_feature (9)..(113): NCBI GI NO: 14193751 NR Description: alpha-expansin [Zea mays]
  misc_feature (9)..(111): NCBI GI NO: 7484721 NR Description: expansin - upland cotton
  misc_feature (9)..(111): NCBI GI NO: 30841322 NR Description: expansin [Gossypium hirsutum]
  misc_feature (9)..(111): NCBI GI NO: 7489470 NR Description: expansin - rice
  misc_feature (9)..(111): NCBI GI NO: 15225530 NR Description: expansin, putative; protein id: At2g39700
  misc_feature (9)..(111): NCBI GI NO: 16517029 NR Description: alpha-expansin [Oryza sativa]
MDSRISICGGACGYGDLDIFRYGRYTTGLSAALFGRGGACGGCYELRCVNHIQWCLRGSPTVVVTATDFCPANMGLADDDAGGWCNFPREHLELSEASFLRVAKAKAGIVPGAVPEGELRQGRRHGGSPSPVAPTSCRCSSPTWRRTARWRP

SEQ ID NO: 29680 - protein, 136 aa, Zea mays subsp. mays
  peptide (1)..(136): Ceres Seq. ID no. 12353953
  misc_feature (111)..(136): NCBI GI NO: 14193753 NR Description: alpha-expansin 2 [Zea mays]
AISFETVQFSQKKEKALKFHGFKNFHLRWRLRVRRPGHLQVRALHDGAERGAVRARRRLRRLLRAAVRQPHPVVPPGQPHGGGDGDGLLPGQHGPRRRRRRRLVQLPAGAPRAVGGLVPPRRQGQGRHRAGCSSGG

SEQ ID NO: 29681 - protein, 79 aa, Zea mays subsp. mays
  peptide (1)..(79): Ceres Seq. ID no. 12353954
  misc_feature (1)..(53): NCBI GI NO: 15233735 NR Description: expansin, putative; protein id: At4g38210
  misc_feature (1)..(38): NCBI GI NO: 16517043 NR Description: alpha-expansin [Oryza sativa]
  misc_feature (1)..(40): NCBI GI NO: 14193759 NR Description: alpha-expansin 5 [Zea mays]
  misc_feature (1)..(38): NCBI GI NO: 21314543 NR Description: alpha-expansin precursor [Gossypium hirsutum]
  misc_feature (1)..(40): NCBI GI NO: 14193751 NR Description: alpha-expansin [Zea mays]
  misc_feature (1)..(38): NCBI GI NO: 7484721 NR Description: expansin - upland cotton
  misc_feature (1)..(38): NCBI GI NO: 30841322 NR Description: expansin [Gossypium hirsutum]
  misc_feature (1)..(38): NCBI GI NO: 7489470 NR Description: expansin - rice
  misc_feature (1)..(38): NCBI GI NO: 16517029 NR Description: alpha-expansin [Oryza sativa]
  misc_feature (1)..(38): NCBI GI NO: 15225530 NR Description: expansin, putative; protein id: At2g39700
MGLADDDAGGWCNFPREHLELSEASFLRVAKAKAGIVPGAVPEGELRQGRRHGGSPSPVAPTSCRCSSPTWRRTARWRP

SEQ ID NO: 29682 - DNA, 1980 bp, Zea mays subsp. mays
  misc_feature (1)..(1980): Ceres Seq. ID no. 13567373
ctcacgggcggcggctcgcgtgtcccgccagctagccgcacactttcctctctttcagtttcgcttcgcagacttcgcttgcgcttcacccaaccttaaccgcaacggttcccgtgcggagtttttattatgaatgaatgaatacgaattcagagcacgagcgccgttgattggccgctactagtactaccagctaggccactgctcctctgctacccgctaacctcgcgccggagtcgtcgcccacgatggcctaccgatccgcagtgctcttgcccgccctcctactggccgtcgccgtcgtcgtggcctccgccgccgccggggacgggaggtggcgggaggagcaggcgcgggaccgggtgccgcgggtgccggggcaggccttcaacaccagcttcgcgcagtacgccgggtacgtgaccgtcagcgagcagcgcggcgctgcgctcttctactggttctttgaggccgagaaggacccggggtccaagcccctcgtgctctggctcaacggagggcctggatgctcgtccattgcttttggacttggagaagaagtaggacctttccatgttaacgcagatgggaagggggtccatgtcaatccttattcttggaacaaagttgcaaatttactgttccttgattcacctgttggtgttggttactcatattcaaacacctctgatgatgctttaaaaaatggggatgcaagaactgccacggattcattggcattcttactgaagtggcttgaacgctttcctcaatacaaggaacgcgaattttatttgacaggggagagttatgctggtcactatgttcctcaactggctcaagccataaaaaggcaccatgaggctactggtgacaaatcaattaatctaaagggctatatggtagggaatgctctcactgatgatttccatgaccactatggaatatttcaattcatgtggactactggcctgatctctgatcaaacatacaagctgctgaatgttttctgtgactacgagtccttcgtgcattcgtctccacagtgtgataagattatggatattgctagcactgaagctggaaacattgattcatatagcatcttcacacctacatgtcatgcatcttttgcctcttcaaagaacaaagtgatgaaaaggctacattctgctggaaaaatgggagaacagtatgatccatgcactgagaagcattcaactgtatacttcaatctagctgaggttcagaaggcacttcatgttaatacagtcattggaaaatcaaaatgggagacttgcagtgaagctgttaatactcattggggggattgcgaaagatctgtgctgcatatctatcatgaacttatacagtatggcctccgtatatgggtgttcagtggagatacagatgcagtgattccagtgacttcaactagatacagcatcgatgctctcaagcttccaacaataactccatggcatgcttggtacgacgatgacggtgaggtcggtggatggacccaagggtacaggggactcaattttgtgaccgtgaggggagcaggtcacgaagtccctcttcatcgacccaaacaggccctcacgctaatcaaatcgttcttgactgggagcccaatgcctgtgcaatccagcacacacagcaacatgtaatccgtgttgttgcaactgattcacgagatgaatgaacatcccgaagcacccaagtcagccagttgtccaacccggcttgttctgcaacttgctgtagttgtttatgtatcagagctaccggtgccggttaccgcagcagccgtgcttttgtcggccctgttggtgcttgttgcagtaccagttatcccctaaggcaggggacagaaactgcggaatagtttttgtttgcattgacgtgacagcactgtaatcttaaacatcgtaccatagtcctttctatgacaaaggtgtggtttctgatgtctgc

SEQ ID NO: 29683 - protein, 474 aa, Zea mays subsp. mays
  peptide (1)..(474): Ceres Seq. ID no. 13567374
  misc_feature (43)..(461): Pfam Name: Pfam Description:  Serine carboxypeptidase
  misc_feature (39)..(474): NCBI GI NO: 2493494 NR Description: Serine carboxypeptidase II-2 precursor (CP-MII.2)
  misc_feature (4)..(473): NCBI GI NO: 18417667 NR Description: serine carboxypeptidase -related
  misc_feature (5)..(474): NCBI GI NO: 34895992 NR Description: putative carboxypeptidase D
  misc_feature (1)..(467): NCBI GI NO: 34908012 NR Description: putative carboxypeptidase D
  misc_feature (12)..(466): NCBI GI NO: 15231911 NR Description: serine carboxypeptidase -related
  misc_feature (1)..(465): NCBI GI NO: 7428204 NR Description: carboxypeptidase D (EC 3
  misc_feature (1)..(465): NCBI GI NO: 20455471 NR Description: Serine carboxypeptidase II precursor
  misc_feature (31)..(466): NCBI GI NO: 15227493 NR Description: serine carboxypeptidase -related
  misc_feature (13)..(465): NCBI GI NO: 13877871 NR Description: putative serine carboxypeptidase II
  misc_feature (13)..(465): NCBI GI NO: 15234795 NR Description: serine carboxypeptidase -related
MAYRSAVLLPALLLAVAVVVASAAAGDGRWREEQARDRVPRVPGQAFNTSFAQYAGYVTVSEQRGAALFYWFFEAEKDPGSKPLVLWLNGGPGCSSIAFGLGEEVGPFHVNADGKGVHVNPYSWNKVANLLFLDSPVGVGYSYSNTSDDALKNGDARTATDSLAFLLKWLERFPQYKEREFYLTGESYAGHYVPQLAQAIKRHHEATGDKSINLKGYMVGNALTDDFHDHYGIFQFMWTTGLISDQTYKLLNVFCDYESFVHSSPQCDKIMDIASTEAGNIDSYSIFTPTCHASFASSKNKVMKRLHSAGKMGEQYDPCTEKHSTVYFNLAEVQKALHVNTVIGKSKWETCSEAVNTHWGDCERSVLHIYHELIQYGLRIWVFSGDTDAVIPVTSTRYSIDALKLPTITPWHAWYDDDGEVGGWTQGYRGLNFVTVRGAGHEVPLHRPKQALTLIKSFLTGSPMPVQSSTHSNM

SEQ ID NO: 29684 - protein, 257 aa, Zea mays subsp. mays
  peptide (1)..(257): Ceres Seq. ID no. 13567375
  misc_feature (1)..(244): Pfam Name: Pfam Description:  Serine carboxypeptidase
  misc_feature (1)..(257): NCBI GI NO: 2493494 NR Description: Serine carboxypeptidase II-2 precursor (CP-MII.2)
  misc_feature (1)..(256): NCBI GI NO: 18417667 NR Description: serine carboxypeptidase -related
  misc_feature (1)..(257): NCBI GI NO: 34895992 NR Description: putative carboxypeptidase D
  misc_feature (1)..(250): NCBI GI NO: 34908012 NR Description: putative carboxypeptidase D
  misc_feature (1)..(249): NCBI GI NO: 15231911 NR Description: serine carboxypeptidase -related
  misc_feature (1)..(248): NCBI GI NO: 7428204 NR Description: carboxypeptidase D (EC 3
  misc_feature (1)..(248): NCBI GI NO: 20455471 NR Description: Serine carboxypeptidase II precursor
  misc_feature (1)..(249): NCBI GI NO: 15227493 NR Description: serine carboxypeptidase -related
  misc_feature (1)..(248): NCBI GI NO: 13877871 NR Description: putative serine carboxypeptidase II
  misc_feature (1)..(248): NCBI GI NO: 15234795 NR Description: serine carboxypeptidase -related
MVGNALTDDFHDHYGIFQFMWTTGLISDQTYKLLNVFCDYESFVHSSPQCDKIMDIASTEAGNIDSYSIFTPTCHASFASSKNKVMKRLHSAGKMGEQYDPCTEKHSTVYFNLAEVQKALHVNTVIGKSKWETCSEAVNTHWGDCERSVLHIYHELIQYGLRIWVFSGDTDAVIPVTSTRYSIDALKLPTITPWHAWYDDDGEVGGWTQGYRGLNFVTVRGAGHEVPLHRPKQALTLIKSFLTGSPMPVQSSTHSNM

SEQ ID NO: 29685 - protein, 238 aa, Zea mays subsp. mays
  peptide (1)..(238): Ceres Seq. ID no. 13567376
  misc_feature (1)..(225): Pfam Name: Pfam Description:  Serine carboxypeptidase
  misc_feature (1)..(238): NCBI GI NO: 2493494 NR Description: Serine carboxypeptidase II-2 precursor (CP-MII.2)
  misc_feature (1)..(237): NCBI GI NO: 18417667 NR Description: serine carboxypeptidase -related
  misc_feature (1)..(238): NCBI GI NO: 34895992 NR Description: putative carboxypeptidase D
  misc_feature (1)..(231): NCBI GI NO: 34908012 NR Description: putative carboxypeptidase D
  misc_feature (1)..(230): NCBI GI NO: 15231911 NR Description: serine carboxypeptidase -related
  misc_feature (1)..(229): NCBI GI NO: 7428204 NR Description: carboxypeptidase D (EC 3
  misc_feature (1)..(229): NCBI GI NO: 20455471 NR Description: Serine carboxypeptidase II precursor
  misc_feature (1)..(230): NCBI GI NO: 15227493 NR Description: serine carboxypeptidase -related
  misc_feature (1)..(229): NCBI GI NO: 13877871 NR Description: putative serine carboxypeptidase II
  misc_feature (1)..(229): NCBI GI NO: 15234795 NR Description: serine carboxypeptidase -related
MWTTGLISDQTYKLLNVFCDYESFVHSSPQCDKIMDIASTEAGNIDSYSIFTPTCHASFASSKNKVMKRLHSAGKMGEQYDPCTEKHSTVYFNLAEVQKALHVNTVIGKSKWETCSEAVNTHWGDCERSVLHIYHELIQYGLRIWVFSGDTDAVIPVTSTRYSIDALKLPTITPWHAWYDDDGEVGGWTQGYRGLNFVTVRGAGHEVPLHRPKQALTLIKSFLTGSPMPVQSSTHSNM

SEQ ID NO: 29686 - DNA, 897 bp, Zea mays subsp. mays
  misc_feature (1)..(897): Ceres Seq. ID no. 12343263
acccacccatcacacgacaaaatccctcaccctcgtgagtcctgacgtcctcgcccgtgctcgcagttggtagggttctagccatggcgtggagcgccgccgccgtctccaggttcgcagccgcctccccacccgcggcacccatctccgtcaggcttggagccgccgcttctcgctcgtccctgtccttctccagtgggcgccgacgccccgtggccgcgtccctctcgacctctgccaccgctgtaaaggaggctgttcagacagagaaggcaccaccagcactaggcccttattctcaggccatcaaagcaaataatcttgtgtttgtttctggagttcttggcttgaatcccgagaccaggaagtttatctctgaaaatgttgaggagcaaactgagcaggttatgaaaaacatgggcgagatattaaaagctagtggtgctaactattcttcagttgtgaagacaacgatcatgttggctgatctgcaggatttcaataaagtaaacgagatctatggcaaatatttcccggtgccagcacctgcacgatcaacctaccaagtggcggcgctgccactgaatgcccggattgagattgagtgcatcgctgctctctaatcagatcatccaaccactcattaaatcatcaataagcacccaggaatttgtggtagaggtacctgtaccagttcagtgtctgaaaactgcgggtaacaaacctttgtgtcccggataagtgatgtgtgtgtgtgtgtgagtgaacagtgcatctagtaggagaattgttgcgtggtttgttacttggattcttcgctctttagacaagaagtaccatggcatcaacatcaatagcctactgttttcttcccaataagaatgaattggcttcccc

SEQ ID NO: 29687 - protein, 179 aa, Zea mays subsp. mays
  peptide (1)..(179): Ceres Seq. ID no. 12343264
  misc_feature (61)..(179): Pfam Name: Pfam Description:  Endoribonuclease L-PSP
  misc_feature (1)..(179): NCBI GI NO: 23617012 NR Description: putative translational inhibitor protein
  misc_feature (1)..(179): NCBI GI NO: 29420485 NR Description: translation-inhibitor protein [Gentiana triflora]
  misc_feature (21)..(179): NCBI GI NO: 15231137 NR Description: translational inhibitor protein, putative
  misc_feature (41)..(179): NCBI GI NO: 9294558 NR Description: contains similarity to protein translationinhibitor~gene_id:MQC12
  misc_feature (16)..(177): NCBI GI NO: 39579795 NR Description: Hypothetical protein CBG24261
  misc_feature (51)..(177): NCBI GI NO: 31616050 NR Description: Chain A, Crystal Structure Of A Human P14
  misc_feature (52)..(177): NCBI GI NO: 5032215 NR Description: translational inhibitor protein p14.5
  misc_feature (52)..(177): NCBI GI NO: 30584193 NR Description: Homo sapiens translational inhibitor protein p14.5
  misc_feature (16)..(177): NCBI GI NO: 25148891 NR Description: YjgF family precursor [Caenorhabditis elegans]
  misc_feature (48)..(177): NCBI GI NO: 25148896 NR Description: YjgF family (15.2 kD) [Caenorhabditis elegans]
MAWSAAAVSRFAAASPPAAPISVRLGAAASRSSLSFSSGRRRPVAASLSTSATAVKEAVQTEKAPPALGPYSQAIKANNLVFVSGVLGLNPETRKFISENVEEQTEQVMKNMGEILKASGANYSSVVKTTIMLADLQDFNKVNEIYGKYFPVPAPARSTYQVAALPLNARIEIECIAAL

SEQ ID NO: 29688 - DNA, 868 bp, Zea mays subsp. mays
  misc_feature (1)..(868): Ceres Seq. ID no. 12402305
atcacccaatgacccaatcaatcgctaacaacccaataaaccgcggacgcagcagaaaagaggtagaggggcggcgaccgatggcgcggcggggcacggaggcgttccctaacctgggcgcgcactgcgacaagccggactgcaaccagctcgacttcctgcccttcgactgcgacggctgcggcaaggtcttctgcgccgcgcaccggacctacggggaccacggctgcgccaaggcggcggaccagggccgcaccgtcgtcgtctgcccggactgcggcgacgccatcgagaggctggttccggggcagggcgagcgggagatcctggaggcgcacgtgcggtcgcggcgctgcgacccgggcaagaagcgcaagccccggtgccccgcgcggcggtgcagggagcagctcaccttctccaacacccaggactgcaagggctgcggccggaaggtgtgcctcaagcaccaggttcccggccgaccacgactgcgccgccagcgcaccaggagctgccgcggcggcgaggagggccagcggggagtgcggccgcggcgcgcggaaggaagggagcggcggctgggcgctgccggcgtccatccggagcctcaagatcttctgaggcttgccaatttgccatactgtcacgttgcagccaggtcaccacagcgaaagaaactgttcctcgagatggatgcagcgaacgtatttcatatgttctttggttgatgtataaatgcattttcaggctaagaatctgaaatacagaaactggacattgaaatgttccatcaatactggtttttaaggcagatgtgaagacagacaaatttgcgttcaatatactacgggagttttttttttcc

SEQ ID NO: 29689 - protein, 242 aa, Zea mays subsp. mays
  peptide (1)..(242): Ceres Seq. ID no. 12402306
  misc_feature (47)..(83): Pfam Name: Pfam Description:  AN1-like Zinc finger
  misc_feature (27)..(159): NCBI GI NO: 15232930 NR Description: zinc finger protein
  misc_feature (31)..(157): NCBI GI NO: 33146779 NR Description: putative arsenite inducible RNA associated protein
  misc_feature (31)..(157): NCBI GI NO: 30688811 NR Description: zinc finger protein (PMZ) -related
  misc_feature (31)..(157): NCBI GI NO: 15230311 NR Description: putative protein; protein id: At3g57480.1
  misc_feature (35)..(213): NCBI GI NO: 15079311 NR Description: RIKEN cDNA 1110060O18 gene [Mus musculus]
  misc_feature (32)..(182): NCBI GI NO: 31207325 NR Description: ENSANGP00000015397 [Anopheles gambiae]
  misc_feature (35)..(159): NCBI GI NO: 21312112 NR Description: RIKEN cDNA 1110060O18 [Mus musculus]
  misc_feature (35)..(159): NCBI GI NO: 34876869 NR Description: similar to RIKEN cDNA 1110060O18
  misc_feature (35)..(222): NCBI GI NO: 20270357 NR Description: hypothetical protein BC018415 [Homo sapiens]
  misc_feature (35)..(159): NCBI GI NO: 21749694 NR Description: unnamed protein product [Homo sapiens]
HPMTQSIANNPINRGRSRKEVEGRRPMARRGTEAFPNLGAHCDKPDCNQLDFLPFDCDGCGKVFCAAHRTYGDHGCAKAADQGRTVVVCPDCGDAIERLVPGQGEREILEAHVRSRRCDPGKKRKPRCPARRCREQLTFSNTQDCKGCGRKVCLKHQVPGRPRLRRQRTRSCRGGEEGQRGVRPRRAEGRERRLGAAGVHPEPQDLLRLANLPYCHVAARSPQRKKLFLEMDAANVFHMFFG

SEQ ID NO: 29690 - protein, 240 aa, Zea mays subsp. mays
  peptide (1)..(240): Ceres Seq. ID no. 12402307
  misc_feature (45)..(81): Pfam Name: Pfam Description:  AN1-like Zinc finger
  misc_feature (25)..(157): NCBI GI NO: 15232930 NR Description: zinc finger protein
  misc_feature (29)..(155): NCBI GI NO: 33146779 NR Description: putative arsenite inducible RNA associated protein
  misc_feature (29)..(155): NCBI GI NO: 30688811 NR Description: zinc finger protein (PMZ) -related
  misc_feature (29)..(155): NCBI GI NO: 15230311 NR Description: putative protein; protein id: At3g57480.1
  misc_feature (33)..(211): NCBI GI NO: 15079311 NR Description: RIKEN cDNA 1110060O18 gene [Mus musculus]
  misc_feature (30)..(180): NCBI GI NO: 31207325 NR Description: ENSANGP00000015397 [Anopheles gambiae]
  misc_feature (33)..(157): NCBI GI NO: 21312112 NR Description: RIKEN cDNA 1110060O18 [Mus musculus]
  misc_feature (33)..(157): NCBI GI NO: 34876869 NR Description: similar to RIKEN cDNA 1110060O18
  misc_feature (33)..(220): NCBI GI NO: 20270357 NR Description: hypothetical protein BC018415 [Homo sapiens]
  misc_feature (33)..(157): NCBI GI NO: 21749694 NR Description: unnamed protein product [Homo sapiens]
MTQSIANNPINRGRSRKEVEGRRPMARRGTEAFPNLGAHCDKPDCNQLDFLPFDCDGCGKVFCAAHRTYGDHGCAKAADQGRTVVVCPDCGDAIERLVPGQGEREILEAHVRSRRCDPGKKRKPRCPARRCREQLTFSNTQDCKGCGRKVCLKHQVPGRPRLRRQRTRSCRGGEEGQRGVRPRRAEGRERRLGAAGVHPEPQDLLRLANLPYCHVAARSPQRKKLFLEMDAANVFHMFFG

SEQ ID NO: 29691 - protein, 216 aa, Zea mays subsp. mays
  peptide (1)..(216): Ceres Seq. ID no. 12402308
  misc_feature (21)..(57): Pfam Name: Pfam Description:  AN1-like Zinc finger
  misc_feature (1)..(133): NCBI GI NO: 15232930 NR Description: zinc finger protein
  misc_feature (5)..(131): NCBI GI NO: 33146779 NR Description: putative arsenite inducible RNA associated protein
  misc_feature (5)..(131): NCBI GI NO: 30688811 NR Description: zinc finger protein (PMZ) -related
  misc_feature (5)..(131): NCBI GI NO: 15230311 NR Description: putative protein; protein id: At3g57480.1
  misc_feature (9)..(187): NCBI GI NO: 15079311 NR Description: RIKEN cDNA 1110060O18 gene [Mus musculus]
  misc_feature (6)..(156): NCBI GI NO: 31207325 NR Description: ENSANGP00000015397 [Anopheles gambiae]
  misc_feature (9)..(133): NCBI GI NO: 21312112 NR Description: RIKEN cDNA 1110060O18 [Mus musculus]
  misc_feature (9)..(133): NCBI GI NO: 34876869 NR Description: similar to RIKEN cDNA 1110060O18
  misc_feature (9)..(196): NCBI GI NO: 20270357 NR Description: hypothetical protein BC018415 [Homo sapiens]
  misc_feature (9)..(133): NCBI GI NO: 21749694 NR Description: unnamed protein product [Homo sapiens]
MARRGTEAFPNLGAHCDKPDCNQLDFLPFDCDGCGKVFCAAHRTYGDHGCAKAADQGRTVVVCPDCGDAIERLVPGQGEREILEAHVRSRRCDPGKKRKPRCPARRCREQLTFSNTQDCKGCGRKVCLKHQVPGRPRLRRQRTRSCRGGEEGQRGVRPRRAEGRERRLGAAGVHPEPQDLLRLANLPYCHVAARSPQRKKLFLEMDAANVFHMFFG

SEQ ID NO: 29692 - DNA, 1016 bp, Zea mays subsp. mays
  misc_feature (1)..(1016): Ceres Seq. ID no. 12402434
gtccgatgcctctcatcgccagaagaccttcccggtacgacgccaccgcaccacggaattaacacgagcactgcatcggtgaatctgcaagcccgcccgcccgtcgctcgccaccgccatgttcggcatcgtcttcccggaccacacctttcccctcgacgccaccgctttcgcgcaggtggcgcccaattcctgggtcctcgatctctccactctcgcgctcgccgccgcgccgcgctcggcagtcgtcttcctgctccccgctgccgtgacagcgctgccgcccggcaaggccgtctccgtctacttccaggccgccaccaaccgccccttcgcattcttaggtgcgctcgggcccacgcgcccctcggccagcttcccgcttccggaggccggcgacgagccggagcctgctgtgggccccgctaaactgggtgtcgccgtggaggacgcggccgcgttaccgccgccccctgacgagcagcgtgccgagcgtgtggcgctccgtgtcggcgagaacctgttcaacttcatgcaatcgttctgcggtgccgacggcggcaagctggtagtgcccacggacatcctggaccggtggttccgcaagttccaggagcgagccaagaaagatccagcgtacctcaagagcttcgacttttgagagcaaaggtcattttgcagataccatgtgggaagaatgttggatagcagtatagcagtgttttgtgtctcatctaggccctcctacattgcacacaatgttacgccgtgtcttaggggctgactgaatgaaggtgcatatgcagcttctctatctattgtagagaaggacaacgacaccaaaagcgaccagataggttagatggtggtgcttcaagtccttgcacccgaatgagaagtcttcttagaaacttttacaacaatacatcggatggttctgcttcgaatgtcagtattttgtggataatatctgggaatctcaggactaagatgaatgcgattgagttcttgtcgcg

SEQ ID NO: 29693 - protein, 180 aa, Zea mays subsp. mays
  peptide (1)..(180): Ceres Seq. ID no. 12402435
  misc_feature (1)..(177): Pfam Name: DUF775 Pfam Description: Protein of unknown function
  misc_feature (1)..(180): NCBI GI NO: 27357983 NR Description: Hypothetical protein
  misc_feature (1)..(178): NCBI GI NO: 15218916 NR Description: hypothetical protein; protein id: At1g66080.1
MFGIVFPDHTFPLDATAFAQVAPNSWVLDLSTLALAAAPRSAVVFLLPAAVTALPPGKAVSVYFQAATNRPFAFLGALGPTRPSASFPLPEAGDEPEPAVGPAKLGVAVEDAAALPPPPDEQRAERVALRVGENLFNFMQSFCGADGGKLVVPTDILDRWFRKFQERAKKDPAYLKSFDF

SEQ ID NO: 29694 - protein, 142 aa, Zea mays subsp. mays
  peptide (1)..(142): Ceres Seq. ID no. 12402436
VRCLSSPEDLPGTTPPHHGINTSTASVNLQARPPVARHRHVRHRLPGPHLSPRRHRFRAGGAQFLGPRSLHSRARRRAALGSRLPAPRCRDSAAARQGRLRLLPGRHQPPLRILRCARAHAPLGQLPASGGRRRAGACCGPR

SEQ ID NO: 29695 - DNA, 968 bp, Zea mays subsp. mays
  misc_feature (1)..(968): Ceres Seq. ID no. 12380992
aaaggaagggcgggggctacatagcaagctccttctctgctaaccgagcgagagcagctgtagcctacactctacagctagcgcaactaacgaccatccacctgaaagagggagaaggcattgggggttcttgaagtgcagtgcaggtccaggcagctagcagtgaccgagagtgagggacagggcaatggcgtcctcactgctccactgccccgacaagctcccgttcttggacgtggaggccatcctccacatgaaagaggggctcggcgagaccagctacgcgcagaactcctcgcttcagaagcgaggcatggacacgctgaggagcctcatcaccagcaccgcgacggacgtgtacgtctcgcagatgccggagcggttcacggtggccgacctcggctgctcctcggggcccaacgcgctgtgcctggcggaggacatcgtggggagcatcggcagggcgtgcggccggtcgtcgcggccgccgcccgagttctcggtgctgctcaacgacctgcccaccaacgacttcaacaccatcttcttcagcctgccggagttcgccgaccggctcgaggccgcggccaggacggacgagtggggccggccgatggtgttcctgtccggggtcccgggctcgttctacgggcggctgttccccaggacgagcgtgcacttcatctgctcctgctccagcctgcactggctctcccaggtccctccggggctcttcgacgagacggacaacaggccggtgaacaaggggaagatgtacatctcgagcaccagccccgcggccgtgccgctggcctacctgaggcagttccggagagacttcggcgtgttcctcaggtcgcgcgcggccgaggtcgtccccggcggccggatggtcctcgccatgcttggccggcagaccgaaggctacgtcgaccggcggacgaccttcctctgggagctcctctccg

SEQ ID NO: 29696 - protein, 260 aa, Zea mays subsp. mays
  peptide (1)..(260): Ceres Seq. ID no. 12380993
  misc_feature (50)..(259): Pfam Name: Pfam Description:  SAM dependent carboxyl methyltransferase
  misc_feature (1)..(259): NCBI GI NO: 34911508 NR Description: putative S-adenosyl-L-methionine:salicylic acidcarboxyl methyltransferase
  misc_feature (3)..(259): NCBI GI NO: 34911486 NR Description: putative S-adenosyl-L-methionine:salicylic acidcarboxyl methyltransferase
  misc_feature (16)..(259): NCBI GI NO: 15234420 NR Description: S-adenosyl-L-methionine: carboxyl methyltransferasefamily
  misc_feature (15)..(259): NCBI GI NO: 6651395 NR Description: floral nectary-specific protein
  misc_feature (15)..(259): NCBI GI NO: 15223601 NR Description: S-adenosyl-L-methionine: jasmonic acid carboxylmethyltransferase
  misc_feature (15)..(259): NCBI GI NO: 13676829 NR Description: S-adenosyl-L-methionine: jasmonic acid carboxylmethyltransferase
  misc_feature (20)..(259): NCBI GI NO: 23957318 NR Description: S-adenosyl-L-methionine: salicylic acidmethyltransferase
  misc_feature (15)..(259): NCBI GI NO: 13235641 NR Description: S-adenosyl-L-methionine: salicylic acid carboxylmethyltransferase
  misc_feature (15)..(259): NCBI GI NO: 34809619 NR Description: Chain X
  misc_feature (20)..(259): NCBI GI NO: 18461100 NR Description: S-adenosyl-L-methionine: salicylic acid calboxylmethyltransferase-like
MASSLLHCPDKLPFLDVEAILHMKEGLGETSYAQNSSLQKRGMDTLRSLITSTATDVYVSQMPERFTVADLGCSSGPNALCLAEDIVGSIGRACGRSSRPPPEFSVLLNDLPTNDFNTIFFSLPEFADRLEAAARTDEWGRPMVFLSGVPGSFYGRLFPRTSVHFICSCSSLHWLSQVPPGLFDETDNRPVNKGKMYISSTSPAAVPLAYLRQFRRDFGVFLRSRAAEVVPGGRMVLAMLGRQTEGYVDRRTTFLWELLS

SEQ ID NO: 29697 - protein, 238 aa, Zea mays subsp. mays
  peptide (1)..(238): Ceres Seq. ID no. 12380994
  misc_feature (28)..(237): Pfam Name: Pfam Description:  SAM dependent carboxyl methyltransferase
  misc_feature (1)..(237): NCBI GI NO: 34911508 NR Description: putative S-adenosyl-L-methionine:salicylic acidcarboxyl methyltransferase
  misc_feature (1)..(237): NCBI GI NO: 34911486 NR Description: putative S-adenosyl-L-methionine:salicylic acidcarboxyl methyltransferase
  misc_feature (1)..(237): NCBI GI NO: 15234420 NR Description: S-adenosyl-L-methionine: carboxyl methyltransferasefamily
  misc_feature (1)..(237): NCBI GI NO: 6651395 NR Description: floral nectary-specific protein
  misc_feature (1)..(237): NCBI GI NO: 15223601 NR Description: S-adenosyl-L-methionine: jasmonic acid carboxylmethyltransferase
  misc_feature (1)..(237): NCBI GI NO: 13676829 NR Description: S-adenosyl-L-methionine: jasmonic acid carboxylmethyltransferase
  misc_feature (1)..(237): NCBI GI NO: 23957318 NR Description: S-adenosyl-L-methionine: salicylic acidmethyltransferase
  misc_feature (1)..(237): NCBI GI NO: 13235641 NR Description: S-adenosyl-L-methionine: salicylic acid carboxylmethyltransferase
  misc_feature (1)..(237): NCBI GI NO: 34809619 NR Description: Chain X
  misc_feature (1)..(237): NCBI GI NO: 18461100 NR Description: S-adenosyl-L-methionine: salicylic acid calboxylmethyltransferase-like
MKEGLGETSYAQNSSLQKRGMDTLRSLITSTATDVYVSQMPERFTVADLGCSSGPNALCLAEDIVGSIGRACGRSSRPPPEFSVLLNDLPTNDFNTIFFSLPEFADRLEAAARTDEWGRPMVFLSGVPGSFYGRLFPRTSVHFICSCSSLHWLSQVPPGLFDETDNRPVNKGKMYISSTSPAAVPLAYLRQFRRDFGVFLRSRAAEVVPGGRMVLAMLGRQTEGYVDRRTTFLWELLS

SEQ ID NO: 29698 - protein, 218 aa, Zea mays subsp. mays
  peptide (1)..(218): Ceres Seq. ID no. 12380995
  misc_feature (8)..(217): Pfam Name: Pfam Description:  SAM dependent carboxyl methyltransferase
  misc_feature (1)..(217): NCBI GI NO: 34911508 NR Description: putative S-adenosyl-L-methionine:salicylic acidcarboxyl methyltransferase
  misc_feature (1)..(217): NCBI GI NO: 34911486 NR Description: putative S-adenosyl-L-methionine:salicylic acidcarboxyl methyltransferase
  misc_feature (1)..(217): NCBI GI NO: 15234420 NR Description: S-adenosyl-L-methionine: carboxyl methyltransferasefamily
  misc_feature (1)..(217): NCBI GI NO: 6651395 NR Description: floral nectary-specific protein
  misc_feature (1)..(217): NCBI GI NO: 15223601 NR Description: S-adenosyl-L-methionine: jasmonic acid carboxylmethyltransferase
  misc_feature (1)..(217): NCBI GI NO: 13676829 NR Description: S-adenosyl-L-methionine: jasmonic acid carboxylmethyltransferase
  misc_feature (1)..(217): NCBI GI NO: 23957318 NR Description: S-adenosyl-L-methionine: salicylic acidmethyltransferase
  misc_feature (1)..(217): NCBI GI NO: 13235641 NR Description: S-adenosyl-L-methionine: salicylic acid carboxylmethyltransferase
  misc_feature (1)..(217): NCBI GI NO: 34809619 NR Description: Chain X
  misc_feature (1)..(217): NCBI GI NO: 18461100 NR Description: S-adenosyl-L-methionine: salicylic acid calboxylmethyltransferase-like
MDTLRSLITSTATDVYVSQMPERFTVADLGCSSGPNALCLAEDIVGSIGRACGRSSRPPPEFSVLLNDLPTNDFNTIFFSLPEFADRLEAAARTDEWGRPMVFLSGVPGSFYGRLFPRTSVHFICSCSSLHWLSQVPPGLFDETDNRPVNKGKMYISSTSPAAVPLAYLRQFRRDFGVFLRSRAAEVVPGGRMVLAMLGRQTEGYVDRRTTFLWELLS

SEQ ID NO: 29699 - DNA, 782 bp, Zea mays subsp. mays
  misc_feature (1)..(782): Ceres Seq. ID no. 12358043
cccactccaaacctccctctctcgacctcgacccctcgcccgcaaagccccgcaagccagcggcatcccgcttcctcggcaggcttccaagacccaacccaacagcttccgagcgagtacggcggcggcgacgatggcggccaagtcgcacacacgcaaggcgttcctcctctgcaactacgtcctcctgggcgcctcctccagctgcatcttcctcacgctgtcgctgcgcctgctgccgtccccgtgcggcctgctcctgctcttcctccacgccctcaccgccgtcttctccgcggccggctgctcgggctccttcacggcgcccgccacgcccgcgcagtggcacaacgcgcacaccgcgggagccgcgctcaccgccatcttccagggcgccatcgcgctgctcgcgttcacccgcacctccgacttcctcgccgagctccagtcctacgtccgcgacgaggacggcgccgtcatcctcaagatggtcggagggctcggcaccgccatcttcgtcctcgagtgggccgcgctcgcgcttgccttctccctccgcctcgacgaggatgacgacgacgacgacctccaggccaagaactggcaatcgtaccatgtctgatcccatccactgctggcctgggctccttcaaaatgagattctttgatgtctattctattattgtactattgctgtcattcttttgtactacggtgtactgttatgactgttcaaccaaaataaataaataccaaagcaaatatatattattgcttttgtt

SEQ ID NO: 29700 - protein, 221 aa, Zea mays subsp. mays
  peptide (1)..(221): Ceres Seq. ID no. 12358044
  misc_feature (90)..(183): Pfam Name: Pfam Description:  Cation efflux family
  misc_feature (2)..(198): NCBI GI NO: 11359723 NR Description: proteophosphoglycan, membrane-associated
  misc_feature (47)..(200): NCBI GI NO: 38175466 NR Description: putative high-affinity potassium transporter
  misc_feature (55)..(206): NCBI GI NO: 11359723 NR Description: proteophosphoglycan, membrane-associated
  misc_feature (2)..(202): NCBI GI NO: 13592175 NR Description: ppg3 [Leishmania major]
  misc_feature (2)..(202): NCBI GI NO: 5420387 NR Description: proteophosphoglycan [Leishmania major]
  misc_feature (48)..(202): NCBI GI NO: 11359723 NR Description: proteophosphoglycan, membrane-associated
  misc_feature (2)..(206): NCBI GI NO: 13592175 NR Description: ppg3 [Leishmania major]
  misc_feature (2)..(208): NCBI GI NO: 13592175 NR Description: ppg3 [Leishmania major]
  misc_feature (2)..(206): NCBI GI NO: 25143299 NR Description: pre-mRNA splicing SR protein related RSR-1 (68
  misc_feature (35)..(196): NCBI GI NO: 5420387 NR Description: proteophosphoglycan [Leishmania major]
HSKPPSLDLDPSPAKPRKPAASRFLGRLPRPNPTASERVRRRRRWRPSRTHARRSSSATTSSWAPPPAASSSRCRCACCRPRAACSCSSSTPSPPSSPRPAARAPSRRPPRPRSGTTRTPREPRSPPSSRAPSRCSRSPAPPTSSPSSSPTSATRTAPSSSRWSEGSAPPSSSSSGPRSRLPSPSASTRMTTTTTSRPRTGNRTMSDPIHCWPGLLQNEIL

SEQ ID NO: 29701 - protein, 206 aa, Zea mays subsp. mays
  peptide (1)..(206): Ceres Seq. ID no. 12358045
  misc_feature (49)..(206): NCBI GI NO: 34907616 NR Description: contains EST C27797(C52876)~unknown protein
  misc_feature (47)..(204): NCBI GI NO: 15239379 NR Description: putative protein; protein id: At5g36710.1
  misc_feature (47)..(204): NCBI GI NO: 15239407 NR Description: putative protein; protein id: At5g36800.1
  misc_feature (42)..(186): NCBI GI NO: 38345379 NR Description: OSJNBa0067K08.8
  misc_feature (39)..(186): NCBI GI NO: 21703131 NR Description: AT5g16250/T21H19_170 [Arabidopsis thaliana]
  misc_feature (39)..(186): NCBI GI NO: 15237310 NR Description: putative protein; protein id: At5g16250
  misc_feature (39)..(186): NCBI GI NO: 21553926 NR Description: unknown [Arabidopsis thaliana]
  misc_feature (50)..(195): NCBI GI NO: 18396262 NR Description: expressed protein; protein id: At3g02640
PLQTSLSRPRPLARKAPQASGIPLPRQASKTQPNSFRASTAAATMAAKSHTRKAFLLCNYVLLGASSSCIFLTLSLRLLPSPCGLLLLFLHALTAVFSAAGCSGSFTAPATPAQWHNAHTAGAALTAIFQGAIALLAFTRTSDFLAELQSYVRDEDGAVILKMVGGLGTAIFVLEWAALALAFSLRLDEDDDDDDLQAKNWQSYHV

SEQ ID NO: 29702 - protein, 190 aa, Zea mays subsp. mays
  peptide (1)..(190): Ceres Seq. ID no. 12358046
PTPNLPLSTSTPRPQSPASQRHPASSAGFQDPTQQLPSEYGGGDDGGQVAHTQGVPPLQLRPPGRLLQLHLPHAVAAPAAVPVRPAPALPPRPHRRLLRGRLLGLLHGARHARAVAQRAHRGSRAHRHLPGRHRAARVHPHLRLPRRAPVLRPRRGRRRHPQDGRRARHRHLRPRVGRARACLLPPPRRG

SEQ ID NO: 29703 - protein, 162 aa, Zea mays subsp. mays
  peptide (1)..(162): Ceres Seq. ID no. 12358047
  misc_feature (5)..(162): NCBI GI NO: 34907616 NR Description: contains EST C27797(C52876)~unknown protein
  misc_feature (3)..(160): NCBI GI NO: 15239379 NR Description: putative protein; protein id: At5g36710.1
  misc_feature (3)..(160): NCBI GI NO: 15239407 NR Description: putative protein; protein id: At5g36800.1
  misc_feature (1)..(142): NCBI GI NO: 38345379 NR Description: OSJNBa0067K08.8
  misc_feature (1)..(142): NCBI GI NO: 21703131 NR Description: AT5g16250/T21H19_170 [Arabidopsis thaliana]
  misc_feature (1)..(142): NCBI GI NO: 15237310 NR Description: putative protein; protein id: At5g16250
  misc_feature (1)..(142): NCBI GI NO: 21553926 NR Description: unknown [Arabidopsis thaliana]
  misc_feature (6)..(151): NCBI GI NO: 18396262 NR Description: expressed protein; protein id: At3g02640
MAAKSHTRKAFLLCNYVLLGASSSCIFLTLSLRLLPSPCGLLLLFLHALTAVFSAAGCSGSFTAPATPAQWHNAHTAGAALTAIFQGAIALLAFTRTSDFLAELQSYVRDEDGAVILKMVGGLGTAIFVLEWAALALAFSLRLDEDDDDDDLQAKNWQSYHV

SEQ ID NO: 29704 - DNA, 902 bp, Zea mays subsp. mays
  misc_feature (1)..(902): Ceres Seq. ID no. 12341316
gtacctgtacgtcttctctatagagggagcaattggagagagagaaaagaaagaaagaaacaaagaacggcgaaaaatggtcgatgccggcgacataacggccggagggccgccacgcgctcacgaggaggagcaagcgggaactccggcatacggttcggtggtcctcggcggcacttttgaccgcctccacgacggccaccgccgccttctcaaggcctccgcggatttggggagagaccggatcgtggtgggcgtctgcacgggacctatgctcgccaagaaggagtatgcggagcttattgagcccgtcgacaagcgcatcaagggtgtggaggattacatcaagtctataaagccagaactgatagtacaagtggagcctattgaggacccttatggcccatccataactgatgagaagttggatgccattattgtcagtaaggagacattaaatggtggactggctgtaaataggaaaagagaagagaaagggttcccactgttgaaggttgaggttgttgatctcctttccggcggtgtggagggggaaaaattgagttcttctgctttaaggaaacttgaggcagaacaagctcaacaaagtgaaacaaaatctggtagccttgaagcttcttagggaggaaattgaatactttgatctggttagctgaatgcacaaatacgggggtgatctgctccaagctcagtgtgaacaaaaaatatgatcagagctgacagtttggttacctttctagaggaataatcttcgaacactggcccatggccctgtaacagtattgctctaaccttctaaaatcaacctggcaacatagactctcccctactaaccaaatttacaaattttgtattggcaatgccatctgaatgttaaaagg

SEQ ID NO: 29705 - protein, 213 aa, Zea mays subsp. mays
  peptide (1)..(213): Ceres Seq. ID no. 12341317
  misc_feature (29)..(204): NCBI GI NO: 34393473 NR Description: bifunctional phosphopantetheine adenylyltransferase dephospho CoA kinase-like
  misc_feature (40)..(204): NCBI GI NO: 15224138 NR Description: hypothetical protein; protein id: At2g18250.1
  misc_feature (43)..(194): NCBI GI NO: 25143409 NR Description: Cytidylyltransferase and Dephospho-CoA kinase (51
  misc_feature (31)..(194): NCBI GI NO: 39589394 NR Description: Hypothetical protein CBG22156
  misc_feature (1)..(193): NCBI GI NO: 31213039 NR Description: ENSANGP00000014315 [Anopheles gambiae]
  misc_feature (56)..(205): NCBI GI NO: 6321716 NR Description: Protein required for cell viability; Ygr277cp
  misc_feature (51)..(193): NCBI GI NO: 20094940 NR Description: Predicted nucleotidyltransferase of the HIGHsuperfamily
  misc_feature (40)..(193): NCBI GI NO: 24658602 NR Description: CG10575-PA [Drosophila melanogaster]
  misc_feature (56)..(194): NCBI GI NO: 20465246 NR Description: bifunctional phosphopantetheine adenylyltransferase / dephospho CoA kinase
  misc_feature (51)..(194): NCBI GI NO: 27229125 NR Description: CoA synthase
YLYVFSIEGAIGEREKKERNKERRKMVDAGDITAGGPPRAHEEEQAGTPAYGSVVLGGTFDRLHDGHRRLLKASADLGRDRIVVGVCTGPMLAKKEYAELIEPVDKRIKGVEDYIKSIKPELIVQVEPIEDPYGPSITDEKLDAIIVSKETLNGGLAVNRKREEKGFPLLKVEVVDLLSGGVEGEKLSSSALRKLEAEQAQQSETKSGSLEAS

SEQ ID NO: 29706 - protein, 188 aa, Zea mays subsp. mays
  peptide (1)..(188): Ceres Seq. ID no. 12341318
  misc_feature (4)..(179): NCBI GI NO: 34393473 NR Description: bifunctional phosphopantetheine adenylyltransferase dephospho CoA kinase-like
  misc_feature (15)..(179): NCBI GI NO: 15224138 NR Description: hypothetical protein; protein id: At2g18250.1
  misc_feature (18)..(169): NCBI GI NO: 25143409 NR Description: Cytidylyltransferase and Dephospho-CoA kinase (51
  misc_feature (6)..(169): NCBI GI NO: 39589394 NR Description: Hypothetical protein CBG22156
  misc_feature (1)..(168): NCBI GI NO: 31213039 NR Description: ENSANGP00000014315 [Anopheles gambiae]
  misc_feature (31)..(180): NCBI GI NO: 6321716 NR Description: Protein required for cell viability; Ygr277cp
  misc_feature (26)..(168): NCBI GI NO: 20094940 NR Description: Predicted nucleotidyltransferase of the HIGHsuperfamily
  misc_feature (15)..(168): NCBI GI NO: 24658602 NR Description: CG10575-PA [Drosophila melanogaster]
  misc_feature (31)..(169): NCBI GI NO: 20465246 NR Description: bifunctional phosphopantetheine adenylyltransferase / dephospho CoA kinase
  misc_feature (26)..(169): NCBI GI NO: 27229125 NR Description: CoA synthase
MVDAGDITAGGPPRAHEEEQAGTPAYGSVVLGGTFDRLHDGHRRLLKASADLGRDRIVVGVCTGPMLAKKEYAELIEPVDKRIKGVEDYIKSIKPELIVQVEPIEDPYGPSITDEKLDAIIVSKETLNGGLAVNRKREEKGFPLLKVEVVDLLSGGVEGEKLSSSALRKLEAEQAQQSETKSGSLEAS

SEQ ID NO: 29707 - protein, 123 aa, Zea mays subsp. mays
  peptide (1)..(123): Ceres Seq. ID no. 12341319
  misc_feature (1)..(114): NCBI GI NO: 34393473 NR Description: bifunctional phosphopantetheine adenylyltransferase dephospho CoA kinase-like
  misc_feature (1)..(114): NCBI GI NO: 15224138 NR Description: hypothetical protein; protein id: At2g18250.1
  misc_feature (1)..(104): NCBI GI NO: 25143409 NR Description: Cytidylyltransferase and Dephospho-CoA kinase (51
  misc_feature (1)..(104): NCBI GI NO: 39589394 NR Description: Hypothetical protein CBG22156
  misc_feature (1)..(103): NCBI GI NO: 31213039 NR Description: ENSANGP00000014315 [Anopheles gambiae]
  misc_feature (1)..(115): NCBI GI NO: 6321716 NR Description: Protein required for cell viability; Ygr277cp
  misc_feature (1)..(103): NCBI GI NO: 20094940 NR Description: Predicted nucleotidyltransferase of the HIGHsuperfamily
  misc_feature (1)..(103): NCBI GI NO: 24658602 NR Description: CG10575-PA [Drosophila melanogaster]
  misc_feature (1)..(104): NCBI GI NO: 20465246 NR Description: bifunctional phosphopantetheine adenylyltransferase / dephospho CoA kinase
  misc_feature (1)..(104): NCBI GI NO: 27229125 NR Description: CoA synthase
MLAKKEYAELIEPVDKRIKGVEDYIKSIKPELIVQVEPIEDPYGPSITDEKLDAIIVSKETLNGGLAVNRKREEKGFPLLKVEVVDLLSGGVEGEKLSSSALRKLEAEQAQQSETKSGSLEAS

SEQ ID NO: 29708 - DNA, 1197 bp, Zea mays subsp. mays
  misc_feature (1)..(1197): Ceres Seq. ID no. 12376601
gcacgagaccattacctagaacatcctaatcgaaaaggctggaggctcgcctagctggctctggcagcagcatctaccgttcgcttgctgcaaagagaacttccactggtgatatactgaaggcgttcagtttgtatgtcaaagcatgtccgtttaggatactatcacactatgtcgcaaacacgaccatcttaaacgctacgaagagcgccacaaggctgcacatcatagactacgggataatgtatggtttccagtggccagtcctcatgcagcggctctcaaagagacctggtggccccccgtaccttcggatcactggtatagactttcccctgtcaggattccgccctgcagagcgtgttgaggcgacagggcggcggttgcatgagtatgcccgtatgttcaatgtcccatttgaataccaagccattgctgccaagtgggatactatccaagttaaagatctcaacatgaagagcgatgagttcgtcgtcgttaactgcctctaccggatgaggaacatgatggacgagacggtgaccgatgacagcccgagaacgagggttttgaacacaatcaggaagctgaatccccatctgttcgttcatgggatcgtcaatggtacttacaatgcacccttcttcgtgacgcggtttaaggaggctatgttcttcttctcttcgatctttgatatgctcgaagcgaatgccttacggatggatgagcataggctgctgatagagagagagttctttggccgggaagctgtcaatgtgattgcctgtgagggcacagagaggattgaaaggccagagacctacaagcaatggcagatgaggaacctcagggcaggcttccggcagctagctctggacagggagataatgaagagagcaaggtacaaggtaagcaagagctatcagggggatttcctcgtggacgaagataacaagtggatgctacaaggttggaagggtcgtatcatatatgcactttcagcatggactagctagacttgtaaatattagtgagctactgagctgcttagctgacctcttccattaatttcttgattattcaccatttcattttgctgtattatgtttacgttgttgaatctagccctcttttagaaaccaaagttttgtatgtttgaattgactgcaataatagaatcttgtccgtgtctgcctc

SEQ ID NO: 29709 - protein, 257 aa, Zea mays subsp. mays
  peptide (1)..(257): Ceres Seq. ID no. 12376602
  misc_feature (1)..(165): Pfam Name: Pfam Description:  GRAS family transcription factor
  misc_feature (1)..(255): NCBI GI NO: 38346720 NR Description: OSJNBa0086O06.18
  misc_feature (1)..(256): NCBI GI NO: 32813435 NR Description: SCARECROW-like protein [Lilium longiflorum]
  misc_feature (1)..(255): NCBI GI NO: 34908186 NR Description: P0406G08.7
  misc_feature (1)..(255): NCBI GI NO: 14719332 NR Description: putative SCARECROW gene regulator [Oryza sativa]
  misc_feature (1)..(255): NCBI GI NO: 15222433 NR Description: transcription factor scarecrow-like 14, putative
  misc_feature (1)..(255): NCBI GI NO: 15224338 NR Description: putative SCARECROW gene regulator
  misc_feature (1)..(249): NCBI GI NO: 8778540 NR Description: F22G5.9 [Arabidopsis thaliana]
  misc_feature (1)..(255): NCBI GI NO: 14719333 NR Description: putative SCARECROW gene regulator [Oryza sativa]
  misc_feature (1)..(255): NCBI GI NO: 15227022 NR Description: putative SCARECROW gene regulator
  misc_feature (1)..(255): NCBI GI NO: 15238422 NR Description: scarecrow-like 11 - like; protein id: At5g59450
MYGFQWPVLMQRLSKRPGGPPYLRITGIDFPLSGFRPAERVEATGRRLHEYARMFNVPFEYQAIAAKWDTIQVKDLNMKSDEFVVVNCLYRMRNMMDETVTDDSPRTRVLNTIRKLNPHLFVHGIVNGTYNAPFFVTRFKEAMFFFSSIFDMLEANALRMDEHRLLIEREFFGREAVNVIACEGTERIERPETYKQWQMRNLRAGFRQLALDREIMKRARYKVSKSYQGDFLVDEDNKWMLQGWKGRIIYALSAWTS

SEQ ID NO: 29710 - protein, 248 aa, Zea mays subsp. mays
  peptide (1)..(248): Ceres Seq. ID no. 12376603
  misc_feature (1)..(156): Pfam Name: Pfam Description:  GRAS family transcription factor
  misc_feature (1)..(246): NCBI GI NO: 38346720 NR Description: OSJNBa0086O06.18
  misc_feature (1)..(247): NCBI GI NO: 32813435 NR Description: SCARECROW-like protein [Lilium longiflorum]
  misc_feature (1)..(246): NCBI GI NO: 34908186 NR Description: P0406G08.7
  misc_feature (1)..(246): NCBI GI NO: 14719332 NR Description: putative SCARECROW gene regulator [Oryza sativa]
  misc_feature (1)..(246): NCBI GI NO: 15222433 NR Description: transcription factor scarecrow-like 14, putative
  misc_feature (1)..(246): NCBI GI NO: 15224338 NR Description: putative SCARECROW gene regulator
  misc_feature (1)..(240): NCBI GI NO: 8778540 NR Description: F22G5.9 [Arabidopsis thaliana]
  misc_feature (1)..(246): NCBI GI NO: 14719333 NR Description: putative SCARECROW gene regulator [Oryza sativa]
  misc_feature (1)..(246): NCBI GI NO: 15227022 NR Description: putative SCARECROW gene regulator
  misc_feature (1)..(246): NCBI GI NO: 15238422 NR Description: scarecrow-like 11 - like; protein id: At5g59450
MQRLSKRPGGPPYLRITGIDFPLSGFRPAERVEATGRRLHEYARMFNVPFEYQAIAAKWDTIQVKDLNMKSDEFVVVNCLYRMRNMMDETVTDDSPRTRVLNTIRKLNPHLFVHGIVNGTYNAPFFVTRFKEAMFFFSSIFDMLEANALRMDEHRLLIEREFFGREAVNVIACEGTERIERPETYKQWQMRNLRAGFRQLALDREIMKRARYKVSKSYQGDFLVDEDNKWMLQGWKGRIIYALSAWTS

SEQ ID NO: 29711 - protein, 204 aa, Zea mays subsp. mays
  peptide (1)..(204): Ceres Seq. ID no. 12376604
  misc_feature (1)..(112): Pfam Name: Pfam Description:  GRAS family transcription factor
  misc_feature (1)..(202): NCBI GI NO: 38346720 NR Description: OSJNBa0086O06.18
  misc_feature (1)..(203): NCBI GI NO: 32813435 NR Description: SCARECROW-like protein [Lilium longiflorum]
  misc_feature (1)..(202): NCBI GI NO: 34908186 NR Description: P0406G08.7
  misc_feature (1)..(202): NCBI GI NO: 14719332 NR Description: putative SCARECROW gene regulator [Oryza sativa]
  misc_feature (1)..(202): NCBI GI NO: 15222433 NR Description: transcription factor scarecrow-like 14, putative
  misc_feature (1)..(202): NCBI GI NO: 15224338 NR Description: putative SCARECROW gene regulator
  misc_feature (1)..(196): NCBI GI NO: 8778540 NR Description: F22G5.9 [Arabidopsis thaliana]
  misc_feature (1)..(202): NCBI GI NO: 14719333 NR Description: putative SCARECROW gene regulator [Oryza sativa]
  misc_feature (1)..(202): NCBI GI NO: 15227022 NR Description: putative SCARECROW gene regulator
  misc_feature (1)..(202): NCBI GI NO: 15238422 NR Description: scarecrow-like 11 - like; protein id: At5g59450
MFNVPFEYQAIAAKWDTIQVKDLNMKSDEFVVVNCLYRMRNMMDETVTDDSPRTRVLNTIRKLNPHLFVHGIVNGTYNAPFFVTRFKEAMFFFSSIFDMLEANALRMDEHRLLIEREFFGREAVNVIACEGTERIERPETYKQWQMRNLRAGFRQLALDREIMKRARYKVSKSYQGDFLVDEDNKWMLQGWKGRIIYALSAWTS

SEQ ID NO: 29712 - DNA, 1498 bp, Zea mays subsp. mays
  misc_feature (1)..(1498): Ceres Seq. ID no. 12406527
agctcccagacattgacgagacataaacccacttgcccacgcgcacggcaagccggcaaggccacgcgagaaattccatctcgagcagagcgcagcaacacgtgcgcggaggtcacagctccgatcgacaagccggccaagcagccacacatgcctcctcacatggcggcgatctcgcaccggatcgcaggatccggcccgcgcgtcgccgttgtggcgccgcctcgcccgcgggggcgcgctgccgtggtcgcgggtgctgcggcgaagggcgcacatcgggagcggacgctggagggcgcgagtgacgacctgagggccgccgcggctcagtgtctggactgggctcccgcgcggcgtcgggtgcgggccgccttcgcgcccgtgctccccaccctcgaccactgccttttcaagatggctcacaatgaaatccagatggaagagaattacgagaccaattcaaagggcgttgaaatattctggaagagttggctgccaagagagggcactgcaactaaggctgcacttttcttctgccatggatatggggatacctgcactttcttttttgaagggattgctaagaggatagcagctgctggttatgcagtttatgctatggattatcctggttttggcatgtcatatggtctccatggctatattgcaagctttgatggaatggtggaccatgtcattgaacagtatgcacgaataagaggcatgaaagaagtgtgtgagctgccacactttctcttggggcagtcaatgggaggtgcagttgccctgaaagtacacttgaagcaacaacaagaatgggatggtgtgcttcttgtcgcacctatgtgcaagatttcagaagatgtaacaccacctgcacctgtattgaaggcactgagcatattgtcatgtcttcttcctgaggcgaagttatttccgcagaaagatataggagatttggcatttagagatccaaggaaaaggaaagtagctgagtacaatgccatctcatattctgaccaaatgagattaagaacagcagttgaacttttaaaagccacgaaggacattgaatcacagttggaaaagatctcctctccattgctgattcttcacggagccgcagacatggtaaccgatcctcaggtcagcaaattcctttatgagaaagccagcacgaaggacaagaccctcaagctctatgaaggcagctaccattcaatcttagagggagaaccagatgaccggatttcaactgccattaacgacatcatttcatggctagattcacactgttaaatacccctttgtctatagcctctcatgtcctcatccattgttttggatttatagttccttattagagtaccatgggtctctagtgctttaaattttgccatggtgtgcagagataagtatctctcgaattaattagttgtgcttgctatcttgacactgttggttttatgttaattgcggacaccgcattcaatgg

SEQ ID NO: 29713 - protein, 433 aa, Zea mays subsp. mays
  peptide (1)..(433): Ceres Seq. ID no. 12406528
  misc_feature (203)..(424): Pfam Name: Pfam Description:  alpha/beta hydrolase fold
  misc_feature (70)..(431): NCBI GI NO: 15223941 NR Description: lysophospholipase isolog, putative
  misc_feature (70)..(431): NCBI GI NO: 21536622 NR Description: lysophospholipase isolog, putative
  misc_feature (97)..(432): NCBI GI NO: 18417885 NR Description: lipase-like protein; protein id: At5g16120
  misc_feature (150)..(432): NCBI GI NO: 37530890 NR Description: putative lipase-like protein
  misc_feature (81)..(149): NCBI GI NO: 37530890 NR Description: putative lipase-like protein
  misc_feature (97)..(432): NCBI GI NO: 11358489 NR Description: lipase-like protein - Arabidopsis thaliana
  misc_feature (307)..(433): NCBI GI NO: 34911304 NR Description: P0519D04.21
  misc_feature (193)..(244): NCBI GI NO: 34911304 NR Description: P0519D04.21
  misc_feature (144)..(431): NCBI GI NO: 30695682 NR Description: esterase/lipase/thioesterase family
  misc_feature (140)..(430): NCBI GI NO: 18407407 NR Description: putative phospholipase; protein id: At2g47630
SSQTLTRHKPTCPRARQAGKATREIPSRAERSNTCAEVTAPIDKPAKQPHMPPHMAAISHRIAGSGPRVAVVAPPRPRGRAAVVAGAAAKGAHRERTLEGASDDLRAAAAQCLDWAPARRRVRAAFAPVLPTLDHCLFKMAHNEIQMEENYETNSKGVEIFWKSWLPREGTATKAALFFCHGYGDTCTFFFEGIAKRIAAAGYAVYAMDYPGFGMSYGLHGYIASFDGMVDHVIEQYARIRGMKEVCELPHFLLGQSMGGAVALKVHLKQQQEWDGVLLVAPMCKISEDVTPPAPVLKALSILSCLLPEAKLFPQKDIGDLAFRDPRKRKVAEYNAISYSDQMRLRTAVELLKATKDIESQLEKISSPLLILHGAADMVTDPQVSKFLYEKASTKDKTLKLYEGSYHSILEGEPDDRISTAINDIISWLDSHC

SEQ ID NO: 29714 - protein, 383 aa, Zea mays subsp. mays
  peptide (1)..(383): Ceres Seq. ID no. 12406529
  misc_feature (153)..(374): Pfam Name: Pfam Description:  alpha/beta hydrolase fold
  misc_feature (20)..(381): NCBI GI NO: 15223941 NR Description: lysophospholipase isolog, putative
  misc_feature (20)..(381): NCBI GI NO: 21536622 NR Description: lysophospholipase isolog, putative
  misc_feature (47)..(382): NCBI GI NO: 18417885 NR Description: lipase-like protein; protein id: At5g16120
  misc_feature (100)..(382): NCBI GI NO: 37530890 NR Description: putative lipase-like protein
  misc_feature (31)..(99): NCBI GI NO: 37530890 NR Description: putative lipase-like protein
  misc_feature (47)..(382): NCBI GI NO: 11358489 NR Description: lipase-like protein - Arabidopsis thaliana
  misc_feature (257)..(383): NCBI GI NO: 34911304 NR Description: P0519D04.21
  misc_feature (143)..(194): NCBI GI NO: 34911304 NR Description: P0519D04.21
  misc_feature (94)..(381): NCBI GI NO: 30695682 NR Description: esterase/lipase/thioesterase family
  misc_feature (90)..(380): NCBI GI NO: 18407407 NR Description: putative phospholipase; protein id: At2g47630
MPPHMAAISHRIAGSGPRVAVVAPPRPRGRAAVVAGAAAKGAHRERTLEGASDDLRAAAAQCLDWAPARRRVRAAFAPVLPTLDHCLFKMAHNEIQMEENYETNSKGVEIFWKSWLPREGTATKAALFFCHGYGDTCTFFFEGIAKRIAAAGYAVYAMDYPGFGMSYGLHGYIASFDGMVDHVIEQYARIRGMKEVCELPHFLLGQSMGGAVALKVHLKQQQEWDGVLLVAPMCKISEDVTPPAPVLKALSILSCLLPEAKLFPQKDIGDLAFRDPRKRKVAEYNAISYSDQMRLRTAVELLKATKDIESQLEKISSPLLILHGAADMVTDPQVSKFLYEKASTKDKTLKLYEGSYHSILEGEPDDRISTAINDIISWLDSHC

SEQ ID NO: 29715 - protein, 379 aa, Zea mays subsp. mays
  peptide (1)..(379): Ceres Seq. ID no. 12406530
  misc_feature (149)..(370): Pfam Name: Pfam Description:  alpha/beta hydrolase fold
  misc_feature (16)..(377): NCBI GI NO: 15223941 NR Description: lysophospholipase isolog, putative
  misc_feature (16)..(377): NCBI GI NO: 21536622 NR Description: lysophospholipase isolog, putative
  misc_feature (43)..(378): NCBI GI NO: 18417885 NR Description: lipase-like protein; protein id: At5g16120
  misc_feature (96)..(378): NCBI GI NO: 37530890 NR Description: putative lipase-like protein
  misc_feature (27)..(95): NCBI GI NO: 37530890 NR Description: putative lipase-like protein
  misc_feature (43)..(378): NCBI GI NO: 11358489 NR Description: lipase-like protein - Arabidopsis thaliana
  misc_feature (253)..(379): NCBI GI NO: 34911304 NR Description: P0519D04.21
  misc_feature (139)..(190): NCBI GI NO: 34911304 NR Description: P0519D04.21
  misc_feature (90)..(377): NCBI GI NO: 30695682 NR Description: esterase/lipase/thioesterase family
  misc_feature (86)..(376): NCBI GI NO: 18407407 NR Description: putative phospholipase; protein id: At2g47630
MAAISHRIAGSGPRVAVVAPPRPRGRAAVVAGAAAKGAHRERTLEGASDDLRAAAAQCLDWAPARRRVRAAFAPVLPTLDHCLFKMAHNEIQMEENYETNSKGVEIFWKSWLPREGTATKAALFFCHGYGDTCTFFFEGIAKRIAAAGYAVYAMDYPGFGMSYGLHGYIASFDGMVDHVIEQYARIRGMKEVCELPHFLLGQSMGGAVALKVHLKQQQEWDGVLLVAPMCKISEDVTPPAPVLKALSILSCLLPEAKLFPQKDIGDLAFRDPRKRKVAEYNAISYSDQMRLRTAVELLKATKDIESQLEKISSPLLILHGAADMVTDPQVSKFLYEKASTKDKTLKLYEGSYHSILEGEPDDRISTAINDIISWLDSHC

SEQ ID NO: 29716 - DNA, 1420 bp, Zea mays subsp. mays
  misc_feature (1)..(1420): Ceres Seq. ID no. 12402424
gacccttcgtcccgcatcgtttcctcctcctttttccccgttcgtcccctggattggcgtctacccggcgcgacccggaccgaatcctaagtccgcctgccgccgccgccggctcccgttggaaacgagtttggagtaaagaaaccaaccttgcatctgtgttctgtctgtctatgctgctttgctttggattcacaaaaaaataagccttgcatctcactgacttgagataactatgcctaaggacaggagctcccgcgtttcctctcacgagagccgccgggctcgtgcctccccatacttgtcagcgtctcatggacagagcagttcttcacgccggtcacaagagtctcctgcggccgcggcagcgaagcaagctgcagagtgggaggatgttcggtgctcggtctgcatggaccacccgcacaacgctgtcctgctggtctgctcgtcgcacgagaagggctgccgccccttcatgtgcgacaccagctcgcggcactccaattgctatgaccagtaccggaaggcctccaaggactcctccaaggattcagggacagagtgcagcgagtgccagcagcaggtccagctctcgtgcccgctgtgccgtgggccagtcagcgactgcatcaaggactacgacgcacggaggtacatgaacaccaaggtccggtcctgcaccatggagtcgtgcgagttcaggggtgcctaccaggagctgaggaagcatgctagggtggagcacccagcggcgaggccgatggaggtagaccctgaacggcagcgggattggcgccggatggagcagcagcgggaccttggagacttgatgagcatgctgcgttcagggttcaacgccaacgttgaggacaacagcggcgaacttggagccaccgaagaaggggaagaggaagccgcaaggactccggcctccataacaatggtcttcatcatgccgtctagaggctcaatcatgcagtacttaacagaacgtagcagggcgatcattctggtcagccggaggcgagcaagcagtggcagtggtgatgctgaggccacagcaccagacagcgaggaaggtgatgaccctatgttgccatcggcagaggcgtctgctggttcgcagcgttcttccgaagaagaggctgacggtgaccacgcccaatgacagaagtcagctagcaggaggtgtgccatggcccatggcatcttcttggcctgaagatcccgacctgcttggtatgtgatgctgtatgctgggaagaaaacatggatgcaggtgccatcaagcaatggaaaggaaaaaaaacaattgagtggttgcatctatcttgtctgaatggatttctttttccatgcgttgtaattctctctcatatattatcatatgaaatagattcggccgtatttgcactgc

SEQ ID NO: 29717 - protein, 311 aa, Zea mays subsp. mays
  peptide (1)..(311): Ceres Seq. ID no. 12402425
  misc_feature (1)..(309): NCBI GI NO: 34912600 NR Description: P0046B10.17
  misc_feature (5)..(309): NCBI GI NO: 34912600 NR Description: P0046B10.17
  misc_feature (1)..(205): NCBI GI NO: 15221290 NR Description: unknown protein; protein id: At1g68140
  misc_feature (113)..(247): NCBI GI NO: 15230170 NR Description: unknown protein; protein id: At3g24740
  misc_feature (36)..(112): NCBI GI NO: 15230170 NR Description: unknown protein; protein id: At3g24740
  misc_feature (1)..(201): NCBI GI NO: 18394245 NR Description: expressed protein; protein id: At1g15430
  misc_feature (14)..(201): NCBI GI NO: 5103842 NR Description: F9L1.39 [Arabidopsis thaliana]
  misc_feature (5)..(203): NCBI GI NO: 38344827 NR Description: OSJNBa0064H22.8
  misc_feature (1)..(201): NCBI GI NO: 15220091 NR Description: hypothetical protein; protein id: At1g80220.1
  misc_feature (50)..(205): NCBI GI NO: 25365932 NR Description: unknown protein T32E8.10
MPKDRSSRVSSHESRRARASPYLSASHGQSSSSRRSQESPAAAAAKQAAEWEDVRCSVCMDHPHNAVLLVCSSHEKGCRPFMCDTSSRHSNCYDQYRKASKDSSKDSGTECSECQQQVQLSCPLCRGPVSDCIKDYDARRYMNTKVRSCTMESCEFRGAYQELRKHARVEHPAARPMEVDPERQRDWRRMEQQRDLGDLMSMLRSGFNANVEDNSGELGATEEGEEEAARTPASITMVFIMPSRGSIMQYLTERSRAIILVSRRRASSGSGDAEATAPDSEEGDDPMLPSAEASAGSQRSSEEEADGDHAQ

SEQ ID NO: 29718 - protein, 252 aa, Zea mays subsp. mays
  peptide (1)..(252): Ceres Seq. ID no. 12402426
  misc_feature (1)..(250): NCBI GI NO: 34912600 NR Description: P0046B10.17
  misc_feature (1)..(250): NCBI GI NO: 34912600 NR Description: P0046B10.17
  misc_feature (1)..(146): NCBI GI NO: 15221290 NR Description: unknown protein; protein id: At1g68140
  misc_feature (54)..(188): NCBI GI NO: 15230170 NR Description: unknown protein; protein id: At3g24740
  misc_feature (1)..(53): NCBI GI NO: 15230170 NR Description: unknown protein; protein id: At3g24740
  misc_feature (1)..(142): NCBI GI NO: 18394245 NR Description: expressed protein; protein id: At1g15430
  misc_feature (1)..(142): NCBI GI NO: 5103842 NR Description: F9L1.39 [Arabidopsis thaliana]
  misc_feature (1)..(144): NCBI GI NO: 38344827 NR Description: OSJNBa0064H22.8
  misc_feature (1)..(142): NCBI GI NO: 15220091 NR Description: hypothetical protein; protein id: At1g80220.1
  misc_feature (1)..(146): NCBI GI NO: 25365932 NR Description: unknown protein T32E8.10
MDHPHNAVLLVCSSHEKGCRPFMCDTSSRHSNCYDQYRKASKDSSKDSGTECSECQQQVQLSCPLCRGPVSDCIKDYDARRYMNTKVRSCTMESCEFRGAYQELRKHARVEHPAARPMEVDPERQRDWRRMEQQRDLGDLMSMLRSGFNANVEDNSGELGATEEGEEEAARTPASITMVFIMPSRGSIMQYLTERSRAIILVSRRRASSGSGDAEATAPDSEEGDDPMLPSAEASAGSQRSSEEEADGDHAQ

SEQ ID NO: 29719 - protein, 230 aa, Zea mays subsp. mays
  peptide (1)..(230): Ceres Seq. ID no. 12402427
  misc_feature (1)..(228): NCBI GI NO: 34912600 NR Description: P0046B10.17
  misc_feature (1)..(228): NCBI GI NO: 34912600 NR Description: P0046B10.17
  misc_feature (1)..(124): NCBI GI NO: 15221290 NR Description: unknown protein; protein id: At1g68140
  misc_feature (32)..(166): NCBI GI NO: 15230170 NR Description: unknown protein; protein id: At3g24740
  misc_feature (1)..(31): NCBI GI NO: 15230170 NR Description: unknown protein; protein id: At3g24740
  misc_feature (1)..(120): NCBI GI NO: 18394245 NR Description: expressed protein; protein id: At1g15430
  misc_feature (1)..(120): NCBI GI NO: 5103842 NR Description: F9L1.39 [Arabidopsis thaliana]
  misc_feature (1)..(122): NCBI GI NO: 38344827 NR Description: OSJNBa0064H22.8
  misc_feature (1)..(120): NCBI GI NO: 15220091 NR Description: hypothetical protein; protein id: At1g80220.1
  misc_feature (1)..(124): NCBI GI NO: 25365932 NR Description: unknown protein T32E8.10
MCDTSSRHSNCYDQYRKASKDSSKDSGTECSECQQQVQLSCPLCRGPVSDCIKDYDARRYMNTKVRSCTMESCEFRGAYQELRKHARVEHPAARPMEVDPERQRDWRRMEQQRDLGDLMSMLRSGFNANVEDNSGELGATEEGEEEAARTPASITMVFIMPSRGSIMQYLTERSRAIILVSRRRASSGSGDAEATAPDSEEGDDPMLPSAEASAGSQRSSEEEADGDHAQ

SEQ ID NO: 29720 - DNA, 1296 bp, Zea mays subsp. mays
  misc_feature (1)..(1296): Ceres Seq. ID no. 12401934
atcatcagatcatcgtcatcaaccagcaggtgaccgctagctgtacctgtacgacgtgtgaaacgagtagttaagcatgacggagaggcgcgccggcatggcagtggcggtggcggtggcggtggcgctcctgctgtcttcgtcgttcggcgtggcgtcggcggcggggaggggacgacccaccaagaagacgctgaagccaggggagaagccctcgcccaaatccaagttcttcccgctcagccgcaccaagtttgggcacaagcgaaactacgaggcctcctgcgccgacgagggcgggccggcctgctacgtcggatgccccgctgattgccccaactcctgcctcgtcttctgcgaatactgcctcagcttctgccaatgtgacatcttccccggcacctcctgcggcgacccgcgcttcaccggcggcgacggcaacaccttctacttccacggaagcaaggaccaggacttctgcatcgtctccgacgcgggcctccacatcaacgcccacttcatcggcaaccacaacccggccctcaaccgcgacttcacctgggtgcaggcgctgggggtcaccttcgtcgcagcaggcggcgaccaccaccgcctctacgtcggcgcccgcagggccgcggagtgggacgaggacgaggaccacgtccaggtcacattcgacggcgagcccgtcgacgtggacgccgcccggaacgcgcggtgggcgtccaaggcgctcccggggctctccgtcaggcgcaccaaggacgtgaacgccgtcaccgtggagctggacggcgccttcgccatctccgcggcagccgtgcccgtcaccgacgaggacgaccgggtccaccgctacggcaagacgggccgcgacagcctcgtgcacctcgacctcggcttccagttccataacctcaccgccgacgtcgacggcgtgctgggacagacataccgccccggctacgtcaccaagctggacatcagcgccaagatgcccatcatgggcggcgcgcccaagtacctgtccgagggtctcttctccactgactgcgctgtctcccggttccaccaccgccgcgatgccgccggcgctgccgtcgtcaccacatatgcctcttaagttgcatgccgccatgcatgcatgcatgaggaacatgagaaataatcaacaaatggaggcagcccaacaattacatgtactcctaccctgcaagcaagaaataattaagtggtcattccattgaccaaacattatttatattaattataaggagctcaaccaattaattg

SEQ ID NO: 29721 - protein, 349 aa, Zea mays subsp. mays
  peptide (1)..(349): Ceres Seq. ID no. 12401935
  misc_feature (6)..(349): NCBI GI NO: 34905940 NR Description: similar to root cap protein
  misc_feature (5)..(349): NCBI GI NO: 34905936 NR Description: similar to root cap protein
  misc_feature (47)..(349): NCBI GI NO: 34905930 NR Description: similar to root cap protein
  misc_feature (44)..(349): NCBI GI NO: 34905934 NR Description: similar to root cap protein
  misc_feature (45)..(345): NCBI GI NO: 4514635 NR Description: root cap protein 1 [Zea mays]
  misc_feature (6)..(349): NCBI GI NO: 4514637 NR Description: root cap protein 2 [Zea mays]
  misc_feature (15)..(343): NCBI GI NO: 21741738 NR Description: OSJNBa0073L04.18
  misc_feature (35)..(338): NCBI GI NO: 11994465 NR Description: contains similarity to late embryogenesis abundantprotein~gene_id:MLD14
  misc_feature (35)..(338): NCBI GI NO: 30685319 NR Description: late embryogenesis abundant protein -related
  misc_feature (67)..(337): NCBI GI NO: 7484468 NR Description: late embryonic abundant protein EMB7
MTERRAGMAVAVAVAVALLLSSSFGVASAAGRGRPTKKTLKPGEKPSPKSKFFPLSRTKFGHKRNYEASCADEGGPACYVGCPADCPNSCLVFCEYCLSFCQCDIFPGTSCGDPRFTGGDGNTFYFHGSKDQDFCIVSDAGLHINAHFIGNHNPALNRDFTWVQALGVTFVAAGGDHHRLYVGARRAAEWDEDEDHVQVTFDGEPVDVDAARNARWASKALPGLSVRRTKDVNAVTVELDGAFAISAAAVPVTDEDDRVHRYGKTGRDSLVHLDLGFQFHNLTADVDGVLGQTYRPGYVTKLDISAKMPIMGGAPKYLSEGLFSTDCAVSRFHHRRDAAGAAVVTTYAS

SEQ ID NO: 29722 - protein, 342 aa, Zea mays subsp. mays
  peptide (1)..(342): Ceres Seq. ID no. 12401936
  misc_feature (1)..(342): NCBI GI NO: 34905940 NR Description: similar to root cap protein
  misc_feature (1)..(342): NCBI GI NO: 34905936 NR Description: similar to root cap protein
  misc_feature (40)..(342): NCBI GI NO: 34905930 NR Description: similar to root cap protein
  misc_feature (37)..(342): NCBI GI NO: 34905934 NR Description: similar to root cap protein
  misc_feature (38)..(338): NCBI GI NO: 4514635 NR Description: root cap protein 1 [Zea mays]
  misc_feature (1)..(342): NCBI GI NO: 4514637 NR Description: root cap protein 2 [Zea mays]
  misc_feature (8)..(336): NCBI GI NO: 21741738 NR Description: OSJNBa0073L04.18
  misc_feature (28)..(331): NCBI GI NO: 11994465 NR Description: contains similarity to late embryogenesis abundantprotein~gene_id:MLD14
  misc_feature (28)..(331): NCBI GI NO: 30685319 NR Description: late embryogenesis abundant protein -related
  misc_feature (60)..(330): NCBI GI NO: 7484468 NR Description: late embryonic abundant protein EMB7
MAVAVAVAVALLLSSSFGVASAAGRGRPTKKTLKPGEKPSPKSKFFPLSRTKFGHKRNYEASCADEGGPACYVGCPADCPNSCLVFCEYCLSFCQCDIFPGTSCGDPRFTGGDGNTFYFHGSKDQDFCIVSDAGLHINAHFIGNHNPALNRDFTWVQALGVTFVAAGGDHHRLYVGARRAAEWDEDEDHVQVTFDGEPVDVDAARNARWASKALPGLSVRRTKDVNAVTVELDGAFAISAAAVPVTDEDDRVHRYGKTGRDSLVHLDLGFQFHNLTADVDGVLGQTYRPGYVTKLDISAKMPIMGGAPKYLSEGLFSTDCAVSRFHHRRDAAGAAVVTTYAS

SEQ ID NO: 29723 - DNA, 1037 bp, Zea mays subsp. mays
  misc_feature (1)..(1037): Ceres Seq. ID no. 12402421
gtaaaaacgtgtagtgcaggaggaggggtgggagaagaagaagaaatcaactgggggctgccggacgacaaccactacggcaaggcagtagagatacggcgtctcctcttctgacttggccagcgcaacggcagctagttcaattgaaccagagcgctttatagatagaacaaaaatatatactgtagaaatccatcgagaaacaaccgagaagacctgcggctgcggtgaagagagaactcagtggtgaagaagagggaaaaatcaccatgctggaccatctcgtcggactgctgaagctgcgcgtggtgaggggggtgaacctcgccgtccgcgacctccgatccagcgatccctacgtcgtcgttcgcatcggcaaacagaaattgaagacacgggtggtaaagaagagtgtcaatccggaatgggacgacgaactcaccctctctatcgaagaccctgctgttcctattagactggaagtttttgacaaggacactttcgtcgatgatacaatgggtaatgcagaggtggacatccgcccattagtcgagattgtgaagatgaaactccaggacgttgccgacagaaccgtggtaaagaaactggtgcccaacagacagaactgcctagccgaggagagctcgatatatatatcggaggggaaggtgaagcaagacatggttgtacggctgaggaacgtagagagcggggaaatagagctccagcttcagtggatcgacctccctggctctaagggtgtatgagtggggggcggctatgagctctgccttgccctgctgttttcgcggatctccaactctttttctacttgaaaagaagaactagtggtttgcgtgcgctcgctcgcgtagagctgtcagttgtatgtaagaagttatgattgcgttggcgtttagtaaaatatcgtcagggagatgtatgtgcatgaacatctgagaatcaagactataaaaatgtgtacaatgcatgtactaaaggagtgtttggtttctatagattaatttttagtccct

SEQ ID NO: 29724 - protein, 165 aa, Zea mays subsp. mays
  peptide (1)..(165): Ceres Seq. ID no. 12402422
  misc_feature (9)..(87): Pfam Name: Pfam Description:  C2 domain
  misc_feature (1)..(165): NCBI GI NO: 15221907 NR Description: unknown protein; protein id: At1g48590.1
  misc_feature (1)..(165): NCBI GI NO: 25405940 NR Description: protein T1N15.21 [imported] - Arabidopsis thaliana
  misc_feature (2)..(165): NCBI GI NO: 18409682 NR Description: expressed protein; protein id: At1g70810
  misc_feature (2)..(165): NCBI GI NO: 13430460 NR Description: unknown protein [Arabidopsis thaliana]
  misc_feature (2)..(161): NCBI GI NO: 33146442 NR Description: zinc finger and C2 domain protein-like
  misc_feature (1)..(165): NCBI GI NO: 30684739 NR Description: C2 domain-containing protein
  misc_feature (2)..(165): NCBI GI NO: 15240322 NR Description: putative protein; protein id: At5g37740
  misc_feature (1)..(165): NCBI GI NO: 15219500 NR Description: hypothetical protein; protein id: At1g73580.1
  misc_feature (2)..(162): NCBI GI NO: 15220022 NR Description: unknown protein; protein id: At1g23140.1
  misc_feature (2)..(161): NCBI GI NO: 33146446 NR Description: zinc finger and C2 domain protein-like
MLDHLVGLLKLRVVRGVNLAVRDLRSSDPYVVVRIGKQKLKTRVVKKSVNPEWDDELTLSIEDPAVPIRLEVFDKDTFVDDTMGNAEVDIRPLVEIVKMKLQDVADRTVVKKLVPNRQNCLAEESSIYISEGKVKQDMVVRLRNVESGEIELQLQWIDLPGSKGV

SEQ ID NO: 29725 - protein, 83 aa, Zea mays subsp. mays
  peptide (1)..(83): Ceres Seq. ID no. 12402423
  misc_feature (1)..(83): NCBI GI NO: 15221907 NR Description: unknown protein; protein id: At1g48590.1
  misc_feature (1)..(83): NCBI GI NO: 25405940 NR Description: protein T1N15.21 [imported] - Arabidopsis thaliana
  misc_feature (1)..(83): NCBI GI NO: 18409682 NR Description: expressed protein; protein id: At1g70810
  misc_feature (1)..(83): NCBI GI NO: 13430460 NR Description: unknown protein [Arabidopsis thaliana]
  misc_feature (1)..(79): NCBI GI NO: 33146442 NR Description: zinc finger and C2 domain protein-like
  misc_feature (1)..(83): NCBI GI NO: 30684739 NR Description: C2 domain-containing protein
  misc_feature (1)..(83): NCBI GI NO: 15240322 NR Description: putative protein; protein id: At5g37740
  misc_feature (1)..(83): NCBI GI NO: 15219500 NR Description: hypothetical protein; protein id: At1g73580.1
  misc_feature (1)..(80): NCBI GI NO: 15220022 NR Description: unknown protein; protein id: At1g23140.1
  misc_feature (1)..(79): NCBI GI NO: 33146446 NR Description: zinc finger and C2 domain protein-like
MGNAEVDIRPLVEIVKMKLQDVADRTVVKKLVPNRQNCLAEESSIYISEGKVKQDMVVRLRNVESGEIELQLQWIDLPGSKGV

SEQ ID NO: 29726 - DNA, 782 bp, Zea mays subsp. mays
  misc_feature (1)..(782): Ceres Seq. ID no. 12351274
atgtgtgtgtccaacagctgagtggcatggacatggaccaaaggcttcagtgcatgtttaagagagtccgggagacctacgacgctgcgacagaaggcatcaagacaaactactatggcataaagcatgtgatcgaagccttgctgcctctgcttcaagcttcctccgatgggaggatcgttaacgtctcctctgagttcggcctgctaaggctgatcaacaacgaggagctaaggcaggagctaaacgacgtggagaagctcaccgaggagaggctggacgaggtgctggccgcgtacctgagagacttcgacgccggcgaggtgggggcgcgcgggtggccggtggacttctcggcctacaaggtggccaaggtggccatgaacgcgtacacgaggatcctagcgaggaggcacccggggctgcgcgtcaactgcgcgcaccccggctacgtgagcaccgacatgaccgtccacaccgggcctctcacgcccgagcaaggcgcggccaacgtcgtgaaggtggcgctgatgccggagggcggcccgaccggcgcgtacttcgcgttgggagaggaggcgtcctttgtgtgacgaaagcaccgtcgtcgttaagttcgtcgttgttcgccaactccctgtcagtcgatttctaaatcgacgtacaatgaaatacatcatcgctgcaaactcacaaatgaaaacagttaagggaaccttttgtagcaaaaaaaaaagtggacagaataatgaataatcatgtcaaatatcgcttgagtatct

SEQ ID NO: 29727 - protein, 196 aa, Zea mays subsp. mays
  peptide (1)..(196): Ceres Seq. ID no. 12351275
  misc_feature (4)..(196): NCBI GI NO: 38346774 NR Description: OSJNBa0081C01.25
  misc_feature (4)..(196): NCBI GI NO: 38346769 NR Description: OSJNBa0081C01.20
  misc_feature (4)..(196): NCBI GI NO: 38346768 NR Description: OSJNBa0081C01.19
  misc_feature (4)..(196): NCBI GI NO: 38346772 NR Description: OSJNBa0081C01.23
  misc_feature (5)..(196): NCBI GI NO: 38346767 NR Description: OSJNBa0081C01.18
  misc_feature (24)..(187): NCBI GI NO: 34559416 NR Description: (-)-isopiperitenone reductase [Mentha x piperita]
  misc_feature (24)..(191): NCBI GI NO: 33146492 NR Description: carbonyl reductase -like protein
  misc_feature (20)..(195): NCBI GI NO: 18378884 NR Description: carbonyl reductase, putative; protein id:At1g01800
  misc_feature (20)..(195): NCBI GI NO: 25518668 NR Description: hypothetical protein T1N6
  misc_feature (22)..(195): NCBI GI NO: 15233062 NR Description: putative protein; protein id: At3g61220
VCVQQLSGMDMDQRLQCMFKRVRETYDAATEGIKTNYYGIKHVIEALLPLLQASSDGRIVNVSSEFGLLRLINNEELRQELNDVEKLTEERLDEVLAAYLRDFDAGEVGARGWPVDFSAYKVAKVAMNAYTRILARRHPGLRVNCAHPGYVSTDMTVHTGPLTPEQGAANVVKVALMPEGGPTGAYFALGEEASFV

SEQ ID NO: 29728 - protein, 188 aa, Zea mays subsp. mays
  peptide (1)..(188): Ceres Seq. ID no. 12351276
  misc_feature (1)..(188): NCBI GI NO: 38346774 NR Description: OSJNBa0081C01.25
  misc_feature (1)..(188): NCBI GI NO: 38346769 NR Description: OSJNBa0081C01.20
  misc_feature (1)..(188): NCBI GI NO: 38346768 NR Description: OSJNBa0081C01.19
  misc_feature (1)..(188): NCBI GI NO: 38346772 NR Description: OSJNBa0081C01.23
  misc_feature (1)..(188): NCBI GI NO: 38346767 NR Description: OSJNBa0081C01.18
  misc_feature (16)..(179): NCBI GI NO: 34559416 NR Description: (-)-isopiperitenone reductase [Mentha x piperita]
  misc_feature (16)..(183): NCBI GI NO: 33146492 NR Description: carbonyl reductase -like protein
  misc_feature (12)..(187): NCBI GI NO: 18378884 NR Description: carbonyl reductase, putative; protein id:At1g01800
  misc_feature (12)..(187): NCBI GI NO: 25518668 NR Description: hypothetical protein T1N6
  misc_feature (14)..(187): NCBI GI NO: 15233062 NR Description: putative protein; protein id: At3g61220
MDMDQRLQCMFKRVRETYDAATEGIKTNYYGIKHVIEALLPLLQASSDGRIVNVSSEFGLLRLINNEELRQELNDVEKLTEERLDEVLAAYLRDFDAGEVGARGWPVDFSAYKVAKVAMNAYTRILARRHPGLRVNCAHPGYVSTDMTVHTGPLTPEQGAANVVKVALMPEGGPTGAYFALGEEASFV

SEQ ID NO: 29729 - protein, 186 aa, Zea mays subsp. mays
  peptide (1)..(186): Ceres Seq. ID no. 12351277
  misc_feature (1)..(186): NCBI GI NO: 38346774 NR Description: OSJNBa0081C01.25
  misc_feature (1)..(186): NCBI GI NO: 38346769 NR Description: OSJNBa0081C01.20
  misc_feature (1)..(186): NCBI GI NO: 38346768 NR Description: OSJNBa0081C01.19
  misc_feature (1)..(186): NCBI GI NO: 38346772 NR Description: OSJNBa0081C01.23
  misc_feature (1)..(186): NCBI GI NO: 38346767 NR Description: OSJNBa0081C01.18
  misc_feature (14)..(177): NCBI GI NO: 34559416 NR Description: (-)-isopiperitenone reductase [Mentha x piperita]
  misc_feature (14)..(181): NCBI GI NO: 33146492 NR Description: carbonyl reductase -like protein
  misc_feature (10)..(185): NCBI GI NO: 18378884 NR Description: carbonyl reductase, putative; protein id:At1g01800
  misc_feature (10)..(185): NCBI GI NO: 25518668 NR Description: hypothetical protein T1N6
  misc_feature (12)..(185): NCBI GI NO: 15233062 NR Description: putative protein; protein id: At3g61220
MDQRLQCMFKRVRETYDAATEGIKTNYYGIKHVIEALLPLLQASSDGRIVNVSSEFGLLRLINNEELRQELNDVEKLTEERLDEVLAAYLRDFDAGEVGARGWPVDFSAYKVAKVAMNAYTRILARRHPGLRVNCAHPGYVSTDMTVHTGPLTPEQGAANVVKVALMPEGGPTGAYFALGEEASFV

SEQ ID NO: 29730 - DNA, 1257 bp, Zea mays subsp. mays
  misc_feature (1)..(1257): Ceres Seq. ID no. 12402418
  misc_feature (149)..(149): n is a, c, t, g, unknown, or other
agtcctggctgatccggagcattcactcactgctgctgctcagtgctcgcgtccggctcccaccgctctgcagacgactgcctcctctgtccttccttcccttcccagtggcaggcagaggatctgcagtgcctgccgtccagcgccanccgaccgacccctcctgccgcacagcacagagggaggggggaaacgcaggatcatcagctagcatgggtgcagcagtcaaagaagaagaagttccgcggcgtcaggcagcgccactggggctcctggggtctccgagatcaggcacccgctgctcaagaggagggtgtggctgggcaccttcgagaccgcggaggaggcggcgcgggcgtacgacgaggccgccgtcctcatgagcggccgcaacgccaagaccaacttccccgtactgccctgcggcaggacgcgcggcggcggcggcggcggcggctcgtccggcaacaacaccaacgccagcgccagcaccagcaccagcaacctgtcgcaggtcctcagcgccaagctccgcaggtgctgcaaggcgccgtcgccgtcgctcacctgcctccgcctcgacccggagaggtcccacatcggcgtctggcacaagggcgccggcgcgcgcgccgactccagctgggtcatgaccgtccagctcagcgacaaggacgccgcgccggcgcccagcgccacgtcgtcggccacggccacgacgacgacggctgcctcgcatcctccgcctgccacggtggtggtggtggacgacgaggagaggatcgcgctgcagatgatcgaggagctgctgggcggcggcggcggcccggtctcgcaacaaccgcttgggaatgggatgctccagatcgcggcagcaggcggcggcctcgtcatctgaagaccggctaatgcaacaacggaaattgcattgcatgcatgcatggttcgttcagcaagctacaagtttgatcggccggatcaagtatttggtacacaacaagagtcgtcgaaagtagtgtggttggtgcagaaagcagttaagattgcatcataaatacatatgtatctctattactagctagctacatcagtcaagcttattaggagagagaccatatagtaagtaattaatcttaatcacttcatccctgtgaagctctgtatctattaaaaggcttacttgtatgtatatataagcatacagccctttgtataacatgttatacatgtatcaataatatcaggctatatatatct

SEQ ID NO: 29731 - protein, 172 aa, Zea mays subsp. mays
  peptide (1)..(172): Ceres Seq. ID no. 12402419
  misc_feature (1)..(144): NCBI GI NO: 15218134 NR Description: putative ethylene responsive element
  misc_feature (1)..(144): NCBI GI NO: 21553845 NR Description: putative ethylene responsive element
  misc_feature (1)..(144): NCBI GI NO: 15238976 NR Description: putative protein; protein id: At5g11190.1
  misc_feature (1)..(102): NCBI GI NO: 15239413 NR Description: AP2 domain containing protein
  misc_feature (1)..(153): NCBI GI NO: 30689846 NR Description: AP2 domain transcription factor, putative
  misc_feature (1)..(14): NCBI GI NO: 15238727 NR Description: ethylene-responsive element - like protein
  misc_feature (1)..(14): NCBI GI NO: 18650662 NR Description: ethylene response factor 1
  misc_feature (1)..(16): NCBI GI NO: 38343976 NR Description: OSJNBb0022F16.15
  misc_feature (1)..(44): NCBI GI NO: 38346619 NR Description: OSJNBa0074L08.10
  misc_feature (1)..(11): NCBI GI NO: 34221731 NR Description: putative AP2 domain transcription factor
MSGRNAKTNFPVLPCGRTRGGGGGGGSSGNNTNASASTSTSNLSQVLSAKLRRCCKAPSPSLTCLRLDPERSHIGVWHKGAGARADSSWVMTVQLSDKDAAPAPSATSSATATTTTAASHPPPATVVVVDDEERIALQMIEELLGGGGGPVSQQPLGNGMLQIAAAGGGLVI

SEQ ID NO: 29732 - protein, 126 aa, Zea mays subsp. mays
  peptide (1)..(126): Ceres Seq. ID no. 12402420
  misc_feature (33)..(126): Pfam Name: Pfam Description:  Glycoprotein GG/GX
  misc_feature (14)..(126): NCBI GI NO: 25143299 NR Description: pre-mRNA splicing SR protein related RSR-1 (68
  misc_feature (35)..(126): NCBI GI NO: 9629749 NR Description: 24 [Equine herpesvirus 4]
  misc_feature (33)..(126): NCBI GI NO: 9629749 NR Description: 24 [Equine herpesvirus 4]
  misc_feature (35)..(126): NCBI GI NO: 11360494 NR Description: antifreeze glycopeptide AFGP polyprotein precursor
  misc_feature (53)..(126): NCBI GI NO: 15600253 NR Description: polyhydroxyalkanoate synthesis protein PhaF
  misc_feature (14)..(126): NCBI GI NO: 9629879 NR Description: immediate-early transactivator protein with Znfinger
  misc_feature (20)..(126): NCBI GI NO: 27375632 NR Description: blr0521 [Bradyrhizobium japonicum]
  misc_feature (69)..(126): NCBI GI NO: 25143299 NR Description: pre-mRNA splicing SR protein related RSR-1 (68
  misc_feature (15)..(126): NCBI GI NO: 25989119 NR Description: unknown [Streptomyces aureofaciens]
  misc_feature (35)..(126): NCBI GI NO: 11360494 NR Description: antifreeze glycopeptide AFGP polyprotein precursor
  misc_feature (49)..(49): Xaa is any aa, unknown or other
SWLIRSIHSLLLLSARVRLPPLCRRLPPLSFLPFPVAGRGSAVPAVQRXPTDPSCRTAQREGGNAGSSASMGAAVKEEEVPRRQAAPLGLLGSPRSGTRCSRGGCGWAPSRPRRRRRGRTTRPPSS

SEQ ID NO: 29733 - DNA, 1031 bp, Zea mays subsp. mays
  misc_feature (1)..(1031): Ceres Seq. ID no. 12340881
atctctatctcatcgtcatcattagaaaggccgaagccttctccgttcctcctcgacgcgtctcttccacagccgcaacctctatccctcgtctggtatcgtctctcccacacccctctgccccaacccagaaaaaccctcgaaaagcggcggcggcgcgacatggcggaggtcgaggctccagctgctgcggttgcggcggcgacccctgaggtggcgacggtgaccgagggcggagccgctacggaggcgaagggtccgcataagctgcaccgccagtggaccttctggtacgacatccagtccaagcccaagcccggcgctgcgtggggcacctccctcaaaaaggcgtacaccttcgacaccgtcgaggagttttggggcttgtatgatcatgttttccgtccaagcaagttgcctggaactgctgattttcacctattcaaggctggagtagagccaaaatgggaagacccagagtgtgcaaatggtggtaaatggactgtcccatgcaacagaaagccaacctttgagaccatgtggcttgaaacgttgatggctcttgttggggatcagtttgatgaaacagatgacatttgtggaattgttgctagtgtccgtccaagaggagataagcttgcattgtggactaggactgccagcaatgaagctgtccaggtaaacattggcaagaaatggaaggatgtcatcgactacaatgacaagatcatctacactttccatgacgactcgagaagggataagccaagcagaggtggacggtacaccgtgtaagtcgcacacgaagatggtcgttgttcggactggacagaggctgagagtggagttttgtgctgagatcggcaccagctttcatttaatacagcctcagcttacctgaggcaattttcgcacctgttatgatgttgttttgctctcagataggtttatgtagcacaagaaagatatgttggagacgttgacgattttgtatgcaactaaatttctatcttaatatgccccgattcaac

SEQ ID NO: 29734 - protein, 264 aa, Zea mays subsp. mays
  peptide (1)..(264): Ceres Seq. ID no. 12340882
  misc_feature (60)..(264): Pfam Name: Pfam Description:  Eukaryotic initiation factor 4E
  misc_feature (58)..(264): NCBI GI NO: 6016335 NR Description: EUKARYOTIC TRANSLATION INITIATION FACTOR 4E
  misc_feature (55)..(264): NCBI GI NO: 37535224 NR Description: cap-binding protein p28
  misc_feature (55)..(264): NCBI GI NO: 1352442 NR Description: EUKARYOTIC TRANSLATION INITIATION FACTOR 4E
  misc_feature (55)..(264): NCBI GI NO: 170753 NR Description: initiation factor (iso)4F p28 subunit
  misc_feature (55)..(264): NCBI GI NO: 547713 NR Description: EUKARYOTIC TRANSLATION INITIATION FACTOR 4E
  misc_feature (73)..(264): NCBI GI NO: 32698526 NR Description: eukaryotic translation initiation factor iso4E
  misc_feature (53)..(255): NCBI GI NO: 2209274 NR Description: eukaryotic initiation factor (iso)-4F p28 subunit
  misc_feature (81)..(255): NCBI GI NO: 15238558 NR Description: eIF4Eiso protein (emb|CAA71579
  misc_feature (71)..(264): NCBI GI NO: 6016334 NR Description: EUKARYOTIC TRANSLATION INITIATION FACTOR 4E
  misc_feature (71)..(264): NCBI GI NO: 34905982 NR Description: eukaryotic translation initiation factor 4E
ISISSSSLERPKPSPFLLDASLPQPQPLSLVWYRLSHTPLPQPRKTLEKRRRRDMAEVEAPAAAVAAATPEVATVTEGGAATEAKGPHKLHRQWTFWYDIQSKPKPGAAWGTSLKKAYTFDTVEEFWGLYDHVFRPSKLPGTADFHLFKAGVEPKWEDPECANGGKWTVPCNRKPTFETMWLETLMALVGDQFDETDDICGIVASVRPRGDKLALWTRTASNEAVQVNIGKKWKDVIDYNDKIIYTFHDDSRRDKPSRGGRYTV

SEQ ID NO: 29735 - protein, 210 aa, Zea mays subsp. mays
  peptide (1)..(210): Ceres Seq. ID no. 12340883
  misc_feature (6)..(210): Pfam Name: Pfam Description:  Eukaryotic initiation factor 4E
  misc_feature (4)..(210): NCBI GI NO: 6016335 NR Description: EUKARYOTIC TRANSLATION INITIATION FACTOR 4E
  misc_feature (1)..(210): NCBI GI NO: 37535224 NR Description: cap-binding protein p28
  misc_feature (1)..(210): NCBI GI NO: 1352442 NR Description: EUKARYOTIC TRANSLATION INITIATION FACTOR 4E
  misc_feature (1)..(210): NCBI GI NO: 170753 NR Description: initiation factor (iso)4F p28 subunit
  misc_feature (1)..(210): NCBI GI NO: 547713 NR Description: EUKARYOTIC TRANSLATION INITIATION FACTOR 4E
  misc_feature (19)..(210): NCBI GI NO: 32698526 NR Description: eukaryotic translation initiation factor iso4E
  misc_feature (1)..(201): NCBI GI NO: 2209274 NR Description: eukaryotic initiation factor (iso)-4F p28 subunit
  misc_feature (27)..(201): NCBI GI NO: 15238558 NR Description: eIF4Eiso protein (emb|CAA71579
  misc_feature (17)..(210): NCBI GI NO: 6016334 NR Description: EUKARYOTIC TRANSLATION INITIATION FACTOR 4E
  misc_feature (17)..(210): NCBI GI NO: 34905982 NR Description: eukaryotic translation initiation factor 4E
MAEVEAPAAAVAAATPEVATVTEGGAATEAKGPHKLHRQWTFWYDIQSKPKPGAAWGTSLKKAYTFDTVEEFWGLYDHVFRPSKLPGTADFHLFKAGVEPKWEDPECANGGKWTVPCNRKPTFETMWLETLMALVGDQFDETDDICGIVASVRPRGDKLALWTRTASNEAVQVNIGKKWKDVIDYNDKIIYTFHDDSRRDKPSRGGRYTV

SEQ ID NO: 29736 - DNA, 1958 bp, Zea mays subsp. mays
  misc_feature (1)..(1958): Ceres Seq. ID no. 13492276
aaaccaaaatcatttcatccccggaaccggacgccgaacggcagtgctgcaaaagtccggacaaagctcgcgccgcccaccgcacccgatccgcctcgcccaggcgtgctgccgtccgctcccttctcccgcgccgtcgcctccgcctacgcccgggccgacccgctggacccagcgtgcgccgctccactcggacgcgccgccgccctctcgggttgaggcggaggtgcttggggacccgcccccatggcgagcgccggcaacagcggcagcggggacgacgatgcaggagggaagctcctggcggatcgctaccagaagggcgaggtcctcggcgagggcacgtatggagtcgtcttcaaggccatcgacaccaagactggaaatacagtcgcggtaaagcgaatccggataggaaaggacaagaaggaaggtgtcaacttcactgcgttgagggaaattaaactacttaaggagctgaaagatcctaatattatagagctgattgattgtttcccttacaaggaaaatttgcaccttgtgtttgagtttatggagaccgatctggaagctctcataaaagataagaacataatactctctccagctgacacaaaatcatatgtccagatgatgttaaaaggtctagcgttctgccataagaaatgggtgctacacagggatatgaaaccaaataatttactcattggtgccgatgggcagctcaagcttgctgacttcggtctggcccgtgtgttcgggagtccaggaaggaacttcactcaccaggtctttgcacgttggtaccgggcaccagaattattatttggctcgaagcagtacggatctggggtggatatttgggccgctggatgtatttttgctgaactgcttactcgcagagcctttctccagggttctagtgacattgatcaacttgggaagattttcgcagcacttgggaccccaaaatcttctcaatggcctgacatggtttatcttcctgattatgttgaataccaatatgttgctgcacctccactacgtacgttgtttccaatggccagcgatgatgctttggatcttctgtcaaaaatgcttacctatgatccaaaagcaagaatcagtgctcagcaggctctagaacacaggtacttttcatcgttacctgcaccaacaagaccatcgcagcttccaaggccacgtcggaaaggagatcaagggaataacaagattcctgatctcaacctgcaggatggccctatggtgctctccccgccaagaaagttacgtagggtgacagcgcatgaagggatggaaggtatgcacaggacagataaagtggacgaacatccttctgggatgaggcacaccgatgacatgcccagtcagagttctagaattccaatgtcagttgatgttggggctgtgtttggcacacgacctgcacctaggccaacattgaacagtgcggacaagtctcgtttaaaacggaaacttgatatggatccagagtttggatacgcggagtagaaggaacacatgtttacatgcaccattcttttcttattggggatgttgatttttaaaataagattctgacacaatcaactgagatgttaccgtcatcgcctcacgaagaggaaaactgaagagagattattctaatttatcccgagtcacatagggtattacagctaaccaattccgtaaggcaggctcttgaaaacagtagactcaatgggatattcattagtggagagtgttatggggaattggaggatggaaaagcttgctccatgcgtgtttgtacgtgttttgccaagattgtgctgaagcatctgatctatctactgattctctattttccgtactgtcaattcccgttcttgtatggacagagctttgagcatgttttcagtcagacaccttaggcagtgattcttattgtacaactc

SEQ ID NO: 29737 - protein, 428 aa, Zea mays subsp. mays
  peptide (1)..(428): Ceres Seq. ID no. 13492277
  misc_feature (23)..(304): Pfam Name: Pfam Description:  Protein kinase domain
  misc_feature (7)..(428): NCBI GI NO: 266410 NR Description: CDC2+/CDC28-related protein kinase R2
  misc_feature (17)..(421): NCBI GI NO: 15419985 NR Description: CDK-activating kinase
  misc_feature (17)..(376): NCBI GI NO: 15220917 NR Description: cell division protein kinase, putative
  misc_feature (341)..(421): NCBI GI NO: 15220917 NR Description: cell division protein kinase, putative
  misc_feature (17)..(421): NCBI GI NO: 15219522 NR Description: cell division protein kinase, putative
  misc_feature (14)..(356): NCBI GI NO: 15219730 NR Description: cell division protein kinase, putative
  misc_feature (17)..(319): NCBI GI NO: 13529020 NR Description: cyclin-dependent kinase 7
  misc_feature (17)..(319): NCBI GI NO: 4502743 NR Description: cyclin-dependent kinase 7
  misc_feature (17)..(319): NCBI GI NO: 33304107 NR Description: cyclin-dependent kinase 7 [synthetic construct]
  misc_feature (17)..(319): NCBI GI NO: 2125816 NR Description: serine/threonine protein kinase [Homo sapiens]
MASAGNSGSGDDDAGGKLLADRYQKGEVLGEGTYGVVFKAIDTKTGNTVAVKRIRIGKDKKEGVNFTALREIKLLKELKDPNIIELIDCFPYKENLHLVFEFMETDLEALIKDKNIILSPADTKSYVQMMLKGLAFCHKKWVLHRDMKPNNLLIGADGQLKLADFGLARVFGSPGRNFTHQVFARWYRAPELLFGSKQYGSGVDIWAAGCIFAELLTRRAFLQGSSDIDQLGKIFAALGTPKSSQWPDMVYLPDYVEYQYVAAPPLRTLFPMASDDALDLLSKMLTYDPKARISAQQALEHRYFSSLPAPTRPSQLPRPRRKGDQGNNKIPDLNLQDGPMVLSPPRKLRRVTAHEGMEGMHRTDKVDEHPSGMRHTDDMPSQSSRIPMSVDVGAVFGTRPAPRPTLNSADKSRLKRKLDMDPEFGYAE

SEQ ID NO: 29738 - protein, 326 aa, Zea mays subsp. mays
  peptide (1)..(326): Ceres Seq. ID no. 13492278
  misc_feature (1)..(202): Pfam Name: Pfam Description:  Protein kinase domain
  misc_feature (1)..(326): NCBI GI NO: 266410 NR Description: CDC2+/CDC28-related protein kinase R2
  misc_feature (1)..(319): NCBI GI NO: 15419985 NR Description: CDK-activating kinase
  misc_feature (1)..(274): NCBI GI NO: 15220917 NR Description: cell division protein kinase, putative
  misc_feature (239)..(319): NCBI GI NO: 15220917 NR Description: cell division protein kinase, putative
  misc_feature (1)..(319): NCBI GI NO: 15219522 NR Description: cell division protein kinase, putative
  misc_feature (1)..(254): NCBI GI NO: 15219730 NR Description: cell division protein kinase, putative
  misc_feature (1)..(217): NCBI GI NO: 13529020 NR Description: cyclin-dependent kinase 7
  misc_feature (1)..(217): NCBI GI NO: 4502743 NR Description: cyclin-dependent kinase 7
  misc_feature (1)..(217): NCBI GI NO: 33304107 NR Description: cyclin-dependent kinase 7 [synthetic construct]
  misc_feature (1)..(217): NCBI GI NO: 2125816 NR Description: serine/threonine protein kinase [Homo sapiens]
METDLEALIKDKNIILSPADTKSYVQMMLKGLAFCHKKWVLHRDMKPNNLLIGADGQLKLADFGLARVFGSPGRNFTHQVFARWYRAPELLFGSKQYGSGVDIWAAGCIFAELLTRRAFLQGSSDIDQLGKIFAALGTPKSSQWPDMVYLPDYVEYQYVAAPPLRTLFPMASDDALDLLSKMLTYDPKARISAQQALEHRYFSSLPAPTRPSQLPRPRRKGDQGNNKIPDLNLQDGPMVLSPPRKLRRVTAHEGMEGMHRTDKVDEHPSGMRHTDDMPSQSSRIPMSVDVGAVFGTRPAPRPTLNSADKSRLKRKLDMDPEFGYAE

SEQ ID NO: 29739 - protein, 300 aa, Zea mays subsp. mays
  peptide (1)..(300): Ceres Seq. ID no. 13492279
  misc_feature (1)..(176): Pfam Name: Pfam Description:  Protein kinase domain
  misc_feature (1)..(300): NCBI GI NO: 266410 NR Description: CDC2+/CDC28-related protein kinase R2
  misc_feature (1)..(293): NCBI GI NO: 15419985 NR Description: CDK-activating kinase
  misc_feature (1)..(248): NCBI GI NO: 15220917 NR Description: cell division protein kinase, putative
  misc_feature (213)..(293): NCBI GI NO: 15220917 NR Description: cell division protein kinase, putative
  misc_feature (1)..(293): NCBI GI NO: 15219522 NR Description: cell division protein kinase, putative
  misc_feature (1)..(228): NCBI GI NO: 15219730 NR Description: cell division protein kinase, putative
  misc_feature (1)..(191): NCBI GI NO: 13529020 NR Description: cyclin-dependent kinase 7
  misc_feature (1)..(191): NCBI GI NO: 4502743 NR Description: cyclin-dependent kinase 7
  misc_feature (1)..(191): NCBI GI NO: 33304107 NR Description: cyclin-dependent kinase 7 [synthetic construct]
  misc_feature (1)..(191): NCBI GI NO: 2125816 NR Description: serine/threonine protein kinase [Homo sapiens]
MMLKGLAFCHKKWVLHRDMKPNNLLIGADGQLKLADFGLARVFGSPGRNFTHQVFARWYRAPELLFGSKQYGSGVDIWAAGCIFAELLTRRAFLQGSSDIDQLGKIFAALGTPKSSQWPDMVYLPDYVEYQYVAAPPLRTLFPMASDDALDLLSKMLTYDPKARISAQQALEHRYFSSLPAPTRPSQLPRPRRKGDQGNNKIPDLNLQDGPMVLSPPRKLRRVTAHEGMEGMHRTDKVDEHPSGMRHTDDMPSQSSRIPMSVDVGAVFGTRPAPRPTLNSADKSRLKRKLDMDPEFGYAE

SEQ ID NO: 29740 - DNA, 1285 bp, Zea mays subsp. mays
  misc_feature (1)..(1285): Ceres Seq. ID no. 12408603
aactagacggaccagaggacgctgccacactatagatcccgtgcttggctgtacaagaacaaccgcactgatgctaccgaccactggtgtccgattaagcagctcatttctaagaagccgacccaggccagccgatatcgagcaccaacgacacaccccattgacgtacagctatgatgcggccgacgtcgacccttgctatggtcgtgccgtcgctcgctgtagccatcctctgcatcctagtccggtccgcctccgcggagttctggctcgacgagttcaccacggacggcgacgtccgcagagactacgaccgttctggccggcaggtggcgtcgcttgtcctcgaccagcgttctggcgctggcttcaactccacgcgcaagtacctcttcggcgagttcagcgtggagatgaagctcgtcggcggcaactccgctgggactgtcacctccttctacctgacgtccggcgagggcgacgagcacgacgagatcgacatggagttcatgggcaactccagcggctccccgacggtgctcaacacgaacgtgtgggccaacggcgacggcaagaaggagcaccagttctacctgtggttcgacccggccgccgacttccacaaatacaagatcgtctggaacgacaagaacatcatcttccaggtggacgacgtgacggtgcgcgtcttcaagcgctacgatgacctgccgtacccggacgccaagcccatggcggtgcacgccacgctgtgggacggcagctactgggccacgcgcaagggcgaggtcaagatcgactggtccagcgcgcccttcgtcgtctcctaccgagactacaccgccaacgcctgcgccgtcgacggccggaacggcggcggcagctcgtcgtgccccgccggtgccaacgagtggatggacaggcagtccgacgacaccgaccgtctcaccgtggcttgggcgcgccggaactgcttgcagtacaactactgcgatgacgggtggcgcttcccgcaggggttccccggagagtgcgcccgcaactgatccaccatctgccctgcagtcgcgagtctccaagtctcgccggcctcatcgcatcctcttaccgcagatataggcatactagatcgagttcattcttggattttatgttcttgtaattgtcttattgtacgtacgtacatcgtctcttccgactcacaaagagcccagcagcgtgcgtcctggatctggatgcatatcgaaggtactagttctgtgacttctaaaagatctttttttct

SEQ ID NO: 29741 - protein, 290 aa, Zea mays subsp. mays
  peptide (1)..(290): Ceres Seq. ID no. 12408604
  misc_feature (34)..(211): Pfam Name: Pfam Description:  Glycosyl hydrolases family 16
  misc_feature (8)..(289): NCBI GI NO: 40253521 NR Description: putative end-xyloglucan transferase
  misc_feature (1)..(289): NCBI GI NO: 7447410 NR Description: xyloglucan endo-1,4-beta-D-glucanase (EC 3
  misc_feature (14)..(289): NCBI GI NO: 14330334 NR Description: Xet2 protein [Festuca pratensis]
  misc_feature (2)..(289): NCBI GI NO: 7447415 NR Description: xyloglucan endotransglycosylase (EC 2
  misc_feature (8)..(259): NCBI GI NO: 7447411 NR Description: end-xyloglucan transferase (EC 2.4.1.-) - rice
  misc_feature (1)..(288): NCBI GI NO: 32489753 NR Description: OSJNBb0015N08.5
  misc_feature (31)..(287): NCBI GI NO: 8886865 NR Description: xyloglucan endotransglycosylase XET1
  misc_feature (23)..(287): NCBI GI NO: 29500891 NR Description: putative xyloglucan endotransglycosylase
  misc_feature (14)..(287): NCBI GI NO: 19911573 NR Description: syringolide-induced protein 19-1-5 [Glycine max]
  misc_feature (14)..(288): NCBI GI NO: 8886867 NR Description: xyloglucan endotransglycosylase XET2
MMRPTSTLAMVVPSLAVAILCILVRSASAEFWLDEFTTDGDVRRDYDRSGRQVASLVLDQRSGAGFNSTRKYLFGEFSVEMKLVGGNSAGTVTSFYLTSGEGDEHDEIDMEFMGNSSGSPTVLNTNVWANGDGKKEHQFYLWFDPAADFHKYKIVWNDKNIIFQVDDVTVRVFKRYDDLPYPDAKPMAVHATLWDGSYWATRKGEVKIDWSSAPFVVSYRDYTANACAVDGRNGGGSSSCPAGANEWMDRQSDDTDRLTVAWARRNCLQYNYCDDGWRFPQGFPGECARN

SEQ ID NO: 29742 - protein, 289 aa, Zea mays subsp. mays
  peptide (1)..(289): Ceres Seq. ID no. 12408605
  misc_feature (33)..(210): Pfam Name: Pfam Description:  Glycosyl hydrolases family 16
  misc_feature (7)..(288): NCBI GI NO: 40253521 NR Description: putative end-xyloglucan transferase
  misc_feature (1)..(288): NCBI GI NO: 7447410 NR Description: xyloglucan endo-1,4-beta-D-glucanase (EC 3
  misc_feature (13)..(288): NCBI GI NO: 14330334 NR Description: Xet2 protein [Festuca pratensis]
  misc_feature (1)..(288): NCBI GI NO: 7447415 NR Description: xyloglucan endotransglycosylase (EC 2
  misc_feature (7)..(258): NCBI GI NO: 7447411 NR Description: end-xyloglucan transferase (EC 2.4.1.-) - rice
  misc_feature (1)..(287): NCBI GI NO: 32489753 NR Description: OSJNBb0015N08.5
  misc_feature (30)..(286): NCBI GI NO: 8886865 NR Description: xyloglucan endotransglycosylase XET1
  misc_feature (22)..(286): NCBI GI NO: 29500891 NR Description: putative xyloglucan endotransglycosylase
  misc_feature (13)..(286): NCBI GI NO: 19911573 NR Description: syringolide-induced protein 19-1-5 [Glycine max]
  misc_feature (13)..(287): NCBI GI NO: 8886867 NR Description: xyloglucan endotransglycosylase XET2
MRPTSTLAMVVPSLAVAILCILVRSASAEFWLDEFTTDGDVRRDYDRSGRQVASLVLDQRSGAGFNSTRKYLFGEFSVEMKLVGGNSAGTVTSFYLTSGEGDEHDEIDMEFMGNSSGSPTVLNTNVWANGDGKKEHQFYLWFDPAADFHKYKIVWNDKNIIFQVDDVTVRVFKRYDDLPYPDAKPMAVHATLWDGSYWATRKGEVKIDWSSAPFVVSYRDYTANACAVDGRNGGGSSSCPAGANEWMDRQSDDTDRLTVAWARRNCLQYNYCDDGWRFPQGFPGECARN

SEQ ID NO: 29743 - protein, 281 aa, Zea mays subsp. mays
  peptide (1)..(281): Ceres Seq. ID no. 12408606
  misc_feature (25)..(202): Pfam Name: Pfam Description:  Glycosyl hydrolases family 16
  misc_feature (1)..(280): NCBI GI NO: 40253521 NR Description: putative end-xyloglucan transferase
  misc_feature (1)..(280): NCBI GI NO: 7447410 NR Description: xyloglucan endo-1,4-beta-D-glucanase (EC 3
  misc_feature (5)..(280): NCBI GI NO: 14330334 NR Description: Xet2 protein [Festuca pratensis]
  misc_feature (1)..(280): NCBI GI NO: 7447415 NR Description: xyloglucan endotransglycosylase (EC 2
  misc_feature (1)..(250): NCBI GI NO: 7447411 NR Description: end-xyloglucan transferase (EC 2.4.1.-) - rice
  misc_feature (1)..(279): NCBI GI NO: 32489753 NR Description: OSJNBb0015N08.5
  misc_feature (22)..(278): NCBI GI NO: 8886865 NR Description: xyloglucan endotransglycosylase XET1
  misc_feature (14)..(278): NCBI GI NO: 29500891 NR Description: putative xyloglucan endotransglycosylase
  misc_feature (5)..(278): NCBI GI NO: 19911573 NR Description: syringolide-induced protein 19-1-5 [Glycine max]
  misc_feature (5)..(279): NCBI GI NO: 8886867 NR Description: xyloglucan endotransglycosylase XET2
MVVPSLAVAILCILVRSASAEFWLDEFTTDGDVRRDYDRSGRQVASLVLDQRSGAGFNSTRKYLFGEFSVEMKLVGGNSAGTVTSFYLTSGEGDEHDEIDMEFMGNSSGSPTVLNTNVWANGDGKKEHQFYLWFDPAADFHKYKIVWNDKNIIFQVDDVTVRVFKRYDDLPYPDAKPMAVHATLWDGSYWATRKGEVKIDWSSAPFVVSYRDYTANACAVDGRNGGGSSSCPAGANEWMDRQSDDTDRLTVAWARRNCLQYNYCDDGWRFPQGFPGECARN

SEQ ID NO: 29744 - DNA, 1990 bp, Zea mays subsp. mays
  misc_feature (1)..(1990): Ceres Seq. ID no. 12372870
gttccaggtcgtggtctttgccaaattcccacgcccctgcccaccctgcccgaatcctctcgccctttacccccgcccgcgaccccattcacactctcgctgctccactccgctccgctcagctcgtcgggacgcgcccccgcctcccatcccatgcccgcccccgcgctcgtcggaggccgctcgcggcggcctcccatcccgccgcgctgacgagagggcctctcggtgggggcgcttcgggtgttcattttgtccgttcggggaaggggagtgcggcgatggggaagcagcaggaggggaagcggcggcgcggggagaaggacgggcagcggaaggggagggggaagacagctgcagcggcggtgccggaggacgcggcgccagtggccgggtgctggatccgcttcccgcgcctccgcggctgcatgccgtcgcgcgccaaggtcgactcctccaccagcgcgcgtggcggcggccgggaaaccaaaccatctactgatgatgcttgccaggaccaatcagtaccaccagcctctggttccgcaacaaccagtaacactggaagtatctcaccttcttccatagttggagaggagctaaaactagctttccaactgcgtagatttacttttagtgaactgaaatgtgccacgagaaacttccgacctgagagtcttcttggcgagggaggttttggctgtgtctttaaaggatggattgaggagaatggaactgctcctgttaagccaggcaccggattaactgttgctgtcaagacactcaaccatgatgggttgcaggggcataaagagtgggtggcagaagttgattttcttggaaaccttcagcatccacatctagtgaaattggttggctactgcattgaagatgaccagaggttgcttgtgtatgaatttatgccccgtggaagtttggagaatcatctttttagaaagtcattgcctctaccatgggccattagaatgaaaattgctcttggtgctgcgaaaagcctcgcttttcttcatgaagaagctgaaagaccagtaatctatcgggacttcaaaacctccaatattcttttagatgcggactataacgcaaaactctctgattttggacttgctaaagatggccctgagggtgataaaacacatgtgtcaactagggtcatgggaacatatggatatgctgcacctgaatatgtaatgacaggtcacctgacatcgaagagtgacgtatatagctttggagttgtactactagagatgatgactggtagaaggtcaatggacaagaacaggccaaacggagaacacaacctggttgaatgggcacgcccttatctgggagaaagacgcagattctataagcttgtagaccctcgtttggatgggaacttctccataaaaggcgcccagaagacggctcagctggcccatgcctgcctcagccgtgaccccaaggctaggcctctgatgagccaggtggtggaggtgctgaagcctctccagaacctcaaggacatggccagctcttcctactacttccagtccatgcaacatgagcggcgcacagcacttgccaacccatatggcagtcaaagcatgaaagcgcagagcacctttgcgcggaacgggcagcagcccatgaggagcctctcgtatggccctcatgcttccccgtatcgccagtcgccaaggcttgacagcaagcggcaatgagtcatggtgcttgtctgtcgaccataacatattttcaagactgaagttgtaaccagaactggtgtatgaactcagccatccaacaagcatctgagctatctattattgtggatgaagcagcaacattgattcgaatttgcatatcatctgcgagtgaatttttttctctcttgttatcgcttacattttagctgtactgtctttacggctctagataccttgacttgaaaggtggaactaaacagggttttgatcggtctttg

SEQ ID NO: 29745 - protein, 574 aa, Zea mays subsp. mays
  peptide (1)..(574): Ceres Seq. ID no. 12372871
  misc_feature (94)..(568): NCBI GI NO: 34912198 NR Description: putative protein kinase
  misc_feature (81)..(567): NCBI GI NO: 15242204 NR Description: serine/threonine specific protein kinase -like
  misc_feature (142)..(562): NCBI GI NO: 28804505 NR Description: serine/threonine protein kinase [Aster tripolium]
  misc_feature (94)..(567): NCBI GI NO: 15232085 NR Description: putative protein kinase; protein id: At3g01300
  misc_feature (94)..(567): NCBI GI NO: 21592646 NR Description: putative protein kinase [Arabidopsis thaliana]
  misc_feature (106)..(572): NCBI GI NO: 15233058 NR Description: protein kinase, putative; protein id: At3g28690.1
  misc_feature (106)..(572): NCBI GI NO: 9294282 NR Description: protein kinase [Arabidopsis thaliana]
  misc_feature (131)..(523): NCBI GI NO: 34898434 NR Description: ESTs C98382
  misc_feature (163)..(545): NCBI GI NO: 14719339 NR Description: putative protein kinase [Oryza sativa]
  misc_feature (181)..(558): NCBI GI NO: 34906046 NR Description: putative serine/threonine-specific protein kinase
SRSWSLPNSHAPAHPARILSPFTPARDPIHTLAAPLRSAQLVGTRPRLPSHARPRARRRPLAAASHPAALTRGPLGGGASGVHFVRSGKGSAAMGKQQEGKRRRGEKDGQRKGRGKTAAAAVPEDAAPVAGCWIRFPRLRGCMPSRAKVDSSTSARGGGRETKPSTDDACQDQSVPPASGSATTSNTGSISPSSIVGEELKLAFQLRRFTFSELKCATRNFRPESLLGEGGFGCVFKGWIEENGTAPVKPGTGLTVAVKTLNHDGLQGHKEWVAEVDFLGNLQHPHLVKLVGYCIEDDQRLLVYEFMPRGSLENHLFRKSLPLPWAIRMKIALGAAKSLAFLHEEAERPVIYRDFKTSNILLDADYNAKLSDFGLAKDGPEGDKTHVSTRVMGTYGYAAPEYVMTGHLTSKSDVYSFGVVLLEMMTGRRSMDKNRPNGEHNLVEWARPYLGERRRFYKLVDPRLDGNFSIKGAQKTAQLAHACLSRDPKARPLMSQVVEVLKPLQNLKDMASSSYYFQSMQHERRTALANPYGSQSMKAQSTFARNGQQPMRSLSYGPHASPYRQSPRLDSKRQ

SEQ ID NO: 29746 - protein, 481 aa, Zea mays subsp. mays
  peptide (1)..(481): Ceres Seq. ID no. 12372872
  misc_feature (1)..(475): NCBI GI NO: 34912198 NR Description: putative protein kinase
  misc_feature (1)..(474): NCBI GI NO: 15242204 NR Description: serine/threonine specific protein kinase -like
  misc_feature (49)..(469): NCBI GI NO: 28804505 NR Description: serine/threonine protein kinase [Aster tripolium]
  misc_feature (1)..(474): NCBI GI NO: 15232085 NR Description: putative protein kinase; protein id: At3g01300
  misc_feature (1)..(474): NCBI GI NO: 21592646 NR Description: putative protein kinase [Arabidopsis thaliana]
  misc_feature (13)..(479): NCBI GI NO: 15233058 NR Description: protein kinase, putative; protein id: At3g28690.1
  misc_feature (13)..(479): NCBI GI NO: 9294282 NR Description: protein kinase [Arabidopsis thaliana]
  misc_feature (38)..(430): NCBI GI NO: 34898434 NR Description: ESTs C98382
  misc_feature (70)..(452): NCBI GI NO: 14719339 NR Description: putative protein kinase [Oryza sativa]
  misc_feature (88)..(465): NCBI GI NO: 34906046 NR Description: putative serine/threonine-specific protein kinase
MGKQQEGKRRRGEKDGQRKGRGKTAAAAVPEDAAPVAGCWIRFPRLRGCMPSRAKVDSSTSARGGGRETKPSTDDACQDQSVPPASGSATTSNTGSISPSSIVGEELKLAFQLRRFTFSELKCATRNFRPESLLGEGGFGCVFKGWIEENGTAPVKPGTGLTVAVKTLNHDGLQGHKEWVAEVDFLGNLQHPHLVKLVGYCIEDDQRLLVYEFMPRGSLENHLFRKSLPLPWAIRMKIALGAAKSLAFLHEEAERPVIYRDFKTSNILLDADYNAKLSDFGLAKDGPEGDKTHVSTRVMGTYGYAAPEYVMTGHLTSKSDVYSFGVVLLEMMTGRRSMDKNRPNGEHNLVEWARPYLGERRRFYKLVDPRLDGNFSIKGAQKTAQLAHACLSRDPKARPLMSQVVEVLKPLQNLKDMASSSYYFQSMQHERRTALANPYGSQSMKAQSTFARNGQQPMRSLSYGPHASPYRQSPRLDSKRQ

SEQ ID NO: 29747 - protein, 432 aa, Zea mays subsp. mays
  peptide (1)..(432): Ceres Seq. ID no. 12372873
  misc_feature (1)..(426): NCBI GI NO: 34912198 NR Description: putative protein kinase
  misc_feature (1)..(425): NCBI GI NO: 15242204 NR Description: serine/threonine specific protein kinase -like
  misc_feature (1)..(420): NCBI GI NO: 28804505 NR Description: serine/threonine protein kinase [Aster tripolium]
  misc_feature (1)..(425): NCBI GI NO: 15232085 NR Description: putative protein kinase; protein id: At3g01300
  misc_feature (1)..(425): NCBI GI NO: 21592646 NR Description: putative protein kinase [Arabidopsis thaliana]
  misc_feature (1)..(430): NCBI GI NO: 15233058 NR Description: protein kinase, putative; protein id: At3g28690.1
  misc_feature (1)..(430): NCBI GI NO: 9294282 NR Description: protein kinase [Arabidopsis thaliana]
  misc_feature (1)..(381): NCBI GI NO: 34898434 NR Description: ESTs C98382
  misc_feature (21)..(403): NCBI GI NO: 14719339 NR Description: putative protein kinase [Oryza sativa]
  misc_feature (39)..(416): NCBI GI NO: 34906046 NR Description: putative serine/threonine-specific protein kinase
MPSRAKVDSSTSARGGGRETKPSTDDACQDQSVPPASGSATTSNTGSISPSSIVGEELKLAFQLRRFTFSELKCATRNFRPESLLGEGGFGCVFKGWIEENGTAPVKPGTGLTVAVKTLNHDGLQGHKEWVAEVDFLGNLQHPHLVKLVGYCIEDDQRLLVYEFMPRGSLENHLFRKSLPLPWAIRMKIALGAAKSLAFLHEEAERPVIYRDFKTSNILLDADYNAKLSDFGLAKDGPEGDKTHVSTRVMGTYGYAAPEYVMTGHLTSKSDVYSFGVVLLEMMTGRRSMDKNRPNGEHNLVEWARPYLGERRRFYKLVDPRLDGNFSIKGAQKTAQLAHACLSRDPKARPLMSQVVEVLKPLQNLKDMASSSYYFQSMQHERRTALANPYGSQSMKAQSTFARNGQQPMRSLSYGPHASPYRQSPRLDSKRQ

SEQ ID NO: 29748 - DNA, 750 bp, Zea mays subsp. mays
  misc_feature (1)..(750): Ceres Seq. ID no. 12356564
aatcaccaatcagtcagtcacagctcacagcaaacaccgcgaagccgcccccgctcccaaacccgaccgagcaaagcgcaaagccccccaaccgcggatcaatccgcagcatcgatggcgcccaaggcggagaaaaagccggcggcgaagaagcccgcggaggaggagcccgcgaccgagaaggcggagaaggctccggcagggaagaagccgaaggcggagaaacgcctccccgcgggcaagtccggcgccggcgagggcaagaagggcaagaagaaagccaagaagagcgtggagacctacaagatctacatcttcaaggtgctcaagcaggtgcaccccgacatcggcatctcgtccaaggccatgtccatcatgaattccttcatcaacgacatcttcgagaagctcgccgcggaggccgccaagctcgcccgctacaacaagaagcccaccatcacctcccgcgagatccagacctccgtccgcctcgtcctacccggcgagctcgccaagcacgccgtctctgaaggcacaaaggcggtcaccaagttcacttcgtcttagattggttgccttccctctcgtttgtactggtgtctggtagtagatctcatctagttgggggtgctgttgctagtcggtcgtgggtccctttggtatgattggccctgttcaatgggtttgcaagtgattagtttgtacatggttgtagtagatctcgtttcagctgtgattctttattactgc

SEQ ID NO: 29749 - protein, 188 aa, Zea mays subsp. mays
  peptide (1)..(188): Ceres Seq. ID no. 12356565
  misc_feature (67)..(187): Pfam Name: Pfam Description:  Core histone H2A/H2B/H3/H4
  misc_feature (39)..(188): NCBI GI NO: 399853 NR Description: Histone H2B.1
  misc_feature (39)..(188): NCBI GI NO: 3913804 NR Description: Histone H2B.3
  misc_feature (39)..(188): NCBI GI NO: 122022 NR Description: Histone H2B
  misc_feature (39)..(188): NCBI GI NO: 34895908 NR Description: putative histone H2B
  misc_feature (39)..(188): NCBI GI NO: 34895904 NR Description: putative histone H2B
  misc_feature (23)..(187): NCBI GI NO: 1708103 NR Description: Histone H2B-I
  misc_feature (71)..(188): NCBI GI NO: 38512027 NR Description: Hist1h2bp protein [Mus musculus]
  misc_feature (67)..(188): NCBI GI NO: 39595176 NR Description: Hypothetical protein CBG03777
  misc_feature (30)..(185): NCBI GI NO: 15223150 NR Description: histone H2B, putative; protein id: At1g08170.1
NHQSVSHSSQQTPRSRPRSQTRPSKAQSPPTADQSAASMAPKAEKKPAAKKPAEEEPATEKAEKAPAGKKPKAEKRLPAGKSGAGEGKKGKKKAKKSVETYKIYIFKVLKQVHPDIGISSKAMSIMNSFINDIFEKLAAEAAKLARYNKKPTITSREIQTSVRLVLPGELAKHAVSEGTKAVTKFTSS

SEQ ID NO: 29750 - protein, 175 aa, Zea mays subsp. mays
  peptide (1)..(175): Ceres Seq. ID no. 12356566
  misc_feature (1)..(77): Pfam Name: Pfam Description:  Glycoprotein GG/GX
  misc_feature (68)..(175): NCBI GI NO: 17505204 NR Description: histone 1, H2bc; H2B histone family, member S
SPISQSQLTANTAKPPPLPNPTEQSAKPPNRGSIRSIDGAQGGEKAGGEEARGGGARDREGGEGSGREEAEGGETPPRGQVRRRRGQEGQEESQEERGDLQDLHLQGAQAGAPRHRHLVQGHVHHEFLHQRHLREARRGGRQARPLQQEAHHHLPRDPDLRPPRPTRRARQARRL

SEQ ID NO: 29751 - protein, 150 aa, Zea mays subsp. mays
  peptide (1)..(150): Ceres Seq. ID no. 12356567
  misc_feature (29)..(149): Pfam Name: Pfam Description:  Core histone H2A/H2B/H3/H4
  misc_feature (1)..(150): NCBI GI NO: 399853 NR Description: Histone H2B.1
  misc_feature (1)..(150): NCBI GI NO: 3913804 NR Description: Histone H2B.3
  misc_feature (1)..(150): NCBI GI NO: 122022 NR Description: Histone H2B
  misc_feature (1)..(150): NCBI GI NO: 34895908 NR Description: putative histone H2B
  misc_feature (1)..(150): NCBI GI NO: 34895904 NR Description: putative histone H2B
  misc_feature (1)..(149): NCBI GI NO: 1708103 NR Description: Histone H2B-I
  misc_feature (33)..(150): NCBI GI NO: 38512027 NR Description: Hist1h2bp protein [Mus musculus]
  misc_feature (29)..(150): NCBI GI NO: 39595176 NR Description: Hypothetical protein CBG03777
  misc_feature (1)..(147): NCBI GI NO: 15223150 NR Description: histone H2B, putative; protein id: At1g08170.1
MAPKAEKKPAAKKPAEEEPATEKAEKAPAGKKPKAEKRLPAGKSGAGEGKKGKKKAKKSVETYKIYIFKVLKQVHPDIGISSKAMSIMNSFINDIFEKLAAEAAKLARYNKKPTITSREIQTSVRLVLPGELAKHAVSEGTKAVTKFTSS

SEQ ID NO: 29752 - DNA, 1556 bp, Zea mays subsp. mays
  misc_feature (1)..(1556): Ceres Seq. ID no. 12343265
ctaatcgaaaaattctagaattgacgaaggtggctgtgccgagttctccacaccgctggagacttccaggtgcttcaggaaaccgagggggcgttgagataggtaaaaaaaaggaactccggcgaggtcgcccccggtagtggccggtgatgagttcgctcgggctccggctccggcttcggcgacctggagcgaggagttcggagatgcagtcttccagcgctcaagcagttttcgacttcgtctcaccgcttcccgcagactcctgagaggaaatttgtgacaaaaatatctgctctggaaatttgtaatgagattgtgaatggccttctacaatctgactctgctccccttcggttattagatgatcctgagaaatgaaccattgtggagaagttgcaagaagaaattgcttaggacaactaacatctgaggcatccaagcaggatttgtgaagcaacgaacacaacgcgcgccaaggcgcgcataagttactagttcgaaaaacaacaacgacctcgccttcttcacgtacgaggagaagcggaagctcgggtacggcacgcagcgggagcgcctgggaaaggactccatcaagcccttcgacgcctgctgcctctgcctcaagccgctcatcggcccgctctgctgccccaagggccacacattctgtaaggagtgcatcctcgagtgcctcctctaccagaagaaggacatcaagcgcaagctagctgcacatgaggtccagaaaaagcaagagaaggaagaggaagaggagaagctaattctgcagaaggctaaggagttggatgcctttgaccagcagaatcatggacctgttccccagtaccatgatcgcagtggttcgcaagacaagaatggttttcatggagcaaataatgtgaaggtcacttcttttgaagacgaagcccttcgcaatatgaaggcattctggctcccttcagctactcctgaagctacggtcaaggtagacgtgccctccatccacactgtttgcccggaggggcaggagaagctcaagttgaaatcgctcttccctatctcgttcacggaagaaactgctgatcagaagagcagtaaggcagtggaaaaaaagagctacatgtgccctagttgcaagtccactatcacaaataccatgtcccttgtggcggtcagcacctgtggccatgtcttctgcaagaaatgttatgacaagtttctagtgaaggataaagcttgcttggagtgcagcaaaccattcagggagaggaatctggttccattggagaaaggaggaaccgggtttgctgcacatgatgaacgcctagaggcaagatatttcaagcatttgggtagtggctctgggttaggactagtgaagcctgcaccagaaacttactaaccttgaataattatagccgttgttgtattgtttaccttggtgtcatgaaattatataacctagaaatgagaactccatcaagttcccaattgccgctgtaacttctatatacatgtatgcagatgttgattttaggtatctttaagacctt

SEQ ID NO: 29753 - protein, 154 aa, Zea mays subsp. mays
  peptide (1)..(154): Ceres Seq. ID no. 12343266
  misc_feature (1)..(149): NCBI GI NO: 18407260 NR Description: expressed protein; protein id: At1g61620
  misc_feature (1)..(149): NCBI GI NO: 26449463 NR Description: unknown protein [Arabidopsis thaliana]
  misc_feature (1)..(133): NCBI GI NO: 31213459 NR Description: ENSANGP00000021661 [Anopheles gambiae]
  misc_feature (1)..(133): NCBI GI NO: 38174118 NR Description: Unknown (protein for MGC:75989)
  misc_feature (1)..(132): NCBI GI NO: 7705716 NR Description: eNOS interacting protein; CGI-25 protein
  misc_feature (1)..(132): NCBI GI NO: 15030017 NR Description: Similar to eNOS interacting protein [Homo sapiens]
  misc_feature (1)..(132): NCBI GI NO: 13384956 NR Description: RIKEN cDNA 2310061K06 [Mus musculus]
  misc_feature (1)..(132): NCBI GI NO: 27731403 NR Description: similar to RIKEN cDNA 2310061K06
  misc_feature (1)..(133): NCBI GI NO: 24643007 NR Description: CG6179-PA [Drosophila melanogaster]
  misc_feature (1)..(128): NCBI GI NO: 39593613 NR Description: Hypothetical protein CBG05897
MKAFWLPSATPEATVKVDVPSIHTVCPEGQEKLKLKSLFPISFTEETADQKSSKAVEKKSYMCPSCKSTITNTMSLVAVSTCGHVFCKKCYDKFLVKDKACLECSKPFRERNLVPLEKGGTGFAAHDERLEARYFKHLGSGSGLGLVKPAPETY

SEQ ID NO: 29754 - protein, 93 aa, Zea mays subsp. mays
  peptide (1)..(93): Ceres Seq. ID no. 12343267
  misc_feature (1)..(88): NCBI GI NO: 18407260 NR Description: expressed protein; protein id: At1g61620
  misc_feature (1)..(88): NCBI GI NO: 26449463 NR Description: unknown protein [Arabidopsis thaliana]
  misc_feature (1)..(72): NCBI GI NO: 31213459 NR Description: ENSANGP00000021661 [Anopheles gambiae]
  misc_feature (1)..(72): NCBI GI NO: 38174118 NR Description: Unknown (protein for MGC:75989)
  misc_feature (1)..(71): NCBI GI NO: 7705716 NR Description: eNOS interacting protein; CGI-25 protein
  misc_feature (1)..(71): NCBI GI NO: 15030017 NR Description: Similar to eNOS interacting protein [Homo sapiens]
  misc_feature (1)..(71): NCBI GI NO: 13384956 NR Description: RIKEN cDNA 2310061K06 [Mus musculus]
  misc_feature (1)..(71): NCBI GI NO: 27731403 NR Description: similar to RIKEN cDNA 2310061K06
  misc_feature (1)..(72): NCBI GI NO: 24643007 NR Description: CG6179-PA [Drosophila melanogaster]
  misc_feature (1)..(67): NCBI GI NO: 39593613 NR Description: Hypothetical protein CBG05897
MCPSCKSTITNTMSLVAVSTCGHVFCKKCYDKFLVKDKACLECSKPFRERNLVPLEKGGTGFAAHDERLEARYFKHLGSGSGLGLVKPAPETY

SEQ ID NO: 29755 - protein, 81 aa, Zea mays subsp. mays
  peptide (1)..(81): Ceres Seq. ID no. 12343268
  misc_feature (1)..(76): NCBI GI NO: 18407260 NR Description: expressed protein; protein id: At1g61620
  misc_feature (1)..(76): NCBI GI NO: 26449463 NR Description: unknown protein [Arabidopsis thaliana]
  misc_feature (1)..(60): NCBI GI NO: 31213459 NR Description: ENSANGP00000021661 [Anopheles gambiae]
  misc_feature (1)..(60): NCBI GI NO: 38174118 NR Description: Unknown (protein for MGC:75989)
  misc_feature (1)..(59): NCBI GI NO: 7705716 NR Description: eNOS interacting protein; CGI-25 protein
  misc_feature (1)..(59): NCBI GI NO: 15030017 NR Description: Similar to eNOS interacting protein [Homo sapiens]
  misc_feature (1)..(59): NCBI GI NO: 13384956 NR Description: RIKEN cDNA 2310061K06 [Mus musculus]
  misc_feature (1)..(59): NCBI GI NO: 27731403 NR Description: similar to RIKEN cDNA 2310061K06
  misc_feature (1)..(60): NCBI GI NO: 24643007 NR Description: CG6179-PA [Drosophila melanogaster]
  misc_feature (1)..(55): NCBI GI NO: 39593613 NR Description: Hypothetical protein CBG05897
MSLVAVSTCGHVFCKKCYDKFLVKDKACLECSKPFRERNLVPLEKGGTGFAAHDERLEARYFKHLGSGSGLGLVKPAPETY

SEQ ID NO: 29756 - DNA, 620 bp, Zea mays subsp. mays
  misc_feature (1)..(620): Ceres Seq. ID no. 13492231
aagagacaaaacaagttattggggctctaaaggagaagggagtgtctgctgttggagctgcagggtattgctggggtgcaaaggttgttgtggagttggcaaaagctcatgagatccaggctgctgtgctgttgcacccttcttttgttaccgttgacgatatcaaagaggtcaagtgcgcaatttctatcctcggagctgagattgacaaaatgtccccaccggagctaatcaagcagttcgagcaggtcctttctttgaactcaggggttggccacttcgtcaagatcttccctggtgtggcgcatggatggagcgtgagatacaaccacgacgacgcagctgccgtgaagagtgctgaggaagcctttgcggacatgctcgactggttcaacaagaatctgaaataaactctgcaattgcatcctgccttgtaataatgcgtgttccagtgccctgggatcgaatctgctgtgtttgggcttttgcatggtcaggctattcagagttgtcatggacttagggttgtgttagtagattggttgcgctgaatctataataaaaacgaggtaaactaggacaatgatgatgtggccgtgtgtatttaatgtattctgttc

SEQ ID NO: 29757 - protein, 135 aa, Zea mays subsp. mays
  peptide (1)..(135): Ceres Seq. ID no. 13492232
  misc_feature (2)..(130): Pfam Name: Pfam Description:  Dienelactone hydrolase family
  misc_feature (2)..(135): NCBI GI NO: 18403820 NR Description: expressed protein [Arabidopsis thaliana]
  misc_feature (1)..(135): NCBI GI NO: 9294513 NR Description: contains similarity to endo-1
  misc_feature (1)..(135): NCBI GI NO: 18403812 NR Description: expressed protein [Arabidopsis thaliana]
  misc_feature (1)..(135): NCBI GI NO: 24899687 NR Description: Unknown protein [Arabidopsis thaliana]
  misc_feature (1)..(135): NCBI GI NO: 40253303 NR Description: putative Endo-1,3;1,4-beta-D-glucanase precursor
  misc_feature (1)..(135): NCBI GI NO: 40253306 NR Description: putative Endo-1,3;1,4-beta-D-glucanase precursor
  misc_feature (1)..(135): NCBI GI NO: 40253308 NR Description: Endo-1,3
  misc_feature (1)..(135): NCBI GI NO: 40253310 NR Description: Endo-1,3
  misc_feature (1)..(84): NCBI GI NO: 8928122 NR Description: Endo-1,3;1,4-beta-D-glucanase precursor
  misc_feature (13)..(134): NCBI GI NO: 40740730 NR Description: hypothetical protein AN3712.2
ETKQVIGALKEKGVSAVGAAGYCWGAKVVVELAKAHEIQAAVLLHPSFVTVDDIKEVKCAISILGAEIDKMSPPELIKQFEQVLSLNSGVGHFVKIFPGVAHGWSVRYNHDDAAAVKSAEEAFADMLDWFNKNLK

SEQ ID NO: 29758 - DNA, 1046 bp, Zea mays subsp. mays
  misc_feature (1)..(1046): Ceres Seq. ID no. 12345398
aatcacatttgattcgagccagtcagccagccccggagccctggacagcagcagcgaactcgaggccgctccgccacctcgccactcgcctcttctcgctctcgccaccgggccagggaagggaccatccgatcggctccgtcatggctggagctgctgctctcaatgagggtatcctttcttccgtgtccgagaaaaatgttgctgctcacccatggcatgatttggagataggaccagaggctcctgaagtgttcaattgtgtggttgagattcctagaggcagcaaggttaagtatgagttggacaagatatctggtctgatcaaggtggatcgtgtcctttactcctctgttgtttacccacataactatggtttcattccacgcacactctgtgaggatagcgaccccatggacgtcctcgtactgatgcaggaacaagttgtccctgggtgtttcctgcgagctcgtgctattgggctcatgcctatgatcgatcagggtgagaaagatgataagatcatagctgtctgtgctgatgaccctgaattccgtcactacaaggacatctcggacctccccccgcatcgccttcaagagatccgccgcttttttgaagattataaaaagaatgaaaacaaagaagttgcagtgaatgatttcctcccagccgaagatgccatcaaagcaatcgagcactcgatggacctgtatggctcgtacgtcatggaaagcctgaggaggtgatctgctgctgcttgattgtggatgctacgtaattttctcaacagctcatcgagagtaccgtagtccgtagtacggcaaatgttaacacgcacgaactggaatcatgaccaagggatattaccttctgttcatgctgaaacgatcagcagtttctttctttgcatcatatgccacgtcaaatcaaggcacttgcctctgaaatctttgtggtcaagtcaaaccagcacttcgacagaacgattgatggatgcatgtattactgttacataaatgtccatttgctcaacttcatttctg

SEQ ID NO: 29759 - protein, 248 aa, Zea mays subsp. mays
  peptide (1)..(248): Ceres Seq. ID no. 12345399
  misc_feature (86)..(240): Pfam Name: Pfam Description:  Inorganic pyrophosphatase
  misc_feature (43)..(248): NCBI GI NO: 3885882 NR Description: inorganic pyrophosphatase [Oryza sativa]
  misc_feature (54)..(248): NCBI GI NO: 15231849 NR Description: inorganic pyrophosphatase -like protein
  misc_feature (54)..(248): NCBI GI NO: 21593570 NR Description: inorganic pyrophosphatase-like protein
  misc_feature (51)..(248): NCBI GI NO: 15223288 NR Description: soluble inorganic pyrophosphatase, putative
  misc_feature (51)..(248): NCBI GI NO: 40642617 NR Description: soluble pyrophosphatase [Beta vulgaris]
  misc_feature (51)..(248): NCBI GI NO: 2500047 NR Description: Soluble inorganic pyrophosphatase
  misc_feature (51)..(248): NCBI GI NO: 5669924 NR Description: soluble inorganic pyrophosphatase
  misc_feature (54)..(248): NCBI GI NO: 15226453 NR Description: putative inorganic pyrophosphatase
  misc_feature (51)..(248): NCBI GI NO: 4033424 NR Description: Soluble inorganic pyrophosphatase
  misc_feature (54)..(248): NCBI GI NO: 26451240 NR Description: putative inorganic pyrophosphatase
SHLIRASQPAPEPWTAAANSRPLRHLATRLFSLSPPGQGRDHPIGSVMAGAAALNEGILSSVSEKNVAAHPWHDLEIGPEAPEVFNCVVEIPRGSKVKYELDKISGLIKVDRVLYSSVVYPHNYGFIPRTLCEDSDPMDVLVLMQEQVVPGCFLRARAIGLMPMIDQGEKDDKIIAVCADDPEFRHYKDISDLPPHRLQEIRRFFEDYKKNENKEVAVNDFLPAEDAIKAIEHSMDLYGSYVMESLRR

SEQ ID NO: 29760 - protein, 201 aa, Zea mays subsp. mays
  peptide (1)..(201): Ceres Seq. ID no. 12345400
  misc_feature (39)..(193): Pfam Name: Pfam Description:  Inorganic pyrophosphatase
  misc_feature (1)..(201): NCBI GI NO: 3885882 NR Description: inorganic pyrophosphatase [Oryza sativa]
  misc_feature (7)..(201): NCBI GI NO: 15231849 NR Description: inorganic pyrophosphatase -like protein
  misc_feature (7)..(201): NCBI GI NO: 21593570 NR Description: inorganic pyrophosphatase-like protein
  misc_feature (4)..(201): NCBI GI NO: 15223288 NR Description: soluble inorganic pyrophosphatase, putative
  misc_feature (4)..(201): NCBI GI NO: 40642617 NR Description: soluble pyrophosphatase [Beta vulgaris]
  misc_feature (4)..(201): NCBI GI NO: 2500047 NR Description: Soluble inorganic pyrophosphatase
  misc_feature (4)..(201): NCBI GI NO: 5669924 NR Description: soluble inorganic pyrophosphatase
  misc_feature (7)..(201): NCBI GI NO: 15226453 NR Description: putative inorganic pyrophosphatase
  misc_feature (4)..(201): NCBI GI NO: 4033424 NR Description: Soluble inorganic pyrophosphatase
  misc_feature (7)..(201): NCBI GI NO: 26451240 NR Description: putative inorganic pyrophosphatase
MAGAAALNEGILSSVSEKNVAAHPWHDLEIGPEAPEVFNCVVEIPRGSKVKYELDKISGLIKVDRVLYSSVVYPHNYGFIPRTLCEDSDPMDVLVLMQEQVVPGCFLRARAIGLMPMIDQGEKDDKIIAVCADDPEFRHYKDISDLPPHRLQEIRRFFEDYKKNENKEVAVNDFLPAEDAIKAIEHSMDLYGSYVMESLRR

SEQ ID NO: 29761 - DNA, 1415 bp, Zea mays subsp. mays
  misc_feature (1)..(1415): Ceres Seq. ID no. 12406615
agggtgtgcactccgatcctgccctctaataacagcagcagcagccgccatggaaggcagcagcaagaagctccagccgttcctcctcacgctgctgctggtgctctccaccgccgtgacgcccatcctctcgctgtcagtgccagacgacgaggtagcctgcgactgcgacaaacccaaggcgcccaagccgtcgcacccgcccaagaccaagccctcccacccgtcgccgtcgccgaagcccaagaaccccaagccacccaggggcagcaccgggtacccagcgccggggcaccaaccgcccaagagcccctcctaccccccggtcgtcggccctcccaagggccccgtcacgcgcccgccagtcacgcgtccgccggtcgtcggtcctcccaagggccccgtcacgcgcccgccggtcacgcgtccgccggttgtcggaccaccggtgacctacccgccgatcaccggccctccgacgacgccgcctgttgtcggaccaccggtgacctacccgccgatcaccggccctccaacaacgccgcctgttgtcggcccaccggtgacctacccaccgatcactggcccgcccgcgacgaggcgccccggtcaccggtccgcccgtaacctacccacccggcggaggcgggggcagctcgacgccgtgcccgccgccaccgagcccgacgccgacgccgtcgtcgccgacgtgcccggcggactcgctgaagctgggcgcgtgcgtggacctgctgggcgggctggtgcatatcggcctcggcgaccccgtggtgaacaagtgctgcccggtgctggaggggctggtggagctggaggcggccgtgtgcctctgcaccaccatcaagctcaggctcctcaacatcaacctctacctgccactggcgctccagctcctcctcacctgcggcaagacgccgccgccgggctacacctgcaccgtctgatctggactagctggcagcccccggcccatgcgtccatttatccgtgaacatgggttttggagtgagctagcatccagttcatcggtcgtttgaagagagatcgacatgagaggatgtcgtctgcttcgtcgttccaagctgaagaaggcacgccggaggaggaagagagtaacaacggccgggtcgatcagctaacgatggatcgatcattttttccccatatttattgtgttgcgtctgctgtagtttctaattttctagatgtgctttcggtttggtctgtagaccctgcagcttgatttggttaagtttgatttgatgcaagggaaatgggtggcggttgattgctaataattcccgttgatatttgtcatgcgtacgtgaacttgataacaaaatgcatgatgtcttctctttgcgtgatttcgagttgattgtcatcaccatggc

SEQ ID NO: 29762 - protein, 336 aa, Zea mays subsp. mays
  peptide (1)..(336): Ceres Seq. ID no. 12406616
  misc_feature (41)..(197): Pfam Name: Pfam Description:  Formin Homology 2 Domain
  misc_feature (59)..(197): NCBI GI NO: 7446482 NR Description: probable cell wall-plasma membrane linker proteinPRP precursor - rape
  misc_feature (62)..(202): NCBI GI NO: 7446482 NR Description: probable cell wall-plasma membrane linker proteinPRP precursor - rape
  misc_feature (28)..(202): NCBI GI NO: 7446483 NR Description: probable cell wall protein - garden pea
  misc_feature (35)..(199): NCBI GI NO: 18396941 NR Description: expressed protein; protein id: At2g10940
  misc_feature (62)..(202): NCBI GI NO: 7446482 NR Description: probable cell wall-plasma membrane linker proteinPRP precursor - rape
  misc_feature (58)..(202): NCBI GI NO: 1076501 NR Description: cell wall protein - alfalfa
  misc_feature (58)..(197): NCBI GI NO: 7446482 NR Description: probable cell wall-plasma membrane linker proteinPRP precursor - rape
  misc_feature (56)..(202): NCBI GI NO: 1076501 NR Description: cell wall protein - alfalfa
  misc_feature (58)..(202): NCBI GI NO: 11994732 NR Description: contains similarity to cell wall-plasma membranelinker protein~gene_id:MKA23
  misc_feature (58)..(202): NCBI GI NO: 15233282 NR Description: unknown protein; protein id: At3g22120.1
GCALRSCPLITAAAAAMEGSSKKLQPFLLTLLLVLSTAVTPILSLSVPDDEVACDCDKPKAPKPSHPPKTKPSHPSPSPKPKNPKPPRGSTGYPAPGHQPPKSPSYPPVVGPPKGPVTRPPVTRPPVVGPPKGPVTRPPVTRPPVVGPPVTYPPITGPPTTPPVVGPPVTYPPITGPPTTPPVVGPPVTYPPITGPPATRRPGHRSARNLPTRRRRGQLDAVPAATEPDADAVVADVPGGLAEAGRVRGPAGRAGAYRPRRPRGEQVLPGAGGAGGAGGGRVPLHHHQAQAPQHQPLPATGAPAPPHLRQDAAAGLHLHRLIWTSWQPPAHASIYP

SEQ ID NO: 29763 - protein, 320 aa, Zea mays subsp. mays
  peptide (1)..(320): Ceres Seq. ID no. 12406617
  misc_feature (25)..(181): Pfam Name: Pfam Description:  Formin Homology 2 Domain
  misc_feature (43)..(181): NCBI GI NO: 7446482 NR Description: probable cell wall-plasma membrane linker proteinPRP precursor - rape
  misc_feature (46)..(186): NCBI GI NO: 7446482 NR Description: probable cell wall-plasma membrane linker proteinPRP precursor - rape
  misc_feature (12)..(186): NCBI GI NO: 7446483 NR Description: probable cell wall protein - garden pea
  misc_feature (19)..(183): NCBI GI NO: 18396941 NR Description: expressed protein; protein id: At2g10940
  misc_feature (46)..(186): NCBI GI NO: 7446482 NR Description: probable cell wall-plasma membrane linker proteinPRP precursor - rape
  misc_feature (42)..(186): NCBI GI NO: 1076501 NR Description: cell wall protein - alfalfa
  misc_feature (42)..(181): NCBI GI NO: 7446482 NR Description: probable cell wall-plasma membrane linker proteinPRP precursor - rape
  misc_feature (40)..(186): NCBI GI NO: 1076501 NR Description: cell wall protein - alfalfa
  misc_feature (42)..(186): NCBI GI NO: 11994732 NR Description: contains similarity to cell wall-plasma membranelinker protein~gene_id:MKA23
  misc_feature (42)..(186): NCBI GI NO: 15233282 NR Description: unknown protein; protein id: At3g22120.1
MEGSSKKLQPFLLTLLLVLSTAVTPILSLSVPDDEVACDCDKPKAPKPSHPPKTKPSHPSPSPKPKNPKPPRGSTGYPAPGHQPPKSPSYPPVVGPPKGPVTRPPVTRPPVVGPPKGPVTRPPVTRPPVVGPPVTYPPITGPPTTPPVVGPPVTYPPITGPPTTPPVVGPPVTYPPITGPPATRRPGHRSARNLPTRRRRGQLDAVPAATEPDADAVVADVPGGLAEAGRVRGPAGRAGAYRPRRPRGEQVLPGAGGAGGAGGGRVPLHHHQAQAPQHQPLPATGAPAPPHLRQDAAAGLHLHRLIWTSWQPPAHASIYP

SEQ ID NO: 29764 - protein, 208 aa, Zea mays subsp. mays
  peptide (1)..(208): Ceres Seq. ID no. 12406618
RVCTPILPSNNSSSSRHGRQQQEAPAVPPHAAAGALHRRDAHPLAVSARRRGSLRLRQTQGAQAVAPAQDQALPPVAVAEAQEPQATQGQHRVPSAGAPTAQEPLLPPGRRPSQGPRHAPASHASAGRRSSQGPRHAPAGHASAGCRTTGDLPADHRPSDDAACCRTTGDLPADHRPSNNAACCRPTGDLPTDHWPARDEAPRSPVRP

SEQ ID NO: 29765 - DNA, 1277 bp, Zea mays subsp. mays
  misc_feature (1)..(1277): Ceres Seq. ID no. 12402410
  misc_feature (346)..(346): n is a, c, t, g, unknown, or other
  misc_feature (320)..(320): n is a, c, t, g, unknown, or other
  misc_feature (55)..(55): n is a, c, t, g, unknown, or other
  misc_feature (57)..(57): n is a, c, t, g, unknown, or other
  misc_feature (299)..(299): n is a, c, t, g, unknown, or other
  misc_feature (56)..(56): n is a, c, t, g, unknown, or other
gcactcatccattccatcatcccctttgcaagtatagtctctctgctaagcgaannnagcttcaagctagtctcggcggctctagaagacgatgggcaaggacgacgtgatcgagagcggcgctggcggcggcgagttcgctgccaaggactacacggaccctcccccggcgccgctgatcgacgcggcggactgggggtcctggtcgctgtaccgcgccgtgatcgccgagttcatcgccacgctgctgttcctgtacatcacggtggccaccgtgatcgggtacaagcaccagacgnacgcgtcggcgtcgggcgccnacgcggcgtgcggcggcgtgggcgtnctgggcatcgcctgggccttcggcggcatgatcttcgtcctcgtctactgcaccgccggcatctcggggggccacatcaaccccgccgtcaccttcggcctcttcctggcgcggcaaggtctccctggtgcgcgcgctgctctacatcgtggcgcagtgcctcggcgccatctgcggcgtcggcctcgtcaaggcgttccagagcgcctacttcgacaggtacggcggcggcgccaactcgctcgcctccggctactcccgcggcaccggcctcggcgccgagatcatcggcaccttcgtgctcgtctacaccgtcttctccgccaccgaccccaagcgcaacgcccgcgactcccacgtcccggttctggctcccctccccatcggcttcgccgtgttcatggtgcacctggccaccatccccgtcaccggcaccggcatcaacccggccaggagcctgggcgccgccgtcatctacaacaaggacaagccctgggacgaccactggatcttctgggtgggccctctcgtgggcgctgccatcgcggccttctaccaccagtacatcctccgggctggcgccatcaaggccctcggctccttcaggagcaacgcgtgatgagcggggcttggctgtggagcaatggcgggcgacctacgggcggggggccgtgagcgaggagaatgccatcattcatcgatcgacttgggtgccggtggttggttcgggtcgcctttttttttgtttcagcagctgctgcgttgcgcgcgtgcgtgagatttggtttggtttcgttcccctgcaatgtaatcatgtcgtgactctcaagggattattccgctctgctcttatggtctctgttttctatttaatgattgttattaccatgtagcagtaaccatcgtcatcagtgagaaccttgttgcttct

SEQ ID NO: 29766 - protein, 412 aa, Zea mays subsp. mays
  peptide (1)..(412): Ceres Seq. ID no. 12402411
  misc_feature (163)..(320): Pfam Name: Pfam Description:  Equine herpesvirus glycoprotein gp2
  misc_feature (149)..(320): NCBI GI NO: 13592175 NR Description: ppg3 [Leishmania major]
  misc_feature (151)..(320): NCBI GI NO: 13592175 NR Description: ppg3 [Leishmania major]
  misc_feature (151)..(320): NCBI GI NO: 13592175 NR Description: ppg3 [Leishmania major]
  misc_feature (149)..(322): NCBI GI NO: 13592175 NR Description: ppg3 [Leishmania major]
  misc_feature (151)..(320): NCBI GI NO: 13592175 NR Description: ppg3 [Leishmania major]
  misc_feature (151)..(320): NCBI GI NO: 13592175 NR Description: ppg3 [Leishmania major]
  misc_feature (149)..(320): NCBI GI NO: 13592175 NR Description: ppg3 [Leishmania major]
  misc_feature (149)..(320): NCBI GI NO: 13592175 NR Description: ppg3 [Leishmania major]
  misc_feature (151)..(320): NCBI GI NO: 13592175 NR Description: ppg3 [Leishmania major]
  misc_feature (151)..(320): NCBI GI NO: 13592175 NR Description: ppg3 [Leishmania major]
  misc_feature (19)..(19): Xaa is any aa, unknown or other
  misc_feature (100)..(100): Xaa is any aa, unknown or other
  misc_feature (107)..(107): Xaa is any aa, unknown or other
  misc_feature (116)..(116): Xaa is any aa, unknown or other
ALIHSIIPFASIVSLLSEXSFKLVSAALEDDGQGRRDRERRWRRRVRCQGLHGPSPGAADRRGGLGVLVAVPRRDRRVHRHAAVPVHHGGHRDRVQAPDXRVGVGRXRGVRRRGRXGHRLGLRRHDLRPRLLHRRHLGGPHQPRRHLRPLPGAARSPWCARCSTSWRSASAPSAASASSRRSRAPTSTGTAAAPTRSPPATPAAPASAPRSSAPSCSSTPSSPPPTPSATPATPTSRFWLPSPSASPCSWCTWPPSPSPAPASTRPGAWAPPSSTTRTSPGTTTGSSGWALSWALPSRPSTTSTSSGLAPSRPSAPSGATRDERGLAVEQWRATYGRGAVSEENAIIHRSTWVPVVGSGRLFFCFSSCCVARVREIWFGFVPLQCNHVVTLKGLFRSALMVSVFYLMIVITM

SEQ ID NO: 29767 - protein, 309 aa, Zea mays subsp. mays
  peptide (1)..(309): Ceres Seq. ID no. 12402412
  misc_feature (36)..(134): Pfam Name: Pfam Description:  Major intrinsic protein
  misc_feature (1)..(134): NCBI GI NO: 13447801 NR Description: plasma membrane integral protein ZmPIP2-1
  misc_feature (1)..(134): NCBI GI NO: 29650727 NR Description: aquaporin [Zea mays]
  misc_feature (1)..(134): NCBI GI NO: 13447803 NR Description: plasma membrane integral protein ZmPIP2-2
  misc_feature (1)..(134): NCBI GI NO: 34901270 NR Description: putative plasma membrane intrinsic protein
  misc_feature (1)..(134): NCBI GI NO: 7441249 NR Description: probable plasma membrane intrinsic protein - rice
  misc_feature (1)..(134): NCBI GI NO: 13447805 NR Description: plasma membrane integral protein ZmPIP2-3
  misc_feature (1)..(134): NCBI GI NO: 13447807 NR Description: plasma membrane integral protein ZmPIP2-4
  misc_feature (1)..(124): NCBI GI NO: 7441245 NR Description: plasma membrane intrinsic protein BPW1 - barley
  misc_feature (1)..(134): NCBI GI NO: 4741931 NR Description: plasma membrane intrinsic protein [Zea mays]
  misc_feature (1)..(124): NCBI GI NO: 3158476 NR Description: aquaporin 2 [Samanea saman]
  misc_feature (70)..(70): Xaa is any aa, unknown or other
  misc_feature (77)..(77): Xaa is any aa, unknown or other
  misc_feature (85)..(85): Xaa is any aa, unknown or other
MGKDDVIESGAGGGEFAAKDYTDPPPAPLIDAADWGSWSLYRAVIAEFIATLLFLYITVATVIGYKHQTXASASGAXAACGGVGXLGIAWAFGGMIFVLVYCTAGISGGHINPAVTFGLFLARQGLPGARAALHRGAVPRRHLRRRPRQGVPERLLRQVRRRRQLARLRLLPRHRPRRRDHRHLRARLHRLLRHRPQAQRPRLPRPGSGSPPHRLRRVHGAPGHHPRHRHRHQPGQEPGRRRHLQQGQALGRPLDLLGGPSRGRCHRGLLPPVHPPGWRHQGPRLLQEQRVMSGAWLWSNGGRPTGGGP

SEQ ID NO: 29768 - protein, 215 aa, Zea mays subsp. mays
  peptide (1)..(215): Ceres Seq. ID no. 12402413
  misc_feature (1)..(40): NCBI GI NO: 13447801 NR Description: plasma membrane integral protein ZmPIP2-1
  misc_feature (1)..(40): NCBI GI NO: 29650727 NR Description: aquaporin [Zea mays]
  misc_feature (1)..(40): NCBI GI NO: 13447803 NR Description: plasma membrane integral protein ZmPIP2-2
  misc_feature (1)..(40): NCBI GI NO: 34901270 NR Description: putative plasma membrane intrinsic protein
  misc_feature (1)..(40): NCBI GI NO: 7441249 NR Description: probable plasma membrane intrinsic protein - rice
  misc_feature (1)..(40): NCBI GI NO: 13447805 NR Description: plasma membrane integral protein ZmPIP2-3
  misc_feature (1)..(40): NCBI GI NO: 13447807 NR Description: plasma membrane integral protein ZmPIP2-4
  misc_feature (1)..(30): NCBI GI NO: 7441245 NR Description: plasma membrane intrinsic protein BPW1 - barley
  misc_feature (1)..(40): NCBI GI NO: 4741931 NR Description: plasma membrane intrinsic protein [Zea mays]
  misc_feature (1)..(30): NCBI GI NO: 3158476 NR Description: aquaporin 2 [Samanea saman]
MIFVLVYCTAGISGGHINPAVTFGLFLARQGLPGARAALHRGAVPRRHLRRRPRQGVPERLLRQVRRRRQLARLRLLPRHRPRRRDHRHLRARLHRLLRHRPQAQRPRLPRPGSGSPPHRLRRVHGAPGHHPRHRHRHQPGQEPGRRRHLQQGQALGRPLDLLGGPSRGRCHRGLLPPVHPPGWRHQGPRLLQEQRVMSGAWLWSNGGRPTGGGP

SEQ ID NO: 29769 - DNA, 1622 bp, Zea mays subsp. mays
  misc_feature (1)..(1622): Ceres Seq. ID no. 12384174
attcccatcagagaagagataaccacacgtccacacaccacagaccacacgcacggtacagcctctccgcagctgcaggtgcctgctgttctccgacgagaccccaagaactcgccaacctatcccaattcccagccacccttccctctttcacaatgctggcctccgccgccaccgtcaagccctccaccgccgcggccgcggccacctgcaaggcggccttcaagccgctccacctccctcccctccccgccgccgccggcctcaggccgctctccctctccgtctccgcgcgcccgctgtaccgtcaggagcatgtcctggcatccgtggcggtggcggcggctgggcgcaacgaacgcgccacgtcccccgcgccgccgtccgccaccgctgacggcgcccggccgctggaggtcgccgcgccggcggagacgggtcggcgcgccaagatcggggtctacttccacgtggtgggcgctgaacgttatcttcaacatctacaacaagaaggtcctcaacgcgttcccgtacccgtggctcacgtcgacgctctccctcgccgccggctccgccatcatgctcgcgtcctgggccaccaggatcgccgaggcgccccagacggacctcgatttctggaaggcgctgactcccgttgcgatcgcgcacacgatcgggcacgtggcggcgacggtgagcatggccaaggtggccgtgtcgttcacgcacatcatcaagagcggggagccggcattcagcgtgctcgtctccaggttcttcctcggcgagcacttcccggcgccggtctacttctccctcctccccatcatcggcggatgcgcgctcgccgccgtcaccgagctcaacttcaacatggttggattcatgggggcaatgatctccaacctggcattcgtcgtccggaccatcttctccaagaaggggatgaagggcaagtccgtgagcgggatgaactactacgcctgcctctccatcatgtcgctggtgatcctcctgcccttcgccgtcgccatggaggggcccaaggtgtgggcagcgggctggcagacagcagtcgccgagatcggtcccaacttcgtctggtgggtggcggcgcagagcgtgttctaccacctgtacaaccaggtgtcctacatgtccctggacgagatctcgcccctcaccttctccatcggcaacaccatgaagcgcatctccgtcatcgtcgcgtccatcatcatcttccagacgcccgtccagcccatcaacgcgctcggggccgccatcgccatcctcggaaccttcatctactcccaggccaagcagtagccgcccttggcgcgcgcgtctggctctcaggcctcagttcagttcaccgccgaatcagctcggcgctcgaagatataacagattatataacttttgaggatatctacctagcttgtataatagtattattactagatcctctcttctttttttcgtattttcttttttcctaggactagcttattactagatcatttcgtcgtcgtgttttcactatgactatgatggcgtagagagagagagagagatggatccatctaaataaaaaaaaaggtaccggatcttgttttgtt

SEQ ID NO: 29770 - protein, 499 aa, Zea mays subsp. mays
  peptide (1)..(499): Ceres Seq. ID no. 12384175
  misc_feature (52)..(155): NCBI GI NO: 28564755 NR Description: putative glucose-6-phosphate/phosphate-translocator precursor
SHQRRDNHTSTHHRPHARYSLSAAAGACCSPTRPQELANLSQFPATLPSFTMLASAATVKPSTAAAAATCKAAFKPLHLPPLPAAAGLRPLSLSVSARPLYRQEHVLASVAVAAAGRNERATSPAPPSATADGARPLEVAAPAETGRRAKIGVYFHVVGAERYLQHLQQEGPQRVPVPVAHVDALPRRRLRHHARVLGHQDRRGAPDGPRFLEGADSRCDRAHDRARGGDGEHGQGGRVVHAHHQERGAGIQRARLQVLPRRALPGAGLLLPPPHHRRMRARRRHRAQLQHGWIHGGNDLQPGIRRPDHLLQEGDEGQVRERDELLRLPLHHVAGDPPALRRRHGGAQGVGSGLADSSRRDRSQLRLVGGGAERVLPPVQPGVLHVPGRDLAPHLLHRQHHEAHLRHRRVHHHLPDARPAHQRARGRHRHPRNLHLLPGQAVAALGARVWLSGLSSVHRRISSALEDITDYITFEDIYLACIIVLLLDPLFFFSYFLFS

SEQ ID NO: 29771 - protein, 448 aa, Zea mays subsp. mays
  peptide (1)..(448): Ceres Seq. ID no. 12384176
  misc_feature (1)..(104): NCBI GI NO: 28564755 NR Description: putative glucose-6-phosphate/phosphate-translocator precursor
MLASAATVKPSTAAAAATCKAAFKPLHLPPLPAAAGLRPLSLSVSARPLYRQEHVLASVAVAAAGRNERATSPAPPSATADGARPLEVAAPAETGRRAKIGVYFHVVGAERYLQHLQQEGPQRVPVPVAHVDALPRRRLRHHARVLGHQDRRGAPDGPRFLEGADSRCDRAHDRARGGDGEHGQGGRVVHAHHQERGAGIQRARLQVLPRRALPGAGLLLPPPHHRRMRARRRHRAQLQHGWIHGGNDLQPGIRRPDHLLQEGDEGQVRERDELLRLPLHHVAGDPPALRRRHGGAQGVGSGLADSSRRDRSQLRLVGGGAERVLPPVQPGVLHVPGRDLAPHLLHRQHHEAHLRHRRVHHHLPDARPAHQRARGRHRHPRNLHLLPGQAVAALGARVWLSGLSSVHRRISSALEDITDYITFEDIYLACIIVLLLDPLFFFSYFLFS

SEQ ID NO: 29772 - protein, 442 aa, Zea mays subsp. mays
  peptide (1)..(442): Ceres Seq. ID no. 12384177
  misc_feature (160)..(285): Pfam Name: Pfam Description:  Integral membrane protein DUF6
  misc_feature (118)..(442): NCBI GI NO: 28564755 NR Description: putative glucose-6-phosphate/phosphate-translocator precursor
  misc_feature (156)..(442): NCBI GI NO: 14150753 NR Description: glucose-6-phosphate/phosphate translocator
  misc_feature (67)..(441): NCBI GI NO: 7489744 NR Description: glucose-6-phosphate/ phosphate-translocatorprecursor
  misc_feature (156)..(442): NCBI GI NO: 7488807 NR Description: glucose-6-phosphate/ phosphate-translocatorprecursor
  misc_feature (156)..(442): NCBI GI NO: 18407336 NR Description: glucose-6-phosphate/ phosphate-translocatorprecursor
  misc_feature (156)..(442): NCBI GI NO: 14596173 NR Description: Similar to glucose-6-phosphate/phosphate-translocator
  misc_feature (156)..(442): NCBI GI NO: 7484980 NR Description: glucose-6-phosphate/ phosphate translocatorprecursor
  misc_feature (124)..(442): NCBI GI NO: 9295277 NR Description: glucose-6P/phosphate translocator precursor
  misc_feature (156)..(442): NCBI GI NO: 32401390 NR Description: glucose-6-phosphate/phosphate translocator
  misc_feature (156)..(442): NCBI GI NO: 7489258 NR Description: probable glucose-6-phosphate/phosphate-translocatorprecursor - potato
IPIREEITTRPHTTDHTHGTASPQLQVPAVLRRDPKNSPTYPNSQPPFPLSQCWPPPPPSSPPPPRPRPPARRPSSRSTSLPSPPPPASGRSPSPSPRARCTVRSMSWHPWRWRRLGATNAPRPPRRRPPPLTAPGRWRSPRRRRRVGAPRSGSTSTWWALNVIFNIYNKKVLNAFPYPWLTSTLSLAAGSAIMLASWATRIAEAPQTDLDFWKALTPVAIAHTIGHVAATVSMAKVAVSFTHIIKSGEPAFSVLVSRFFLGEHFPAPVYFSLLPIIGGCALAAVTELNFNMVGFMGAMISNLAFVVRTIFSKKGMKGKSVSGMNYYACLSIMSLVILLPFAVAMEGPKVWAAGWQTAVAEIGPNFVWWVAAQSVFYHLYNQVSYMSLDEISPLTFSIGNTMKRISVIVASIIIFQTPVQPINALGAAIAILGTFIYSQAKQ

SEQ ID NO: 29773 - DNA, 1353 bp, Zea mays subsp. mays
  misc_feature (1)..(1353): Ceres Seq. ID no. 12407178
gtgtgcaagcaaagcgcaaggccgatccgagggtggactgtggagggccggccatggtgatgatgatgcggtcgtgcctcggcggcggcctgctaccggtggcggtcatgctctgcctcaacgtggtggcggcggtcatggtgtcgctcgtcaaggtggccatggacggcggcatgaaaccgctcgtgatcgtcaccctgcagcagctcaccgccgccgtcttcctcgcgccaatcgcattcttcaaggagaggaagtcgaggccaaagctgacgctggagatcttcgcctacatcttcgtcagtgcggcgctcggggcagctcttcgtcagtacatgatcttcgtggccctgcgctacaccacggccaccttcgtgaccgccttctccaacatcgcccccgtgctcaccttcctcctggccgtcgctacgcggtccgaagcgctggacctcaagagcaggacggggttagcgaagctgctgggcacgctggtgtcgctggccggcgccatggtgctcaccctctacaagggcgtggcgctcacccacgcggcgttccgcctcgcaggaccagcagcagcactcccacggccggttgccgccgagcgccgccgacagccgcggcaagtggacgctgggcaccgtggccatcctgggcaactgcgtctgcctctcctgctggttcctgctccacggccgcctcgccaagaagtacccgcacgtctactcctgcaacgcgctcatgtccttgctcagcttcctccaggtcgccgtcgtcggcctctgcacccagcgcagcatctccccctggatcgtcaccagcaagttcaacatcctcaccgtcctatacgccggcatcgtcggctgcggcgtctcgttcgtgctggtgacatggtgcatcgagaagagaggagccgtgttcgtggccgccttcataccggtggtgcagatcatcgtctccgtcatcgacttctccatcctgcacgagcagctctacctcggaagcgtgctgggatcagtgctagtgataggtggcctttaccttctgctgtggggcaagaggcaggaggccctgcactgtcctcctcctcctccaaaggttgccgaagaagaccctgctgacaaagagcagcagcaagtgcagcagaactgaagacggacagcatcctctgactgtttggtcgtttggttgtaacagtgccagcaataagatctctctgcctccttttcttttcttttggtgtctcaggggggtgggcaatgttccttccttctcagatcgatcaccaacaaagtgtttagattctaatccaaaacagtagaatggtcttaaatacagtactcctgcttactg

SEQ ID NO: 29774 - protein, 372 aa, Zea mays subsp. mays
  peptide (1)..(372): Ceres Seq. ID no. 12407179
  misc_feature (26)..(203): NCBI GI NO: 6815050 NR Description: ESTs AU078644
  misc_feature (26)..(203): NCBI GI NO: 34897774 NR Description: ESTs AU078644
  misc_feature (31)..(201): NCBI GI NO: 34897816 NR Description: P0514G12.28
  misc_feature (32)..(182): NCBI GI NO: 34897814 NR Description: P0514G12.27
  misc_feature (33)..(181): NCBI GI NO: 30689857 NR Description: nodulin N21 family protein [Arabidopsis thaliana]
  misc_feature (28)..(181): NCBI GI NO: 15234182 NR Description: hypothetical protein; protein id: At4g01440
  misc_feature (26)..(183): NCBI GI NO: 15234185 NR Description: unknown protein; protein id: At4g01450.1
  misc_feature (33)..(177): NCBI GI NO: 38605909 NR Description: OSJNBb0088C09.3
  misc_feature (31)..(177): NCBI GI NO: 28932880 NR Description: nodulin-like protein [Gossypium hirsutum]
  misc_feature (32)..(182): NCBI GI NO: 15234179 NR Description: unknown protein; protein id: At4g01430
VQAKRKADPRVDCGGPAMVMMMRSCLGGGLLPVAVMLCLNVVAAVMVSLVKVAMDGGMKPLVIVTLQQLTAAVFLAPIAFFKERKSRPKLTLEIFAYIFVSAALGAALRQYMIFVALRYTTATFVTAFSNIAPVLTFLLAVATRSEALDLKSRTGLAKLLGTLVSLAGAMVLTLYKGVALTHAAFRLAGPAAALPRPVAAERRRQPRQVDAGHRGHPGQLRLPLLLVPAPRPPRQEVPARLLLQRAHVLAQLPPGRRRRPLHPAQHLPLDRHQQVQHPHRPIRRHRRLRRLVRAGDMVHREERSRVRGRLHTGGADHRLRHRLLHPARAALPRKRAGISASDRWPLPSAVGQEAGGPALSSSSSKGCRRRPC

SEQ ID NO: 29775 - protein, 355 aa, Zea mays subsp. mays
  peptide (1)..(355): Ceres Seq. ID no. 12407180
  misc_feature (9)..(186): NCBI GI NO: 6815050 NR Description: ESTs AU078644
  misc_feature (9)..(186): NCBI GI NO: 34897774 NR Description: ESTs AU078644
  misc_feature (14)..(184): NCBI GI NO: 34897816 NR Description: P0514G12.28
  misc_feature (15)..(165): NCBI GI NO: 34897814 NR Description: P0514G12.27
  misc_feature (16)..(164): NCBI GI NO: 30689857 NR Description: nodulin N21 family protein [Arabidopsis thaliana]
  misc_feature (11)..(164): NCBI GI NO: 15234182 NR Description: hypothetical protein; protein id: At4g01440
  misc_feature (9)..(166): NCBI GI NO: 15234185 NR Description: unknown protein; protein id: At4g01450.1
  misc_feature (16)..(160): NCBI GI NO: 38605909 NR Description: OSJNBb0088C09.3
  misc_feature (14)..(160): NCBI GI NO: 28932880 NR Description: nodulin-like protein [Gossypium hirsutum]
  misc_feature (15)..(165): NCBI GI NO: 15234179 NR Description: unknown protein; protein id: At4g01430
MVMMMRSCLGGGLLPVAVMLCLNVVAAVMVSLVKVAMDGGMKPLVIVTLQQLTAAVFLAPIAFFKERKSRPKLTLEIFAYIFVSAALGAALRQYMIFVALRYTTATFVTAFSNIAPVLTFLLAVATRSEALDLKSRTGLAKLLGTLVSLAGAMVLTLYKGVALTHAAFRLAGPAAALPRPVAAERRRQPRQVDAGHRGHPGQLRLPLLLVPAPRPPRQEVPARLLLQRAHVLAQLPPGRRRRPLHPAQHLPLDRHQQVQHPHRPIRRHRRLRRLVRAGDMVHREERSRVRGRLHTGGADHRLRHRLLHPARAALPRKRAGISASDRWPLPSAVGQEAGGPALSSSSSKGCRRRPC

SEQ ID NO: 29776 - protein, 353 aa, Zea mays subsp. mays
  peptide (1)..(353): Ceres Seq. ID no. 12407181
  misc_feature (7)..(184): NCBI GI NO: 6815050 NR Description: ESTs AU078644
  misc_feature (7)..(184): NCBI GI NO: 34897774 NR Description: ESTs AU078644
  misc_feature (12)..(182): NCBI GI NO: 34897816 NR Description: P0514G12.28
  misc_feature (13)..(163): NCBI GI NO: 34897814 NR Description: P0514G12.27
  misc_feature (14)..(162): NCBI GI NO: 30689857 NR Description: nodulin N21 family protein [Arabidopsis thaliana]
  misc_feature (9)..(162): NCBI GI NO: 15234182 NR Description: hypothetical protein; protein id: At4g01440
  misc_feature (7)..(164): NCBI GI NO: 15234185 NR Description: unknown protein; protein id: At4g01450.1
  misc_feature (14)..(158): NCBI GI NO: 38605909 NR Description: OSJNBb0088C09.3
  misc_feature (12)..(158): NCBI GI NO: 28932880 NR Description: nodulin-like protein [Gossypium hirsutum]
  misc_feature (13)..(163): NCBI GI NO: 15234179 NR Description: unknown protein; protein id: At4g01430
MMMRSCLGGGLLPVAVMLCLNVVAAVMVSLVKVAMDGGMKPLVIVTLQQLTAAVFLAPIAFFKERKSRPKLTLEIFAYIFVSAALGAALRQYMIFVALRYTTATFVTAFSNIAPVLTFLLAVATRSEALDLKSRTGLAKLLGTLVSLAGAMVLTLYKGVALTHAAFRLAGPAAALPRPVAAERRRQPRQVDAGHRGHPGQLRLPLLLVPAPRPPRQEVPARLLLQRAHVLAQLPPGRRRRPLHPAQHLPLDRHQQVQHPHRPIRRHRRLRRLVRAGDMVHREERSRVRGRLHTGGADHRLRHRLLHPARAALPRKRAGISASDRWPLPSAVGQEAGGPALSSSSSKGCRRRPC

SEQ ID NO: 29777 - DNA, 1284 bp, Zea mays subsp. mays
  misc_feature (1)..(1284): Ceres Seq. ID no. 12386761
acgggaaaggagtacggagtaccggagacatcgtcaacgccatggccggaggaggtgcaacggtgtgcgtgaccggagccggcgggttcatcgcctcgtgggtagtgaagctcctgctctcccgcgggtacaccgtgcacggcaccgtccgccacctcagtgacgagaagacaggccacctgaagcgcctggagaatgctgccggaaaccttaggatcttcaaggctgacctgctggactacgacgccatggcagctgcggtcgtcgggtgccagggggttttccatgtggccactcctgtgccttcggaggacctgactgacccagagctacaaatgctgggtcctgctgttaccggcaccacgaatgtgctcaaagctgcctccagcgcgaacgtccagcgagtggtggtggtgtcgtccatggttgccgtcgagatcagccccaaagattggcctgaaggtaaggtccgagatgagaggtgctggtcagaccgagagttctgcaggagcattgagagctggtacccggtggctaagatcatctcagaggaggcggcgctggcgtacgggcagcaaaccgggctcgacgtggtgactatcaatccagggttggtgttcggccccatgctgcagccgacggtcaacacgaccatccagttcctcatctacttcctcaaaggaggccccgacccggtgaagaacaagctctggcacatcgtcgacgtccgcgatgtggccgacgccatgctgctgctctacgaggtgcctgaagcgaccggcagacacatctgcgcgcctcatgttatcagtgcccgcgacctgctggatctgctgaagagcatgtaccctgactacccttgcattgccaacgagagcatacttgacagagaccacccagcgccgatgacctctgacaagctgaagaagatcgggtggagctgccgaccgctggaggagacgatcgtggacaccgtcgagtgctgcctgcgggctggatttctggacgacgtgggtggggagacttcctgtcgcttccctcctcttttaaaccagatctagcctcggcgaaagcatgaattgtgattgcctatgctcttgcttatgttaccgtggacgacgagcgtcagcttttaaataaacgtcattgcatgctgttgtatttcttatattactgtggacaagcatcgatcagagcttttaaattgttaggatcacaggtgaaaaaggagacagagtttaacgtggaaaaaactctctaatttggaggagaaaaaatcacggg

SEQ ID NO: 29778 - protein, 352 aa, Zea mays subsp. mays
  peptide (1)..(352): Ceres Seq. ID no. 12386762
  misc_feature (21)..(207): Pfam Name: Pfam Description:  3-beta hydroxysteroid dehydrogenase/ isomerase family
  misc_feature (21)..(335): NCBI GI NO: 15226134 NR Description: putative cinnamoyl-CoA reductase
  misc_feature (21)..(335): NCBI GI NO: 15226135 NR Description: putative cinnamoyl-CoA reductase
  misc_feature (21)..(334): NCBI GI NO: 15223068 NR Description: putative cinnamoyl-CoA reductase
  misc_feature (21)..(334): NCBI GI NO: 6554472 NR Description: putative cinnamoyl-CoA reductase; 14056-15506
  misc_feature (15)..(342): NCBI GI NO: 7431410 NR Description: cinnamoyl CoA reductase - maize
  misc_feature (15)..(342): NCBI GI NO: 3242328 NR Description: cinnamoyl-CoA reductase [Zea mays]
  misc_feature (16)..(342): NCBI GI NO: 3341511 NR Description: cinnamoyl-CoA reductase [Saccharum officinarum]
  misc_feature (10)..(334): NCBI GI NO: 9964087 NR Description: cinnamoyl CoA reductase [Lolium perenne]
  misc_feature (11)..(334): NCBI GI NO: 25989515 NR Description: cinnamoyl CoA reductase [Eucalyptus globulus]
  misc_feature (4)..(334): NCBI GI NO: 17978549 NR Description: cinnamoyl-CoA reductase [Lolium perenne]
GKGVRSTGDIVNAMAGGGATVCVTGAGGFIASWVVKLLLSRGYTVHGTVRHLSDEKTGHLKRLENAAGNLRIFKADLLDYDAMAAAVVGCQGVFHVATPVPSEDLTDPELQMLGPAVTGTTNVLKAASSANVQRVVVVSSMVAVEISPKDWPEGKVRDERCWSDREFCRSIESWYPVAKIISEEAALAYGQQTGLDVVTINPGLVFGPMLQPTVNTTIQFLIYFLKGGPDPVKNKLWHIVDVRDVADAMLLLYEVPEATGRHICAPHVISARDLLDLLKSMYPDYPCIANESILDRDHPAPMTSDKLKKIGWSCRPLEETIVDTVECCLRAGFLDDVGGETSCRFPPLLNQI

SEQ ID NO: 29779 - protein, 339 aa, Zea mays subsp. mays
  peptide (1)..(339): Ceres Seq. ID no. 12386763
  misc_feature (8)..(194): Pfam Name: Pfam Description:  3-beta hydroxysteroid dehydrogenase/ isomerase family
  misc_feature (8)..(322): NCBI GI NO: 15226134 NR Description: putative cinnamoyl-CoA reductase
  misc_feature (8)..(322): NCBI GI NO: 15226135 NR Description: putative cinnamoyl-CoA reductase
  misc_feature (8)..(321): NCBI GI NO: 15223068 NR Description: putative cinnamoyl-CoA reductase
  misc_feature (8)..(321): NCBI GI NO: 6554472 NR Description: putative cinnamoyl-CoA reductase; 14056-15506
  misc_feature (2)..(329): NCBI GI NO: 7431410 NR Description: cinnamoyl CoA reductase - maize
  misc_feature (2)..(329): NCBI GI NO: 3242328 NR Description: cinnamoyl-CoA reductase [Zea mays]
  misc_feature (3)..(329): NCBI GI NO: 3341511 NR Description: cinnamoyl-CoA reductase [Saccharum officinarum]
  misc_feature (1)..(321): NCBI GI NO: 9964087 NR Description: cinnamoyl CoA reductase [Lolium perenne]
  misc_feature (1)..(321): NCBI GI NO: 25989515 NR Description: cinnamoyl CoA reductase [Eucalyptus globulus]
  misc_feature (1)..(321): NCBI GI NO: 17978549 NR Description: cinnamoyl-CoA reductase [Lolium perenne]
MAGGGATVCVTGAGGFIASWVVKLLLSRGYTVHGTVRHLSDEKTGHLKRLENAAGNLRIFKADLLDYDAMAAAVVGCQGVFHVATPVPSEDLTDPELQMLGPAVTGTTNVLKAASSANVQRVVVVSSMVAVEISPKDWPEGKVRDERCWSDREFCRSIESWYPVAKIISEEAALAYGQQTGLDVVTINPGLVFGPMLQPTVNTTIQFLIYFLKGGPDPVKNKLWHIVDVRDVADAMLLLYEVPEATGRHICAPHVISARDLLDLLKSMYPDYPCIANESILDRDHPAPMTSDKLKKIGWSCRPLEETIVDTVECCLRAGFLDDVGGETSCRFPPLLNQI

SEQ ID NO: 29780 - protein, 270 aa, Zea mays subsp. mays
  peptide (1)..(270): Ceres Seq. ID no. 12386764
  misc_feature (1)..(125): Pfam Name: Pfam Description:  3-beta hydroxysteroid dehydrogenase/ isomerase family
  misc_feature (1)..(253): NCBI GI NO: 15226134 NR Description: putative cinnamoyl-CoA reductase
  misc_feature (1)..(253): NCBI GI NO: 15226135 NR Description: putative cinnamoyl-CoA reductase
  misc_feature (1)..(252): NCBI GI NO: 15223068 NR Description: putative cinnamoyl-CoA reductase
  misc_feature (1)..(252): NCBI GI NO: 6554472 NR Description: putative cinnamoyl-CoA reductase; 14056-15506
  misc_feature (1)..(260): NCBI GI NO: 7431410 NR Description: cinnamoyl CoA reductase - maize
  misc_feature (1)..(260): NCBI GI NO: 3242328 NR Description: cinnamoyl-CoA reductase [Zea mays]
  misc_feature (1)..(260): NCBI GI NO: 3341511 NR Description: cinnamoyl-CoA reductase [Saccharum officinarum]
  misc_feature (1)..(252): NCBI GI NO: 9964087 NR Description: cinnamoyl CoA reductase [Lolium perenne]
  misc_feature (1)..(252): NCBI GI NO: 25989515 NR Description: cinnamoyl CoA reductase [Eucalyptus globulus]
  misc_feature (1)..(252): NCBI GI NO: 17978549 NR Description: cinnamoyl-CoA reductase [Lolium perenne]
MAAAVVGCQGVFHVATPVPSEDLTDPELQMLGPAVTGTTNVLKAASSANVQRVVVVSSMVAVEISPKDWPEGKVRDERCWSDREFCRSIESWYPVAKIISEEAALAYGQQTGLDVVTINPGLVFGPMLQPTVNTTIQFLIYFLKGGPDPVKNKLWHIVDVRDVADAMLLLYEVPEATGRHICAPHVISARDLLDLLKSMYPDYPCIANESILDRDHPAPMTSDKLKKIGWSCRPLEETIVDTVECCLRAGFLDDVGGETSCRFPPLLNQI

SEQ ID NO: 29781 - DNA, 1116 bp, Zea mays subsp. mays
  misc_feature (1)..(1116): Ceres Seq. ID no. 12356519
aaaagaccaaaggatgtcgacaccaggagccccgagcctggccacgacagcggcggctgtcctgtgcgtcctggccgcggcgctcgcggtcacggtcgcgagcggccagcagtgcgggcagcaggccggcggcgcaacgtgccgcgactgcctctgctgcagccgcttcggcttttgcggcgacacctccgagtactgcggcgccgggtgccagagccagtgcaccggctgcggcccgcgtcccgcgggccccggcgtggcatccgtcgtgccgagagacctcttcgagcggctgctcctccaccgcaacgacgcggcgtgccctgcgcgcgggttctacacctacgacgcgttcctggccgccgcggccgcgttcccggccttcggcacgacgggcggcgacgagcagcggaaacgggaggtcgcggcgttcctgggccagacctcccacgagaccacgggcgggtggccgaccgcgcccgacgggcccttctcgtggggttactgcttcaagcaggagcgcaacccgccgtcggactactgcgagccgcggccgcagtggccgtgcgcgcccggcaagaagtacttcggccgcggccccatccagatctccttcaactacaactacggcccggcggggcgagccatcggcgtggacctcctcaacaacccggacctcgtcgcgacggaccccgtgatatccttcaagacagcgctgtggttctggatgaacgcgcgggacaacaagccgtcgtgccacgccgtgatcacggggcagtggacgcccacggctgcggacagggcggccggccggggcgcgccagggtacggcgtgatcaccaacatcatcaacggtgggatcgagtgcgggcacgggacggacccccgggtcaccgaccggattggcttctacaagcgctactgcgatgtcttccgcatcggctacgggagcaatctcgattgcgacggccagaggcccttcaatagcggactggcggttgaggtggcggcgcagtgaaaacgtgtgtgtgtgtgtgtgactgtgtgttgcttcgtcggtttgaataaatttcatgtaaaaaccggtgcttcatccgaaaataaggcactttacgt

SEQ ID NO: 29782 - protein, 338 aa, Zea mays subsp. mays
  peptide (1)..(338): Ceres Seq. ID no. 12356520
  misc_feature (36)..(74): Pfam Name: Pfam Description:  Chitin recognition protein
  misc_feature (5)..(338): NCBI GI NO: 481896 NR Description: chitinase (EC 3.2.1.14) - rice
  misc_feature (5)..(338): NCBI GI NO: 1076740 NR Description: chitinase (EC 3.2.1.14) - rice
  misc_feature (14)..(334): NCBI GI NO: 18146827 NR Description: chitinase 2 [Triticum aestivum]
  misc_feature (5)..(338): NCBI GI NO: 7435364 NR Description: probable chitinase (EC 3.2.1.14) precursor - rice
  misc_feature (17)..(334): NCBI GI NO: 38371990 NR Description: chitinase; BoCHI1 [Bambusa oldhamii]
  misc_feature (17)..(327): NCBI GI NO: 11344587 NR Description: seed chitinase-a [Secale cereale]
  misc_feature (20)..(329): NCBI GI NO: 6164588 NR Description: chitinase [Poa pratensis]
  misc_feature (11)..(334): NCBI GI NO: 7435361 NR Description: probable chitinase (EC 3.2.1.14) - barley
  misc_feature (20)..(327): NCBI GI NO: 12407647 NR Description: 31
  misc_feature (14)..(332): NCBI GI NO: 38261495 NR Description: chitinase [Oryza sativa]
KDQRMSTPGAPSLATTAAAVLCVLAAALAVTVASGQQCGQQAGGATCRDCLCCSRFGFCGDTSEYCGAGCQSQCTGCGPRPAGPGVASVVPRDLFERLLLHRNDAACPARGFYTYDAFLAAAAAFPAFGTTGGDEQRKREVAAFLGQTSHETTGGWPTAPDGPFSWGYCFKQERNPPSDYCEPRPQWPCAPGKKYFGRGPIQISFNYNYGPAGRAIGVDLLNNPDLVATDPVISFKTALWFWMNARDNKPSCHAVITGQWTPTAADRAAGRGAPGYGVITNIINGGIECGHGTDPRVTDRIGFYKRYCDVFRIGYGSNLDCDGQRPFNSGLAVEVAAQ

SEQ ID NO: 29783 - protein, 334 aa, Zea mays subsp. mays
  peptide (1)..(334): Ceres Seq. ID no. 12356521
  misc_feature (32)..(70): Pfam Name: Pfam Description:  Chitin recognition protein
  misc_feature (1)..(334): NCBI GI NO: 481896 NR Description: chitinase (EC 3.2.1.14) - rice
  misc_feature (1)..(334): NCBI GI NO: 1076740 NR Description: chitinase (EC 3.2.1.14) - rice
  misc_feature (10)..(330): NCBI GI NO: 18146827 NR Description: chitinase 2 [Triticum aestivum]
  misc_feature (1)..(334): NCBI GI NO: 7435364 NR Description: probable chitinase (EC 3.2.1.14) precursor - rice
  misc_feature (13)..(330): NCBI GI NO: 38371990 NR Description: chitinase; BoCHI1 [Bambusa oldhamii]
  misc_feature (13)..(323): NCBI GI NO: 11344587 NR Description: seed chitinase-a [Secale cereale]
  misc_feature (16)..(325): NCBI GI NO: 6164588 NR Description: chitinase [Poa pratensis]
  misc_feature (7)..(330): NCBI GI NO: 7435361 NR Description: probable chitinase (EC 3.2.1.14) - barley
  misc_feature (16)..(323): NCBI GI NO: 12407647 NR Description: 31
  misc_feature (10)..(328): NCBI GI NO: 38261495 NR Description: chitinase [Oryza sativa]
MSTPGAPSLATTAAAVLCVLAAALAVTVASGQQCGQQAGGATCRDCLCCSRFGFCGDTSEYCGAGCQSQCTGCGPRPAGPGVASVVPRDLFERLLLHRNDAACPARGFYTYDAFLAAAAAFPAFGTTGGDEQRKREVAAFLGQTSHETTGGWPTAPDGPFSWGYCFKQERNPPSDYCEPRPQWPCAPGKKYFGRGPIQISFNYNYGPAGRAIGVDLLNNPDLVATDPVISFKTALWFWMNARDNKPSCHAVITGQWTPTAADRAAGRGAPGYGVITNIINGGIECGHGTDPRVTDRIGFYKRYCDVFRIGYGSNLDCDGQRPFNSGLAVEVAAQ

SEQ ID NO: 29784 - protein, 328 aa, Zea mays subsp. mays
  peptide (1)..(328): Ceres Seq. ID no. 12356522
KRPKDVDTRSPEPGHDSGGCPVRPGRGARGHGRERPAVRAAGRRRNVPRLPLLQPLRLLRRHLRVLRRRVPEPVHRLRPASRGPRRGIRRAERPLRAAAPPPQRRGVPCARVLHLRRVPGRRGRVPGLRHDGRRRAAETGGRGVPGPDLPRDHGRVADRARRALLVGLLLQAGAQPAVGLLRAAAAVAVRARQEVLRPRPHPDLLQLQLRPGGASHRRGPPQQPGPRRDGPRDILQDSAVVLDERAGQQAVVPRRDHGAVDAHGCGQGGRPGRARVRRDHQHHQRWDRVRARDGPPGHRPDWLLQALLRCLPHRLREQSRLRRPEALQ

SEQ ID NO: 29785 - DNA, 928 bp, Zea mays subsp. mays
  misc_feature (1)..(928): Ceres Seq. ID no. 12365717
ccttctatcctctccggcacgagccgtccagttcagttcacctcggtccgggaccgcgactacaccgacggcggcgcgtccgagcccagccgacgccgagccaatggtgactccagcgacattctccctccgccccagcgcgccccccgcgccgcctcgtgccgggctgccccgcgctcgggcctgtttcgcgcccgccatccgcacctccccttccgtcgccttttcctaccagcctcggcgcttcagtggcatccgccgcgccgtggccgtcgactccgagcagggctcccccgagtctccagagcaggagaagaagcccaagacgtactacttcctggtggcaaacgccaagttcatgctggacgaggaggagcatttccaggagcaactcgccgagaagctgcgcaactacgccgagcgcgacaaggagcaggacttctggctcgtcgtggagcccaagttcctcgacaggttccccaacatcaccaagcgcctcaagcgccccgccgtcgcgcttgtctccaccgacggcaactggatcacattcatgaagttaaggctagacagggtcttacaagaccagttcgacgcagaatcagttgaagaggcattggcttctaaccctgttgagttgaaatttgagaagcctgagaaatggacagctccgtaccctaaatatgggtttggatggtgggaacccttcttgcctccaaagttcagcaatggtacggcatagagataagcagcaatccctatgaggcatgtaagattactcccctgtaagtgatgaatgtaattttaattttgatgatgaggatgtagtacttgaggttgtaccagtacagttagttgaattagttgcacagtttttgtaataccaaataatcagctgttttattttatttgagaaagtcgtggttctgtt

SEQ ID NO: 29786 - protein, 245 aa, Zea mays subsp. mays
  peptide (1)..(245): Ceres Seq. ID no. 12365718
  misc_feature (69)..(237): NCBI GI NO: 15237144 NR Description: similar to unknown protein
  misc_feature (102)..(207): NCBI GI NO: 23129763 NR Description: hypothetical protein [Nostoc punctiforme]
  misc_feature (108)..(208): NCBI GI NO: 23042740 NR Description: hypothetical protein
  misc_feature (106)..(207): NCBI GI NO: 17227712 NR Description: hypothetical protein [Nostoc sp. PCC 7120]
  misc_feature (109)..(207): NCBI GI NO: 22299042 NR Description: ORF_ID:tll1499~hypothetical protein
  misc_feature (110)..(207): NCBI GI NO: 33865445 NR Description: conserved hypothetical protein
  misc_feature (109)..(207): NCBI GI NO: 16329384 NR Description: hypothetical protein [Synechocystis sp. PCC 6803]
  misc_feature (109)..(202): NCBI GI NO: 33861662 NR Description: conserved hypothetical protein
  misc_feature (108)..(200): NCBI GI NO: 37520451 NR Description: hypothetical protein [Gloeobacter violaceus]
  misc_feature (109)..(197): NCBI GI NO: 11465670 NR Description: ORF108 [Porphyra purpurea]
LLSSPARAVQFSSPRSGTATTPTAARPSPADAEPMVTPATFSLRPSAPPAPPRAGLPRARACFAPAIRTSPSVAFSYQPRRFSGIRRAVAVDSEQGSPESPEQEKKPKTYYFLVANAKFMLDEEEHFQEQLAEKLRNYAERDKEQDFWLVVEPKFLDRFPNITKRLKRPAVALVSTDGNWITFMKLRLDRVLQDQFDAESVEEALASNPVELKFEKPEKWTAPYPKYGFGWWEPFLPPKFSNGTA

SEQ ID NO: 29787 - protein, 211 aa, Zea mays subsp. mays
  peptide (1)..(211): Ceres Seq. ID no. 12365719
  misc_feature (35)..(203): NCBI GI NO: 15237144 NR Description: similar to unknown protein
  misc_feature (68)..(173): NCBI GI NO: 23129763 NR Description: hypothetical protein [Nostoc punctiforme]
  misc_feature (74)..(174): NCBI GI NO: 23042740 NR Description: hypothetical protein
  misc_feature (72)..(173): NCBI GI NO: 17227712 NR Description: hypothetical protein [Nostoc sp. PCC 7120]
  misc_feature (75)..(173): NCBI GI NO: 22299042 NR Description: ORF_ID:tll1499~hypothetical protein
  misc_feature (76)..(173): NCBI GI NO: 33865445 NR Description: conserved hypothetical protein
  misc_feature (75)..(173): NCBI GI NO: 16329384 NR Description: hypothetical protein [Synechocystis sp. PCC 6803]
  misc_feature (75)..(168): NCBI GI NO: 33861662 NR Description: conserved hypothetical protein
  misc_feature (74)..(166): NCBI GI NO: 37520451 NR Description: hypothetical protein [Gloeobacter violaceus]
  misc_feature (75)..(163): NCBI GI NO: 11465670 NR Description: ORF108 [Porphyra purpurea]
MVTPATFSLRPSAPPAPPRAGLPRARACFAPAIRTSPSVAFSYQPRRFSGIRRAVAVDSEQGSPESPEQEKKPKTYYFLVANAKFMLDEEEHFQEQLAEKLRNYAERDKEQDFWLVVEPKFLDRFPNITKRLKRPAVALVSTDGNWITFMKLRLDRVLQDQFDAESVEEALASNPVELKFEKPEKWTAPYPKYGFGWWEPFLPPKFSNGTA

SEQ ID NO: 29788 - protein, 201 aa, Zea mays subsp. mays
  peptide (1)..(201): Ceres Seq. ID no. 12365720
PSILSGTSRPVQFTSVRDRDYTDGGASEPSRRRANGDSSDILPPPQRAPRAASCRAAPRSGLFRARHPHLPFRRLFLPASALQWHPPRRGRRLRAGLPRVSRAGEEAQDVLLPGGKRQVHAGRGGAFPGATRREAAQLRRARQGAGLLARRGAQVPRQVPQHHQAPQAPRRRACLHRRQLDHIHEVKARQGLTRPVRRRIS

SEQ ID NO: 29789 - DNA, 795 bp, Zea mays subsp. mays
  misc_feature (1)..(795): Ceres Seq. ID no. 12403108
aacgcaagcagaagctacaatcctaaaaccatctgcttcagccttcagctagccccaagtttagtcggccgatcgatcactgaagtagtaatggcctccgccaacagctggaccctcgagatcgcgtcgccggtggctccgcagcgcctgttccgcgccgccgtgatggactggcacaccctggcgcccaaggtcgcctcccacgtcgtcgccagcgcgcagcccgtggagggcgacggcggcgttggcagcgtcaggcagttcaacttcacctcagtcatgccgttcagcttcatgaaggagaggctcgagttcctggacgcggacaagtgcgagtgcaagaacacgctcatcgagggcggcggcatcggcgtcgccatcgaaacggcgacgtcgcacatcaaggtggagcccgcggccggcggcgggagcgtggtgaaggtcgaatccacttacaagctgctgccgggcgtggaggtgaaggacgagatcgccaaggccaaggagtccgtcaccgccatcttcaagggtgccgaggcctacctcgtcgccaaccccgacgcctacaactaaaccattggactgggatgagcttcatttcccttccgtcttgtttggatatacaagggtattgtgtacggagattgggttttctttccccttcttttttgttttcatacaaaataaaataaagctgctctaaagcagcgtgcggtttttggactcgagatggtatgattatatatatgtacgtgctgtccttgtgttgtataccgtcatggttttctgtgtggg

SEQ ID NO: 29790 - protein, 190 aa, Zea mays subsp. mays
  peptide (1)..(190): Ceres Seq. ID no. 12403109
  misc_feature (32)..(185): Pfam Name: Pfam Description:  Pathogenesis-related protein Bet v I family
  misc_feature (31)..(190): NCBI GI NO: 16589076 NR Description: pathogen-related protein [Oryza sativa]
  misc_feature (31)..(190): NCBI GI NO: 7442203 NR Description: pathogenesis-related protein - sorghum
  misc_feature (33)..(189): NCBI GI NO: 1572683 NR Description: early flowering protein 1 [Asparagus officinalis]
  misc_feature (37)..(189): NCBI GI NO: 4325333 NR Description: intracellular pathogenesis-related protein PR-107
  misc_feature (36)..(189): NCBI GI NO: 939857 NR Description: pathogenesis related protein
  misc_feature (33)..(189): NCBI GI NO: 4210626 NR Description: intracellular pathogenesis-related protein
  misc_feature (37)..(189): NCBI GI NO: 6649902 NR Description: intracellular pathogenesis-related protein PR-105
  misc_feature (37)..(189): NCBI GI NO: 6649904 NR Description: intracellular pathogenesis-related protein PR-106
  misc_feature (33)..(189): NCBI GI NO: 548591 NR Description: Pathogenesis-related protein 1 (AOPR1)
  misc_feature (33)..(189): NCBI GI NO: 4210624 NR Description: intracellular pathogenesis-related protein
NASRSYNPKTICFSLQLAPSLVGRSITEVVMASANSWTLEIASPVAPQRLFRAAVMDWHTLAPKVASHVVASAQPVEGDGGVGSVRQFNFTSVMPFSFMKERLEFLDADKCECKNTLIEGGGIGVAIETATSHIKVEPAAGGGSVVKVESTYKLLPGVEVKDEIAKAKESVTAIFKGAEAYLVANPDAYN

SEQ ID NO: 29791 - protein, 160 aa, Zea mays subsp. mays
  peptide (1)..(160): Ceres Seq. ID no. 12403110
  misc_feature (2)..(155): Pfam Name: Pfam Description:  Pathogenesis-related protein Bet v I family
  misc_feature (1)..(160): NCBI GI NO: 16589076 NR Description: pathogen-related protein [Oryza sativa]
  misc_feature (1)..(160): NCBI GI NO: 7442203 NR Description: pathogenesis-related protein - sorghum
  misc_feature (3)..(159): NCBI GI NO: 1572683 NR Description: early flowering protein 1 [Asparagus officinalis]
  misc_feature (7)..(159): NCBI GI NO: 4325333 NR Description: intracellular pathogenesis-related protein PR-107
  misc_feature (6)..(159): NCBI GI NO: 939857 NR Description: pathogenesis related protein
  misc_feature (3)..(159): NCBI GI NO: 4210626 NR Description: intracellular pathogenesis-related protein
  misc_feature (7)..(159): NCBI GI NO: 6649902 NR Description: intracellular pathogenesis-related protein PR-105
  misc_feature (7)..(159): NCBI GI NO: 6649904 NR Description: intracellular pathogenesis-related protein PR-106
  misc_feature (3)..(159): NCBI GI NO: 548591 NR Description: Pathogenesis-related protein 1 (AOPR1)
  misc_feature (3)..(159): NCBI GI NO: 4210624 NR Description: intracellular pathogenesis-related protein
MASANSWTLEIASPVAPQRLFRAAVMDWHTLAPKVASHVVASAQPVEGDGGVGSVRQFNFTSVMPFSFMKERLEFLDADKCECKNTLIEGGGIGVAIETATSHIKVEPAAGGGSVVKVESTYKLLPGVEVKDEIAKAKESVTAIFKGAEAYLVANPDAYN

SEQ ID NO: 29792 - protein, 135 aa, Zea mays subsp. mays
  peptide (1)..(135): Ceres Seq. ID no. 12403111
  misc_feature (1)..(130): Pfam Name: Pfam Description:  Pathogenesis-related protein Bet v I family
  misc_feature (1)..(135): NCBI GI NO: 16589076 NR Description: pathogen-related protein [Oryza sativa]
  misc_feature (1)..(135): NCBI GI NO: 7442203 NR Description: pathogenesis-related protein - sorghum
  misc_feature (1)..(134): NCBI GI NO: 1572683 NR Description: early flowering protein 1 [Asparagus officinalis]
  misc_feature (1)..(134): NCBI GI NO: 4325333 NR Description: intracellular pathogenesis-related protein PR-107
  misc_feature (1)..(134): NCBI GI NO: 939857 NR Description: pathogenesis related protein
  misc_feature (1)..(134): NCBI GI NO: 4210626 NR Description: intracellular pathogenesis-related protein
  misc_feature (1)..(134): NCBI GI NO: 6649902 NR Description: intracellular pathogenesis-related protein PR-105
  misc_feature (1)..(134): NCBI GI NO: 6649904 NR Description: intracellular pathogenesis-related protein PR-106
  misc_feature (1)..(134): NCBI GI NO: 548591 NR Description: Pathogenesis-related protein 1 (AOPR1)
  misc_feature (1)..(134): NCBI GI NO: 4210624 NR Description: intracellular pathogenesis-related protein
MDWHTLAPKVASHVVASAQPVEGDGGVGSVRQFNFTSVMPFSFMKERLEFLDADKCECKNTLIEGGGIGVAIETATSHIKVEPAAGGGSVVKVESTYKLLPGVEVKDEIAKAKESVTAIFKGAEAYLVANPDAYN

SEQ ID NO: 29793 - DNA, 1102 bp, Zea mays subsp. mays
  misc_feature (1)..(1102): Ceres Seq. ID no. 12362589
aactccccccatcctccccgccacctctcaccccccgcaagcgagtcagccaagccaagcgacgcccaacccccgcctccattcccgggccggagacgcgcctgcctggccgcgacgccgccagccatgggaatggggccgctcgacaacgccgcgtcggccgcgctggaggccgccgccgccgccgccgccgccccctcgcgggcgggctcgtacgcggtgctgcagtgcggcgaggactcggagtacgtgcggcagaagtacggcggctacttcgccgtcttccgcgcgctgctggaggaggacggcgagaggtggcgggtgtacagcggccgtccgcggggagctccccgccgacgccgaggcagccgggttcgacgggttcgtcatctccgggagctgcgccgacgcgcacggcgacgagccctggatcctcgcgctcgtcgacctcacccgccgcgtccacgccgccggcaagcgcgtcctcggcgtctgcttcggccaccagatcctgtgccgggcgctgggcgggcgcacggggcggtcggccaagggctgggacatcggggtgagctgcatccacccgacggcggcggcggcgcggctgttcgcgccgctgaagctgcccgtgcacatgccggtgatcgagttccaccaggacgaggtgtgggagctgccccccggcgccgaggcgctggcgcggtcggacaagacccgcgtcgagatgttccgcctcggcgcccgcgccatgggcgtccagggccacccggagtacagcaaggacgtcctcatgagcatcgccgaccgcctcctccgccacaaccacatactggactgccaggtggacgtggccaaggcgagcttcgacgtgcggcagccggacaaggagttgtggagcaaggtgtgcaggggcttcctcaagggaaggctccagtcgtcgcagcagcaaggtgtggcgctatagcaggaggaaattggggggcattggatgcctaggttaatccgtcatattgtttgtttttttattatatgtgcttcagaactcaagagttgtacagaaactgctatcttcgtccgaagcattaataaaaaaaaaggaggg

SEQ ID NO: 29794 - protein, 331 aa, Zea mays subsp. mays
  peptide (1)..(331): Ceres Seq. ID no. 12362590
  misc_feature (43)..(109): NCBI GI NO: 13174241 NR Description: putative glutamine synthetase [Oryza sativa]
  misc_feature (72)..(109): NCBI GI NO: 15224079 NR Description: unknown protein; protein id: At2g23970.1
  misc_feature (80)..(109): NCBI GI NO: 17381294 NR Description: AT4g30550/F17I23_110 [Arabidopsis thaliana]
  misc_feature (80)..(109): NCBI GI NO: 15234767 NR Description: putative protein; protein id: At4g30550
  misc_feature (80)..(112): NCBI GI NO: 21555885 NR Description: unknown [Arabidopsis thaliana]
  misc_feature (72)..(111): NCBI GI NO: 15234763 NR Description: putative protein; protein id: At4g30530
  misc_feature (72)..(111): NCBI GI NO: 14009290 NR Description: defense-related protein [Brassica carinata]
  misc_feature (72)..(111): NCBI GI NO: 21593315 NR Description: defense-related protein [Arabidopsis thaliana]
  misc_feature (72)..(114): NCBI GI NO: 15234765 NR Description: putative protein; protein id: At4g30540.1
  misc_feature (72)..(111): NCBI GI NO: 15224078 NR Description: unknown protein; protein id: At2g23960.1
NSPHPPRHLSPPASESAKPSDAQPPPPFPGRRRACLAATPPAMGMGPLDNAASAALEAAAAAAAAPSRAGSYAVLQCGEDSEYVRQKYGGYFAVFRALLEEDGERWRVYSGRPRGAPRRRRGSRVRRVRHLRELRRRARRRALDPRARRPHPPRPRRRQARPRRLLRPPDPVPGAGRAHGAVGQGLGHRGELHPPDGGGGAAVRAAEAARAHAGDRVPPGRGVGAAPRRRGAGAVGQDPRRDVPPRRPRHGRPGPPGVQQGRPHEHRRPPPPPQPHTGLPGGRGQGELRRAAAGQGVVEQGVQGLPQGKAPVVAAARCGAIAGGNWGALDA

SEQ ID NO: 29795 - protein, 320 aa, Zea mays subsp. mays
  peptide (1)..(320): Ceres Seq. ID no. 12362591
  misc_feature (111)..(278): Pfam Name: Pfam Description:  Glutamine amidotransferase class-I
  misc_feature (111)..(315): NCBI GI NO: 13174241 NR Description: putative glutamine synthetase [Oryza sativa]
  misc_feature (112)..(309): NCBI GI NO: 15224079 NR Description: unknown protein; protein id: At2g23970.1
  misc_feature (112)..(308): NCBI GI NO: 17381294 NR Description: AT4g30550/F17I23_110 [Arabidopsis thaliana]
  misc_feature (112)..(308): NCBI GI NO: 15234767 NR Description: putative protein; protein id: At4g30550
  misc_feature (112)..(308): NCBI GI NO: 21555885 NR Description: unknown [Arabidopsis thaliana]
  misc_feature (112)..(313): NCBI GI NO: 15234763 NR Description: putative protein; protein id: At4g30530
  misc_feature (112)..(313): NCBI GI NO: 14009290 NR Description: defense-related protein [Brassica carinata]
  misc_feature (112)..(313): NCBI GI NO: 21593315 NR Description: defense-related protein [Arabidopsis thaliana]
  misc_feature (112)..(309): NCBI GI NO: 15234765 NR Description: putative protein; protein id: At4g30540.1
  misc_feature (112)..(276): NCBI GI NO: 15224078 NR Description: unknown protein; protein id: At2g23960.1
TPPILPATSHPPQASQPSQATPNPRLHSRAGDAPAWPRRRQPWEWGRSTTPRRPRWRPPPPPPPPPRGRARTRCCSAARTRSTCGRSTAATSPSSARCWRRTARGGGCTAAVRGELPADAEAAGFDGFVISGSCADAHGDEPWILALVDLTRRVHAAGKRVLGVCFGHQILCRALGGRTGRSAKGWDIGVSCIHPTAAAARLFAPLKLPVHMPVIEFHQDEVWELPPGAEALARSDKTRVEMFRLGARAMGVQGHPEYSKDVLMSIADRLLRHNHILDCQVDVAKASFDVRQPDKELWSKVCRGFLKGRLQSSQQQGVAL

SEQ ID NO: 29796 - protein, 289 aa, Zea mays subsp. mays
  peptide (1)..(289): Ceres Seq. ID no. 12362592
  misc_feature (1)..(67): NCBI GI NO: 13174241 NR Description: putative glutamine synthetase [Oryza sativa]
  misc_feature (30)..(67): NCBI GI NO: 15224079 NR Description: unknown protein; protein id: At2g23970.1
  misc_feature (38)..(67): NCBI GI NO: 17381294 NR Description: AT4g30550/F17I23_110 [Arabidopsis thaliana]
  misc_feature (38)..(67): NCBI GI NO: 15234767 NR Description: putative protein; protein id: At4g30550
  misc_feature (38)..(70): NCBI GI NO: 21555885 NR Description: unknown [Arabidopsis thaliana]
  misc_feature (30)..(69): NCBI GI NO: 15234763 NR Description: putative protein; protein id: At4g30530
  misc_feature (30)..(69): NCBI GI NO: 14009290 NR Description: defense-related protein [Brassica carinata]
  misc_feature (30)..(69): NCBI GI NO: 21593315 NR Description: defense-related protein [Arabidopsis thaliana]
  misc_feature (30)..(72): NCBI GI NO: 15234765 NR Description: putative protein; protein id: At4g30540.1
  misc_feature (30)..(69): NCBI GI NO: 15224078 NR Description: unknown protein; protein id: At2g23960.1
MGMGPLDNAASAALEAAAAAAAAPSRAGSYAVLQCGEDSEYVRQKYGGYFAVFRALLEEDGERWRVYSGRPRGAPRRRRGSRVRRVRHLRELRRRARRRALDPRARRPHPPRPRRRQARPRRLLRPPDPVPGAGRAHGAVGQGLGHRGELHPPDGGGGAAVRAAEAARAHAGDRVPPGRGVGAAPRRRGAGAVGQDPRRDVPPRRPRHGRPGPPGVQQGRPHEHRRPPPPPQPHTGLPGGRGQGELRRAAAGQGVVEQGVQGLPQGKAPVVAAARCGAIAGGNWGALDA

SEQ ID NO: 29797 - DNA, 917 bp, Zea mays subsp. mays
  misc_feature (1)..(917): Ceres Seq. ID no. 13493285
tcttcacccacattataaagatcctccacttcgcactttcgccgccgcctctctccttcccgagcaggaggcggacaaggtaagcagcaatcgcaggaaccctagcgccgccgcacccgcaggaatgggtatcgacctcgtcgccggtgggaggaataagaagaccaagcgcactgcgcccaagtctgacgatgtctacctcaagctcctcgtcaagctctaccgtttcttggtcaggaggaccaagagcaatttcaacgctgtcattctcaagaggcttttcatgagtaaaaccaaccgaccaccaatctccatgcgccgccttgtcaagtttatggaaggaaaggagaagaacattgctgtcattgttggcacagtcacagatgacaaaaggatccaggaggttccagcaatgaaggttactgccctgaggttcacggagacagcaagggccaggattgtcaatgctggtggcgagtgcctcacatttgaccagcttgctcttcgtgctccacttggcgagaacacggtcctcttgaggggccccaagaatgcccgtgaggcagtgaggcactttggcaaggctcctggagtgccgcacagccacaccaagccgtatgtgcgctccaagggaaggaagttcgagaaggctcgtggcaggaggaacagccgtggattcaaggtttaaaacaaattgtggccctccgtgttgccatcagcatagtgcaaccgttgtgtttgatcagtcgacagtaattagtcatcactctgtaccgagattagtagcacaatttgttgtcctggtttgaattttggaagatatttgatgtcgtctccttattatctactcgttactggttgagcacgaagattgttttgtgatactcctacatgatttaagacggttcccgacgttc

SEQ ID NO: 29798 - protein, 228 aa, Zea mays subsp. mays
  peptide (1)..(228): Ceres Seq. ID no. 13493286
  misc_feature (42)..(228): NCBI GI NO: 34897628 NR Description: cytoplasmic ribosomal protein L18 [Oryza sativa]
  misc_feature (42)..(228): NCBI GI NO: 34393858 NR Description: putative cytoplasmic ribosomal protein L18
  misc_feature (42)..(228): NCBI GI NO: 606970 NR Description: cytoplasmic ribosomal protein L18
  misc_feature (42)..(228): NCBI GI NO: 15241061 NR Description: 60S ribosomal protein L18 (RPL18C)
  misc_feature (42)..(228): NCBI GI NO: 15230011 NR Description: 60S ribosomal protein L18 (RPL18B)
  misc_feature (45)..(228): NCBI GI NO: 6094021 NR Description: 60S RIBOSOMAL PROTEIN L18
  misc_feature (43)..(228): NCBI GI NO: 7440855 NR Description: ribosomal protein L18
  misc_feature (42)..(204): NCBI GI NO: 28798549 NR Description: 60S ribosomal protein [Medicago sativa]
  misc_feature (42)..(227): NCBI GI NO: 28630356 NR Description: ribosomal protein L18 [Petromyzon marinus]
  misc_feature (42)..(227): NCBI GI NO: 4506607 NR Description: ribosomal protein L18; 60S ribosomal protein L18
LHPHYKDPPLRTFAAASLLPEQEADKVSSNRRNPSAAAPAGMGIDLVAGGRNKKTKRTAPKSDDVYLKLLVKLYRFLVRRTKSNFNAVILKRLFMSKTNRPPISMRRLVKFMEGKEKNIAVIVGTVTDDKRIQEVPAMKVTALRFTETARARIVNAGGECLTFDQLALRAPLGENTVLLRGPKNAREAVRHFGKAPGVPHSHTKPYVRSKGRKFEKARGRRNSRGFKV

SEQ ID NO: 29799 - protein, 187 aa, Zea mays subsp. mays
  peptide (1)..(187): Ceres Seq. ID no. 13493287
  misc_feature (1)..(187): NCBI GI NO: 34897628 NR Description: cytoplasmic ribosomal protein L18 [Oryza sativa]
  misc_feature (1)..(187): NCBI GI NO: 34393858 NR Description: putative cytoplasmic ribosomal protein L18
  misc_feature (1)..(187): NCBI GI NO: 606970 NR Description: cytoplasmic ribosomal protein L18
  misc_feature (1)..(187): NCBI GI NO: 15241061 NR Description: 60S ribosomal protein L18 (RPL18C)
  misc_feature (1)..(187): NCBI GI NO: 15230011 NR Description: 60S ribosomal protein L18 (RPL18B)
  misc_feature (4)..(187): NCBI GI NO: 6094021 NR Description: 60S RIBOSOMAL PROTEIN L18
  misc_feature (2)..(187): NCBI GI NO: 7440855 NR Description: ribosomal protein L18
  misc_feature (1)..(163): NCBI GI NO: 28798549 NR Description: 60S ribosomal protein [Medicago sativa]
  misc_feature (1)..(186): NCBI GI NO: 28630356 NR Description: ribosomal protein L18 [Petromyzon marinus]
  misc_feature (1)..(186): NCBI GI NO: 4506607 NR Description: ribosomal protein L18; 60S ribosomal protein L18
MGIDLVAGGRNKKTKRTAPKSDDVYLKLLVKLYRFLVRRTKSNFNAVILKRLFMSKTNRPPISMRRLVKFMEGKEKNIAVIVGTVTDDKRIQEVPAMKVTALRFTETARARIVNAGGECLTFDQLALRAPLGENTVLLRGPKNAREAVRHFGKAPGVPHSHTKPYVRSKGRKFEKARGRRNSRGFKV

SEQ ID NO: 29800 - protein, 134 aa, Zea mays subsp. mays
  peptide (1)..(134): Ceres Seq. ID no. 13493288
  misc_feature (1)..(134): NCBI GI NO: 34897628 NR Description: cytoplasmic ribosomal protein L18 [Oryza sativa]
  misc_feature (1)..(134): NCBI GI NO: 34393858 NR Description: putative cytoplasmic ribosomal protein L18
  misc_feature (1)..(134): NCBI GI NO: 606970 NR Description: cytoplasmic ribosomal protein L18
  misc_feature (1)..(134): NCBI GI NO: 15241061 NR Description: 60S ribosomal protein L18 (RPL18C)
  misc_feature (1)..(134): NCBI GI NO: 15230011 NR Description: 60S ribosomal protein L18 (RPL18B)
  misc_feature (1)..(134): NCBI GI NO: 6094021 NR Description: 60S RIBOSOMAL PROTEIN L18
  misc_feature (1)..(134): NCBI GI NO: 7440855 NR Description: ribosomal protein L18
  misc_feature (1)..(110): NCBI GI NO: 28798549 NR Description: 60S ribosomal protein [Medicago sativa]
  misc_feature (1)..(133): NCBI GI NO: 28630356 NR Description: ribosomal protein L18 [Petromyzon marinus]
  misc_feature (1)..(133): NCBI GI NO: 4506607 NR Description: ribosomal protein L18; 60S ribosomal protein L18
MSKTNRPPISMRRLVKFMEGKEKNIAVIVGTVTDDKRIQEVPAMKVTALRFTETARARIVNAGGECLTFDQLALRAPLGENTVLLRGPKNAREAVRHFGKAPGVPHSHTKPYVRSKGRKFEKARGRRNSRGFKV

SEQ ID NO: 29801 - DNA, 1185 bp, Zea mays subsp. mays
  misc_feature (1)..(1185): Ceres Seq. ID no. 12372341
attgctggtaccgacccgtccccaccagtccagtctataagagcgacgggatcacggaaacctgttcaccgctgcgccgcctcactattgactgtcggattccccactcgccggcgacaaccgccgcgcccgatccgtctgctaggtcttgcacctccgggctctggccatggctgccgaagctggcccaatctccaaggtcctcatcgtcgtagcgatgcagacggaggcgatgccgctcgtccacaagttcaagctcgtcgaggcgcccgcccacgaatccacatttcctaaaggtgccccatgggttaggtaccatggcaactacaaaggcctccacattgaccttgtattgcctggaaaggatgctgttttaggagtcgacagtgttggtacggtatcggcagctcttttgactagtttttccattcaaacattgaagccagaccttatcattaatgctggcactgctggtggcttcaaggccaaaggggcaagcattggagatgtattcctggcatcagatgtttcattccatgacaggaggataccaatacctgtttttgacatgtatggaattggagcacggaaaacttctgcagttcctaatatcttgaaggaactcaatttgaagattggcaaattgtcgactggggattctctggatatgtctccccaggatgagaaggtgatactgagcaatgatgctacagtaaaggatatggagggagctgctgtggcatatgtcgccgacatgttttcaacgccagcgatctttgtgaaagctgtgactgatatcgtggatggggataagccaacatctgaggagtttctgcagaacctgattgccgtgacggcggcactggacctggcagtcaccaaagtggtggatttcatcagcgggaaacgcatctctgatctttgaaggctgtcatgaaatacgacacccccactgctctgatgcacgatgctaggctacgaacaatacaacattgggtcaacgattttttgtgaggtgttttctatgtgaggttaaaccttcttaaccctgtgtacaaaattcctgccaattgctatgggccggccatagcgtggaattttatagaataatttgcaaaatgtattttgtggtgcaaatatcgatatataataatatgctgggggacgggatccccgtgggattag

SEQ ID NO: 29802 - protein, 251 aa, Zea mays subsp. mays
  peptide (1)..(251): Ceres Seq. ID no. 12372342
  misc_feature (10)..(235): Pfam Name: Pfam Description:  Phosphorylase family
  misc_feature (5)..(251): NCBI GI NO: 34897892 NR Description: ESTs C28489
  misc_feature (5)..(251): NCBI GI NO: 18087497 NR Description: methylthioadenosine/ S-adenosyl homocysteinenucleosidase
  misc_feature (1)..(251): NCBI GI NO: 7406708 NR Description: putative ripening-related protein [Vitis vinifera]
  misc_feature (7)..(251): NCBI GI NO: 15234791 NR Description: putative protein; protein id: At4g38800
  misc_feature (4)..(251): NCBI GI NO: 30690140 NR Description: expressed protein [Arabidopsis thaliana]
  misc_feature (53)..(251): NCBI GI NO: 7486865 NR Description: hypothetical protein T11I11
  misc_feature (62)..(216): NCBI GI NO: 24372900 NR Description: 5-methylthioadenosine nucleosidase/ S-adenosylhomocysteine nucleosidase
  misc_feature (65)..(222): NCBI GI NO: 23467396 NR Description: hypothetical protein [Haemophilus somnus 129PT]
  misc_feature (64)..(222): NCBI GI NO: 23037085 NR Description: hypothetical protein [Oenococcus oeni MCW]
  misc_feature (64)..(238): NCBI GI NO: 16079781 NR Description: similar to purine nucleoside phosphorylase
MAAEAGPISKVLIVVAMQTEAMPLVHKFKLVEAPAHESTFPKGAPWVRYHGNYKGLHIDLVLPGKDAVLGVDSVGTVSAALLTSFSIQTLKPDLIINAGTAGGFKAKGASIGDVFLASDVSFHDRRIPIPVFDMYGIGARKTSAVPNILKELNLKIGKLSTGDSLDMSPQDEKVILSNDATVKDMEGAAVAYVADMFSTPAIFVKAVTDIVDGDKPTSEEFLQNLIAVTAALDLAVTKVVDFISGKRISDL

SEQ ID NO: 29803 - protein, 235 aa, Zea mays subsp. mays
  peptide (1)..(235): Ceres Seq. ID no. 12372343
  misc_feature (1)..(219): Pfam Name: Pfam Description:  Phosphorylase family
  misc_feature (1)..(235): NCBI GI NO: 34897892 NR Description: ESTs C28489
  misc_feature (1)..(235): NCBI GI NO: 18087497 NR Description: methylthioadenosine/ S-adenosyl homocysteinenucleosidase
  misc_feature (1)..(235): NCBI GI NO: 7406708 NR Description: putative ripening-related protein [Vitis vinifera]
  misc_feature (1)..(235): NCBI GI NO: 15234791 NR Description: putative protein; protein id: At4g38800
  misc_feature (1)..(235): NCBI GI NO: 30690140 NR Description: expressed protein [Arabidopsis thaliana]
  misc_feature (37)..(235): NCBI GI NO: 7486865 NR Description: hypothetical protein T11I11
  misc_feature (46)..(200): NCBI GI NO: 24372900 NR Description: 5-methylthioadenosine nucleosidase/ S-adenosylhomocysteine nucleosidase
  misc_feature (49)..(206): NCBI GI NO: 23467396 NR Description: hypothetical protein [Haemophilus somnus 129PT]
  misc_feature (48)..(206): NCBI GI NO: 23037085 NR Description: hypothetical protein [Oenococcus oeni MCW]
  misc_feature (48)..(222): NCBI GI NO: 16079781 NR Description: similar to purine nucleoside phosphorylase
MQTEAMPLVHKFKLVEAPAHESTFPKGAPWVRYHGNYKGLHIDLVLPGKDAVLGVDSVGTVSAALLTSFSIQTLKPDLIINAGTAGGFKAKGASIGDVFLASDVSFHDRRIPIPVFDMYGIGARKTSAVPNILKELNLKIGKLSTGDSLDMSPQDEKVILSNDATVKDMEGAAVAYVADMFSTPAIFVKAVTDIVDGDKPTSEEFLQNLIAVTAALDLAVTKVVDFISGKRISDL

SEQ ID NO: 29804 - protein, 230 aa, Zea mays subsp. mays
  peptide (1)..(230): Ceres Seq. ID no. 12372344
  misc_feature (1)..(214): Pfam Name: Pfam Description:  Phosphorylase family
  misc_feature (1)..(230): NCBI GI NO: 34897892 NR Description: ESTs C28489
  misc_feature (1)..(230): NCBI GI NO: 18087497 NR Description: methylthioadenosine/ S-adenosyl homocysteinenucleosidase
  misc_feature (1)..(230): NCBI GI NO: 7406708 NR Description: putative ripening-related protein [Vitis vinifera]
  misc_feature (1)..(230): NCBI GI NO: 15234791 NR Description: putative protein; protein id: At4g38800
  misc_feature (1)..(230): NCBI GI NO: 30690140 NR Description: expressed protein [Arabidopsis thaliana]
  misc_feature (32)..(230): NCBI GI NO: 7486865 NR Description: hypothetical protein T11I11
  misc_feature (41)..(195): NCBI GI NO: 24372900 NR Description: 5-methylthioadenosine nucleosidase/ S-adenosylhomocysteine nucleosidase
  misc_feature (44)..(201): NCBI GI NO: 23467396 NR Description: hypothetical protein [Haemophilus somnus 129PT]
  misc_feature (43)..(201): NCBI GI NO: 23037085 NR Description: hypothetical protein [Oenococcus oeni MCW]
  misc_feature (43)..(217): NCBI GI NO: 16079781 NR Description: similar to purine nucleoside phosphorylase
MPLVHKFKLVEAPAHESTFPKGAPWVRYHGNYKGLHIDLVLPGKDAVLGVDSVGTVSAALLTSFSIQTLKPDLIINAGTAGGFKAKGASIGDVFLASDVSFHDRRIPIPVFDMYGIGARKTSAVPNILKELNLKIGKLSTGDSLDMSPQDEKVILSNDATVKDMEGAAVAYVADMFSTPAIFVKAVTDIVDGDKPTSEEFLQNLIAVTAALDLAVTKVVDFISGKRISDL

SEQ ID NO: 29805 - DNA, 1186 bp, Zea mays subsp. mays
  misc_feature (1)..(1186): Ceres Seq. ID no. 12402393
ctcctcctcatggctctgtcgtccgccggctcgttcgtggcctgcagcctccggccaagcggatagcatccatgccccgaggtcgacttcgcacctgaagccgggtgctgcggcggcgtcgttcacgaggacgccgcagcgccgggcgaacgcgaccaagggcggcgtgtccaccgtgtgcgagccgctgggccccgaccggccgatctggttccccggcagctcccctccgccgtggctcgacggaagccttccaggagactttggatttgaccctctcggactaggttcggagccggagctgctgcggtggttcgcgcaggcggagctgatgcacgggcggtgggcgatgctggcggcggcgggcatccttatcccggacctgctggcgcggtggggcttcatcgacgcggggttctcgtggttcgacgccgggtcccgcgagtacttcgcggacccctggacgctgttcgtgtcgcagatggcgctgatggggtgggcggaggggcggcggtgggcggactacctgaggcccgggtgcgtggacatcgagccgcgcttcccgaaccgcaagaacccggtccccgacgtggggtaccccggcgggctgtggttcgactgggccaactggggccgcgggtccccggagcccgtgatggtgctgcgcaccaaggagatcaagaacggccgcctcgccatgctcgccttcgtcggcttctggttccaggccgtgtacacggggcagggccccatcgacaacctgctcgcgcacctcgccgaccccggccactgcaacatcttctccggcgttcacgtcccactgatccgatgttgcttcggagctggcggagagactgcgaagaattaaaaaaaaaagtgcatcctgttgagggagaaagaacttcgcttggtcggtatcattttggccctgctggacatgtcaacattttgtttgtagtacctgcgtagaaatgtcaaaccacctgtacaaacgtacaaataccaccccagggatcgcgatgatgctagccagcagtccagcacacactagcttgtcctgaagatccatgcaacaccgtatacgagacaattgtatttttgggactacaaacagtgtgctttgcaataatgtcattccaaacaattagctcgcagaaatgggattataaagatcttataattgatt

SEQ ID NO: 29806 - protein, 288 aa, Zea mays subsp. mays
  peptide (1)..(288): Ceres Seq. ID no. 12402394
  misc_feature (75)..(243): Pfam Name: Pfam Description:  Chlorophyll A-B binding protein
  misc_feature (27)..(268): NCBI GI NO: 27754356 NR Description: putative light-harvesting chlorophyll a/b bindingprotein
  misc_feature (33)..(268): NCBI GI NO: 15221956 NR Description: light-harvesting chlorophyll a/b binding protein
  misc_feature (33)..(268): NCBI GI NO: 25299032 NR Description: hypothetical protein T29M8
  misc_feature (37)..(268): NCBI GI NO: 1084336 NR Description: chlorophyll a/b-binding protein type II -Arabidopsis thaliana
  misc_feature (25)..(267): NCBI GI NO: 34393511 NR Description: putative photosystem I antenna protein
  misc_feature (20)..(268): NCBI GI NO: 2129879 NR Description: chlorophyll a/b-binding protein type II precursor
  misc_feature (35)..(268): NCBI GI NO: 115765 NR Description: Chlorophyll A-B binding protein 7
  misc_feature (35)..(268): NCBI GI NO: 99486 NR Description: chlorophyll a/b-binding protein
  misc_feature (35)..(268): NCBI GI NO: 115766 NR Description: Chlorophyll A-B binding protein
  misc_feature (15)..(268): NCBI GI NO: 18376587 NR Description: putative chlorophyll A-B binding protein of LHCItype II precursor
SSSWLCRPPARSWPAASGQADSIHAPRSTSHLKPGAAAASFTRTPQRRANATKGGVSTVCEPLGPDRPIWFPGSSPPPWLDGSLPGDFGFDPLGLGSEPELLRWFAQAELMHGRWAMLAAAGILIPDLLARWGFIDAGFSWFDAGSREYFADPWTLFVSQMALMGWAEGRRWADYLRPGCVDIEPRFPNRKNPVPDVGYPGGLWFDWANWGRGSPEPVMVLRTKEIKNGRLAMLAFVGFWFQAVYTGQGPIDNLLAHLADPGHCNIFSGVHVPLIRCCFGAGGETAKN

SEQ ID NO: 29807 - protein, 178 aa, Zea mays subsp. mays
  peptide (1)..(178): Ceres Seq. ID no. 12402395
  misc_feature (1)..(133): Pfam Name: Pfam Description:  Chlorophyll A-B binding protein
  misc_feature (1)..(158): NCBI GI NO: 27754356 NR Description: putative light-harvesting chlorophyll a/b bindingprotein
  misc_feature (1)..(158): NCBI GI NO: 15221956 NR Description: light-harvesting chlorophyll a/b binding protein
  misc_feature (1)..(158): NCBI GI NO: 25299032 NR Description: hypothetical protein T29M8
  misc_feature (1)..(158): NCBI GI NO: 1084336 NR Description: chlorophyll a/b-binding protein type II -Arabidopsis thaliana
  misc_feature (1)..(157): NCBI GI NO: 34393511 NR Description: putative photosystem I antenna protein
  misc_feature (1)..(158): NCBI GI NO: 2129879 NR Description: chlorophyll a/b-binding protein type II precursor
  misc_feature (1)..(158): NCBI GI NO: 115765 NR Description: Chlorophyll A-B binding protein 7
  misc_feature (1)..(158): NCBI GI NO: 99486 NR Description: chlorophyll a/b-binding protein
  misc_feature (1)..(158): NCBI GI NO: 115766 NR Description: Chlorophyll A-B binding protein
  misc_feature (1)..(158): NCBI GI NO: 18376587 NR Description: putative chlorophyll A-B binding protein of LHCItype II precursor
MHGRWAMLAAAGILIPDLLARWGFIDAGFSWFDAGSREYFADPWTLFVSQMALMGWAEGRRWADYLRPGCVDIEPRFPNRKNPVPDVGYPGGLWFDWANWGRGSPEPVMVLRTKEIKNGRLAMLAFVGFWFQAVYTGQGPIDNLLAHLADPGHCNIFSGVHVPLIRCCFGAGGETAKN

SEQ ID NO: 29808 - protein, 172 aa, Zea mays subsp. mays
  peptide (1)..(172): Ceres Seq. ID no. 12402396
  misc_feature (1)..(127): Pfam Name: Pfam Description:  Chlorophyll A-B binding protein
  misc_feature (1)..(152): NCBI GI NO: 27754356 NR Description: putative light-harvesting chlorophyll a/b bindingprotein
  misc_feature (1)..(152): NCBI GI NO: 15221956 NR Description: light-harvesting chlorophyll a/b binding protein
  misc_feature (1)..(152): NCBI GI NO: 25299032 NR Description: hypothetical protein T29M8
  misc_feature (1)..(152): NCBI GI NO: 1084336 NR Description: chlorophyll a/b-binding protein type II -Arabidopsis thaliana
  misc_feature (1)..(151): NCBI GI NO: 34393511 NR Description: putative photosystem I antenna protein
  misc_feature (1)..(152): NCBI GI NO: 2129879 NR Description: chlorophyll a/b-binding protein type II precursor
  misc_feature (1)..(152): NCBI GI NO: 115765 NR Description: Chlorophyll A-B binding protein 7
  misc_feature (1)..(152): NCBI GI NO: 99486 NR Description: chlorophyll a/b-binding protein
  misc_feature (1)..(152): NCBI GI NO: 115766 NR Description: Chlorophyll A-B binding protein
  misc_feature (1)..(152): NCBI GI NO: 18376587 NR Description: putative chlorophyll A-B binding protein of LHCItype II precursor
MLAAAGILIPDLLARWGFIDAGFSWFDAGSREYFADPWTLFVSQMALMGWAEGRRWADYLRPGCVDIEPRFPNRKNPVPDVGYPGGLWFDWANWGRGSPEPVMVLRTKEIKNGRLAMLAFVGFWFQAVYTGQGPIDNLLAHLADPGHCNIFSGVHVPLIRCCFGAGGETAKN

SEQ ID NO: 29809 - DNA, 2092 bp, Zea mays subsp. mays
  misc_feature (1)..(2092): Ceres Seq. ID no. 12359759
aaaaaagtgtgggccgagaaacatgtcgtctcacctcgccgcggccgcttccgcccttcctctccctcttcctccgccggcggtcgccgcgccttcccgcgccctccgagctctaatcctgtcccggggcggcgccgccgccgtatgctccagtctgcgccgcggcggcacgccggcatgcctcgtgcgtcgcctgtgctcccaccactccgccgcggcggcggcaacggcgttggaggaggcgcggcgcgggcggaagcagctcggaatgacgcctgcgctctacgactacctcctcgccaacgtccgcgagcaccccattctccgggagcttcgcgaggagaccgcggctatgagagggagccagatgcaggtttctcccgctcaggctcagctgttgtcaatgcttgtgcaaatccttggggcgcgccgttgcattgaagttggtgtgtttactgggtattcatcattagctgttgcactggcccttcctgaatctggtcacttggttgcttgtgagagggatgacagatgcctagaagttgccaagaagtactaccaacgtgctggtgttgcacataagattgatgtgaaacatgctttggctgcggattctctaagatcacttcttgattgcggcgaagcttccagctatgacttcgcatttgttgatgctgacaagagaatgtatgaggaatattatgaacttctactgaagctagtaagagttggtggtttaattgtaatggacaatgtcctttggtatggaagggttgccgatctactggttgatgatcaaaagacgatcagtataaggaacttcaataagaaagttttagaggacaagcgtgttgatatcagcatggtgccaattggagatgggatgacaatttgccggaagctagtagatacttgaattcaatatccatgatatcatcagtatatttgctatggttcgcaaaggttacaagaataacaacattgccaagctttgcgaggatcttgggcttgcagacagggccacaggtttaattgactatatgattggaaatgggcagcatcccgaagtttttcatttggtacaaaattttaatttggaggacaagtatcctccattttctcttctgaagggatacattcagaaggccaagcagacttttgtggagatgtttaaaaagagtcaaacacacgagtccttgaactgggctataccaaaggaactatggattgcacattatctagctgagcagaaactcactgattctaagcaacgcagtgctatcatggcagaaattaaatatttgatgagtggatatgaaaagaaacaaaggtcagaaaatctctcaacatgggcttcacagcatccgccaacggaatctaaaaggaggaacaggaagcgcaaggaggaggagcaggagcaccatgaagcacaatacaaccagcagcagcaggaacagaatgaaaacaagttaattcaaggaaagcggcatcagctgcatcaagaagaaaatatggcgcaagtgacacagcagcagcatatgcaaccgacaacaaggccagctactcttaagcttccgacgcctgctattcctctggttctgaatgcagctcagatccaaaactttgcgcgtccagcttacgccgctgtgcctggagttcacaattaccctgcccagccaggttggcctgcagctcaaggaagtccattcgtaccacagttcatgtcaccgcagtatatgggtctgccatttaatccctttggccttcatcctacttgctatcccagacgcagatagcgtagagagttctggcgttccgcgtccatttgctgagtgaaactgtggtgaagcgtacaagttatatgaaacagaccggtatcggttaactggttttgtgttcgtttgttatgctgtctgatggttccttttcgcgacatggtgatcactttgcattgatttgttgttcagccaagtggtggaatgcttggtgcttgcaatctgaaatgtacgcacggtaacaggaattgtagtacttttcaatcaattacataatggcatttcacaaatacctgaacggtgaacatcaatccctg

SEQ ID NO: 29810 - protein, 304 aa, Zea mays subsp. mays
  peptide (1)..(304): Ceres Seq. ID no. 12359760
  misc_feature (100)..(300): Pfam Name: Pfam Description:  O-methyltransferase
  misc_feature (63)..(300): NCBI GI NO: 15228652 NR Description: O-methyltransferase, family 3 family
  misc_feature (72)..(300): NCBI GI NO: 15228651 NR Description: O-methyltransferase, family 3 family
  misc_feature (72)..(300): NCBI GI NO: 21593560 NR Description: unknown [Arabidopsis thaliana]
  misc_feature (86)..(300): NCBI GI NO: 17232671 NR Description: O-methyltransferase [Nostoc sp. PCC 7120]
  misc_feature (88)..(300): NCBI GI NO: 23126866 NR Description: hypothetical protein [Nostoc punctiforme]
  misc_feature (85)..(300): NCBI GI NO: 23129851 NR Description: hypothetical protein [Nostoc punctiforme]
  misc_feature (90)..(300): NCBI GI NO: 7463011 NR Description: probable O-methyltransferase (EC 2
  misc_feature (94)..(300): NCBI GI NO: 23043526 NR Description: hypothetical protein
  misc_feature (86)..(301): NCBI GI NO: 3452357 NR Description: unknown [Legionella pneumophila]
  misc_feature (86)..(302): NCBI GI NO: 5257275 NR Description: ESTs AU030740
KKCGPRNMSSHLAAAASALPLPLPPPAVAAPSRALRALILSRGGAAAVCSSLRRGGTPACLVRRLCSHHSAAAAATALEEARRGRKQLGMTPALYDYLLANVREHPILRELREETAAMRGSQMQVSPAQAQLLSMLVQILGARRCIEVGVFTGYSSLAVALALPESGHLVACERDDRCLEVAKKYYQRAGVAHKIDVKHALAADSLRSLLDCGEASSYDFAFVDADKRMYEEYYELLLKLVRVGGLIVMDNVLWYGRVADLLVDDQKTISIRNFNKKVLEDKRVDISMVPIGDGMTICRKLVDT

SEQ ID NO: 29811 - protein, 297 aa, Zea mays subsp. mays
  peptide (1)..(297): Ceres Seq. ID no. 12359761
  misc_feature (93)..(293): Pfam Name: Pfam Description:  O-methyltransferase
  misc_feature (56)..(293): NCBI GI NO: 15228652 NR Description: O-methyltransferase, family 3 family
  misc_feature (65)..(293): NCBI GI NO: 15228651 NR Description: O-methyltransferase, family 3 family
  misc_feature (65)..(293): NCBI GI NO: 21593560 NR Description: unknown [Arabidopsis thaliana]
  misc_feature (79)..(293): NCBI GI NO: 17232671 NR Description: O-methyltransferase [Nostoc sp. PCC 7120]
  misc_feature (81)..(293): NCBI GI NO: 23126866 NR Description: hypothetical protein [Nostoc punctiforme]
  misc_feature (78)..(293): NCBI GI NO: 23129851 NR Description: hypothetical protein [Nostoc punctiforme]
  misc_feature (83)..(293): NCBI GI NO: 7463011 NR Description: probable O-methyltransferase (EC 2
  misc_feature (87)..(293): NCBI GI NO: 23043526 NR Description: hypothetical protein
  misc_feature (79)..(294): NCBI GI NO: 3452357 NR Description: unknown [Legionella pneumophila]
  misc_feature (79)..(295): NCBI GI NO: 5257275 NR Description: ESTs AU030740
MSSHLAAAASALPLPLPPPAVAAPSRALRALILSRGGAAAVCSSLRRGGTPACLVRRLCSHHSAAAAATALEEARRGRKQLGMTPALYDYLLANVREHPILRELREETAAMRGSQMQVSPAQAQLLSMLVQILGARRCIEVGVFTGYSSLAVALALPESGHLVACERDDRCLEVAKKYYQRAGVAHKIDVKHALAADSLRSLLDCGEASSYDFAFVDADKRMYEEYYELLLKLVRVGGLIVMDNVLWYGRVADLLVDDQKTISIRNFNKKVLEDKRVDISMVPIGDGMTICRKLVDT

SEQ ID NO: 29812 - protein, 281 aa, Zea mays subsp. mays
  peptide (1)..(281): Ceres Seq. ID no. 12359762
MVRKGYKNNNIAKLCEDLGLADRATGLIDYMIGNGQHPEVFHLVQNFNLEDKYPPFSLLKGYIQKAKQTFVEMFKKSQTHESLNWAIPKELWIAHYLAEQKLTDSKQRSAIMAEIKYLMSGYEKKQRSENLSTWASQHPPTESKRRNRKRKEEEQEHHEAQYNQQQQEQNENKLIQGKRHQLHQEENMAQVTQQQHMQPTTRPATLKLPTPAIPLVLNAAQIQNFARPAYAAVPGVHNYPAQPGWPAAQGSPFVPQFMSPQYMGLPFNPFGLHPTCYPRRR

SEQ ID NO: 29813 - DNA, 750 bp, Zea mays subsp. mays
  misc_feature (1)..(750): Ceres Seq. ID no. 12341819
acacctcatcgatatagctttatttcccttgcccttttccagggcacaccccctccagctctccgccgtcggccatgggtcaagcctggggtaatctccaagataggctccaagggcggcggtggaaggagcaccaggtgaggaagatcaccgacaaggtgttcgaccgcctcacggaggacgcccagaagcgcgacaaggaggccctcagattcgaggaggtctacatcgccgtcctctgcgtctacaatgacatcaataagtacttgccggggccgcaccacgaccccccgtccaaggagaagctcagggccatgatggaggagtacgacgtgaacctggacgggctcctggaccgcgaggagttcgcggagttcatccggaagctgaccgcggactcgctgtgctcgatcagcgtgaagctgctgatcacgctggtggcggcgccggcgctggcgatggcgaccaagcgggcgacggagggcgtccccggcgtgggcaaggtggtacgcaaggtgcccaacgcgctctacgcctccgccatcaccctgggcgttgtgctgttgcagagatcaaccgagggcgtcgagtgactcgcgctgctgaaactgcaatgtcgtcggctgtgtagatggagcagcgtatctaggataggtgttggttctttacggcttgtgcggtgaattgatctgtgtatcaattcgatgtgatttatcctggatttgggacaaatagttgtggatccttgtg

SEQ ID NO: 29814 - protein, 172 aa, Zea mays subsp. mays
  peptide (1)..(172): Ceres Seq. ID no. 12341820
  misc_feature (1)..(172): NCBI GI NO: 38344137 NR Description: OSJNBa0041A02.4
  misc_feature (6)..(162): NCBI GI NO: 18408144 NR Description: expressed protein; protein id: At1g64850
  misc_feature (1)..(165): NCBI GI NO: 38344138 NR Description: OSJNBa0041A02.5
  misc_feature (38)..(159): NCBI GI NO: 18420040 NR Description: Expressed protein; protein id: At4g37445
  misc_feature (38)..(159): NCBI GI NO: 26453144 NR Description: unknown protein [Arabidopsis thaliana]
MGQAWGNLQDRLQGRRWKEHQVRKITDKVFDRLTEDAQKRDKEALRFEEVYIAVLCVYNDINKYLPGPHHDPPSKEKLRAMMEEYDVNLDGLLDREEFAEFIRKLTADSLCSISVKLLITLVAAPALAMATKRATEGVPGVGKVVRKVPNALYASAITLGVVLLQRSTEGVE

SEQ ID NO: 29815 - protein, 92 aa, Zea mays subsp. mays
  peptide (1)..(92): Ceres Seq. ID no. 12341821
  misc_feature (1)..(92): NCBI GI NO: 38344137 NR Description: OSJNBa0041A02.4
  misc_feature (1)..(82): NCBI GI NO: 18408144 NR Description: expressed protein; protein id: At1g64850
  misc_feature (1)..(85): NCBI GI NO: 38344138 NR Description: OSJNBa0041A02.5
  misc_feature (1)..(79): NCBI GI NO: 18420040 NR Description: Expressed protein; protein id: At4g37445
  misc_feature (1)..(79): NCBI GI NO: 26453144 NR Description: unknown protein [Arabidopsis thaliana]
MMEEYDVNLDGLLDREEFAEFIRKLTADSLCSISVKLLITLVAAPALAMATKRATEGVPGVGKVVRKVPNALYASAITLGVVLLQRSTEGVE

SEQ ID NO: 29816 - protein, 91 aa, Zea mays subsp. mays
  peptide (1)..(91): Ceres Seq. ID no. 12341822
  misc_feature (1)..(91): NCBI GI NO: 38344137 NR Description: OSJNBa0041A02.4
  misc_feature (1)..(81): NCBI GI NO: 18408144 NR Description: expressed protein; protein id: At1g64850
  misc_feature (1)..(84): NCBI GI NO: 38344138 NR Description: OSJNBa0041A02.5
  misc_feature (1)..(78): NCBI GI NO: 18420040 NR Description: Expressed protein; protein id: At4g37445
  misc_feature (1)..(78): NCBI GI NO: 26453144 NR Description: unknown protein [Arabidopsis thaliana]
MEEYDVNLDGLLDREEFAEFIRKLTADSLCSISVKLLITLVAAPALAMATKRATEGVPGVGKVVRKVPNALYASAITLGVVLLQRSTEGVE

SEQ ID NO: 29817 - DNA, 849 bp, Zea mays subsp. mays
  misc_feature (1)..(849): Ceres Seq. ID no. 12402386
atccctcgtggcctctctcccctcctcacacaggcacacacgcactttctgtcagcttcctcccctgcgccgataagcaagcccgtgagccaacagtggtgccagcggcccgagcggcgaggatgcacagcggagcgaggaagctcatgtgggggaccagcccggacaggcccgacgaccacgacgtggtcatcgtgctcgcctcgctgctgtgcgcgctcatcaccgtcctcggcatcggcctcgtggcgcggtgcgcgtgcgcgcgcgggcccagcgcgcaggcggcggccgccgccaacaggggcgtcaagaagtcggtgctgcgcaggatccccaccgtgccctacgccgcctccgccgccgcctgcagccaaggggaaggggacgacgcggacgagtgcgccatctgcctggcggagttcgaggagggcgagcccacccgcgtgctgccccagtgcggccacgccttccacgccgcctgcgtcgacaggtggctgcgcgcccactcgtcctgcccctcctgccgccggatcctctccctccagctgccgcccggcgagcggtgccgccgctgcggcgcgcggcccctggacgacggggacgctgggtggaagcccacctactacagcgccatgccgccgttcctggcgtaagcggcggaggaatcgcccgatccggaagcaaagcaaagcaaacctgtatcaattaggggatcaattaggttgtttgttgcagctgaaaacactgcactgcagcgtgcgtagtagtagtactagtaccaggctggcgtgtacagtacagtttgtaaatactcaagtaattaatatgcatgcgatgagttttggt

SEQ ID NO: 29818 - protein, 283 aa, Zea mays subsp. mays
  peptide (1)..(283): Ceres Seq. ID no. 12402387
  misc_feature (20)..(186): Pfam Name: Pfam Description:  Glycoprotein GG/GX
  misc_feature (1)..(219): NCBI GI NO: 11360318 NR Description: probable mucin DKFZp434C196.1 - human (fragment)
  misc_feature (59)..(231): NCBI GI NO: 34395167 NR Description: hypothetical protein
IPRGLSPLLTQAHTHFLSASSPAPISKPVSQQWCQRPERRGCTAERGSSCGGPARTGPTTTTWSSCSPRCCARSSPSSASASWRGARARAGPARRRRPPPTGASRSRCCAGSPPCPTPPPPPPAAKGKGTTRTSAPSAWRSSRRASPPACCPSAATPSTPPASTGGCAPTRPAPPAAGSSPSSCRPASGAAAAARGPWTTGTLGGSPPTTAPCRRSWRKRRRNRPIRKQSKANLYQLGDQLGCLLQLKTLHCSVRSSSTSTRLACTVQFVNTQVINMHAMSFG

SEQ ID NO: 29819 - protein, 217 aa, Zea mays subsp. mays
  peptide (1)..(217): Ceres Seq. ID no. 12402388
  misc_feature (134)..(175): Pfam Name: RING finger Pfam Description: Zinc finger, C3HC4 type
  misc_feature (58)..(216): NCBI GI NO: 32487554 NR Description: OSJNBa0013K16.6
  misc_feature (95)..(198): NCBI GI NO: 37536508 NR Description: putative ring finger protein
  misc_feature (61)..(99): NCBI GI NO: 37536508 NR Description: putative ring finger protein
  misc_feature (1)..(194): NCBI GI NO: 7489432 NR Description: probable ring finger protein - barley
  misc_feature (61)..(193): NCBI GI NO: 15237013 NR Description: RING-H2 finger protein RHA3b; protein id:At4g35480
  misc_feature (59)..(193): NCBI GI NO: 15227839 NR Description: putative RING zinc finger protein
  misc_feature (52)..(206): NCBI GI NO: 15223041 NR Description: putative RING zinc finger protein
  misc_feature (52)..(206): NCBI GI NO: 21555237 NR Description: putative RING zinc finger protein
  misc_feature (61)..(196): NCBI GI NO: 15218042 NR Description: similar to putative RING zinc finger protein
  misc_feature (51)..(179): NCBI GI NO: 15241087 NR Description: putative protein; protein id: At5g01880.1
PSWPLSPPHTGTHALSVSFLPCADKQAREPTVVPAARAARMHSGARKLMWGTSPDRPDDHDVVIVLASLLCALITVLGIGLVARCACARGPSAQAAAAANRGVKKSVLRRIPTVPYAASAAACSQGEGDDADECAICLAEFEEGEPTRVLPQCGHAFHAACVDRWLRAHSSCPSCRRILSLQLPPGERCRRCGARPLDDGDAGWKPTYYSAMPPFLA

SEQ ID NO: 29820 - protein, 177 aa, Zea mays subsp. mays
  peptide (1)..(177): Ceres Seq. ID no. 12402389
  misc_feature (94)..(135): Pfam Name: RING finger Pfam Description: Zinc finger, C3HC4 type
  misc_feature (18)..(176): NCBI GI NO: 32487554 NR Description: OSJNBa0013K16.6
  misc_feature (55)..(158): NCBI GI NO: 37536508 NR Description: putative ring finger protein
  misc_feature (21)..(59): NCBI GI NO: 37536508 NR Description: putative ring finger protein
  misc_feature (1)..(154): NCBI GI NO: 7489432 NR Description: probable ring finger protein - barley
  misc_feature (21)..(153): NCBI GI NO: 15237013 NR Description: RING-H2 finger protein RHA3b; protein id:At4g35480
  misc_feature (19)..(153): NCBI GI NO: 15227839 NR Description: putative RING zinc finger protein
  misc_feature (12)..(166): NCBI GI NO: 15223041 NR Description: putative RING zinc finger protein
  misc_feature (12)..(166): NCBI GI NO: 21555237 NR Description: putative RING zinc finger protein
  misc_feature (21)..(156): NCBI GI NO: 15218042 NR Description: similar to putative RING zinc finger protein
  misc_feature (11)..(139): NCBI GI NO: 15241087 NR Description: putative protein; protein id: At5g01880.1
MHSGARKLMWGTSPDRPDDHDVVIVLASLLCALITVLGIGLVARCACARGPSAQAAAAANRGVKKSVLRRIPTVPYAASAAACSQGEGDDADECAICLAEFEEGEPTRVLPQCGHAFHAACVDRWLRAHSSCPSCRRILSLQLPPGERCRRCGARPLDDGDAGWKPTYYSAMPPFLA

SEQ ID NO: 29821 - DNA, 1011 bp, Zea mays subsp. mays
  misc_feature (1)..(1011): Ceres Seq. ID no. 12386530
gaaattgttcctaatgttgttggcgccataagctcgggcatcacggaccttataaatcttggagcaaagaagttagttgttccagggaacttcccaatagggtgtgtcccattatatcttgcaatctttcagagccaaaaggagggttactatgaggaacaaacaggctgcattaagtggctcaatgaatttgctgagtaccataataggatgcttcaggaggagttggagaaactcaggaatcttcaccctgatgtaaccatcatttatgctgattattacggtgctgcattgaacatattccgtgccccactcaagtttggcttcacagtcccactgaatgcgtgctgcggaagtgacgctccgtacaactgttccccttcaatactgtgcgggcgtcctggatctacagtgttccctgacccatcaaaatacatctcatgggatggtctacacttcaccgaggcgagttacaaagttgtcatccaaggagtactaggggggtacgccaaacctcctctttcagaagcctgcaagggtgcggagttcaaagtttctcaacttcaccaatgtacagataatccaacaaacaccgtatcatacgatgccttgagctcttttatttgatctgatgagctcaagtacttttagatttgtgctggtaaaaaaagtgcagtttagagttacagtgggcagtgtagatgctgcaggaccgggtatcttggacacttctcagagcggagaagagatccatcgatctagagtcatgtagttctacaatcaacttggctgctgggaggaggtaaaaaaaggtggggattttgtagtgtggaaatttgcaatcaccgaagggatacaggtggtcatactgctatataggaacctagatctatgattctgcttctgagggcaatgtatgcagatatgggctcagttgccttttaacagatacatgcatatatacagtgtaaatttgttgattcacattaaccaggataataaccgttgtcc

SEQ ID NO: 29822 - protein, 208 aa, Zea mays subsp. mays
  peptide (1)..(208): Ceres Seq. ID no. 12386531
  misc_feature (4)..(165): Pfam Name: Pfam Description:  GDSL-like Lipase/Acylhydrolase
  misc_feature (4)..(174): NCBI GI NO: 34911800 NR Description: lipase-like protein
  misc_feature (1)..(189): NCBI GI NO: 15218731 NR Description: lipase, putative; protein id: At1g28600
  misc_feature (1)..(189): NCBI GI NO: 21593234 NR Description: lipase, putative [Arabidopsis thaliana]
  misc_feature (1)..(192): NCBI GI NO: 10764858 NR Description: F1K23.17 [Arabidopsis thaliana]
  misc_feature (4)..(178): NCBI GI NO: 34911804 NR Description: lipase-like protein
  misc_feature (1)..(189): NCBI GI NO: 15225872 NR Description: putative lipase; protein id: At2g27360.1
  misc_feature (1)..(188): NCBI GI NO: 12597843 NR Description: lipase, putative [Arabidopsis thaliana]
  misc_feature (1)..(182): NCBI GI NO: 15218728 NR Description: lipase, putative; protein id: At1g28590.1
  misc_feature (1)..(182): NCBI GI NO: 19347801 NR Description: putative lipase [Arabidopsis thaliana]
  misc_feature (1)..(188): NCBI GI NO: 12322540 NR Description: unknown protein [Arabidopsis thaliana]
EIVPNVVGAISSGITDLINLGAKKLVVPGNFPIGCVPLYLAIFQSQKEGYYEEQTGCIKWLNEFAEYHNRMLQEELEKLRNLHPDVTIIYADYYGAALNIFRAPLKFGFTVPLNACCGSDAPYNCSPSILCGRPGSTVFPDPSKYISWDGLHFTEASYKVVIQGVLGGYAKPPLSEACKGAEFKVSQLHQCTDNPTNTVSYDALSSFI

SEQ ID NO: 29823 - protein, 138 aa, Zea mays subsp. mays
  peptide (1)..(138): Ceres Seq. ID no. 12386532
  misc_feature (1)..(95): Pfam Name: Pfam Description:  GDSL-like Lipase/Acylhydrolase
  misc_feature (1)..(104): NCBI GI NO: 34911800 NR Description: lipase-like protein
  misc_feature (1)..(119): NCBI GI NO: 15218731 NR Description: lipase, putative; protein id: At1g28600
  misc_feature (1)..(119): NCBI GI NO: 21593234 NR Description: lipase, putative [Arabidopsis thaliana]
  misc_feature (1)..(122): NCBI GI NO: 10764858 NR Description: F1K23.17 [Arabidopsis thaliana]
  misc_feature (1)..(108): NCBI GI NO: 34911804 NR Description: lipase-like protein
  misc_feature (1)..(119): NCBI GI NO: 15225872 NR Description: putative lipase; protein id: At2g27360.1
  misc_feature (1)..(118): NCBI GI NO: 12597843 NR Description: lipase, putative [Arabidopsis thaliana]
  misc_feature (1)..(112): NCBI GI NO: 15218728 NR Description: lipase, putative; protein id: At1g28590.1
  misc_feature (1)..(112): NCBI GI NO: 19347801 NR Description: putative lipase [Arabidopsis thaliana]
  misc_feature (1)..(118): NCBI GI NO: 12322540 NR Description: unknown protein [Arabidopsis thaliana]
MLQEELEKLRNLHPDVTIIYADYYGAALNIFRAPLKFGFTVPLNACCGSDAPYNCSPSILCGRPGSTVFPDPSKYISWDGLHFTEASYKVVIQGVLGGYAKPPLSEACKGAEFKVSQLHQCTDNPTNTVSYDALSSFI

SEQ ID NO: 29824 - DNA, 474 bp, Zea mays subsp. mays
  misc_feature (1)..(474): Ceres Seq. ID no. 1423771
accctacctcacaagtccaaatcagtttgtytgctccgcccgttgcccgtggcccgtcggtctctcttgcagtctcgccgctccccttcctcccccgcagaatccgaatcagtaagtccggcgacctaggtctctcggcttgtccgcagcccgccggtcagtaatggcgcaggatgatccggttgtttctgctcagtggctgcacgagcacctagggatgcctgatgttaaggttttggatgcttcctggtacatgccggtagagaacagggatccatggaaagaatatcaggtggcacacatccccggtgcgctattcttcgacttagatggcatagttgatcggacaactgatttaccgcacatgctgccatcagaagaggcttttgcagcagcaatttctgagctggatataaaaaaccaggataaagttattgtctatgatggaagggattcttcagtgcacctcgtgtt

SEQ ID NO: 29825 - protein, 103 aa, Zea mays subsp. mays
  peptide (1)..(103): Ceres Seq. ID no. 1423772
  misc_feature (9)..(96): Pfam Name: Pfam Description:  Rhodanese-like domain
  misc_feature (1)..(96): NCBI GI NO: 14571545 NR Description: thiosulfate transferase [Triticum aestivum]
  misc_feature (4)..(96): NCBI GI NO: 4406372 NR Description: thiosulfate sulfurtransferase [Datisca glomerata]
  misc_feature (1)..(96): NCBI GI NO: 18412307 NR Description: mercaptopyruvate sulfurtransferase
  misc_feature (1)..(95): NCBI GI NO: 18394364 NR Description: mercaptopyruvate sulfurtransferase
  misc_feature (1)..(95): NCBI GI NO: 25288797 NR Description: hypothetical protein F3O9.26
  misc_feature (1)..(95): NCBI GI NO: 30684873 NR Description: mercaptopyruvate sulfurtransferase (Mst2/Rdh2)
  misc_feature (1)..(95): NCBI GI NO: 25456716 NR Description: thiosulfate sulfurtransferase (EC 2.8.1.1)
  misc_feature (1)..(96): NCBI GI NO: 25288794 NR Description: thiosulfate sulfurtransferase (EC 2
  misc_feature (5)..(94): NCBI GI NO: 16125674 NR Description: rhodanese family protein
  misc_feature (7)..(95): NCBI GI NO: 15965374 NR Description: PUTATIVE THIOSULFATE SULFURTRANSFERASE PROTEIN
MAQDDPVVSAQWLHEHLGMPDVKVLDASWYMPVENRDPWKEYQVAHIPGALFFDLDGIVDRTTDLPHMLPSEEAFAAAISELDIKNQDKVIVYDGRDSSVHLV

SEQ ID NO: 29826 - protein, 85 aa, Zea mays subsp. mays
  peptide (1)..(85): Ceres Seq. ID no. 1423773
  misc_feature (1)..(78): Pfam Name: Pfam Description:  Rhodanese-like domain
  misc_feature (1)..(78): NCBI GI NO: 14571545 NR Description: thiosulfate transferase [Triticum aestivum]
  misc_feature (1)..(78): NCBI GI NO: 4406372 NR Description: thiosulfate sulfurtransferase [Datisca glomerata]
  misc_feature (1)..(78): NCBI GI NO: 18412307 NR Description: mercaptopyruvate sulfurtransferase
  misc_feature (1)..(77): NCBI GI NO: 18394364 NR Description: mercaptopyruvate sulfurtransferase
  misc_feature (1)..(77): NCBI GI NO: 25288797 NR Description: hypothetical protein F3O9.26
  misc_feature (1)..(77): NCBI GI NO: 30684873 NR Description: mercaptopyruvate sulfurtransferase (Mst2/Rdh2)
  misc_feature (1)..(77): NCBI GI NO: 25456716 NR Description: thiosulfate sulfurtransferase (EC 2.8.1.1)
  misc_feature (1)..(78): NCBI GI NO: 25288794 NR Description: thiosulfate sulfurtransferase (EC 2
  misc_feature (1)..(76): NCBI GI NO: 16125674 NR Description: rhodanese family protein
  misc_feature (1)..(77): NCBI GI NO: 15965374 NR Description: PUTATIVE THIOSULFATE SULFURTRANSFERASE PROTEIN
MPDVKVLDASWYMPVENRDPWKEYQVAHIPGALFFDLDGIVDRTTDLPHMLPSEEAFAAAISELDIKNQDKVIVYDGRDSSVHLV

SEQ ID NO: 29827 - protein, 73 aa, Zea mays subsp. mays
  peptide (1)..(73): Ceres Seq. ID no. 1423774
  misc_feature (1)..(66): Pfam Name: Pfam Description:  Rhodanese-like domain
  misc_feature (1)..(66): NCBI GI NO: 14571545 NR Description: thiosulfate transferase [Triticum aestivum]
  misc_feature (1)..(66): NCBI GI NO: 4406372 NR Description: thiosulfate sulfurtransferase [Datisca glomerata]
  misc_feature (1)..(66): NCBI GI NO: 18412307 NR Description: mercaptopyruvate sulfurtransferase
  misc_feature (1)..(65): NCBI GI NO: 18394364 NR Description: mercaptopyruvate sulfurtransferase
  misc_feature (1)..(65): NCBI GI NO: 25288797 NR Description: hypothetical protein F3O9.26
  misc_feature (1)..(65): NCBI GI NO: 30684873 NR Description: mercaptopyruvate sulfurtransferase (Mst2/Rdh2)
  misc_feature (1)..(65): NCBI GI NO: 25456716 NR Description: thiosulfate sulfurtransferase (EC 2.8.1.1)
  misc_feature (1)..(66): NCBI GI NO: 25288794 NR Description: thiosulfate sulfurtransferase (EC 2
  misc_feature (1)..(64): NCBI GI NO: 16125674 NR Description: rhodanese family protein
  misc_feature (1)..(65): NCBI GI NO: 15965374 NR Description: PUTATIVE THIOSULFATE SULFURTRANSFERASE PROTEIN
MPVENRDPWKEYQVAHIPGALFFDLDGIVDRTTDLPHMLPSEEAFAAAISELDIKNQDKVIVYDGRDSSVHLV

SEQ ID NO: 29828 - DNA, 789 bp, Zea mays subsp. mays
  misc_feature (1)..(789): Ceres Seq. ID no. 12341823
gaactagagaaaagcaacttgcaggcaaaatcaaaggaaactgaagaagctggactcaaaatgctgagaaagagtttaaatttcaaggcaacaccaatgcccagcttttataaggaaccacctccccccaaggttgagttgaagaagatacctacaacaagagctaggtcaccaaagcttggtcgctccaagaacacatcctcaggagggacagaagggaatccaaatcctccagctcgttcagctcgactgagtctcgatgaaagggtctcccaaaatggtgtcaagaaagcacctgctgcaaatgcagcgaagaagccccagcggaaatctctacctaaactgccttcagagcaaacaaccaaagttgacattgcaccatctgttccatctgcagaagagctagaaaacaagttgccgacgaagggtggtcttgatcgagagccgatccgcgctcaaattacacctgacgaacctggactcactgcataggaacctatcaagccgactcctatgaaaggagggagttgtgccccagcttcctttatcacattttgctatttctgcagtaaactgctggctggtattatgtattagaattagtctcagcaccaggagcttgaagagtggcaagtgacaccgtgtattctttatcttagtttctgttgacataccaggtatttgtagttggcagacaggcagaatttcatattattctccagggctaccagtcaattaagttgccgtccaagtaagatatgtacacgattttgcaaagctttgtgattc

SEQ ID NO: 29829 - protein, 163 aa, Zea mays subsp. mays
  peptide (1)..(163): Ceres Seq. ID no. 12341824
  misc_feature (1)..(148): NCBI GI NO: 18417986 NR Description: putative protein; protein id: At4g32330
  misc_feature (1)..(142): NCBI GI NO: 15224733 NR Description: unknown protein; protein id: At2g25480.1
  misc_feature (1)..(158): NCBI GI NO: 18403980 NR Description: expressed protein; protein id: At2g35880
  misc_feature (1)..(158): NCBI GI NO: 25408425 NR Description: hypothetical protein At2g35880
  misc_feature (1)..(69): NCBI GI NO: 32395575 NR Description: seed specific protein Bn15D14A [Brassica napus]
  misc_feature (1)..(114): NCBI GI NO: 34393229 NR Description: putative seed specific protein
  misc_feature (1)..(106): NCBI GI NO: 34897180 NR Description: unknown protein
  misc_feature (1)..(69): NCBI GI NO: 15228950 NR Description: unknown protein; protein id: At3g23090.1
  misc_feature (1)..(69): NCBI GI NO: 9294199 NR Description: gb|AAF04893
  misc_feature (1)..(67): NCBI GI NO: 28453880 NR Description: WAVE-DAMPENED2 [Arabidopsis thaliana]
ELEKSNLQAKSKETEEAGLKMLRKSLNFKATPMPSFYKEPPPPKVELKKIPTTRARSPKLGRSKNTSSGGTEGNPNPPARSARLSLDERVSQNGVKKAPAANAAKKPQRKSLPKLPSEQTTKVDIAPSVPSAEELENKLPTKGGLDREPIRAQITPDEPGLTA

SEQ ID NO: 29830 - protein, 143 aa, Zea mays subsp. mays
  peptide (1)..(143): Ceres Seq. ID no. 12341825
  misc_feature (1)..(128): NCBI GI NO: 18417986 NR Description: putative protein; protein id: At4g32330
  misc_feature (1)..(122): NCBI GI NO: 15224733 NR Description: unknown protein; protein id: At2g25480.1
  misc_feature (1)..(138): NCBI GI NO: 18403980 NR Description: expressed protein; protein id: At2g35880
  misc_feature (1)..(138): NCBI GI NO: 25408425 NR Description: hypothetical protein At2g35880
  misc_feature (1)..(49): NCBI GI NO: 32395575 NR Description: seed specific protein Bn15D14A [Brassica napus]
  misc_feature (1)..(94): NCBI GI NO: 34393229 NR Description: putative seed specific protein
  misc_feature (1)..(86): NCBI GI NO: 34897180 NR Description: unknown protein
  misc_feature (1)..(49): NCBI GI NO: 15228950 NR Description: unknown protein; protein id: At3g23090.1
  misc_feature (1)..(49): NCBI GI NO: 9294199 NR Description: gb|AAF04893
  misc_feature (1)..(47): NCBI GI NO: 28453880 NR Description: WAVE-DAMPENED2 [Arabidopsis thaliana]
MLRKSLNFKATPMPSFYKEPPPPKVELKKIPTTRARSPKLGRSKNTSSGGTEGNPNPPARSARLSLDERVSQNGVKKAPAANAAKKPQRKSLPKLPSEQTTKVDIAPSVPSAEELENKLPTKGGLDREPIRAQITPDEPGLTA

SEQ ID NO: 29831 - protein, 131 aa, Zea mays subsp. mays
  peptide (1)..(131): Ceres Seq. ID no. 12341826
  misc_feature (1)..(116): NCBI GI NO: 18417986 NR Description: putative protein; protein id: At4g32330
  misc_feature (1)..(110): NCBI GI NO: 15224733 NR Description: unknown protein; protein id: At2g25480.1
  misc_feature (1)..(126): NCBI GI NO: 18403980 NR Description: expressed protein; protein id: At2g35880
  misc_feature (1)..(126): NCBI GI NO: 25408425 NR Description: hypothetical protein At2g35880
  misc_feature (1)..(37): NCBI GI NO: 32395575 NR Description: seed specific protein Bn15D14A [Brassica napus]
  misc_feature (1)..(82): NCBI GI NO: 34393229 NR Description: putative seed specific protein
  misc_feature (1)..(74): NCBI GI NO: 34897180 NR Description: unknown protein
  misc_feature (1)..(37): NCBI GI NO: 15228950 NR Description: unknown protein; protein id: At3g23090.1
  misc_feature (1)..(37): NCBI GI NO: 9294199 NR Description: gb|AAF04893
  misc_feature (1)..(35): NCBI GI NO: 28453880 NR Description: WAVE-DAMPENED2 [Arabidopsis thaliana]
MPSFYKEPPPPKVELKKIPTTRARSPKLGRSKNTSSGGTEGNPNPPARSARLSLDERVSQNGVKKAPAANAAKKPQRKSLPKLPSEQTTKVDIAPSVPSAEELENKLPTKGGLDREPIRAQITPDEPGLTA

SEQ ID NO: 29832 - DNA, 476 bp, Zea mays subsp. mays
  misc_feature (1)..(476): Ceres Seq. ID no. 5005895
catcacccgcgtccgccaccgccgccgcctttcgtaccgcggcccctaaacccctttcctcgttcccctccgtctctcagttaggcacaatgatgctagctaataagcttggtggtttgctcaagaatgctacgagttcaaagagttcaaatatgtctgtctaccaagcaatcagatgcatgtcatcatccaagctttttgttggagggctttcttatggaaccgatgatcacagtctcagagacgagtttgccaaatatggacaagttattgaagctaagattatccttgatcgtgagtctgggaggtccagaggttttggctttataacttacacgtcttctgaggaggcttcggctgccatcactgccatggatggaaagactctggatggacggaacatacgggttaatcatgctaacgagaggacaggtggcttccgcagcagtggtggcggctatggtggcggtggctat

SEQ ID NO: 29833 - protein, 158 aa, Zea mays subsp. mays
  peptide (1)..(158): Ceres Seq. ID no. 5005896
  misc_feature (65)..(136): Pfam Name: a.k.a. RRM, RBD, or RNP domain Pfam Description: RNA recognition motif.
  misc_feature (30)..(157): NCBI GI NO: 15239505 NR Description: glycine-rich RNA-binding protein
  misc_feature (30)..(157): NCBI GI NO: 15822703 NR Description: RNA-binding protein precursor [Nicotiana tabacum]
  misc_feature (30)..(157): NCBI GI NO: 15822705 NR Description: RNA-binding protein precursor [Solanum tuberosum]
  misc_feature (30)..(156): NCBI GI NO: 7439994 NR Description: glycine-rich RNA-binding protein - garden pea
  misc_feature (30)..(157): NCBI GI NO: 1084415 NR Description: RNA-binding protein - wood tobacco
  misc_feature (30)..(156): NCBI GI NO: 7439995 NR Description: RNA binding protein 3 - wood tobacco
  misc_feature (30)..(157): NCBI GI NO: 15221187 NR Description: glycine-rich RNA-binding protein
  misc_feature (30)..(157): NCBI GI NO: 15236359 NR Description: glycine-rich RNA-binding protein AtGRP2
  misc_feature (30)..(157): NCBI GI NO: 2826811 NR Description: AtGRP2 [Arabidopsis thaliana]
  misc_feature (30)..(157): NCBI GI NO: 30682622 NR Description: glycine-rich RNA-binding protein (AtGRP2)
SPASATAAAFRTAAPKPLSSFPSVSQLGTMMLANKLGGLLKNATSSKSSNMSVYQAIRCMSSSKLFVGGLSYGTDDHSLRDEFAKYGQVIEAKIILDRESGRSRGFGFITYTSSEEASAAITAMDGKTLDGRNIRVNHANERTGGFRSSGGGYGGGGY

SEQ ID NO: 29834 - protein, 129 aa, Zea mays subsp. mays
  peptide (1)..(129): Ceres Seq. ID no. 5005897
  misc_feature (36)..(107): Pfam Name: a.k.a. RRM, RBD, or RNP domain Pfam Description: RNA recognition motif.
  misc_feature (1)..(128): NCBI GI NO: 15239505 NR Description: glycine-rich RNA-binding protein
  misc_feature (1)..(128): NCBI GI NO: 15822703 NR Description: RNA-binding protein precursor [Nicotiana tabacum]
  misc_feature (1)..(128): NCBI GI NO: 15822705 NR Description: RNA-binding protein precursor [Solanum tuberosum]
  misc_feature (1)..(127): NCBI GI NO: 7439994 NR Description: glycine-rich RNA-binding protein - garden pea
  misc_feature (1)..(128): NCBI GI NO: 1084415 NR Description: RNA-binding protein - wood tobacco
  misc_feature (1)..(127): NCBI GI NO: 7439995 NR Description: RNA binding protein 3 - wood tobacco
  misc_feature (1)..(128): NCBI GI NO: 15221187 NR Description: glycine-rich RNA-binding protein
  misc_feature (1)..(128): NCBI GI NO: 15236359 NR Description: glycine-rich RNA-binding protein AtGRP2
  misc_feature (1)..(128): NCBI GI NO: 2826811 NR Description: AtGRP2 [Arabidopsis thaliana]
  misc_feature (1)..(128): NCBI GI NO: 30682622 NR Description: glycine-rich RNA-binding protein (AtGRP2)
MMLANKLGGLLKNATSSKSSNMSVYQAIRCMSSSKLFVGGLSYGTDDHSLRDEFAKYGQVIEAKIILDRESGRSRGFGFITYTSSEEASAAITAMDGKTLDGRNIRVNHANERTGGFRSSGGGYGGGGY

SEQ ID NO: 29835 - protein, 128 aa, Zea mays subsp. mays
  peptide (1)..(128): Ceres Seq. ID no. 5005898
  misc_feature (35)..(106): Pfam Name: a.k.a. RRM, RBD, or RNP domain Pfam Description: RNA recognition motif.
  misc_feature (1)..(127): NCBI GI NO: 15239505 NR Description: glycine-rich RNA-binding protein
  misc_feature (1)..(127): NCBI GI NO: 15822703 NR Description: RNA-binding protein precursor [Nicotiana tabacum]
  misc_feature (1)..(127): NCBI GI NO: 15822705 NR Description: RNA-binding protein precursor [Solanum tuberosum]
  misc_feature (1)..(126): NCBI GI NO: 7439994 NR Description: glycine-rich RNA-binding protein - garden pea
  misc_feature (1)..(127): NCBI GI NO: 1084415 NR Description: RNA-binding protein - wood tobacco
  misc_feature (1)..(126): NCBI GI NO: 7439995 NR Description: RNA binding protein 3 - wood tobacco
  misc_feature (1)..(127): NCBI GI NO: 15221187 NR Description: glycine-rich RNA-binding protein
  misc_feature (1)..(127): NCBI GI NO: 15236359 NR Description: glycine-rich RNA-binding protein AtGRP2
  misc_feature (1)..(127): NCBI GI NO: 2826811 NR Description: AtGRP2 [Arabidopsis thaliana]
  misc_feature (1)..(127): NCBI GI NO: 30682622 NR Description: glycine-rich RNA-binding protein (AtGRP2)
MLANKLGGLLKNATSSKSSNMSVYQAIRCMSSSKLFVGGLSYGTDDHSLRDEFAKYGQVIEAKIILDRESGRSRGFGFITYTSSEEASAAITAMDGKTLDGRNIRVNHANERTGGFRSSGGGYGGGGY

SEQ ID NO: 29836 - DNA, 631 bp, Zea mays subsp. mays
  misc_feature (1)..(631): Ceres Seq. ID no. 12342153
tgcttaaggttcttgacaaggagaaacgccaggcacattgtgctgatgttggatctcacttgttggagcgtctaaaatcgcttcaggacaagcacgaaattataggtgatgttagaggaaggggactgatgcttggggtggaactcgttacggacagaaaggagaagacccctgccaagtcagaaaccattgaactgtttgagaagctcagagatctcggggtactagttggaaagggcggtctgcatggtaacgtcttcagaataaaaccaccgatgtgcttttcgaaggacgatgcagacttcttggtggactccatggactacgcaatgtcaaggctctgaaggaacatgctctgagttgacaatgtgtctgcgtggaaacaacacttcctgcaaccgcaagatgcatggcctgaaatgaaactgaaaggcagatgatttaatgggcatgctccccgggtggtatgttggtgttatggtgaagtttaatagtccccctcccccgaataaattgatgaaaggggacagaacgtcttgcccagcttgtgaactgtttgtagaagaactgcagttaataaatagaatagcgagcaagcaagcgtgatatcaatctgcatacgtccattttc

SEQ ID NO: 29837 - protein, 113 aa, Zea mays subsp. mays
  peptide (1)..(113): Ceres Seq. ID no. 12342154
  misc_feature (1)..(113): Pfam Name: Pfam Description:  Aminotransferase class-III
  misc_feature (1)..(113): NCBI GI NO: 5731259 NR Description: alanine:glyoxylate aminotransferase 2 homolog
  misc_feature (1)..(113): NCBI GI NO: 18420498 NR Description: putative protein; protein id: At4g39660
  misc_feature (1)..(103): NCBI GI NO: 7434175 NR Description: hypothetical protein T19P19
  misc_feature (1)..(113): NCBI GI NO: 15224499 NR Description: putative beta-alanine-pyruvate aminotransferase
  misc_feature (1)..(113): NCBI GI NO: 15028237 NR Description: putative beta-alanine-pyruvate aminotransferase
  misc_feature (1)..(113): NCBI GI NO: 15231974 NR Description: putative aminotransferase; protein id: At3g08860
  misc_feature (1)..(111): NCBI GI NO: 16198011 NR Description: LD24726p [Drosophila melanogaster]
  misc_feature (1)..(111): NCBI GI NO: 28574759 NR Description: CG11241-PA [Drosophila melanogaster]
  misc_feature (1)..(104): NCBI GI NO: 39595899 NR Description: Hypothetical protein CBG12888
  misc_feature (1)..(98): NCBI GI NO: 31239473 NR Description: ENSANGP00000008948 [Anopheles gambiae]
LKVLDKEKRQAHCADVGSHLLERLKSLQDKHEIIGDVRGRGLMLGVELVTDRKEKTPAKSETIELFEKLRDLGVLVGKGGLHGNVFRIKPPMCFSKDDADFLVDSMDYAMSRL

SEQ ID NO: 29838 - protein, 71 aa, Zea mays subsp. mays
  peptide (1)..(71): Ceres Seq. ID no. 12342155
  misc_feature (1)..(71): Pfam Name: Pfam Description:  Aminotransferase class-III
  misc_feature (1)..(71): NCBI GI NO: 5731259 NR Description: alanine:glyoxylate aminotransferase 2 homolog
  misc_feature (1)..(71): NCBI GI NO: 18420498 NR Description: putative protein; protein id: At4g39660
  misc_feature (1)..(61): NCBI GI NO: 7434175 NR Description: hypothetical protein T19P19
  misc_feature (1)..(71): NCBI GI NO: 15224499 NR Description: putative beta-alanine-pyruvate aminotransferase
  misc_feature (1)..(71): NCBI GI NO: 15028237 NR Description: putative beta-alanine-pyruvate aminotransferase
  misc_feature (1)..(71): NCBI GI NO: 15231974 NR Description: putative aminotransferase; protein id: At3g08860
  misc_feature (1)..(69): NCBI GI NO: 16198011 NR Description: LD24726p [Drosophila melanogaster]
  misc_feature (1)..(69): NCBI GI NO: 28574759 NR Description: CG11241-PA [Drosophila melanogaster]
  misc_feature (1)..(62): NCBI GI NO: 39595899 NR Description: Hypothetical protein CBG12888
  misc_feature (1)..(56): NCBI GI NO: 31239473 NR Description: ENSANGP00000008948 [Anopheles gambiae]
MLGVELVTDRKEKTPAKSETIELFEKLRDLGVLVGKGGLHGNVFRIKPPMCFSKDDADFLVDSMDYAMSRL

SEQ ID NO: 29839 - DNA, 832 bp, Zea mays subsp. mays
  misc_feature (1)..(832): Ceres Seq. ID no. 12402043
ataaatcaaccgccggtgaagtctagtcgtctcgtcgctcggtccaccacctcagctccgccgcttgcccgcttttgctctctccctcccggctctcggcttcttctacacgctaccgtctcacagccgtaaacgcccctcccggatcccgctagttcgccaccgccgcccgcccgcccgcctttcgcctcatcatggccgcctcgtcgaccgccacctccgtccacgacttcatcgtcaaggatgcgagcggcaaagacgttgacctcagcacctacaaggggaaggttcttctcattgttaacgtcgcatcccagtgtggcttaaccaactccaactacactgagctggcccagctctatgagaagtacaaggaccaaggctttgaaatcctggctttcccatgcaaccagtttggtgggcaggagcctggtaccaataaggagattgtccagtttgcctgcacacgcttcaaggctgagtaccccatcttcgacaaggttgatgtcaacggtagcaatgctgcgcccatctacaagttcttgaaatctagcaaaggtggccttttcggcgacagcatcaagtggaacttttccaagttcttggttgacaaggagggacgtgttgtggatcgctatgctccaaccacttcacccctgagcattgagaaggatatcaagaagctgcttgggagctcttaatcagtatctgggtgcaaagctgtagaaaaacatgtatcaacaatgccctgagcgataaaatatatgataagttgtattaataaagtattgtcgtacttgagaggttgcagtatctgctctatttcccttgc

SEQ ID NO: 29840 - protein, 168 aa, Zea mays subsp. mays
  peptide (1)..(168): Ceres Seq. ID no. 12402044
  misc_feature (9)..(118): Pfam Name: Pfam Description:  Glutathione peroxidase
  misc_feature (1)..(167): NCBI GI NO: 22268405 NR Description: putative glutathione peroxidase [Zea mays]
  misc_feature (1)..(168): NCBI GI NO: 6179600 NR Description: GPX12Hv, glutathione peroxidase-like protein
  misc_feature (1)..(168): NCBI GI NO: 34334012 NR Description: cytosolic glutathione peroxidase
  misc_feature (1)..(168): NCBI GI NO: 21360380 NR Description: glutathione peroxidase 1 [Oryza sativa]
  misc_feature (2)..(168): NCBI GI NO: 27544804 NR Description: phospholipid hydroperoxide glutathione peroxidase-like
  misc_feature (1)..(168): NCBI GI NO: 38345591 NR Description: OSJNBb0012E24.9
  misc_feature (1)..(165): NCBI GI NO: 6179604 NR Description: glutathione peroxidase-like protein GPX54Hv
  misc_feature (1)..(166): NCBI GI NO: 30681827 NR Description: glutathione peroxidase, putative
  misc_feature (1)..(166): NCBI GI NO: 20138157 NR Description: Probable phospholipid hydroperoxide glutathioneperoxidase
  misc_feature (3)..(165): NCBI GI NO: 544437 NR Description: Probable phospholipid hydroperoxide glutathioneperoxidase
MAASSTATSVHDFIVKDASGKDVDLSTYKGKVLLIVNVASQCGLTNSNYTELAQLYEKYKDQGFEILAFPCNQFGGQEPGTNKEIVQFACTRFKAEYPIFDKVDVNGSNAAPIYKFLKSSKGGLFGDSIKWNFSKFLVDKEGRVVDRYAPTTSPLSIEKDIKKLLGSS

SEQ ID NO: 29841 - DNA, 1075 bp, Zea mays subsp. mays
  misc_feature (1)..(1075): Ceres Seq. ID no. 13495182
ctatttgcggaaaggaacttctgttagtgctggccaaacatcaagttcatcaaatggaacaactgcaggagaaaggcctctcctacgtgagaaattgtcaaagggaaaggatggctttgttgctgctgatttcacagctacagaagctcattgtgctgtaccctcgactccaatactttggttccagcaggcagatgagtgcatgcacctatgcatttatcagcacaaaagtctcactatcttactgctggttcctgcttcctcagtgataaatggagaagagggcattactcatgtgaagaaggcgatccttgaaaatgcatcacagaagattgtcactgttgagcagaaattgacacgaggatggggaggagaaaatgcgtatcatgttagtggatatcgttatttgcttgttgatccggagagaagagtatcaagagcctccccacctgggaaagtcaccaccctagcaaaggattctctacttgccctcaacatgctaagacaagaagtagatctagagaagtcaagatacaagagaggcgacccttgtcatgataaggatttcgaagtatgtatcagaacaaaaaacaatgcgtgggttattgctaaaatcagtcaaggaagggagctttacatggctctagagaagggtggtgaaacgcttctatatgcatccacagctgtagagaaattcagcaacaggtactgtgagggagcattctctacagattagaagcaccagagggagatcttagcttttccatacattacctattatgtacatcctgttttttttcccagctgtatcgttgccccctattgttgagagactcggaccactctttgcgaagggaataaggagttcgtatcagttgtacagctgctctgctgtcgtgtgctatctgcaaaagaatagcctagtctgggaataacgcagagcgggatagagtttgtttgttcacttatgcccttccttaacgcagagcattgtgcgtgttttcattttgctgtaacagccggcgatttacctgcagactgggaaagtaacttagcgtttaatttggtattctgc

SEQ ID NO: 29842 - protein, 244 aa, Zea mays subsp. mays
  peptide (1)..(244): Ceres Seq. ID no. 13495183
  misc_feature (1)..(244): NCBI GI NO: 38175489 NR Description: putative myrosinase precursor
  misc_feature (8)..(244): NCBI GI NO: 15220866 NR Description: myrosinase precursor -related
  misc_feature (8)..(244): NCBI GI NO: 25372816 NR Description: F23A5.27 [imported] - Arabidopsis thaliana
  misc_feature (16)..(244): NCBI GI NO: 18394314 NR Description: expressed protein [Arabidopsis thaliana]
  misc_feature (16)..(244): NCBI GI NO: 21618002 NR Description: unknown [Arabidopsis thaliana]
  misc_feature (16)..(244): NCBI GI NO: 30684673 NR Description: expressed protein [Arabidopsis thaliana]
  misc_feature (8)..(235): NCBI GI NO: 14517360 NR Description: At1g80910/F23A5_21 [Arabidopsis thaliana]
  misc_feature (1)..(244): NCBI GI NO: 18266049 NR Description: myrosinase precursor [Brassica oleracea]
YLRKGTSVSAGQTSSSSNGTTAGERPLLREKLSKGKDGFVAADFTATEAHCAVPSTPILWFQQADECMHLCIYQHKSLTILLLVPASSVINGEEGITHVKKAILENASQKIVTVEQKLTRGWGGENAYHVSGYRYLLVDPERRVSRASPPGKVTTLAKDSLLALNMLRQEVDLEKSRYKRGDPCHDKDFEVCIRTKNNAWVIAKISQGRELYMALEKGGETLLYASTAVEKFSNRYCEGAFSTD

SEQ ID NO: 29843 - protein, 177 aa, Zea mays subsp. mays
  peptide (1)..(177): Ceres Seq. ID no. 13495184
  misc_feature (1)..(177): NCBI GI NO: 38175489 NR Description: putative myrosinase precursor
  misc_feature (1)..(177): NCBI GI NO: 15220866 NR Description: myrosinase precursor -related
  misc_feature (1)..(177): NCBI GI NO: 25372816 NR Description: F23A5.27 [imported] - Arabidopsis thaliana
  misc_feature (1)..(177): NCBI GI NO: 18394314 NR Description: expressed protein [Arabidopsis thaliana]
  misc_feature (1)..(177): NCBI GI NO: 21618002 NR Description: unknown [Arabidopsis thaliana]
  misc_feature (1)..(177): NCBI GI NO: 30684673 NR Description: expressed protein [Arabidopsis thaliana]
  misc_feature (1)..(168): NCBI GI NO: 14517360 NR Description: At1g80910/F23A5_21 [Arabidopsis thaliana]
  misc_feature (1)..(177): NCBI GI NO: 18266049 NR Description: myrosinase precursor [Brassica oleracea]
MHLCIYQHKSLTILLLVPASSVINGEEGITHVKKAILENASQKIVTVEQKLTRGWGGENAYHVSGYRYLLVDPERRVSRASPPGKVTTLAKDSLLALNMLRQEVDLEKSRYKRGDPCHDKDFEVCIRTKNNAWVIAKISQGRELYMALEKGGETLLYASTAVEKFSNRYCEGAFSTD

SEQ ID NO: 29844 - DNA, 1056 bp, Zea mays subsp. mays
  misc_feature (1)..(1056): Ceres Seq. ID no. 12361825
aagctcgtgtaattgctgcggcgacagtgcccaaataaaatcccctaaacctagcgccgccgccgccatgcttcgccgtctcgccgccgtcgcccagcggaccttctcctcctcctcttccccgcacgccccgccgctggctgcgtcgggctacaccccgcgccgcgagtacggcctggtgcccatggtgatcgagcatacctcccgcggggagcgcgcctacgacatcttctcgcgcttgctcaaggagcgcatcgtatgcatccatggccccatcactgacgatacggcgtccctcgtcgtcgcccagctgctcttcctcgaatccgagaaccccgccaagcccgtccacctctacatcaactccccggggggcgtcgtcactgcgggcctcgccatctacgataccatgcagtacatccgctcccccgtcaccacgctctgcatcggtcaggccgcctccatggcgtcgctactcctcgccgctggggcgagcgggcagaggcgggcgctgccgaacgcgcgggtcatgatccaccagccctcgggtggcgcgtcggggcaggcgtcggacatcgccatccacgccaaggagatccttaaggtgcgggaccggctcaacaaaatctacgccaagcacacgggccaggccatcgaccgcatcgagcagtgtatggagagggacatgttcatggacccggaggaggcacatgattgggggctcatcgacgaggtcatcgagcaccgccctgtctctcttgtgtctgatgctgttggcagtgattcgcaaaacctcggtggaggcggagctggggtgaataaaggagcggatgagccatcctcagcgtgatggcattggacagtcgcaaggtgcaatcgttgtcgtgctcctgtagctgtcttatttggatttaaggtttaattcgtacatgaggtgaataccttaattttctggttgctgggctaatccaatagcaacgctgttgttttgatactttaattgatctgttgctgataacgaatgctatctggtatgagccctcaacagcgttgttg

SEQ ID NO: 29845 - protein, 282 aa, Zea mays subsp. mays
  peptide (1)..(282): Ceres Seq. ID no. 12361826
  misc_feature (68)..(249): Pfam Name: Pfam Description:  Clp protease
  misc_feature (23)..(282): NCBI GI NO: 38344435 NR Description: OSJNBa0038O10.7
  misc_feature (23)..(264): NCBI GI NO: 18420643 NR Description: ATP-dependent Clp protease proteolytic subunit
  misc_feature (51)..(253): NCBI GI NO: 6685315 NR Description: ATP-dependent Clp protease proteolytic subunit
  misc_feature (22)..(250): NCBI GI NO: 8393156 NR Description: caseinolytic protease
  misc_feature (22)..(250): NCBI GI NO: 34882298 NR Description: similar to ClpP protease [Rattus norvegicus]
  misc_feature (55)..(261): NCBI GI NO: 20129427 NR Description: CG5045-PA [Drosophila melanogaster]
  misc_feature (52)..(250): NCBI GI NO: 5174419 NR Description: endopeptidase Clp precursor
  misc_feature (59)..(252): NCBI GI NO: 18203228 NR Description: ATP-dependent Clp protease proteolytic subunit
  misc_feature (59)..(252): NCBI GI NO: 23501987 NR Description: ATP-dependent Clp protease
  misc_feature (59)..(252): NCBI GI NO: 23014984 NR Description: hypothetical protein
SSCNCCGDSAQIKSPKPSAAAAMLRRLAAVAQRTFSSSSSPHAPPLAASGYTPRREYGLVPMVIEHTSRGERAYDIFSRLLKERIVCIHGPITDDTASLVVAQLLFLESENPAKPVHLYINSPGGVVTAGLAIYDTMQYIRSPVTTLCIGQAASMASLLLAAGASGQRRALPNARVMIHQPSGGASGQASDIAIHAKEILKVRDRLNKIYAKHTGQAIDRIEQCMERDMFMDPEEAHDWGLIDEVIEHRPVSLVSDAVGSDSQNLGGGGAGVNKGADEPSSA

SEQ ID NO: 29846 - protein, 260 aa, Zea mays subsp. mays
  peptide (1)..(260): Ceres Seq. ID no. 12361827
  misc_feature (46)..(227): Pfam Name: Pfam Description:  Clp protease
  misc_feature (1)..(260): NCBI GI NO: 38344435 NR Description: OSJNBa0038O10.7
  misc_feature (1)..(242): NCBI GI NO: 18420643 NR Description: ATP-dependent Clp protease proteolytic subunit
  misc_feature (29)..(231): NCBI GI NO: 6685315 NR Description: ATP-dependent Clp protease proteolytic subunit
  misc_feature (1)..(228): NCBI GI NO: 8393156 NR Description: caseinolytic protease
  misc_feature (1)..(228): NCBI GI NO: 34882298 NR Description: similar to ClpP protease [Rattus norvegicus]
  misc_feature (33)..(239): NCBI GI NO: 20129427 NR Description: CG5045-PA [Drosophila melanogaster]
  misc_feature (30)..(228): NCBI GI NO: 5174419 NR Description: endopeptidase Clp precursor
  misc_feature (37)..(230): NCBI GI NO: 18203228 NR Description: ATP-dependent Clp protease proteolytic subunit
  misc_feature (37)..(230): NCBI GI NO: 23501987 NR Description: ATP-dependent Clp protease
  misc_feature (37)..(230): NCBI GI NO: 23014984 NR Description: hypothetical protein
MLRRLAAVAQRTFSSSSSPHAPPLAASGYTPRREYGLVPMVIEHTSRGERAYDIFSRLLKERIVCIHGPITDDTASLVVAQLLFLESENPAKPVHLYINSPGGVVTAGLAIYDTMQYIRSPVTTLCIGQAASMASLLLAAGASGQRRALPNARVMIHQPSGGASGQASDIAIHAKEILKVRDRLNKIYAKHTGQAIDRIEQCMERDMFMDPEEAHDWGLIDEVIEHRPVSLVSDAVGSDSQNLGGGGAGVNKGADEPSSA

SEQ ID NO: 29847 - protein, 221 aa, Zea mays subsp. mays
  peptide (1)..(221): Ceres Seq. ID no. 12361828
  misc_feature (7)..(188): Pfam Name: Pfam Description:  Clp protease
  misc_feature (1)..(221): NCBI GI NO: 38344435 NR Description: OSJNBa0038O10.7
  misc_feature (1)..(203): NCBI GI NO: 18420643 NR Description: ATP-dependent Clp protease proteolytic subunit
  misc_feature (1)..(192): NCBI GI NO: 6685315 NR Description: ATP-dependent Clp protease proteolytic subunit
  misc_feature (1)..(189): NCBI GI NO: 8393156 NR Description: caseinolytic protease
  misc_feature (1)..(189): NCBI GI NO: 34882298 NR Description: similar to ClpP protease [Rattus norvegicus]
  misc_feature (1)..(200): NCBI GI NO: 20129427 NR Description: CG5045-PA [Drosophila melanogaster]
  misc_feature (1)..(189): NCBI GI NO: 5174419 NR Description: endopeptidase Clp precursor
  misc_feature (1)..(191): NCBI GI NO: 18203228 NR Description: ATP-dependent Clp protease proteolytic subunit
  misc_feature (1)..(191): NCBI GI NO: 23501987 NR Description: ATP-dependent Clp protease
  misc_feature (1)..(191): NCBI GI NO: 23014984 NR Description: hypothetical protein
MVIEHTSRGERAYDIFSRLLKERIVCIHGPITDDTASLVVAQLLFLESENPAKPVHLYINSPGGVVTAGLAIYDTMQYIRSPVTTLCIGQAASMASLLLAAGASGQRRALPNARVMIHQPSGGASGQASDIAIHAKEILKVRDRLNKIYAKHTGQAIDRIEQCMERDMFMDPEEAHDWGLIDEVIEHRPVSLVSDAVGSDSQNLGGGGAGVNKGADEPSSA

SEQ ID NO: 29848 - DNA, 641 bp, Zea mays subsp. mays
  misc_feature (1)..(641): Ceres Seq. ID no. 12400980
  misc_feature (406)..(406): n is a, c, t, g, unknown, or other
aatattggctagcttttggctcggcagctaacgacctgcagccaaccatctaccagcgactcagcgagcgagagcagcacacacgcagctagctaggagcagcagcagagcagcggcgatggcggcctccatgatctcctcgtcagctctggcggtggcgcctcagggcctgccgcccctcggccgccgcgcctcctccttcgccgtcgtctgctccaagaagaagatcaagaccgacaagccctacgggattgggggtggcctgaccgtcgacgtcgacgccaacgggagaaagggcaagggcaagggcgtgtaccagttcgtcgacaagtacggcgcgaacgtcgacggatacagcccaatctacaacgaggatgactggtctcccaccggcgacgtctacgtngtggaaccactgggcttctgatctgggccgtcaccctcgctgggatcctcggcggcggcgccctcctcgtctacaacaccagcgccctctccggctaaggatatccaatgcatgcgcttcttgcgattcgtcatgtaaaatcagggtgtctgtctataatctagcctccatggatgctcaaccttcgtcatgtaacaataatcagtgctactcttcattacataattttgatgcc

SEQ ID NO: 29849 - protein, 102 aa, Zea mays subsp. mays
  peptide (1)..(102): Ceres Seq. ID no. 12400981
  misc_feature (35)..(96): Pfam Name: Pfam Description:  Photosystem II 10 kDa polypeptide PsbR
  misc_feature (1)..(96): NCBI GI NO: 38636958 NR Description: putative photosystem II 10K protein
  misc_feature (5)..(96): NCBI GI NO: 7443194 NR Description: photosystem II 10K protein - rice
  misc_feature (1)..(96): NCBI GI NO: 131399 NR Description: Photosystem II 10 kDa polypeptide
  misc_feature (1)..(96): NCBI GI NO: 3914471 NR Description: Photosystem II 10 kDa polypeptide
  misc_feature (14)..(96): NCBI GI NO: 3914472 NR Description: Photosystem II 10 kDa polypeptide
  misc_feature (1)..(96): NCBI GI NO: 25989650 NR Description: photosystem II 10 kDa protein [Xerophyta humilis]
  misc_feature (13)..(96): NCBI GI NO: 1418984 NR Description: photosystem II 10 kD polypeptide
  misc_feature (1)..(96): NCBI GI NO: 21491 NR Description: ST-LS1 protein (AA 1-138) [Solanum tuberosum]
  misc_feature (14)..(95): NCBI GI NO: 131400 NR Description: Photosystem II 10 kDa polypeptide
  misc_feature (16)..(95): NCBI GI NO: 28207611 NR Description: photosystem II 10kDa polypeptide
  misc_feature (96)..(96): Xaa is any aa, unknown or other
MAASMISSSALAVAPQGLPPLGRRASSFAVVCSKKKIKTDKPYGIGGGLTVDVDANGRKGKGKGVYQFVDKYGANVDGYSPIYNEDDWSPTGDVYXVEPLGF

SEQ ID NO: 29850 - protein, 98 aa, Zea mays subsp. mays
  peptide (1)..(98): Ceres Seq. ID no. 12400982
  misc_feature (31)..(92): Pfam Name: Pfam Description:  Photosystem II 10 kDa polypeptide PsbR
  misc_feature (1)..(92): NCBI GI NO: 38636958 NR Description: putative photosystem II 10K protein
  misc_feature (1)..(92): NCBI GI NO: 7443194 NR Description: photosystem II 10K protein - rice
  misc_feature (1)..(92): NCBI GI NO: 131399 NR Description: Photosystem II 10 kDa polypeptide
  misc_feature (1)..(92): NCBI GI NO: 3914471 NR Description: Photosystem II 10 kDa polypeptide
  misc_feature (10)..(92): NCBI GI NO: 3914472 NR Description: Photosystem II 10 kDa polypeptide
  misc_feature (1)..(92): NCBI GI NO: 25989650 NR Description: photosystem II 10 kDa protein [Xerophyta humilis]
  misc_feature (9)..(92): NCBI GI NO: 1418984 NR Description: photosystem II 10 kD polypeptide
  misc_feature (1)..(92): NCBI GI NO: 21491 NR Description: ST-LS1 protein (AA 1-138) [Solanum tuberosum]
  misc_feature (10)..(91): NCBI GI NO: 131400 NR Description: Photosystem II 10 kDa polypeptide
  misc_feature (12)..(91): NCBI GI NO: 28207611 NR Description: photosystem II 10kDa polypeptide
  misc_feature (92)..(92): Xaa is any aa, unknown or other
MISSSALAVAPQGLPPLGRRASSFAVVCSKKKIKTDKPYGIGGGLTVDVDANGRKGKGKGVYQFVDKYGANVDGYSPIYNEDDWSPTGDVYXVEPLGF

SEQ ID NO: 29851 - protein, 89 aa, Zea mays subsp. mays
  peptide (1)..(89): Ceres Seq. ID no. 12400983
  misc_feature (11)..(11): Xaa is any aa, unknown or other
MTGLPPATSTXWNHWASDLGRHPRWDPRRRRPPRLQHQRPLRLRISNACASCDSSCKIRVSVYNLASMDAQPSSCNNNQCYSSLHNFDA

SEQ ID NO: 29852 - DNA, 911 bp, Zea mays subsp. mays
  misc_feature (1)..(911): Ceres Seq. ID no. 12402669
gcgatttcccctcgcagtctctcgcacgcgccggcatggcgacgctcgcgcggtggcatctacaacctcctactgcccgccccctcgctcgccggcggatcccgcgtcgggctgcgaccgtggtttccccgcgcgcgttcagccgcgcggacttcgatggcttcgtgcggcgcgcgtggcagggcgccaacgcgggggccgagcgcttcgccttcgaggcacggcaggccgcgcagcggctggacagcaggttctcgatctcccggaggctcgcggacgcttcccgtgccgcccgcgcccgcgccgttgagatcgacgccgagttcggcatcgggaggcggtggcgctccttctccgtcgacttctcccgcaactggcccaggtatcggagggagatcaatgacttcatggaaactcccatcgggagagcattagctacaatattttttctgtggttagcactgtcagggtggttgttcagaattttcatttttggcacgtttgtgctgccatttgctgcccctcttctccttgggacctttgctaacagggttgccattgagggaacatgcccagcatgcaaaaggcgtttcgtgggctaccgcaaccaagtgattcggtgcatgagctgccaaaacattgtatggcagccaaataacagcccatctggtggtgctagaagttcacgaagctcggaacctgatgtgattgatgtagaatatgaagagaagtaagaacattctgccccaccctacaccgaaaagcaaaaatcacgtgggcggaagaagaggcaaggcttcagacacaggctgcaccccatgagctatttgtagatttggttgtttgtgtttttctggtgtacatacattacgtgctcctttcgaaataaaatggaaattctggtgttgtgc

SEQ ID NO: 29853 - protein, 243 aa, Zea mays subsp. mays
  peptide (1)..(243): Ceres Seq. ID no. 12402670
  misc_feature (12)..(243): NCBI GI NO: 37537000 NR Description: unknown protein
  misc_feature (34)..(243): NCBI GI NO: 18406650 NR Description: expressed protein; protein id: At2g44870
  misc_feature (34)..(243): NCBI GI NO: 7486940 NR Description: hypothetical protein At2g44870
DFPSQSLARAGMATLARWHLQPPTARPLARRRIPRRAATVVSPRAFSRADFDGFVRRAWQGANAGAERFAFEARQAAQRLDSRFSISRRLADASRAARARAVEIDAEFGIGRRWRSFSVDFSRNWPRYRREINDFMETPIGRALATIFFLWLALSGWLFRIFIFGTFVLPFAAPLLLGTFANRVAIEGTCPACKRRFVGYRNQVIRCMSCQNIVWQPNNSPSGGARSSRSSEPDVIDVEYEEK

SEQ ID NO: 29854 - protein, 232 aa, Zea mays subsp. mays
  peptide (1)..(232): Ceres Seq. ID no. 12402671
  misc_feature (1)..(232): NCBI GI NO: 37537000 NR Description: unknown protein
  misc_feature (23)..(232): NCBI GI NO: 18406650 NR Description: expressed protein; protein id: At2g44870
  misc_feature (23)..(232): NCBI GI NO: 7486940 NR Description: hypothetical protein At2g44870
MATLARWHLQPPTARPLARRRIPRRAATVVSPRAFSRADFDGFVRRAWQGANAGAERFAFEARQAAQRLDSRFSISRRLADASRAARARAVEIDAEFGIGRRWRSFSVDFSRNWPRYRREINDFMETPIGRALATIFFLWLALSGWLFRIFIFGTFVLPFAAPLLLGTFANRVAIEGTCPACKRRFVGYRNQVIRCMSCQNIVWQPNNSPSGGARSSRSSEPDVIDVEYEEK

SEQ ID NO: 29855 - protein, 144 aa, Zea mays subsp. mays
  peptide (1)..(144): Ceres Seq. ID no. 12402672
AISPRSLSHAPAWRRSRGGIYNLLLPAPSLAGGSRVGLRPWFPRARSAARTSMASCGARGRAPTRGPSASPSRHGRPRSGWTAGSRSPGGSRTLPVPPAPAPLRSTPSSASGGGGAPSPSTSPATGPGIGGRSMTSWKLPSGEH

SEQ ID NO: 29856 - DNA, 1022 bp, Zea mays subsp. mays
  misc_feature (1)..(1022): Ceres Seq. ID no. 12402380
aagttaggtttctagccagttgtcgcgttgggacaaaatgaaaagggaataaataaaaagagagaataactggctagttgtcgtctgcctctcgatttctgcgtgattcgcctgcctgccttcctgttggttgcttctttctactcgcgctcgcaccaaccagaggagcaaccgagcagtagcgactcctctgcgtgaggcctgccgtcatcccccgtgggccgtggccgtgcgcaaaaaaacaaatcatcctcgattcgaccagaggggaaggagacgcgccgggagaagggggaagagacgcggcgaccatgtctccgatctgggtgttcgggtacggctcgctgatctggaacccaggtttcgcctacgacgaccgcgtcgtcggctttgtcagggactaccgccgcgtcttctaccaagggagcacggaccacaggggcacgccgcagttccccgggaggaccgtcacgctcgagcaccagcccggagcgacttgctggggagttgcttacagaataaaggaggaagatgaggagatagctttggagtatcttgaagtcagggagaagcaatacgatgagaaagtttaccttgacttgtatactgattcatcgcccaaagtaccagctgtcgaaaacgtgatggtatacttcgccaccagtaacaagaagaacaatcaaaactatcttggtcctgcacctctggaagaaatgaccaggcaaatttaccttgctcaaggcccatctggacctaacaaagagtatgtgttcaaactcgaggacgcgttacacaaattaggagttgtagaccaacatgtccaagaactggcaaatgctctgcgtgagtattctgacaccgagctatctaagtgaaagatcacatttaccccttgtttggagggtaaggatttataaataaagttagaattcattcatgcatgtcccaacatggatatattcttgtaagctgcgttttgagtgactacattacgattatattcctgtgcacatgtggtttgc

SEQ ID NO: 29857 - protein, 187 aa, Zea mays subsp. mays
  peptide (1)..(187): Ceres Seq. ID no. 12402381
  misc_feature (4)..(178): Pfam Name: Pfam Description:  ChaC-like protein
  misc_feature (4)..(186): NCBI GI NO: 38344831 NR Description: OSJNBa0064H22.12
  misc_feature (4)..(184): NCBI GI NO: 12083292 NR Description: unknown protein [Arabidopsis thaliana]
  misc_feature (4)..(184): NCBI GI NO: 18401334 NR Description: expressed protein; protein id: At1g44790
  misc_feature (4)..(182): NCBI GI NO: 15239626 NR Description: putative protein; protein id: At5g26220.1
  misc_feature (4)..(184): NCBI GI NO: 25349686 NR Description: hypothetical protein T12C22.6
  misc_feature (4)..(187): NCBI GI NO: 18417778 NR Description: unknown protein; protein id: At4g31290
  misc_feature (4)..(187): NCBI GI NO: 21593515 NR Description: unknown [Arabidopsis thaliana]
  misc_feature (5)..(187): NCBI GI NO: 27525010 NR Description: putative cation transporter [Beta procumbens]
  misc_feature (84)..(182): NCBI GI NO: 7486723 NR Description: hypothetical protein F9D12
  misc_feature (4)..(80): NCBI GI NO: 7486723 NR Description: hypothetical protein F9D12
MSPIWVFGYGSLIWNPGFAYDDRVVGFVRDYRRVFYQGSTDHRGTPQFPGRTVTLEHQPGATCWGVAYRIKEEDEEIALEYLEVREKQYDEKVYLDLYTDSSPKVPAVENVMVYFATSNKKNNQNYLGPAPLEEMTRQIYLAQGPSGPNKEYVFKLEDALHKLGVVDQHVQELANALREYSDTELSK

SEQ ID NO: 29858 - DNA, 987 bp, Zea mays subsp. mays
  misc_feature (1)..(987): Ceres Seq. ID no. 12356601
  misc_feature (502)..(502): n is a, c, t, g, unknown, or other
  misc_feature (122)..(122): n is a, c, t, g, unknown, or other
  misc_feature (331)..(331): n is a, c, t, g, unknown, or other
  misc_feature (121)..(121): n is a, c, t, g, unknown, or other
  misc_feature (329)..(329): n is a, c, t, g, unknown, or other
  misc_feature (339)..(339): n is a, c, t, g, unknown, or other
  misc_feature (439)..(439): n is a, c, t, g, unknown, or other
atccgcttgtccctaccacctccaccaaccaaaacccccaaccgccgaggtcaccggcgactccgtcctcgccgcgccgcgccgtgaggatgtcgttccactaccacgaccacgggctgtnnatggacgccgcggcagcggcggccgccgccgcgtcgtcgccgaaccctagcggcttctcccccggcatcggcggggaaagggagaaggcggccatcgcggcgcacccgctgtacgagcgcctcctggaggcgcacgtcgcctgcctacgcgtcgccacccccgtcgaccagctcccccgcatcgacgcgcagatcgccgcgcgcccncngccgctcnccgcggccgccggggccgcggccgcgggaggcccgtccggcggggaggagctcgacctcttcatgacgcactatgtattgctcctttgctgatgcaaggngcagttgcagcagcatgtacgtgttcatgcaatggaagcagtgatgggttgctgggagcttgnacaatctttacaaagcctaacaggggcatctccgggtgaaggcactggaggaaccatgtctgacgatgaagataaccaggtggatagtgaagccaacatgttcgatggaaatgatggatcagacggtatgggctttggccccctaatactgacagagggtgaacggtccttagttgagcgtgtacggaaggagctgaagaacgagcttaagcagggttacaaggaaaagcttgtcgatatcagggaagagatcatgcgcaaacgcagggctgggaaacttcctggagataccgcatctgtactgaaagcttggtggcaagctcattcgaagtggccgtacccaactgaagacgacaaggccagactggtgcaggaaacggggttgcagctaaagcagatcaacaactggttcattaaccaacgcaaacggaactggcacagcaacccaacatcctcggctgaaaagaccaaaaaaaaaaaaaaaa

SEQ ID NO: 29859 - protein, 172 aa, Zea mays subsp. mays
  peptide (1)..(172): Ceres Seq. ID no. 12356602
  misc_feature (98)..(154): Pfam Name: Pfam Description:  Homeobox domain
  misc_feature (1)..(171): NCBI GI NO: 14149139 NR Description: KNOX family class 2 homeodomain protein
  misc_feature (1)..(171): NCBI GI NO: 33333542 NR Description: knotted 7 [Hordeum vulgare]
  misc_feature (1)..(171): NCBI GI NO: 7446253 NR Description: probable homeobox protein OSH45, splice form OSH44
  misc_feature (1)..(171): NCBI GI NO: 15238743 NR Description: KNAT3 homeodomain protein; protein id: At5g25220
  misc_feature (1)..(171): NCBI GI NO: 21554222 NR Description: KNAT3 homeodomain protein [Arabidopsis thaliana]
  misc_feature (1)..(171): NCBI GI NO: 21539535 NR Description: KNAT3 homeodomain protein [Arabidopsis thaliana]
  misc_feature (1)..(170): NCBI GI NO: 7446252 NR Description: probable homeobox protein OSH45, splice form OSH45
  misc_feature (1)..(171): NCBI GI NO: 3023961 NR Description: Homeobox protein knotted-1 like 3 (KNAP3)
  misc_feature (1)..(171): NCBI GI NO: 20141566 NR Description: Homeobox protein knotted-1 like 4 (KNAT4)
  misc_feature (1)..(171): NCBI GI NO: 1045044 NR Description: KNAT4 homeobox protein [Arabidopsis thaliana]
  misc_feature (11)..(11): Xaa is any aa, unknown or other
MEAVMGCWELXQSLQSLTGASPGEGTGGTMSDDEDNQVDSEANMFDGNDGSDGMGFGPLILTEGERSLVERVRKELKNELKQGYKEKLVDIREEIMRKRRAGKLPGDTASVLKAWWQAHSKWPYPTEDDKARLVQETGLQLKQINNWFINQRKRNWHSNPTSSAEKTKKKKK

SEQ ID NO: 29860 - protein, 168 aa, Zea mays subsp. mays
  peptide (1)..(168): Ceres Seq. ID no. 12356603
  misc_feature (94)..(150): Pfam Name: Pfam Description:  Homeobox domain
  misc_feature (1)..(167): NCBI GI NO: 14149139 NR Description: KNOX family class 2 homeodomain protein
  misc_feature (1)..(167): NCBI GI NO: 33333542 NR Description: knotted 7 [Hordeum vulgare]
  misc_feature (1)..(167): NCBI GI NO: 7446253 NR Description: probable homeobox protein OSH45, splice form OSH44
  misc_feature (1)..(167): NCBI GI NO: 15238743 NR Description: KNAT3 homeodomain protein; protein id: At5g25220
  misc_feature (1)..(167): NCBI GI NO: 21539535 NR Description: KNAT3 homeodomain protein [Arabidopsis thaliana]
  misc_feature (1)..(167): NCBI GI NO: 21554222 NR Description: KNAT3 homeodomain protein [Arabidopsis thaliana]
  misc_feature (1)..(166): NCBI GI NO: 7446252 NR Description: probable homeobox protein OSH45, splice form OSH45
  misc_feature (1)..(167): NCBI GI NO: 3023961 NR Description: Homeobox protein knotted-1 like 3 (KNAP3)
  misc_feature (1)..(167): NCBI GI NO: 20141566 NR Description: Homeobox protein knotted-1 like 4 (KNAT4)
  misc_feature (1)..(167): NCBI GI NO: 1045044 NR Description: KNAT4 homeobox protein [Arabidopsis thaliana]
  misc_feature (7)..(7): Xaa is any aa, unknown or other
MGCWELXQSLQSLTGASPGEGTGGTMSDDEDNQVDSEANMFDGNDGSDGMGFGPLILTEGERSLVERVRKELKNELKQGYKEKLVDIREEIMRKRRAGKLPGDTASVLKAWWQAHSKWPYPTEDDKARLVQETGLQLKQINNWFINQRKRNWHSNPTSSAEKTKKKKK

SEQ ID NO: 29861 - protein, 143 aa, Zea mays subsp. mays
  peptide (1)..(143): Ceres Seq. ID no. 12356604
  misc_feature (69)..(125): Pfam Name: Pfam Description:  Homeobox domain
  misc_feature (1)..(142): NCBI GI NO: 14149139 NR Description: KNOX family class 2 homeodomain protein
  misc_feature (1)..(142): NCBI GI NO: 33333542 NR Description: knotted 7 [Hordeum vulgare]
  misc_feature (1)..(142): NCBI GI NO: 7446253 NR Description: probable homeobox protein OSH45, splice form OSH44
  misc_feature (1)..(142): NCBI GI NO: 15238743 NR Description: KNAT3 homeodomain protein; protein id: At5g25220
  misc_feature (1)..(142): NCBI GI NO: 21539535 NR Description: KNAT3 homeodomain protein [Arabidopsis thaliana]
  misc_feature (1)..(142): NCBI GI NO: 21554222 NR Description: KNAT3 homeodomain protein [Arabidopsis thaliana]
  misc_feature (1)..(141): NCBI GI NO: 7446252 NR Description: probable homeobox protein OSH45, splice form OSH45
  misc_feature (1)..(142): NCBI GI NO: 3023961 NR Description: Homeobox protein knotted-1 like 3 (KNAP3)
  misc_feature (1)..(142): NCBI GI NO: 20141566 NR Description: Homeobox protein knotted-1 like 4 (KNAT4)
  misc_feature (1)..(142): NCBI GI NO: 1045044 NR Description: KNAT4 homeobox protein [Arabidopsis thaliana]
MSDDEDNQVDSEANMFDGNDGSDGMGFGPLILTEGERSLVERVRKELKNELKQGYKEKLVDIREEIMRKRRAGKLPGDTASVLKAWWQAHSKWPYPTEDDKARLVQETGLQLKQINNWFINQRKRNWHSNPTSSAEKTKKKKK

SEQ ID NO: 29862 - DNA, 726 bp, Zea mays subsp. mays
  misc_feature (1)..(726): Ceres Seq. ID no. 12402116
atccgccgaattaagttcctgcacgtacgcacgcaccgggacaccagcaacccccaacagcgccactgtccagtgcgcgcgtcaagcttgcttagctagccgccatggcctccctcgccgccgtctccgtgaagcccgtggccatcaagggtctcgccggcagctccatctccggaaggaagctcgccgtcgccaggccgtcggcccgctccatccgcaggccccgcgcagccgccgtggtggccaagtacggcgacaagagcgtctactttgacctcgacgacatcggcaacaccaccggacagtgggacctctacggctctgacgcgccctcgccctacaacccgctacagagcaagttcttcgagacgttcgcggctccgttcaccaagagaggtctgctgctcaagttcctgctgctgggcggcggctcacttctggcctacgtcagcgcgtcggcgtcaccggacctcctgccgatcaagaagggacctcaggagccgccgcagccgggcccgcgcggcaagatctaagctcagcttctccatttgcatggtctagtagtagcttgctttgtactgctagcgccggtcgatccgtcgcaatcgtcatggatcatctctctatcttgttgttacgctgttcataatttggtatatttgccattccgctattgtgtactctttggcatacatacaataattaaaatggcgttgcgtggctttc

SEQ ID NO: 29863 - protein, 142 aa, Zea mays subsp. mays
  peptide (1)..(142): Ceres Seq. ID no. 12402117
  misc_feature (5)..(142): Pfam Name: Pfam Description:  Photosystem I reaction centre subunit VI
  misc_feature (1)..(142): NCBI GI NO: 3914465 NR Description: Photosystem I reaction center subunit VI
  misc_feature (1)..(142): NCBI GI NO: 3885894 NR Description: photosystem-1 H subunit GOS5 [Oryza sativa]
  misc_feature (1)..(142): NCBI GI NO: 17380533 NR Description: Photosystem I reaction center subunit VI
  misc_feature (1)..(142): NCBI GI NO: 72679 NR Description: photosystem I protein psaH precursor - rice
  misc_feature (1)..(142): NCBI GI NO: 131196 NR Description: Photosystem I reaction center subunit VI
  misc_feature (1)..(142): NCBI GI NO: 15218186 NR Description: photosystem I subunit VI precursor
  misc_feature (1)..(142): NCBI GI NO: 15233291 NR Description: photosystem I subunit VI precursor
  misc_feature (1)..(142): NCBI GI NO: 3914442 NR Description: Photosystem I reaction center subunit VI
  misc_feature (1)..(142): NCBI GI NO: 33520419 NR Description: photosystem I psaH protein [Trifolium pratense]
  misc_feature (1)..(142): NCBI GI NO: 131199 NR Description: Photosystem I reaction center subunit VI
MASLAAVSVKPVAIKGLAGSSISGRKLAVARPSARSIRRPRAAAVVAKYGDKSVYFDLDDIGNTTGQWDLYGSDAPSPYNPLQSKFFETFAAPFTKRGLLLKFLLLGGGSLLAYVSASASPDLLPIKKGPQEPPQPGPRGKI

SEQ ID NO: 29864 - protein, 90 aa, Zea mays subsp. mays
  peptide (1)..(90): Ceres Seq. ID no. 12402118
SAELSSCTYARTGTPATPNSATVQCARQACLASRHGLPRRRLREARGHQGSRRQLHLRKEARRRQAVGPLHPQAPRSRRGGQVRRQERLL

SEQ ID NO: 29865 - DNA, 1448 bp, Zea mays subsp. mays
  misc_feature (1)..(1448): Ceres Seq. ID no. 13496092
gcacgagaccattacctagaacatcctaatcgaaaagtgggtgtcgggcgggccagcagctggacaagcaagcaagcaagcaagccaataatggcgtctcactctcatcggtcccggtctcccacggcgccctgtcccagctgggggcacgcccacgcgccgcggtgccggcggcggctcgtccgggcactgctgctcgtagcggcgctggcgctggcggcggcaggtggtggtggtcgtggctccgcggccgccgccgccgccgccacccagcagaggatcccggccatcttcatgttcggcgactccatcgtggacccgggcaacaacaacaaccggctgacggagggccaaggccaacttcccgccgtacgggcaggacttccccggcggcgtcgccacgggggaggttctccaacggcttggtccccggggacctcctagcttccaagctgggcatcaaggagctgctgccgccgttcatcggcaccgacctgcagctcgaggacctgctcaccggcgtggccttcgcctgcggcggcagtggctacgatccgctcacgtccaagctcgcgacgaccctgtcgagcgccgaccagctccagctgttccaggactacaaggataagctggcggccctggccggggaggaggagatggagcgggtcgtctcgcaggccgtctacttcacggtgatgggggcaaacgacatcgtaaacaactacttcatcctccccatcagacgccaccagtacgacctctcgtcctacgtcgacttcctcgtctcctcggcgatcaacttcacaaggactctgaacgacatgggagctcagaggatagcgttcctcggcgtgccgccactaggatgctgcccgtcacagatcacgctcgcggggagcccgtcgcgccagtgcgatccggcaaggaaccaggcgtcggagctgtacaactccagggtctccaaggagatagagcgcctcaacgcggagcggagcggttctggctccaagttcgtctacgtcgacatatactacaacttgctcgacctcatccagaatccagcttcgtacggtttcaaggacgtgagcgaaggttgctgcggcagcacggtgctgaacgccgccatcttcatcgcgtaccacagcgcgtgccccaacgcgcccgactacatattctgggacggcttccaccccacgcagaaggcctacgacatcgtggtggacaagctcatccagcagaactccaagtacctgatgatgtgaagacgcttgctgctgctgcggctgctgcatggcacgagggctctacctttccccgtacaaacacacagccagctgacgtcgaccattcatggacgactccccagtccccacatggcagtggcatttgccaaatgtacgatacatattaacatataaatatactatacatgcctgtgcgccaatatc

SEQ ID NO: 29866 - protein, 201 aa, Zea mays subsp. mays
  peptide (1)..(201): Ceres Seq. ID no. 13496093
  misc_feature (1)..(184): Pfam Name: Pfam Description:  GDSL-like Lipase/Acylhydrolase
  misc_feature (1)..(192): NCBI GI NO: 37534726 NR Description: putative anter-specific proline-rich protein
  misc_feature (1)..(200): NCBI GI NO: 30102970 NR Description: putative lipase/acylhydrolase
  misc_feature (1)..(199): NCBI GI NO: 18406327 NR Description: lipase, putative [Arabidopsis thaliana]
  misc_feature (1)..(194): NCBI GI NO: 28393626 NR Description: putative family II extracellular lipase 1 (EXL1)
  misc_feature (1)..(194): NCBI GI NO: 18410954 NR Description: family II extracellular lipase 1 (EXL1)
  misc_feature (1)..(194): NCBI GI NO: 8778807 NR Description: T4O12.12 [Arabidopsis thaliana]
  misc_feature (1)..(194): NCBI GI NO: 15222901 NR Description: family II extracellular lipase 3 (EXL3)
  misc_feature (1)..(80): NCBI GI NO: 15229719 NR Description: lipase, putative [Arabidopsis thaliana]
  misc_feature (120)..(199): NCBI GI NO: 15229719 NR Description: lipase, putative [Arabidopsis thaliana]
  misc_feature (1)..(199): NCBI GI NO: 15231934 NR Description: lipase, putative [Arabidopsis thaliana]
MERVVSQAVYFTVMGANDIVNNYFILPIRRHQYDLSSYVDFLVSSAINFTRTLNDMGAQRIAFLGVPPLGCCPSQITLAGSPSRQCDPARNQASELYNSRVSKEIERLNAERSGSGSKFVYVDIYYNLLDLIQNPASYGFKDVSEGCCGSTVLNAAIFIAYHSACPNAPDYIFWDGFHPTQKAYDIVVDKLIQQNSKYLMM

SEQ ID NO: 29867 - protein, 188 aa, Zea mays subsp. mays
  peptide (1)..(188): Ceres Seq. ID no. 13496094
  misc_feature (1)..(171): Pfam Name: Pfam Description:  GDSL-like Lipase/Acylhydrolase
  misc_feature (1)..(179): NCBI GI NO: 37534726 NR Description: putative anter-specific proline-rich protein
  misc_feature (1)..(187): NCBI GI NO: 30102970 NR Description: putative lipase/acylhydrolase
  misc_feature (1)..(186): NCBI GI NO: 18406327 NR Description: lipase, putative [Arabidopsis thaliana]
  misc_feature (1)..(181): NCBI GI NO: 28393626 NR Description: putative family II extracellular lipase 1 (EXL1)
  misc_feature (1)..(181): NCBI GI NO: 18410954 NR Description: family II extracellular lipase 1 (EXL1)
  misc_feature (1)..(181): NCBI GI NO: 8778807 NR Description: T4O12.12 [Arabidopsis thaliana]
  misc_feature (1)..(181): NCBI GI NO: 15222901 NR Description: family II extracellular lipase 3 (EXL3)
  misc_feature (1)..(67): NCBI GI NO: 15229719 NR Description: lipase, putative [Arabidopsis thaliana]
  misc_feature (107)..(186): NCBI GI NO: 15229719 NR Description: lipase, putative [Arabidopsis thaliana]
  misc_feature (1)..(186): NCBI GI NO: 15231934 NR Description: lipase, putative [Arabidopsis thaliana]
MGANDIVNNYFILPIRRHQYDLSSYVDFLVSSAINFTRTLNDMGAQRIAFLGVPPLGCCPSQITLAGSPSRQCDPARNQASELYNSRVSKEIERLNAERSGSGSKFVYVDIYYNLLDLIQNPASYGFKDVSEGCCGSTVLNAAIFIAYHSACPNAPDYIFWDGFHPTQKAYDIVVDKLIQQNSKYLMM

SEQ ID NO: 29868 - protein, 181 aa, Zea mays subsp. mays
  peptide (1)..(181): Ceres Seq. ID no. 13496095
MLPVTDHARGEPVAPVRSGKEPGVGAVQLQGLQGDRAPQRGAERFWLQVRLRRHILQLARPHPESSFVRFQGRERRLLRQHGAERRHLHRVPQRVPQRARLHILGRLPPHAEGLRHRGGQAHPAELQVPDDVKTLAAAAAAAWHEGSTFPRTNTQPADVDHSWTTPQSPHGSGICQMYDTY

SEQ ID NO: 29869 - DNA, 1621 bp, Zea mays subsp. mays
  misc_feature (1)..(1621): Ceres Seq. ID no. 12367462
acgggctgggctttcgtgggccgggagtgggcgacgaacgatggctggctggccgtccgtgattgttttggaacgggcagcgtgtttggttggtgcctgtgctgtgccgccgttcgtctctgggtagcgtagcgacggcgccacggcggcttccggctcgtgcgcgcgcgcgcgtgtccgggcgagaagagctgccaagggatggaggcgctgaggaagcaggcgagcaagttcaaggagcaggtcgccaagcagcagcaggctgttataaagcaattcagtactactggctatgagcggtcagattccattgtaattgatgaggttgaactacagagacatcaacagcttgagaaattgtatacttctactcgttctgtaagggatttccagaaggacatagttagagcagctgaaggtttggtgtctattggaaacaaacatattgaagtgggaacaaaattttctgaggactgctatagatatggaagcgaaaataatgcaagcgacgaagcccttagaaaagcagcatcactatacggaggtgctttgagaaatattgagaaagagtatgaagatttcaacagaattttatcttctcagactatagacccattgagagcaatggctatgggtagacccctggaagatgctcgtggtcttgcacagcgctatagcaggatgagacatgaagctgagatcctctctactgaaattgctagaagaaaggcacgggtaagagaagctccaattgctgagcacactacaaagcttcagcaatcagaagctagaatgatagagcacaaagcaagcatggccgtgttagggaaggaagcagcagctgcacttgcaactgtcgagtctcaacagcaacgagtgacccttcagaggctggttggcacggcggaagcagaaaagttattccatctgagattagctgctatacttgatgacgttgaggcagagatgtcctctgagaagcaaaggagagaatctgcaccacctatcatatcttcacataagcgtgctgagaaagctcagtacttccttgctgaggtaatgcataatttcaatggaaccacggagaaggaactgagcttaattgttggcgattatgttgttgttcgtcagattgctcccaacggctgggcggaaggagaatgccgagggaaggctggctggtttccggctgcctatgttgagaggcgcgagaatatccccccgaataaagttttccctcaagtataagatcataagaggggtcatctgtttccactgataagcagtttggtttggcattgaggagctgcaaggctgtatctaacttctgattggtttgatgctccgtatggcgtatcttgtgcatcctatgttcttgtggtggtctagacttggaataagatatgtcggcacgtgctctgcgcctgtgcctgcgcgcacattgatgaagatgtcgctttgcatgtgtccgcagtgtgctactgcttgcggcagcgtaggtcatgttgaatgagctttcctttactgacagatttcgagtgtaaattggttcttgcacttttttttcgttagggtgtatcagtagttctgtacaatatgtttttaatgagaccattcggcc

SEQ ID NO: 29870 - protein, 348 aa, Zea mays subsp. mays
  peptide (1)..(348): Ceres Seq. ID no. 12367463
  misc_feature (282)..(336): Pfam Name: Pfam Description:  SH3 domain
  misc_feature (1)..(347): NCBI GI NO: 22093679 NR Description: putative SH3
  misc_feature (1)..(348): NCBI GI NO: 21928139 NR Description: AT4g18060/F15J5_30 [Arabidopsis thaliana]
  misc_feature (1)..(348): NCBI GI NO: 22328762 NR Description: putative protein; protein id: At4g18060
  misc_feature (1)..(348): NCBI GI NO: 16974680 NR Description: SH3 domain-containing protein 3
  misc_feature (1)..(260): NCBI GI NO: 7485521 NR Description: hypothetical protein F15J5
  misc_feature (1)..(273): NCBI GI NO: 15221714 NR Description: unknown protein; protein id: At1g31440
  misc_feature (276)..(344): NCBI GI NO: 15221714 NR Description: unknown protein; protein id: At1g31440
  misc_feature (1)..(272): NCBI GI NO: 18418491 NR Description: putative protein; protein id: At4g34660
  misc_feature (1)..(272): NCBI GI NO: 38344978 NR Description: OSJNBa0011L07.8
  misc_feature (1)..(272): NCBI GI NO: 7487662 NR Description: hypothetical protein T4L20
MEALRKQASKFKEQVAKQQQAVIKQFSTTGYERSDSIVIDEVELQRHQQLEKLYTSTRSVRDFQKDIVRAAEGLVSIGNKHIEVGTKFSEDCYRYGSENNASDEALRKAASLYGGALRNIEKEYEDFNRILSSQTIDPLRAMAMGRPLEDARGLAQRYSRMRHEAEILSTEIARRKARVREAPIAEHTTKLQQSEARMIEHKASMAVLGKEAAAALATVESQQQRVTLQRLVGTAEAEKLFHLRLAAILDDVEAEMSSEKQRRESAPPIISSHKRAEKAQYFLAEVMHNFNGTTEKELSLIVGDYVVVRQIAPNGWAEGECRGKAGWFPAAYVERRENIPPNKVFPQV

SEQ ID NO: 29871 - protein, 207 aa, Zea mays subsp. mays
  peptide (1)..(207): Ceres Seq. ID no. 12367464
  misc_feature (141)..(195): Pfam Name: Pfam Description:  SH3 domain
  misc_feature (1)..(206): NCBI GI NO: 22093679 NR Description: putative SH3
  misc_feature (1)..(207): NCBI GI NO: 21928139 NR Description: AT4g18060/F15J5_30 [Arabidopsis thaliana]
  misc_feature (1)..(207): NCBI GI NO: 22328762 NR Description: putative protein; protein id: At4g18060
  misc_feature (1)..(207): NCBI GI NO: 16974680 NR Description: SH3 domain-containing protein 3
  misc_feature (1)..(119): NCBI GI NO: 7485521 NR Description: hypothetical protein F15J5
  misc_feature (1)..(132): NCBI GI NO: 15221714 NR Description: unknown protein; protein id: At1g31440
  misc_feature (135)..(203): NCBI GI NO: 15221714 NR Description: unknown protein; protein id: At1g31440
  misc_feature (1)..(131): NCBI GI NO: 18418491 NR Description: putative protein; protein id: At4g34660
  misc_feature (1)..(131): NCBI GI NO: 38344978 NR Description: OSJNBa0011L07.8
  misc_feature (1)..(131): NCBI GI NO: 7487662 NR Description: hypothetical protein T4L20
MAMGRPLEDARGLAQRYSRMRHEAEILSTEIARRKARVREAPIAEHTTKLQQSEARMIEHKASMAVLGKEAAAALATVESQQQRVTLQRLVGTAEAEKLFHLRLAAILDDVEAEMSSEKQRRESAPPIISSHKRAEKAQYFLAEVMHNFNGTTEKELSLIVGDYVVVRQIAPNGWAEGECRGKAGWFPAAYVERRENIPPNKVFPQV

SEQ ID NO: 29872 - protein, 205 aa, Zea mays subsp. mays
  peptide (1)..(205): Ceres Seq. ID no. 12367465
  misc_feature (139)..(193): Pfam Name: Pfam Description:  SH3 domain
  misc_feature (1)..(204): NCBI GI NO: 22093679 NR Description: putative SH3
  misc_feature (1)..(205): NCBI GI NO: 21928139 NR Description: AT4g18060/F15J5_30 [Arabidopsis thaliana]
  misc_feature (1)..(205): NCBI GI NO: 22328762 NR Description: putative protein; protein id: At4g18060
  misc_feature (1)..(205): NCBI GI NO: 16974680 NR Description: SH3 domain-containing protein 3
  misc_feature (1)..(117): NCBI GI NO: 7485521 NR Description: hypothetical protein F15J5
  misc_feature (1)..(130): NCBI GI NO: 15221714 NR Description: unknown protein; protein id: At1g31440
  misc_feature (133)..(201): NCBI GI NO: 15221714 NR Description: unknown protein; protein id: At1g31440
  misc_feature (1)..(129): NCBI GI NO: 18418491 NR Description: putative protein; protein id: At4g34660
  misc_feature (1)..(129): NCBI GI NO: 38344978 NR Description: OSJNBa0011L07.8
  misc_feature (1)..(129): NCBI GI NO: 7487662 NR Description: hypothetical protein T4L20
MGRPLEDARGLAQRYSRMRHEAEILSTEIARRKARVREAPIAEHTTKLQQSEARMIEHKASMAVLGKEAAAALATVESQQQRVTLQRLVGTAEAEKLFHLRLAAILDDVEAEMSSEKQRRESAPPIISSHKRAEKAQYFLAEVMHNFNGTTEKELSLIVGDYVVVRQIAPNGWAEGECRGKAGWFPAAYVERRENIPPNKVFPQV

SEQ ID NO: 29873 - DNA, 1475 bp, Zea mays subsp. mays
  misc_feature (1)..(1475): Ceres Seq. ID no. 12367451
aatatgttccttttcagctttgccaatatcgtccctgtttcccttcttgtatttcatgatcgaagatctacacgtggccaaaaaagaacaagatattggactgtacgctggttttcttggtgcatcttactttgtcggtcgatttttggtctcgttcttctggggtgtggtggctgatcgtgtcggaaggaagcccatcattatattttcagtcgcttcagtggttgtattcaacacactgtttggattaagtgtacaatattggatggccatcaccacaagattgcttctaggtgctctcaatggcatgcttgcaccaataaaggcttactcaatcgagatttgtcgacctgagcaccatgctcttgggttatcagttgtaagcacggcttggggcctaggtcttattgttggcccgtccattggaggctacttggcgcagcctgcacggcaatatccaaacgtattctctgaggaatcgatttttgggaggttcccgtatctgctgccatgcctaagtatctccattttttctgctgtcgttctagtaagctgcatatggttaccggagacactccataaacataagaatatagacaacgaagtagaaatgtccggacactcaaggactccacaaacagaagacgtagatgcaggcaagagtctatataagaactggccattgatgtcttccatcattgcgtactgtgttttcacgcttcatgacactgcatacaccgagatactttccttgtggaccgtaagtgacaaaaagtatggtgggctaggcttttcttctaagggagttggtcaacttcttgcgattgcaggtcttgggcttattgtgtatcaaatgttcatctacaggccagtccacagatatctcggaagtgtaaattcatgccgtgctgcatctgcgctatccataccacttatcgctgcttttcccttcatgacacacctgtcaggatcaaaacttggactagctctttattttgctactattttgaaagctgctcttgggataactatcctgacaggcacttcacttctgcagaactatgctgtgccacagcatcaaagaggcgccgcaaacggcgtagcggcgactgcaatgtccttctttaaggctattggacctgcaggagcaggcgctttattctcatggacccaaaaacgccaagatgctgccttctttccaggggatcacatgttgttcttcattctgaatttggtccaatgtattgggctcgtgctgacccttaaaacattcctagcagtaccgaaacactataaatgacagctgctcgaacccaagcaatggaataatgatggattagcaaaacatatgtgcccaaaaatacgtttttgagtggcatacaacggaattatgtaaaagctgtcaagaaaaagtagctacaatgattgtgtccgctatctttacatctccttacattgaagttttaatttgagcc

SEQ ID NO: 29874 - protein, 432 aa, Zea mays subsp. mays
  peptide (1)..(432): Ceres Seq. ID no. 12367452
  misc_feature (5)..(432): NCBI GI NO: 23452823 NR Description: major facilitator superfamily antiporter
  misc_feature (45)..(432): NCBI GI NO: 23452819 NR Description: major facilitator superfamily antiporter
  misc_feature (5)..(426): NCBI GI NO: 30684565 NR Description: transporter-related protein [Arabidopsis thaliana]
  misc_feature (5)..(429): NCBI GI NO: 20260160 NR Description: transporter-like protein [Arabidopsis thaliana]
  misc_feature (5)..(429): NCBI GI NO: 22326785 NR Description: transporter-like protein; protein id: At5g13740
  misc_feature (1)..(428): NCBI GI NO: 23452821 NR Description: major facilitator superfamily antiporter
  misc_feature (5)..(402): NCBI GI NO: 10177340 NR Description: transporter-like protein [Arabidopsis thaliana]
  misc_feature (15)..(426): NCBI GI NO: 15229781 NR Description: transporter-like protein; protein id: At3g43790.1
  misc_feature (45)..(426): NCBI GI NO: 30684567 NR Description: transporter-related protein [Arabidopsis thaliana]
  misc_feature (45)..(426): NCBI GI NO: 21555230 NR Description: transporter-like protein [Arabidopsis thaliana]
ICSFSALPISSLFPFLYFMIEDLHVAKKEQDIGLYAGFLGASYFVGRFLVSFFWGVVADRVGRKPIIIFSVASVVVFNTLFGLSVQYWMAITTRLLLGALNGMLAPIKAYSIEICRPEHHALGLSVVSTAWGLGLIVGPSIGGYLAQPARQYPNVFSEESIFGRFPYLLPCLSISIFSAVVLVSCIWLPETLHKHKNIDNEVEMSGHSRTPQTEDVDAGKSLYKNWPLMSSIIAYCVFTLHDTAYTEILSLWTVSDKKYGGLGFSSKGVGQLLAIAGLGLIVYQMFIYRPVHRYLGSVNSCRAASALSIPLIAAFPFMTHLSGSKLGLALYFATILKAALGITILTGTSLLQNYAVPQHQRGAANGVAATAMSFFKAIGPAGAGALFSWTQKRQDAAFFPGDHMLFFILNLVQCIGLVLTLKTFLAVPKHYK

SEQ ID NO: 29875 - protein, 414 aa, Zea mays subsp. mays
  peptide (1)..(414): Ceres Seq. ID no. 12367453
  misc_feature (1)..(414): NCBI GI NO: 23452823 NR Description: major facilitator superfamily antiporter
  misc_feature (27)..(414): NCBI GI NO: 23452819 NR Description: major facilitator superfamily antiporter
  misc_feature (1)..(408): NCBI GI NO: 30684565 NR Description: transporter-related protein [Arabidopsis thaliana]
  misc_feature (1)..(411): NCBI GI NO: 20260160 NR Description: transporter-like protein [Arabidopsis thaliana]
  misc_feature (1)..(411): NCBI GI NO: 22326785 NR Description: transporter-like protein; protein id: At5g13740
  misc_feature (1)..(410): NCBI GI NO: 23452821 NR Description: major facilitator superfamily antiporter
  misc_feature (1)..(384): NCBI GI NO: 10177340 NR Description: transporter-like protein [Arabidopsis thaliana]
  misc_feature (1)..(408): NCBI GI NO: 15229781 NR Description: transporter-like protein; protein id: At3g43790.1
  misc_feature (27)..(408): NCBI GI NO: 30684567 NR Description: transporter-related protein [Arabidopsis thaliana]
  misc_feature (27)..(408): NCBI GI NO: 21555230 NR Description: transporter-like protein [Arabidopsis thaliana]
MIEDLHVAKKEQDIGLYAGFLGASYFVGRFLVSFFWGVVADRVGRKPIIIFSVASVVVFNTLFGLSVQYWMAITTRLLLGALNGMLAPIKAYSIEICRPEHHALGLSVVSTAWGLGLIVGPSIGGYLAQPARQYPNVFSEESIFGRFPYLLPCLSISIFSAVVLVSCIWLPETLHKHKNIDNEVEMSGHSRTPQTEDVDAGKSLYKNWPLMSSIIAYCVFTLHDTAYTEILSLWTVSDKKYGGLGFSSKGVGQLLAIAGLGLIVYQMFIYRPVHRYLGSVNSCRAASALSIPLIAAFPFMTHLSGSKLGLALYFATILKAALGITILTGTSLLQNYAVPQHQRGAANGVAATAMSFFKAIGPAGAGALFSWTQKRQDAAFFPGDHMLFFILNLVQCIGLVLTLKTFLAVPKHYK

SEQ ID NO: 29876 - protein, 344 aa, Zea mays subsp. mays
  peptide (1)..(344): Ceres Seq. ID no. 12367454
  misc_feature (1)..(344): NCBI GI NO: 23452823 NR Description: major facilitator superfamily antiporter
  misc_feature (1)..(344): NCBI GI NO: 23452819 NR Description: major facilitator superfamily antiporter
  misc_feature (1)..(338): NCBI GI NO: 30684565 NR Description: transporter-related protein [Arabidopsis thaliana]
  misc_feature (1)..(341): NCBI GI NO: 20260160 NR Description: transporter-like protein [Arabidopsis thaliana]
  misc_feature (1)..(341): NCBI GI NO: 22326785 NR Description: transporter-like protein; protein id: At5g13740
  misc_feature (1)..(340): NCBI GI NO: 23452821 NR Description: major facilitator superfamily antiporter
  misc_feature (1)..(314): NCBI GI NO: 10177340 NR Description: transporter-like protein [Arabidopsis thaliana]
  misc_feature (1)..(338): NCBI GI NO: 15229781 NR Description: transporter-like protein; protein id: At3g43790.1
  misc_feature (1)..(338): NCBI GI NO: 30684567 NR Description: transporter-related protein [Arabidopsis thaliana]
  misc_feature (1)..(338): NCBI GI NO: 21555230 NR Description: transporter-like protein [Arabidopsis thaliana]
MAITTRLLLGALNGMLAPIKAYSIEICRPEHHALGLSVVSTAWGLGLIVGPSIGGYLAQPARQYPNVFSEESIFGRFPYLLPCLSISIFSAVVLVSCIWLPETLHKHKNIDNEVEMSGHSRTPQTEDVDAGKSLYKNWPLMSSIIAYCVFTLHDTAYTEILSLWTVSDKKYGGLGFSSKGVGQLLAIAGLGLIVYQMFIYRPVHRYLGSVNSCRAASALSIPLIAAFPFMTHLSGSKLGLALYFATILKAALGITILTGTSLLQNYAVPQHQRGAANGVAATAMSFFKAIGPAGAGALFSWTQKRQDAAFFPGDHMLFFILNLVQCIGLVLTLKTFLAVPKHYK

SEQ ID NO: 29877 - DNA, 1265 bp, Zea mays subsp. mays
  misc_feature (1)..(1265): Ceres Seq. ID no. 12423889
gttactccaggtctccagcccaaccaacgccacgtacaggtacagtacctgtagagaggcagaggcagaggcagaggcagaggcaccaaccttttggacatccctcctccactccctaccaacgacctctgctcatcctaagtttgccaatttgccgctccttcacttcacagttacagtagattacctccatctctcagacggaacggaggaggagagccatgtccagccccacgcacgccaggctcgcgcagcaaggcaaggccggcgtggcgctgcgcctgctcctctccgccgcgctcgccggcttcctcctcgtcttcgccgcgcgcaccctggtcacgtcgcctgtcccggcatcgccctcgtactcgtcgcagccgcatccgctgccgctgcccgtggcggaggcgctggtgcactacgccacgtccaacgcgacgccgcagcagacggcggaggagatcggggtggcgctgcgcgtgctacagcggcgcgcgccctgcaacttcctggtgttcggtctgggcctcgacagccccatgtgggcggcgctgaaccacggggggcggaccgtgttcctggaggaggacgcggcgtggatcaccagcgtgcggggcaggcacccggcgctggagtcccaccacgtggcctacgacacggcgctggccgacgccgacgcgctgctagggctccgcgcccacccggcctgcgtcgcgcagcccgacctcgcggcggccgccgccgcgtcctgccgcctcgcgctccggggcctcccgcccgtcttcgccggcctcgactgggacctcgtcatggtggacgcgcccacggggtggacgccccgggcgcccggccgcatgggcgccatctacaccgccggcatggcggcgcgcgcgcgcaggccaggggccggccccacccacgtcttcgtccacgacgtcgaccgccccgtcgaggacgccttctccagggcgttcctgtgcgagggctacctcgccgagcaggtcggacggatcaggcacttcgtcatcccgtcacaccgcgacaaggacggcacgccattctgcccttgatcaagtttgttctgctttggtttggatcccacggtgcccattgccaaactactacagtactattattgctgcatagatgttgctttgcagttgctcattctacactgatgagtgcctgagatttgggtagacgattacaatgtaaaatcgacaacttgctttgtctgttactcggatgaaaaactccagggt

SEQ ID NO: 29878 - protein, 396 aa, Zea mays subsp. mays
  peptide (1)..(396): Ceres Seq. ID no. 12423890
  misc_feature (134)..(351): NCBI GI NO: 97774 NR Description: probable endoglucanase - Ruminococcus flavefaciens
  misc_feature (124)..(353): NCBI GI NO: 23018055 NR Description: hypothetical protein [Thermobifida fusca]
  misc_feature (77)..(320): NCBI GI NO: 25028434 NR Description: putative translation initiation factor IF-2
  misc_feature (171)..(350): NCBI GI NO: 1911490 NR Description: Con1 [Homo sapiens]
  misc_feature (171)..(350): NCBI GI NO: 1911490 NR Description: Con1 [Homo sapiens]
  misc_feature (76)..(350): NCBI GI NO: 23019401 NR Description: hypothetical protein [Thermobifida fusca]
  misc_feature (202)..(336): NCBI GI NO: 23019418 NR Description: hypothetical protein [Thermobifida fusca]
LLQVSSPTNATYRYSTCREAEAEAEAEAPTFWTSLLHSLPTTSAHPKFANLPLLHFTVTVDYLHLSDGTEEESHVQPHARQARAARQGRRGAAPAPLRRARRLPPRLRRAHPGHVACPGIALVLVAAASAAAARGGGAGALRHVQRDAAADGGGDRGGAARATAARALQLPGVRSGPRQPHVGGAEPRGADRVPGGGRGVDHQRAGQAPGAGVPPRGLRHGAGRRRRAARAPRPPGLRRAARPRGGRRRVLPPRAPGPPARLRRPRLGPRHGGRAHGVDAPGARPHGRHLHRRHGGARAQARGRPHPRLRPRRRPPRRGRLLQGVPVRGLPRRAGRTDQALRHPVTPRQGRHAILPLIKFVLLWFGSHGAHCQTTTVLLLLHRCCFAVAHSTLMSA

SEQ ID NO: 29879 - protein, 283 aa, Zea mays subsp. mays
  peptide (1)..(283): Ceres Seq. ID no. 12423891
  misc_feature (48)..(282): Pfam Name: DUF579 Pfam Description: Protein of unknown function
  misc_feature (19)..(283): NCBI GI NO: 15217566 NR Description: unknown protein; protein id: At1g09610.1
  misc_feature (48)..(283): NCBI GI NO: 15234881 NR Description: putative protein; protein id: At4g09990.1
  misc_feature (57)..(283): NCBI GI NO: 18398986 NR Description: expressed protein; protein id: At1g33800
  misc_feature (1)..(283): NCBI GI NO: 25402555 NR Description: hypothetical protein
  misc_feature (57)..(283): NCBI GI NO: 18409879 NR Description: hypothetical protein; protein id: At1g71690.1
  misc_feature (57)..(283): NCBI GI NO: 25354648 NR Description: hypothetical protein F14O23.3
  misc_feature (63)..(282): NCBI GI NO: 15220402 NR Description: unknown protein; protein id: At1g67330.1
  misc_feature (44)..(271): NCBI GI NO: 18396558 NR Description: expressed protein; protein id: At1g27930
  misc_feature (44)..(271): NCBI GI NO: 21537399 NR Description: unknown [Arabidopsis thaliana]
  misc_feature (57)..(282): NCBI GI NO: 10241434 NR Description: putative protein
MSSPTHARLAQQGKAGVALRLLLSAALAGFLLVFAARTLVTSPVPASPSYSSQPHPLPLPVAEALVHYATSNATPQQTAEEIGVALRVLQRRAPCNFLVFGLGLDSPMWAALNHGGRTVFLEEDAAWITSVRGRHPALESHHVAYDTALADADALLGLRAHPACVAQPDLAAAAAASCRLALRGLPPVFAGLDWDLVMVDAPTGWTPRAPGRMGAIYTAGMAARARRPGAGPTHVFVHDVDRPVEDAFSRAFLCEGYLAEQVGRIRHFVIPSHRDKDGTPFCP

SEQ ID NO: 29880 - DNA, 1524 bp, Zea mays subsp. mays
  misc_feature (1)..(1524): Ceres Seq. ID no. 12408587
atttgttccacaatccacattccccaccccccacggcccccgggcccacccaccctctccctcttcttcctcactcctctctccctctctctctctctctctctctctctcgtcctgcgccacacgccgcggccgtctccgggcaggaaggaagggggcgggaagatgatgatgacgcgggcaccgatggggccgatggagggcgcggcggtggacgagatggtgcgccgcctcgtggagggcggccgaggcgggcgccaggtgcagctgtccgaggcggagatccggcagctctgcgtagagggcaagcgggtgctcctctcccagcccaatctcctccgaatccacgccccagtcaagatctgcggtgatatccatggccagtttgtcgaccttctgagattattcgatttgggtggttatcctccagcttcaacttacgtattcctcggagactatgtcgatagaggcaaacagagcctggagactatatgcttgctgctggcgtacaaaatccggtaccccgaaaatattttcctgttgaggggtaaccacgaggatgcaaagatcaacagagtctatggtttttatgacgaatgtaagaggaggttcaatgttcggctgtggaagatattctctgattgcttcaactgcctgcccatcgcagcgctcatcgatgacaagatactgtgcatgcatggtggcctctcgcccgaattgactagtttggaccagataaaagatattgagcgacctgctgagattcctgattatggtctcctgtgtgatctgctttggtctgatcctagccccgatggagaagggtggggggagagtgacaggggtgtctcgtgtacgtttggtgcagataaacttgtagagtttttggagaagaatgatctcgatcttatatgccgagctcatcaggtggttgaagatggctatgagttctttgcacaacgaagattagtgacaatcttttcagctccaaattattgtggagagtttgataatgttggcgctcttttaagcatagatgagagcctaatgtgttcatttcagatcctgaagccaactgatatgggtccaccgcatgcaagaaaacaaattccaaataagccaacaagagggtgaagccttggaccagcatccaatacttccagttccagtatcatgatgatcgtcagtcagctcaaagggggtgatctgttgtttggatagttggatccaccagggcctgacattagacatccatcagccaattaatccctttagccaccctttactcgtgtcttgggaggcggcttggctgtaaaggatattctgtacagcatttagttggattcaacacatcatctgttttactgttcttcctgccggcaagggacctcattggcagcatgacatacaatagatgttagtagtctcaatttgttttccttagcttctgccttgcgtttttttttttttggtgcgggacttgatgtatggtgattttatatctttgtaatatgtagatgttgc

SEQ ID NO: 29881 - protein, 377 aa, Zea mays subsp. mays
  peptide (1)..(377): Ceres Seq. ID no. 12408588
  misc_feature (117)..(312): Pfam Name: Pfam Description:  Calcineurin-like phosphoesterase
  misc_feature (63)..(377): NCBI GI NO: 34895162 NR Description: putative serine/threonine protein phosphatase
  misc_feature (57)..(371): NCBI GI NO: 30690812 NR Description: serine/threonine protein phosphatase type one(PP1)
  misc_feature (57)..(371): NCBI GI NO: 15230010 NR Description: serine/threonine protein phosphatase
  misc_feature (57)..(371): NCBI GI NO: 3153205 NR Description: serine/threonine protein phosphatase type one
  misc_feature (66)..(376): NCBI GI NO: 1346765 NR Description: SERINE/THREONINE PROTEIN PHOSPHATASE PP1
  misc_feature (57)..(360): NCBI GI NO: 29290586 NR Description: serine threonine protein phosphatase
  misc_feature (57)..(377): NCBI GI NO: 30690815 NR Description: serine/threonine protein phosphatase type one(PP1)
  misc_feature (66)..(377): NCBI GI NO: 21593410 NR Description: TOPP8 serine/threonine protein phosphatase type one
  misc_feature (66)..(364): NCBI GI NO: 15227080 NR Description: phosphoprotein phosphatase-type 1 catalyticsubunit
  misc_feature (66)..(364): NCBI GI NO: 25289017 NR Description: phosphoprotein phosphatase (EC 3
ICSTIHIPHPPRPPGPPTLSLFFLTPLSLSLSLSLSLVLRHTPRPSPGRKEGGGKMMMTRAPMGPMEGAAVDEMVRRLVEGGRGGRQVQLSEAEIRQLCVEGKRVLLSQPNLLRIHAPVKICGDIHGQFVDLLRLFDLGGYPPASTYVFLGDYVDRGKQSLETICLLLAYKIRYPENIFLLRGNHEDAKINRVYGFYDECKRRFNVRLWKIFSDCFNCLPIAALIDDKILCMHGGLSPELTSLDQIKDIERPAEIPDYGLLCDLLWSDPSPDGEGWGESDRGVSCTFGADKLVEFLEKNDLDLICRAHQVVEDGYEFFAQRRLVTIFSAPNYCGEFDNVGALLSIDESLMCSFQILKPTDMGPPHARKQIPNKPTRG

SEQ ID NO: 29882 - protein, 322 aa, Zea mays subsp. mays
  peptide (1)..(322): Ceres Seq. ID no. 12408589
  misc_feature (62)..(257): Pfam Name: Pfam Description:  Calcineurin-like phosphoesterase
  misc_feature (8)..(322): NCBI GI NO: 34895162 NR Description: putative serine/threonine protein phosphatase
  misc_feature (2)..(316): NCBI GI NO: 30690812 NR Description: serine/threonine protein phosphatase type one(PP1)
  misc_feature (2)..(316): NCBI GI NO: 15230010 NR Description: serine/threonine protein phosphatase
  misc_feature (2)..(316): NCBI GI NO: 3153205 NR Description: serine/threonine protein phosphatase type one
  misc_feature (11)..(321): NCBI GI NO: 1346765 NR Description: SERINE/THREONINE PROTEIN PHOSPHATASE PP1
  misc_feature (2)..(305): NCBI GI NO: 29290586 NR Description: serine threonine protein phosphatase
  misc_feature (2)..(322): NCBI GI NO: 30690815 NR Description: serine/threonine protein phosphatase type one(PP1)
  misc_feature (11)..(322): NCBI GI NO: 21593410 NR Description: TOPP8 serine/threonine protein phosphatase type one
  misc_feature (11)..(309): NCBI GI NO: 15227080 NR Description: phosphoprotein phosphatase-type 1 catalyticsubunit
  misc_feature (11)..(309): NCBI GI NO: 25289017 NR Description: phosphoprotein phosphatase (EC 3
MMMTRAPMGPMEGAAVDEMVRRLVEGGRGGRQVQLSEAEIRQLCVEGKRVLLSQPNLLRIHAPVKICGDIHGQFVDLLRLFDLGGYPPASTYVFLGDYVDRGKQSLETICLLLAYKIRYPENIFLLRGNHEDAKINRVYGFYDECKRRFNVRLWKIFSDCFNCLPIAALIDDKILCMHGGLSPELTSLDQIKDIERPAEIPDYGLLCDLLWSDPSPDGEGWGESDRGVSCTFGADKLVEFLEKNDLDLICRAHQVVEDGYEFFAQRRLVTIFSAPNYCGEFDNVGALLSIDESLMCSFQILKPTDMGPPHARKQIPNKPTRG

SEQ ID NO: 29883 - protein, 321 aa, Zea mays subsp. mays
  peptide (1)..(321): Ceres Seq. ID no. 12408590
  misc_feature (61)..(256): Pfam Name: Pfam Description:  Calcineurin-like phosphoesterase
  misc_feature (7)..(321): NCBI GI NO: 34895162 NR Description: putative serine/threonine protein phosphatase
  misc_feature (1)..(315): NCBI GI NO: 30690812 NR Description: serine/threonine protein phosphatase type one(PP1)
  misc_feature (1)..(315): NCBI GI NO: 15230010 NR Description: serine/threonine protein phosphatase
  misc_feature (1)..(315): NCBI GI NO: 3153205 NR Description: serine/threonine protein phosphatase type one
  misc_feature (10)..(320): NCBI GI NO: 1346765 NR Description: SERINE/THREONINE PROTEIN PHOSPHATASE PP1
  misc_feature (1)..(304): NCBI GI NO: 29290586 NR Description: serine threonine protein phosphatase
  misc_feature (1)..(321): NCBI GI NO: 30690815 NR Description: serine/threonine protein phosphatase type one(PP1)
  misc_feature (10)..(321): NCBI GI NO: 21593410 NR Description: TOPP8 serine/threonine protein phosphatase type one
  misc_feature (10)..(308): NCBI GI NO: 15227080 NR Description: phosphoprotein phosphatase-type 1 catalyticsubunit
  misc_feature (10)..(308): NCBI GI NO: 25289017 NR Description: phosphoprotein phosphatase (EC 3
MMTRAPMGPMEGAAVDEMVRRLVEGGRGGRQVQLSEAEIRQLCVEGKRVLLSQPNLLRIHAPVKICGDIHGQFVDLLRLFDLGGYPPASTYVFLGDYVDRGKQSLETICLLLAYKIRYPENIFLLRGNHEDAKINRVYGFYDECKRRFNVRLWKIFSDCFNCLPIAALIDDKILCMHGGLSPELTSLDQIKDIERPAEIPDYGLLCDLLWSDPSPDGEGWGESDRGVSCTFGADKLVEFLEKNDLDLICRAHQVVEDGYEFFAQRRLVTIFSAPNYCGEFDNVGALLSIDESLMCSFQILKPTDMGPPHARKQIPNKPTRG

SEQ ID NO: 29884 - DNA, 1353 bp, Zea mays subsp. mays
  misc_feature (1)..(1353): Ceres Seq. ID no. 12374404
ctcccgtccaggttcactccgccactccggccccctcatcttcttcccgtccccctcttcgttgcccccagatcccgcaaaccgcgaaaagaaaccgcatatcagcggacagcgggcgctgctcgttctcatcgcccccctctcgtctctcgcggagccgaccccgtccccattcggacctcagctagccaccaccaccatggcttcttcgaagaggagatttggtgctgccggcggcgcggacaagaaggatctattccatgtcgtccacaaggtgcccgccggcgacagcccgtacgtcgtagccaagcacctccagctcgtggagaagcaaccggatgtggcgatcgtgtggttctggaaggcaatcaactcaggggacagggtggacagcgccctgaaggacatggccatggtgatgaagcagcaggaccgttccgaggaggcaatcgaggccatcaggtccttcaggcacctctgctccaagcaggctcaggaatccctcgacaacctcctcattgacctctacaagaaatgcgggaaagttgaggagcagatcgagctcctgaaacagaagctcaagtcgatataccttggcgaggccttcaacgggaaggcgacgaagaaagcgcggtcccatggcaagaagtttcaggtctcgatccaacaagagacgtctcgtattctgggcaatcttggctgggcttacatgcagcagaacaacttcgaagccgccgagctggtgtaccgcaaggcgcaagctatcgagcccgatgccaacagggcgtgcaaccttgggctgtgcctgatcaagcagggcaggcacgaggaggcacggcaagcactcgaggacgtccgattgcgcagaatctatggatcagaagatgcaaaggtggttgcccgtgcggagcagcttctccgcgagctaaacccgttgcaatgcgtttcatcgccgttccaggttggcctcagcgtccatgaagggatcatgggtgaaccagacctagtagtgatgaacgagtggacgccgttcaggtcgaggaggctgcctgtgtttgaggagatagcaactttccgggaccaaatggcttgttgatgcattactttgcatggtttaatttatctgtcagtgtcacactcacatccctctagaagtttttgttcgtatactgggtgtgggggcgtgacggtgaggaatagagatcagtatatatcatatagctggggttgatgcaaagcgttgcctttaggatagtatttggttcatgttatatcactgtatggttcagatttcagtgaacaaatgttcgtgcgtgccctgatcttgtacaggatttacagttggctgttgtg

SEQ ID NO: 29885 - protein, 364 aa, Zea mays subsp. mays
  peptide (1)..(364): Ceres Seq. ID no. 12374405
  misc_feature (226)..(259): Pfam Name: Pfam Description:  TPR Domain
  misc_feature (47)..(364): NCBI GI NO: 3859116 NR Description: unknown [Oryza sativa]
  misc_feature (84)..(364): NCBI GI NO: 9758884 NR Description: gb|AAC72543
  misc_feature (84)..(364): NCBI GI NO: 30695554 NR Description: male sterility MS5 family [Arabidopsis thaliana]
  misc_feature (79)..(364): NCBI GI NO: 25406811 NR Description: hypothetical protein
  misc_feature (79)..(364): NCBI GI NO: 30678993 NR Description: male sterility MS5 family [Arabidopsis thaliana]
  misc_feature (82)..(309): NCBI GI NO: 15230439 NR Description: MS5-like protein; protein id: At3g51280.1
  misc_feature (45)..(324): NCBI GI NO: 3859112 NR Description: male sterility MS5 [Arabidopsis thaliana]
  misc_feature (45)..(324): NCBI GI NO: 4028970 NR Description: pollenless3 [Arabidopsis thaliana]
  misc_feature (45)..(286): NCBI GI NO: 15233432 NR Description: putative protein; protein id: At4g20900.1
  misc_feature (96)..(309): NCBI GI NO: 29467532 NR Description: P0582D05.25
SRPGSLRHSGPLIFFPSPSSLPPDPANREKKPHISGQRALLVLIAPLSSLAEPTPSPFGPQLATTTMASSKRRFGAAGGADKKDLFHVVHKVPAGDSPYVVAKHLQLVEKQPDVAIVWFWKAINSGDRVDSALKDMAMVMKQQDRSEEAIEAIRSFRHLCSKQAQESLDNLLIDLYKKCGKVEEQIELLKQKLKSIYLGEAFNGKATKKARSHGKKFQVSIQQETSRILGNLGWAYMQQNNFEAAELVYRKAQAIEPDANRACNLGLCLIKQGRHEEARQALEDVRLRRIYGSEDAKVVARAEQLLRELNPLQCVSSPFQVGLSVHEGIMGEPDLVVMNEWTPFRSRRLPVFEEIATFRDQMAC

SEQ ID NO: 29886 - protein, 298 aa, Zea mays subsp. mays
  peptide (1)..(298): Ceres Seq. ID no. 12374406
  misc_feature (160)..(193): Pfam Name: Pfam Description:  TPR Domain
  misc_feature (1)..(298): NCBI GI NO: 3859116 NR Description: unknown [Oryza sativa]
  misc_feature (18)..(298): NCBI GI NO: 9758884 NR Description: gb|AAC72543
  misc_feature (18)..(298): NCBI GI NO: 30695554 NR Description: male sterility MS5 family [Arabidopsis thaliana]
  misc_feature (13)..(298): NCBI GI NO: 25406811 NR Description: hypothetical protein
  misc_feature (13)..(298): NCBI GI NO: 30678993 NR Description: male sterility MS5 family [Arabidopsis thaliana]
  misc_feature (16)..(243): NCBI GI NO: 15230439 NR Description: MS5-like protein; protein id: At3g51280.1
  misc_feature (1)..(258): NCBI GI NO: 3859112 NR Description: male sterility MS5 [Arabidopsis thaliana]
  misc_feature (1)..(258): NCBI GI NO: 4028970 NR Description: pollenless3 [Arabidopsis thaliana]
  misc_feature (1)..(220): NCBI GI NO: 15233432 NR Description: putative protein; protein id: At4g20900.1
  misc_feature (30)..(243): NCBI GI NO: 29467532 NR Description: P0582D05.25
MASSKRRFGAAGGADKKDLFHVVHKVPAGDSPYVVAKHLQLVEKQPDVAIVWFWKAINSGDRVDSALKDMAMVMKQQDRSEEAIEAIRSFRHLCSKQAQESLDNLLIDLYKKCGKVEEQIELLKQKLKSIYLGEAFNGKATKKARSHGKKFQVSIQQETSRILGNLGWAYMQQNNFEAAELVYRKAQAIEPDANRACNLGLCLIKQGRHEEARQALEDVRLRRIYGSEDAKVVARAEQLLRELNPLQCVSSPFQVGLSVHEGIMGEPDLVVMNEWTPFRSRRLPVFEEIATFRDQMAC

SEQ ID NO: 29887 - protein, 229 aa, Zea mays subsp. mays
  peptide (1)..(229): Ceres Seq. ID no. 12374407
  misc_feature (91)..(124): Pfam Name: Pfam Description:  TPR Domain
  misc_feature (1)..(229): NCBI GI NO: 3859116 NR Description: unknown [Oryza sativa]
  misc_feature (1)..(229): NCBI GI NO: 9758884 NR Description: gb|AAC72543
  misc_feature (1)..(229): NCBI GI NO: 30695554 NR Description: male sterility MS5 family [Arabidopsis thaliana]
  misc_feature (1)..(229): NCBI GI NO: 25406811 NR Description: hypothetical protein
  misc_feature (1)..(229): NCBI GI NO: 30678993 NR Description: male sterility MS5 family [Arabidopsis thaliana]
  misc_feature (1)..(174): NCBI GI NO: 15230439 NR Description: MS5-like protein; protein id: At3g51280.1
  misc_feature (1)..(189): NCBI GI NO: 3859112 NR Description: male sterility MS5 [Arabidopsis thaliana]
  misc_feature (1)..(189): NCBI GI NO: 4028970 NR Description: pollenless3 [Arabidopsis thaliana]
  misc_feature (1)..(151): NCBI GI NO: 15233432 NR Description: putative protein; protein id: At4g20900.1
  misc_feature (1)..(174): NCBI GI NO: 29467532 NR Description: P0582D05.25
MAMVMKQQDRSEEAIEAIRSFRHLCSKQAQESLDNLLIDLYKKCGKVEEQIELLKQKLKSIYLGEAFNGKATKKARSHGKKFQVSIQQETSRILGNLGWAYMQQNNFEAAELVYRKAQAIEPDANRACNLGLCLIKQGRHEEARQALEDVRLRRIYGSEDAKVVARAEQLLRELNPLQCVSSPFQVGLSVHEGIMGEPDLVVMNEWTPFRSRRLPVFEEIATFRDQMAC

SEQ ID NO: 29888 - DNA, 1564 bp, Zea mays subsp. mays
  misc_feature (1)..(1564): Ceres Seq. ID no. 12367922
actgtattattgtgtggctcagctcaacaagctcgccgcaccgtcgccatggacgccgccaccggcaactgttcctcctctccgctgcgcatcgtgatctgcccgtggctcgcgttcggccacatgctcccgtgcctggagctcgcggagcgtctggcttcgcggggccaccgcgtgtccttcgtctccacgccgcgcaacctggcgcgcctcccgccgcggcgccacgacgtgcacctcgtgcccctgcccctcccacgcgtggagggcctccccgacggcgtcgagtccaccaacgacgtgccccccgacaagagagacctccactggaaggccttcgacggcctcgccgtccccttcgctgagttcctggccgccgcgtgcgccgacgaggctaccaggccggactgggtcctcgccgacacattctcccattgggcggccgccgtcgccctcgagcacaaggtgccaagcgcgatgcttctcccgagcgccgccatgatcgcctcgtgctggcaccggccgccgtcgcacgccgagcagccgagaagcgcagtgtttgaggagccggcggaacggccggcgggtgtgctcccttacgagtgggataaaagagcgcacttctttgggccccaaagagcgtcgggcatgtccaccgcgcagcgctgcttcctgacactgcagaggtgcaggctgctggccatgcggagctgccccgagtgggagccggagaatttcacggtggcggcggcactcctcggcaagccgctcgtgccgctcggcctcctaccgccgtcgcccaacggtggacgacgacgagaggaggacggcggcagtacggcgcgctgctggctggacgcgcagccgccgagctcggtcgtgtacgtggcgttgggcagcgaagtcccgctgacggtggcgctggtgcacgagctcgcccttgggctggagctcgccggcgcacgcttcctttgggctctccggaagcccagcggcgtcgcggacgacgccgacgtgctcccgccgggattccgggagcgcacctgcggccgcgggctcgtcgccatgggctgggtccctcagatgagcatactggcgcacggcgccgtgggcgggttcctgacgcactgcggccggaactcgctcgtcgaagggctcctgttcggccaccctctcgtcatgctgcccgtcgtcggggaccagggccccaacgcgcgcgccatggagcggaccaaggttgggctgcaggtggcgaggaacggcaaggacgggtcgttcgaccgccacggcgtcgccgccgccgtccgggaagtcatgctggtggaagaagccaggaaggtcttcgtggcgaatgccctggaaatgcagcgtgttgtggccgacaaggaacgccatgagagatacatcgacgagttcatacgccagctgagatcttactccactccgccggcagcgagttaaaaaggcgtacttggtggcttggtgcctcgcactgtatgtctgtatggggtctaggatgtcaacggttacgtacccgtccagtaatattattccatacttacct

SEQ ID NO: 29889 - protein, 486 aa, Zea mays subsp. mays
  peptide (1)..(486): Ceres Seq. ID no. 12367923
  misc_feature (31)..(479): Pfam Name: Pfam Description:  UDP-glucoronosyl and UDP-glucosyl transferase
  misc_feature (17)..(479): NCBI GI NO: 37530678 NR Description: putative anthocyanidin-3-glucosiderhamnosyltransferase
  misc_feature (127)..(479): NCBI GI NO: 34393982 NR Description: putative UDP-glucosyltransferase
  misc_feature (16)..(129): NCBI GI NO: 34393982 NR Description: putative UDP-glucosyltransferase
  misc_feature (28)..(477): NCBI GI NO: 34393985 NR Description: putative UDP-glucosyltransferase
  misc_feature (284)..(479): NCBI GI NO: 34393978 NR Description: putative UDP-glucosyltransferase
  misc_feature (10)..(184): NCBI GI NO: 34393978 NR Description: putative UDP-glucosyltransferase
  misc_feature (22)..(479): NCBI GI NO: 34908562 NR Description: putative anthocyanidine rhamnosyl-transferase
  misc_feature (29)..(476): NCBI GI NO: 21435782 NR Description: UDP-glucosyltransferase [Stevia rebaudiana]
  misc_feature (29)..(478): NCBI GI NO: 15240534 NR Description: anthocyanidin-3- glucoside rhamnosyltransferase-like
  misc_feature (29)..(479): NCBI GI NO: 20149064 NR Description: putative anthocyanidine rhamnosyl-transferase
TVLLCGSAQQARRTVAMDAATGNCSSSPLRIVICPWLAFGHMLPCLELAERLASRGHRVSFVSTPRNLARLPPRRHDVHLVPLPLPRVEGLPDGVESTNDVPPDKRDLHWKAFDGLAVPFAEFLAAACADEATRPDWVLADTFSHWAAAVALEHKVPSAMLLPSAAMIASCWHRPPSHAEQPRSAVFEEPAERPAGVLPYEWDKRAHFFGPQRASGMSTAQRCFLTLQRCRLLAMRSCPEWEPENFTVAAALLGKPLVPLGLLPPSPNGGRRREEDGGSTARCWLDAQPPSSVVYVALGSEVPLTVALVHELALGLELAGARFLWALRKPSGVADDADVLPPGFRERTCGRGLVAMGWVPQMSILAHGAVGGFLTHCGRNSLVEGLLFGHPLVMLPVVGDQGPNARAMERTKVGLQVARNGKDGSFDRHGVAAAVREVMLVEEARKVFVANALEMQRVVADKERHERYIDEFIRQLRSYSTPPAAS

SEQ ID NO: 29890 - protein, 470 aa, Zea mays subsp. mays
  peptide (1)..(470): Ceres Seq. ID no. 12367924
  misc_feature (15)..(463): Pfam Name: Pfam Description:  UDP-glucoronosyl and UDP-glucosyl transferase
  misc_feature (1)..(463): NCBI GI NO: 37530678 NR Description: putative anthocyanidin-3-glucosiderhamnosyltransferase
  misc_feature (111)..(463): NCBI GI NO: 34393982 NR Description: putative UDP-glucosyltransferase
  misc_feature (1)..(113): NCBI GI NO: 34393982 NR Description: putative UDP-glucosyltransferase
  misc_feature (12)..(461): NCBI GI NO: 34393985 NR Description: putative UDP-glucosyltransferase
  misc_feature (268)..(463): NCBI GI NO: 34393978 NR Description: putative UDP-glucosyltransferase
  misc_feature (1)..(168): NCBI GI NO: 34393978 NR Description: putative UDP-glucosyltransferase
  misc_feature (6)..(463): NCBI GI NO: 34908562 NR Description: putative anthocyanidine rhamnosyl-transferase
  misc_feature (13)..(460): NCBI GI NO: 21435782 NR Description: UDP-glucosyltransferase [Stevia rebaudiana]
  misc_feature (13)..(462): NCBI GI NO: 15240534 NR Description: anthocyanidin-3- glucoside rhamnosyltransferase-like
  misc_feature (13)..(463): NCBI GI NO: 20149064 NR Description: putative anthocyanidine rhamnosyl-transferase
MDAATGNCSSSPLRIVICPWLAFGHMLPCLELAERLASRGHRVSFVSTPRNLARLPPRRHDVHLVPLPLPRVEGLPDGVESTNDVPPDKRDLHWKAFDGLAVPFAEFLAAACADEATRPDWVLADTFSHWAAAVALEHKVPSAMLLPSAAMIASCWHRPPSHAEQPRSAVFEEPAERPAGVLPYEWDKRAHFFGPQRASGMSTAQRCFLTLQRCRLLAMRSCPEWEPENFTVAAALLGKPLVPLGLLPPSPNGGRRREEDGGSTARCWLDAQPPSSVVYVALGSEVPLTVALVHELALGLELAGARFLWALRKPSGVADDADVLPPGFRERTCGRGLVAMGWVPQMSILAHGAVGGFLTHCGRNSLVEGLLFGHPLVMLPVVGDQGPNARAMERTKVGLQVARNGKDGSFDRHGVAAAVREVMLVEEARKVFVANALEMQRVVADKERHERYIDEFIRQLRSYSTPPAAS

SEQ ID NO: 29891 - protein, 445 aa, Zea mays subsp. mays
  peptide (1)..(445): Ceres Seq. ID no. 12367925
  misc_feature (1)..(438): Pfam Name: Pfam Description:  UDP-glucoronosyl and UDP-glucosyl transferase
  misc_feature (1)..(438): NCBI GI NO: 37530678 NR Description: putative anthocyanidin-3-glucosiderhamnosyltransferase
  misc_feature (86)..(438): NCBI GI NO: 34393982 NR Description: putative UDP-glucosyltransferase
  misc_feature (1)..(88): NCBI GI NO: 34393982 NR Description: putative UDP-glucosyltransferase
  misc_feature (1)..(436): NCBI GI NO: 34393985 NR Description: putative UDP-glucosyltransferase
  misc_feature (243)..(438): NCBI GI NO: 34393978 NR Description: putative UDP-glucosyltransferase
  misc_feature (1)..(143): NCBI GI NO: 34393978 NR Description: putative UDP-glucosyltransferase
  misc_feature (1)..(438): NCBI GI NO: 34908562 NR Description: putative anthocyanidine rhamnosyl-transferase
  misc_feature (1)..(435): NCBI GI NO: 21435782 NR Description: UDP-glucosyltransferase [Stevia rebaudiana]
  misc_feature (1)..(437): NCBI GI NO: 15240534 NR Description: anthocyanidin-3- glucoside rhamnosyltransferase-like
  misc_feature (1)..(438): NCBI GI NO: 20149064 NR Description: putative anthocyanidine rhamnosyl-transferase
MLPCLELAERLASRGHRVSFVSTPRNLARLPPRRHDVHLVPLPLPRVEGLPDGVESTNDVPPDKRDLHWKAFDGLAVPFAEFLAAACADEATRPDWVLADTFSHWAAAVALEHKVPSAMLLPSAAMIASCWHRPPSHAEQPRSAVFEEPAERPAGVLPYEWDKRAHFFGPQRASGMSTAQRCFLTLQRCRLLAMRSCPEWEPENFTVAAALLGKPLVPLGLLPPSPNGGRRREEDGGSTARCWLDAQPPSSVVYVALGSEVPLTVALVHELALGLELAGARFLWALRKPSGVADDADVLPPGFRERTCGRGLVAMGWVPQMSILAHGAVGGFLTHCGRNSLVEGLLFGHPLVMLPVVGDQGPNARAMERTKVGLQVARNGKDGSFDRHGVAAAVREVMLVEEARKVFVANALEMQRVVADKERHERYIDEFIRQLRSYSTPPAAS

SEQ ID NO: 29892 - DNA, 1296 bp, Zea mays subsp. mays
  misc_feature (1)..(1296): Ceres Seq. ID no. 12413938
  misc_feature (902)..(902): n is a, c, t, g, unknown, or other
  misc_feature (334)..(334): n is a, c, t, g, unknown, or other
  misc_feature (1188)..(1188): n is a, c, t, g, unknown, or other
  misc_feature (841)..(841): n is a, c, t, g, unknown, or other
atacgcgctctcatctctggctggctcagaaaacagccgccaagcgcacacaccactctctcatcatgacctccatataggccccctacattctttgatcagtgatcactctcgctgggtctcaccccctcccgcagacggccaaacagaacccacgcgtgcgcgcgcgcccacgagcgagcgatgcctcccctccgccgcgcgcgctccatcctgctcctcctccactacgtggccgcctcccacctcctgctgcgcgccgccgcggccacattgccggaccccgcgccgctcgacccggcactggtcgcgaccccggtgcagcccgccgccnccgttccggggggcacgatcccggcgttccccgcgcagtcggactcgctggcgggttcctcgtccacgtgcccgctcgccccttccccggcgctcctcccggccgtgcgggcctcctgcgccgccgccgcggcgctgccgccgaggctgcgctgctgccccgcgctggccgcgtggctgttcgcggcctacgcgcccgccgcgctcgcggagcggccgcccgcgaggcctccggccgcggcggcggccgccgtggacatgccgctgccgcccgacgactccgaggcgtgcgcgggcgccgcggaccgcgcgcttcgtgcggcgggggcgacgctgccccgccccaccggcggcaataacgggacgtgcgacgtggcgttctgctactgcggggtcaggctgaggcggctgacgtgcggacccccgccggcagccgagggcgggctgtgggcgccggctgacgacgcggcggcgaggaggctggagagggactgcgcgcagccgggcntccccggctgctccaaatgccttcttgctctgaccatgataaagaacactagtcccggcgntggcgccgccgcggaggcagcgagcaaggagaagcaggccgccgtccggtcgggcgagagtgaccgggactgcgagctcatggggctcatgtggctgctgcagcgcaacgccacgcgctacggagcgacggccacggccgtcatccaggcgctgatggccgtggacgaggcgtccgccgcgggtgtcgcggtggcggcagacgcggggccggccgcggcgtgctcgctgcccgtggacgacatgcccctcccggccgaatacgcgcaggtcggcggggccagcgancgcctcgcggcgtctgctgcttcttctgcctgctcgtgctgttctccgttctaagcttccgctccgtgtactcgctgtagcaattttgtggttcaattgaagttcgtg

SEQ ID NO: 29893 - protein, 352 aa, Zea mays subsp. mays
  peptide (1)..(352): Ceres Seq. ID no. 12413939
  misc_feature (41)..(343): NCBI GI NO: 34394002 NR Description: unknown protein
  misc_feature (35)..(315): NCBI GI NO: 18401752 NR Description: expressed protein; protein id: At3g18050
  misc_feature (71)..(292): NCBI GI NO: 18417127 NR Description: expressed protein; protein id: At4g28100
  misc_feature (71)..(292): NCBI GI NO: 21593735 NR Description: unknown [Arabidopsis thaliana]
  misc_feature (1)..(352): NCBI GI NO: 11360494 NR Description: antifreeze glycopeptide AFGP polyprotein precursor
  misc_feature (51)..(51): Xaa is any aa, unknown or other
  misc_feature (220)..(220): Xaa is any aa, unknown or other
  misc_feature (240)..(240): Xaa is any aa, unknown or other
  misc_feature (335)..(335): Xaa is any aa, unknown or other
MPPLRRARSILLLLHYVAASHLLLRAAAATLPDPAPLDPALVATPVQPAAXVPGGTIPAFPAQSDSLAGSSSTCPLAPSPALLPAVRASCAAAAALPPRLRCCPALAAWLFAAYAPAALAERPPARPPAAAAAAVDMPLPPDDSEACAGAADRALRAAGATLPRPTGGNNGTCDVAFCYCGVRLRRLTCGPPPAAEGGLWAPADDAAARRLERDCAQPGXPGCSKCLLALTMIKNTSPGXGAAAEAASKEKQAAVRSGESDRDCELMGLMWLLQRNATRYGATATAVIQALMAVDEASAAGVAVAADAGPAAACSLPVDDMPLPAEYAQVGGASXRLAASAASSACSCCSPF

SEQ ID NO: 29894 - protein, 244 aa, Zea mays subsp. mays
  peptide (1)..(244): Ceres Seq. ID no. 12413940
  misc_feature (17)..(227): Pfam Name: Pfam Description:  Extensin-like region
  misc_feature (40)..(244): NCBI GI NO: 5821145 NR Description: RNA binding protein [Homo sapiens]
  misc_feature (40)..(244): NCBI GI NO: 5821143 NR Description: RNA binding protein [Homo sapiens]
  misc_feature (5)..(244): NCBI GI NO: 5821151 NR Description: RNA binding protein [Homo sapiens]
  misc_feature (40)..(244): NCBI GI NO: 6649242 NR Description: splicing coactivator subunit SRm300 [Homo sapiens]
  misc_feature (5)..(244): NCBI GI NO: 6634015 NR Description: KIAA0324 protein [Homo sapiens]
  misc_feature (5)..(244): NCBI GI NO: 7512967 NR Description: hypothetical protein KIAA0324 - human (fragment)
  misc_feature (40)..(244): NCBI GI NO: 19923466 NR Description: splicing coactivator subunit SRm300
  misc_feature (5)..(244): NCBI GI NO: 19923466 NR Description: splicing coactivator subunit SRm300
  misc_feature (5)..(244): NCBI GI NO: 6649242 NR Description: splicing coactivator subunit SRm300 [Homo sapiens]
  misc_feature (41)..(209): NCBI GI NO: 25143299 NR Description: pre-mRNA splicing SR protein related RSR-1 (68
  misc_feature (111)..(111): Xaa is any aa, unknown or other
YALSSLAGSENSRQAHTPLSHHDLHIGPLHSLISDHSRWVSPPPADGQTEPTRARAPTSERCLPSAARAPSCSSSTTWPPPTSCCAPPRPHCRTPRRSTRHWSRPRCSPPXPFRGARSRRSPRSRTRWRVPRPRARSPLPRRSSRPCGPPAPPPRRCRRGCAAAPRWPRGCSRPTRPPRSRSGRPRGLRPRRRPPWTCRCRPTTPRRARAPRTARFVRRGRRCPAPPAAITGRATWRSATAGSG

SEQ ID NO: 29895 - protein, 216 aa, Zea mays subsp. mays
  peptide (1)..(216): Ceres Seq. ID no. 12413941
  misc_feature (1)..(207): NCBI GI NO: 34394002 NR Description: unknown protein
  misc_feature (1)..(179): NCBI GI NO: 18401752 NR Description: expressed protein; protein id: At3g18050
  misc_feature (1)..(156): NCBI GI NO: 18417127 NR Description: expressed protein; protein id: At4g28100
  misc_feature (1)..(156): NCBI GI NO: 21593735 NR Description: unknown [Arabidopsis thaliana]
  misc_feature (1)..(216): NCBI GI NO: 11360494 NR Description: antifreeze glycopeptide AFGP polyprotein precursor
  misc_feature (84)..(84): Xaa is any aa, unknown or other
  misc_feature (104)..(104): Xaa is any aa, unknown or other
  misc_feature (199)..(199): Xaa is any aa, unknown or other
MPLPPDDSEACAGAADRALRAAGATLPRPTGGNNGTCDVAFCYCGVRLRRLTCGPPPAAEGGLWAPADDAAARRLERDCAQPGXPGCSKCLLALTMIKNTSPGXGAAAEAASKEKQAAVRSGESDRDCELMGLMWLLQRNATRYGATATAVIQALMAVDEASAAGVAVAADAGPAAACSLPVDDMPLPAEYAQVGGASXRLAASAASSACSCCSPF

SEQ ID NO: 29896 - DNA, 1316 bp, Zea mays subsp. mays
  misc_feature (1)..(1316): Ceres Seq. ID no. 12369494
gcagatattctgtggctcaaacctttggaggcacgggcacgggcacggggcaccgaagtgttggtatacgcggcagccgggatagcgagcgtatggccacctacttcgtcctcaacaccggcgcgaagatcccgtcggtcgggctcggcacctggcaggccgacaacgggctcgtcggcgacgccgtctatgccgccgtgaaggcaggttacaggcacattgactgtgctcaagcatacaacaacgagaaagaggtcgggttggtctcaggagagtgctggacgagggcatagtcaagcgtgaagatctcttcatcacctccaagctttggaacattaaccatgcggcggaggacgtcccggttgcactgaacggcacactgaaggacttgcaaactgactacgtggatctctacctcatgcattggccggtgaggatgaagaaaggcgccggcttcggcccgcacgccgtcgtcccgtcagacatccccgcgacgtgggccgcgatggaggagctgtacgacgccgggaaggcgcgcgccatcggcgtcagcaacttctcgagcaagaagctggcggacctgctggccgtggcgcgcgtgcgccccgccgtcgaccaggtggagtgccacccggtgtggcggcagggcaggctccgcgcgttctgcgcctcccaagggatacacctctccgcctactcgccgctgggctcgccgggcacggcgacggtgaaggcgggcgcggtgctggagcacccggccgtcgtctcggcggcggagacgctggggaagacgccggcgcaggtggcgctgcgctggggcgtccagatggggcacagcgtgctcccgaagagcaccgacgaggggaggatcagggcgaatctcgacgtcttcggctggtccttgccggaggacctgctcgccaagttctctgagatcgagcaggaaaggctgattcgtgcgggcttctttgttgatcccgacagcgtgttcaaatccatcgaggagttttgggatggcgagatctgaacactgtgtcctgactgggaggagctgagtgacggaattttgccactggcaaggcgtactgtgcctgtggaagaataaatttatgcgtatgaactctgaaaggcagcgtagttttcaggtagtttgtgctcggcactccaataattcctcgacgctcaagtggtctatctatcctctaaaggccatgccgctcaagcggtcttttaagccaaaaaaaaaaaaaaaaaaaaaaaaaaaaaaaaaaaaaagaaaaaaaaaaaaaaaaaacggcacgagaagccggcacgag

SEQ ID NO: 29897 - protein, 202 aa, Zea mays subsp. mays
  peptide (1)..(202): Ceres Seq. ID no. 12369495
  misc_feature (1)..(202): NCBI GI NO: 34908280 NR Description: putative aldose reductase
  misc_feature (1)..(202): NCBI GI NO: 30687261 NR Description: aldo/keto reductase family [Arabidopsis thaliana]
  misc_feature (1)..(202): NCBI GI NO: 34908276 NR Description: putative aldose reductase
  misc_feature (1)..(202): NCBI GI NO: 30687247 NR Description: aldo/keto reductase family [Arabidopsis thaliana]
  misc_feature (1)..(175): NCBI GI NO: 25283479 NR Description: probable alcohol dehydrogenase
  misc_feature (175)..(202): NCBI GI NO: 25283479 NR Description: probable alcohol dehydrogenase
  misc_feature (1)..(202): NCBI GI NO: 28393400 NR Description: putative aldo/keto reductase
  misc_feature (1)..(202): NCBI GI NO: 13160397 NR Description: aldose reductase [Digitalis purpurea]
  misc_feature (1)..(202): NCBI GI NO: 13160399 NR Description: aldose reductase [Digitalis purpurea]
  misc_feature (1)..(177): NCBI GI NO: 7431114 NR Description: aldehyde dehydrogenase homolog At2g37770 -Arabidopsis thaliana
MHWPVRMKKGAGFGPHAVVPSDIPATWAAMEELYDAGKARAIGVSNFSSKKLADLLAVARVRPAVDQVECHPVWRQGRLRAFCASQGIHLSAYSPLGSPGTATVKAGAVLEHPAVVSAAETLGKTPAQVALRWGVQMGHSVLPKSTDEGRIRANLDVFGWSLPEDLLAKFSEIEQERLIRAGFFVDPDSVFKSIEEFWDGEI

SEQ ID NO: 29898 - protein, 196 aa, Zea mays subsp. mays
  peptide (1)..(196): Ceres Seq. ID no. 12369496
  misc_feature (1)..(196): NCBI GI NO: 34908280 NR Description: putative aldose reductase
  misc_feature (1)..(196): NCBI GI NO: 30687261 NR Description: aldo/keto reductase family [Arabidopsis thaliana]
  misc_feature (1)..(196): NCBI GI NO: 34908276 NR Description: putative aldose reductase
  misc_feature (1)..(196): NCBI GI NO: 30687247 NR Description: aldo/keto reductase family [Arabidopsis thaliana]
  misc_feature (1)..(169): NCBI GI NO: 25283479 NR Description: probable alcohol dehydrogenase
  misc_feature (169)..(196): NCBI GI NO: 25283479 NR Description: probable alcohol dehydrogenase
  misc_feature (1)..(196): NCBI GI NO: 28393400 NR Description: putative aldo/keto reductase
  misc_feature (1)..(196): NCBI GI NO: 13160397 NR Description: aldose reductase [Digitalis purpurea]
  misc_feature (1)..(196): NCBI GI NO: 13160399 NR Description: aldose reductase [Digitalis purpurea]
  misc_feature (1)..(171): NCBI GI NO: 7431114 NR Description: aldehyde dehydrogenase homolog At2g37770 -Arabidopsis thaliana
MKKGAGFGPHAVVPSDIPATWAAMEELYDAGKARAIGVSNFSSKKLADLLAVARVRPAVDQVECHPVWRQGRLRAFCASQGIHLSAYSPLGSPGTATVKAGAVLEHPAVVSAAETLGKTPAQVALRWGVQMGHSVLPKSTDEGRIRANLDVFGWSLPEDLLAKFSEIEQERLIRAGFFVDPDSVFKSIEEFWDGEI

SEQ ID NO: 29899 - protein, 173 aa, Zea mays subsp. mays
  peptide (1)..(173): Ceres Seq. ID no. 12369497
  misc_feature (1)..(173): NCBI GI NO: 34908280 NR Description: putative aldose reductase
  misc_feature (1)..(173): NCBI GI NO: 30687261 NR Description: aldo/keto reductase family [Arabidopsis thaliana]
  misc_feature (1)..(173): NCBI GI NO: 34908276 NR Description: putative aldose reductase
  misc_feature (1)..(173): NCBI GI NO: 30687247 NR Description: aldo/keto reductase family [Arabidopsis thaliana]
  misc_feature (1)..(146): NCBI GI NO: 25283479 NR Description: probable alcohol dehydrogenase
  misc_feature (146)..(173): NCBI GI NO: 25283479 NR Description: probable alcohol dehydrogenase
  misc_feature (1)..(173): NCBI GI NO: 28393400 NR Description: putative aldo/keto reductase
  misc_feature (1)..(173): NCBI GI NO: 13160397 NR Description: aldose reductase [Digitalis purpurea]
  misc_feature (1)..(173): NCBI GI NO: 13160399 NR Description: aldose reductase [Digitalis purpurea]
  misc_feature (1)..(148): NCBI GI NO: 7431114 NR Description: aldehyde dehydrogenase homolog At2g37770 -Arabidopsis thaliana
MEELYDAGKARAIGVSNFSSKKLADLLAVARVRPAVDQVECHPVWRQGRLRAFCASQGIHLSAYSPLGSPGTATVKAGAVLEHPAVVSAAETLGKTPAQVALRWGVQMGHSVLPKSTDEGRIRANLDVFGWSLPEDLLAKFSEIEQERLIRAGFFVDPDSVFKSIEEFWDGEI

SEQ ID NO: 29900 - DNA, 1100 bp, Zea mays subsp. mays
  misc_feature (1)..(1100): Ceres Seq. ID no. 12351532
cactcgccgcctcctccccactgcctcgtgtggccgtcgtctcccgttcggaacgccaagccccccctccggcgaaatggcccccaagcgaggtggcagggcgccggtgccggccaagaagaagacggataaagtgacgaaccctctattcgagaagaggccgaagcagttcggcatcggcggcgcgttgccgcccaagaaggacctgcaccggttcgtcaagtggcccaaggtcgtgcgtatccagcggcagcgccgcatcctcaagcagcgcctcaaggtaccaccggcgctcaaccagttcacccgcaccctcgacaagaacctcgctacgaacctgtttaagatgcttctcaagtaccggcctgaagacaaggctgccaagaaggagaggcttctgaagagggcccaagctgagaatgaaggaaaaactgttgagtcgaagaaaccaattgttgtgaagtatggccttaaccatgtgacttacctcattgagcagaacaaggctcagcttgttgtcatcgctcacgacgtggatccgatcgaacttgttgtgtggcttccagccctgtgcaggaagatggaggtcccttactgcattgttaaaggaaaggctcgccttggatcgattgttcacaagaagaatgcatcagtcttgtgtctgaccactgtcaagaacgaggataagcttgagttcagcaagatcttggaggctattaaggcaaacttcaacgacaagttcgatgaggtcaggaagaagtgaggaggtggcatcatgggatccaagtcgcaggccaagaccaaggcccgggaaaagttgctcgccaaggaggctgcgcagcggatgacctagattgtctattgtctactgctgtgtctgccctgtagtttgacggggaagaactgatgaactcgtattgtggtttttctgaatctagtttcatatgtttctgtccaccagaccatgtttagaagctttgcaagacagagttaccatgtttagaagctttgcaagacagagttacagtgtttatgtgatacctcagatccatgcagctttgcttctatttgcctaagagcaaccccaaaagtatttcatg

SEQ ID NO: 29901 - protein, 253 aa, Zea mays subsp. mays
  peptide (1)..(253): Ceres Seq. ID no. 12351533
  misc_feature (138)..(233): Pfam Name: Pfam Description:  Ribosomal protein L7Ae/L30e/S12e/Gadd45 family
  misc_feature (26)..(253): NCBI GI NO: 548774 NR Description: 60S RIBOSOMAL PROTEIN L7A
  misc_feature (26)..(253): NCBI GI NO: 15229338 NR Description: 60S RIBOSOMAL PROTEIN L7A protein
  misc_feature (26)..(253): NCBI GI NO: 15226635 NR Description: 60S ribosomal protein L7A; protein id: At2g47610
  misc_feature (19)..(253): NCBI GI NO: 20161741 NR Description: putative 60S ribosomal protein
  misc_feature (22)..(253): NCBI GI NO: 17530825 NR Description: Ribosomal protein L7A CG3314-PD
  misc_feature (22)..(253): NCBI GI NO: 1173062 NR Description: 60S RIBOSOMAL PROTEIN L7A
  misc_feature (22)..(253): NCBI GI NO: 4506661 NR Description: ribosomal protein L7a
  misc_feature (22)..(253): NCBI GI NO: 7305443 NR Description: ribosomal protein L7a; surfeit 3 [Mus musculus]
  misc_feature (22)..(253): NCBI GI NO: 6094094 NR Description: 60S RIBOSOMAL PROTEIN L7A
  misc_feature (29)..(253): NCBI GI NO: 34932126 NR Description: similar to Rpl7a protein [Rattus norvegicus]
TRRLLPTASCGRRLPFGTPSPPSGEMAPKRGGRAPVPAKKKTDKVTNPLFEKRPKQFGIGGALPPKKDLHRFVKWPKVVRIQRQRRILKQRLKVPPALNQFTRTLDKNLATNLFKMLLKYRPEDKAAKKERLLKRAQAENEGKTVESKKPIVVKYGLNHVTYLIEQNKAQLVVIAHDVDPIELVVWLPALCRKMEVPYCIVKGKARLGSIVHKKNASVLCLTTVKNEDKLEFSKILEAIKANFNDKFDEVRKK

SEQ ID NO: 29902 - protein, 228 aa, Zea mays subsp. mays
  peptide (1)..(228): Ceres Seq. ID no. 12351534
  misc_feature (113)..(208): Pfam Name: Pfam Description:  Ribosomal protein L7Ae/L30e/S12e/Gadd45 family
  misc_feature (1)..(228): NCBI GI NO: 548774 NR Description: 60S RIBOSOMAL PROTEIN L7A
  misc_feature (1)..(228): NCBI GI NO: 15229338 NR Description: 60S RIBOSOMAL PROTEIN L7A protein
  misc_feature (1)..(228): NCBI GI NO: 15226635 NR Description: 60S ribosomal protein L7A; protein id: At2g47610
  misc_feature (1)..(228): NCBI GI NO: 20161741 NR Description: putative 60S ribosomal protein
  misc_feature (1)..(228): NCBI GI NO: 17530825 NR Description: Ribosomal protein L7A CG3314-PD
  misc_feature (1)..(228): NCBI GI NO: 1173062 NR Description: 60S RIBOSOMAL PROTEIN L7A
  misc_feature (1)..(228): NCBI GI NO: 4506661 NR Description: ribosomal protein L7a
  misc_feature (1)..(228): NCBI GI NO: 7305443 NR Description: ribosomal protein L7a; surfeit 3 [Mus musculus]
  misc_feature (1)..(228): NCBI GI NO: 6094094 NR Description: 60S RIBOSOMAL PROTEIN L7A
  misc_feature (4)..(228): NCBI GI NO: 34932126 NR Description: similar to Rpl7a protein [Rattus norvegicus]
MAPKRGGRAPVPAKKKTDKVTNPLFEKRPKQFGIGGALPPKKDLHRFVKWPKVVRIQRQRRILKQRLKVPPALNQFTRTLDKNLATNLFKMLLKYRPEDKAAKKERLLKRAQAENEGKTVESKKPIVVKYGLNHVTYLIEQNKAQLVVIAHDVDPIELVVWLPALCRKMEVPYCIVKGKARLGSIVHKKNASVLCLTTVKNEDKLEFSKILEAIKANFNDKFDEVRKK

SEQ ID NO: 29903 - protein, 138 aa, Zea mays subsp. mays
  peptide (1)..(138): Ceres Seq. ID no. 12351535
  misc_feature (23)..(118): Pfam Name: Pfam Description:  Ribosomal protein L7Ae/L30e/S12e/Gadd45 family
  misc_feature (1)..(138): NCBI GI NO: 548774 NR Description: 60S RIBOSOMAL PROTEIN L7A
  misc_feature (1)..(138): NCBI GI NO: 15229338 NR Description: 60S RIBOSOMAL PROTEIN L7A protein
  misc_feature (1)..(138): NCBI GI NO: 15226635 NR Description: 60S ribosomal protein L7A; protein id: At2g47610
  misc_feature (1)..(138): NCBI GI NO: 20161741 NR Description: putative 60S ribosomal protein
  misc_feature (1)..(138): NCBI GI NO: 17530825 NR Description: Ribosomal protein L7A CG3314-PD
  misc_feature (1)..(138): NCBI GI NO: 1173062 NR Description: 60S RIBOSOMAL PROTEIN L7A
  misc_feature (1)..(138): NCBI GI NO: 4506661 NR Description: ribosomal protein L7a
  misc_feature (1)..(138): NCBI GI NO: 7305443 NR Description: ribosomal protein L7a; surfeit 3 [Mus musculus]
  misc_feature (1)..(138): NCBI GI NO: 6094094 NR Description: 60S RIBOSOMAL PROTEIN L7A
  misc_feature (1)..(138): NCBI GI NO: 34932126 NR Description: similar to Rpl7a protein [Rattus norvegicus]
MLLKYRPEDKAAKKERLLKRAQAENEGKTVESKKPIVVKYGLNHVTYLIEQNKAQLVVIAHDVDPIELVVWLPALCRKMEVPYCIVKGKARLGSIVHKKNASVLCLTTVKNEDKLEFSKILEAIKANFNDKFDEVRKK

SEQ ID NO: 29904 - DNA, 1958 bp, Zea mays subsp. mays
  misc_feature (1)..(1958): Ceres Seq. ID no. 13636500
  misc_feature (208)..(208): n is a, c, t, g, unknown, or other
  misc_feature (247)..(247): n is a, c, t, g, unknown, or other
aaccaacaaatcgacctagctaggcacaagagcgctagacgccgcagcgcagcacgcaccacccaccgagcggcggcggaggcagggcaatccgcaggaagcagaggccgcgcgcgcaggcatgggcgcgccggtgcacggcgccctcgacttgttcctcctgctcctggtgggggcaggggcggcgcccgaggtgacggcgccgcangaacccacattgccagccaccggctccggcgctaccggngcagcggcggtcggagtcaactccaactccgtgctggtggcgctgctggattcgcactacacggagctggcggaactggtggagaaggcgctgctcctgcagacgctggaggacgccgtcgggaagcacaacgtcaccatcttcgcgccgcggaacgaggcgctggagcgggacctggatccggagttcaagcgcttcctgctggagccgcgcaacctcaggtcgctgcaggcgctgctgctctaccacgtcctcccctcgcgcctgccctccgactcctggcccgcggcgtcccaccccacgctgtccggcgaggaggtcgagctcgcccccgccgccggcgccggcatgcgcgtcggccacgccgccgtcacgcgcccggacgccgtgctcaggcccgacggggtcatccacggcatcgagcgcctcctcgtgcccgcgctccgtgcaggaggacttcaaccgccgccgcagcctcgcggcgatctcggccgtgctgcccacgggcgcgcccgaggtggacccgcggacgcaccgcctcaagaagcccgcgccgccggttccccccggcgcgccccccgtgctccccgtctgggacgccatggcgcccggcccctccatcgcccccgcgccggcgcctggcccgggctccgggaagcaccacttcgacgggcacagccaggtcaaggacttcatccagacgctgctcctctacggcggctacaacgagctcgccgacatcctcgtcaacctcacctccctcgccaccgagatgggccgcctcgtctccgagggctacgtcctcaccgtgctcgcccccaacgacgaggccatggcgcgcctcaccacggaccagctcagcgagcccggctcgcccgagaacatcctctactaccacatgatccccgagtaccagaccgaggagtccatgtacaacgccgtgcgccgcttcggcaaggtgcgctacgacacgctgcgcctgccgcacaaggtcgtggcgcgggaggccgacggctccgtcaagttcggccagggcgagggctccgcctacctcttcgacccggacatctacaccgacgggaggatctccgtgcagggcatcgacgccgtgctgttcgcgccggacgacaccaaggccacgcagacagccgaccctaacaggaagcctcccgccatcgtcacccacaagaagaagatcaagctccggcgaggcaagttgttagaggcgacgtgccagatggccgggctcttcggtcagcgatcgcgattcgcgagctgccagtagacggagaaaggatctgttgatctccacgacaccgaaagacgaacgaacgaactgatgggctgccgcaggaggagggggagccgtccacattattgcttgtattttttttcactcttttgtttattgttgagaataataatgaatcaggtgggggatgtaaactctgtgggttgttgttggtgtgtcgtccagatggggaaaaaaatgagaaaaagaaaggcagccaaaaaaaattgtccatacatgaatgaagaagcccaggatcgttgtctttgtataggagaaggaattgaaaccttttgttttttctttttctgccattctttgcttctgttcccgttttgacaatgagaaatatcgggtaaacacacaatcattcttacttattatccattttccttcttttttatatatggtttttcgtcg

SEQ ID NO: 29905 - protein, 427 aa, Zea mays subsp. mays
  peptide (1)..(427): Ceres Seq. ID no. 13636501
  misc_feature (1)..(188): NCBI GI NO: 27819499 NR Description: putative arabinogalactan-protein
  misc_feature (11)..(274): NCBI GI NO: 33146739 NR Description: GPI-anchored protein -like
  misc_feature (11)..(274): NCBI GI NO: 34899886 NR Description: OJ1714_H10.26
  misc_feature (1)..(274): NCBI GI NO: 15240029 NR Description: expressed protein [Arabidopsis thaliana]
  misc_feature (48)..(272): NCBI GI NO: 25370583 NR Description: hypothetical protein At2g35860
  misc_feature (48)..(272): NCBI GI NO: 30686588 NR Description: expressed protein [Arabidopsis thaliana]
  misc_feature (35)..(279): NCBI GI NO: 6041822 NR Description: unknown protein [Arabidopsis thaliana]
  misc_feature (35)..(279): NCBI GI NO: 18399319 NR Description: expressed protein [Arabidopsis thaliana]
  misc_feature (48)..(274): NCBI GI NO: 15231197 NR Description: predicted GPI-anchored protein
  misc_feature (200)..(427): NCBI GI NO: 23018055 NR Description: hypothetical protein [Thermobifida fusca]
  misc_feature (29)..(29): Xaa is any aa, unknown or other
  misc_feature (42)..(42): Xaa is any aa, unknown or other
MGAPVHGALDLFLLLLVGAGAAPEVTAPXEPTLPATGSGATXAAAVGVNSNSVLVALLDSHYTELAELVEKALLLQTLEDAVGKHNVTIFAPRNEALERDLDPEFKRFLLEPRNLRSLQALLLYHVLPSRLPSDSWPAASHPTLSGEEVELAPAAGAGMRVGHAAVTRPDAVLRPDGVIHGIERLLVPALRAGGLQPPPQPRGDLGRAAHGRARGGPADAPPQEARAAGSPRRAPRAPRLGRHGARPLHRPRAGAWPGLREAPLRRAQPGQGLHPDAAPLRRLQRARRHPRQPHLPRHRDGPPRLRGLRPHRARPQRRGHGAPHHGPAQRARLAREHPLLPHDPRVPDRGVHVQRRAPLRQGALRHAAPAAQGRGAGGRRLRQVRPGRGLRLPLRPGHLHRREDLRAGHRRRAVRAGRHQGHADSRP

SEQ ID NO: 29906 - protein, 382 aa, Zea mays subsp. mays
  peptide (1)..(382): Ceres Seq. ID no. 13636502
  misc_feature (299)..(382): Pfam Name: Pfam Description:  Equine herpesvirus glycoprotein gp2
  misc_feature (13)..(382): NCBI GI NO: 29247944 NR Description: GLP_26_54603_52153 [Giardia lamblia ATCC 50803]
  misc_feature (164)..(382): NCBI GI NO: 39592411 NR Description: Hypothetical protein CBG07956
  misc_feature (115)..(382): NCBI GI NO: 25143299 NR Description: pre-mRNA splicing SR protein related RSR-1 (68
  misc_feature (2)..(382): NCBI GI NO: 30424862 NR Description: RIKEN cDNA 5033413A03 [Mus musculus]
  misc_feature (3)..(382): NCBI GI NO: 11360494 NR Description: antifreeze glycopeptide AFGP polyprotein precursor
  misc_feature (261)..(382): NCBI GI NO: 6322209 NR Description: Required for invasion and pseudohyphae formation inresponse to nitrogen starvation
  misc_feature (164)..(382): NCBI GI NO: 11360318 NR Description: probable mucin DKFZp434C196.1 - human (fragment)
  misc_feature (15)..(382): NCBI GI NO: 5821145 NR Description: RNA binding protein [Homo sapiens]
  misc_feature (15)..(382): NCBI GI NO: 5821143 NR Description: RNA binding protein [Homo sapiens]
  misc_feature (220)..(382): NCBI GI NO: 28574039 NR Description: Salivary gland secretion 1 CG3047-PA
  misc_feature (70)..(70): Xaa is any aa, unknown or other
  misc_feature (83)..(83): Xaa is any aa, unknown or other
NQQIDLARHKSARRRSAARTTHRAAAEAGQSAGSRGRARRHGRAGARRPRLVPPAPGGGRGGARGDGAAXTHIASHRLRRYRXSGGRSQLQLRAGGAAGFALHGAGGTGGEGAAPADAGGRRREAQRHHLRAAERGAGAGPGSGVQALPAGAAQPQVAAGAAALPRPPLAPALRLLARGVPPHAVRRGGRARPRRRRRHARRPRRRHAPGRRAQARRGHPRHRAPPRARAPCRRTSTAAAASRRSRPCCPRARPRWTRGRTASRSPRRRFPPARPPCSPSGTPWRPAPPSPPRRRLARAPGSTTSTGTARSRTSSRRCSSTAATTSSPTSSSTSPPSPPRWAASSPRATSSPCSPPTTRPWRASPRTSSASPARPRTSSTTT

SEQ ID NO: 29907 - protein, 269 aa, Zea mays subsp. mays
  peptide (1)..(269): Ceres Seq. ID no. 13636503
  misc_feature (1)..(30): NCBI GI NO: 27819499 NR Description: putative arabinogalactan-protein
  misc_feature (1)..(116): NCBI GI NO: 33146739 NR Description: GPI-anchored protein -like
  misc_feature (1)..(116): NCBI GI NO: 34899886 NR Description: OJ1714_H10.26
  misc_feature (1)..(116): NCBI GI NO: 15240029 NR Description: expressed protein [Arabidopsis thaliana]
  misc_feature (1)..(114): NCBI GI NO: 25370583 NR Description: hypothetical protein At2g35860
  misc_feature (1)..(114): NCBI GI NO: 30686588 NR Description: expressed protein [Arabidopsis thaliana]
  misc_feature (1)..(121): NCBI GI NO: 6041822 NR Description: unknown protein [Arabidopsis thaliana]
  misc_feature (1)..(121): NCBI GI NO: 18399319 NR Description: expressed protein [Arabidopsis thaliana]
  misc_feature (1)..(116): NCBI GI NO: 15231197 NR Description: predicted GPI-anchored protein
  misc_feature (42)..(269): NCBI GI NO: 23018055 NR Description: hypothetical protein [Thermobifida fusca]
MRVGHAAVTRPDAVLRPDGVIHGIERLLVPALRAGGLQPPPQPRGDLGRAAHGRARGGPADAPPQEARAAGSPRRAPRAPRLGRHGARPLHRPRAGAWPGLREAPLRRAQPGQGLHPDAAPLRRLQRARRHPRQPHLPRHRDGPPRLRGLRPHRARPQRRGHGAPHHGPAQRARLAREHPLLPHDPRVPDRGVHVQRRAPLRQGALRHAAPAAQGRGAGGRRLRQVRPGRGLRLPLRPGHLHRREDLRAGHRRRAVRAGRHQGHADSRP

SEQ ID NO: 29908 - DNA, 1213 bp, Zea mays subsp. mays
  misc_feature (1)..(1213): Ceres Seq. ID no. 12365777
  misc_feature (1053)..(1053): n is a, c, t, g, unknown, or other
attaacaaagcacccatcccttcaacaaaccttgagttgggagagagagagagagaggagaggaggcaacaagaggcacgaacaaacagaggcaaaccggctcacgcctgtctcggtgcggtggccggctaatcatggctaccgtggggcagtccggggccctgagaagggtcaccgtgcactacgccagctcgcccacgcgcggcgcggtggtagaggtgagcctcgacgacctcgacgacgagctgctccagtttgtgctcgccgatcttcttcccggccaggagggtttacaccagtcgatcttggaaggagcacacggcagcaaccaggagaactatatgagaggcgcaggatccagtgcgccgtcacaggaataccatgcacagagcagcaccgctgctgcggcagcagctgcttcgtccaggaggaatccaggcacggatgacgcccagatcgcctcggacttcgagtacgccacgaagctgcagcaggagatggagggcctcagcgtcgacgacgacggcgacggtatcagctgcgtgccgtctccgtccgactctgacgacgggcacgaccatcacgacgaagaggacgaggatgaggaggatggtaatggtggtggtgatgatgatgatgatccagacaacatgacttatgagcaaagacaggcacttgtagagtctgtggggtctgaggacagaggcttatccgacgagctcatctcctacctgcagccatggaagtacaaggcatcagggtttttctcccggaaaacaaaccatgacgactgccctatctgcctgtcaactttcaggaaccgagagactatgataacgttgccgtgcatgcatcactaccacgcagcttgcgtcaccaaatggctcagggtcaacaagacatgccctgtatgcaaatatgaactgttcggaccttgctagcatccgacaatggagatggtaagacaaggtgatggggcgtcacactcacatccggctggttgcatcgtctacttttgttttgcaccaagaaaaaagaaaatgaaaaacaatncaaaaagagaagggaaaaaagttaggaagtgtagatcttgatcacacaagaaaaagaagaaaaaaaaactgaaatttatgtcttttttatctttccttcggcttttggaaatgtacgtaagtcacggtcttatatttgtttagaagcttgttttttttct

SEQ ID NO: 29909 - protein, 268 aa, Zea mays subsp. mays
  peptide (1)..(268): Ceres Seq. ID no. 12365778
  misc_feature (220)..(260): Pfam Name: RING finger Pfam Description: Zinc finger, C3HC4 type
  misc_feature (1)..(267): NCBI GI NO: 34898016 NR Description: ESTs C26000
  misc_feature (43)..(266): NCBI GI NO: 38567912 NR Description: OSJNBa0088I22.8
  misc_feature (128)..(268): NCBI GI NO: 22331928 NR Description: putative protein; protein id: At3g63530.1
  misc_feature (81)..(264): NCBI GI NO: 10334499 NR Description: hypothetical protein [Cicer arietinum]
  misc_feature (152)..(264): NCBI GI NO: 21536693 NR Description: unknown [Arabidopsis thaliana]
  misc_feature (152)..(264): NCBI GI NO: 18402411 NR Description: expressed protein; protein id: At3g19910
  misc_feature (73)..(260): NCBI GI NO: 15232746 NR Description: zinc-finger protein-like protein
  misc_feature (187)..(264): NCBI GI NO: 34911538 NR Description: P0421H07.18
  misc_feature (184)..(264): NCBI GI NO: 15236782 NR Description: putative protein; protein id: At4g26580.1
  misc_feature (169)..(261): NCBI GI NO: 1076498 NR Description: RING finger protein Pzf - soybean (fragment)
MATVGQSGALRRVTVHYASSPTRGAVVEVSLDDLDDELLQFVLADLLPGQEGLHQSILEGAHGSNQENYMRGAGSSAPSQEYHAQSSTAAAAAAASSRRNPGTDDAQIASDFEYATKLQQEMEGLSVDDDGDGISCVPSPSDSDDGHDHHDEEDEDEEDGNGGGDDDDDPDNMTYEQRQALVESVGSEDRGLSDELISYLQPWKYKASGFFSRKTNHDDCPICLSTFRNRETMITLPCMHHYHAACVTKWLRVNKTCPVCKYELFGPC

SEQ ID NO: 29910 - protein, 199 aa, Zea mays subsp. mays
  peptide (1)..(199): Ceres Seq. ID no. 12365779
  misc_feature (151)..(191): Pfam Name: RING finger Pfam Description: Zinc finger, C3HC4 type
  misc_feature (1)..(198): NCBI GI NO: 34898016 NR Description: ESTs C26000
  misc_feature (1)..(197): NCBI GI NO: 38567912 NR Description: OSJNBa0088I22.8
  misc_feature (59)..(199): NCBI GI NO: 22331928 NR Description: putative protein; protein id: At3g63530.1
  misc_feature (12)..(195): NCBI GI NO: 10334499 NR Description: hypothetical protein [Cicer arietinum]
  misc_feature (83)..(195): NCBI GI NO: 21536693 NR Description: unknown [Arabidopsis thaliana]
  misc_feature (83)..(195): NCBI GI NO: 18402411 NR Description: expressed protein; protein id: At3g19910
  misc_feature (4)..(191): NCBI GI NO: 15232746 NR Description: zinc-finger protein-like protein
  misc_feature (118)..(195): NCBI GI NO: 34911538 NR Description: P0421H07.18
  misc_feature (115)..(195): NCBI GI NO: 15236782 NR Description: putative protein; protein id: At4g26580.1
  misc_feature (100)..(192): NCBI GI NO: 1076498 NR Description: RING finger protein Pzf - soybean (fragment)
MRGAGSSAPSQEYHAQSSTAAAAAAASSRRNPGTDDAQIASDFEYATKLQQEMEGLSVDDDGDGISCVPSPSDSDDGHDHHDEEDEDEEDGNGGGDDDDDPDNMTYEQRQALVESVGSEDRGLSDELISYLQPWKYKASGFFSRKTNHDDCPICLSTFRNRETMITLPCMHHYHAACVTKWLRVNKTCPVCKYELFGPC

SEQ ID NO: 29911 - protein, 148 aa, Zea mays subsp. mays
  peptide (1)..(148): Ceres Seq. ID no. 12365780
LTKHPSLQQTLSWERERERRGGNKRHEQTEANRLTPVSVRWPANHGYRGAVRGPEKGHRALRQLAHARRGGRGEPRRPRRRAAPVCARRSSSRPGGFTPVDLGRSTRQQPGELYERRRIQCAVTGIPCTEQHRCCGSSCFVQEESRHG

SEQ ID NO: 29912 - DNA, 593 bp, Zea mays subsp. mays
  misc_feature (1)..(593): Ceres Seq. ID no. 12408576
  misc_feature (253)..(253): n is a, c, t, g, unknown, or other
acgcctctctctacttaggagtatacttcaaaagcgccgaaccagataggcaggcatctcgatcggcgacggctccagtcaaggggctggttggcatggagggcgagaagaaggcggccgccgtagcggaggatgaggttgtggttgtggctgctggcgatgtcagcctgaaggacctgtcaaagaagctcaacgacttcgccagggagagggactgggagcagttccatagccccaggaacctactgctcgncatgatcgccgaagtcggggagctgtcagagctgttcatgtggagaggggaggtgcggaagggcctcgcgggctgggacgaggccgagaaggagcacctgggcgaggagctctccgacgtgctgctctacctggtccaactctccgacatgtgcggcgtcgacctcggcgacgccgccgtcaggaaggatcggcaagaacgccgtcaagtacccggcgccgccgccgtcggaagaaggaagaagaaggcgcctgatagctttttttcttctggctgtgcatgtttgaaggccaatactacttgatgcagaaattgctcgtctgatagctttcgcctttcg

SEQ ID NO: 29913 - protein, 184 aa, Zea mays subsp. mays
  peptide (1)..(184): Ceres Seq. ID no. 12408577
  misc_feature (32)..(146): NCBI GI NO: 32482945 NR Description: OSJNBb0072M01.10
  misc_feature (54)..(146): NCBI GI NO: 30687841 NR Description: expressed protein [Arabidopsis thaliana]
  misc_feature (55)..(165): NCBI GI NO: 33468615 NR Description: SI:zC150A22.2 (novel protein) [Danio rerio]
  misc_feature (28)..(155): NCBI GI NO: 20302079 NR Description: RS21-C6 protein [Rattus norvegicus]
  misc_feature (55)..(165): NCBI GI NO: 13129100 NR Description: hypothetical protein MGC5627 [Homo sapiens]
  misc_feature (55)..(155): NCBI GI NO: 12963573 NR Description: RIKEN cDNA 2410015N17 [Mus musculus]
  misc_feature (65)..(155): NCBI GI NO: 34877104 NR Description: similar to RS21-C6 protein [Rattus norvegicus]
  misc_feature (55)..(155): NCBI GI NO: 34864617 NR Description: similar to RS21-C6 protein [Rattus norvegicus]
  misc_feature (54)..(154): NCBI GI NO: 34495748 NR Description: conserved hypothetical protein
  misc_feature (55)..(165): NCBI GI NO: 39996459 NR Description: conserved hypothetical protein
  misc_feature (84)..(84): Xaa is any aa, unknown or other
ASLYLGVYFKSAEPDRQASRSATAPVKGLVGMEGEKKAAAVAEDEVVVVAAGDVSLKDLSKKLNDFARERDWEQFHSPRNLLLXMIAEVGELSELFMWRGEVRKGLAGWDEAEKEHLGEELSDVLLYLVQLSDMCGVDLGDAAVRKDRQERRQVPGAAAVGRRKKKAPDSFFSSGCACLKANTT

SEQ ID NO: 29914 - protein, 153 aa, Zea mays subsp. mays
  peptide (1)..(153): Ceres Seq. ID no. 12408578
  misc_feature (1)..(115): NCBI GI NO: 32482945 NR Description: OSJNBb0072M01.10
  misc_feature (23)..(115): NCBI GI NO: 30687841 NR Description: expressed protein [Arabidopsis thaliana]
  misc_feature (24)..(134): NCBI GI NO: 33468615 NR Description: SI:zC150A22.2 (novel protein) [Danio rerio]
  misc_feature (1)..(124): NCBI GI NO: 20302079 NR Description: RS21-C6 protein [Rattus norvegicus]
  misc_feature (24)..(134): NCBI GI NO: 13129100 NR Description: hypothetical protein MGC5627 [Homo sapiens]
  misc_feature (24)..(124): NCBI GI NO: 12963573 NR Description: RIKEN cDNA 2410015N17 [Mus musculus]
  misc_feature (34)..(124): NCBI GI NO: 34877104 NR Description: similar to RS21-C6 protein [Rattus norvegicus]
  misc_feature (24)..(124): NCBI GI NO: 34864617 NR Description: similar to RS21-C6 protein [Rattus norvegicus]
  misc_feature (23)..(123): NCBI GI NO: 34495748 NR Description: conserved hypothetical protein
  misc_feature (24)..(134): NCBI GI NO: 39996459 NR Description: conserved hypothetical protein
  misc_feature (53)..(53): Xaa is any aa, unknown or other
MEGEKKAAAVAEDEVVVVAAGDVSLKDLSKKLNDFARERDWEQFHSPRNLLLXMIAEVGELSELFMWRGEVRKGLAGWDEAEKEHLGEELSDVLLYLVQLSDMCGVDLGDAAVRKDRQERRQVPGAAAVGRRKKKAPDSFFSSGCACLKANTT

SEQ ID NO: 29915 - protein, 100 aa, Zea mays subsp. mays
  peptide (1)..(100): Ceres Seq. ID no. 12408579
  misc_feature (1)..(62): NCBI GI NO: 32482945 NR Description: OSJNBb0072M01.10
  misc_feature (1)..(62): NCBI GI NO: 30687841 NR Description: expressed protein [Arabidopsis thaliana]
  misc_feature (1)..(81): NCBI GI NO: 33468615 NR Description: SI:zC150A22.2 (novel protein) [Danio rerio]
  misc_feature (1)..(71): NCBI GI NO: 20302079 NR Description: RS21-C6 protein [Rattus norvegicus]
  misc_feature (1)..(81): NCBI GI NO: 13129100 NR Description: hypothetical protein MGC5627 [Homo sapiens]
  misc_feature (1)..(71): NCBI GI NO: 12963573 NR Description: RIKEN cDNA 2410015N17 [Mus musculus]
  misc_feature (1)..(71): NCBI GI NO: 34877104 NR Description: similar to RS21-C6 protein [Rattus norvegicus]
  misc_feature (1)..(71): NCBI GI NO: 34864617 NR Description: similar to RS21-C6 protein [Rattus norvegicus]
  misc_feature (1)..(70): NCBI GI NO: 34495748 NR Description: conserved hypothetical protein
  misc_feature (1)..(81): NCBI GI NO: 39996459 NR Description: conserved hypothetical protein
MIAEVGELSELFMWRGEVRKGLAGWDEAEKEHLGEELSDVLLYLVQLSDMCGVDLGDAAVRKDRQERRQVPGAAAVGRRKKKAPDSFFSSGCACLKANTT

SEQ ID NO: 29916 - DNA, 1732 bp, Zea mays subsp. mays
  misc_feature (1)..(1732): Ceres Seq. ID no. 12336960
attcttagactaaaaacactatgagttagtgctaccaactgaaggatacgccatggctgttctgacactggttaatatccttatcagcttcgctgcttgtgctgaagctctaaggagagcagacttccctcaaggtttcgtctttggcactgcttcttcagcttaccagtatgaaggtgctgtcaacgagggtcaacgtggacctacaatatgggatactctcacaagacgacccggacgggtgatagatttcagcaatgcagatgttgccgttgatcactaccatcgttataaggaagatgtggacttgattaaggacattggcatggatgcataccggttctctatctcgtggtcacgtatctttccaaatggaactggtgaacctaatgaagaaggattgaattactataacagcctcataaatactctattagacaaaggtatacaaccatatgtaacactctttcactgggaccttccgcaagcactagaagacagatatggtggatggttaaacccccaaatcgtggatgattttgttcactatgcctctacttgcttcaaggaatttggagatagagtgaaacactggatcactttcaatgagccccataattttgcgattgaaggctatgaccttggcatccaggcacctgggaggtgttctattctgtctcatatattttgcagggagggcaaatcatcgactgagccttatgtcgtagctcacaacatactcttagcgcatgctggtgcctttcatacttataagcagcatttcaagaaagaacaaggaggtatcattggcattgcactcgattctaagtggtatgagccactgtcagatgttgatgaggacacagaggcagcagcacgagcaatggactttgagcttggatggttcctggatcccttaatgtttggccactatcctccttctatgcagaaacttgtgggcgacaggctgcctcagttttcagctcgggcttccgatgttagtgtcaggctcactagattttgtgggcataaaccattacaccacactgtatgttaggaacgacagaatgcggatcaggaaacttgtaatgaatgatgcttcaactgatgctgcggtcatacctactgcttatagacatggaaagaaaataggagaaacggcagcgtcaggatggctgcacatagtgccctggggcatgttcaagctgatgaagcacatcaaagaaaagtacgggaatccgcccgtgatcattactgaaaacggcatggatgatgcgaacaaccggttttcgaaattagaggatgatctgcaggatgataaacggatacagtaccacaaggactacatgtctaacctcctagacgcaattaggaaggaaggctgcaacgtccatggctacttcgtctggtcgctgctcgacaactgggagtggaactccgggtacacggtgcggtttgggctctactacatcgactacaacaacaatttgacacggatacccaaggcgtccgtggagtggttcaggcaggtcttggcccagaagacggctggtggagtacagtggttctacagtggccagtagttgagtgtatataacatacacggcacggctaccatcgatctgtacatgcgtacgtagctttagattagattgtgattattctcgatgtatatagactcaccatttggacgaccttcaaccgcacagttgaatgtgtcgttatgcttgct

SEQ ID NO: 29917 - protein, 334 aa, Zea mays subsp. mays
  peptide (1)..(334): Ceres Seq. ID no. 12336961
  misc_feature (17)..(310): NCBI GI NO: 22327832 NR Description: glycosyl hydrolase family 1; protein id:At5g54570
  misc_feature (17)..(310): NCBI GI NO: 9758949 NR Description: beta-glucosidase [Arabidopsis thaliana]
  misc_feature (1)..(334): NCBI GI NO: 15222734 NR Description: glycosyl hydrolase family 1; protein id:At1g26560
  misc_feature (1)..(334): NCBI GI NO: 21537259 NR Description: beta-glucosidase, putative [Arabidopsis thaliana]
  misc_feature (20)..(334): NCBI GI NO: 22658440 NR Description: beta-glucosidase
  misc_feature (16)..(314): NCBI GI NO: 7435445 NR Description: beta-glucosidase (EC 3
  misc_feature (16)..(314): NCBI GI NO: 15778634 NR Description: amygdalin hydrolase isoform AH I precursor
  misc_feature (16)..(314): NCBI GI NO: 16757966 NR Description: amygdalin hydrolase isoform AH I precursor
  misc_feature (10)..(331): NCBI GI NO: 3820531 NR Description: beta-glucosidase [Pinus contorta]
  misc_feature (20)..(316): NCBI GI NO: 7435429 NR Description: furostanol glycoside 26-O-beta-glucosidase F26G -Costus speciosus
MAVLTLVNILISFAACAEALRRADFPQGFVFGTASSAYQYEGAVNEGQRGPTIWDTLTRRPGRVIDFSNADVAVDHYHRYKEDVDLIKDIGMDAYRFSISWSRIFPNGTGEPNEEGLNYYNSLINTLLDKGIQPYVTLFHWDLPQALEDRYGGWLNPQIVDDFVHYASTCFKEFGDRVKHWITFNEPHNFAIEGYDLGIQAPGRCSILSHIFCREGKSSTEPYVVAHNILLAHAGAFHTYKQHFKKEQGGIIGIALDSKWYEPLSDVDEDTEAAARAMDFELGWFLDPLMFGHYPPSMQKLVGDRLPQFSARASDVSVRLTRFCGHKPLHHTVC

SEQ ID NO: 29918 - protein, 243 aa, Zea mays subsp. mays
  peptide (1)..(243): Ceres Seq. ID no. 12336962
  misc_feature (1)..(219): NCBI GI NO: 22327832 NR Description: glycosyl hydrolase family 1; protein id:At5g54570
  misc_feature (1)..(219): NCBI GI NO: 9758949 NR Description: beta-glucosidase [Arabidopsis thaliana]
  misc_feature (1)..(243): NCBI GI NO: 15222734 NR Description: glycosyl hydrolase family 1; protein id:At1g26560
  misc_feature (1)..(243): NCBI GI NO: 21537259 NR Description: beta-glucosidase, putative [Arabidopsis thaliana]
  misc_feature (1)..(243): NCBI GI NO: 22658440 NR Description: beta-glucosidase
  misc_feature (1)..(223): NCBI GI NO: 7435445 NR Description: beta-glucosidase (EC 3
  misc_feature (1)..(223): NCBI GI NO: 15778634 NR Description: amygdalin hydrolase isoform AH I precursor
  misc_feature (1)..(223): NCBI GI NO: 16757966 NR Description: amygdalin hydrolase isoform AH I precursor
  misc_feature (1)..(240): NCBI GI NO: 3820531 NR Description: beta-glucosidase [Pinus contorta]
  misc_feature (1)..(225): NCBI GI NO: 7435429 NR Description: furostanol glycoside 26-O-beta-glucosidase F26G -Costus speciosus
MDAYRFSISWSRIFPNGTGEPNEEGLNYYNSLINTLLDKGIQPYVTLFHWDLPQALEDRYGGWLNPQIVDDFVHYASTCFKEFGDRVKHWITFNEPHNFAIEGYDLGIQAPGRCSILSHIFCREGKSSTEPYVVAHNILLAHAGAFHTYKQHFKKEQGGIIGIALDSKWYEPLSDVDEDTEAAARAMDFELGWFLDPLMFGHYPPSMQKLVGDRLPQFSARASDVSVRLTRFCGHKPLHHTVC

SEQ ID NO: 29919 - protein, 195 aa, Zea mays subsp. mays
  peptide (1)..(195): Ceres Seq. ID no. 12336963
  misc_feature (3)..(181): NCBI GI NO: 22327832 NR Description: glycosyl hydrolase family 1; protein id:At5g54570
  misc_feature (3)..(181): NCBI GI NO: 9758949 NR Description: beta-glucosidase [Arabidopsis thaliana]
  misc_feature (2)..(180): NCBI GI NO: 15222734 NR Description: glycosyl hydrolase family 1; protein id:At1g26560
  misc_feature (2)..(180): NCBI GI NO: 21537259 NR Description: beta-glucosidase, putative [Arabidopsis thaliana]
  misc_feature (2)..(180): NCBI GI NO: 22658440 NR Description: beta-glucosidase
  misc_feature (2)..(191): NCBI GI NO: 7435445 NR Description: beta-glucosidase (EC 3
  misc_feature (2)..(191): NCBI GI NO: 16757966 NR Description: amygdalin hydrolase isoform AH I precursor
  misc_feature (2)..(191): NCBI GI NO: 15778634 NR Description: amygdalin hydrolase isoform AH I precursor
  misc_feature (5)..(189): NCBI GI NO: 3820531 NR Description: beta-glucosidase [Pinus contorta]
  misc_feature (2)..(180): NCBI GI NO: 7435429 NR Description: furostanol glycoside 26-O-beta-glucosidase F26G -Costus speciosus
MLVSGSLDFVGINHYTTLYVRNDRMRIRKLVMNDASTDAAVIPTAYRHGKKIGETAASGWLHIVPWGMFKLMKHIKEKYGNPPVIITENGMDDANNRFSKLEDDLQDDKRIQYHKDYMSNLLDAIRKEGCNVHGYFVWSLLDNWEWNSGYTVRFGLYYIDYNNNLTRIPKASVEWFRQVLAQKTAGGVQWFYSGQ

SEQ ID NO: 29920 - DNA, 1604 bp, Zea mays subsp. mays
  misc_feature (1)..(1604): Ceres Seq. ID no. 12343269
attggcacgtatgaatgctcagccacatgcgtatgtatacatcacggccacgttcacgcttcccccttctgcaagcaaacctaaccaagcctctgcggctcttcttcgaatccaactcctccccgatccccaaaatcgaacccaagtcgaaaccctaacctcggccttctcgatgtcggccgccacaaccgccccaacccctgcggtggccaccccgatggcgccgcctccgtcgtacccggcctcctccacgatctccgcctccgtggccgcgtcggtcgaggaagaggacgacctctatggccgcctcaagtcgctccagcgccacatggagttcgtcgagatccaggaggagtacgttaaagacgaacagaagaacctcaagcgcgaactcctccgtgcgcaggaggaggtcaagcggatccagtccgtaccgctcgtcatcggccagtttatggagatggtcgacggcaacaacggcatcgtgggttctactacgggcagcaactactatgtgcggatcctcagcaccatcaaccgcgagctgctcaagccgtcagcatctgtcgcgttgcatcgtcactccaacgctttagtcgacgtgctgccgcccgaggccgactccagcatctccttgctgggatcgtcggagaagcccaacgtcacctacaacgatattggaggatgcgacatccaaaagcaagaaatacgggaggcggttgagttacccttgactcatcatgagttgtacaagcagattggtattgatcctccaagaggggtgcttctgtatggtcctccgggtactggcaagaccatgcttgccaaagcagtcgcacatcataccaccgctgcttttatcagagtcgttggttcggagtttgtacagaagtacttgggcgagggccctagaatggtgcgtgatgtgttccgtttggctaaggagaatgctccagcaatcattttcattgatgaggttgatgctatagccactgctcgctttgatgctcagactggtgctgaccgagaagttcaacgcattcttatggagctactcaatcagatggatgggtttgatcaaacagtgaatgtgaaggttataatggcaactaatcgggcagacactctagatcctgctctgttgcgtcctggtagacttgacaggaaaattgagttccctttgccagaccggcgtcagaagaggcttgttttccaagtctgcactgccaaaatgaacctgagtgacgaggttgatttggaagactatgtttccagaccggataagatcagtgctgctgatattgctgctatctgtcaagaagctggcatgcatgctgtccgcaaaaaccgatatgtcatcctccccaaggactttgagaagggctaccgaaccaacgtgaaaaagcctgagacggacttcgatttctacaaatgaggcaacctgagtgttgagctcgtttcttgtttatcaattgaatatgttttagcataaagatgagtttcaggatagttgccaatatcaaatgtcgaagttgatggctgtaatgcttgagtcaatctttttacttgaaggtacagcggtgttatggaagttatgattatgc

SEQ ID NO: 29921 - protein, 477 aa, Zea mays subsp. mays
  peptide (1)..(477): Ceres Seq. ID no. 12343270
  misc_feature (260)..(447): Pfam Name: AAA Pfam Description: ATPase family associated with various cellular activities
  misc_feature (68)..(477): NCBI GI NO: 15237159 NR Description: 26S proteasome AAA-ATPase subunit RPT3
  misc_feature (110)..(477): NCBI GI NO: 17298145 NR Description: 26S proteasome regulatory particle triple-A ATPase subunit3
  misc_feature (68)..(477): NCBI GI NO: 1709798 NR Description: 26S PROTEASE REGULATORY SUBUNIT 6B HOMOLOG
  misc_feature (91)..(477): NCBI GI NO: 18860063 NR Description: CG16916-PA [Drosophila melanogaster]
  misc_feature (95)..(477): NCBI GI NO: 1172638 NR Description: 26S PROTEASE REGULATORY SUBUNIT 6B (ATPASE MS73)
  misc_feature (94)..(477): NCBI GI NO: 5729991 NR Description: proteasome 26S ATPase subunit 4 isoform 1
  misc_feature (94)..(477): NCBI GI NO: 25742677 NR Description: proteasome 26S  ATPase subunit 4
  misc_feature (94)..(477): NCBI GI NO: 26341428 NR Description: unnamed protein product [Mus musculus]
  misc_feature (94)..(477): NCBI GI NO: 3450955 NR Description: ATPase homolog [Homo sapiens]
  misc_feature (115)..(476): NCBI GI NO: 23480119 NR Description: 26S proteasome ATPase [Plasmodium yoelii yoelii]
LARMNAQPHAYVYITATFTLPPSASKPNQASAALLRIQLLPDPQNRTQVETLTSAFSMSAATTAPTPAVATPMAPPPSYPASSTISASVAASVEEEDDLYGRLKSLQRHMEFVEIQEEYVKDEQKNLKRELLRAQEEVKRIQSVPLVIGQFMEMVDGNNGIVGSTTGSNYYVRILSTINRELLKPSASVALHRHSNALVDVLPPEADSSISLLGSSEKPNVTYNDIGGCDIQKQEIREAVELPLTHHELYKQIGIDPPRGVLLYGPPGTGKTMLAKAVAHHTTAAFIRVVGSEFVQKYLGEGPRMVRDVFRLAKENAPAIIFIDEVDAIATARFDAQTGADREVQRILMELLNQMDGFDQTVNVKVIMATNRADTLDPALLRPGRLDRKIEFPLPDRRQKRLVFQVCTAKMNLSDEVDLEDYVSRPDKISAADIAAICQEAGMHAVRKNRYVILPKDFEKGYRTNVKKPETDFDFYK

SEQ ID NO: 29922 - protein, 474 aa, Zea mays subsp. mays
  peptide (1)..(474): Ceres Seq. ID no. 12343271
  misc_feature (257)..(444): Pfam Name: AAA Pfam Description: ATPase family associated with various cellular activities
  misc_feature (65)..(474): NCBI GI NO: 15237159 NR Description: 26S proteasome AAA-ATPase subunit RPT3
  misc_feature (107)..(474): NCBI GI NO: 17298145 NR Description: 26S proteasome regulatory particle triple-A ATPase subunit3
  misc_feature (65)..(474): NCBI GI NO: 1709798 NR Description: 26S PROTEASE REGULATORY SUBUNIT 6B HOMOLOG
  misc_feature (88)..(474): NCBI GI NO: 18860063 NR Description: CG16916-PA [Drosophila melanogaster]
  misc_feature (92)..(474): NCBI GI NO: 1172638 NR Description: 26S PROTEASE REGULATORY SUBUNIT 6B (ATPASE MS73)
  misc_feature (91)..(474): NCBI GI NO: 5729991 NR Description: proteasome 26S ATPase subunit 4 isoform 1
  misc_feature (91)..(474): NCBI GI NO: 25742677 NR Description: proteasome 26S  ATPase subunit 4
  misc_feature (91)..(474): NCBI GI NO: 26341428 NR Description: unnamed protein product [Mus musculus]
  misc_feature (91)..(474): NCBI GI NO: 3450955 NR Description: ATPase homolog [Homo sapiens]
  misc_feature (112)..(473): NCBI GI NO: 23480119 NR Description: 26S proteasome ATPase [Plasmodium yoelii yoelii]
MNAQPHAYVYITATFTLPPSASKPNQASAALLRIQLLPDPQNRTQVETLTSAFSMSAATTAPTPAVATPMAPPPSYPASSTISASVAASVEEEDDLYGRLKSLQRHMEFVEIQEEYVKDEQKNLKRELLRAQEEVKRIQSVPLVIGQFMEMVDGNNGIVGSTTGSNYYVRILSTINRELLKPSASVALHRHSNALVDVLPPEADSSISLLGSSEKPNVTYNDIGGCDIQKQEIREAVELPLTHHELYKQIGIDPPRGVLLYGPPGTGKTMLAKAVAHHTTAAFIRVVGSEFVQKYLGEGPRMVRDVFRLAKENAPAIIFIDEVDAIATARFDAQTGADREVQRILMELLNQMDGFDQTVNVKVIMATNRADTLDPALLRPGRLDRKIEFPLPDRRQKRLVFQVCTAKMNLSDEVDLEDYVSRPDKISAADIAAICQEAGMHAVRKNRYVILPKDFEKGYRTNVKKPETDFDFYK

SEQ ID NO: 29923 - protein, 420 aa, Zea mays subsp. mays
  peptide (1)..(420): Ceres Seq. ID no. 12343272
  misc_feature (203)..(390): Pfam Name: AAA Pfam Description: ATPase family associated with various cellular activities
  misc_feature (11)..(420): NCBI GI NO: 15237159 NR Description: 26S proteasome AAA-ATPase subunit RPT3
  misc_feature (53)..(420): NCBI GI NO: 17298145 NR Description: 26S proteasome regulatory particle triple-A ATPase subunit3
  misc_feature (11)..(420): NCBI GI NO: 1709798 NR Description: 26S PROTEASE REGULATORY SUBUNIT 6B HOMOLOG
  misc_feature (34)..(420): NCBI GI NO: 18860063 NR Description: CG16916-PA [Drosophila melanogaster]
  misc_feature (38)..(420): NCBI GI NO: 1172638 NR Description: 26S PROTEASE REGULATORY SUBUNIT 6B (ATPASE MS73)
  misc_feature (37)..(420): NCBI GI NO: 5729991 NR Description: proteasome 26S ATPase subunit 4 isoform 1
  misc_feature (37)..(420): NCBI GI NO: 25742677 NR Description: proteasome 26S  ATPase subunit 4
  misc_feature (37)..(420): NCBI GI NO: 26341428 NR Description: unnamed protein product [Mus musculus]
  misc_feature (37)..(420): NCBI GI NO: 3450955 NR Description: ATPase homolog [Homo sapiens]
  misc_feature (58)..(419): NCBI GI NO: 23480119 NR Description: 26S proteasome ATPase [Plasmodium yoelii yoelii]
MSAATTAPTPAVATPMAPPPSYPASSTISASVAASVEEEDDLYGRLKSLQRHMEFVEIQEEYVKDEQKNLKRELLRAQEEVKRIQSVPLVIGQFMEMVDGNNGIVGSTTGSNYYVRILSTINRELLKPSASVALHRHSNALVDVLPPEADSSISLLGSSEKPNVTYNDIGGCDIQKQEIREAVELPLTHHELYKQIGIDPPRGVLLYGPPGTGKTMLAKAVAHHTTAAFIRVVGSEFVQKYLGEGPRMVRDVFRLAKENAPAIIFIDEVDAIATARFDAQTGADREVQRILMELLNQMDGFDQTVNVKVIMATNRADTLDPALLRPGRLDRKIEFPLPDRRQKRLVFQVCTAKMNLSDEVDLEDYVSRPDKISAADIAAICQEAGMHAVRKNRYVILPKDFEKGYRTNVKKPETDFDFYK

SEQ ID NO: 29924 - DNA, 1058 bp, Zea mays subsp. mays
  misc_feature (1)..(1058): Ceres Seq. ID no. 12346165
ctcacacgccggccgccgcgcaagagccgtggccccgtcgacgtccgcccgcacaggactctccgagtgtgggattgagccgtagttttttttttttggtggctcgggccgatatccggtactgtatgagggttgccaactactagactttaagatcgctgattcaatggaggcctccgaggcagcacctgcagcggcggccaccgtcatggaagcagaggatgtgagcggcgggaagggcgaatggtacgtgcttggggagcgggcgctgatggtgccgtacacgcgggagcacgtgccgcggtaccacgactggatgcaggacccggcgctgctggaggccaccgcgtcggagcccctctccctctcgcaggagttcgaggtccaccgctcatggaccctcgaccctctaaagcacaccttcatagtgttggataaggagctcatagagggagagttcgtgccgggcaacccgcacattgaagctatggttggtgatgtgaacatatatatgaatgactctgatgatgtgcagatcgcggagatagagattatgatagctgaacataagagccgtgggaagggtattggtcaagaagcaatcttactgatgatggcatttgcagtagagaaatatggaattcacacgttcagggcaaaaattagcgaatcaaatatggcatcgcttaagctcttcaggaagttgggcttcaaggatgcttcatacagtgtggtgttcaaggaggtgactctggaggcacccgctgactcactcccgttgagatttcctctgaccattggagactggtgacgtttgacatgccccaagttaattccatgcagacgacacaagaagctaatgctgtttgtctgtactatctgaccaaaatttactcgggctgatattgtatgaaaaaaatgaataaaacagttgcacagttgtgattcaattgcattagaccagtcgggtttttcatgtcactattttgaagaccccatatcttataaacaaatgtagacaagttttatctcataatttttttatagtatctcccgtc

SEQ ID NO: 29925 - protein, 214 aa, Zea mays subsp. mays
  peptide (1)..(214): Ceres Seq. ID no. 12346166
  misc_feature (101)..(183): Pfam Name: GNAT Pfam Description: Acetyltransferase
  misc_feature (5)..(193): NCBI GI NO: 24414273 NR Description: Unknown protein
  misc_feature (187)..(214): NCBI GI NO: 24414273 NR Description: Unknown protein
  misc_feature (31)..(203): NCBI GI NO: 18395874 NR Description: Expressed protein; protein id: At2g04845
  misc_feature (31)..(203): NCBI GI NO: 21554294 NR Description: unknown [Arabidopsis thaliana]
  misc_feature (29)..(196): NCBI GI NO: 13278945 NR Description: DKFZP564C103 protein [Homo sapiens]
  misc_feature (29)..(196): NCBI GI NO: 7512719 NR Description: hypothetical protein DKFZp564C103.1 - human
  misc_feature (29)..(196): NCBI GI NO: 31542521 NR Description: DKFZP564C103 protein [Homo sapiens]
  misc_feature (29)..(206): NCBI GI NO: 13384782 NR Description: RIKEN cDNA 1110028N05 [Mus musculus]
  misc_feature (29)..(213): NCBI GI NO: 39584036 NR Description: Hypothetical protein CBG11716
  misc_feature (29)..(196): NCBI GI NO: 34875069 NR Description: similar to RIKEN cDNA 1110028N05
MEASEAAPAAAATVMEAEDVSGGKGEWYVLGERALMVPYTREHVPRYHDWMQDPALLEATASEPLSLSQEFEVHRSWTLDPLKHTFIVLDKELIEGEFVPGNPHIEAMVGDVNIYMNDSDDVQIAEIEIMIAEHKSRGKGIGQEAILLMMAFAVEKYGIHTFRAKISESNMASLKLFRKLGFKDASYSVVFKEVTLEAPADSLPLRFPLTIGDW

SEQ ID NO: 29926 - protein, 200 aa, Zea mays subsp. mays
  peptide (1)..(200): Ceres Seq. ID no. 12346167
  misc_feature (87)..(169): Pfam Name: GNAT Pfam Description: Acetyltransferase
  misc_feature (1)..(179): NCBI GI NO: 24414273 NR Description: Unknown protein
  misc_feature (173)..(200): NCBI GI NO: 24414273 NR Description: Unknown protein
  misc_feature (17)..(189): NCBI GI NO: 18395874 NR Description: Expressed protein; protein id: At2g04845
  misc_feature (17)..(189): NCBI GI NO: 21554294 NR Description: unknown [Arabidopsis thaliana]
  misc_feature (15)..(182): NCBI GI NO: 13278945 NR Description: DKFZP564C103 protein [Homo sapiens]
  misc_feature (15)..(182): NCBI GI NO: 7512719 NR Description: hypothetical protein DKFZp564C103.1 - human
  misc_feature (15)..(182): NCBI GI NO: 31542521 NR Description: DKFZP564C103 protein [Homo sapiens]
  misc_feature (15)..(192): NCBI GI NO: 13384782 NR Description: RIKEN cDNA 1110028N05 [Mus musculus]
  misc_feature (15)..(199): NCBI GI NO: 39584036 NR Description: Hypothetical protein CBG11716
  misc_feature (15)..(182): NCBI GI NO: 34875069 NR Description: similar to RIKEN cDNA 1110028N05
MEAEDVSGGKGEWYVLGERALMVPYTREHVPRYHDWMQDPALLEATASEPLSLSQEFEVHRSWTLDPLKHTFIVLDKELIEGEFVPGNPHIEAMVGDVNIYMNDSDDVQIAEIEIMIAEHKSRGKGIGQEAILLMMAFAVEKYGIHTFRAKISESNMASLKLFRKLGFKDASYSVVFKEVTLEAPADSLPLRFPLTIGDW

SEQ ID NO: 29927 - protein, 179 aa, Zea mays subsp. mays
  peptide (1)..(179): Ceres Seq. ID no. 12346168
  misc_feature (66)..(148): Pfam Name: GNAT Pfam Description: Acetyltransferase
  misc_feature (1)..(158): NCBI GI NO: 24414273 NR Description: Unknown protein
  misc_feature (152)..(179): NCBI GI NO: 24414273 NR Description: Unknown protein
  misc_feature (1)..(168): NCBI GI NO: 18395874 NR Description: Expressed protein; protein id: At2g04845
  misc_feature (1)..(168): NCBI GI NO: 21554294 NR Description: unknown [Arabidopsis thaliana]
  misc_feature (1)..(161): NCBI GI NO: 13278945 NR Description: DKFZP564C103 protein [Homo sapiens]
  misc_feature (1)..(161): NCBI GI NO: 7512719 NR Description: hypothetical protein DKFZp564C103.1 - human
  misc_feature (1)..(161): NCBI GI NO: 31542521 NR Description: DKFZP564C103 protein [Homo sapiens]
  misc_feature (1)..(171): NCBI GI NO: 13384782 NR Description: RIKEN cDNA 1110028N05 [Mus musculus]
  misc_feature (1)..(178): NCBI GI NO: 39584036 NR Description: Hypothetical protein CBG11716
  misc_feature (1)..(161): NCBI GI NO: 34875069 NR Description: similar to RIKEN cDNA 1110028N05
MVPYTREHVPRYHDWMQDPALLEATASEPLSLSQEFEVHRSWTLDPLKHTFIVLDKELIEGEFVPGNPHIEAMVGDVNIYMNDSDDVQIAEIEIMIAEHKSRGKGIGQEAILLMMAFAVEKYGIHTFRAKISESNMASLKLFRKLGFKDASYSVVFKEVTLEAPADSLPLRFPLTIGDW

SEQ ID NO: 29928 - DNA, 1726 bp, Zea mays subsp. mays
  misc_feature (1)..(1726): Ceres Seq. ID no. 12359767
aatcaggccacaggggggctcccacttcttcctcctcgacagtcctcagtcctccgtgcgaaatctgttcgcactcgcagtcgcagtcaccactgttctccagggatggcgccgtgttgcctgctccagatcggttggtgtctcgagcgcccccgtggctttcgcctcgccgcggcgctgtgcgcggctgtggtcgcgctggcgctggcgcccgccttggatgccacgtcggcgtcgcttctgggcatcaactacggccgcgtggggaacaacctcccgccgcctcagtccgtcatgccgctgctcgagggcctcggtattggccgcgtgcggatgtacgacgccgaccccaccgtgctgcgcgcgttcgcccggaccggggtcgagctcatcgtcggcgtgcccgacgagtgcctggccgccgtggccgacccgagcggcgcggcacagtggctcaaggagaacgtcgcgcctttcctgccggacacgaagatctccgtgctcgccgtcggcaacgaggtgctcaccggcgccaacagctccacgctgtcgcgcaccctcctcccggcgatgcagtccctgcacggcgcggtggccgcgctcggcctcgacaagcagatcaccgtcacctcggcgcacaacctcggcgtgctcgggacgtcgtacccgccctcggcgggggccttccgcaaggacctgctcccgtacctctgccccatcctggactaccatgccaggaccggctcgccgttcctcgtgaaacgcgtatccctacttcgcctactccagcgaccccaggggcgtgcagcttgactacgcgctgctcgacccgggcttcgccggcgtgcaggaccccaactccaggctgcactaccccaacctcctcgtggcgcaggtggacgcggtgtaccacgccatcgcggcggccaataccgcggcgtcgcgggtggtggaggtgcgggtctcggagaccggctggccctccgcgggggccgccaacgagacggccgcgacgccgcagaacgcggcgcgctacaacagcaacgcgatgcgcctggtggcggaggacaagggcacgccgctcaagcccggggcgccgctccgcgcctacgtgttcgcgctcttcaacgagaacctcaagcccgggttggcgtctgagcgctactacggcctcttcaagcccgacggcacgccggcgtacgagctctccttcaagctaccgcgcgacaactccacgtttggtcacggcgataccggcaagggcggtggcggaatcggcggtaacggcaatggcaatggcagcagctggaacaatagcggcggcggaaacagcggctactatgacatctcggcttcagcacgtgacactacgggtcactggcggatgtgggcgcaggcggccatggcaggagcagtagccgtcctgacactgtagcgccaagggtaggatcaggaatggagcggagttgccgtcctggggcagcggcctgatttggtgctcctcgtatgctgtagtttctgagaccgacctgtgactgtgagtgaccttgtgcttccggaaatctggtggcatctaaagcactcctagttttaagcagcgctggatcaggtttgcctgcctgcttgaaatgaaaccctttccaaatactggtagcaccctggtaaaaatcctctaaaatagtgctgcgctgcttcgttttagacaacgctgttaattccggtcttt

SEQ ID NO: 29929 - protein, 471 aa, Zea mays subsp. mays
  peptide (1)..(471): Ceres Seq. ID no. 12359768
  misc_feature (249)..(449): Pfam Name: Pfam Description:  Equine herpesvirus glycoprotein gp2
  misc_feature (251)..(467): NCBI GI NO: 28574039 NR Description: Salivary gland secretion 1 CG3047-PA
  misc_feature (251)..(459): NCBI GI NO: 28574039 NR Description: Salivary gland secretion 1 CG3047-PA
  misc_feature (31)..(449): NCBI GI NO: 29247944 NR Description: GLP_26_54603_52153 [Giardia lamblia ATCC 50803]
  misc_feature (251)..(459): NCBI GI NO: 28574039 NR Description: Salivary gland secretion 1 CG3047-PA
SGHRGAPTSSSSTVLSPPCEICSHSQSQSPLFSRDGAVLPAPDRLVSRAPPWLSPRRGAVRGCGRAGAGARLGCHVGVASGHQLRPRGEQPPAASVRHAAARGPRYWPRADVRRRPHRAARVRPDRGRAHRRRARRVPGRRGRPERRGTVAQGERRAFPAGHEDLRARRRQRGAHRRQQLHAVAHPPPGDAVPARRGGRARPRQADHRHLGAQPRRARDVVPALGGGLPQGPAPVPLPHPGLPCQDRLAVPRETRIPTSPTPATPGACSLTTRCSTRASPACRTPTPGCTTPTSSWRRWTRCTTPSRRPIPRRRGWWRCGSRRPAGPPRGPPTRRPRRRRTRRATTATRCAWWRRTRARRSSPGRRSAPTCSRSSTRTSSPGWRLSATTASSSPTARRRTSSPSSYRATTPRLVTAIPARAVAESAVTAMAMAAAGTIAAAETAATMTSRLQHVTLRVTGGCGRRRPWQEQ

SEQ ID NO: 29930 - protein, 270 aa, Zea mays subsp. mays
  peptide (1)..(270): Ceres Seq. ID no. 12359769
  misc_feature (81)..(267): Pfam Name: Pfam Description:  Glycosyl hydrolases family 17
  misc_feature (60)..(267): NCBI GI NO: 37531294 NR Description: putative beta-1,3-glucanase
  misc_feature (64)..(253): NCBI GI NO: 6006371 NR Description: Similar to hypothetical protein - potato (S31196)
  misc_feature (76)..(253): NCBI GI NO: 419789 NR Description: hypothetical protein - potato
  misc_feature (79)..(266): NCBI GI NO: 15238298 NR Description: glycosyl hydrolase family 17; protein id:At5g42100
  misc_feature (64)..(253): NCBI GI NO: 30692765 NR Description: glycosyl hydrolase family 17
  misc_feature (64)..(253): NCBI GI NO: 25316443 NR Description: CDS protein F9L11.6
  misc_feature (64)..(253): NCBI GI NO: 38346337 NR Description: OSJNBa0073L04.8
  misc_feature (57)..(253): NCBI GI NO: 34908492 NR Description: putative beta-1,3-glucanase
  misc_feature (81)..(253): NCBI GI NO: 18401444 NR Description: glycosyl hydrolase family 17; protein id:At2g27500
  misc_feature (81)..(253): NCBI GI NO: 25316425 NR Description: probable beta-1,3-glucanase
NQATGGLPLLPPRQSSVLRAKSVRTRSRSHHCSPGMAPCCLLQIGWCLERPRGFRLAAALCAAVVALALAPALDATSASLLGINYGRVGNNLPPPQSVMPLLEGLGIGRVRMYDADPTVLRAFARTGVELIVGVPDECLAAVADPSGAAQWLKENVAPFLPDTKISVLAVGNEVLTGANSSTLSRTLLPAMQSLHGAVAALGLDKQITVTSAHNLGVLGTSYPPSAGAFRKDLLPYLCPILDYHARTGSPFLVKRVSLLRLLQRPQGRAA

SEQ ID NO: 29931 - protein, 252 aa, Zea mays subsp. mays
  peptide (1)..(252): Ceres Seq. ID no. 12359770
  misc_feature (101)..(242): Pfam Name: Pfam Description:  Equine herpesvirus glycoprotein gp2
  misc_feature (97)..(245): NCBI GI NO: 28574039 NR Description: Salivary gland secretion 1 CG3047-PA
  misc_feature (41)..(243): NCBI GI NO: 28574039 NR Description: Salivary gland secretion 1 CG3047-PA
  misc_feature (83)..(243): NCBI GI NO: 28574039 NR Description: Salivary gland secretion 1 CG3047-PA
  misc_feature (70)..(243): NCBI GI NO: 28574039 NR Description: Salivary gland secretion 1 CG3047-PA
IRPQGGSHFFLLDSPQSSVRNLFALAVAVTTVLQGWRRVACSRSVGVSSAPVAFASPRRCARLWSRWRWRPPWMPRRRRFWASTTAAWGTTSRRLSPSCRCSRASVLAACGCTTPTPPCCARSPGPGSSSSSACPTSAWPPWPTRAARHSGSRRTSRLSCRTRRSPCSPSATRCSPAPTAPRCRAPSSRRCSPCTARWPRSASTSRSPSPRRTTSACSGRRTRPRRGPSARTCSRTSAPSWTTMPGPARRSS

SEQ ID NO: 29932 - DNA, 1105 bp, Zea mays subsp. mays
  misc_feature (1)..(1105): Ceres Seq. ID no. 12404952
accagccgaaaccgaggctgacgctgcgcgagccaaccggcggtgatgcaggcggcagtcggccaccgcggcgccaaccttggctccccgtcactctcgcgcttccggtatggctcccgcctccccggccggtcccgcctcttctctgagggcgtggcggtggcgccactccgcgtcggctctctgccccagccacggacccatggcagcggcggtttcgcgcacctcggggccatggatggggaggcgccgaggctgccgcacgccctcaggagaatgcttatcgatcatcagaaaatggcatgtcccaaccttctgaaagctgctgtactttcaaccatgacattgcttgctgtacctcttgaggcgtcagcggagatgtgccagccacctagttctttcgccaatatgccaatttttattgttgtagctctaataggagctgctgttggcggattattagcacgccaaagaaaggcggaattgaagcggctcaataatcaacttcgccagatcaatgcagcacttagaaggcaggcacagattgagtcatttgcgcctggccttacttatgcgccagttgggagaacaaatgaaactgatgttattgttgacccaaggaagcagcagttggtcacaaacctgagaaatgggaagaattacatgaggaatcaagatcttgataaggctatagtggagttcagaacagctctggagcttgcagagagcataggtgatcgttttgaagaaaagaaagctgcccgaggactagaggctcgggaagtaccgagaagcaatgagacagtacagcaaggttctggagctgtccaaggagacaggtgaagattccggctgcaccgaggcctacggtgccatagcggactgctacaccgagctgggcgacctggagcgagcggcgaaggtgtatgacaagtacatatcgaggctgcagcccggcgagtaaggtagatttctttacagacgagacagcgagttccttcccgttcgttgagttttgtgttttgtcggtcttgttaaactcactgcaggtattggattgttttgagaacggttttaatattcgtatataaataactattgattt

SEQ ID NO: 29933 - protein, 265 aa, Zea mays subsp. mays
  peptide (1)..(265): Ceres Seq. ID no. 12404953
  misc_feature (73)..(244): NCBI GI NO: 34914598 NR Description: P0520B06.12
  misc_feature (94)..(244): NCBI GI NO: 9294636 NR Description: emb|CAB41081
  misc_feature (94)..(244): NCBI GI NO: 18400278 NR Description: expressed protein; protein id: At3g14110
MQAAVGHRGANLGSPSLSRFRYGSRLPGRSRLFSEGVAVAPLRVGSLPQPRTHGSGGFAHLGAMDGEAPRLPHALRRMLIDHQKMACPNLLKAAVLSTMTLLAVPLEASAEMCQPPSSFANMPIFIVVALIGAAVGGLLARQRKAELKRLNNQLRQINAALRRQAQIESFAPGLTYAPVGRTNETDVIVDPRKQQLVTNLRNGKNYMRNQDLDKAIVEFRTALELAESIGDRFEEKKAARGLEAREVPRSNETVQQGSGAVQGDR

SEQ ID NO: 29934 - protein, 202 aa, Zea mays subsp. mays
  peptide (1)..(202): Ceres Seq. ID no. 12404954
  misc_feature (10)..(181): NCBI GI NO: 34914598 NR Description: P0520B06.12
  misc_feature (31)..(181): NCBI GI NO: 9294636 NR Description: emb|CAB41081
  misc_feature (31)..(181): NCBI GI NO: 18400278 NR Description: expressed protein; protein id: At3g14110
MDGEAPRLPHALRRMLIDHQKMACPNLLKAAVLSTMTLLAVPLEASAEMCQPPSSFANMPIFIVVALIGAAVGGLLARQRKAELKRLNNQLRQINAALRRQAQIESFAPGLTYAPVGRTNETDVIVDPRKQQLVTNLRNGKNYMRNQDLDKAIVEFRTALELAESIGDRFEEKKAARGLEAREVPRSNETVQQGSGAVQGDR

SEQ ID NO: 29935 - protein, 188 aa, Zea mays subsp. mays
  peptide (1)..(188): Ceres Seq. ID no. 12404955
  misc_feature (1)..(167): NCBI GI NO: 34914598 NR Description: P0520B06.12
  misc_feature (17)..(167): NCBI GI NO: 9294636 NR Description: emb|CAB41081
  misc_feature (17)..(167): NCBI GI NO: 18400278 NR Description: expressed protein; protein id: At3g14110
MLIDHQKMACPNLLKAAVLSTMTLLAVPLEASAEMCQPPSSFANMPIFIVVALIGAAVGGLLARQRKAELKRLNNQLRQINAALRRQAQIESFAPGLTYAPVGRTNETDVIVDPRKQQLVTNLRNGKNYMRNQDLDKAIVEFRTALELAESIGDRFEEKKAARGLEAREVPRSNETVQQGSGAVQGDR

SEQ ID NO: 29936 - DNA, 1701 bp, Zea mays subsp. mays
  misc_feature (1)..(1701): Ceres Seq. ID no. 12406634
gttctcccggggctcttctccgtccgtaaggcaccgccgccgcgtctcggctggaccgacagttcggccgatccgtcttctcatcctcctcctccacctgcggctgtgcaggtcggcttcggggacgatggcggcgagggcggctgatgagaacagaaggccgggggtggggaggcccgcgccatgcgtccgagacatggggagccggcgcgcgctcacggacatcaagaacctcgtcggggttgccccgaacccctgcgccgtcgccaagaagcccgtgctgcagaagagcagaaaggacgaaaagaagacagcgttgccaagcagccggccaatgacaaggaaattcgtcgcctccttggcgagcaaagagcaacctaaatgtcagccgaccggagctgatccagaacccggagttgatcaacggaaggaaccaatcgttgatggcaccgttgatatcgacgtggaactgggcgagccggtcgacgatagtgatggtgacatcgacatgggtgatgagacagagaacaaggacattatgaaccaagatgaatcgctcatggatattgatagtgcagactcggggaacccgcttgcagcaacagaatatgttgaagagctttacaagttttacagagaaaatgaggctaagagttgtgtaaaccctgattacatgtccagtcagcaagatataaatgcaaagatgagagcaattctgattgactggctaattgaggttcactacaagtttgaactgatggatgagacgctatttcttacggtaaacgtaatagatagattcttggaaaaggaagtggttccaaggaagaagctacaactggttggaatcacagctctgcttcttgcttgcaaatatgaggaggtctcagttccagttgttgaggaccttgtgctcatttctgaccgtgcctacacaaaagggcaaattctagaaatggaaaagttgattctgaacacgctgcaattcaacatgtctgttccaacaccttatgtcttcatgaagaggtttctgaaagcagcagacgcagataaacagtttgagctagtgtcatttttcatgctggagctctgcttggtagagtaccaaatgctgaactataggccttcacatctggctgctgctgcggtttatactgcacaatgtgctattaaccgttgccagcagtggacaaaggtttgcgagtcacatagcagatacactggcgaccaactcctggagtgctcgaggatgattgtagactttcaccagaaggctggaaccggcaagctcactggcgtgcacaggaagtacagtacctacaagtttgggtgcgcggccaagattgtgcctgcgcagttcatgctggagtcaggagggacagcaccgcctccttcaggtgcaatctaattgaatcgccctgttttaactgggtgggggtttttttttttaaaagattttagcatattctccgtgaacaaaagatgcagaaaacatcgtgttgatgttgcccaaaagtgcatcgaattttcttggagaattatgattaactgttttttttctatccgtgtcctgaatgacgagtgacggactgttttttgttatactgcggctaataacgaactgtcctgttcaggaatgttgttggaaccttgtaaagaaaaacaagttctgaatcaaatggtcaaatggatcctttgtcc

SEQ ID NO: 29937 - protein, 468 aa, Zea mays subsp. mays
  peptide (1)..(468): Ceres Seq. ID no. 12406635
  misc_feature (206)..(332): Pfam Name: Pfam Description:  Cyclin, N-terminal domain
  misc_feature (48)..(458): NCBI GI NO: 38345935 NR Description: OSJNBb0078D11.10
  misc_feature (48)..(458): NCBI GI NO: 6331704 NR Description: cyclin [Oryza sativa]
  misc_feature (68)..(457): NCBI GI NO: 3913236 NR Description: G2/mitotic-specific cyclin 2
  misc_feature (64)..(457): NCBI GI NO: 1168893 NR Description: G2/mitotic-specific cyclin 1
  misc_feature (64)..(457): NCBI GI NO: 1362054 NR Description: mitosis-specific cyclin CycIII - alfalfa
  misc_feature (51)..(455): NCBI GI NO: 22330658 NR Description: Cyclin B2;4; protein id: At1g76310.1
  misc_feature (68)..(455): NCBI GI NO: 25294186 NR Description: hypothetical protein F15M4.19
  misc_feature (68)..(457): NCBI GI NO: 2130122 NR Description: cyclin III - maize
  misc_feature (68)..(455): NCBI GI NO: 15217987 NR Description: Cyclin B2;3; protein id: At1g20610.1
  misc_feature (68)..(455): NCBI GI NO: 25294182 NR Description: protein F2D10.10 [imported] - Arabidopsis thaliana
FSRGSSPSVRHRRRVSAGPTVRPIRLLILLLHLRLCRSASGTMAARAADENRRPGVGRPAPCVRDMGSRRALTDIKNLVGVAPNPCAVAKKPVLQKSRKDEKKTALPSSRPMTRKFVASLASKEQPKCQPTGADPEPGVDQRKEPIVDGTVDIDVELGEPVDDSDGDIDMGDETENKDIMNQDESLMDIDSADSGNPLAATEYVEELYKFYRENEAKSCVNPDYMSSQQDINAKMRAILIDWLIEVHYKFELMDETLFLTVNVIDRFLEKEVVPRKKLQLVGITALLLACKYEEVSVPVVEDLVLISDRAYTKGQILEMEKLILNTLQFNMSVPTPYVFMKRFLKAADADKQFELVSFFMLELCLVEYQMLNYRPSHLAAAAVYTAQCAINRCQQWTKVCESHSRYTGDQLLECSRMIVDFHQKAGTGKLTGVHRKYSTYKFGCAAKIVPAQFMLESGGTAPPPSGAI

SEQ ID NO: 29938 - protein, 426 aa, Zea mays subsp. mays
  peptide (1)..(426): Ceres Seq. ID no. 12406636
  misc_feature (164)..(290): Pfam Name: Pfam Description:  Cyclin, N-terminal domain
  misc_feature (6)..(416): NCBI GI NO: 38345935 NR Description: OSJNBb0078D11.10
  misc_feature (6)..(416): NCBI GI NO: 6331704 NR Description: cyclin [Oryza sativa]
  misc_feature (26)..(415): NCBI GI NO: 3913236 NR Description: G2/mitotic-specific cyclin 2
  misc_feature (22)..(415): NCBI GI NO: 1168893 NR Description: G2/mitotic-specific cyclin 1
  misc_feature (22)..(415): NCBI GI NO: 1362054 NR Description: mitosis-specific cyclin CycIII - alfalfa
  misc_feature (9)..(413): NCBI GI NO: 22330658 NR Description: Cyclin B2;4; protein id: At1g76310.1
  misc_feature (26)..(413): NCBI GI NO: 25294186 NR Description: hypothetical protein F15M4.19
  misc_feature (26)..(415): NCBI GI NO: 2130122 NR Description: cyclin III - maize
  misc_feature (26)..(413): NCBI GI NO: 15217987 NR Description: Cyclin B2;3; protein id: At1g20610.1
  misc_feature (26)..(413): NCBI GI NO: 25294182 NR Description: protein F2D10.10 [imported] - Arabidopsis thaliana
MAARAADENRRPGVGRPAPCVRDMGSRRALTDIKNLVGVAPNPCAVAKKPVLQKSRKDEKKTALPSSRPMTRKFVASLASKEQPKCQPTGADPEPGVDQRKEPIVDGTVDIDVELGEPVDDSDGDIDMGDETENKDIMNQDESLMDIDSADSGNPLAATEYVEELYKFYRENEAKSCVNPDYMSSQQDINAKMRAILIDWLIEVHYKFELMDETLFLTVNVIDRFLEKEVVPRKKLQLVGITALLLACKYEEVSVPVVEDLVLISDRAYTKGQILEMEKLILNTLQFNMSVPTPYVFMKRFLKAADADKQFELVSFFMLELCLVEYQMLNYRPSHLAAAAVYTAQCAINRCQQWTKVCESHSRYTGDQLLECSRMIVDFHQKAGTGKLTGVHRKYSTYKFGCAAKIVPAQFMLESGGTAPPPSGAI

SEQ ID NO: 29939 - protein, 403 aa, Zea mays subsp. mays
  peptide (1)..(403): Ceres Seq. ID no. 12406637
  misc_feature (141)..(267): Pfam Name: Pfam Description:  Cyclin, N-terminal domain
  misc_feature (1)..(393): NCBI GI NO: 38345935 NR Description: OSJNBb0078D11.10
  misc_feature (1)..(393): NCBI GI NO: 6331704 NR Description: cyclin [Oryza sativa]
  misc_feature (3)..(392): NCBI GI NO: 3913236 NR Description: G2/mitotic-specific cyclin 2
  misc_feature (1)..(392): NCBI GI NO: 1168893 NR Description: G2/mitotic-specific cyclin 1
  misc_feature (1)..(392): NCBI GI NO: 1362054 NR Description: mitosis-specific cyclin CycIII - alfalfa
  misc_feature (1)..(390): NCBI GI NO: 22330658 NR Description: Cyclin B2;4; protein id: At1g76310.1
  misc_feature (3)..(390): NCBI GI NO: 25294186 NR Description: hypothetical protein F15M4.19
  misc_feature (3)..(392): NCBI GI NO: 2130122 NR Description: cyclin III - maize
  misc_feature (3)..(390): NCBI GI NO: 15217987 NR Description: Cyclin B2;3; protein id: At1g20610.1
  misc_feature (3)..(390): NCBI GI NO: 25294182 NR Description: protein F2D10.10 [imported] - Arabidopsis thaliana
MGSRRALTDIKNLVGVAPNPCAVAKKPVLQKSRKDEKKTALPSSRPMTRKFVASLASKEQPKCQPTGADPEPGVDQRKEPIVDGTVDIDVELGEPVDDSDGDIDMGDETENKDIMNQDESLMDIDSADSGNPLAATEYVEELYKFYRENEAKSCVNPDYMSSQQDINAKMRAILIDWLIEVHYKFELMDETLFLTVNVIDRFLEKEVVPRKKLQLVGITALLLACKYEEVSVPVVEDLVLISDRAYTKGQILEMEKLILNTLQFNMSVPTPYVFMKRFLKAADADKQFELVSFFMLELCLVEYQMLNYRPSHLAAAAVYTAQCAINRCQQWTKVCESHSRYTGDQLLECSRMIVDFHQKAGTGKLTGVHRKYSTYKFGCAAKIVPAQFMLESGGTAPPPSGAI

SEQ ID NO: 29940 - DNA, 831 bp, Zea mays subsp. mays
  misc_feature (1)..(831): Ceres Seq. ID no. 12373480
aagatcagatcacactcgtagagagaaggaaaaatatccccaaaccctagctcccgatctcgatggcgaaccctcgcgtcttcttcgacatgaccgtcggcggcgccccggcgggccggatcgtgatggagctgtacgccaacgaggtgcccaagaccgcggagaacttccgcgcgctgtgcacgggcgagaagggcgtgggcaagtccgggaagccgctccactacaagggctccaccttccaccgcgtcatccccgagttcatgtgccagggcggcgacttcacccgcggcaacggcaccggcggcgagtccatctacggcgagaagttccccgacgagaagttcgtgcgcaagcacaccgctcccggtgtgctctccatggccaacgccgggcccaacaccaacggctcccagttcttcatctgcaccgtcgcgaccccttggctcgacggcaagcacgtcgtcttcggccaggtcgtcgagggcatggacgtcgtcaaggccatcgagaaggtgggcacccgcaacggctccacctccaaggtggtcaaggtcgctgactgcggacagctctcctagatctctctgatctggtctgttcggccgccctccctccgtcatcgtcgactccccctgcgtccgttcctttggatctgaataagatggtggtgatctgagtggtggtcttagtttatcatgtatcgctcgcagtttaatttagcggtttaggtgtggatctgtgaaccccatggcgcctctgcttgattcgtgtttcacctgttatgttctgagattcatgataatgctatgagaactgaaattcccgttt

SEQ ID NO: 29941 - protein, 186 aa, Zea mays subsp. mays
  peptide (1)..(186): Ceres Seq. ID no. 12373481
RSDHTRREKEKYPQTLAPDLDGEPSRLLRHDRRRRPGGPDRDGAVRQRGAQDRGELPRAVHGREGRGQVREAAPLQGLHLPPRHPRVHVPGRRLHPRQRHRRRVHLRREVPRREVRAQAHRSRCALHGQRRAQHQRLPVLHLHRRDPLARRQARRLRPGRRGHGRRQGHREGGHPQRLHLQGGQGR

SEQ ID NO: 29942 - protein, 172 aa, Zea mays subsp. mays
  peptide (1)..(172): Ceres Seq. ID no. 12373482
  misc_feature (1)..(172): NCBI GI NO: 118104 NR Description: Peptidyl-prolyl cis-trans isomerase
  misc_feature (1)..(172): NCBI GI NO: 1084455 NR Description: peptidylprolyl isomerase (EC 5.2.1.8) Cyp2 - rice
  misc_feature (1)..(171): NCBI GI NO: 13925731 NR Description: cyclophilin A-1 [Triticum aestivum]
  misc_feature (1)..(171): NCBI GI NO: 13925734 NR Description: cyclophilin A-2 [Triticum aestivum]
  misc_feature (1)..(172): NCBI GI NO: 600769 NR Description: cyclophilin 2
  misc_feature (1)..(172): NCBI GI NO: 18376589 NR Description: putative cyclosporin A-binding protein
  misc_feature (2)..(172): NCBI GI NO: 18076088 NR Description: cyclophilin [Ricinus communis]
  misc_feature (1)..(171): NCBI GI NO: 11270316 NR Description: peptidylprolyl isomerase (EC 5.2.1.8)
  misc_feature (1)..(172): NCBI GI NO: 3334157 NR Description: Peptidyl-prolyl cis-trans isomerase
  misc_feature (1)..(171): NCBI GI NO: 11270318 NR Description: peptidylprolyl isomerase (EC 5.2.1.8) CYP18
MANPRVFFDMTVGGAPAGRIVMELYANEVPKTAENFRALCTGEKGVGKSGKPLHYKGSTFHRVIPEFMCQGGDFTRGNGTGGESIYGEKFPDEKFVRKHTAPGVLSMANAGPNTNGSQFFICTVATPWLDGKHVVFGQVVEGMDVVKAIEKVGTRNGSTSKVVKVADCGQLS

SEQ ID NO: 29943 - protein, 163 aa, Zea mays subsp. mays
  peptide (1)..(163): Ceres Seq. ID no. 12373483
  misc_feature (1)..(163): NCBI GI NO: 118104 NR Description: Peptidyl-prolyl cis-trans isomerase
  misc_feature (1)..(163): NCBI GI NO: 1084455 NR Description: peptidylprolyl isomerase (EC 5.2.1.8) Cyp2 - rice
  misc_feature (1)..(162): NCBI GI NO: 13925731 NR Description: cyclophilin A-1 [Triticum aestivum]
  misc_feature (1)..(162): NCBI GI NO: 13925734 NR Description: cyclophilin A-2 [Triticum aestivum]
  misc_feature (1)..(163): NCBI GI NO: 600769 NR Description: cyclophilin 2
  misc_feature (1)..(163): NCBI GI NO: 18376589 NR Description: putative cyclosporin A-binding protein
  misc_feature (1)..(163): NCBI GI NO: 18076088 NR Description: cyclophilin [Ricinus communis]
  misc_feature (1)..(162): NCBI GI NO: 11270316 NR Description: peptidylprolyl isomerase (EC 5.2.1.8)
  misc_feature (1)..(163): NCBI GI NO: 3334157 NR Description: Peptidyl-prolyl cis-trans isomerase
  misc_feature (1)..(162): NCBI GI NO: 11270318 NR Description: peptidylprolyl isomerase (EC 5.2.1.8) CYP18
MTVGGAPAGRIVMELYANEVPKTAENFRALCTGEKGVGKSGKPLHYKGSTFHRVIPEFMCQGGDFTRGNGTGGESIYGEKFPDEKFVRKHTAPGVLSMANAGPNTNGSQFFICTVATPWLDGKHVVFGQVVEGMDVVKAIEKVGTRNGSTSKVVKVADCGQLS

SEQ ID NO: 29944 - DNA, 1573 bp, Zea mays subsp. mays
  misc_feature (1)..(1573): Ceres Seq. ID no. 12344354
ataccgggatgggcgccatgggcatcgtcgtcagagcgtgggcgcctcccgctcttgccgccgcggccgcgccggcaccctccggctccagggacaccggtcaggcccagcggaggagcaagccctcgaggaccggccgcgtgcgcgtgctcggcggcactggccgtgtcggaggatccacggccaccgcactctccaaactccgccccaagcttggcatcctcgtcggtggcaggaaccgggagaaaggcgagtccattgcagccaagcttgggggccagtctgagttcgtccaggtcgacacccgcaacacaggcatgttggaggaagcgctgcaggtggtagctgttcgcggagttgccaaaccggaggcagctgcgacgccggcgaggcgctcgcgccccatccctctggcttccgtggccgtgtggagtctggttgccactggcgccgcaaatgctgccgagctatgggaccccttggccctgcacggatcatcaggactcgtcttggctgaccttggcattggagattggtttgggggtttgctgttttcagctgggcagcaggctaatgaggctgtccaagatcagttgtctgctcttagtttctctagcctagcagttatttttggtgctggacttgtaactagtttatctccttgtacactaagtgttctaccactaactctaggatatataggtgcatttggctcagggaaaagccgatccgaggttgttgggaattcaattgcattttcactaggactagcaacaaccttagccattcttggtgttgctgcttcttttgctggaaaggcttatggtcaggtaggacaagggctcccagtggctgcttccggtttggccattatcatgggattgaaccttctggaggtacttgaattgcaacttccctcatttttcagcgattttgaccctcgcgctgctgcagctaacctcccttcaggtgtacaagcataccttgctggtcttacatttgcattggcagcatcaccttgcagcacacctgttcttgctacccttctgggatatgtcgccacttcaagagacccaattattggaggaagtttattgttgacatacacaacgggctatgttgcgcctcttcttattgcagcttcatttgctggagcactgcagagtttgttgtcattcagaagatattcggcatggataaacccaatcagtggtgcatttctacttggtggaggtgtttataccctactggacagggtgtttccagcaacatcaatggccatgtagaccatcgttggacaagaattgataggcaccagtctgtttggcgtgcgaatgatatttggatgtgaagtagtgaaatgatggcaacaaagtttagccagatctctcagcgttgtataggcacgcaggacattttgatcgggacaagcaaagcaccttgacctaagtacagtagtctgcatcactgtatctgtatgggcctcgatacttggggccggtctaccctactaaaatgtatttctgggacagattgaaagagtatgaaatccatataagggtttgttcgttcc

SEQ ID NO: 29945 - protein, 427 aa, Zea mays subsp. mays
  peptide (1)..(427): Ceres Seq. ID no. 12344355
  misc_feature (209)..(416): Pfam Name: Pfam Description:  Cytochrome C biogenesis protein transmembrane region
  misc_feature (117)..(427): NCBI GI NO: 27464261 NR Description: biogenesis protein
  misc_feature (149)..(427): NCBI GI NO: 27464259 NR Description: biogenesis protein [Lotus japonicus]
  misc_feature (123)..(427): NCBI GI NO: 15239604 NR Description: cytochrome c biogenesis protein precursor
  misc_feature (149)..(427): NCBI GI NO: 32402380 NR Description: c-type cytochrome biogenesis protein [Glycine max]
  misc_feature (123)..(427): NCBI GI NO: 21592806 NR Description: cytochrome c biogenesis protein precursor
  misc_feature (123)..(427): NCBI GI NO: 15292991 NR Description: putative cytochrome c biogenesis protein precursor
  misc_feature (149)..(427): NCBI GI NO: 27464263 NR Description: biogenesis protein [Medicago truncatula]
  misc_feature (135)..(422): NCBI GI NO: 20153422 NR Description: putative c-type cytochrome biogenesis protein
  misc_feature (190)..(419): NCBI GI NO: 17230614 NR Description: putative c-type cytochrome biogenesis protein CcdA
  misc_feature (183)..(419): NCBI GI NO: 23127010 NR Description: hypothetical protein [Nostoc punctiforme]
TGMGAMGIVVRAWAPPALAAAAAPAPSGSRDTGQAQRRSKPSRTGRVRVLGGTGRVGGSTATALSKLRPKLGILVGGRNREKGESIAAKLGGQSEFVQVDTRNTGMLEEALQVVAVRGVAKPEAAATPARRSRPIPLASVAVWSLVATGAANAAELWDPLALHGSSGLVLADLGIGDWFGGLLFSAGQQANEAVQDQLSALSFSSLAVIFGAGLVTSLSPCTLSVLPLTLGYIGAFGSGKSRSEVVGNSIAFSLGLATTLAILGVAASFAGKAYGQVGQGLPVAASGLAIIMGLNLLEVLELQLPSFFSDFDPRAAAANLPSGVQAYLAGLTFALAASPCSTPVLATLLGYVATSRDPIIGGSLLLTYTTGYVAPLLIAASFAGALQSLLSFRRYSAWINPISGAFLLGGGVYTLLDRVFPATSMAM

SEQ ID NO: 29946 - protein, 425 aa, Zea mays subsp. mays
  peptide (1)..(425): Ceres Seq. ID no. 12344356
  misc_feature (207)..(414): Pfam Name: Pfam Description:  Cytochrome C biogenesis protein transmembrane region
  misc_feature (115)..(425): NCBI GI NO: 27464261 NR Description: biogenesis protein
  misc_feature (147)..(425): NCBI GI NO: 27464259 NR Description: biogenesis protein [Lotus japonicus]
  misc_feature (121)..(425): NCBI GI NO: 15239604 NR Description: cytochrome c biogenesis protein precursor
  misc_feature (147)..(425): NCBI GI NO: 32402380 NR Description: c-type cytochrome biogenesis protein [Glycine max]
  misc_feature (121)..(425): NCBI GI NO: 21592806 NR Description: cytochrome c biogenesis protein precursor
  misc_feature (121)..(425): NCBI GI NO: 15292991 NR Description: putative cytochrome c biogenesis protein precursor
  misc_feature (147)..(425): NCBI GI NO: 27464263 NR Description: biogenesis protein [Medicago truncatula]
  misc_feature (133)..(420): NCBI GI NO: 20153422 NR Description: putative c-type cytochrome biogenesis protein
  misc_feature (188)..(417): NCBI GI NO: 17230614 NR Description: putative c-type cytochrome biogenesis protein CcdA
  misc_feature (181)..(417): NCBI GI NO: 23127010 NR Description: hypothetical protein [Nostoc punctiforme]
MGAMGIVVRAWAPPALAAAAAPAPSGSRDTGQAQRRSKPSRTGRVRVLGGTGRVGGSTATALSKLRPKLGILVGGRNREKGESIAAKLGGQSEFVQVDTRNTGMLEEALQVVAVRGVAKPEAAATPARRSRPIPLASVAVWSLVATGAANAAELWDPLALHGSSGLVLADLGIGDWFGGLLFSAGQQANEAVQDQLSALSFSSLAVIFGAGLVTSLSPCTLSVLPLTLGYIGAFGSGKSRSEVVGNSIAFSLGLATTLAILGVAASFAGKAYGQVGQGLPVAASGLAIIMGLNLLEVLELQLPSFFSDFDPRAAAANLPSGVQAYLAGLTFALAASPCSTPVLATLLGYVATSRDPIIGGSLLLTYTTGYVAPLLIAASFAGALQSLLSFRRYSAWINPISGAFLLGGGVYTLLDRVFPATSMAM

SEQ ID NO: 29947 - protein, 422 aa, Zea mays subsp. mays
  peptide (1)..(422): Ceres Seq. ID no. 12344357
  misc_feature (204)..(411): Pfam Name: Pfam Description:  Cytochrome C biogenesis protein transmembrane region
  misc_feature (112)..(422): NCBI GI NO: 27464261 NR Description: biogenesis protein
  misc_feature (144)..(422): NCBI GI NO: 27464259 NR Description: biogenesis protein [Lotus japonicus]
  misc_feature (118)..(422): NCBI GI NO: 15239604 NR Description: cytochrome c biogenesis protein precursor
  misc_feature (144)..(422): NCBI GI NO: 32402380 NR Description: c-type cytochrome biogenesis protein [Glycine max]
  misc_feature (118)..(422): NCBI GI NO: 21592806 NR Description: cytochrome c biogenesis protein precursor
  misc_feature (118)..(422): NCBI GI NO: 15292991 NR Description: putative cytochrome c biogenesis protein precursor
  misc_feature (144)..(422): NCBI GI NO: 27464263 NR Description: biogenesis protein [Medicago truncatula]
  misc_feature (130)..(417): NCBI GI NO: 20153422 NR Description: putative c-type cytochrome biogenesis protein
  misc_feature (185)..(414): NCBI GI NO: 17230614 NR Description: putative c-type cytochrome biogenesis protein CcdA
  misc_feature (178)..(414): NCBI GI NO: 23127010 NR Description: hypothetical protein [Nostoc punctiforme]
MGIVVRAWAPPALAAAAAPAPSGSRDTGQAQRRSKPSRTGRVRVLGGTGRVGGSTATALSKLRPKLGILVGGRNREKGESIAAKLGGQSEFVQVDTRNTGMLEEALQVVAVRGVAKPEAAATPARRSRPIPLASVAVWSLVATGAANAAELWDPLALHGSSGLVLADLGIGDWFGGLLFSAGQQANEAVQDQLSALSFSSLAVIFGAGLVTSLSPCTLSVLPLTLGYIGAFGSGKSRSEVVGNSIAFSLGLATTLAILGVAASFAGKAYGQVGQGLPVAASGLAIIMGLNLLEVLELQLPSFFSDFDPRAAAANLPSGVQAYLAGLTFALAASPCSTPVLATLLGYVATSRDPIIGGSLLLTYTTGYVAPLLIAASFAGALQSLLSFRRYSAWINPISGAFLLGGGVYTLLDRVFPATSMAM

SEQ ID NO: 29948 - DNA, 473 bp, Zea mays subsp. mays
  misc_feature (1)..(473): Ceres Seq. ID no. 1424194
atcgattcttggcatcgcctctctctaaaccccaactcctcgactcgagcaatccctaggtctccgcgcgaggcgtggcggctgtgaggggattttgattgatttggctcgagatggcggaggacaaggtgcggcggatcttcgtcggcgggttgtcctggaagaccacggagcgcacgctcgagcgcaccttcggtcagtacggcaatgtcatcgaggcacaggttgtagtgaaaagggaaacaggccgctcgaggggatttggatttgtcacattctcagaacctcgggctgtggatgctgccattcgtggaatgcataatgcggaactggatggccgtaatatttctgtgaacaaagctcatcctaggattgctgacgatgactatggctatggtggtggtggtggtggtggttactcgtctggtgctagaggtggatatcgtagtggcggtgatgtagttccagcagtg

SEQ ID NO: 29949 - protein, 120 aa, Zea mays subsp. mays
  peptide (1)..(120): Ceres Seq. ID no. 1424195
  misc_feature (10)..(80): Pfam Name: a.k.a. RRM, RBD, or RNP domain Pfam Description: RNA recognition motif.
  misc_feature (1)..(119): NCBI GI NO: 33146923 NR Description: glycine-rich RNA-binding protein-like
  misc_feature (1)..(114): NCBI GI NO: 15226605 NR Description: glycine-rich RNA binding protein AtGRP7
  misc_feature (1)..(114): NCBI GI NO: 21553354 NR Description: glycine-rich RNA binding protein 7
  misc_feature (8)..(114): NCBI GI NO: 20152613 NR Description: putative glycine rich protein [Rumex obtusifolius]
  misc_feature (1)..(114): NCBI GI NO: 1346180 NR Description: Glycine-rich RNA-binding protein GRP1A
  misc_feature (1)..(114): NCBI GI NO: 2119042 NR Description: glycine-rich RNA-binding protein RGP-1a
  misc_feature (1)..(114): NCBI GI NO: 7439982 NR Description: RNA-binding glycine-rich protein-1
  misc_feature (1)..(114): NCBI GI NO: 2674201 NR Description: glycine-rich RNA-binding protein [Euphorbia esula]
  misc_feature (2)..(114): NCBI GI NO: 18103931 NR Description: glycine rich RNA binding protein [Oryza sativa]
  misc_feature (1)..(108): NCBI GI NO: 31712074 NR Description: putative RNA-binding protein
MAEDKVRRIFVGGLSWKTTERTLERTFGQYGNVIEAQVVVKRETGRSRGFGFVTFSEPRAVDAAIRGMHNAELDGRNISVNKAHPRIADDDYGYGGGGGGGYSSGARGGYRSGGDVVPAV

SEQ ID NO: 29950 - DNA, 1457 bp, Zea mays subsp. mays
  misc_feature (1)..(1457): Ceres Seq. ID no. 12352588
gaacgatttgggggaggaggtgttctattacacaaaagaggcaaaaaacaaaagccggtaacggaaaccctaatccccccaaatcccgaatccctctcgaatttctatttaatgttcctgttcttcccctccgatccgatgtccccaactgcgctcccgtcggcgatcaaacaccggatcgcggcactcgccgccgttgaggaggaggtttccggcgctgcttccagcgccttgccgtcagcaccatgaggaagaagctggacacgcgtttccccgctcctcggattaaaaagatcatgcaaacagatgaagacgtcggcaagattgctcaagctgtacctgttctagtgtccaaagcattggagctatttctgcaagatttatgtgataggacatatgatattacaattcggaagggggtcaagactgtgggttcttcccatttgaaacaatgcatacaaacgtacaacgtctatgacttcttgagggaagtagtcagcaaagttccagacattggtccttctgatgttattgctgatgataagcttggcaaaaggaggaaagccgaagaagatggaagtgaggaagaattgaagaggacaagaaatgagacagaaagctatacaagcaatggcagaggccgtgggagaggtcgtgggagaggtcgccgtggtgtacgtggagcttggcgggaggtggtcacaagtcctgagcaattcaaggaggagaatcaatctagcaaggtagccagcctaaaggtggaggtagcagatgaggtctcgaatgtaactgaagcaaaacaggacactacaccaatgagcaacgccaggccttccttaaggaacattgacttgaatttagatccaaccgatgaagaggatgaggttacagtgccaccccaaccccagctgtcagctccagcaactagttgcgatgcagccactgcagcacctggaccatctgttccacggttaagggaaggagcaaaactcaaggacttctttggtgcttgggaactggctgacatgaacaagatggagatggaccctgtccagtttgctctgtcaacaaaccatagattggaggaggacgaggattatgacaatgaagactagctccgccgttatatagcttcagagttgatgagtaggaatagcaggacaactgtaggttcagcttaactctgtagcagttctcatgtatcatatagccgccaaagctgccgatgtagcttataatgtcccagaggttaaggtcgtttgactagttgactgtaatgttctcaagttaggttctattagcagctattgctttcgcagatagtaccgtttgtacattccagttgctctccagttttatgttatctatccttctgctttcttggatagctgagacctgttggcggatgtatcatgtatggcaagttggcaacaaaaagcaagaaggctttcagattc

SEQ ID NO: 29951 - protein, 289 aa, Zea mays subsp. mays
  peptide (1)..(289): Ceres Seq. ID no. 12352589
  misc_feature (7)..(71): Pfam Name: CBF/NF-Y Pfam Description: Histone-like transcription factor
  misc_feature (1)..(288): NCBI GI NO: 30682195 NR Description: transcription factor Hap5a, putative
  misc_feature (1)..(288): NCBI GI NO: 12321975 NR Description: unknown protein; 69004-67516
  misc_feature (1)..(211): NCBI GI NO: 18481624 NR Description: repressor protein [Oryza sativa]
  misc_feature (1)..(197): NCBI GI NO: 18481626 NR Description: repressor protein [Zea mays]
  misc_feature (30)..(215): NCBI GI NO: 15239766 NR Description: putative protein; protein id: At5g19490.1
  misc_feature (2)..(134): NCBI GI NO: 28279647 NR Description: Similar to Dr1 associated protein 1
  misc_feature (2)..(112): NCBI GI NO: 21313424 NR Description: RIKEN cDNA 2310074H19 [Mus musculus]
  misc_feature (2)..(112): NCBI GI NO: 18426973 NR Description: DR1-associated protein 1
  misc_feature (2)..(172): NCBI GI NO: 10242351 NR Description: NC2alpha [Drosophila melanogaster]
  misc_feature (2)..(172): NCBI GI NO: 24657218 NR Description: CG10318-PA [Drosophila melanogaster]
MRKKLDTRFPAPRIKKIMQTDEDVGKIAQAVPVLVSKALELFLQDLCDRTYDITIRKGVKTVGSSHLKQCIQTYNVYDFLREVVSKVPDIGPSDVIADDKLGKRRKAEEDGSEEELKRTRNETESYTSNGRGRGRGRGRGRRGVRGAWREVVTSPEQFKEENQSSKVASLKVEVADEVSNVTEAKQDTTPMSNARPSLRNIDLNLDPTDEEDEVTVPPQPQLSAPATSCDAATAAPGPSVPRLREGAKLKDFFGAWELADMNKMEMDPVQFALSTNHRLEEDEDYDNED

SEQ ID NO: 29952 - protein, 272 aa, Zea mays subsp. mays
  peptide (1)..(272): Ceres Seq. ID no. 12352590
  misc_feature (1)..(54): Pfam Name: CBF/NF-Y Pfam Description: Histone-like transcription factor
  misc_feature (1)..(271): NCBI GI NO: 30682195 NR Description: transcription factor Hap5a, putative
  misc_feature (1)..(271): NCBI GI NO: 12321975 NR Description: unknown protein; 69004-67516
  misc_feature (1)..(194): NCBI GI NO: 18481624 NR Description: repressor protein [Oryza sativa]
  misc_feature (1)..(180): NCBI GI NO: 18481626 NR Description: repressor protein [Zea mays]
  misc_feature (13)..(198): NCBI GI NO: 15239766 NR Description: putative protein; protein id: At5g19490.1
  misc_feature (1)..(117): NCBI GI NO: 28279647 NR Description: Similar to Dr1 associated protein 1
  misc_feature (1)..(95): NCBI GI NO: 21313424 NR Description: RIKEN cDNA 2310074H19 [Mus musculus]
  misc_feature (1)..(95): NCBI GI NO: 18426973 NR Description: DR1-associated protein 1
  misc_feature (1)..(155): NCBI GI NO: 10242351 NR Description: NC2alpha [Drosophila melanogaster]
  misc_feature (1)..(155): NCBI GI NO: 24657218 NR Description: CG10318-PA [Drosophila melanogaster]
MQTDEDVGKIAQAVPVLVSKALELFLQDLCDRTYDITIRKGVKTVGSSHLKQCIQTYNVYDFLREVVSKVPDIGPSDVIADDKLGKRRKAEEDGSEEELKRTRNETESYTSNGRGRGRGRGRGRRGVRGAWREVVTSPEQFKEENQSSKVASLKVEVADEVSNVTEAKQDTTPMSNARPSLRNIDLNLDPTDEEDEVTVPPQPQLSAPATSCDAATAAPGPSVPRLREGAKLKDFFGAWELADMNKMEMDPVQFALSTNHRLEEDEDYDNED

SEQ ID NO: 29953 - DNA, 640 bp, Zea mays subsp. mays
  misc_feature (1)..(640): Ceres Seq. ID no. 12412545
tcactcgtcacatgcgctgacgcgcatccccccggcgtggcgtgcgctttgatctagctcttcttctcgaatccagcccgaggcctttttcttctgcggtttcatccgtacccatcctgcacacgaagcctagaatagccctcccctgctccgccacctcctcggatcccgaccaccccacccccaccccagacaacaggttgatggaggctaagatgggacgcttcttcgagtccgtgagcaatttcttcaccggaggcgaccacatcccctggtgcgaccgcgacctcatcgccggctgtgaaggagagcttgtcaatgctgtaaatgaggaacaaaggaatgaaagccttatgaggttgtcatgggcccttgtgcactccaggcagacagacgatgtaaaccgtggaatcagcatgcttcaagcttctttggataattctgccagtcctctgcagactagggaaaagctgtacttgttggctgttggattctacaggattggcgactactcaaaaagcaggcaacttgcagatcgttgtttggagattcaagcggattggcggcaggccatatcgctgaagaaggcaatagaagataaaattgccaaagatggtctgattggaataggaattgcgac

SEQ ID NO: 29954 - protein, 145 aa, Zea mays subsp. mays
  peptide (1)..(145): Ceres Seq. ID no. 12412546
  misc_feature (1)..(144): NCBI GI NO: 18410639 NR Description: expressed protein; protein id: At3g57090
  misc_feature (1)..(144): NCBI GI NO: 19386833 NR Description: B1147A04.28
  misc_feature (1)..(144): NCBI GI NO: 18416852 NR Description: putative protein; protein id: At5g12390.1
  misc_feature (34)..(144): NCBI GI NO: 32408377 NR Description: hypothetical protein [Neurospora crassa]
  misc_feature (54)..(144): NCBI GI NO: 27664028 NR Description: similar to RIKEN cDNA 2010003O14
  misc_feature (54)..(144): NCBI GI NO: 7705632 NR Description: CGI-135 protein [Homo sapiens]
  misc_feature (54)..(144): NCBI GI NO: 33112470 NR Description: Tetratricopeptide repeat protein 11
  misc_feature (54)..(144): NCBI GI NO: 33391189 NR Description: putative mitochondrial fission protein Tbfis1p
  misc_feature (54)..(144): NCBI GI NO: 40889302 NR Description: Chain A
  misc_feature (54)..(144): NCBI GI NO: 13384998 NR Description: RIKEN cDNA 2010003O14 [Mus musculus]
MEAKMGRFFESVSNFFTGGDHIPWCDRDLIAGCEGELVNAVNEEQRNESLMRLSWALVHSRQTDDVNRGISMLQASLDNSASPLQTREKLYLLAVGFYRIGDYSKSRQLADRCLEIQADWRQAISLKKAIEDKIAKDGLIGIGIA

SEQ ID NO: 29955 - protein, 141 aa, Zea mays subsp. mays
  peptide (1)..(141): Ceres Seq. ID no. 12412547
  misc_feature (1)..(140): NCBI GI NO: 18410639 NR Description: expressed protein; protein id: At3g57090
  misc_feature (1)..(140): NCBI GI NO: 19386833 NR Description: B1147A04.28
  misc_feature (1)..(140): NCBI GI NO: 18416852 NR Description: putative protein; protein id: At5g12390.1
  misc_feature (30)..(140): NCBI GI NO: 32408377 NR Description: hypothetical protein [Neurospora crassa]
  misc_feature (50)..(140): NCBI GI NO: 27664028 NR Description: similar to RIKEN cDNA 2010003O14
  misc_feature (50)..(140): NCBI GI NO: 7705632 NR Description: CGI-135 protein [Homo sapiens]
  misc_feature (50)..(140): NCBI GI NO: 33112470 NR Description: Tetratricopeptide repeat protein 11
  misc_feature (50)..(140): NCBI GI NO: 33391189 NR Description: putative mitochondrial fission protein Tbfis1p
  misc_feature (50)..(140): NCBI GI NO: 40889302 NR Description: Chain A
  misc_feature (50)..(140): NCBI GI NO: 13384998 NR Description: RIKEN cDNA 2010003O14 [Mus musculus]
MGRFFESVSNFFTGGDHIPWCDRDLIAGCEGELVNAVNEEQRNESLMRLSWALVHSRQTDDVNRGISMLQASLDNSASPLQTREKLYLLAVGFYRIGDYSKSRQLADRCLEIQADWRQAISLKKAIEDKIAKDGLIGIGIA

SEQ ID NO: 29956 - protein, 95 aa, Zea mays subsp. mays
  peptide (1)..(95): Ceres Seq. ID no. 12412548
  misc_feature (1)..(94): NCBI GI NO: 18410639 NR Description: expressed protein; protein id: At3g57090
  misc_feature (1)..(94): NCBI GI NO: 19386833 NR Description: B1147A04.28
  misc_feature (1)..(94): NCBI GI NO: 18416852 NR Description: putative protein; protein id: At5g12390.1
  misc_feature (1)..(94): NCBI GI NO: 32408377 NR Description: hypothetical protein [Neurospora crassa]
  misc_feature (4)..(94): NCBI GI NO: 27664028 NR Description: similar to RIKEN cDNA 2010003O14
  misc_feature (4)..(94): NCBI GI NO: 7705632 NR Description: CGI-135 protein [Homo sapiens]
  misc_feature (4)..(94): NCBI GI NO: 33112470 NR Description: Tetratricopeptide repeat protein 11
  misc_feature (4)..(94): NCBI GI NO: 33391189 NR Description: putative mitochondrial fission protein Tbfis1p
  misc_feature (4)..(94): NCBI GI NO: 40889302 NR Description: Chain A
  misc_feature (4)..(94): NCBI GI NO: 13384998 NR Description: RIKEN cDNA 2010003O14 [Mus musculus]
MRLSWALVHSRQTDDVNRGISMLQASLDNSASPLQTREKLYLLAVGFYRIGDYSKSRQLADRCLEIQADWRQAISLKKAIEDKIAKDGLIGIGIA

SEQ ID NO: 29957 - DNA, 1246 bp, Zea mays subsp. mays
  misc_feature (1)..(1246): Ceres Seq. ID no. 12358706
aaaaaaccctatttcatgtgacgtgaacccctttcgctcgctccgagtgcggaggaaggggagctcgacgcacccaagtcgcccgcccacggaacgcgccgccgccgccgccgccatcacatcacagaggcctcgccgtcgtctcggatattccccgccgtaggaccagtttccctccagctgccggagaccatgtcgggcggcctggacatgtccctggacgacctcatcaagcagtccaagtcccgacccaaggacagcccggcgtccttgtcggggcctgcccgccgcgcgccacaccccgcccgcgccgcgccctacccaccggccgctcccaaggcccgtgccgccgccgactcgccctacggggtctactccaagcacatcgccgcgatagcgccgcccccgctggccaaagcaaggtcgcttgagacgggaacgaagctgcacatctccaaccttgactccggcgtcaccatcgaggatgtccaggaactcttctcagaagttggggagctcaagcgttattctatgaattatgacaaggatgggagatctaaggggactgtggaagttgtctttgcaaggaaagtggatgctttggatgctatcaagagatacaatggtgttctacttgatgggaagccaatgaatctagagctcattggaaacaatgtcgaaccacctcccatgccaccagtaatacacagtcgtcctttgcagaactataatgatatccatagcagtatgcctcaatcccaaagaggtggtcagcgaagagtaccccaaggcaacggtcggggtggacgcagtagtcaaagcagtggtggccggggacaggggaaaggccgaggccaggaccggaatcgcaccaccatttctgctgcagatcttgacgccgaacttgacaagtaccatgcagcggcagtgaaggaggaatgaggctctggcgttctgtttactaaacagctggtaaggcgccgggacagtgtggccttctgctttagaagcatgaagtttgctatcttagtcctagtgttttatgctagaaattttttttggcccatgtacaaccgcgtctctgcgtcaagattcctggtgttttatgtgtagcatgaagttgtggtcctactttgcaggaactatcaatcatatttacagctctgcgggcacgattgagaacaattggaaactaaggggtgtttggtttgaagagtcaatccattctagatgagttggtgaaatc

SEQ ID NO: 29958 - protein, 249 aa, Zea mays subsp. mays
  peptide (1)..(249): Ceres Seq. ID no. 12358707
  misc_feature (1)..(179): NCBI GI NO: 34900544 NR Description: P0565A07.3
  misc_feature (192)..(249): NCBI GI NO: 34900544 NR Description: P0565A07.3
  misc_feature (1)..(220): NCBI GI NO: 33146678 NR Description: putative RNA and export factor binding protein
  misc_feature (1)..(243): NCBI GI NO: 30697310 NR Description: RNA and export factor binding protein, putative
  misc_feature (1)..(243): NCBI GI NO: 30697313 NR Description: RNA and export factor binding protein, putative
  misc_feature (1)..(243): NCBI GI NO: 9757916 NR Description: RNA and export factor binding protein 2-I-likeprotein
  misc_feature (1)..(206): NCBI GI NO: 30693141 NR Description: RNA and export factor binding protein, putative
  misc_feature (189)..(246): NCBI GI NO: 30693141 NR Description: RNA and export factor binding protein, putative
  misc_feature (1)..(243): NCBI GI NO: 21555029 NR Description: transcriptional coactivator-like protein
  misc_feature (26)..(247): NCBI GI NO: 11358209 NR Description: hypothetical protein T22P11
MSGGLDMSLDDLIKQSKSRPKDSPASLSGPARRAPHPARAAPYPPAAPKARAAADSPYGVYSKHIAAIAPPPLAKARSLETGTKLHISNLDSGVTIEDVQELFSEVGELKRYSMNYDKDGRSKGTVEVVFARKVDALDAIKRYNGVLLDGKPMNLELIGNNVEPPPMPPVIHSRPLQNYNDIHSSMPQSQRGGQRRVPQGNGRGGRSSQSSGGRGQGKGRGQDRNRTTISAADLDAELDKYHAAAVKEE

SEQ ID NO: 29959 - protein, 243 aa, Zea mays subsp. mays
  peptide (1)..(243): Ceres Seq. ID no. 12358708
  misc_feature (1)..(173): NCBI GI NO: 34900544 NR Description: P0565A07.3
  misc_feature (186)..(243): NCBI GI NO: 34900544 NR Description: P0565A07.3
  misc_feature (1)..(214): NCBI GI NO: 33146678 NR Description: putative RNA and export factor binding protein
  misc_feature (1)..(237): NCBI GI NO: 30697310 NR Description: RNA and export factor binding protein, putative
  misc_feature (1)..(237): NCBI GI NO: 30697313 NR Description: RNA and export factor binding protein, putative
  misc_feature (1)..(237): NCBI GI NO: 9757916 NR Description: RNA and export factor binding protein 2-I-likeprotein
  misc_feature (1)..(200): NCBI GI NO: 30693141 NR Description: RNA and export factor binding protein, putative
  misc_feature (183)..(240): NCBI GI NO: 30693141 NR Description: RNA and export factor binding protein, putative
  misc_feature (1)..(237): NCBI GI NO: 21555029 NR Description: transcriptional coactivator-like protein
  misc_feature (20)..(241): NCBI GI NO: 11358209 NR Description: hypothetical protein T22P11
MSLDDLIKQSKSRPKDSPASLSGPARRAPHPARAAPYPPAAPKARAAADSPYGVYSKHIAAIAPPPLAKARSLETGTKLHISNLDSGVTIEDVQELFSEVGELKRYSMNYDKDGRSKGTVEVVFARKVDALDAIKRYNGVLLDGKPMNLELIGNNVEPPPMPPVIHSRPLQNYNDIHSSMPQSQRGGQRRVPQGNGRGGRSSQSSGGRGQGKGRGQDRNRTTISAADLDAELDKYHAAAVKEE

SEQ ID NO: 29960 - protein, 136 aa, Zea mays subsp. mays
  peptide (1)..(136): Ceres Seq. ID no. 12358709
  misc_feature (1)..(66): NCBI GI NO: 34900544 NR Description: P0565A07.3
  misc_feature (79)..(136): NCBI GI NO: 34900544 NR Description: P0565A07.3
  misc_feature (1)..(107): NCBI GI NO: 33146678 NR Description: putative RNA and export factor binding protein
  misc_feature (1)..(130): NCBI GI NO: 30697310 NR Description: RNA and export factor binding protein, putative
  misc_feature (1)..(130): NCBI GI NO: 30697313 NR Description: RNA and export factor binding protein, putative
  misc_feature (1)..(130): NCBI GI NO: 9757916 NR Description: RNA and export factor binding protein 2-I-likeprotein
  misc_feature (1)..(93): NCBI GI NO: 30693141 NR Description: RNA and export factor binding protein, putative
  misc_feature (76)..(133): NCBI GI NO: 30693141 NR Description: RNA and export factor binding protein, putative
  misc_feature (1)..(130): NCBI GI NO: 21555029 NR Description: transcriptional coactivator-like protein
  misc_feature (1)..(134): NCBI GI NO: 11358209 NR Description: hypothetical protein T22P11
MNYDKDGRSKGTVEVVFARKVDALDAIKRYNGVLLDGKPMNLELIGNNVEPPPMPPVIHSRPLQNYNDIHSSMPQSQRGGQRRVPQGNGRGGRSSQSSGGRGQGKGRGQDRNRTTISAADLDAELDKYHAAAVKEE

SEQ ID NO: 29961 - DNA, 1619 bp, Zea mays subsp. mays
  misc_feature (1)..(1619): Ceres Seq. ID no. 13498683
taatcgaaaaaacaaaactgcaattatctcagtctccttcaaacaactgttttttccattgttagactcaaagcctatccccttcacggagctcgccaagcgctatgggggacgccaacggcggcagtatgcacgttgtgatgctgccatggctggcgttcggccacatcctccccttcacggagctcgccaagcgcatagctaggcagggccaccgggtcaccctcttctccacgccaagaaacacccggcggttaatccgcatccctccagaactcgcggggcatatccgcgtcgtggacatcgcgctgccgcgcgtggagcgcctgccggaggactgcgaggcgagcatagacctgccatccgacgacctccgcccgtacctccgcgtagcctacgacgccgccttcgccgacaaactctcggccatcctgcaggagccgcggccggagaggccggactgggttctcatcgactacgccgcgtactgggcgcccgcggccgcggcgaggcacggcgtgccgtgcgccttcctgagcctgttcggcgccgcgaccctcagtttctatgggcccccggaggggctcatgggacgcggcaagtacgccaggacgaagccggaggacctcaccgtagtacccgactacgtgccgttcccaacaaccgtcgcgcaccgcggcttcgaggcgcgcgagctattcaagccaggccttgtcccggacgactccggcgtgtcggagggccacaggttcggcgtgtccatcggagagagccagatcgtaggcatcaggagcagaacagagctcgagtcggagtggctgcaggtgcttggcaagctctacaagaagccggtgatcccgatcggcctgttccctccgccgcccacgcaagacatcgccggccacgaggcgactttgcggtggctggacagacaggctcagggctccgtcgtgtacgcggccttcggcagcgaggcgaagctgacgagcgcgcagctccaaacaattgcgctaggtttggaggcttccggcctgccgttcctctgggcattcaggccgccaaccgacgccgcaccaggacaaggcacgggcgggttgcccgaaggcttcaaggagcgtgtcaatggccggggattggtctgccgcggctgggtgcctcaacccaggctgttggctcatgaatcggttggtgggtttctgacccacgccggctggaactccatcgccgaaggcctctcgcggggcgtcacgatggtgctgttgccgctgatgttcgatcagggcctcaacgccaggcttcttgtggataagaagatcgggattgaggtggagagggacgaagacgacggcacgttcgcgcccaaagacatcgcggatgctctgaggacggccatggcggagaaccaagacgggactagggtcaaggaactggccgaggtgtttggaaatgacgaggccaatgatcagtgcctgcgagatttcctccggtatctgttagaatacatcaggcagcatcaaggttagttccagtccatttcgaggctaatgttaatgcagaaaagggcaaagaaatggtagtgagtcacgtcacgctatcaaaaaaaaaaaatccttccaggt

SEQ ID NO: 29962 - protein, 472 aa, Zea mays subsp. mays
  peptide (1)..(472): Ceres Seq. ID no. 13498684
  misc_feature (10)..(469): Pfam Name: Pfam Description:  UDP-glucoronosyl and UDP-glucosyl transferase
  misc_feature (2)..(472): NCBI GI NO: 34908562 NR Description: putative anthocyanidine rhamnosyl-transferase
  misc_feature (3)..(464): NCBI GI NO: 15450577 NR Description: At2g22590/T9I22.3 [Arabidopsis thaliana]
  misc_feature (5)..(466): NCBI GI NO: 20149064 NR Description: putative anthocyanidine rhamnosyl-transferase
  misc_feature (3)..(464): NCBI GI NO: 18400022 NR Description: glycosyltransferase family [Arabidopsis thaliana]
  misc_feature (1)..(463): NCBI GI NO: 15240534 NR Description: UDP-glycosyltransferase family
  misc_feature (9)..(454): NCBI GI NO: 34393985 NR Description: putative UDP-glucosyltransferase
  misc_feature (1)..(463): NCBI GI NO: 21435782 NR Description: UDP-glucosyltransferase [Stevia rebaudiana]
  misc_feature (1)..(260): NCBI GI NO: 34393978 NR Description: putative UDP-glucosyltransferase
  misc_feature (271)..(466): NCBI GI NO: 34393978 NR Description: putative UDP-glucosyltransferase
  misc_feature (9)..(463): NCBI GI NO: 15238503 NR Description: UDP-glycosyltransferase family
MGDANGGSMHVVMLPWLAFGHILPFTELAKRIARQGHRVTLFSTPRNTRRLIRIPPELAGHIRVVDIALPRVERLPEDCEASIDLPSDDLRPYLRVAYDAAFADKLSAILQEPRPERPDWVLIDYAAYWAPAAAARHGVPCAFLSLFGAATLSFYGPPEGLMGRGKYARTKPEDLTVVPDYVPFPTTVAHRGFEARELFKPGLVPDDSGVSEGHRFGVSIGESQIVGIRSRTELESEWLQVLGKLYKKPVIPIGLFPPPPTQDIAGHEATLRWLDRQAQGSVVYAAFGSEAKLTSAQLQTIALGLEASGLPFLWAFRPPTDAAPGQGTGGLPEGFKERVNGRGLVCRGWVPQPRLLAHESVGGFLTHAGWNSIAEGLSRGVTMVLLPLMFDQGLNARLLVDKKIGIEVERDEDDGTFAPKDIADALRTAMAENQDGTRVKELAEVFGNDEANDQCLRDFLRYLLEYIRQHQG

SEQ ID NO: 29963 - protein, 464 aa, Zea mays subsp. mays
  peptide (1)..(464): Ceres Seq. ID no. 13498685
  misc_feature (2)..(461): Pfam Name: Pfam Description:  UDP-glucoronosyl and UDP-glucosyl transferase
  misc_feature (1)..(464): NCBI GI NO: 34908562 NR Description: putative anthocyanidine rhamnosyl-transferase
  misc_feature (1)..(456): NCBI GI NO: 15450577 NR Description: At2g22590/T9I22.3 [Arabidopsis thaliana]
  misc_feature (1)..(458): NCBI GI NO: 20149064 NR Description: putative anthocyanidine rhamnosyl-transferase
  misc_feature (1)..(456): NCBI GI NO: 18400022 NR Description: glycosyltransferase family [Arabidopsis thaliana]
  misc_feature (1)..(455): NCBI GI NO: 15240534 NR Description: UDP-glycosyltransferase family
  misc_feature (1)..(446): NCBI GI NO: 34393985 NR Description: putative UDP-glucosyltransferase
  misc_feature (1)..(455): NCBI GI NO: 21435782 NR Description: UDP-glucosyltransferase [Stevia rebaudiana]
  misc_feature (1)..(252): NCBI GI NO: 34393978 NR Description: putative UDP-glucosyltransferase
  misc_feature (263)..(458): NCBI GI NO: 34393978 NR Description: putative UDP-glucosyltransferase
  misc_feature (1)..(455): NCBI GI NO: 15238503 NR Description: UDP-glycosyltransferase family
MHVVMLPWLAFGHILPFTELAKRIARQGHRVTLFSTPRNTRRLIRIPPELAGHIRVVDIALPRVERLPEDCEASIDLPSDDLRPYLRVAYDAAFADKLSAILQEPRPERPDWVLIDYAAYWAPAAAARHGVPCAFLSLFGAATLSFYGPPEGLMGRGKYARTKPEDLTVVPDYVPFPTTVAHRGFEARELFKPGLVPDDSGVSEGHRFGVSIGESQIVGIRSRTELESEWLQVLGKLYKKPVIPIGLFPPPPTQDIAGHEATLRWLDRQAQGSVVYAAFGSEAKLTSAQLQTIALGLEASGLPFLWAFRPPTDAAPGQGTGGLPEGFKERVNGRGLVCRGWVPQPRLLAHESVGGFLTHAGWNSIAEGLSRGVTMVLLPLMFDQGLNARLLVDKKIGIEVERDEDDGTFAPKDIADALRTAMAENQDGTRVKELAEVFGNDEANDQCLRDFLRYLLEYIRQHQG

SEQ ID NO: 29964 - protein, 460 aa, Zea mays subsp. mays
  peptide (1)..(460): Ceres Seq. ID no. 13498686
  misc_feature (1)..(457): Pfam Name: Pfam Description:  UDP-glucoronosyl and UDP-glucosyl transferase
  misc_feature (1)..(460): NCBI GI NO: 34908562 NR Description: putative anthocyanidine rhamnosyl-transferase
  misc_feature (1)..(452): NCBI GI NO: 15450577 NR Description: At2g22590/T9I22.3 [Arabidopsis thaliana]
  misc_feature (1)..(454): NCBI GI NO: 20149064 NR Description: putative anthocyanidine rhamnosyl-transferase
  misc_feature (1)..(452): NCBI GI NO: 18400022 NR Description: glycosyltransferase family [Arabidopsis thaliana]
  misc_feature (1)..(451): NCBI GI NO: 15240534 NR Description: UDP-glycosyltransferase family
  misc_feature (1)..(442): NCBI GI NO: 34393985 NR Description: putative UDP-glucosyltransferase
  misc_feature (1)..(451): NCBI GI NO: 21435782 NR Description: UDP-glucosyltransferase [Stevia rebaudiana]
  misc_feature (1)..(248): NCBI GI NO: 34393978 NR Description: putative UDP-glucosyltransferase
  misc_feature (259)..(454): NCBI GI NO: 34393978 NR Description: putative UDP-glucosyltransferase
  misc_feature (1)..(451): NCBI GI NO: 15238503 NR Description: UDP-glycosyltransferase family
MLPWLAFGHILPFTELAKRIARQGHRVTLFSTPRNTRRLIRIPPELAGHIRVVDIALPRVERLPEDCEASIDLPSDDLRPYLRVAYDAAFADKLSAILQEPRPERPDWVLIDYAAYWAPAAAARHGVPCAFLSLFGAATLSFYGPPEGLMGRGKYARTKPEDLTVVPDYVPFPTTVAHRGFEARELFKPGLVPDDSGVSEGHRFGVSIGESQIVGIRSRTELESEWLQVLGKLYKKPVIPIGLFPPPPTQDIAGHEATLRWLDRQAQGSVVYAAFGSEAKLTSAQLQTIALGLEASGLPFLWAFRPPTDAAPGQGTGGLPEGFKERVNGRGLVCRGWVPQPRLLAHESVGGFLTHAGWNSIAEGLSRGVTMVLLPLMFDQGLNARLLVDKKIGIEVERDEDDGTFAPKDIADALRTAMAENQDGTRVKELAEVFGNDEANDQCLRDFLRYLLEYIRQHQG

SEQ ID NO: 29965 - DNA, 924 bp, Zea mays subsp. mays
  misc_feature (1)..(924): Ceres Seq. ID no. 12367187
agtttttcatgggctgacccggttatgtggccttgttagttttcgcctaatttcaaataacagcaatttcttagtggcccgtacactctgcagcagtgcggtgcgggcgtgcggcctccctttttttctccagttcctccggcggcggcgtgcttggcggtgcgccaggtgcccagatctccaccatcttagtcgccggcgacgagcatcaccaggttcccgatgaccatggcgcagcgcacgatgtgcctgcttcggcggtccattgggtttacagcgccgcaggcacagagagccctgagtaccactgccgcaccagcggcggagggtgcggccgtggctgaagctacggcgaaggaggcgaagaggaggaggaagaatctgtttgacgtagtgcagttcctgccagagtggggcattggatacaaggttgccaagaccacctggcgtgacgtctcctatcagatcaccaagatcaacctgtacaaggatggtcggcatggaaaggcgtgggggcttcggtacaaggcaggtgtgcaagctgcagacaccccaactaggatcagcggtgttaacaaacgtgggtggaagtacataaaagaatcacagaagaaactacaagaagcccccaaagtagacgtagctgttgctgctgcctagttcgtagttacatgcatgtttgttgtaagatgattcggtaaatctttagatggctgttgccagggtgagaacagggaaccacttttttttggatcgactctatacttttttgtcgatgacgactgaacctctctgcaacatgtccagtttcttttcttttccttatggaacgaacctttaccgtaatgtactgatgcagaagaactgcgttgattgtggcgatctagttttcattcaaacgcaagccttgtttcattctgagcc

SEQ ID NO: 29966 - protein, 145 aa, Zea mays subsp. mays
  peptide (1)..(145): Ceres Seq. ID no. 12367188
  misc_feature (8)..(143): NCBI GI NO: 15237795 NR Description: putative protein; protein id: At5g58990
  misc_feature (8)..(143): NCBI GI NO: 18423383 NR Description: expressed protein; protein id: At5g52370
MTMAQRTMCLLRRSIGFTAPQAQRALSTTAAPAAEGAAVAEATAKEAKRRRKNLFDVVQFLPEWGIGYKVAKTTWRDVSYQITKINLYKDGRHGKAWGLRYKAGVQAADTPTRISGVNKRGWKYIKESQKKLQEAPKVDVAVAAA

SEQ ID NO: 29967 - protein, 143 aa, Zea mays subsp. mays
  peptide (1)..(143): Ceres Seq. ID no. 12367189
  misc_feature (6)..(141): NCBI GI NO: 15237795 NR Description: putative protein; protein id: At5g58990
  misc_feature (6)..(141): NCBI GI NO: 18423383 NR Description: expressed protein; protein id: At5g52370
MAQRTMCLLRRSIGFTAPQAQRALSTTAAPAAEGAAVAEATAKEAKRRRKNLFDVVQFLPEWGIGYKVAKTTWRDVSYQITKINLYKDGRHGKAWGLRYKAGVQAADTPTRISGVNKRGWKYIKESQKKLQEAPKVDVAVAAA

SEQ ID NO: 29968 - protein, 138 aa, Zea mays subsp. mays
  peptide (1)..(138): Ceres Seq. ID no. 12367190
  misc_feature (1)..(136): NCBI GI NO: 15237795 NR Description: putative protein; protein id: At5g58990
  misc_feature (1)..(136): NCBI GI NO: 18423383 NR Description: expressed protein; protein id: At5g52370
MCLLRRSIGFTAPQAQRALSTTAAPAAEGAAVAEATAKEAKRRRKNLFDVVQFLPEWGIGYKVAKTTWRDVSYQITKINLYKDGRHGKAWGLRYKAGVQAADTPTRISGVNKRGWKYIKESQKKLQEAPKVDVAVAAA

SEQ ID NO: 29969 - DNA, 1189 bp, Zea mays subsp. mays
  misc_feature (1)..(1189): Ceres Seq. ID no. 13498621
attatcgaccagcaccctcatctatatccatcaacatcgatccatccatccatcatggcggcggagcagcagcatcagctggatctgccggggttccggttccacccgacggaggaggagctgctggagttctacctgaagcaggcggcgcgcgggaggaagctcaagttcgacatcatccccacggtgcacctgtaccggcacgacccctgggagctgccgagcctggcgcgcgtcgttggcgagcgcgagtggtacttcttcgtgccccgcgacggcggcgggcgggcggccaagcagcagcccggctccggcggccggcctagccgcaccacggagcgcgggttctggaaggccacggggtcggaccgcgccgtgcggtgcgccgccgaccccaagcgcctcatcgggctcaagaagacgctcgtctactacgagggccgcgcgccgcggggcaccaagacggactgggtcatgaacgagtaccgcctccccgacgctgccgacgctagcagcgacgcgcgcgtgccgcaggtggacgtggtgctgtgcaaggtctaccgcaaggccgtgtcgctcaaggagctggagcagcgggtggccatggaggagctcgcgcgcgccaccgccacgccgtccgcgtcccacagcaccggctcccccgccgactccatgtcgtcgtcggagatcgtgatggtgcccgtgggcggcgtctcgctctcaccgtcagctgcgatgagcatgaagagagaggaggcggcgaagaatcagcagcagcaggaccccttcctgacgcagctgcggagcccacggatggagagctggtggtctgcctactacgccagcgtcctcaacttctaaccaaaatccacacaatccaacagctttatatgtaaagcgaaggcccacgctcacagtcgtcggcccaactgatgcccgtgcgccgcgcgctgggccgcacggcccaagagctaccaagcgcgggcacgcaccgcggcagcccaaggatctctccaccttatctccctgctcgggactcgggacctttacctatcttcttcgttcttccatgggagcgagctagagagagggcgccatggatcagcagcttctcgtggatgactccaatcatattaacgatatactaacttataatgtgccgatcgttgaacaccgtttattttgattc

SEQ ID NO: 29970 - protein, 286 aa, Zea mays subsp. mays
  peptide (1)..(286): Ceres Seq. ID no. 13498622
  misc_feature (29)..(165): Pfam Name: NAM Pfam Description: No apical meristem
  misc_feature (27)..(261): NCBI GI NO: 25411775 NR Description: NAM (no apical meristem)-like protein
  misc_feature (52)..(261): NCBI GI NO: 18398293 NR Description: No apical meristem (NAM) protein family
  misc_feature (20)..(189): NCBI GI NO: 30678000 NR Description: No apical meristem (NAM) protein family
  misc_feature (20)..(189): NCBI GI NO: 30678002 NR Description: No apical meristem (NAM) protein family
  misc_feature (20)..(165): NCBI GI NO: 25410986 NR Description: NAM (no apical meristem)-like protein
  misc_feature (22)..(231): NCBI GI NO: 40786563 NR Description: putative NAC-domain protein
  misc_feature (18)..(257): NCBI GI NO: 34897020 NR Description: putative NAM (no apical meristem) protein
  misc_feature (22)..(170): NCBI GI NO: 10177980 NR Description: NAM (no apical meristem)-like protein
  misc_feature (18)..(285): NCBI GI NO: 4218535 NR Description: GRAB1 protein [Triticum sp.]
  misc_feature (29)..(231): NCBI GI NO: 15223376 NR Description: No apical meristem (NAM) protein family
IIDQHPHLYPSTSIHPSIMAAEQQHQLDLPGFRFHPTEEELLEFYLKQAARGRKLKFDIIPTVHLYRHDPWELPSLARVVGEREWYFFVPRDGGGRAAKQQPGSGGRPSRTTERGFWKATGSDRAVRCAADPKRLIGLKKTLVYYEGRAPRGTKTDWVMNEYRLPDAADASSDARVPQVDVVLCKVYRKAVSLKELEQRVAMEELARATATPSASHSTGSPADSMSSSEIVMVPVGGVSLSPSAAMSMKREEAAKNQQQQDPFLTQLRSPRMESWWSAYYASVLNF

SEQ ID NO: 29971 - protein, 268 aa, Zea mays subsp. mays
  peptide (1)..(268): Ceres Seq. ID no. 13498623
  misc_feature (11)..(147): Pfam Name: NAM Pfam Description: No apical meristem
  misc_feature (9)..(243): NCBI GI NO: 25411775 NR Description: NAM (no apical meristem)-like protein
  misc_feature (34)..(243): NCBI GI NO: 18398293 NR Description: No apical meristem (NAM) protein family
  misc_feature (2)..(171): NCBI GI NO: 30678000 NR Description: No apical meristem (NAM) protein family
  misc_feature (2)..(171): NCBI GI NO: 30678002 NR Description: No apical meristem (NAM) protein family
  misc_feature (2)..(147): NCBI GI NO: 25410986 NR Description: NAM (no apical meristem)-like protein
  misc_feature (4)..(213): NCBI GI NO: 40786563 NR Description: putative NAC-domain protein
  misc_feature (1)..(239): NCBI GI NO: 34897020 NR Description: putative NAM (no apical meristem) protein
  misc_feature (4)..(152): NCBI GI NO: 10177980 NR Description: NAM (no apical meristem)-like protein
  misc_feature (1)..(267): NCBI GI NO: 4218535 NR Description: GRAB1 protein [Triticum sp.]
  misc_feature (11)..(213): NCBI GI NO: 15223376 NR Description: No apical meristem (NAM) protein family
MAAEQQHQLDLPGFRFHPTEEELLEFYLKQAARGRKLKFDIIPTVHLYRHDPWELPSLARVVGEREWYFFVPRDGGGRAAKQQPGSGGRPSRTTERGFWKATGSDRAVRCAADPKRLIGLKKTLVYYEGRAPRGTKTDWVMNEYRLPDAADASSDARVPQVDVVLCKVYRKAVSLKELEQRVAMEELARATATPSASHSTGSPADSMSSSEIVMVPVGGVSLSPSAAMSMKREEAAKNQQQQDPFLTQLRSPRMESWWSAYYASVLNF

SEQ ID NO: 29972 - DNA, 1672 bp, Zea mays subsp. mays
  misc_feature (1)..(1672): Ceres Seq. ID no. 12367459
gcactccgcaattccgcatcacgcaccccaccccaccgcccgcaaccgcaagctcagattccctcccaccccaccccaccgtcccgctcactccagcccagcccgcgtccccacagcccagcgacagcgagcaccggcggcatccagccatgtgcggcggcgccatcctgtcggacatcatcccgccgccgccgccgcggcgtgtcacggcgggccacctctggcccgagagcaagaagccgaggagggctgcagccggcaggaggagagcccccgtggagcaggagcaggaggaggatttcgaggccgacttcgaggagttcgaggtggagtccggcgagtcggagctcgagtccgaggacgagcccaagcccaagcccttcgccgcccccagcagcgcgctcgccagaggtggactaaacactggtgcagctggtgtcgatggccctgctgcaaattcagttaaaaggaagaggaagaaccagttcaggggtatccgccggcgcccgtggggcaaatgggctgctgagatcagagatcctcgcaagggcgtgcgcgtctggctcggtacattcaactctcccgaagaagctgccagagcttacgacgccgaggcacgcaggatccgcggcaagaaggctaaagtcaacttcccggatgaggttcctacggcggtttctcagaagcgccgtgctgctgggcttgcctctctgaaagcgcctaagatggacgttgaggaggagaagccgatcatcaagctcgcagtgaacaatatgaccaactcaaacgcatatcactaccctgccgtcgtcggccaccacaacatcatacccgagccattcatgcagactcagaacatgccattcgctcctctggtgaattatgctgccctcgtgaacctgtcttcacaccaaggcagcaactcgttcggttgctcggacttcagcctcgagaacgactccaggacccctgacataacttcggtgcctgcgcccgttgccaccttggccgccgttggagagtctgcgttcgtccagaacacggccggccatgctgtggcgcctcctgcgacggggaacactggtgttgatctcgctgagttggagccgtatatggatttcctgatggacggtggttcagacgactcgatcagcactctcttgagctgtgatggatcccaggacgtggtcagcaacatggacctttggagcttcgacgacatgcccatgtctgctggtttctactgaggctgaggcccagcgactggtgcttgactgcttgtgtacatagggggggacaaagggtaagagcctgcagtaacagagattggctctttctggtacttgcaatttctatcccttcaactctttcttccgcccccgtgtttcaggaataatgttctggagatgaagaatcgcttgcgtgggcgtgcctgcaggcacgcgtgtagtagctgcggtattagtatatatgcttagatgttcagtcactttctttaagtacaatttggcgctggacatgtaccttattttactatgtatccgtgacaacagctatgtgtctgctccttttattttcttgtctttgcttcaaaaaaatggctctgaacattgcgagtttgtactttgtagacaatatatatatatgtgtgtgtatgtgcttggtttgcttc

SEQ ID NO: 29973 - protein, 414 aa, Zea mays subsp. mays
  peptide (1)..(414): Ceres Seq. ID no. 12367460
  misc_feature (159)..(222): Pfam Name: Pfam Description:  AP2 domain
  misc_feature (50)..(414): NCBI GI NO: 6176534 NR Description: EREBP-like protein [Oryza sativa]
  misc_feature (50)..(414): NCBI GI NO: 6689918 NR Description: transcription factor EREBP1 [Oryza sativa]
  misc_feature (50)..(414): NCBI GI NO: 24940524 NR Description: ethylene response element binding protein
  misc_feature (50)..(414): NCBI GI NO: 30525872 NR Description: ethylene-responsive element binding protein
  misc_feature (84)..(414): NCBI GI NO: 30525870 NR Description: ethylene-responsive element binding protein
  misc_feature (50)..(412): NCBI GI NO: 38343926 NR Description: ethylene transcription factor [Fagus sylvatica]
  misc_feature (50)..(412): NCBI GI NO: 18496063 NR Description: ethylene responsive element binding protein
  misc_feature (50)..(414): NCBI GI NO: 33331083 NR Description: ethylene responsive protein [Glycine max]
  misc_feature (66)..(414): NCBI GI NO: 19880313 NR Description: putative EREBP-type transcription factor
  misc_feature (50)..(412): NCBI GI NO: 22074046 NR Description: transcription factor JERF1
TPQFRITHPTPPPATASSDSLPPHPTVPLTPAQPASPQPSDSEHRRHPAMCGGAILSDIIPPPPPRRVTAGHLWPESKKPRRAAAGRRRAPVEQEQEEDFEADFEEFEVESGESELESEDEPKPKPFAAPSSALARGGLNTGAAGVDGPAANSVKRKRKNQFRGIRRRPWGKWAAEIRDPRKGVRVWLGTFNSPEEAARAYDAEARRIRGKKAKVNFPDEVPTAVSQKRRAAGLASLKAPKMDVEEEKPIIKLAVNNMTNSNAYHYPAVVGHHNIIPEPFMQTQNMPFAPLVNYAALVNLSSHQGSNSFGCSDFSLENDSRTPDITSVPAPVATLAAVGESAFVQNTAGHAVAPPATGNTGVDLAELEPYMDFLMDGGSDDSISTLLSCDGSQDVVSNMDLWSFDDMPMSAGFY

SEQ ID NO: 29974 - protein, 365 aa, Zea mays subsp. mays
  peptide (1)..(365): Ceres Seq. ID no. 12367461
  misc_feature (110)..(173): Pfam Name: Pfam Description:  AP2 domain
  misc_feature (1)..(365): NCBI GI NO: 6176534 NR Description: EREBP-like protein [Oryza sativa]
  misc_feature (1)..(365): NCBI GI NO: 6689918 NR Description: transcription factor EREBP1 [Oryza sativa]
  misc_feature (1)..(365): NCBI GI NO: 24940524 NR Description: ethylene response element binding protein
  misc_feature (1)..(365): NCBI GI NO: 30525872 NR Description: ethylene-responsive element binding protein
  misc_feature (35)..(365): NCBI GI NO: 30525870 NR Description: ethylene-responsive element binding protein
  misc_feature (1)..(363): NCBI GI NO: 38343926 NR Description: ethylene transcription factor [Fagus sylvatica]
  misc_feature (1)..(363): NCBI GI NO: 18496063 NR Description: ethylene responsive element binding protein
  misc_feature (1)..(365): NCBI GI NO: 33331083 NR Description: ethylene responsive protein [Glycine max]
  misc_feature (17)..(365): NCBI GI NO: 19880313 NR Description: putative EREBP-type transcription factor
  misc_feature (1)..(363): NCBI GI NO: 22074046 NR Description: transcription factor JERF1
MCGGAILSDIIPPPPPRRVTAGHLWPESKKPRRAAAGRRRAPVEQEQEEDFEADFEEFEVESGESELESEDEPKPKPFAAPSSALARGGLNTGAAGVDGPAANSVKRKRKNQFRGIRRRPWGKWAAEIRDPRKGVRVWLGTFNSPEEAARAYDAEARRIRGKKAKVNFPDEVPTAVSQKRRAAGLASLKAPKMDVEEEKPIIKLAVNNMTNSNAYHYPAVVGHHNIIPEPFMQTQNMPFAPLVNYAALVNLSSHQGSNSFGCSDFSLENDSRTPDITSVPAPVATLAAVGESAFVQNTAGHAVAPPATGNTGVDLAELEPYMDFLMDGGSDDSISTLLSCDGSQDVVSNMDLWSFDDMPMSAGFY

SEQ ID NO: 29975 - DNA, 1572 bp, Zea mays subsp. mays
  misc_feature (1)..(1572): Ceres Seq. ID no. 12405446
attgggttccccgctctgctcctcagctcagccctcttgctcctgacctgccgtcctcctccttccctccccgtgagtcgccgtacggcggtacggggatcgccaccgcggcgtccagggatggcggacgggagcctctacgcctggtggtgttgtgccttgggctgggcgctggcgcttgtcgcagcggacggcttcctcgtggacatcacctatgtggaaagcgccgtggccaaaggagcagtgtgtttggatggtagtgcgccggcgtaccatctcgcccgcggctccggctccggtgagaagagctggctggtccatttcgaggggggaggctggtgcaacaatgtcaccacctgcctgcaacggaagcgcactcggttgggttcgtccaaggagatggcgacggcagattgccttctccggaatcctgagtgacacgccggatgacaacccagatttttacaattggaacaaggtcaaggttcggtactgtgatggttcatctttcactggagatgttgaagaagttgaccctgcaacaaagctacattatagaggtgcgaggatatggcaagctgtcatggacgacctgcttgccaaagggatggacaaagctgaaaatgctctaatttcaggctgttctgctggtggtttaacctccatactacactgtgacagatttcatgaccttctgccgccggctgcgagggttaagtgcctttctgatgctgggttcttcattaatgagaaagacgttgcaggagttgggtacattgctgcctttttcaacgacgtcgttacaacacatgggtcagcaaagaatttgccgccttcatgcacttcgacgttacctccaggaacgtgctttttcccccagaacgaggtgaaacagatacagacacctctgttcatcctcaacgcagcatatgattcatggcaggtaaggaacattttggtgccaggagtagctgaccctcatggaaaatggcatagctgtaagcatgatatagaccagtgctctgcatcgcagctacgggtattgcagggattcaggggtgattttctgaaggaagtggcagaactagggaactccgactcgagagggttgttcataaactcatgcttcgtgcactgccagtctgagatacaggagctatggttctcatctgactcccccgtgctcggaaacacaacagtagcaaacgctgttggcgactggttcttcgaccgcagctccttccagaagatagactgcccatacccttgtgactcgacctgtcacaatcggatctacgatgactcatcacaagcatagcaattacagtggcctcacttcgtactgccattcaccatgttattacatttgacgcttccagcattgctaacagtagggcaatgcgttgatagccattgattttttttttctttttacgaataagatcaggtgccggcggctttaactcggttgctaccggaaagtgagcgtgcatcttccgacggtacatggcatggtttatctggatggatgaatcgataatcataaattcttaaaaacacaataaatattct

SEQ ID NO: 29976 - protein, 367 aa, Zea mays subsp. mays
  peptide (1)..(367): Ceres Seq. ID no. 12405447
  misc_feature (66)..(346): Pfam Name: Pfam Description:  Pectinacetylesterase
  misc_feature (66)..(366): NCBI GI NO: 7488883 NR Description: pectin acetylesterase (EC 3
  misc_feature (67)..(361): NCBI GI NO: 22328797 NR Description: pectinacetylesterase family; protein id:At4g19420
  misc_feature (62)..(363): NCBI GI NO: 38344147 NR Description: OSJNBa0041A02.14
  misc_feature (65)..(356): NCBI GI NO: 21593445 NR Description: pectin acetylesterase [Arabidopsis thaliana]
  misc_feature (65)..(356): NCBI GI NO: 15242357 NR Description: pectinacetylesterase, putative
  misc_feature (34)..(356): NCBI GI NO: 18415308 NR Description: pectinacetylesterase, putative
  misc_feature (65)..(362): NCBI GI NO: 28392968 NR Description: putative pectinacetylesterase
  misc_feature (67)..(361): NCBI GI NO: 15226462 NR Description: pectinacetylesterase, putative
  misc_feature (65)..(361): NCBI GI NO: 18397406 NR Description: pectinacetylesterase, putative
  misc_feature (65)..(361): NCBI GI NO: 25347293 NR Description: probable pectinacetylesterase precursor T8L23.6
MWKAPWPKEQCVWMVVRRRTISPAAPAPVRRAGWSISRGEAGATMSPPACNGSALGWVRPRRWRRQIAFSGILSDTPDDNPDFYNWNKVKVRYCDGSSFTGDVEEVDPATKLHYRGARIWQAVMDDLLAKGMDKAENALISGCSAGGLTSILHCDRFHDLLPPAARVKCLSDAGFFINEKDVAGVGYIAAFFNDVVTTHGSAKNLPPSCTSTLPPGTCFFPQNEVKQIQTPLFILNAAYDSWQVRNILVPGVADPHGKWHSCKHDIDQCSASQLRVLQGFRGDFLKEVAELGNSDSRGLFINSCFVHCQSEIQELWFSSDSPVLGNTTVANAVGDWFFDRSSFQKIDCPYPCDSTCHNRIYDDSSQA

SEQ ID NO: 29977 - protein, 354 aa, Zea mays subsp. mays
  peptide (1)..(354): Ceres Seq. ID no. 12405448
  misc_feature (53)..(333): Pfam Name: Pfam Description:  Pectinacetylesterase
  misc_feature (53)..(353): NCBI GI NO: 7488883 NR Description: pectin acetylesterase (EC 3
  misc_feature (54)..(348): NCBI GI NO: 22328797 NR Description: pectinacetylesterase family; protein id:At4g19420
  misc_feature (49)..(350): NCBI GI NO: 38344147 NR Description: OSJNBa0041A02.14
  misc_feature (52)..(343): NCBI GI NO: 21593445 NR Description: pectin acetylesterase [Arabidopsis thaliana]
  misc_feature (52)..(343): NCBI GI NO: 15242357 NR Description: pectinacetylesterase, putative
  misc_feature (21)..(343): NCBI GI NO: 18415308 NR Description: pectinacetylesterase, putative
  misc_feature (52)..(349): NCBI GI NO: 28392968 NR Description: putative pectinacetylesterase
  misc_feature (54)..(348): NCBI GI NO: 15226462 NR Description: pectinacetylesterase, putative
  misc_feature (52)..(348): NCBI GI NO: 18397406 NR Description: pectinacetylesterase, putative
  misc_feature (52)..(348): NCBI GI NO: 25347293 NR Description: probable pectinacetylesterase precursor T8L23.6
MVVRRRTISPAAPAPVRRAGWSISRGEAGATMSPPACNGSALGWVRPRRWRRQIAFSGILSDTPDDNPDFYNWNKVKVRYCDGSSFTGDVEEVDPATKLHYRGARIWQAVMDDLLAKGMDKAENALISGCSAGGLTSILHCDRFHDLLPPAARVKCLSDAGFFINEKDVAGVGYIAAFFNDVVTTHGSAKNLPPSCTSTLPPGTCFFPQNEVKQIQTPLFILNAAYDSWQVRNILVPGVADPHGKWHSCKHDIDQCSASQLRVLQGFRGDFLKEVAELGNSDSRGLFINSCFVHCQSEIQELWFSSDSPVLGNTTVANAVGDWFFDRSSFQKIDCPYPCDSTCHNRIYDDSSQA

SEQ ID NO: 29978 - protein, 323 aa, Zea mays subsp. mays
  peptide (1)..(323): Ceres Seq. ID no. 12405449
  misc_feature (22)..(302): Pfam Name: Pfam Description:  Pectinacetylesterase
  misc_feature (22)..(322): NCBI GI NO: 7488883 NR Description: pectin acetylesterase (EC 3
  misc_feature (23)..(317): NCBI GI NO: 22328797 NR Description: pectinacetylesterase family; protein id:At4g19420
  misc_feature (18)..(319): NCBI GI NO: 38344147 NR Description: OSJNBa0041A02.14
  misc_feature (21)..(312): NCBI GI NO: 21593445 NR Description: pectin acetylesterase [Arabidopsis thaliana]
  misc_feature (21)..(312): NCBI GI NO: 15242357 NR Description: pectinacetylesterase, putative
  misc_feature (1)..(312): NCBI GI NO: 18415308 NR Description: pectinacetylesterase, putative
  misc_feature (21)..(318): NCBI GI NO: 28392968 NR Description: putative pectinacetylesterase
  misc_feature (23)..(317): NCBI GI NO: 15226462 NR Description: pectinacetylesterase, putative
  misc_feature (21)..(317): NCBI GI NO: 18397406 NR Description: pectinacetylesterase, putative
  misc_feature (21)..(317): NCBI GI NO: 25347293 NR Description: probable pectinacetylesterase precursor T8L23.6
MSPPACNGSALGWVRPRRWRRQIAFSGILSDTPDDNPDFYNWNKVKVRYCDGSSFTGDVEEVDPATKLHYRGARIWQAVMDDLLAKGMDKAENALISGCSAGGLTSILHCDRFHDLLPPAARVKCLSDAGFFINEKDVAGVGYIAAFFNDVVTTHGSAKNLPPSCTSTLPPGTCFFPQNEVKQIQTPLFILNAAYDSWQVRNILVPGVADPHGKWHSCKHDIDQCSASQLRVLQGFRGDFLKEVAELGNSDSRGLFINSCFVHCQSEIQELWFSSDSPVLGNTTVANAVGDWFFDRSSFQKIDCPYPCDSTCHNRIYDDSSQA

SEQ ID NO: 29979 - DNA, 1298 bp, Zea mays subsp. mays
  misc_feature (1)..(1298): Ceres Seq. ID no. 12376925
gagggagacgacgacgacggcgatggcctggctgcggcggacggagacgctggtgctgctgctcgtggtgcttctggcctccgcttcatcccccgcggcggctgcggcggcgggagaggaggaggaaagagtgatcaggctgaagcgctgtgatggtggttattcttataaccatactctggctcatattcttgtcgaatacgcgtctgcggtgtacacatctgacttgacatcacttttctcatggacctgtccaaggtgcaaaggccacacaaagggatttgaggtgatagagatcatagtagatgtggagaactgcttacaggcgtttgttggagttgcacctgaccctcgatccataatcattgcttttagaggcactcaacagcacagtgtctcaaattggatcgaagatcttttctggaagcagcttgatgtgacatacccaggcatgccggatgcaatggtccatcatgggttttattctgcatattataatacaactctgcgatatgagatcctgaagtctattaaatgggcaagaaaaacatatggaaatctacccataaatgttgtgggacactccatgggaggggctttagcttcgttttgtgcccttgatctatctgttaaatttggatcgcaggaggttgaactcatgacctttggacagcctcggataggcaatcctgcatttgctgtatactttggtgaacaagtcccaagaacaatccgtgtgacccatcagaatgatattgtgccgcatttaccaccgtattattattacctaggtgaatggacataccaccacttcgctagagaggtttggcttcatgagagcatagatggaaatgtagttaccagaaacgagacggtatgtgatgattctggtgaagacccgacctgtagcaggtcggtctatgggatgagcgtagcagatcatcttgagtactatgatgtcacactacatgctgattcaagaggaacctgtcaattcgtgattggtgcagccaaccaagtatacaactacgttcgtgaagttgatggatccatcatcctgtcaagatacccgcaagaaccacaagctctagaatctatgtgactttgtatgccacggaatgcacccctgtacagtatttttcattttcattttgtgtacagctcatgaaatgctgggcgctcctggagctctccagaggataaggagaggctcacctttttaaatgtgtcccctttgctcaagtgagaatcgtgcatgtaagctccataagattgtccgcacaattcaatttgtgtat

SEQ ID NO: 29980 - protein, 366 aa, Zea mays subsp. mays
  peptide (1)..(366): Ceres Seq. ID no. 12376926
  misc_feature (43)..(355): NCBI GI NO: 15238889 NR Description: triacylglycerol lipase-like protein
  misc_feature (43)..(355): NCBI GI NO: 18418946 NR Description: triacylglycerol lipase-like protein
  misc_feature (56)..(363): NCBI GI NO: 21425569 NR Description: triacylglycerol Lipase [Triticum aestivum]
  misc_feature (56)..(359): NCBI GI NO: 21425571 NR Description: triacylglycerol lipase [Triticum aestivum]
  misc_feature (18)..(364): NCBI GI NO: 34395192 NR Description: putative triacylglycerol lipase
  misc_feature (43)..(304): NCBI GI NO: 30686925 NR Description: lipase (class 3) family [Arabidopsis thaliana]
  misc_feature (55)..(364): NCBI GI NO: 34899296 NR Description: putative triacylglycerol lipase
  misc_feature (96)..(356): NCBI GI NO: 34907212 NR Description: P0492G09.26
  misc_feature (54)..(318): NCBI GI NO: 21166167 NR Description: triacylglycerol lipase-like protein triacylglycerollipase
  misc_feature (81)..(320): NCBI GI NO: 230348 NR Description: Triacylglycerol Acylhydrolase (E.C.3.1.1.3)
RETTTTAMAWLRRTETLVLLLVVLLASASSPAAAAAAGEEEERVIRLKRCDGGYSYNHTLAHILVEYASAVYTSDLTSLFSWTCPRCKGHTKGFEVIEIIVDVENCLQAFVGVAPDPRSIIIAFRGTQQHSVSNWIEDLFWKQLDVTYPGMPDAMVHHGFYSAYYNTTLRYEILKSIKWARKTYGNLPINVVGHSMGGALASFCALDLSVKFGSQEVELMTFGQPRIGNPAFAVYFGEQVPRTIRVTHQNDIVPHLPPYYYYLGEWTYHHFAREVWLHESIDGNVVTRNETVCDDSGEDPTCSRSVYGMSVADHLEYYDVTLHADSRGTCQFVIGAANQVYNYVREVDGSIILSRYPQEPQALESM

SEQ ID NO: 29981 - protein, 359 aa, Zea mays subsp. mays
  peptide (1)..(359): Ceres Seq. ID no. 12376927
  misc_feature (36)..(348): NCBI GI NO: 15238889 NR Description: triacylglycerol lipase-like protein
  misc_feature (36)..(348): NCBI GI NO: 18418946 NR Description: triacylglycerol lipase-like protein
  misc_feature (49)..(356): NCBI GI NO: 21425569 NR Description: triacylglycerol Lipase [Triticum aestivum]
  misc_feature (49)..(352): NCBI GI NO: 21425571 NR Description: triacylglycerol lipase [Triticum aestivum]
  misc_feature (11)..(357): NCBI GI NO: 34395192 NR Description: putative triacylglycerol lipase
  misc_feature (36)..(297): NCBI GI NO: 30686925 NR Description: lipase (class 3) family [Arabidopsis thaliana]
  misc_feature (48)..(357): NCBI GI NO: 34899296 NR Description: putative triacylglycerol lipase
  misc_feature (89)..(349): NCBI GI NO: 34907212 NR Description: P0492G09.26
  misc_feature (47)..(311): NCBI GI NO: 21166167 NR Description: triacylglycerol lipase-like protein triacylglycerollipase
  misc_feature (74)..(313): NCBI GI NO: 230348 NR Description: Triacylglycerol Acylhydrolase (E.C.3.1.1.3)
MAWLRRTETLVLLLVVLLASASSPAAAAAAGEEEERVIRLKRCDGGYSYNHTLAHILVEYASAVYTSDLTSLFSWTCPRCKGHTKGFEVIEIIVDVENCLQAFVGVAPDPRSIIIAFRGTQQHSVSNWIEDLFWKQLDVTYPGMPDAMVHHGFYSAYYNTTLRYEILKSIKWARKTYGNLPINVVGHSMGGALASFCALDLSVKFGSQEVELMTFGQPRIGNPAFAVYFGEQVPRTIRVTHQNDIVPHLPPYYYYLGEWTYHHFAREVWLHESIDGNVVTRNETVCDDSGEDPTCSRSVYGMSVADHLEYYDVTLHADSRGTCQFVIGAANQVYNYVREVDGSIILSRYPQEPQALESM

SEQ ID NO: 29982 - protein, 216 aa, Zea mays subsp. mays
  peptide (1)..(216): Ceres Seq. ID no. 12376928
  misc_feature (1)..(205): NCBI GI NO: 15238889 NR Description: triacylglycerol lipase-like protein
  misc_feature (1)..(205): NCBI GI NO: 18418946 NR Description: triacylglycerol lipase-like protein
  misc_feature (1)..(213): NCBI GI NO: 21425569 NR Description: triacylglycerol Lipase [Triticum aestivum]
  misc_feature (1)..(209): NCBI GI NO: 21425571 NR Description: triacylglycerol lipase [Triticum aestivum]
  misc_feature (1)..(214): NCBI GI NO: 34395192 NR Description: putative triacylglycerol lipase
  misc_feature (1)..(154): NCBI GI NO: 30686925 NR Description: lipase (class 3) family [Arabidopsis thaliana]
  misc_feature (1)..(214): NCBI GI NO: 34899296 NR Description: putative triacylglycerol lipase
  misc_feature (1)..(206): NCBI GI NO: 34907212 NR Description: P0492G09.26
  misc_feature (1)..(168): NCBI GI NO: 21166167 NR Description: triacylglycerol lipase-like protein triacylglycerollipase
  misc_feature (1)..(170): NCBI GI NO: 230348 NR Description: Triacylglycerol Acylhydrolase (E.C.3.1.1.3)
MPDAMVHHGFYSAYYNTTLRYEILKSIKWARKTYGNLPINVVGHSMGGALASFCALDLSVKFGSQEVELMTFGQPRIGNPAFAVYFGEQVPRTIRVTHQNDIVPHLPPYYYYLGEWTYHHFAREVWLHESIDGNVVTRNETVCDDSGEDPTCSRSVYGMSVADHLEYYDVTLHADSRGTCQFVIGAANQVYNYVREVDGSIILSRYPQEPQALESM

SEQ ID NO: 29983 - DNA, 2013 bp, Zea mays subsp. mays
  misc_feature (1)..(2013): Ceres Seq. ID no. 12594603
agtgtgagagctcgattcgttgccgtccacttgtctcacggcctgtcgccatctccttcctggttttttcatccgaccatccccggctcctccgcgccgtcggcgacgactccatcgagtcactcggccgcagcaaccggcgaccatgtaccgagtcgcctccgggctcggcgccctcaagaggcatggggcaaatgctcaaatgatgaatgctgcaattaggtgtgccagcacaagtgttgcacagaggtcttccggtggcttgtggacctggttgactggtgcgcgttcaaatgaaatacctcctccagatttcacacttccgggagtgactattcctcctccgctgcctgaccatgtggaggctggcaaaacaagagtcacaacacttcccaatggtgttaaaatagcctctgagacatctgcgggatcatcttgttctgttggagtttatgttgattgtggttctgtatatgaagcacctgaaacaacaggtgccagtcaactgttgaagacaatggccttcacaaccactgccaacaggagtgagttgcgggttgtgcgtgaaattgaggcaataggtggcagtgccaaagcatctgctagccgtgagatgatgagctacacttacggagccctgaagacttacatgcctgaaatggttgaggtgcttattgattgtgtacgcaaccctgcttttcttgattgggaggtaaaggaacagattttgaggctacaggcagagcttgcaaaatcatcaagttatcctgaaaattttcttttggaggctcttcattctactggctattctggtgctttagcaaacccactaattgttccagaatattcagttagcagattgaatgcagatgtcctggagcaatttataactgagaactacactgcttcccgaattgttctagctgcatcaggtgttgatcatgatgaattggtatctattgccgaaccccttctgtctgacattcccagtgtatctggaacaacaaggccaaaatcaacctacattggtggagaatacagaagaagtgcagattcatcgaacacagacgttgcattggcattcgaggtcccaagtggttggctcaaagaaaaagattgcgtcactgtatcagttcttcaggcacttctgggtggtggtggcaagttttcttggggaaggcaaggaaaggggttacattcacgtctaaaccgcctcgtaaatgaatttgatcagatcaagtcaatctctgctttcaaggatgttcacagtaatactggcatctttggaatccatacatctactgatgcatcatttgttcctaaagctattgacctagcagccagagagctcacttcccttgcaactcctggacaagttgaccaaagccaactggaccgtgctaaagcctcagctaaatctgccatactggcaaatttggaatcacaggcatcgctaacagaggacatggggcgccaagttttggcatttggtgaaaggaaacctgccgagcaccttctcaaggctgtagatggtgttactatgaaagatataacgtctgttgctgaaaagatcatttcatccccattgacaatggcatctcatggaaacgttctgaatatgcctacttatgagtcagtcagtggcaagttccgctcaaaatgaggagtacatgacccttcccttcattttatcaccttgtttgctggacaagttttaccagtcccttgtcattcacgtctaggccatggttcttggtcagtttcagaagaaataaggaacctcatgcagttttgttcgtgaaacctgtgatcacttcacaattattcccttttctcattcttttgcggaacattcgtgtggttaatgctggtgatagaccagtaacgtgcttgtaaatttaactgaaccctggcccctcattcggtaccaaggccccccagagaatgtacaaaattgtcgtaaaactcttgacaaaaatgttgtcgcacatgaataatgattctacagaactg

SEQ ID NO: 29984 - protein, 505 aa, Zea mays subsp. mays
  peptide (1)..(505): Ceres Seq. ID no. 12594604
  misc_feature (238)..(423): Pfam Name: Pfam Description:  Peptidase M16 inactive domain
  misc_feature (1)..(505): NCBI GI NO: 11993905 NR Description: mitochondrial processing peptidase alpha-chainprecursor
  misc_feature (1)..(488): NCBI GI NO: 34906418 NR Description: putative mitochondrial processing peptidase(EC:3
  misc_feature (26)..(504): NCBI GI NO: 34909352 NR Description: putative mitochondrial processing peptidase alphasubuunit
  misc_feature (1)..(505): NCBI GI NO: 2117355 NR Description: mitochondrial processing peptidase (EC 3
  misc_feature (1)..(505): NCBI GI NO: 266567 NR Description: Mitochondrial processing peptidase alpha subunit
  misc_feature (1)..(503): NCBI GI NO: 15218090 NR Description: mitochondrial processing peptidase alpha subunit
  misc_feature (1)..(503): NCBI GI NO: 21594004 NR Description: mitochondrial processing peptidase alpha subunit
  misc_feature (1)..(503): NCBI GI NO: 18401141 NR Description: putative mitochondrial processing  peptidase alpha subunit
  misc_feature (1)..(503): NCBI GI NO: 14334534 NR Description: putative mitochondrial processing peptidase alpha subunit
  misc_feature (1)..(505): NCBI GI NO: 15076515 NR Description: mitochondrial processing peptidase alpha subunit
MYRVASGLGALKRHGANAQMMNAAIRCASTSVAQRSSGGLWTWLTGARSNEIPPPDFTLPGVTIPPPLPDHVEAGKTRVTTLPNGVKIASETSAGSSCSVGVYVDCGSVYEAPETTGASQLLKTMAFTTTANRSELRVVREIEAIGGSAKASASREMMSYTYGALKTYMPEMVEVLIDCVRNPAFLDWEVKEQILRLQAELAKSSSYPENFLLEALHSTGYSGALANPLIVPEYSVSRLNADVLEQFITENYTASRIVLAASGVDHDELVSIAEPLLSDIPSVSGTTRPKSTYIGGEYRRSADSSNTDVALAFEVPSGWLKEKDCVTVSVLQALLGGGGKFSWGRQGKGLHSRLNRLVNEFDQIKSISAFKDVHSNTGIFGIHTSTDASFVPKAIDLAARELTSLATPGQVDQSQLDRAKASAKSAILANLESQASLTEDMGRQVLAFGERKPAEHLLKAVDGVTMKDITSVAEKIISSPLTMASHGNVLNMPTYESVSGKFRSK

SEQ ID NO: 29985 - protein, 486 aa, Zea mays subsp. mays
  peptide (1)..(486): Ceres Seq. ID no. 12594605
  misc_feature (219)..(404): Pfam Name: Pfam Description:  Peptidase M16 inactive domain
  misc_feature (1)..(486): NCBI GI NO: 11993905 NR Description: mitochondrial processing peptidase alpha-chainprecursor
  misc_feature (1)..(469): NCBI GI NO: 34906418 NR Description: putative mitochondrial processing peptidase(EC:3
  misc_feature (7)..(485): NCBI GI NO: 34909352 NR Description: putative mitochondrial processing peptidase alphasubuunit
  misc_feature (1)..(486): NCBI GI NO: 2117355 NR Description: mitochondrial processing peptidase (EC 3
  misc_feature (1)..(486): NCBI GI NO: 266567 NR Description: Mitochondrial processing peptidase alpha subunit
  misc_feature (1)..(484): NCBI GI NO: 15218090 NR Description: mitochondrial processing peptidase alpha subunit
  misc_feature (1)..(484): NCBI GI NO: 21594004 NR Description: mitochondrial processing peptidase alpha subunit
  misc_feature (1)..(484): NCBI GI NO: 18401141 NR Description: putative mitochondrial processing  peptidase alpha subunit
  misc_feature (1)..(484): NCBI GI NO: 14334534 NR Description: putative mitochondrial processing peptidase alpha subunit
  misc_feature (1)..(486): NCBI GI NO: 15076515 NR Description: mitochondrial processing peptidase alpha subunit
MMNAAIRCASTSVAQRSSGGLWTWLTGARSNEIPPPDFTLPGVTIPPPLPDHVEAGKTRVTTLPNGVKIASETSAGSSCSVGVYVDCGSVYEAPETTGASQLLKTMAFTTTANRSELRVVREIEAIGGSAKASASREMMSYTYGALKTYMPEMVEVLIDCVRNPAFLDWEVKEQILRLQAELAKSSSYPENFLLEALHSTGYSGALANPLIVPEYSVSRLNADVLEQFITENYTASRIVLAASGVDHDELVSIAEPLLSDIPSVSGTTRPKSTYIGGEYRRSADSSNTDVALAFEVPSGWLKEKDCVTVSVLQALLGGGGKFSWGRQGKGLHSRLNRLVNEFDQIKSISAFKDVHSNTGIFGIHTSTDASFVPKAIDLAARELTSLATPGQVDQSQLDRAKASAKSAILANLESQASLTEDMGRQVLAFGERKPAEHLLKAVDGVTMKDITSVAEKIISSPLTMASHGNVLNMPTYESVSGKFRSK

SEQ ID NO: 29986 - protein, 485 aa, Zea mays subsp. mays
  peptide (1)..(485): Ceres Seq. ID no. 12594606
  misc_feature (218)..(403): Pfam Name: Pfam Description:  Peptidase M16 inactive domain
  misc_feature (1)..(485): NCBI GI NO: 11993905 NR Description: mitochondrial processing peptidase alpha-chainprecursor
  misc_feature (1)..(468): NCBI GI NO: 34906418 NR Description: putative mitochondrial processing peptidase(EC:3
  misc_feature (6)..(484): NCBI GI NO: 34909352 NR Description: putative mitochondrial processing peptidase alphasubuunit
  misc_feature (1)..(485): NCBI GI NO: 2117355 NR Description: mitochondrial processing peptidase (EC 3
  misc_feature (1)..(485): NCBI GI NO: 266567 NR Description: Mitochondrial processing peptidase alpha subunit
  misc_feature (1)..(483): NCBI GI NO: 15218090 NR Description: mitochondrial processing peptidase alpha subunit
  misc_feature (1)..(483): NCBI GI NO: 21594004 NR Description: mitochondrial processing peptidase alpha subunit
  misc_feature (1)..(483): NCBI GI NO: 18401141 NR Description: putative mitochondrial processing  peptidase alpha subunit
  misc_feature (1)..(483): NCBI GI NO: 14334534 NR Description: putative mitochondrial processing peptidase alpha subunit
  misc_feature (1)..(485): NCBI GI NO: 15076515 NR Description: mitochondrial processing peptidase alpha subunit
MNAAIRCASTSVAQRSSGGLWTWLTGARSNEIPPPDFTLPGVTIPPPLPDHVEAGKTRVTTLPNGVKIASETSAGSSCSVGVYVDCGSVYEAPETTGASQLLKTMAFTTTANRSELRVVREIEAIGGSAKASASREMMSYTYGALKTYMPEMVEVLIDCVRNPAFLDWEVKEQILRLQAELAKSSSYPENFLLEALHSTGYSGALANPLIVPEYSVSRLNADVLEQFITENYTASRIVLAASGVDHDELVSIAEPLLSDIPSVSGTTRPKSTYIGGEYRRSADSSNTDVALAFEVPSGWLKEKDCVTVSVLQALLGGGGKFSWGRQGKGLHSRLNRLVNEFDQIKSISAFKDVHSNTGIFGIHTSTDASFVPKAIDLAARELTSLATPGQVDQSQLDRAKASAKSAILANLESQASLTEDMGRQVLAFGERKPAEHLLKAVDGVTMKDITSVAEKIISSPLTMASHGNVLNMPTYESVSGKFRSK

SEQ ID NO: 29987 - DNA, 1421 bp, Zea mays subsp. mays
  misc_feature (1)..(1421): Ceres Seq. ID no. 12352595
ctcacatgcatatgcatgcattagcttttccccaccagcatgcactagctgactagcatctgtgtaatcggtgaccgctcttgacttgttggctcctcgctcccacggtagctaaagctagctaggtgggtggtagcaccaccatggcctcgcccaagcattctcatcgccatcatcgtgcggcggcgacgaagcatcgtcggccgctggcgctgcggcgtgcgatgctgcattcgtgcgtgtgcttcctggtgggtctcgtgaccggcctggccccttccgactggacggacgccgcctcgcgcgcggccgtgcacgcgaacggcgcggccacggcgcaggtgttccgcgcgctgcacgccatgaaccagacggcggcggcgggggcactgggccagctgctggcgctgcagcactaccagcagcagccagtggtggagaaggagaaggagaaggagaagcctctggatctggtggtggtggtgacgactacgacaacgtcgacggggctgtcggagcgcgagcggcggtcggcgggtctgacgcgcacggcgcacgcgctgcgtctggtgtcccctcccctggtgtggctggtggtggaggcggcccgggaggctggtcccacggcacggctgctgcggcgcacgggggtggtgtaccggcacctgacctacgcggagaacttcacatcggaggcctgggaggaggagcggcaccaccagaggaaccaggcgctagcgcacattgagcggcaccgcctgcgcggcgtcgtcctcttcgcggggctcgccgacgtgtacgacggccgcctcctggagcagctcaggcggcacatcaggacaaggagtgtgggcgcgtgggcagtggcgacagtatgggagcaggagaagagggtggccgtggaagggcccgtcgtcgtctgcaacaccaccaccagcaccagcgcagcatccacagcatgtgcatggttctccgcctccgactccacattattggcggcagcggcagcggcagcgcccccagtgacggtcgacgactccgtccacggctttgccttcgccagtgacctcctctgggacccttccaggtgggaccgcttccccacatccgagcccgaccagtcgcaggattcgatcaagttcgtgcaaaggttggtgatggcggagtacaacaaaacgagggccatcatccctgcagacgacgattactcctccaaccgttctcaaatcatggtgtggcgtgtcgacacaacgctgctctagctagccctcttgccacgctaagagcgatagataaagatgcatgcatgcttaaaataaacattccatgacttattacatagtaatgccatacacgtacgtatgtatatgtataaagggaaaagaatggcaagcagcagtctgcatcagtcgttgtcgtcg

SEQ ID NO: 29988 - protein, 372 aa, Zea mays subsp. mays
  peptide (1)..(372): Ceres Seq. ID no. 12352596
  misc_feature (137)..(257): Pfam Name: Pfam Description:  Glycosyltransferase family 43
  misc_feature (54)..(371): NCBI GI NO: 34394028 NR Description: putative glycosyltransferase family
  misc_feature (19)..(57): NCBI GI NO: 34394028 NR Description: putative glycosyltransferase family
  misc_feature (1)..(366): NCBI GI NO: 32879543 NR Description: beta3-glucuronyltransferase [Zea mays]
  misc_feature (110)..(368): NCBI GI NO: 32968187 NR Description: beta3-glucuronyltransferase [Triticum aestivum]
  misc_feature (97)..(368): NCBI GI NO: 32968174 NR Description: beta3-glucuronyltransferase [Hordeum vulgare]
  misc_feature (14)..(318): NCBI GI NO: 33771692 NR Description: glycuronosyltransferase-like protein
  misc_feature (110)..(318): NCBI GI NO: 16973326 NR Description: hypothetical protein [Gossypium hirsutum]
  misc_feature (25)..(257): NCBI GI NO: 15228084 NR Description: unknown protein; protein id: At2g37090.1
  misc_feature (103)..(264): NCBI GI NO: 32968189 NR Description: beta3-glucuronyltransferase [Triticum aestivum]
  misc_feature (302)..(365): NCBI GI NO: 32968189 NR Description: beta3-glucuronyltransferase [Triticum aestivum]
MASPKHSHRHHRAAATKHRRPLALRRAMLHSCVCFLVGLVTGLAPSDWTDAASRAAVHANGAATAQVFRALHAMNQTAAAGALGQLLALQHYQQQPVVEKEKEKEKPLDLVVVVTTTTTSTGLSERERRSAGLTRTAHALRLVSPPLVWLVVEAAREAGPTARLLRRTGVVYRHLTYAENFTSEAWEEERHHQRNQALAHIERHRLRGVVLFAGLADVYDGRLLEQLRRHIRTRSVGAWAVATVWEQEKRVAVEGPVVVCNTTTSTSAASTACAWFSASDSTLLAAAAAAAPPVTVDDSVHGFAFASDLLWDPSRWDRFPTSEPDQSQDSIKFVQRLVMAEYNKTRAIIPADDDYSSNRSQIMVWRVDTTLL

SEQ ID NO: 29989 - protein, 345 aa, Zea mays subsp. mays
  peptide (1)..(345): Ceres Seq. ID no. 12352597
  misc_feature (110)..(230): Pfam Name: Pfam Description:  Glycosyltransferase family 43
  misc_feature (27)..(344): NCBI GI NO: 34394028 NR Description: putative glycosyltransferase family
  misc_feature (1)..(30): NCBI GI NO: 34394028 NR Description: putative glycosyltransferase family
  misc_feature (1)..(339): NCBI GI NO: 32879543 NR Description: beta3-glucuronyltransferase [Zea mays]
  misc_feature (83)..(341): NCBI GI NO: 32968187 NR Description: beta3-glucuronyltransferase [Triticum aestivum]
  misc_feature (70)..(341): NCBI GI NO: 32968174 NR Description: beta3-glucuronyltransferase [Hordeum vulgare]
  misc_feature (1)..(291): NCBI GI NO: 33771692 NR Description: glycuronosyltransferase-like protein
  misc_feature (83)..(291): NCBI GI NO: 16973326 NR Description: hypothetical protein [Gossypium hirsutum]
  misc_feature (1)..(230): NCBI GI NO: 15228084 NR Description: unknown protein; protein id: At2g37090.1
  misc_feature (76)..(237): NCBI GI NO: 32968189 NR Description: beta3-glucuronyltransferase [Triticum aestivum]
  misc_feature (275)..(338): NCBI GI NO: 32968189 NR Description: beta3-glucuronyltransferase [Triticum aestivum]
MLHSCVCFLVGLVTGLAPSDWTDAASRAAVHANGAATAQVFRALHAMNQTAAAGALGQLLALQHYQQQPVVEKEKEKEKPLDLVVVVTTTTTSTGLSERERRSAGLTRTAHALRLVSPPLVWLVVEAAREAGPTARLLRRTGVVYRHLTYAENFTSEAWEEERHHQRNQALAHIERHRLRGVVLFAGLADVYDGRLLEQLRRHIRTRSVGAWAVATVWEQEKRVAVEGPVVVCNTTTSTSAASTACAWFSASDSTLLAAAAAAAPPVTVDDSVHGFAFASDLLWDPSRWDRFPTSEPDQSQDSIKFVQRLVMAEYNKTRAIIPADDDYSSNRSQIMVWRVDTTLL

SEQ ID NO: 29990 - protein, 299 aa, Zea mays subsp. mays
  peptide (1)..(299): Ceres Seq. ID no. 12352598
  misc_feature (64)..(184): Pfam Name: Pfam Description:  Glycosyltransferase family 43
  misc_feature (1)..(298): NCBI GI NO: 34394028 NR Description: putative glycosyltransferase family
  misc_feature (1)..(293): NCBI GI NO: 32879543 NR Description: beta3-glucuronyltransferase [Zea mays]
  misc_feature (37)..(295): NCBI GI NO: 32968187 NR Description: beta3-glucuronyltransferase [Triticum aestivum]
  misc_feature (24)..(295): NCBI GI NO: 32968174 NR Description: beta3-glucuronyltransferase [Hordeum vulgare]
  misc_feature (1)..(245): NCBI GI NO: 33771692 NR Description: glycuronosyltransferase-like protein
  misc_feature (37)..(245): NCBI GI NO: 16973326 NR Description: hypothetical protein [Gossypium hirsutum]
  misc_feature (1)..(184): NCBI GI NO: 15228084 NR Description: unknown protein; protein id: At2g37090.1
  misc_feature (30)..(191): NCBI GI NO: 32968189 NR Description: beta3-glucuronyltransferase [Triticum aestivum]
  misc_feature (229)..(292): NCBI GI NO: 32968189 NR Description: beta3-glucuronyltransferase [Triticum aestivum]
  misc_feature (1)..(156): NCBI GI NO: 34895984 NR Description: P0011G08.34
MNQTAAAGALGQLLALQHYQQQPVVEKEKEKEKPLDLVVVVTTTTTSTGLSERERRSAGLTRTAHALRLVSPPLVWLVVEAAREAGPTARLLRRTGVVYRHLTYAENFTSEAWEEERHHQRNQALAHIERHRLRGVVLFAGLADVYDGRLLEQLRRHIRTRSVGAWAVATVWEQEKRVAVEGPVVVCNTTTSTSAASTACAWFSASDSTLLAAAAAAAPPVTVDDSVHGFAFASDLLWDPSRWDRFPTSEPDQSQDSIKFVQRLVMAEYNKTRAIIPADDDYSSNRSQIMVWRVDTTLL

SEQ ID NO: 29991 - DNA, 1658 bp, Zea mays subsp. mays
  misc_feature (1)..(1658): Ceres Seq. ID no. 12362642
ccctttccctttctggccgcattccctcgtcctccggcagccgtcgccagcttccgatggtccggaaggagacggccatgaggctgcccccgcagcaccagggcctggaggtcaagatccccagcttcttccgctgccccatctcgctggacgtcatgcgctcgcccgttagcctctgcaccggcgtcacctacgaccgcgcctccatccagcagtggctcgactccggcaacaccacgtgcccggccaccatgctcccgctcccctccaccgacctcgtccccaacctcactctccgcagcctcatcgcccactgggccgcctccgccgcctcctgttcccccaccgccgccggcggcgccggagtcgccgactcctcttcggcacgtacttcttctcccgcgagcctcgtccgccaggtggcttcgtccggcgtggacccctcgccggccctccgcgagctggcagcctatctctccgacgacgacgtcgacgacttcgaaaagaacgcgcttgtgggcgccggccgcgccgccgagaccgtcgcgtcagttcttcggagaagagccgaggaaaccggcgtcgaaggcgtggaggcggccacgagagtgctagccttgatcttggcctcggacggcatcgacgactcgaacaagaagcgggtggccactggcctcgccgcggacgcggcggcctcgaccgcgtcgctggcgcgcgtgatgcgcggcgggagcgacctggaggcgaggatcgacgcggccaagctggcggagctgttgctcgccaatgcggccggcgaggcgaaggcggcggcgaccaaatcgtccgagttgctggccgagctggtacgcctcgtgggcaccgtcgacgagacgggcgccctggacaggaacgccgtggacgccggcctctcctgcctggccgccatctgcgggtcgtgccgtgccgcgcgtggcgagatggtgcgccttggcgcggtcccggccgctgtgcgcgctctgcgcgcctcgacggagtccggcgcgtccgcgaaggcgctccgggtcctcgagtccgccgtgggctgcgccgagggccgtgccgcgctgtgcgccaacgcggaggacgccatccctgcggtggtgggcaagatgatgaaggctgggcgcgacggcgcggaggccgccgtggccgtgctctgggcggtctgccaccggtaccaggaccgccgggcggcggacgcggctgcggcggccgagggcgggctgacgaggctgctcctcctgatgcagagcgggtgctcgccggcggcgagacagatggcgctggagctgctgaagatatacagggtgaacgccaagagctgtctcgccggctacgactccaagaccacccacatcatgccgttctgaggaaccgaagcggacgagagtggtttgccgcgatcctgggtggctgttttgacatgatgaaatggattcaattcagtgaatcaattaaatcgcatggaacaggggaatgtgttcttgttcctgtgatgtttattgatttccactcccccctcctcttttctttggatgtaagtcggtagagaaacaaacaagaattagttcacgaggtgagatgaagaataatctgtacagacatgatcagaacaggcatagtggacaatttaaccg

SEQ ID NO: 29992 - protein, 462 aa, Zea mays subsp. mays
  peptide (1)..(462): Ceres Seq. ID no. 12362643
  misc_feature (39)..(108): Pfam Name: Pfam Description:  U-box domain
  misc_feature (5)..(462): NCBI GI NO: 38605834 NR Description: OSJNBb0108J11.6
  misc_feature (37)..(462): NCBI GI NO: 15237755 NR Description: putative protein; protein id: At5g64660.1
  misc_feature (197)..(462): NCBI GI NO: 15242515 NR Description: putative protein; protein id: At5g09800.1
  misc_feature (39)..(108): NCBI GI NO: 15242515 NR Description: putative protein; protein id: At5g09800.1
  misc_feature (177)..(462): NCBI GI NO: 13539578 NR Description: photoperiod responsive protein
  misc_feature (40)..(441): NCBI GI NO: 38346713 NR Description: OSJNBa0086O06.11
  misc_feature (35)..(440): NCBI GI NO: 37530696 NR Description: hypothetical protein
  misc_feature (31)..(268): NCBI GI NO: 13539578 NR Description: photoperiod responsive protein
  misc_feature (225)..(447): NCBI GI NO: 20330772 NR Description: Unknown protein
  misc_feature (34)..(105): NCBI GI NO: 20330772 NR Description: Unknown protein
LSLSGRIPSSSGSRRQLPMVRKETAMRLPPQHQGLEVKIPSFFRCPISLDVMRSPVSLCTGVTYDRASIQQWLDSGNTTCPATMLPLPSTDLVPNLTLRSLIAHWAASAASCSPTAAGGAGVADSSSARTSSPASLVRQVASSGVDPSPALRELAAYLSDDDVDDFEKNALVGAGRAAETVASVLRRRAEETGVEGVEAATRVLALILASDGIDDSNKKRVATGLAADAAASTASLARVMRGGSDLEARIDAAKLAELLLANAAGEAKAAATKSSELLAELVRLVGTVDETGALDRNAVDAGLSCLAAICGSCRAARGEMVRLGAVPAAVRALRASTESGASAKALRVLESAVGCAEGRAALCANAEDAIPAVVGKMMKAGRDGAEAAVAVLWAVCHRYQDRRAADAAAAAEGGLTRLLLLMQSGCSPAARQMALELLKIYRVNAKSCLAGYDSKTTHIMPF

SEQ ID NO: 29993 - protein, 444 aa, Zea mays subsp. mays
  peptide (1)..(444): Ceres Seq. ID no. 12362644
  misc_feature (21)..(90): Pfam Name: Pfam Description:  U-box domain
  misc_feature (1)..(444): NCBI GI NO: 38605834 NR Description: OSJNBb0108J11.6
  misc_feature (19)..(444): NCBI GI NO: 15237755 NR Description: putative protein; protein id: At5g64660.1
  misc_feature (179)..(444): NCBI GI NO: 15242515 NR Description: putative protein; protein id: At5g09800.1
  misc_feature (21)..(90): NCBI GI NO: 15242515 NR Description: putative protein; protein id: At5g09800.1
  misc_feature (159)..(444): NCBI GI NO: 13539578 NR Description: photoperiod responsive protein
  misc_feature (22)..(423): NCBI GI NO: 38346713 NR Description: OSJNBa0086O06.11
  misc_feature (17)..(422): NCBI GI NO: 37530696 NR Description: hypothetical protein
  misc_feature (13)..(250): NCBI GI NO: 13539578 NR Description: photoperiod responsive protein
  misc_feature (207)..(429): NCBI GI NO: 20330772 NR Description: Unknown protein
  misc_feature (16)..(87): NCBI GI NO: 20330772 NR Description: Unknown protein
MVRKETAMRLPPQHQGLEVKIPSFFRCPISLDVMRSPVSLCTGVTYDRASIQQWLDSGNTTCPATMLPLPSTDLVPNLTLRSLIAHWAASAASCSPTAAGGAGVADSSSARTSSPASLVRQVASSGVDPSPALRELAAYLSDDDVDDFEKNALVGAGRAAETVASVLRRRAEETGVEGVEAATRVLALILASDGIDDSNKKRVATGLAADAAASTASLARVMRGGSDLEARIDAAKLAELLLANAAGEAKAAATKSSELLAELVRLVGTVDETGALDRNAVDAGLSCLAAICGSCRAARGEMVRLGAVPAAVRALRASTESGASAKALRVLESAVGCAEGRAALCANAEDAIPAVVGKMMKAGRDGAEAAVAVLWAVCHRYQDRRAADAAAAAEGGLTRLLLLMQSGCSPAARQMALELLKIYRVNAKSCLAGYDSKTTHIMPF

SEQ ID NO: 29994 - protein, 437 aa, Zea mays subsp. mays
  peptide (1)..(437): Ceres Seq. ID no. 12362645
  misc_feature (14)..(83): Pfam Name: Pfam Description:  U-box domain
  misc_feature (1)..(437): NCBI GI NO: 38605834 NR Description: OSJNBb0108J11.6
  misc_feature (12)..(437): NCBI GI NO: 15237755 NR Description: putative protein; protein id: At5g64660.1
  misc_feature (172)..(437): NCBI GI NO: 15242515 NR Description: putative protein; protein id: At5g09800.1
  misc_feature (14)..(83): NCBI GI NO: 15242515 NR Description: putative protein; protein id: At5g09800.1
  misc_feature (152)..(437): NCBI GI NO: 13539578 NR Description: photoperiod responsive protein
  misc_feature (15)..(416): NCBI GI NO: 38346713 NR Description: OSJNBa0086O06.11
  misc_feature (10)..(415): NCBI GI NO: 37530696 NR Description: hypothetical protein
  misc_feature (6)..(243): NCBI GI NO: 13539578 NR Description: photoperiod responsive protein
  misc_feature (200)..(422): NCBI GI NO: 20330772 NR Description: Unknown protein
  misc_feature (9)..(80): NCBI GI NO: 20330772 NR Description: Unknown protein
MRLPPQHQGLEVKIPSFFRCPISLDVMRSPVSLCTGVTYDRASIQQWLDSGNTTCPATMLPLPSTDLVPNLTLRSLIAHWAASAASCSPTAAGGAGVADSSSARTSSPASLVRQVASSGVDPSPALRELAAYLSDDDVDDFEKNALVGAGRAAETVASVLRRRAEETGVEGVEAATRVLALILASDGIDDSNKKRVATGLAADAAASTASLARVMRGGSDLEARIDAAKLAELLLANAAGEAKAAATKSSELLAELVRLVGTVDETGALDRNAVDAGLSCLAAICGSCRAARGEMVRLGAVPAAVRALRASTESGASAKALRVLESAVGCAEGRAALCANAEDAIPAVVGKMMKAGRDGAEAAVAVLWAVCHRYQDRRAADAAAAAEGGLTRLLLLMQSGCSPAARQMALELLKIYRVNAKSCLAGYDSKTTHIMPF

SEQ ID NO: 29995 - DNA, 1440 bp, Zea mays subsp. mays
  misc_feature (1)..(1440): Ceres Seq. ID no. 12408549
gacgcgcacccgcaccagcctctagtcggccagtcgggacgaagcctctcgaacgagcgaggccacgaggtgcccgccgcgcccagccggcctcgccgaccgggcccgccggcccctatataggcaggcgccacttcctcctcgcaaccaccagacgccagtccaccaccgcttcccgtgcagcgccctccctctacgttcccccatttcctgtgttggcggcgatggcgcggcacttcgtgctcaacaccggcgccaagatcccctccgtggggctcggcacctggcagtctgaccccggcgtcgttggcaacgctgtctacgccgccgtcaaggcgggttaccgacatatcgattgtgccagagtttacggcaacgaaaaggagattggtttggcgctgaagaagctatttgaagagggtgtagtgaagcgagaagatctgtttatcacctctaagctatggaatgatcatcatgctcctgaagatgtgcctgaggcactaaatgacagcctgaatgatttgcagcttgagtacctggatctttatcttatccattggccatttagagtcaacaagggaacaaataccagccctgaaaattttgttacacctgacttccctgctacttggggggcaatggaaaagttatatgatgctggcaaagctcgcgctattggtgtgagtaacttctcctcaaagaaattgggtgacttgcttgctgtagctcgtgtacctccagctgttgatcaggtggaatgtcatcctggttggcagcaaactaagctccatagcttttgtcagtcaactggtgttcatctaactgcttactcaccactaggttcacctggtacaacttggatgaatggtaatgtccttaaagaaccaataatcatctcaatagctgagaaactcgggaaaacttctgcacaagtggctctgcgctggaacattcagatgggtcacagtgttcttccaaagagcacgaatgaagaaaggataaagcaaaaccttgatgtttatgattggtcaattccagatgacttgcttgcaaagttctctgagattaagcaggctaggctacttagaggcaacttcattgttaatccagagagcgtttacaagacccatgaggagctctgggatggtgaactttaagaaggacgccgttgtccctcctgactcctgagcagggagcaagcagcgttccattagggctcgtcagatcatttcacctccaaagttgctcttttgaaatgaaggttcagtgctcggaagctctggtgccatcctgtatcacgaactattgagaaatttgtcggtgattttactttgtgctacgggatgtgctgctgcagtctgtcctagtgtcagttgatttttctggtaaaactgtgaccaaataagttaattcgccaggcatcattactattggaatttc

SEQ ID NO: 29996 - protein, 384 aa, Zea mays subsp. mays
  peptide (1)..(384): Ceres Seq. ID no. 12408550
  misc_feature (75)..(384): NCBI GI NO: 34908280 NR Description: putative aldose reductase
  misc_feature (75)..(384): NCBI GI NO: 34908276 NR Description: putative aldose reductase
  misc_feature (72)..(384): NCBI GI NO: 30687261 NR Description: aldo/keto reductase family [Arabidopsis thaliana]
  misc_feature (79)..(384): NCBI GI NO: 30687247 NR Description: aldo/keto reductase family [Arabidopsis thaliana]
  misc_feature (72)..(358): NCBI GI NO: 25283479 NR Description: probable alcohol dehydrogenase
  misc_feature (357)..(384): NCBI GI NO: 25283479 NR Description: probable alcohol dehydrogenase
  misc_feature (83)..(384): NCBI GI NO: 28393400 NR Description: putative aldo/keto reductase
  misc_feature (72)..(382): NCBI GI NO: 13160397 NR Description: aldose reductase [Digitalis purpurea]
  misc_feature (72)..(382): NCBI GI NO: 13160399 NR Description: aldose reductase [Digitalis purpurea]
  misc_feature (79)..(359): NCBI GI NO: 7431114 NR Description: aldehyde dehydrogenase homolog At2g37770 -Arabidopsis thaliana
RAPAPASSRPVGTKPLERARPRGARRAQPASPTGPAGPYIGRRHFLLATTRRQSTTASRAAPSLYVPPFPVLAAMARHFVLNTGAKIPSVGLGTWQSDPGVVGNAVYAAVKAGYRHIDCARVYGNEKEIGLALKKLFEEGVVKREDLFITSKLWNDHHAPEDVPEALNDSLNDLQLEYLDLYLIHWPFRVNKGTNTSPENFVTPDFPATWGAMEKLYDAGKARAIGVSNFSSKKLGDLLAVARVPPAVDQVECHPGWQQTKLHSFCQSTGVHLTAYSPLGSPGTTWMNGNVLKEPIIISIAEKLGKTSAQVALRWNIQMGHSVLPKSTNEERIKQNLDVYDWSIPDDLLAKFSEIKQARLLRGNFIVNPESVYKTHEELWDGEL

SEQ ID NO: 29997 - protein, 310 aa, Zea mays subsp. mays
  peptide (1)..(310): Ceres Seq. ID no. 12408551
  misc_feature (1)..(310): NCBI GI NO: 34908280 NR Description: putative aldose reductase
  misc_feature (1)..(310): NCBI GI NO: 34908276 NR Description: putative aldose reductase
  misc_feature (1)..(310): NCBI GI NO: 30687261 NR Description: aldo/keto reductase family [Arabidopsis thaliana]
  misc_feature (5)..(310): NCBI GI NO: 30687247 NR Description: aldo/keto reductase family [Arabidopsis thaliana]
  misc_feature (1)..(284): NCBI GI NO: 25283479 NR Description: probable alcohol dehydrogenase
  misc_feature (283)..(310): NCBI GI NO: 25283479 NR Description: probable alcohol dehydrogenase
  misc_feature (9)..(310): NCBI GI NO: 28393400 NR Description: putative aldo/keto reductase
  misc_feature (1)..(308): NCBI GI NO: 13160397 NR Description: aldose reductase [Digitalis purpurea]
  misc_feature (1)..(308): NCBI GI NO: 13160399 NR Description: aldose reductase [Digitalis purpurea]
  misc_feature (5)..(285): NCBI GI NO: 7431114 NR Description: aldehyde dehydrogenase homolog At2g37770 -Arabidopsis thaliana
MARHFVLNTGAKIPSVGLGTWQSDPGVVGNAVYAAVKAGYRHIDCARVYGNEKEIGLALKKLFEEGVVKREDLFITSKLWNDHHAPEDVPEALNDSLNDLQLEYLDLYLIHWPFRVNKGTNTSPENFVTPDFPATWGAMEKLYDAGKARAIGVSNFSSKKLGDLLAVARVPPAVDQVECHPGWQQTKLHSFCQSTGVHLTAYSPLGSPGTTWMNGNVLKEPIIISIAEKLGKTSAQVALRWNIQMGHSVLPKSTNEERIKQNLDVYDWSIPDDLLAKFSEIKQARLLRGNFIVNPESVYKTHEELWDGEL

SEQ ID NO: 29998 - DNA, 1527 bp, Zea mays subsp. mays
  misc_feature (1)..(1527): Ceres Seq. ID no. 12352599
  misc_feature (614)..(614): n is a, c, t, g, unknown, or other
actgcttcccgtagtcctttgtcgcgagctgctgtgctgtgtcctgtgtgcccgcaccatcgcctgaggcctgagggtgcgtgctgcaggtatttattggacgcttcccggatcaaagcaatgtcgagtggcgacagtcggcggtgggcgcgcatgcagtgggtggcgacgcgaccgagtgcggtggtggtacggcgagcgagcgagcgacacgagctgagtgagtgccctgcaagcccaagctcgtgacagagataggacttcagctcgactcgcgcggtcgccttgcctgctgcacacgagccgtcgccaactcgatcctcaccggtgacccctaccgcagctcatatcatcctgttcttgctcttcatcttactgttaatttcctgccaatttaatcccaccggccatcgttctcctgaaccaaagccatggcgcaagctgcttccggctccagcaagatcgacaccaaagctcccacctcagccgacgaggccgctcaacccaagagctacggcgacctggtatccactctcccggctagaggcgggtgggtatcgctcgtgcagtaccagaactactggctgaaccccggcaggctccagaacatcatncccgtgaaagagctctacaagcctcgcgccgacgacatcgtcctcgccacctacctgaaatgcgggaccacgtggctgaaggcgctggccttcgccatcacgacccgcggccgccaccaccaggccttcgccgccgccgaccaccccctgctcaccgtgcacccgcaggaggccgtgccgcacctggaggtgcacacgccagggcagggcctggcagacatcgagaggctgccgtcgccgaggctgctcgggacgcacctgcccctctccctgctcccgccggccgtggccacctccggctgccgcgtcgtgtacctgtgccggcagcccaaggacgtgttcgtctcgctctggcacttcgtgaagggcatgcgcgggggcaggtcccccgtggagctggacgccgcgctggccatgttctgcgagggggtctcgcctttcgggcccgtctgggagcactacctcgagtactggaaggagagcctggcgaggcctgagcgggtccttttcctcaggtacgaggagatggtggcggacccggtgcgtgccgtgaggacgctcgccggcttcttcgccgtcccgttcaccgacgaggaagaggggcgaggggtcccggaggagattgtgaggctgtgcagcttcgagatgctgagcggcttggaaagcaatcggaccggagatcttgattgcggagacaacacggtgatcggaaaatctaccttcttcaggaagggcaaggttggggactgggagaaccacttgacaaaagagatgggcaagaaggtcgacgccgttttcgaagacaagctccagggatctggtctcgtgttttgaattttgattactatccatgcatggcttttgtttgtgtgatgctgtttgtccagaataactaatcgtttgcgcatgttgc

SEQ ID NO: 29999 - protein, 338 aa, Zea mays subsp. mays
  peptide (1)..(338): Ceres Seq. ID no. 12352600
  misc_feature (73)..(335): Pfam Name: Pfam Description:  Sulfotransferase domain
  misc_feature (30)..(336): NCBI GI NO: 34905060 NR Description: putative flavonol 4'-sulfotransferase
  misc_feature (15)..(182): NCBI GI NO: 34905062 NR Description: P0686C03.14
  misc_feature (233)..(338): NCBI GI NO: 34905062 NR Description: P0686C03.14
  misc_feature (1)..(337): NCBI GI NO: 15221130 NR Description: putative flavonol sulfotransferase
  misc_feature (1)..(337): NCBI GI NO: 21593660 NR Description: putative flavonol sulfotransferase
  misc_feature (14)..(336): NCBI GI NO: 38346451 NR Description: OSJNBa0018J19.12
  misc_feature (8)..(336): NCBI GI NO: 38344441 NR Description: OSJNBa0038O10.13
  misc_feature (4)..(336): NCBI GI NO: 40253317 NR Description: putative flavonol 3-sulfotransferase
  misc_feature (5)..(337): NCBI GI NO: 15221820 NR Description: flavonol 4'-sulfotransferase, putative
  misc_feature (26)..(337): NCBI GI NO: 21593087 NR Description: putative flavonol sulfotransferase
  misc_feature (61)..(61): Xaa is any aa, unknown or other
MAQAASGSSKIDTKAPTSADEAAQPKSYGDLVSTLPARGGWVSLVQYQNYWLNPGRLQNIXPVKELYKPRADDIVLATYLKCGTTWLKALAFAITTRGRHHQAFAAADHPLLTVHPQEAVPHLEVHTPGQGLADIERLPSPRLLGTHLPLSLLPPAVATSGCRVVYLCRQPKDVFVSLWHFVKGMRGGRSPVELDAALAMFCEGVSPFGPVWEHYLEYWKESLARPERVLFLRYEEMVADPVRAVRTLAGFFAVPFTDEEEGRGVPEEIVRLCSFEMLSGLESNRTGDLDCGDNTVIGKSTFFRKGKVGDWENHLTKEMGKKVDAVFEDKLQGSGLVF

SEQ ID NO: 30000 - DNA, 1436 bp, Zea mays subsp. mays
  misc_feature (1)..(1436): Ceres Seq. ID no. 12352544
gaaacaaattgcgcattttcttctcctgcggtccttccttcgcttccccgttcttccagaatcctgtcgagacctgaatccaccctcacccagcggtccccatggcctccggcgaaggtgtagttgaccaaccgcctctcttctgttgatcctcgcatcggccaactcccccatctccgcaagctctcattccgccagaacctcctcgacgatgacgccgtcgcgccactcacgtcctgggaggctattgccgggttgaaggagttcgtccttagagataacaaacttacaaggattcctgatgctggcatattcaaggatcttctggtgttcgatgtatctttcaatgagatatcttctttgactggtctgtccaaggtttccatcaaattgaaggaactttatgtttcaaaaaatgaagttgcaaagatggaagagcttgaacatttccatgcgctggaaattcttgaacttggtagcaacagattacgggtaatggaaaatcttgaaaccttgacaaatctacaagaactgtggttgggaagaaatcgaattcgagctgtcaacttgtgtggtttgaagctaattaagaaaataagtttgcaaagcaacagactgacttcaatgcatgggtttcaggaatgtgctgcattagaggagttatacctcagccataatggaatccaaaagatggaaggcctctctactttgcataacctccgcattttggatgtttcagctaacaagctaacgactatagaaaatatcgaaaccttaaccaggctggaggacctgtggttgaatgacaaccaaataccatctctagagggtatagagacagctttggctggttcgcgggagaagttgacgacaatctatctcgaacgaaatccctgtgcaaaaactccagattactcgtcgacgttgaggaaaatatttccaaatctcgaacaaattgattcagatatcatagcatgataactagctaatccttgcccagatactaaggcaaagaaggctttggggttccccggagaagtcattaacagcaatcaacttgtgaggcgaacaatagacagtaatttgatccttaaagtcttcattgccaactctgctcgtgttgtggaagacattggttcggagtttgtagccttgagccgttacgggcttaatatagtgattggtaaccaaataattagaggtgtacgaggattgtcacaggatccatatccgtgttactagttttaagatgtttcatttcagttctctagattagtgttgatttttttttctctccaaatgaggctaggaacagccagcagttcatttctgtaagttgaatgcagacatctctgtgttgcatatcaacttgcaaggatgtgtcagcctgttgagaacccgaaattatcttttatttgaattttatttattactcc

SEQ ID NO: 30001 - protein, 182 aa, Zea mays subsp. mays
  peptide (1)..(182): Ceres Seq. ID no. 12352545
  misc_feature (1)..(182): NCBI GI NO: 21536755 NR Description: unknown [Arabidopsis thaliana]
  misc_feature (1)..(182): NCBI GI NO: 15241153 NR Description: putative protein; protein id: At5g19680
  misc_feature (1)..(181): NCBI GI NO: 4506013 NR Description: protein phosphatase 1, regulatory subunit 7; sds22
  misc_feature (1)..(181): NCBI GI NO: 4633066 NR Description: protein phosphatase-1 regulatory subunit 7 alpha2
  misc_feature (1)..(181): NCBI GI NO: 12963569 NR Description: protein phosphatase-1 regulatory subunit 7
  misc_feature (1)..(181): NCBI GI NO: 34877683 NR Description: similar to protein phosphatase 1
  misc_feature (1)..(180): NCBI GI NO: 31233812 NR Description: ENSANGP00000015763 [Anopheles gambiae]
  misc_feature (1)..(180): NCBI GI NO: 21358617 NR Description: CG5851-PA [Drosophila melanogaster]
  misc_feature (1)..(180): NCBI GI NO: 6684160 NR Description: putative mitotic protein phosphatase 1 regulator
  misc_feature (1)..(181): NCBI GI NO: 40747368 NR Description: hypothetical protein AN0425.2
MEELEHFHALEILELGSNRLRVMENLETLTNLQELWLGRNRIRAVNLCGLKLIKKISLQSNRLTSMHGFQECAALEELYLSHNGIQKMEGLSTLHNLRILDVSANKLTTIENIETLTRLEDLWLNDNQIPSLEGIETALAGSREKLTTIYLERNPCAKTPDYSSTLRKIFPNLEQIDSDIIA

SEQ ID NO: 30002 - protein, 160 aa, Zea mays subsp. mays
  peptide (1)..(160): Ceres Seq. ID no. 12352546
  misc_feature (1)..(160): NCBI GI NO: 21536755 NR Description: unknown [Arabidopsis thaliana]
  misc_feature (1)..(160): NCBI GI NO: 15241153 NR Description: putative protein; protein id: At5g19680
  misc_feature (1)..(159): NCBI GI NO: 4506013 NR Description: protein phosphatase 1, regulatory subunit 7; sds22
  misc_feature (1)..(159): NCBI GI NO: 4633066 NR Description: protein phosphatase-1 regulatory subunit 7 alpha2
  misc_feature (1)..(159): NCBI GI NO: 12963569 NR Description: protein phosphatase-1 regulatory subunit 7
  misc_feature (1)..(159): NCBI GI NO: 34877683 NR Description: similar to protein phosphatase 1
  misc_feature (1)..(158): NCBI GI NO: 31233812 NR Description: ENSANGP00000015763 [Anopheles gambiae]
  misc_feature (1)..(158): NCBI GI NO: 21358617 NR Description: CG5851-PA [Drosophila melanogaster]
  misc_feature (1)..(158): NCBI GI NO: 6684160 NR Description: putative mitotic protein phosphatase 1 regulator
  misc_feature (1)..(159): NCBI GI NO: 40747368 NR Description: hypothetical protein AN0425.2
MENLETLTNLQELWLGRNRIRAVNLCGLKLIKKISLQSNRLTSMHGFQECAALEELYLSHNGIQKMEGLSTLHNLRILDVSANKLTTIENIETLTRLEDLWLNDNQIPSLEGIETALAGSREKLTTIYLERNPCAKTPDYSSTLRKIFPNLEQIDSDIIA

SEQ ID NO: 30003 - protein, 117 aa, Zea mays subsp. mays
  peptide (1)..(117): Ceres Seq. ID no. 12352547
  misc_feature (1)..(117): NCBI GI NO: 21536755 NR Description: unknown [Arabidopsis thaliana]
  misc_feature (1)..(117): NCBI GI NO: 15241153 NR Description: putative protein; protein id: At5g19680
  misc_feature (1)..(116): NCBI GI NO: 4506013 NR Description: protein phosphatase 1, regulatory subunit 7; sds22
  misc_feature (1)..(116): NCBI GI NO: 4633066 NR Description: protein phosphatase-1 regulatory subunit 7 alpha2
  misc_feature (1)..(116): NCBI GI NO: 12963569 NR Description: protein phosphatase-1 regulatory subunit 7
  misc_feature (1)..(116): NCBI GI NO: 34877683 NR Description: similar to protein phosphatase 1
  misc_feature (1)..(115): NCBI GI NO: 31233812 NR Description: ENSANGP00000015763 [Anopheles gambiae]
  misc_feature (1)..(115): NCBI GI NO: 21358617 NR Description: CG5851-PA [Drosophila melanogaster]
  misc_feature (1)..(115): NCBI GI NO: 6684160 NR Description: putative mitotic protein phosphatase 1 regulator
  misc_feature (1)..(116): NCBI GI NO: 40747368 NR Description: hypothetical protein AN0425.2
MHGFQECAALEELYLSHNGIQKMEGLSTLHNLRILDVSANKLTTIENIETLTRLEDLWLNDNQIPSLEGIETALAGSREKLTTIYLERNPCAKTPDYSSTLRKIFPNLEQIDSDIIA

SEQ ID NO: 30004 - DNA, 1701 bp, Zea mays subsp. mays
  misc_feature (1)..(1701): Ceres Seq. ID no. 12356548
ttcagctcgaggccttgtcttgagttctctagctcgtccacaggcctggccagctagctagctagcactgacactgaccgagaccctgcagctagcagctgatcgatccatccatggccatgggctgctgctacggtgatttcttcgacaaggccaagccttacctcgccatgatctccctgcagttcggctatgccggcatgaacgtcatcaccaaggtctccctcaaccacggcatgagccactacgtgctcgtcgtctaccgccacgcctttgccaccgtctctattgcaccgtttgctctcatccttgagaggaaggtgaggcccaacatgacgtggtccgtcttcctccagatcttcgtgttggcactgctcgggcctgtgatagaccagaacttctactacgccggcctcaagttcaccgggccgaccttcgcgtgcgccatgagcaacatccttcctgccatgaccttcgtcatggccgtgattttcaggatggagaaggtggacctgaagaagatgcggtgccagggcgaaggtggccgggacgctggtgaccgtggccggcgcgatgatgatgacgctgtacaagggcccgctgatgaagatggcgtggaccagcagcggccacgcgcacggcggcggcggcggcgccgaggcggccgtcatcgaccccagcggcagggagtggttcctgggctcgctcttcgtcatcgtcgccaccctcgcctgggcctcgctcttcatcctccaggcgcacaccctgaagcagtacgcggcgccgctctccctcaccaccctcatctgcttcgtcggcaccctacaggccatcgtcgtcaccttcgccatggagcaccgcccctccgtctggaccatcggcttcgacatgaacctcctcgccgccgcatacgccggcattgtcacgtcgagcatagcgtactacgtgcaaggcctggtgatccagaagaccgggcccgtgttcgcgtcggcgttcagcccgctgatgatgatcatcgtggccgtcatgggctccttcatcctcgccgagaagatattcctcggcggcgtcctcggcgccgtcctcatcgtcatcgggctctactcggtgctctggggcaagcacaaggagacgcaggacaaggaggacgatgagactacagagctgcccgtcgtggcaataatggcatccaaaaccaatggagtcgtctacgacgacgacgatgacgtcgtcttcgtcaaggagatcgccgccgccggcgctggcgctgttggaggagatgactcggagtgcaggaaggcgactggggtggtgaagtcatcctcccgtggacacggagctgctggtgcagtttgatggaacatgcatggaagaggcggtgtccaactgctaacttcctttccttgcattgccatgtgtgtcccctagtatctactgacgttgcatgcatcacagggtcgggtgattgagagaggcagctgcgatgcagagtggaaggactggaataattttgttctgtgcccttttgaattttgctacctttttgtacctaagatgtatctactagtatatttaacttgtattttcttatgctttaatttctgtggagaaaaaagtgatgttccgggacttaagcgaaggacatatatatatgtatgtatcacatcggcttttgccatgtaatatattattgcttttctt

SEQ ID NO: 30005 - protein, 346 aa, Zea mays subsp. mays
  peptide (1)..(346): Ceres Seq. ID no. 12356549
  misc_feature (25)..(142): Pfam Name: Pfam Description:  Integral membrane protein DUF6
  misc_feature (1)..(142): NCBI GI NO: 34908998 NR Description: nodulin-like protein
  misc_feature (10)..(142): NCBI GI NO: 15240683 NR Description: MtN21 nodulin protein-like; protein id: At5g07050
  misc_feature (10)..(142): NCBI GI NO: 2598575 NR Description: MtN21 [Medicago truncatula]
  misc_feature (12)..(139): NCBI GI NO: 30688451 NR Description: nodulin MtN21 family protein
  misc_feature (12)..(139): NCBI GI NO: 7487973 NR Description: probable integral membrane protein nodulinAt2g40900
  misc_feature (12)..(142): NCBI GI NO: 15228980 NR Description: nodulin-like protein; protein id: At3g56620
  misc_feature (12)..(142): NCBI GI NO: 21592817 NR Description: nodulin-like protein [Arabidopsis thaliana]
  misc_feature (15)..(138): NCBI GI NO: 15219123 NR Description: nodulin-like protein; protein id: At1g21890
  misc_feature (15)..(138): NCBI GI NO: 17529004 NR Description: putative nodulin protein [Arabidopsis thaliana]
  misc_feature (15)..(138): NCBI GI NO: 6552743 NR Description: T26F17.11 [Arabidopsis thaliana]
MAMGCCYGDFFDKAKPYLAMISLQFGYAGMNVITKVSLNHGMSHYVLVVYRHAFATVSIAPFALILERKVRPNMTWSVFLQIFVLALLGPVIDQNFYYAGLKFTGPTFACAMSNILPAMTFVMAVIFRMEKVDLKKMRCQGEGGRDAGDRGRRDDDDAVQGPADEDGVDQQRPRARRRRRRRGGRHRPQRQGVVPGLALRHRRHPRLGLALHPPGAHPEAVRGAALPHHPHLLRRHPTGHRRHLRHGAPPLRLDHRLRHEPPRRRIRRHCHVEHSVLRARPGDPEDRARVRVGVQPADDDHRGRHGLLHPRREDIPRRRPRRRPHRHRALLGALGQAQGDAGQGGR

SEQ ID NO: 30006 - protein, 344 aa, Zea mays subsp. mays
  peptide (1)..(344): Ceres Seq. ID no. 12356550
  misc_feature (23)..(140): Pfam Name: Pfam Description:  Integral membrane protein DUF6
  misc_feature (1)..(140): NCBI GI NO: 34908998 NR Description: nodulin-like protein
  misc_feature (8)..(140): NCBI GI NO: 15240683 NR Description: MtN21 nodulin protein-like; protein id: At5g07050
  misc_feature (8)..(140): NCBI GI NO: 2598575 NR Description: MtN21 [Medicago truncatula]
  misc_feature (10)..(137): NCBI GI NO: 30688451 NR Description: nodulin MtN21 family protein
  misc_feature (10)..(137): NCBI GI NO: 7487973 NR Description: probable integral membrane protein nodulinAt2g40900
  misc_feature (10)..(140): NCBI GI NO: 15228980 NR Description: nodulin-like protein; protein id: At3g56620
  misc_feature (10)..(140): NCBI GI NO: 21592817 NR Description: nodulin-like protein [Arabidopsis thaliana]
  misc_feature (13)..(136): NCBI GI NO: 15219123 NR Description: nodulin-like protein; protein id: At1g21890
  misc_feature (13)..(136): NCBI GI NO: 17529004 NR Description: putative nodulin protein [Arabidopsis thaliana]
  misc_feature (13)..(136): NCBI GI NO: 6552743 NR Description: T26F17.11 [Arabidopsis thaliana]
MGCCYGDFFDKAKPYLAMISLQFGYAGMNVITKVSLNHGMSHYVLVVYRHAFATVSIAPFALILERKVRPNMTWSVFLQIFVLALLGPVIDQNFYYAGLKFTGPTFACAMSNILPAMTFVMAVIFRMEKVDLKKMRCQGEGGRDAGDRGRRDDDDAVQGPADEDGVDQQRPRARRRRRRRGGRHRPQRQGVVPGLALRHRRHPRLGLALHPPGAHPEAVRGAALPHHPHLLRRHPTGHRRHLRHGAPPLRLDHRLRHEPPRRRIRRHCHVEHSVLRARPGDPEDRARVRVGVQPADDDHRGRHGLLHPRREDIPRRRPRRRPHRHRALLGALGQAQGDAGQGGR

SEQ ID NO: 30007 - protein, 327 aa, Zea mays subsp. mays
  peptide (1)..(327): Ceres Seq. ID no. 12356551
  misc_feature (6)..(123): Pfam Name: Pfam Description:  Integral membrane protein DUF6
  misc_feature (1)..(123): NCBI GI NO: 34908998 NR Description: nodulin-like protein
  misc_feature (1)..(123): NCBI GI NO: 15240683 NR Description: MtN21 nodulin protein-like; protein id: At5g07050
  misc_feature (1)..(123): NCBI GI NO: 2598575 NR Description: MtN21 [Medicago truncatula]
  misc_feature (1)..(120): NCBI GI NO: 30688451 NR Description: nodulin MtN21 family protein
  misc_feature (1)..(120): NCBI GI NO: 7487973 NR Description: probable integral membrane protein nodulinAt2g40900
  misc_feature (1)..(123): NCBI GI NO: 15228980 NR Description: nodulin-like protein; protein id: At3g56620
  misc_feature (1)..(123): NCBI GI NO: 21592817 NR Description: nodulin-like protein [Arabidopsis thaliana]
  misc_feature (1)..(119): NCBI GI NO: 15219123 NR Description: nodulin-like protein; protein id: At1g21890
  misc_feature (1)..(119): NCBI GI NO: 17529004 NR Description: putative nodulin protein [Arabidopsis thaliana]
  misc_feature (1)..(119): NCBI GI NO: 6552743 NR Description: T26F17.11 [Arabidopsis thaliana]
MISLQFGYAGMNVITKVSLNHGMSHYVLVVYRHAFATVSIAPFALILERKVRPNMTWSVFLQIFVLALLGPVIDQNFYYAGLKFTGPTFACAMSNILPAMTFVMAVIFRMEKVDLKKMRCQGEGGRDAGDRGRRDDDDAVQGPADEDGVDQQRPRARRRRRRRGGRHRPQRQGVVPGLALRHRRHPRLGLALHPPGAHPEAVRGAALPHHPHLLRRHPTGHRRHLRHGAPPLRLDHRLRHEPPRRRIRRHCHVEHSVLRARPGDPEDRARVRVGVQPADDDHRGRHGLLHPRREDIPRRRPRRRPHRHRALLGALGQAQGDAGQGGR

SEQ ID NO: 30008 - DNA, 1422 bp, Zea mays subsp. mays
  misc_feature (1)..(1422): Ceres Seq. ID no. 12406840
tcagataccaccagaccagaccagatccgtcccgcgaatctaaggtcaaaccaaccgcgatccgcgaatccgcggagaggaggggaggggaggggaagggcgcgggggcatggagttcctgcagggccagaggctggagaccacgctggccgtcgcggccgccgtcgttgccgtcgcagccggctccgcctacctcttcctccgcagtaggaagcccaggggatgcctagaccccgagaacttcaaggagttcaaacttgttgagaagaggcagctgagtcataatgttgccaagttcaagtttgcgctcccaacacctacttctgtattgggtcttccaatcggacagcatataagctgcagaggacaggatgcttctggcgaggaagtgatcaagccttatactccaactactctggactctgatgttggatcttttgagcttgttataaagatgtatccccaaggaagaatgtctcatcatttccgtgagatgaaagttggtgattatatgtctgtgaagggacctaagggccgtttcaagtacctacctggacaagtgagagcattaggaatggtagctggaggatcaggcattactccaatgttccaagtcacaagggcaattcttgagaacccaaaggacaacacgaaagtacacttaatctatgcaaatgtcacgtatgaggatattcttctgaaggaagaacttgacggcatggccaaaaactatcctgatcgtttcaagatctactatgtcttgaatcagcctcctgaagtctgggacggtagcgtcgggttcgtgtcgaaggaaatgatccagactcattgcccagcgcctgccgccgacattcaggtattgcgatgtggacctcctcccatgaacaaagccatggccgcgcacctggacgaccttggctacacgaaggagatgcagttccagttctaagcgttacattctctctaccagtaccagaataaacgggggtggaacaagtttcgtcgcctctttgagcagacgaagcctgaccatatcgccatataggctccaaacagacgcggtttgccactgacagtcacagagcgtcgtacttaaggggtgtttggtttatagggactaaactttagtctctccactttattccattttagttcataaattattaaatagggaaacttaaatagagttttagtttctatatttagtaatttagggactaaaatggaataaaatagaggactaaaaattagtccctagaaaccaaacacccctttactctacctggatgaaagcagcagtacagtacccacctaatttgtatcggtgtcgggacattgtaccatgccgttcttttgtatcggtttgtcactcactcactccgcgagccagcagcccagcacacgatccatcgtgtcattttg

SEQ ID NO: 30009 - protein, 279 aa, Zea mays subsp. mays
  peptide (1)..(279): Ceres Seq. ID no. 12406841
  misc_feature (151)..(265): Pfam Name: Pfam Description:  Oxidoreductase NAD-binding domain
  misc_feature (1)..(279): NCBI GI NO: 17221690 NR Description: cytochrome b5 reductase isoform II [Zea mays]
  misc_feature (1)..(279): NCBI GI NO: 4336205 NR Description: cytochrome b5 reductase [Zea mays]
  misc_feature (2)..(279): NCBI GI NO: 15238025 NR Description: NADH-cytochrome b5 reductase; protein id:At5g17770
  misc_feature (116)..(279): NCBI GI NO: 16648905 NR Description: NADH-cytochrome b5 reductase
  misc_feature (15)..(273): NCBI GI NO: 6070342 NR Description: NADH-cytochrome b5 reductase [Mortierella alpina]
  misc_feature (20)..(273): NCBI GI NO: 40739560 NR Description: hypothetical protein AN6366.2
  misc_feature (120)..(279): NCBI GI NO: 21312524 NR Description: RIKEN cDNA 1500005G05 [Mus musculus]
  misc_feature (19)..(146): NCBI GI NO: 21312524 NR Description: RIKEN cDNA 1500005G05 [Mus musculus]
  misc_feature (120)..(279): NCBI GI NO: 27712062 NR Description: similar to RIKEN cDNA 1500005G05
  misc_feature (22)..(146): NCBI GI NO: 27712062 NR Description: similar to RIKEN cDNA 1500005G05
MEFLQGQRLETTLAVAAAVVAVAAGSAYLFLRSRKPRGCLDPENFKEFKLVEKRQLSHNVAKFKFALPTPTSVLGLPIGQHISCRGQDASGEEVIKPYTPTTLDSDVGSFELVIKMYPQGRMSHHFREMKVGDYMSVKGPKGRFKYLPGQVRALGMVAGGSGITPMFQVTRAILENPKDNTKVHLIYANVTYEDILLKEELDGMAKNYPDRFKIYYVLNQPPEVWDGSVGFVSKEMIQTHCPAPAADIQVLRCGPPPMNKAMAAHLDDLGYTKEMQFQF

SEQ ID NO: 30010 - protein, 164 aa, Zea mays subsp. mays
  peptide (1)..(164): Ceres Seq. ID no. 12406842
  misc_feature (36)..(150): Pfam Name: Pfam Description:  Oxidoreductase NAD-binding domain
  misc_feature (1)..(164): NCBI GI NO: 17221690 NR Description: cytochrome b5 reductase isoform II [Zea mays]
  misc_feature (1)..(164): NCBI GI NO: 4336205 NR Description: cytochrome b5 reductase [Zea mays]
  misc_feature (1)..(164): NCBI GI NO: 15238025 NR Description: NADH-cytochrome b5 reductase; protein id:At5g17770
  misc_feature (1)..(164): NCBI GI NO: 16648905 NR Description: NADH-cytochrome b5 reductase
  misc_feature (1)..(158): NCBI GI NO: 6070342 NR Description: NADH-cytochrome b5 reductase [Mortierella alpina]
  misc_feature (1)..(158): NCBI GI NO: 40739560 NR Description: hypothetical protein AN6366.2
  misc_feature (5)..(164): NCBI GI NO: 21312524 NR Description: RIKEN cDNA 1500005G05 [Mus musculus]
  misc_feature (1)..(31): NCBI GI NO: 21312524 NR Description: RIKEN cDNA 1500005G05 [Mus musculus]
  misc_feature (5)..(164): NCBI GI NO: 27712062 NR Description: similar to RIKEN cDNA 1500005G05
  misc_feature (1)..(31): NCBI GI NO: 27712062 NR Description: similar to RIKEN cDNA 1500005G05
MYPQGRMSHHFREMKVGDYMSVKGPKGRFKYLPGQVRALGMVAGGSGITPMFQVTRAILENPKDNTKVHLIYANVTYEDILLKEELDGMAKNYPDRFKIYYVLNQPPEVWDGSVGFVSKEMIQTHCPAPAADIQVLRCGPPPMNKAMAAHLDDLGYTKEMQFQF

SEQ ID NO: 30011 - protein, 158 aa, Zea mays subsp. mays
  peptide (1)..(158): Ceres Seq. ID no. 12406843
  misc_feature (30)..(144): Pfam Name: Pfam Description:  Oxidoreductase NAD-binding domain
  misc_feature (1)..(158): NCBI GI NO: 17221690 NR Description: cytochrome b5 reductase isoform II [Zea mays]
  misc_feature (1)..(158): NCBI GI NO: 4336205 NR Description: cytochrome b5 reductase [Zea mays]
  misc_feature (1)..(158): NCBI GI NO: 15238025 NR Description: NADH-cytochrome b5 reductase; protein id:At5g17770
  misc_feature (1)..(158): NCBI GI NO: 16648905 NR Description: NADH-cytochrome b5 reductase
  misc_feature (1)..(152): NCBI GI NO: 6070342 NR Description: NADH-cytochrome b5 reductase [Mortierella alpina]
  misc_feature (1)..(152): NCBI GI NO: 40739560 NR Description: hypothetical protein AN6366.2
  misc_feature (1)..(158): NCBI GI NO: 21312524 NR Description: RIKEN cDNA 1500005G05 [Mus musculus]
  misc_feature (1)..(25): NCBI GI NO: 21312524 NR Description: RIKEN cDNA 1500005G05 [Mus musculus]
  misc_feature (1)..(158): NCBI GI NO: 27712062 NR Description: similar to RIKEN cDNA 1500005G05
  misc_feature (1)..(25): NCBI GI NO: 27712062 NR Description: similar to RIKEN cDNA 1500005G05
MSHHFREMKVGDYMSVKGPKGRFKYLPGQVRALGMVAGGSGITPMFQVTRAILENPKDNTKVHLIYANVTYEDILLKEELDGMAKNYPDRFKIYYVLNQPPEVWDGSVGFVSKEMIQTHCPAPAADIQVLRCGPPPMNKAMAAHLDDLGYTKEMQFQF

SEQ ID NO: 30012 - DNA, 1391 bp, Zea mays subsp. mays
  misc_feature (1)..(1391): Ceres Seq. ID no. 12405442
attgctaccactgccacttctcccgatcgattcgtcgctgaggaatacctggtcaccacctgcgggctcaccccagcgcaagcgggcagggcgtccaaggggctcacccacctcaagtctccggttaagcccgacgccgtcgtcgcctttctcgtgggcgtcggtctcgccaaagacgacatcaccgccggtatcgccaggtacccgcggctcctctgctccaaggtggacaaaaccctaacccctcgcttcgctcagctcatgagccttgggctatccccttcccaaatctcccgcctcattaccatcgtccccaacatcttcgtcgctcccaaaaagatctcccacctccagttctatctctccttcatgggttgcttcgatcgggttcactccgccatcaggatcaatccaatgctcctcagtcggaaccttgaggatgtggtcaagcctaacatagcattcctactgcagtgcggtctaactgtttctaatgttctagagttcccattgctgataggcatgaggcccgagagtgtcagggaaagggtggcatgcgctgagaagcttggtgtgccgcgcaatacagggatgttcaagagtgccctgtgggccgtctattgcgttggtcccaactccattggtgcaaaattggatgtcatcaaggcgactcttggatgctctgaggcggagctgacccttgtggtgcgcaagtcacctccaattctgaggatgtcagaaggcaagctgagtcgcgcattgaagttcctgaaggtggatgttgggttgaagcttcagtacatcttgcttaggccagcaatacttgcctttagcatgcagaggcggctgatgcccagacattatttcatcaagattctgaaggcgaaggggcttgtgaaggaaaatgttgacttttataatgctctttgtttaactgaaaagagatttgcccagaagtttattgatccttacaaccagagtattgcagggcttgcagatgcttatgctgctgcttgtgctgggaaaatgcctcatgaagattaggcgcattagcagcagcatgctagggatcatggtgaagcaaaggcagagatagtcggttcaggtcttctctgcatgtacttgaacagcccctcgccaaactattgtgcagttccttgatgcataccaatgcttgcaacagatgctgcctttgtgtgttgaaatgaaattagttcttccttaagaccggtgttgtgacctatcatttcaggtaagccattggctattttcagatgggtataatgatatgttactctgttctttctgtgtttcaggtctaaatattgtctgtacttgaagtcttgaattaattatgtattgaacttgtcacacagttaattatttgattt

SEQ ID NO: 30013 - protein, 347 aa, Zea mays subsp. mays
  peptide (1)..(347): Ceres Seq. ID no. 12405443
  misc_feature (48)..(318): Pfam Name: Pfam Description:  mTERF
  misc_feature (2)..(321): NCBI GI NO: 39545750 NR Description: OSJNBb0034I13.16
  misc_feature (16)..(335): NCBI GI NO: 18415647 NR Description: expressed protein; protein id: At5g07900
  misc_feature (37)..(339): NCBI GI NO: 15238313 NR Description: putative protein; protein id: At5g64950
  misc_feature (37)..(339): NCBI GI NO: 21553423 NR Description: unknown [Arabidopsis thaliana]
  misc_feature (2)..(344): NCBI GI NO: 34394750 NR Description: unknown protein
  misc_feature (16)..(337): NCBI GI NO: 15218140 NR Description: hypothetical protein; protein id: At1g21150.1
  misc_feature (16)..(337): NCBI GI NO: 25511650 NR Description: T22I11.2 protein - Arabidopsis thaliana
  misc_feature (16)..(281): NCBI GI NO: 15220660 NR Description: hypothetical protein; protein id: At1g61960.1
  misc_feature (16)..(281): NCBI GI NO: 26450011 NR Description: unknown protein [Arabidopsis thaliana]
  misc_feature (16)..(283): NCBI GI NO: 15232683 NR Description: putative protein; protein id: At3g46950
IATTATSPDRFVAEEYLVTTCGLTPAQAGRASKGLTHLKSPVKPDAVVAFLVGVGLAKDDITAGIARYPRLLCSKVDKTLTPRFAQLMSLGLSPSQISRLITIVPNIFVAPKKISHLQFYLSFMGCFDRVHSAIRINPMLLSRNLEDVVKPNIAFLLQCGLTVSNVLEFPLLIGMRPESVRERVACAEKLGVPRNTGMFKSALWAVYCVGPNSIGAKLDVIKATLGCSEAELTLVVRKSPPILRMSEGKLSRALKFLKVDVGLKLQYILLRPAILAFSMQRRLMPRHYFIKILKAKGLVKENVDFYNALCLTEKRFAQKFIDPYNQSIAGLADAYAAACAGKMPHED

SEQ ID NO: 30014 - protein, 260 aa, Zea mays subsp. mays
  peptide (1)..(260): Ceres Seq. ID no. 12405444
  misc_feature (1)..(231): Pfam Name: Pfam Description:  mTERF
  misc_feature (1)..(234): NCBI GI NO: 39545750 NR Description: OSJNBb0034I13.16
  misc_feature (1)..(248): NCBI GI NO: 18415647 NR Description: expressed protein; protein id: At5g07900
  misc_feature (1)..(252): NCBI GI NO: 15238313 NR Description: putative protein; protein id: At5g64950
  misc_feature (1)..(252): NCBI GI NO: 21553423 NR Description: unknown [Arabidopsis thaliana]
  misc_feature (1)..(257): NCBI GI NO: 34394750 NR Description: unknown protein
  misc_feature (1)..(250): NCBI GI NO: 15218140 NR Description: hypothetical protein; protein id: At1g21150.1
  misc_feature (1)..(250): NCBI GI NO: 25511650 NR Description: T22I11.2 protein - Arabidopsis thaliana
  misc_feature (1)..(194): NCBI GI NO: 15220660 NR Description: hypothetical protein; protein id: At1g61960.1
  misc_feature (1)..(194): NCBI GI NO: 26450011 NR Description: unknown protein [Arabidopsis thaliana]
  misc_feature (1)..(196): NCBI GI NO: 15232683 NR Description: putative protein; protein id: At3g46950
MSLGLSPSQISRLITIVPNIFVAPKKISHLQFYLSFMGCFDRVHSAIRINPMLLSRNLEDVVKPNIAFLLQCGLTVSNVLEFPLLIGMRPESVRERVACAEKLGVPRNTGMFKSALWAVYCVGPNSIGAKLDVIKATLGCSEAELTLVVRKSPPILRMSEGKLSRALKFLKVDVGLKLQYILLRPAILAFSMQRRLMPRHYFIKILKAKGLVKENVDFYNALCLTEKRFAQKFIDPYNQSIAGLADAYAAACAGKMPHED

SEQ ID NO: 30015 - protein, 224 aa, Zea mays subsp. mays
  peptide (1)..(224): Ceres Seq. ID no. 12405445
  misc_feature (1)..(195): Pfam Name: Pfam Description:  mTERF
  misc_feature (1)..(198): NCBI GI NO: 39545750 NR Description: OSJNBb0034I13.16
  misc_feature (1)..(212): NCBI GI NO: 18415647 NR Description: expressed protein; protein id: At5g07900
  misc_feature (1)..(216): NCBI GI NO: 15238313 NR Description: putative protein; protein id: At5g64950
  misc_feature (1)..(216): NCBI GI NO: 21553423 NR Description: unknown [Arabidopsis thaliana]
  misc_feature (1)..(221): NCBI GI NO: 34394750 NR Description: unknown protein
  misc_feature (1)..(214): NCBI GI NO: 15218140 NR Description: hypothetical protein; protein id: At1g21150.1
  misc_feature (1)..(214): NCBI GI NO: 25511650 NR Description: T22I11.2 protein - Arabidopsis thaliana
  misc_feature (1)..(158): NCBI GI NO: 15220660 NR Description: hypothetical protein; protein id: At1g61960.1
  misc_feature (1)..(158): NCBI GI NO: 26450011 NR Description: unknown protein [Arabidopsis thaliana]
  misc_feature (1)..(160): NCBI GI NO: 15232683 NR Description: putative protein; protein id: At3g46950
MGCFDRVHSAIRINPMLLSRNLEDVVKPNIAFLLQCGLTVSNVLEFPLLIGMRPESVRERVACAEKLGVPRNTGMFKSALWAVYCVGPNSIGAKLDVIKATLGCSEAELTLVVRKSPPILRMSEGKLSRALKFLKVDVGLKLQYILLRPAILAFSMQRRLMPRHYFIKILKAKGLVKENVDFYNALCLTEKRFAQKFIDPYNQSIAGLADAYAAACAGKMPHED

SEQ ID NO: 30016 - DNA, 1606 bp, Zea mays subsp. mays
  misc_feature (1)..(1606): Ceres Seq. ID no. 12406836
atccagctagctgctcacgcccgccacgcctctctttgtctctttcacccagtgacagcgcacagctcccaacctgctcgaagctcggctcagccgatccagtgcgccatggccggccgcgaggcaggcgactgcggcggagaggagccggcccgcgagatccccgacgacatcacgggcgagatcctgctccgcctgccgtcgcgctcggcgctggcgcgcgccgcggtggcgagctgcgccttccacgcgctcgtcgcctccccgcgcttcctccgccgccaccgctcgctgcatagggatcccggatcgctcctcggggtcttcaccttccctctcgtccccgacggcggcagaggtggaggcgacggctcggggcttccaccccaccgagcccccgcacccggcggcgtccaccgccagcgccgtcgccgctgcggccgacttctcgtttgggttcctcccagcggacccctccgccacggctgggtctgaggctgccgagtggatggtccgggactaccgcgacggccgcttcctcctcgaccgcgtgccttcgggaaccgggagcaccgtcttcaccgagctcgccgtctgcgacccgctgtcccgacgctacgtcctgctcccgcccattccggaggacctcgccgacaccgtccacagcgtgctcaccgtcttcggcggccgccgcgcgtgcgagcccttcctcgcgcccgccgagacctgcggcgcggacgacgtcgacgcggacccacctctcaccgtgttctggacggcccgctccccgaggaagatggtggccttcgccttctcgtcgcgcgacggacgatggcgtgcgctcgagtcgccgaactgcttcatctggcgcaggcaccgctccccgttcagctgccccatggcccccatcagcaccgtctggaaccgccgccactacgcgcacggctgcttctactgggtggactgcctcaccagccgctggctcgtgctcgacgggcgcaccatggagctctccctcgcgatgatcccgtcgccggccggctactgggaggagcacgtcgcagtcgtggaggccccggacgggaagcttggcgtattcgcgcacggtttccaccaccccgacggcaaagccaatctacactactatacgatcgtgcacgacaaggaagccgccggcgacacgaagcggtggcagctggagaagacgatccagctgccgtggccgtcagaccaccggtctttctgcctccggggcacggccaacgggtgcctcaacgttggcctcatcattgaagtcggcgagaagaagtcggtattcatgggaagccaccgcatcagggacgccgagctattcaagatcgacgtcaagagtttccagctccaaaagatctgccgagcacggtgcgccggcagtgctgccggcgagtgctgctggccatacttcggcttcccgccgtcgctgtccttgcccactgtgtgagaagcttgatgttactgagacaaaatgaattatgttacagcttcagagccgtccgtctgtatgtaacatgtataagcaacacttgtactcgtccagtttgtttacaaatgcaacgcatacatacat

SEQ ID NO: 30017 - protein, 323 aa, Zea mays subsp. mays
  peptide (1)..(323): Ceres Seq. ID no. 12406837
  misc_feature (1)..(323): NCBI GI NO: 32480316 NR Description: OSJNBa0042D13.1
  misc_feature (1)..(292): NCBI GI NO: 34393351 NR Description: hypothetical protein
  misc_feature (1)..(237): NCBI GI NO: 34393354 NR Description: hypothetical protein
  misc_feature (1)..(198): NCBI GI NO: 34393352 NR Description: hypothetical protein
  misc_feature (1)..(203): NCBI GI NO: 37530886 NR Description: hypothetical protein
  misc_feature (1)..(117): NCBI GI NO: 37530888 NR Description: hypothetical protein
MVRDYRDGRFLLDRVPSGTGSTVFTELAVCDPLSRRYVLLPPIPEDLADTVHSVLTVFGGRRACEPFLAPAETCGADDVDADPPLTVFWTARSPRKMVAFAFSSRDGRWRALESPNCFIWRRHRSPFSCPMAPISTVWNRRHYAHGCFYWVDCLTSRWLVLDGRTMELSLAMIPSPAGYWEEHVAVVEAPDGKLGVFAHGFHHPDGKANLHYYTIVHDKEAAGDTKRWQLEKTIQLPWPSDHRSFCLRGTANGCLNVGLIIEVGEKKSVFMGSHRIRDAELFKIDVKSFQLQKICRARCAGSAAGECCWPYFGFPPSLSLPTV

SEQ ID NO: 30018 - protein, 227 aa, Zea mays subsp. mays
  peptide (1)..(227): Ceres Seq. ID no. 12406838
  misc_feature (1)..(227): NCBI GI NO: 32480316 NR Description: OSJNBa0042D13.1
  misc_feature (1)..(196): NCBI GI NO: 34393351 NR Description: hypothetical protein
  misc_feature (1)..(141): NCBI GI NO: 34393354 NR Description: hypothetical protein
  misc_feature (1)..(102): NCBI GI NO: 34393352 NR Description: hypothetical protein
  misc_feature (1)..(107): NCBI GI NO: 37530886 NR Description: hypothetical protein
  misc_feature (1)..(21): NCBI GI NO: 37530888 NR Description: hypothetical protein
MVAFAFSSRDGRWRALESPNCFIWRRHRSPFSCPMAPISTVWNRRHYAHGCFYWVDCLTSRWLVLDGRTMELSLAMIPSPAGYWEEHVAVVEAPDGKLGVFAHGFHHPDGKANLHYYTIVHDKEAAGDTKRWQLEKTIQLPWPSDHRSFCLRGTANGCLNVGLIIEVGEKKSVFMGSHRIRDAELFKIDVKSFQLQKICRARCAGSAAGECCWPYFGFPPSLSLPTV

SEQ ID NO: 30019 - protein, 193 aa, Zea mays subsp. mays
  peptide (1)..(193): Ceres Seq. ID no. 12406839
  misc_feature (1)..(193): NCBI GI NO: 32480316 NR Description: OSJNBa0042D13.1
  misc_feature (1)..(162): NCBI GI NO: 34393351 NR Description: hypothetical protein
  misc_feature (1)..(107): NCBI GI NO: 34393354 NR Description: hypothetical protein
  misc_feature (1)..(68): NCBI GI NO: 34393352 NR Description: hypothetical protein
  misc_feature (1)..(73): NCBI GI NO: 37530886 NR Description: hypothetical protein
MAPISTVWNRRHYAHGCFYWVDCLTSRWLVLDGRTMELSLAMIPSPAGYWEEHVAVVEAPDGKLGVFAHGFHHPDGKANLHYYTIVHDKEAAGDTKRWQLEKTIQLPWPSDHRSFCLRGTANGCLNVGLIIEVGEKKSVFMGSHRIRDAELFKIDVKSFQLQKICRARCAGSAAGECCWPYFGFPPSLSLPTV

SEQ ID NO: 30020 - DNA, 1475 bp, Zea mays subsp. mays
  misc_feature (1)..(1475): Ceres Seq. ID no. 12425146
  misc_feature (307)..(307): n is a, c, t, g, unknown, or other
acactgccccactctcctctacctccgcgccaatgcgcctccccaacatttaaacggccaaaccagcccaaaccccaaccccaaacccacagcagtaacaggggcacactagctaagctaaacctcgccacggcacagcaatggcgccgctccccgcttccctcctgccctgcctctggctcttcctctgcctcctcgccgcgccgtgccccacagcgcgggcggcgcggttcgcgtgcaacgccacggcgccgcgagcgtccacgtgccaggcgctcgtctcctacgcgccgcccaacgggacggncacgcccacgctggccgccgtgcgcgcgctcttccagctccgctcccaccgcgcgctgctggccgccaacggcctcccgctctccacgccgcccacggcgcccgcgcccgtgccgctgctgggtccgcctgccctgcctctgctcggggggcgccggggccacgttccagcggcccacgtaccgggtccgcgccggggacacgctcgacgccgtcgcgcggggcgtcttcgcgggcctcgtcacctaccaggacatcgccgccgccaacaacgtctccgaccccaacagggtcgccgtcggccagcagctctggatccccgtgccctgcagctgcgaccccgtgggcggccaacccgtcgtgcacttcacctacgtcgtgccggccgggggctccgtgtccggcatcgcggaggagttcggcaccacggaggagacgattctcacgctgaacaagatgcccgacgccaagtcccttctcgccggccaggttcttgacgtgccacttcgagcttgtagttctgccattagcagcacagccattgaccgcaaccttctcgtgccaaatggaagctacatcctcaccgccaacaactgcgtcaagtgtggctgcagctctagcacctggcagttggactgccagccaacacagggactgagctcgtcgttctgccctgcggccaagtgcggagacatgttcctcggcaacacatcctcctccacctcatcctgcgagagcacagcatgctcctacgccgggtacaccaacagcacatcgttcgccatcctcgccaatgtgaccaccagcaacgtgtgtaacgctgggatgactccgacggcgcagccggctcactcttcggcgtttcggttggagccggtgtggctgagatggacggagctggttgccttgtctctcttcacgctgtctttcttcgtctaggctatctgcggcaaaggctgaacgttgttgccatgcgtctgtcgttagaatctggccctctgattcctagtttgatgttgtgagtaatatctgcagtgtttgcgcgacttcgatctgtaactggttggatttgtaagggcaaactctagggtaacactgatctgtgttagacggtaaatcaggaaacatttgtacttcgtcaaacttttgcaaagataatttcttctgtt

SEQ ID NO: 30021 - protein, 414 aa, Zea mays subsp. mays
  peptide (1)..(414): Ceres Seq. ID no. 12425147
  misc_feature (163)..(209): Pfam Name: Pfam Description:  LysM domain
  misc_feature (144)..(380): NCBI GI NO: 28207683 NR Description: Erwinia induced protein 1 [Solanum tuberosum]
  misc_feature (144)..(387): NCBI GI NO: 22758281 NR Description: Unknown protein
  misc_feature (133)..(388): NCBI GI NO: 18398317 NR Description: expressed protein; protein id: At2g17120
  misc_feature (133)..(362): NCBI GI NO: 21593990 NR Description: unknown [Arabidopsis thaliana]
  misc_feature (139)..(365): NCBI GI NO: 18395044 NR Description: expressed protein; protein id: At1g21880
  misc_feature (139)..(366): NCBI GI NO: 30699276 NR Description: expressed protein [Arabidopsis thaliana]
  misc_feature (139)..(360): NCBI GI NO: 30687570 NR Description: expressed protein [Arabidopsis thaliana]
  misc_feature (139)..(366): NCBI GI NO: 25406518 NR Description: unknown protein T5M16.22
  misc_feature (5)..(138): NCBI GI NO: 23274133 NR Description: Similar to serine/arginine repetitive matrix 1
  misc_feature (8)..(136): NCBI GI NO: 5821151 NR Description: RNA binding protein [Homo sapiens]
  misc_feature (103)..(103): Xaa is any aa, unknown or other
TLPHSPLPPRQCASPTFKRPNQPKPQPQTHSSNRGTLAKLNLATAQQWRRSPLPSCPASGSSSASSPRRAPQRGRRGSRATPRRRERPRARRSSPTRRPTGRXRPRWPPCARSSSSAPTARCWPPTASRSPRRPRRPRPCRCWVRLPCLCSGGAGATFQRPTYRVRAGDTLDAVARGVFAGLVTYQDIAAANNVSDPNRVAVGQQLWIPVPCSCDPVGGQPVVHFTYVVPAGGSVSGIAEEFGTTEETILTLNKMPDAKSLLAGQVLDVPLRACSSAISSTAIDRNLLVPNGSYILTANNCVKCGCSSSTWQLDCQPTQGLSSSFCPAAKCGDMFLGNTSSSTSSCESTACSYAGYTNSTSFAILANVTTSNVCNAGMTPTAQPAHSSAFRLEPVWLRWTELVALSLFTLSFFV

SEQ ID NO: 30022 - protein, 220 aa, Zea mays subsp. mays
  peptide (1)..(220): Ceres Seq. ID no. 12425148
  misc_feature (56)..(56): Xaa is any aa, unknown or other
MAPLPASLLPCLWLFLCLLAAPCPTARAARFACNATAPRASTCQALVSYAPPNGTXTPTLAAVRALFQLRSHRALLAANGLPLSTPPTAPAPVPLLGPPALPLLGGRRGHVPAAHVPGPRRGHARRRRAGRLRGPRHLPGHRRRQQRLRPQQGRRRPAALDPRALQLRPRGRPTRRALHLRRAGRGLRVRHRGGVRHHGGDDSHAEQDARRQVPSRRPGS

SEQ ID NO: 30023 - DNA, 1562 bp, Zea mays subsp. mays; identical to SEQ ID NO: 27020
  misc_feature (1)..(1562): Ceres Seq. ID no. 12341687

SEQ ID NO: 30024 - protein, 357 aa, Zea mays subsp. mays; identical to SEQ ID NO: 27021
  peptide (1)..(357): Ceres Seq. ID no. 12341688
  misc_feature (104)..(344): Pfam Name: Pfam Description:  Protein phosphatase 2C
  misc_feature (1)..(356): NCBI GI NO: 18423476 NR Description: protein phosphatase 2C
  misc_feature (1)..(356): NCBI GI NO: 18086420 NR Description: AT5g53140/MFH8_8 [Arabidopsis thaliana]
  misc_feature (118)..(356): NCBI GI NO: 9757995 NR Description: protein phosphatase 2C-like [Arabidopsis thaliana]
  misc_feature (118)..(357): NCBI GI NO: 34912708 NR Description: putative protein phosphatase 2C-like protein
  misc_feature (89)..(357): NCBI GI NO: 30689144 NR Description: protein phosphatase 2C (PP2C), putative
  misc_feature (93)..(356): NCBI GI NO: 15238651 NR Description: Protein phosphatase 2C-like protein
  misc_feature (94)..(351): NCBI GI NO: 20146110 NR Description: protein phosphatase 2C
  misc_feature (93)..(356): NCBI GI NO: 18416366 NR Description: protein phosphatase 2C -like protein
  misc_feature (89)..(353): NCBI GI NO: 38345197 NR Description: OSJNBa0015K02.7
  misc_feature (100)..(287): NCBI GI NO: 7486331 NR Description: hypothetical protein F28M20

SEQ ID NO: 30025 - protein, 303 aa, Zea mays subsp. mays; identical to SEQ ID NO: 27022
  peptide (1)..(303): Ceres Seq. ID no. 12341689
  misc_feature (50)..(290): Pfam Name: Pfam Description:  Protein phosphatase 2C
  misc_feature (1)..(302): NCBI GI NO: 18423476 NR Description: protein phosphatase 2C
  misc_feature (1)..(302): NCBI GI NO: 18086420 NR Description: AT5g53140/MFH8_8 [Arabidopsis thaliana]
  misc_feature (64)..(302): NCBI GI NO: 9757995 NR Description: protein phosphatase 2C-like [Arabidopsis thaliana]
  misc_feature (64)..(303): NCBI GI NO: 34912708 NR Description: putative protein phosphatase 2C-like protein
  misc_feature (35)..(303): NCBI GI NO: 30689144 NR Description: protein phosphatase 2C (PP2C), putative
  misc_feature (39)..(302): NCBI GI NO: 15238651 NR Description: Protein phosphatase 2C-like protein
  misc_feature (40)..(297): NCBI GI NO: 20146110 NR Description: protein phosphatase 2C
  misc_feature (39)..(302): NCBI GI NO: 18416366 NR Description: protein phosphatase 2C -like protein
  misc_feature (35)..(299): NCBI GI NO: 38345197 NR Description: OSJNBa0015K02.7
  misc_feature (46)..(233): NCBI GI NO: 7486331 NR Description: hypothetical protein F28M20

SEQ ID NO: 30026 - protein, 302 aa, Zea mays subsp. mays; identical to SEQ ID NO: 27023
  peptide (1)..(302): Ceres Seq. ID no. 12341690
  misc_feature (49)..(289): Pfam Name: Pfam Description:  Protein phosphatase 2C
  misc_feature (1)..(301): NCBI GI NO: 18423476 NR Description: protein phosphatase 2C
  misc_feature (1)..(301): NCBI GI NO: 18086420 NR Description: AT5g53140/MFH8_8 [Arabidopsis thaliana]
  misc_feature (63)..(301): NCBI GI NO: 9757995 NR Description: protein phosphatase 2C-like [Arabidopsis thaliana]
  misc_feature (63)..(302): NCBI GI NO: 34912708 NR Description: putative protein phosphatase 2C-like protein
  misc_feature (34)..(302): NCBI GI NO: 30689144 NR Description: protein phosphatase 2C (PP2C), putative
  misc_feature (38)..(301): NCBI GI NO: 15238651 NR Description: Protein phosphatase 2C-like protein
  misc_feature (39)..(296): NCBI GI NO: 20146110 NR Description: protein phosphatase 2C
  misc_feature (38)..(301): NCBI GI NO: 18416366 NR Description: protein phosphatase 2C -like protein
  misc_feature (34)..(298): NCBI GI NO: 38345197 NR Description: OSJNBa0015K02.7
  misc_feature (45)..(232): NCBI GI NO: 7486331 NR Description: hypothetical protein F28M20

SEQ ID NO: 30027 - DNA, 1135 bp, Zea mays subsp. mays
  misc_feature (1)..(1135): Ceres Seq. ID no. 12408545
aaaggaccaacgtgctcgatctccatctcgaccgtcgctcaccgggaagctacgctacgacgaagcatggcgtccgtcaccgcccgcgccccggtcgcagccctgcgcccgtcgtcgtcgtcggccttccttggccactctagccgcctcggccgcactgctaccgcgtcgccgacgaggcgcagcctcaaggcggaggccaagggcgagtggctcccgggccttccctcccccgcctacctcgacggcagcctgccgggtgacaatggcttcgacccgttgggcctggcggaggacccggagaacctgaggtggtacgtgcaggcggagctggtgaacgggcggtgggcgatgctgggcgtggccgggatgctgatcccggaggtgctgaccaaggccgggctgatcaacgcgccgcagtggtacgacgccggcaagtcggagtacttcgcgtcgtcgtcgacgctgttcgtgatcgagttcatcctgtttcactacgtggagatccggcggtggcaggacatcaagaaccccggcagcgtcaaccaggaccccatcttcaagagctacagcctgccgccgcacgagtgcggctaccccggcagcgtcttcaacccgctcaacttcgcgcccacgctcgaggccaaggagaaggagctcgccaacgggaggctggccatgctggcgttcctggccttcctgatccagcacaacgtcaccggcaaggggcccttcgacaacctgctgcagcacctgtccgacccatggcacaacaccatcatccagaccctgtcgggttgagtcgacggtccatcaggtcatgtgatccgagctgaaataaaggaagacaaatcttgaaacgcgatcgatgttacgttcctttctgggccggatcagttcgtgtgatgcgttcttaatcgactgagggctaaggaatgtgacgtactggtatatgtacattagttgaagcggaggctataaagggtgtagagattgtttcatcagtgtatatcatctgtcccgatgggttttgttttgtgcttttcacgattcattgtggaagcacatgtattattagtacaagaactgctagtagatatataggcttataattaagcacgacttctaaaacctc

SEQ ID NO: 30028 - protein, 266 aa, Zea mays subsp. mays
  peptide (1)..(266): Ceres Seq. ID no. 12408546
  misc_feature (77)..(238): Pfam Name: Pfam Description:  Chlorophyll A-B binding protein
  misc_feature (23)..(266): NCBI GI NO: 3789952 NR Description: chlorophyll a/b-binding protein presursor
  misc_feature (38)..(266): NCBI GI NO: 9624495 NR Description: chlorophyll a/b-binding protein precursor
  misc_feature (23)..(265): NCBI GI NO: 100196 NR Description: chlorophyll a/b-binding protein (cab-11) - tomato
  misc_feature (23)..(266): NCBI GI NO: 322392 NR Description: chlorophyll a/b-binding protein type 4
  misc_feature (23)..(266): NCBI GI NO: 13385204 NR Description: cDNA sequence BC002118
  misc_feature (23)..(265): NCBI GI NO: 100197 NR Description: chlorophyll a/b-binding protein (cab-12) - tomato
  misc_feature (41)..(266): NCBI GI NO: 322393 NR Description: chlorophyll a/b-binding protein type 4
  misc_feature (23)..(266): NCBI GI NO: 20218813 NR Description: putative chlorophyll a/b-binding protein type 4
  misc_feature (23)..(266): NCBI GI NO: 11277626 NR Description: chlorophyll a/b-binding protein
  misc_feature (22)..(260): NCBI GI NO: 2129879 NR Description: chlorophyll a/b-binding protein type II precursor
KGPTCSISISTVAHREATLRRSMASVTARAPVAALRPSSSSAFLGHSSRLGRTATASPTRRSLKAEAKGEWLPGLPSPAYLDGSLPGDNGFDPLGLAEDPENLRWYVQAELVNGRWAMLGVAGMLIPEVLTKAGLINAPQWYDAGKSEYFASSSTLFVIEFILFHYVEIRRWQDIKNPGSVNQDPIFKSYSLPPHECGYPGSVFNPLNFAPTLEAKEKELANGRLAMLAFLAFLIQHNVTGKGPFDNLLQHLSDPWHNTIIQTLSG

SEQ ID NO: 30029 - protein, 244 aa, Zea mays subsp. mays
  peptide (1)..(244): Ceres Seq. ID no. 12408547
  misc_feature (55)..(216): Pfam Name: Pfam Description:  Chlorophyll A-B binding protein
  misc_feature (1)..(244): NCBI GI NO: 3789952 NR Description: chlorophyll a/b-binding protein presursor
  misc_feature (16)..(244): NCBI GI NO: 9624495 NR Description: chlorophyll a/b-binding protein precursor
  misc_feature (1)..(243): NCBI GI NO: 100196 NR Description: chlorophyll a/b-binding protein (cab-11) - tomato
  misc_feature (1)..(244): NCBI GI NO: 322392 NR Description: chlorophyll a/b-binding protein type 4
  misc_feature (1)..(244): NCBI GI NO: 13385204 NR Description: cDNA sequence BC002118
  misc_feature (1)..(243): NCBI GI NO: 100197 NR Description: chlorophyll a/b-binding protein (cab-12) - tomato
  misc_feature (19)..(244): NCBI GI NO: 322393 NR Description: chlorophyll a/b-binding protein type 4
  misc_feature (1)..(244): NCBI GI NO: 20218813 NR Description: putative chlorophyll a/b-binding protein type 4
  misc_feature (1)..(244): NCBI GI NO: 11277626 NR Description: chlorophyll a/b-binding protein
  misc_feature (1)..(238): NCBI GI NO: 2129879 NR Description: chlorophyll a/b-binding protein type II precursor
MASVTARAPVAALRPSSSSAFLGHSSRLGRTATASPTRRSLKAEAKGEWLPGLPSPAYLDGSLPGDNGFDPLGLAEDPENLRWYVQAELVNGRWAMLGVAGMLIPEVLTKAGLINAPQWYDAGKSEYFASSSTLFVIEFILFHYVEIRRWQDIKNPGSVNQDPIFKSYSLPPHECGYPGSVFNPLNFAPTLEAKEKELANGRLAMLAFLAFLIQHNVTGKGPFDNLLQHLSDPWHNTIIQTLSG

SEQ ID NO: 30030 - protein, 149 aa, Zea mays subsp. mays
  peptide (1)..(149): Ceres Seq. ID no. 12408548
  misc_feature (1)..(121): Pfam Name: Pfam Description:  Chlorophyll A-B binding protein
  misc_feature (1)..(149): NCBI GI NO: 3789952 NR Description: chlorophyll a/b-binding protein presursor
  misc_feature (1)..(149): NCBI GI NO: 9624495 NR Description: chlorophyll a/b-binding protein precursor
  misc_feature (1)..(148): NCBI GI NO: 100196 NR Description: chlorophyll a/b-binding protein (cab-11) - tomato
  misc_feature (1)..(149): NCBI GI NO: 322392 NR Description: chlorophyll a/b-binding protein type 4
  misc_feature (1)..(149): NCBI GI NO: 13385204 NR Description: cDNA sequence BC002118
  misc_feature (1)..(148): NCBI GI NO: 100197 NR Description: chlorophyll a/b-binding protein (cab-12) - tomato
  misc_feature (1)..(149): NCBI GI NO: 322393 NR Description: chlorophyll a/b-binding protein type 4
  misc_feature (1)..(149): NCBI GI NO: 20218813 NR Description: putative chlorophyll a/b-binding protein type 4
  misc_feature (1)..(149): NCBI GI NO: 11277626 NR Description: chlorophyll a/b-binding protein
  misc_feature (1)..(143): NCBI GI NO: 2129879 NR Description: chlorophyll a/b-binding protein type II precursor
MLGVAGMLIPEVLTKAGLINAPQWYDAGKSEYFASSSTLFVIEFILFHYVEIRRWQDIKNPGSVNQDPIFKSYSLPPHECGYPGSVFNPLNFAPTLEAKEKELANGRLAMLAFLAFLIQHNVTGKGPFDNLLQHLSDPWHNTIIQTLSG

SEQ ID NO: 30031 - DNA, 1498 bp, Zea mays subsp. mays
  misc_feature (1)..(1498): Ceres Seq. ID no. 13493669
ctttccgcctcggcacctccccacccctctcgccttcgcttcgtcgccacggcgagccccacgccgccgatcggggcgccgccagcggcggcggcgcccgatccgatggaagcggaggtggggccgccgaatccgccgcggccggagccagccggatcggagcccgacgacgcgcgcctctccccgcctcctcctgctcctgctccgccgcctccgcccccgcctcctcccgccgccgaggctgccgccgcgcccaccgcctccgcggccttctcgctgcaggctccagctccggcgccggcggaggcgaacggcagctccgacaggaagaggaggaggaaggcggaggacggggacgggtgcaagacctgcagctgcaagaagtccaggtgcctcaagctttactgtgtgtgctttgcttctgggttacattgtactgaatcatgtggatgtgaaccttgtcataacaagccacaattgcaaggtactctgcggatggcaacagttttacctctgaaacctgtccaaacattcgaagctggccaagatatagtggaacaagtcataaggtctcctatggatcttattagaagaaaatgcacatgcaagaagtcaggctgccttaagaagtactgcgactgctaccagggaggggcaggatgctccatcaactgtaaatgcgatgattgtagaaacccatttgggagaaaagtcggcgttattttggacggtaaaagcagtcttactgcacctatactgcacgaaagaaacgggactgaagttgactcaagcgacgaggaagacgacttctacatgaatcgacagctctccccaatacctccgtctccggtgtctagggagtcttcgttccaacaggagactctagtcggcgtcgaggtccagaccatgaacgggcacctgtaccccaaaccactgacccaggtgcgccccgagccgtcgtcctggcagctctcccggaggcccatcgaggaaccgcgcggggagatatggcgcttctcgaggaggccgagcgaggacgggacctctgatgccatggaagtgcacgccgtcgccccgagagagagcaagaaggcggcagaggtccgcggggacaggttcggcatcccgcggtgcatcgaggtgatgagcgccatggcggagctgtcgccggtggagaagtcgctggcgcccgacgtcttcttggacgcgagcaaccgggagatcttcctctcgctgagtgtagatattaggccaatctggctgaggcgcaagatgaagagccttgtctagctagacgctacaacagagatagcctgaggaattttcgtcgtcggcgtatacctaataaacccgtgctgtactgtagatatataatatatgtgccttagattcagagttgagttctggaccgatgggtgtaatataccttagtgctaatttatggtgcatgctgttatattggagttcttcctatggtaagttcgttatgatttcagcc

SEQ ID NO: 30032 - protein, 429 aa, Zea mays subsp. mays
  peptide (1)..(429): Ceres Seq. ID no. 13493670
  misc_feature (197)..(236): Pfam Name: Pfam Description:  Tesmin/TSO1-like CXC domain
  misc_feature (103)..(269): NCBI GI NO: 34393829 NR Description: putative CXC domain protein TSO1
  misc_feature (102)..(281): NCBI GI NO: 15028139 NR Description: putative DNA binding protein
  misc_feature (102)..(281): NCBI GI NO: 23297130 NR Description: putative DNA binding protein
  misc_feature (102)..(281): NCBI GI NO: 6739821 NR Description: putative DNA binding protein
  misc_feature (102)..(281): NCBI GI NO: 30686784 NR Description: DNA binding protein -related
  misc_feature (107)..(243): NCBI GI NO: 7767427 NR Description: CXC domain containing TSO1-like protein 1
  misc_feature (107)..(243): NCBI GI NO: 18403510 NR Description: CXC domain containing TSO1-related protein 1
  misc_feature (109)..(293): NCBI GI NO: 40241245 NR Description: cysteine-rich polycomb-like protein
  misc_feature (80)..(247): NCBI GI NO: 4218187 NR Description: cysteine-rich polycomb-like protein [Glycine max]
  misc_feature (108)..(288): NCBI GI NO: 28393078 NR Description: unknown protein [Arabidopsis thaliana]
LSASAPPHPSRLRFVATASPTPPIGAPPAAAAPDPMEAEVGPPNPPRPEPAGSEPDDARLSPPPPAPAPPPPPPPPPAAEAAAAPTASAAFSLQAPAPAPAEANGSSDRKRRRKAEDGDGCKTCSCKKSRCLKLYCVCFASGLHCTESCGCEPCHNKPQLQGTLRMATVLPLKPVQTFEAGQDIVEQVIRSPMDLIRRKCTCKKSGCLKKYCDCYQGGAGCSINCKCDDCRNPFGRKVGVILDGKSSLTAPILHERNGTEVDSSDEEDDFYMNRQLSPIPPSPVSRESSFQQETLVGVEVQTMNGHLYPKPLTQVRPEPSSWQLSRRPIEEPRGEIWRFSRRPSEDGTSDAMEVHAVAPRESKKAAEVRGDRFGIPRCIEVMSAMAELSPVEKSLAPDVFLDASNREIFLSLSVDIRPIWLRRKMKSLV

SEQ ID NO: 30033 - protein, 394 aa, Zea mays subsp. mays
  peptide (1)..(394): Ceres Seq. ID no. 13493671
  misc_feature (162)..(201): Pfam Name: Pfam Description:  Tesmin/TSO1-like CXC domain
  misc_feature (68)..(234): NCBI GI NO: 34393829 NR Description: putative CXC domain protein TSO1
  misc_feature (67)..(246): NCBI GI NO: 15028139 NR Description: putative DNA binding protein
  misc_feature (67)..(246): NCBI GI NO: 23297130 NR Description: putative DNA binding protein
  misc_feature (67)..(246): NCBI GI NO: 6739821 NR Description: putative DNA binding protein
  misc_feature (67)..(246): NCBI GI NO: 30686784 NR Description: DNA binding protein -related
  misc_feature (72)..(208): NCBI GI NO: 7767427 NR Description: CXC domain containing TSO1-like protein 1
  misc_feature (72)..(208): NCBI GI NO: 18403510 NR Description: CXC domain containing TSO1-related protein 1
  misc_feature (74)..(258): NCBI GI NO: 40241245 NR Description: cysteine-rich polycomb-like protein
  misc_feature (45)..(212): NCBI GI NO: 4218187 NR Description: cysteine-rich polycomb-like protein [Glycine max]
  misc_feature (73)..(253): NCBI GI NO: 28393078 NR Description: unknown protein [Arabidopsis thaliana]
MEAEVGPPNPPRPEPAGSEPDDARLSPPPPAPAPPPPPPPPPAAEAAAAPTASAAFSLQAPAPAPAEANGSSDRKRRRKAEDGDGCKTCSCKKSRCLKLYCVCFASGLHCTESCGCEPCHNKPQLQGTLRMATVLPLKPVQTFEAGQDIVEQVIRSPMDLIRRKCTCKKSGCLKKYCDCYQGGAGCSINCKCDDCRNPFGRKVGVILDGKSSLTAPILHERNGTEVDSSDEEDDFYMNRQLSPIPPSPVSRESSFQQETLVGVEVQTMNGHLYPKPLTQVRPEPSSWQLSRRPIEEPRGEIWRFSRRPSEDGTSDAMEVHAVAPRESKKAAEVRGDRFGIPRCIEVMSAMAELSPVEKSLAPDVFLDASNREIFLSLSVDIRPIWLRRKMKSLV

SEQ ID NO: 30034 - protein, 264 aa, Zea mays subsp. mays
  peptide (1)..(264): Ceres Seq. ID no. 13493672
  misc_feature (32)..(71): Pfam Name: Pfam Description:  Tesmin/TSO1-like CXC domain
  misc_feature (1)..(104): NCBI GI NO: 34393829 NR Description: putative CXC domain protein TSO1
  misc_feature (1)..(116): NCBI GI NO: 15028139 NR Description: putative DNA binding protein
  misc_feature (1)..(116): NCBI GI NO: 23297130 NR Description: putative DNA binding protein
  misc_feature (1)..(116): NCBI GI NO: 6739821 NR Description: putative DNA binding protein
  misc_feature (1)..(116): NCBI GI NO: 30686784 NR Description: DNA binding protein -related
  misc_feature (1)..(78): NCBI GI NO: 7767427 NR Description: CXC domain containing TSO1-like protein 1
  misc_feature (1)..(78): NCBI GI NO: 18403510 NR Description: CXC domain containing TSO1-related protein 1
  misc_feature (1)..(128): NCBI GI NO: 40241245 NR Description: cysteine-rich polycomb-like protein
  misc_feature (1)..(82): NCBI GI NO: 4218187 NR Description: cysteine-rich polycomb-like protein [Glycine max]
  misc_feature (1)..(123): NCBI GI NO: 28393078 NR Description: unknown protein [Arabidopsis thaliana]
MATVLPLKPVQTFEAGQDIVEQVIRSPMDLIRRKCTCKKSGCLKKYCDCYQGGAGCSINCKCDDCRNPFGRKVGVILDGKSSLTAPILHERNGTEVDSSDEEDDFYMNRQLSPIPPSPVSRESSFQQETLVGVEVQTMNGHLYPKPLTQVRPEPSSWQLSRRPIEEPRGEIWRFSRRPSEDGTSDAMEVHAVAPRESKKAAEVRGDRFGIPRCIEVMSAMAELSPVEKSLAPDVFLDASNREIFLSLSVDIRPIWLRRKMKSLV

SEQ ID NO: 30035 - DNA, 2002 bp, Zea mays subsp. mays
  misc_feature (1)..(2002): Ceres Seq. ID no. 12374270
gccaggatgacaaaatttcccactccactcgaattaaaaccctagcggcaaaaccttcgctctgcgccgccgtcgcctgctcccgtcccgccaccacatccgcccaggagctcgccgtcggggaggctgctcgaggagccgcgctgtctctcccgcgccgcgaccttcgccctcgccgccgccatgatctgcgcgatctccggtgaggtgccggacgagccggtggtgtcgaagaagtcggggcttctcttcgagcggcggctcatcgagcgctacattgaggaccatggcaagtgccccatcaccaaggatgagcttactatggatgatatcgtgccggtcaataccaacaaggtcgtgaagcccaggcctttgcaggctgcaagcattccaggactccttgggatttttcagaacgagtgggatgctctcatgctttctaattttgctttggagcagcagctacacacagcaagacaagaacttagtcatgcactctaccagcatgacgctgcctgccgtgttatagccaggttgaagaaggaaagagatgaggctagagcacttttggctcaagctgagagacagattccagcatcagttgcaggagctgctcctgcagctgttgtttccaatggaaaaagagcaatggaagatgaaattggccctgacggaaagaagattcgtcctggtatcaaccctgtcatgattgatgaacttacagagtgtaataccatgctttcagcacagcgtaagaaaagacaggttcctccaactctggcaccattagatgcactcgagagatacactcaaatctccagccatccccttcataagacaaacaaaccaggcattttgtccatggatgttcatccttcaaaggatgttgttgcaactgggggtatcgatacaaatgcagtaatctttgatcggtcatctggtcaaatcttgtgcacgcttactggtcactcaaagaagataaccactttaaagtttgttccacgggatcaactctttgtaactggatcagcagataagactgttcgcatttggcaagagaacgagaatggaaactataactgcgtccatacattgaaagatcatactgctgaggttgaagctgttacagtacatgcgactcagaagtattttgtgagtgcttccaaggataattcgtggtgcttctatgatatttcaacaggatcttgcctgacacaggttggcgaggcttcaggacaagagggatatacatccgcgtctttccatccagatggtcttatccttggaacaggaactactgatgctgttgttaaaatttgggatgtgaagactcagtcgaatgtcgcgaagtttgaggggcatgtaggaccagtcactgctatgtccttctctgaaaatggttacttcctagcgactgctgctcatgatggtgtcaagctttgggatcttcggaaattaagaaattttaggaccttctctccctatgattcagatacgccaacaaatactgtggaatttgattttagtggaaactatcttgccattggtggttcagatataagggtctaccaagtagctaatgttaaggccgaatggaatctcatcaagacattaccagatttatctggaacagggaaagtaacttcggtaaagttcggagcagatgctaagtacatagccgtaggttctatggaccgcaatctacggatatttggcctccctggagacgaccaaatggaggaatcaaccacagcggcagagtgaggaaaatccatggtacctaatttcctcctcctggtatactccgcaatatgttctgatgatgggtagactgagtgcaaatggatacatcacgagagaagggtcctcgcggcgatgaactggcttgagcttcggtcggtgtaaacaagctgtgacattattgtattgtaggcctcactaattcttctgatggggatacaatttgttttgatgagtacgagtgtacgacgctaaacagcct

SEQ ID NO: 30036 - protein, 526 aa, Zea mays subsp. mays
  peptide (1)..(526): Ceres Seq. ID no. 12374271
  misc_feature (1)..(63): Pfam Name: Pfam Description:  U-box domain
  misc_feature (1)..(526): NCBI GI NO: 37535206 NR Description: putative WD-repeat containing protein
  misc_feature (1)..(521): NCBI GI NO: 18390401 NR Description: putative pre-mRNA splicing factor PRP19
  misc_feature (1)..(506): NCBI GI NO: 30685651 NR Description: transducin / WD-40 repeat protein family
  misc_feature (1)..(506): NCBI GI NO: 30685653 NR Description: transducin / WD-40 repeat protein family
  misc_feature (1)..(285): NCBI GI NO: 25408261 NR Description: probable PRP19-like spliceosomal protein
  misc_feature (310)..(506): NCBI GI NO: 25408261 NR Description: probable PRP19-like spliceosomal protein
  misc_feature (1)..(512): NCBI GI NO: 28278498 NR Description: Similar to nuclear matrix protein NMP200 related tosplicing factor PRP19
  misc_feature (1)..(512): NCBI GI NO: 7657381 NR Description: nuclear matrix protein NMP200 related to splicingfactor PRP19
  misc_feature (1)..(512): NCBI GI NO: 19527358 NR Description: nuclear matrix protein SNEV [Mus musculus]
  misc_feature (1)..(512): NCBI GI NO: 21326455 NR Description: neuronal differentiation-related gene
MICAISGEVPDEPVVSKKSGLLFERRLIERYIEDHGKCPITKDELTMDDIVPVNTNKVVKPRPLQAASIPGLLGIFQNEWDALMLSNFALEQQLHTARQELSHALYQHDAACRVIARLKKERDEARALLAQAERQIPASVAGAAPAAVVSNGKRAMEDEIGPDGKKIRPGINPVMIDELTECNTMLSAQRKKRQVPPTLAPLDALERYTQISSHPLHKTNKPGILSMDVHPSKDVVATGGIDTNAVIFDRSSGQILCTLTGHSKKITTLKFVPRDQLFVTGSADKTVRIWQENENGNYNCVHTLKDHTAEVEAVTVHATQKYFVSASKDNSWCFYDISTGSCLTQVGEASGQEGYTSASFHPDGLILGTGTTDAVVKIWDVKTQSNVAKFEGHVGPVTAMSFSENGYFLATAAHDGVKLWDLRKLRNFRTFSPYDSDTPTNTVEFDFSGNYLAIGGSDIRVYQVANVKAEWNLIKTLPDLSGTGKVTSVKFGADAKYIAVGSMDRNLRIFGLPGDDQMEESTTAAE

SEQ ID NO: 30037 - protein, 480 aa, Zea mays subsp. mays
  peptide (1)..(480): Ceres Seq. ID no. 12374272
  misc_feature (1)..(480): NCBI GI NO: 37535206 NR Description: putative WD-repeat containing protein
  misc_feature (1)..(475): NCBI GI NO: 18390401 NR Description: putative pre-mRNA splicing factor PRP19
  misc_feature (1)..(460): NCBI GI NO: 30685651 NR Description: transducin / WD-40 repeat protein family
  misc_feature (1)..(460): NCBI GI NO: 30685653 NR Description: transducin / WD-40 repeat protein family
  misc_feature (1)..(239): NCBI GI NO: 25408261 NR Description: probable PRP19-like spliceosomal protein
  misc_feature (264)..(460): NCBI GI NO: 25408261 NR Description: probable PRP19-like spliceosomal protein
  misc_feature (1)..(466): NCBI GI NO: 28278498 NR Description: Similar to nuclear matrix protein NMP200 related tosplicing factor PRP19
  misc_feature (1)..(466): NCBI GI NO: 7657381 NR Description: nuclear matrix protein NMP200 related to splicingfactor PRP19
  misc_feature (1)..(466): NCBI GI NO: 19527358 NR Description: nuclear matrix protein SNEV [Mus musculus]
  misc_feature (1)..(466): NCBI GI NO: 21326455 NR Description: neuronal differentiation-related gene
MDDIVPVNTNKVVKPRPLQAASIPGLLGIFQNEWDALMLSNFALEQQLHTARQELSHALYQHDAACRVIARLKKERDEARALLAQAERQIPASVAGAAPAAVVSNGKRAMEDEIGPDGKKIRPGINPVMIDELTECNTMLSAQRKKRQVPPTLAPLDALERYTQISSHPLHKTNKPGILSMDVHPSKDVVATGGIDTNAVIFDRSSGQILCTLTGHSKKITTLKFVPRDQLFVTGSADKTVRIWQENENGNYNCVHTLKDHTAEVEAVTVHATQKYFVSASKDNSWCFYDISTGSCLTQVGEASGQEGYTSASFHPDGLILGTGTTDAVVKIWDVKTQSNVAKFEGHVGPVTAMSFSENGYFLATAAHDGVKLWDLRKLRNFRTFSPYDSDTPTNTVEFDFSGNYLAIGGSDIRVYQVANVKAEWNLIKTLPDLSGTGKVTSVKFGADAKYIAVGSMDRNLRIFGLPGDDQMEESTTAAE

SEQ ID NO: 30038 - protein, 443 aa, Zea mays subsp. mays
  peptide (1)..(443): Ceres Seq. ID no. 12374273
  misc_feature (1)..(443): NCBI GI NO: 37535206 NR Description: putative WD-repeat containing protein
  misc_feature (1)..(438): NCBI GI NO: 18390401 NR Description: putative pre-mRNA splicing factor PRP19
  misc_feature (1)..(423): NCBI GI NO: 30685651 NR Description: transducin / WD-40 repeat protein family
  misc_feature (1)..(423): NCBI GI NO: 30685653 NR Description: transducin / WD-40 repeat protein family
  misc_feature (1)..(202): NCBI GI NO: 25408261 NR Description: probable PRP19-like spliceosomal protein
  misc_feature (227)..(423): NCBI GI NO: 25408261 NR Description: probable PRP19-like spliceosomal protein
  misc_feature (1)..(429): NCBI GI NO: 28278498 NR Description: Similar to nuclear matrix protein NMP200 related tosplicing factor PRP19
  misc_feature (1)..(429): NCBI GI NO: 7657381 NR Description: nuclear matrix protein NMP200 related to splicingfactor PRP19
  misc_feature (1)..(429): NCBI GI NO: 19527358 NR Description: nuclear matrix protein SNEV [Mus musculus]
  misc_feature (1)..(429): NCBI GI NO: 21326455 NR Description: neuronal differentiation-related gene
MLSNFALEQQLHTARQELSHALYQHDAACRVIARLKKERDEARALLAQAERQIPASVAGAAPAAVVSNGKRAMEDEIGPDGKKIRPGINPVMIDELTECNTMLSAQRKKRQVPPTLAPLDALERYTQISSHPLHKTNKPGILSMDVHPSKDVVATGGIDTNAVIFDRSSGQILCTLTGHSKKITTLKFVPRDQLFVTGSADKTVRIWQENENGNYNCVHTLKDHTAEVEAVTVHATQKYFVSASKDNSWCFYDISTGSCLTQVGEASGQEGYTSASFHPDGLILGTGTTDAVVKIWDVKTQSNVAKFEGHVGPVTAMSFSENGYFLATAAHDGVKLWDLRKLRNFRTFSPYDSDTPTNTVEFDFSGNYLAIGGSDIRVYQVANVKAEWNLIKTLPDLSGTGKVTSVKFGADAKYIAVGSMDRNLRIFGLPGDDQMEESTTAAE

SEQ ID NO: 30039 - DNA, 916 bp, Zea mays subsp. mays; identical to SEQ ID NO: 26909
  misc_feature (1)..(916): Ceres Seq. ID no. 13625767
  misc_feature (125)..(125): n is a, c, t, g, unknown, or other

SEQ ID NO: 30040 - protein, 269 aa, Zea mays subsp. mays; identical to SEQ ID NO: 26910
  peptide (1)..(269): Ceres Seq. ID no. 13625768
  misc_feature (201)..(269): Pfam Name: Pfam Description:  Ribosomal protein L7/L12 C-terminal domain
  misc_feature (87)..(269): NCBI GI NO: 34912074 NR Description: putative ribosomal protein L12
  misc_feature (87)..(269): NCBI GI NO: 464517 NR Description: 50S RIBOSOMAL PROTEIN L12-1, CHLOROPLAST PRECURSOR
  misc_feature (87)..(269): NCBI GI NO: 464518 NR Description: 50S RIBOSOMAL PROTEIN L12-2, CHLOROPLAST PRECURSOR
  misc_feature (73)..(260): NCBI GI NO: 1345575 NR Description: ribosomal protein L12 [Secale cereale]
  misc_feature (85)..(269): NCBI GI NO: 4176422 NR Description: ribosomal protein L12
  misc_feature (87)..(269): NCBI GI NO: 418872 NR Description: ribosomal protein L12
  misc_feature (87)..(269): NCBI GI NO: 548746 NR Description: 50S RIBOSOMAL PROTEIN L12, CHLOROPLAST PRECURSOR
  misc_feature (87)..(269): NCBI GI NO: 20020 NR Description: ribosomal protein L12-1a [Nicotiana tabacum]
  misc_feature (87)..(269): NCBI GI NO: 133088 NR Description: 50S RIBOSOMAL PROTEIN L12, CHLOROPLAST PRECURSOR
  misc_feature (87)..(268): NCBI GI NO: 133085 NR Description: 50S RIBOSOMAL PROTEIN L12, CHLOROPLAST PRECURSOR
  misc_feature (42)..(42): Xaa is any aa, unknown or other

SEQ ID NO: 30041 - protein, 183 aa, Zea mays subsp. mays; identical to SEQ ID NO: 26911
  peptide (1)..(183): Ceres Seq. ID no. 13625769
  misc_feature (115)..(183): Pfam Name: Pfam Description:  Ribosomal protein L7/L12 C-terminal domain
  misc_feature (1)..(183): NCBI GI NO: 34912074 NR Description: putative ribosomal protein L12
  misc_feature (1)..(183): NCBI GI NO: 464517 NR Description: 50S RIBOSOMAL PROTEIN L12-1, CHLOROPLAST PRECURSOR
  misc_feature (1)..(183): NCBI GI NO: 464518 NR Description: 50S RIBOSOMAL PROTEIN L12-2, CHLOROPLAST PRECURSOR
  misc_feature (1)..(174): NCBI GI NO: 1345575 NR Description: ribosomal protein L12 [Secale cereale]
  misc_feature (1)..(183): NCBI GI NO: 4176422 NR Description: ribosomal protein L12
  misc_feature (1)..(183): NCBI GI NO: 418872 NR Description: ribosomal protein L12
  misc_feature (1)..(183): NCBI GI NO: 548746 NR Description: 50S RIBOSOMAL PROTEIN L12, CHLOROPLAST PRECURSOR
  misc_feature (1)..(183): NCBI GI NO: 20020 NR Description: ribosomal protein L12-1a [Nicotiana tabacum]
  misc_feature (1)..(183): NCBI GI NO: 133088 NR Description: 50S RIBOSOMAL PROTEIN L12, CHLOROPLAST PRECURSOR
  misc_feature (1)..(182): NCBI GI NO: 133085 NR Description: 50S RIBOSOMAL PROTEIN L12, CHLOROPLAST PRECURSOR

SEQ ID NO: 30042 - DNA, 1255 bp, Zea mays subsp. mays
  misc_feature (1)..(1255): Ceres Seq. ID no. 12404948
atggcagatgcacaggtagtagtaactgcagctgcaaagctggcagtgtcggtgtcggtgtcgtcgtcggcgtcggtgctggggagcgggcgagcggcgcgtcgcatgattctgtcctcctgacgtggcagctaacgattccgattccctttggttgcagtgcgacgacattgacatggacatggcgcagctggagtggctgtcggggctcttcgacgacgcatccatcccgcacgagccggcgttccccggcgcggcgcccatcatcaagagctccgcgctggcggccggcgcgctgctgccgccggacaagatgggggacgcgctgctgttccgcagctccagccccatctcggtgctggagcacggcagcttcaacaacgccaacggcggtggcggcggctgctccgcgtcgtcggagtcgtcctcggcgtcctcgtcctcggagtctttctccggcagcgggagcggcgaaggccatgcgtggtcggcgcccgtgtcgccgccacccgtgctcgtcataccggcgcgcgcgcggagcaagcgctcccgcccgtccgcgttcacgcgcgccggggcggaggcgcccaccatcctcgtgccgacgcccatgtactcgtccgggccgtcccactcggaccccgagagcatcgctgagtccagcccgcacccggcgccgcccatgaagaaaaagaagaaggccaagaagccgccggcgccgcccgcgcccgcctcttccgacgacaacgacggcgacgccgactacgaggaaggcggcgagcgcacggagccgcagggctgcgccgtcaggaggtgcacgcactgccagatcgagaagacgccgcagtggcgcgcggggccgctggggcccaagaccctctgcaacgcctgtggcgtgcgctacaagtccggccgcctgttcccggagtaccgtcccgcggcgagccccaccttcgtgccgtccatccactccaactcgcacaagaaggtggtggagatgcgccagaaggctgtccggagcggtgacccgtcgtgcgacctcctgcagttcatccgccgccgggattgacgtcccggcacggtgtcgccggactgtcggtcggtctcgtcccccttatagctagctatatagtatatgtatacatgctagtatgtatgcatgcatggttgcttcagcagtcgttggtcgtcgtcgtccatcatggtcatcatcaccacttcaccggtcaccgccatggcatggatcccacccctc

SEQ ID NO: 30043 - protein, 297 aa, Zea mays subsp. mays
  peptide (1)..(297): Ceres Seq. ID no. 12404949
  misc_feature (1)..(297): NCBI GI NO: 15451574 NR Description: Putative GATA-1 zinc finger protein [Oryza sativa]
  misc_feature (80)..(280): NCBI GI NO: 37572443 NR Description: AG-motif binding protein-1 [Nicotiana tabacum]
  misc_feature (80)..(280): NCBI GI NO: 37572451 NR Description: AG-motif binding protein-5 [Nicotiana tabacum]
  misc_feature (74)..(285): NCBI GI NO: 34909448 NR Description: OSJNBa0014K08.18
  misc_feature (84)..(278): NCBI GI NO: 37536778 NR Description: putative transcription factor
  misc_feature (84)..(278): NCBI GI NO: 15239503 NR Description: GATA zinc finger protein; protein id: At5g25830.1
  misc_feature (78)..(283): NCBI GI NO: 15233101 NR Description: GATA zinc finger protein; protein id: At3g54810
  misc_feature (116)..(294): NCBI GI NO: 15239343 NR Description: GATA zinc finger protein; protein id: At5g66320.1
  misc_feature (204)..(280): NCBI GI NO: 12711287 NR Description: GATA-1 zinc finger protein [Nicotiana tabacum]
  misc_feature (212)..(284): NCBI GI NO: 37572449 NR Description: AG-motif binding protein-4 [Nicotiana tabacum]
MDMAQLEWLSGLFDDASIPHEPAFPGAAPIIKSSALAAGALLPPDKMGDALLFRSSSPISVLEHGSFNNANGGGGGCSASSESSSASSSSESFSGSGSGEGHAWSAPVSPPPVLVIPARARSKRSRPSAFTRAGAEAPTILVPTPMYSSGPSHSDPESIAESSPHPAPPMKKKKKAKKPPAPPAPASSDDNDGDADYEEGGERTEPQGCAVRRCTHCQIEKTPQWRAGPLGPKTLCNACGVRYKSGRLFPEYRPAASPTFVPSIHSNSHKKVVEMRQKAVRSGDPSCDLLQFIRRRD

SEQ ID NO: 30044 - protein, 295 aa, Zea mays subsp. mays
  peptide (1)..(295): Ceres Seq. ID no. 12404950
  misc_feature (1)..(295): NCBI GI NO: 15451574 NR Description: Putative GATA-1 zinc finger protein [Oryza sativa]
  misc_feature (78)..(278): NCBI GI NO: 37572443 NR Description: AG-motif binding protein-1 [Nicotiana tabacum]
  misc_feature (78)..(278): NCBI GI NO: 37572451 NR Description: AG-motif binding protein-5 [Nicotiana tabacum]
  misc_feature (72)..(283): NCBI GI NO: 34909448 NR Description: OSJNBa0014K08.18
  misc_feature (82)..(276): NCBI GI NO: 37536778 NR Description: putative transcription factor
  misc_feature (82)..(276): NCBI GI NO: 15239503 NR Description: GATA zinc finger protein; protein id: At5g25830.1
  misc_feature (76)..(281): NCBI GI NO: 15233101 NR Description: GATA zinc finger protein; protein id: At3g54810
  misc_feature (114)..(292): NCBI GI NO: 15239343 NR Description: GATA zinc finger protein; protein id: At5g66320.1
  misc_feature (202)..(278): NCBI GI NO: 12711287 NR Description: GATA-1 zinc finger protein [Nicotiana tabacum]
  misc_feature (210)..(282): NCBI GI NO: 37572449 NR Description: AG-motif binding protein-4 [Nicotiana tabacum]
MAQLEWLSGLFDDASIPHEPAFPGAAPIIKSSALAAGALLPPDKMGDALLFRSSSPISVLEHGSFNNANGGGGGCSASSESSSASSSSESFSGSGSGEGHAWSAPVSPPPVLVIPARARSKRSRPSAFTRAGAEAPTILVPTPMYSSGPSHSDPESIAESSPHPAPPMKKKKKAKKPPAPPAPASSDDNDGDADYEEGGERTEPQGCAVRRCTHCQIEKTPQWRAGPLGPKTLCNACGVRYKSGRLFPEYRPAASPTFVPSIHSNSHKKVVEMRQKAVRSGDPSCDLLQFIRRRD

SEQ ID NO: 30045 - protein, 251 aa, Zea mays subsp. mays
  peptide (1)..(251): Ceres Seq. ID no. 12404951
  misc_feature (1)..(251): NCBI GI NO: 15451574 NR Description: Putative GATA-1 zinc finger protein [Oryza sativa]
  misc_feature (34)..(234): NCBI GI NO: 37572443 NR Description: AG-motif binding protein-1 [Nicotiana tabacum]
  misc_feature (34)..(234): NCBI GI NO: 37572451 NR Description: AG-motif binding protein-5 [Nicotiana tabacum]
  misc_feature (28)..(239): NCBI GI NO: 34909448 NR Description: OSJNBa0014K08.18
  misc_feature (38)..(232): NCBI GI NO: 37536778 NR Description: putative transcription factor
  misc_feature (38)..(232): NCBI GI NO: 15239503 NR Description: GATA zinc finger protein; protein id: At5g25830.1
  misc_feature (32)..(237): NCBI GI NO: 15233101 NR Description: GATA zinc finger protein; protein id: At3g54810
  misc_feature (70)..(248): NCBI GI NO: 15239343 NR Description: GATA zinc finger protein; protein id: At5g66320.1
  misc_feature (158)..(234): NCBI GI NO: 12711287 NR Description: GATA-1 zinc finger protein [Nicotiana tabacum]
  misc_feature (166)..(238): NCBI GI NO: 37572449 NR Description: AG-motif binding protein-4 [Nicotiana tabacum]
MGDALLFRSSSPISVLEHGSFNNANGGGGGCSASSESSSASSSSESFSGSGSGEGHAWSAPVSPPPVLVIPARARSKRSRPSAFTRAGAEAPTILVPTPMYSSGPSHSDPESIAESSPHPAPPMKKKKKAKKPPAPPAPASSDDNDGDADYEEGGERTEPQGCAVRRCTHCQIEKTPQWRAGPLGPKTLCNACGVRYKSGRLFPEYRPAASPTFVPSIHSNSHKKVVEMRQKAVRSGDPSCDLLQFIRRRD

SEQ ID NO: 30046 - DNA, 1614 bp, Zea mays subsp. mays; identical to SEQ ID NO: 23495
  misc_feature (1)..(1614): Ceres Seq. ID no. 12410981
  misc_feature (607)..(607): n is a, c, t, g, unknown, or other
  misc_feature (609)..(609): n is a, c, t, g, unknown, or other
  misc_feature (608)..(608): n is a, c, t, g, unknown, or other

SEQ ID NO: 30047 - protein, 352 aa, Zea mays subsp. mays; identical to SEQ ID NO: 23496
  peptide (1)..(352): Ceres Seq. ID no. 12410982
  misc_feature (1)..(119): Pfam Name: Pfam Description:  Cupin
  misc_feature (16)..(352): NCBI GI NO: 29247944 NR Description: GLP_26_54603_52153 [Giardia lamblia ATCC 50803]
  misc_feature (34)..(352): NCBI GI NO: 29247944 NR Description: GLP_26_54603_52153 [Giardia lamblia ATCC 50803]
  misc_feature (55)..(352): NCBI GI NO: 23104258 NR Description: hypothetical protein [Azotobacter vinelandii]
  misc_feature (108)..(108): Xaa is any aa, unknown or other
  misc_feature (109)..(109): Xaa is any aa, unknown or other

SEQ ID NO: 30048 - protein, 344 aa, Zea mays subsp. mays; identical to SEQ ID NO: 23497
  peptide (1)..(344): Ceres Seq. ID no. 12410983
  misc_feature (79)..(135): Pfam Name: Pfam Description:  Carboxylesterase
  misc_feature (3)..(331): NCBI GI NO: 34904770 NR Description: similar to carboxylesterase
  misc_feature (1)..(334): NCBI GI NO: 34904760 NR Description: similar to carboxylesterase
  misc_feature (1)..(332): NCBI GI NO: 34393714 NR Description: putative esterase
  misc_feature (1)..(332): NCBI GI NO: 34904774 NR Description: similar to carboxylesterase
  misc_feature (15)..(327): NCBI GI NO: 34904772 NR Description: similar to carboxylesterase
  misc_feature (1)..(328): NCBI GI NO: 15237783 NR Description: putative protein; protein id: At5g23530
  misc_feature (1)..(328): NCBI GI NO: 21618039 NR Description: unknown [Arabidopsis thaliana]
  misc_feature (1)..(332): NCBI GI NO: 15240483 NR Description: putative protein; protein id: At5g27320
  misc_feature (2)..(334): NCBI GI NO: 34904758 NR Description: hypothetical protein~predicted by GeneMark
  misc_feature (34)..(339): NCBI GI NO: 15229371 NR Description: putative protein; protein id: At3g63010.1
  misc_feature (77)..(77): Xaa is any aa, unknown or other
  misc_feature (78)..(78): Xaa is any aa, unknown or other

SEQ ID NO: 30049 - DNA, 1567 bp, Zea mays subsp. mays
  misc_feature (1)..(1567): Ceres Seq. ID no. 12407394
gaacatcctaatcgaaaaaagccccagcagtttgccactcccacgcgaaacagaagccccagcagggcggcactcccgacgcgacgcccctgcttgccggccgggaggctcactcgactctgcctccacttcctcgtctgtccgttggagcacggcgccgatggcggcggcgccagcgctcgcgcgggagctgctggacgcggcgcgggagccggagttcgcggagtggcagcgcggcgtgcggcgccggatccaccagcacccggagctggccttccaggagcaccgcaccagcgcgctcgtgcgcgccgagctcgacgcgatcggcgtcccgtacgcctggcccgtcgcgcagacgggcgtcgtggccaccatcaccggccccgccgcgggccccgtgttcgcgctccgcgccgacatggacgcgctccccatccaggaaatggtagaatgggagttcaagagcaaggaagacgggaagatgcatgcgtgcggccatgacgcccacgtggcgatgcttcttggagcagctaggttgcttcagtctcggagggacgatttaaagggtacagtgaagctcgtcttccagccagccgaggagggacacgccggcgcataccacgtcctcaaggaaggcgtcctggacaacgtgcaggccatcttcggcgtgcacgtggacacggcgttgccggtggggctcgtcgggtccaggccagggccgttcctcgccggatcggcgcggttcacggcgaccatcacggggaaaggcgggcacgcagcggggccgcagcacgtcgtcgacccgatcgtcgcggcgtcctccgccgtgctcagcctccagcagctcgtcgcccgcgagaccgacccgctacagggcgcagttgtgtcggtgaccttcatcaaaggaggaggcggagctttcaatgtcatcccagaatccgtcaccatgggcggcaccttgaggagcatgacgaacgatggcatgtcctatctcgtgaaaagaatcagagaggtgatacaaggacaagccgccgtgagccgctgcgccgctacggtggacttgatggaggagaggatgaggccgtacccggccaccgtgaacgacgaggccatgtactcccacgccaaggcggtggcggagagcatgctgggcgaggccagcgtgatgctgtgcccccagttcatggcggcggaggacttcggcttctacgcgcagcggatcccggcggccttcttcagcgtcggcgtccgcgacgaggcgacggggaaggtccaccacgtgcactcaccgcacctggacatcgacgaggccgcgctccccgtcggagccgcgttgcacgccgccttggctatggagtacctgaacaaacacgcaccatgcaaataaacacaaggctctggccatcccgataatacatgtcattcttattgaagtgactgcatgccgcaaaatcttccctccttggagcggtaagaatttgctaccccgcatccgtgctctgtacgtcgaaaataaatgtgtccagacatccctgaaagattggtttggttgtactgcgcctgttcc

SEQ ID NO: 30050 - protein, 461 aa, Zea mays subsp. mays
  peptide (1)..(461): Ceres Seq. ID no. 12407395
  misc_feature (74)..(455): Pfam Name: Pfam Description:  Peptidase family M20/M25/M40
  misc_feature (56)..(458): NCBI GI NO: 28376718 NR Description: putative  IAA amidohydrolase
  misc_feature (60)..(458): NCBI GI NO: 28376716 NR Description: putative  IAA amidohydrolase
  misc_feature (50)..(457): NCBI GI NO: 34900782 NR Description: putative IAA amidohydrolase
  misc_feature (63)..(458): NCBI GI NO: 34900780 NR Description: putative IAA amidohydrolase
  misc_feature (50)..(458): NCBI GI NO: 34900784 NR Description: IAA amidohydrolase-like protein~contains ESTsAU057861
  misc_feature (59)..(457): NCBI GI NO: 15233011 NR Description: IAA-amino acid hydrolase
  misc_feature (59)..(457): NCBI GI NO: 21554648 NR Description: IAA-amino acid hydrolase (ILR1)
  misc_feature (59)..(457): NCBI GI NO: 887785 NR Description: ILR1
  misc_feature (59)..(457): NCBI GI NO: 18129692 NR Description: IAA amidohydrolase [Arabidopsis suecica]
  misc_feature (63)..(461): NCBI GI NO: 34910396 NR Description: putative IAA-Ala hydrolase
NILIEKSPSSLPLPRETEAPAGRHSRRDAPACRPGGSLDSASTSSSVRWSTAPMAAAPALARELLDAAREPEFAEWQRGVRRRIHQHPELAFQEHRTSALVRAELDAIGVPYAWPVAQTGVVATITGPAAGPVFALRADMDALPIQEMVEWEFKSKEDGKMHACGHDAHVAMLLGAARLLQSRRDDLKGTVKLVFQPAEEGHAGAYHVLKEGVLDNVQAIFGVHVDTALPVGLVGSRPGPFLAGSARFTATITGKGGHAAGPQHVVDPIVAASSAVLSLQQLVARETDPLQGAVVSVTFIKGGGGAFNVIPESVTMGGTLRSMTNDGMSYLVKRIREVIQGQAAVSRCAATVDLMEERMRPYPATVNDEAMYSHAKAVAESMLGEASVMLCPQFMAAEDFGFYAQRIPAAFFSVGVRDEATGKVHHVHSPHLDIDEAALPVGAALHAALAMEYLNKHAPCK

SEQ ID NO: 30051 - protein, 408 aa, Zea mays subsp. mays
  peptide (1)..(408): Ceres Seq. ID no. 12407396
  misc_feature (21)..(402): Pfam Name: Pfam Description:  Peptidase family M20/M25/M40
  misc_feature (3)..(405): NCBI GI NO: 28376718 NR Description: putative  IAA amidohydrolase
  misc_feature (7)..(405): NCBI GI NO: 28376716 NR Description: putative  IAA amidohydrolase
  misc_feature (1)..(404): NCBI GI NO: 34900782 NR Description: putative IAA amidohydrolase
  misc_feature (10)..(405): NCBI GI NO: 34900780 NR Description: putative IAA amidohydrolase
  misc_feature (1)..(405): NCBI GI NO: 34900784 NR Description: IAA amidohydrolase-like protein~contains ESTsAU057861
  misc_feature (6)..(404): NCBI GI NO: 15233011 NR Description: IAA-amino acid hydrolase
  misc_feature (6)..(404): NCBI GI NO: 21554648 NR Description: IAA-amino acid hydrolase (ILR1)
  misc_feature (6)..(404): NCBI GI NO: 887785 NR Description: ILR1
  misc_feature (6)..(404): NCBI GI NO: 18129692 NR Description: IAA amidohydrolase [Arabidopsis suecica]
  misc_feature (10)..(408): NCBI GI NO: 34910396 NR Description: putative IAA-Ala hydrolase
MAAAPALARELLDAAREPEFAEWQRGVRRRIHQHPELAFQEHRTSALVRAELDAIGVPYAWPVAQTGVVATITGPAAGPVFALRADMDALPIQEMVEWEFKSKEDGKMHACGHDAHVAMLLGAARLLQSRRDDLKGTVKLVFQPAEEGHAGAYHVLKEGVLDNVQAIFGVHVDTALPVGLVGSRPGPFLAGSARFTATITGKGGHAAGPQHVVDPIVAASSAVLSLQQLVARETDPLQGAVVSVTFIKGGGGAFNVIPESVTMGGTLRSMTNDGMSYLVKRIREVIQGQAAVSRCAATVDLMEERMRPYPATVNDEAMYSHAKAVAESMLGEASVMLCPQFMAAEDFGFYAQRIPAAFFSVGVRDEATGKVHHVHSPHLDIDEAALPVGAALHAALAMEYLNKHAPCK

SEQ ID NO: 30052 - protein, 322 aa, Zea mays subsp. mays
  peptide (1)..(322): Ceres Seq. ID no. 12407397
  misc_feature (1)..(316): Pfam Name: Pfam Description:  Peptidase family M20/M25/M40
  misc_feature (1)..(319): NCBI GI NO: 28376718 NR Description: putative  IAA amidohydrolase
  misc_feature (1)..(319): NCBI GI NO: 28376716 NR Description: putative  IAA amidohydrolase
  misc_feature (1)..(318): NCBI GI NO: 34900782 NR Description: putative IAA amidohydrolase
  misc_feature (1)..(319): NCBI GI NO: 34900780 NR Description: putative IAA amidohydrolase
  misc_feature (1)..(319): NCBI GI NO: 34900784 NR Description: IAA amidohydrolase-like protein~contains ESTsAU057861
  misc_feature (1)..(318): NCBI GI NO: 15233011 NR Description: IAA-amino acid hydrolase
  misc_feature (1)..(318): NCBI GI NO: 21554648 NR Description: IAA-amino acid hydrolase (ILR1)
  misc_feature (1)..(318): NCBI GI NO: 887785 NR Description: ILR1
  misc_feature (1)..(318): NCBI GI NO: 18129692 NR Description: IAA amidohydrolase [Arabidopsis suecica]
  misc_feature (1)..(322): NCBI GI NO: 34910396 NR Description: putative IAA-Ala hydrolase
MDALPIQEMVEWEFKSKEDGKMHACGHDAHVAMLLGAARLLQSRRDDLKGTVKLVFQPAEEGHAGAYHVLKEGVLDNVQAIFGVHVDTALPVGLVGSRPGPFLAGSARFTATITGKGGHAAGPQHVVDPIVAASSAVLSLQQLVARETDPLQGAVVSVTFIKGGGGAFNVIPESVTMGGTLRSMTNDGMSYLVKRIREVIQGQAAVSRCAATVDLMEERMRPYPATVNDEAMYSHAKAVAESMLGEASVMLCPQFMAAEDFGFYAQRIPAAFFSVGVRDEATGKVHHVHSPHLDIDEAALPVGAALHAALAMEYLNKHAPCK

SEQ ID NO: 30053 - DNA, 1390 bp, Zea mays subsp. mays
  misc_feature (1)..(1390): Ceres Seq. ID no. 12412584
aaaagcccacttctgtagctgtagactgtagttctgttcctccccactcactcctgcgcttcctcgccgcgcggttccttctccctgatcctcctttggcttcgcggttcatggcgatgtggagggccgccgctaggcagctggtcgaccgggcgctcggctcaagggccgcgcacacgtctacaggcagcaaaaagatagtcggggtgttctacaaggccggggagtatgccgacaagaaccccaacttcgtcggctgcgtcgagggtgcactcggcatccgcggctggctcgagtcgcagggccatcagtacattgtcaccgatgacaaggaaggccccaactgtgaactggagaagcacattgaagacatgcatgtcctgattaccaccccattccacccagcttatgtcactgcagagaggataaagaacgcgaagaatcttgagcttcttctcacggcaggaattggctcagatcatattgatcttccagcagctgctgctgcgggcttaactgtggctgaggtcactggaagcaacactgtctctgtggcagaagatgagctcttgcgcattctgattctgctcaggaacttcttgcctgggtaccaacaggtagttcaaggcgaatggaacgtagcaggcattgcccatagagcttatgatcttgaaggaaaaactgttgggactgttggggctggtcgtattggcaggctcttgcttcagcgtcttaagccctttaactgcaacctgctttaccatgacagacttcagattgacccagagcttgagaaagaaattggggccaaatttgaggaggacctggatgctatgcttccagagtgtgatgtgattgtgatcaacacacctcttacggagaaaacaagaggcatgtttaacaaagagaggattgcaaagatgaagaaaggtgtaattgttgtgaataatgctcgaggagcaatcatggatgctcaagcagtcgcagatgcatgttctagcggtcacattgctggatacggtggtgatgtgtggttcccccaaccagcacccaaggatcacccctggcgctacatgccaaaccatgccatgacccctcacatctctgggactacaattgatgcgcagctgcggtatgcggatggtgtgagggacatgctgaataggtatttcaagggcgaggacttccccgtgcagaactacatcgtcaaggaaggccagcttgccagtcagtaccagtgaccgcgcgagatgttgctgtgccgtgtaggcttttctggtgagaagctgcgaggaagaaactcctgttgcgtacttgcgttactgtatgagtagctctgagaaacctgtcagcggccacctgtaataaaagaatgccttgctggtatcgc

SEQ ID NO: 30054 - protein, 412 aa, Zea mays subsp. mays
  peptide (1)..(412): Ceres Seq. ID no. 12412585
  misc_feature (81)..(178): Pfam Name: Pfam Description:  D-isomer specific 2-hydroxyacid dehydrogenase
  misc_feature (38)..(412): NCBI GI NO: 21263612 NR Description: Formate dehydrogenase, mitochondrial precursor
  misc_feature (37)..(412): NCBI GI NO: 21263611 NR Description: Formate dehydrogenase, mitochondrial precursor
  misc_feature (43)..(412): NCBI GI NO: 38636526 NR Description: formate dehydrogenase [Quercus robur]
  misc_feature (37)..(412): NCBI GI NO: 26454627 NR Description: Formate dehydrogenase, mitochondrial precursor
  misc_feature (54)..(412): NCBI GI NO: 542089 NR Description: formate dehydrogenase (EC 1
  misc_feature (55)..(412): NCBI GI NO: 15241492 NR Description: formate dehydrogenase (FDH); protein id:At5g14780
  misc_feature (154)..(352): NCBI GI NO: 17017281 NR Description: formate dehydrogenase [Zea mays]
  misc_feature (69)..(310): NCBI GI NO: 40738675 NR Description: FDH_EMENI Probable formate dehydrogenase
  misc_feature (309)..(412): NCBI GI NO: 40738675 NR Description: FDH_EMENI Probable formate dehydrogenase
  misc_feature (32)..(412): NCBI GI NO: 4572458 NR Description: NAD-dependent formate dehydrogenase
KPTSVAVDCSSVPPHSLLRFLAARFLLPDPPLASRFMAMWRAAARQLVDRALGSRAAHTSTGSKKIVGVFYKAGEYADKNPNFVGCVEGALGIRGWLESQGHQYIVTDDKEGPNCELEKHIEDMHVLITTPFHPAYVTAERIKNAKNLELLLTAGIGSDHIDLPAAAAAGLTVAEVTGSNTVSVAEDELLRILILLRNFLPGYQQVVQGEWNVAGIAHRAYDLEGKTVGTVGAGRIGRLLLQRLKPFNCNLLYHDRLQIDPELEKEIGAKFEEDLDAMLPECDVIVINTPLTEKTRGMFNKERIAKMKKGVIVVNNARGAIMDAQAVADACSSGHIAGYGGDVWFPQPAPKDHPWRYMPNHAMTPHISGTTIDAQLRYADGVRDMLNRYFKGEDFPVQNYIVKEGQLASQYQ

SEQ ID NO: 30055 - protein, 376 aa, Zea mays subsp. mays
  peptide (1)..(376): Ceres Seq. ID no. 12412586
  misc_feature (45)..(142): Pfam Name: Pfam Description:  D-isomer specific 2-hydroxyacid dehydrogenase
  misc_feature (2)..(376): NCBI GI NO: 21263612 NR Description: Formate dehydrogenase, mitochondrial precursor
  misc_feature (1)..(376): NCBI GI NO: 21263611 NR Description: Formate dehydrogenase, mitochondrial precursor
  misc_feature (7)..(376): NCBI GI NO: 38636526 NR Description: formate dehydrogenase [Quercus robur]
  misc_feature (1)..(376): NCBI GI NO: 26454627 NR Description: Formate dehydrogenase, mitochondrial precursor
  misc_feature (18)..(376): NCBI GI NO: 542089 NR Description: formate dehydrogenase (EC 1
  misc_feature (19)..(376): NCBI GI NO: 15241492 NR Description: formate dehydrogenase (FDH); protein id:At5g14780
  misc_feature (118)..(316): NCBI GI NO: 17017281 NR Description: formate dehydrogenase [Zea mays]
  misc_feature (33)..(274): NCBI GI NO: 40738675 NR Description: FDH_EMENI Probable formate dehydrogenase
  misc_feature (273)..(376): NCBI GI NO: 40738675 NR Description: FDH_EMENI Probable formate dehydrogenase
  misc_feature (1)..(376): NCBI GI NO: 4572458 NR Description: NAD-dependent formate dehydrogenase
MAMWRAAARQLVDRALGSRAAHTSTGSKKIVGVFYKAGEYADKNPNFVGCVEGALGIRGWLESQGHQYIVTDDKEGPNCELEKHIEDMHVLITTPFHPAYVTAERIKNAKNLELLLTAGIGSDHIDLPAAAAAGLTVAEVTGSNTVSVAEDELLRILILLRNFLPGYQQVVQGEWNVAGIAHRAYDLEGKTVGTVGAGRIGRLLLQRLKPFNCNLLYHDRLQIDPELEKEIGAKFEEDLDAMLPECDVIVINTPLTEKTRGMFNKERIAKMKKGVIVVNNARGAIMDAQAVADACSSGHIAGYGGDVWFPQPAPKDHPWRYMPNHAMTPHISGTTIDAQLRYADGVRDMLNRYFKGEDFPVQNYIVKEGQLASQYQ

SEQ ID NO: 30056 - protein, 374 aa, Zea mays subsp. mays
  peptide (1)..(374): Ceres Seq. ID no. 12412587
  misc_feature (43)..(140): Pfam Name: Pfam Description:  D-isomer specific 2-hydroxyacid dehydrogenase
  misc_feature (1)..(374): NCBI GI NO: 21263612 NR Description: Formate dehydrogenase, mitochondrial precursor
  misc_feature (1)..(374): NCBI GI NO: 21263611 NR Description: Formate dehydrogenase, mitochondrial precursor
  misc_feature (5)..(374): NCBI GI NO: 38636526 NR Description: formate dehydrogenase [Quercus robur]
  misc_feature (1)..(374): NCBI GI NO: 26454627 NR Description: Formate dehydrogenase, mitochondrial precursor
  misc_feature (16)..(374): NCBI GI NO: 542089 NR Description: formate dehydrogenase (EC 1
  misc_feature (17)..(374): NCBI GI NO: 15241492 NR Description: formate dehydrogenase (FDH); protein id:At5g14780
  misc_feature (116)..(314): NCBI GI NO: 17017281 NR Description: formate dehydrogenase [Zea mays]
  misc_feature (31)..(272): NCBI GI NO: 40738675 NR Description: FDH_EMENI Probable formate dehydrogenase
  misc_feature (271)..(374): NCBI GI NO: 40738675 NR Description: FDH_EMENI Probable formate dehydrogenase
  misc_feature (1)..(374): NCBI GI NO: 4572458 NR Description: NAD-dependent formate dehydrogenase
MWRAAARQLVDRALGSRAAHTSTGSKKIVGVFYKAGEYADKNPNFVGCVEGALGIRGWLESQGHQYIVTDDKEGPNCELEKHIEDMHVLITTPFHPAYVTAERIKNAKNLELLLTAGIGSDHIDLPAAAAAGLTVAEVTGSNTVSVAEDELLRILILLRNFLPGYQQVVQGEWNVAGIAHRAYDLEGKTVGTVGAGRIGRLLLQRLKPFNCNLLYHDRLQIDPELEKEIGAKFEEDLDAMLPECDVIVINTPLTEKTRGMFNKERIAKMKKGVIVVNNARGAIMDAQAVADACSSGHIAGYGGDVWFPQPAPKDHPWRYMPNHAMTPHISGTTIDAQLRYADGVRDMLNRYFKGEDFPVQNYIVKEGQLASQYQ

SEQ ID NO: 30057 - DNA, 1482 bp, Zea mays subsp. mays
  misc_feature (1)..(1482): Ceres Seq. ID no. 12369082
gacattattgccccctcttcccttcccaacccaacccattgcatttgcaagcccttttacattgcagagcgccagagcctcgctcgctctcggaacagagctaggcagctaacagacgaagaagaagcaagccaagcagaattgagagagaggcgaggacgtggcgacgacggcagccgcgatggcgacgacgacggacctggggttcgaggcgacggagctccgcctgggcctgcccggcgggggaggtggaggggagccggcgctgggcggcgaggggaggagctcttcctccgcctccggcaagaggggcttcgccgagaccatcgacctgaagctgaagctggagccagcggccgtcgtggaggcggaggaggaggaggaggaccacggcgttgctgttgcccttgagaaggaggaggaggccgggaagatgaagcggtccccgagccagagcagcgtcgccgccgccgccgccgccgtgctggctgaccccgccgagaagccgcgcgccgccaaggctcaggtggtgggatggccaccggtccggtcgttccggaagaacatcatgtccgtgcagtccgacaagggcgccggcaaagacgccgccgccgccaacggcgacaagtcctcggcggcggcaggcggcggtgccgcgttcgtgaaggtgagcttggacggcgcgccctacctgcgcaaagtggacctcaagatgtacaggagctaccagcagctgtccaaggcgctcgagaacatgttcagctccttcaccatcggaagctgtgggtctcaagggatgaacggcatgaacgagagcaagctggtggatctgctcaacggctccgagtacgtgccgacctacgaggacaaggacggggactggatgctcgtcggcgacgtgccgtgggagatgttcgtcgaatcatgcaagcgccttcggatcatgaaaggatcagaagccattggcctggcgccaagggccatggagaaatgcaagaacagaagctgaggagaagacggacggacggaagcttgcatctcagcaccaccaggggtggatggatgcaagaagaacaaatctccatggcttttgcagctctgctcgtctctgtatcatactcgtcgtccctgcccttcaggcctctgtatctccctgatcaatgaagtcgttttggtgtgtcaactgttctctccgtgcccagcttgtcagtgaaagagtcagtcagtgtccatcaagtctcatcttgtcctatacagaagagagaagccatgcatgaacatgtacctgtcctataacaatgtctttttttgctacctgtttttttttctctctctctctttttttggcacaagatgcaaaggcaccctgctcctgatcaaagggccttttgcatcataagctgtttgattataattaccatggtgtgtcagtggaacaaataactgttgcaaggtgttaaaaaaaagttgtattgtaatatg

SEQ ID NO: 30058 - protein, 275 aa, Zea mays subsp. mays
  peptide (1)..(275): Ceres Seq. ID no. 12369083
  misc_feature (7)..(60): Pfam Name: Pfam Description:  AUX/IAA family
  misc_feature (88)..(275): NCBI GI NO: 15229343 NR Description: auxin-induced protein; protein id: At3g04730
  misc_feature (7)..(60): NCBI GI NO: 15229343 NR Description: auxin-induced protein; protein id: At3g04730
  misc_feature (104)..(275): NCBI GI NO: 4887020 NR Description: Nt-iaa28 deduced protein [Nicotiana tabacum]
  misc_feature (7)..(55): NCBI GI NO: 4887020 NR Description: Nt-iaa28 deduced protein [Nicotiana tabacum]
  misc_feature (103)..(275): NCBI GI NO: 114734 NR Description: AUXIN-INDUCED PROTEIN AUX28
  misc_feature (7)..(94): NCBI GI NO: 114734 NR Description: AUXIN-INDUCED PROTEIN AUX28
  misc_feature (1)..(275): NCBI GI NO: 20269059 NR Description: aux/IAA protein
  misc_feature (89)..(263): NCBI GI NO: 20269061 NR Description: aux/IAA protein
  misc_feature (5)..(55): NCBI GI NO: 20269061 NR Description: aux/IAA protein
  misc_feature (86)..(275): NCBI GI NO: 4887022 NR Description: Nt-iaa4.1 deduced protein [Nicotiana tabacum]
MATTTDLGFEATELRLGLPGGGGGGEPALGGEGRSSSSASGKRGFAETIDLKLKLEPAAVVEAEEEEEDHGVAVALEKEEEAGKMKRSPSQSSVAAAAAAVLADPAEKPRAAKAQVVGWPPVRSFRKNIMSVQSDKGAGKDAAAANGDKSSAAAGGGAAFVKVSLDGAPYLRKVDLKMYRSYQQLSKALENMFSSFTIGSCGSQGMNGMNESKLVDLLNGSEYVPTYEDKDGDWMLVGDVPWEMFVESCKRLRIMKGSEAIGLAPRAMEKCKNRS

SEQ ID NO: 30059 - protein, 209 aa, Zea mays subsp. mays
  peptide (1)..(209): Ceres Seq. ID no. 12369084
MATGPVVPEEHHVRAVRQGRRQRRRRRQRRQVLGGGRRRCRVREGELGRRALPAQSGPQDVQELPAAVQGAREHVQLLHHRKLWVSRDERHEREQAGGSAQRLRVRADLRGQGRGLDARRRRAVGDVRRIMQAPSDHERIRSHWPGAKGHGEMQEQKLRRRRTDGSLHLSTTRGGWMQEEQISMAFAALLVSVSYSSSLPFRPLYLPDQ

SEQ ID NO: 30060 - protein, 191 aa, Zea mays subsp. mays
  peptide (1)..(191): Ceres Seq. ID no. 12369085
  misc_feature (4)..(183): Pfam Name: Pfam Description:  AUX/IAA family
  misc_feature (4)..(191): NCBI GI NO: 15229343 NR Description: auxin-induced protein; protein id: At3g04730
  misc_feature (20)..(191): NCBI GI NO: 4887020 NR Description: Nt-iaa28 deduced protein [Nicotiana tabacum]
  misc_feature (19)..(191): NCBI GI NO: 114734 NR Description: AUXIN-INDUCED PROTEIN AUX28
  misc_feature (1)..(191): NCBI GI NO: 20269059 NR Description: aux/IAA protein
  misc_feature (5)..(179): NCBI GI NO: 20269061 NR Description: aux/IAA protein
  misc_feature (2)..(191): NCBI GI NO: 4887022 NR Description: Nt-iaa4.1 deduced protein [Nicotiana tabacum]
  misc_feature (20)..(191): NCBI GI NO: 20385508 NR Description: auxin-regulated protein
  misc_feature (75)..(191): NCBI GI NO: 5139697 NR Description: expressed in cucumber hypocotyls [Cucumis sativus]
  misc_feature (1)..(46): NCBI GI NO: 5139697 NR Description: expressed in cucumber hypocotyls [Cucumis sativus]
  misc_feature (18)..(191): NCBI GI NO: 21593352 NR Description: indoleacetic acid (IAA)-inducible gene (IAA7)
MKRSPSQSSVAAAAAAVLADPAEKPRAAKAQVVGWPPVRSFRKNIMSVQSDKGAGKDAAAANGDKSSAAAGGGAAFVKVSLDGAPYLRKVDLKMYRSYQQLSKALENMFSSFTIGSCGSQGMNGMNESKLVDLLNGSEYVPTYEDKDGDWMLVGDVPWEMFVESCKRLRIMKGSEAIGLAPRAMEKCKNRS

SEQ ID NO: 30061 - DNA, 1630 bp, Zea mays subsp. mays
  misc_feature (1)..(1630): Ceres Seq. ID no. 12356575
gcggccaccggcttattcaagagcaccaaaagagtttcggcatggatggatagcacacagcgagcgagcgagagcggtgagcccggccaccagcgccggaggccgtcgtcgtcttactagccgacgctcgacttgggcatgaattgctagccgcgcgggtgagagattgctaggtagccagctaggtacggtgtggggagttgaatcggaggtctgccgctcgaggcggcggcggcagaaggccggtaggatgaagaagctccactggctggtgcggttcctgttcgggccggtgccggtctacttctcggcgctggccatcctcatcgtgctcaccaacgcgcagtacttcgggctggtgggcgtcggcgtggcgccgcgcaccgcgaagctggcctcctcggcgcccgtggtcagcgtcatgaagtactgcgacatcttccgcggcgagtgggtgccggacgcggaggcgccctactacaaccacaagacgtgccacatgatccaggagcaccagaactgcctcaagtacggccgccccgacctgggcttcctcaagtggcggtggcggccctccggatgcgagctgccgcgcttcgacccgctgcagttcctgcagttcgcccgcgggaagtcgctggccttcgtcggggactcgctggcgcggaaccacatgcagtcgctgctctgcctcctgtcccaggtggcgtatcccaaggacctgtcggcgaacccgtcggaccagaacaaggtgtaccactaccgggcgtacaacttcaccatcagcatgttctggtcgccgttcctggtgcgcgcccgggagcccgaccacgacggccccgcgcacacgggccactggagcctctacctggacgagcccgacgacaagtgggtgtcccagatgccccgcttcgactacgtgctggtgtcggcggccaactggttctcccgcccctccctcttctacgagcggcggcgcctcgtcgggtgcagcttctgcagccgccagtacggcgtgcccgacctgacgctctactactcgcagcgccgcgcgtggcgcgtggcgctgcgcgccatcaacgacctggagcgcctgcgagggcgcgtcatcctgcgcatgctctccccgatgtcgcacttcgagaacgggacctgggaccacggcggcgactgcaggcgcacgcagccgctgcgggcgaaccagaccgccatggagggccgcgacctgcacttctacaccgcgcagatggaggagttccgcgccgcggagaaggccgccgccgagaaggggcggcgcctgatgctcatggacgccacggcggcgatgctgatgcggcccgacggccaccccagccgctacgggcactggcccaacgagaaggtgcagctctacaacgactgcatccactggtgcctcccgggacccatcgacatctggaacgacatgctcttccagatgctcctcgcctagcagcaagcagcaaagattaaaaaaaaaactcagcaattcggtcgccggtaaccgtgcacagattggccttcttttttttgccttgtttcgtttttttaaaaaaagaagaaaatggtgcaattttgacaagcaaggattcgaaattcgccggtaaccccc

SEQ ID NO: 30062 - protein, 406 aa, Zea mays subsp. mays
  peptide (1)..(406): Ceres Seq. ID no. 12356576
  misc_feature (232)..(404): Pfam Name: Pfam Description:  Arabidopsis proteins of unknown function
  misc_feature (3)..(405): NCBI GI NO: 34911880 NR Description: OSJNBb0032K15.17
  misc_feature (9)..(404): NCBI GI NO: 34911888 NR Description: OSJNBb0032K15.21
  misc_feature (20)..(405): NCBI GI NO: 34898638 NR Description: contains ESTsAU089699
  misc_feature (54)..(404): NCBI GI NO: 15237213 NR Description: putative protein; protein id: At5g15900.1
  misc_feature (61)..(404): NCBI GI NO: 15237211 NR Description: putative protein; protein id: At5g15890.1
  misc_feature (1)..(404): NCBI GI NO: 15232914 NR Description: hypothetical protein; protein id: At3g28150
  misc_feature (56)..(405): NCBI GI NO: 30678135 NR Description: expressed protein [Arabidopsis thaliana]
  misc_feature (17)..(405): NCBI GI NO: 15234058 NR Description: hypothetical protein; protein id: At4g01080.1
  misc_feature (17)..(405): NCBI GI NO: 28393189 NR Description: unknown protein [Arabidopsis thaliana]
  misc_feature (71)..(405): NCBI GI NO: 25518737 NR Description: hypothetical protein F6F3.23
MKKLHWLVRFLFGPVPVYFSALAILIVLTNAQYFGLVGVGVAPRTAKLASSAPVVSVMKYCDIFRGEWVPDAEAPYYNHKTCHMIQEHQNCLKYGRPDLGFLKWRWRPSGCELPRFDPLQFLQFARGKSLAFVGDSLARNHMQSLLCLLSQVAYPKDLSANPSDQNKVYHYRAYNFTISMFWSPFLVRAREPDHDGPAHTGHWSLYLDEPDDKWVSQMPRFDYVLVSAANWFSRPSLFYERRRLVGCSFCSRQYGVPDLTLYYSQRRAWRVALRAINDLERLRGRVILRMLSPMSHFENGTWDHGGDCRRTQPLRANQTAMEGRDLHFYTAQMEEFRAAEKAAAEKGRRLMLMDATAAMLMRPDGHPSRYGHWPNEKVQLYNDCIHWCLPGPIDIWNDMLFQMLLA

SEQ ID NO: 30063 - protein, 349 aa, Zea mays subsp. mays
  peptide (1)..(349): Ceres Seq. ID no. 12356577
  misc_feature (175)..(347): Pfam Name: Pfam Description:  Arabidopsis proteins of unknown function
  misc_feature (1)..(348): NCBI GI NO: 34911880 NR Description: OSJNBb0032K15.17
  misc_feature (1)..(347): NCBI GI NO: 34911888 NR Description: OSJNBb0032K15.21
  misc_feature (1)..(348): NCBI GI NO: 34898638 NR Description: contains ESTsAU089699
  misc_feature (1)..(347): NCBI GI NO: 15237213 NR Description: putative protein; protein id: At5g15900.1
  misc_feature (4)..(347): NCBI GI NO: 15237211 NR Description: putative protein; protein id: At5g15890.1
  misc_feature (1)..(347): NCBI GI NO: 15232914 NR Description: hypothetical protein; protein id: At3g28150
  misc_feature (1)..(348): NCBI GI NO: 30678135 NR Description: expressed protein [Arabidopsis thaliana]
  misc_feature (1)..(348): NCBI GI NO: 15234058 NR Description: hypothetical protein; protein id: At4g01080.1
  misc_feature (1)..(348): NCBI GI NO: 28393189 NR Description: unknown protein [Arabidopsis thaliana]
  misc_feature (14)..(348): NCBI GI NO: 25518737 NR Description: hypothetical protein F6F3.23
MKYCDIFRGEWVPDAEAPYYNHKTCHMIQEHQNCLKYGRPDLGFLKWRWRPSGCELPRFDPLQFLQFARGKSLAFVGDSLARNHMQSLLCLLSQVAYPKDLSANPSDQNKVYHYRAYNFTISMFWSPFLVRAREPDHDGPAHTGHWSLYLDEPDDKWVSQMPRFDYVLVSAANWFSRPSLFYERRRLVGCSFCSRQYGVPDLTLYYSQRRAWRVALRAINDLERLRGRVILRMLSPMSHFENGTWDHGGDCRRTQPLRANQTAMEGRDLHFYTAQMEEFRAAEKAAAEKGRRLMLMDATAAMLMRPDGHPSRYGHWPNEKVQLYNDCIHWCLPGPIDIWNDMLFQMLLA

SEQ ID NO: 30064 - protein, 323 aa, Zea mays subsp. mays
  peptide (1)..(323): Ceres Seq. ID no. 12356578
  misc_feature (149)..(321): Pfam Name: Pfam Description:  Arabidopsis proteins of unknown function
  misc_feature (1)..(322): NCBI GI NO: 34911880 NR Description: OSJNBb0032K15.17
  misc_feature (1)..(321): NCBI GI NO: 34911888 NR Description: OSJNBb0032K15.21
  misc_feature (1)..(322): NCBI GI NO: 34898638 NR Description: contains ESTsAU089699
  misc_feature (1)..(321): NCBI GI NO: 15237213 NR Description: putative protein; protein id: At5g15900.1
  misc_feature (1)..(321): NCBI GI NO: 15237211 NR Description: putative protein; protein id: At5g15890.1
  misc_feature (1)..(321): NCBI GI NO: 15232914 NR Description: hypothetical protein; protein id: At3g28150
  misc_feature (1)..(322): NCBI GI NO: 30678135 NR Description: expressed protein [Arabidopsis thaliana]
  misc_feature (1)..(322): NCBI GI NO: 15234058 NR Description: hypothetical protein; protein id: At4g01080.1
  misc_feature (1)..(322): NCBI GI NO: 28393189 NR Description: unknown protein [Arabidopsis thaliana]
  misc_feature (1)..(322): NCBI GI NO: 25518737 NR Description: hypothetical protein F6F3.23
MIQEHQNCLKYGRPDLGFLKWRWRPSGCELPRFDPLQFLQFARGKSLAFVGDSLARNHMQSLLCLLSQVAYPKDLSANPSDQNKVYHYRAYNFTISMFWSPFLVRAREPDHDGPAHTGHWSLYLDEPDDKWVSQMPRFDYVLVSAANWFSRPSLFYERRRLVGCSFCSRQYGVPDLTLYYSQRRAWRVALRAINDLERLRGRVILRMLSPMSHFENGTWDHGGDCRRTQPLRANQTAMEGRDLHFYTAQMEEFRAAEKAAAEKGRRLMLMDATAAMLMRPDGHPSRYGHWPNEKVQLYNDCIHWCLPGPIDIWNDMLFQMLLA

SEQ ID NO: 30065 - DNA, 1161 bp, Zea mays subsp. mays
  misc_feature (1)..(1161): Ceres Seq. ID no. 12408515
atctagccctttgtgtgagccgccgtcgcgcactcgccgctccgcccctacgcgcagtcgccacgggagctcgttcctctccggcggcagcaccctccactataacccaacccgcaagaaaaaacccgcagcagagaagaggagtcgccgcgaccgagagctccagagcacgcccccgccacagcctccgacgatggatccaaagatgacagaggtgacccagatgttcgcccgcttcaaggcggcctacgcccgcaacgacctcaacacctgcgtcaccctcctctcgcagctcaaggtccatctcacccaattccccagccttccgcccttgtttcagcagacaccgaacattgtggaggagctcaaacttgcaagggacatttatgagcatgctgttgttttgagtgtgaaacttgaggaccaagatgcgtttgaacgcgatttctgccagctgaagccttattacatggatacatgtggcataattcccgcctcgccagaggagtacccaattttgggactcaatcttctgaggctgttggttcagaatagaattgccgaattccacactgagctggagcttttacctgccaaggcactcgagcatccttgcatcaagcatgctgtagagcttgagcaatccttcatggagggtgcctacaaccgagtgttaagcgctcggcaggctgtgccacatgagacctacgtttacttcatcgaccttctcgccaaaacagttagagatgagatcgctgggtgcagcgaaaaggggtatgattctctatctgtgagtgatgcaaagcaaatgcttatgttcagttctgaccaagatctgcacgagtacatcactgaggagcacccggaatgggagattaagaacggtgctgtcttcttccagaaggcgaaggaatcacagcccctgcaaggagatcccatccttgcagcttatcaaccagacgctcagctacgccagggagctggagcgtattgtatgatttaaaccaatccctggtggttctttccccccctgtggccgcttggcatggcttgtactgtcctttgcatttgggatgatctttgatcgcagctctcatctgactgaaacatcatgtgaatctctgaagggctcagtctctccggcattggtctgttaactcc

SEQ ID NO: 30066 - protein, 333 aa, Zea mays subsp. mays
  peptide (1)..(333): Ceres Seq. ID no. 12408516
  misc_feature (173)..(314): Pfam Name: Pfam Description:  26S proteasome non-ATPase regulatory subunit Nin1/mts3
  misc_feature (65)..(314): NCBI GI NO: 17297985 NR Description: 26S proteasome regulatory particle non-ATPase subunit12
  misc_feature (65)..(314): NCBI GI NO: 15217661 NR Description: 26S proteasome regulatory subunit
  misc_feature (173)..(314): NCBI GI NO: 15238267 NR Description: putative protein; protein id: At5g42040.1
  misc_feature (70)..(299): NCBI GI NO: 38372874 NR Description: Probable 26S proteasome non-ATPase regulatory subunit 8
  misc_feature (69)..(323): NCBI GI NO: 21357229 NR Description: CG4157-PA [Drosophila melanogaster]
  misc_feature (73)..(282): NCBI GI NO: 40787635 NR Description: Unknown (protein for IMAGE:6055235) [Homo sapiens]
  misc_feature (75)..(282): NCBI GI NO: 13278567 NR Description: RIKEN cDNA 6720456J22 gene [Mus musculus]
  misc_feature (75)..(282): NCBI GI NO: 27229063 NR Description: proteasome 26S non-ATPase subunit 8 [Mus musculus]
  misc_feature (75)..(282): NCBI GI NO: 26371077 NR Description: unnamed protein product [Mus musculus]
  misc_feature (75)..(282): NCBI GI NO: 34855658 NR Description: similar to proteasome 26S non-ATPase subunit 8
SSPLCEPPSRTRRSAPTRSRHGSSFLSGGSTLHYNPTRKKKPAAEKRSRRDRELQSTPPPQPPTMDPKMTEVTQMFARFKAAYARNDLNTCVTLLSQLKVHLTQFPSLPPLFQQTPNIVEELKLARDIYEHAVVLSVKLEDQDAFERDFCQLKPYYMDTCGIIPASPEEYPILGLNLLRLLVQNRIAEFHTELELLPAKALEHPCIKHAVELEQSFMEGAYNRVLSARQAVPHETYVYFIDLLAKTVRDEIAGCSEKGYDSLSVSDAKQMLMFSSDQDLHEYITEEHPEWEIKNGAVFFQKAKESQPLQGDPILAAYQPDAQLRQGAGAYCMI

SEQ ID NO: 30067 - protein, 269 aa, Zea mays subsp. mays
  peptide (1)..(269): Ceres Seq. ID no. 12408517
  misc_feature (109)..(250): Pfam Name: Pfam Description:  26S proteasome non-ATPase regulatory subunit Nin1/mts3
  misc_feature (1)..(250): NCBI GI NO: 17297985 NR Description: 26S proteasome regulatory particle non-ATPase subunit12
  misc_feature (1)..(250): NCBI GI NO: 15217661 NR Description: 26S proteasome regulatory subunit
  misc_feature (109)..(250): NCBI GI NO: 15238267 NR Description: putative protein; protein id: At5g42040.1
  misc_feature (6)..(235): NCBI GI NO: 38372874 NR Description: Probable 26S proteasome non-ATPase regulatory subunit 8
  misc_feature (5)..(259): NCBI GI NO: 21357229 NR Description: CG4157-PA [Drosophila melanogaster]
  misc_feature (9)..(218): NCBI GI NO: 40787635 NR Description: Unknown (protein for IMAGE:6055235) [Homo sapiens]
  misc_feature (11)..(218): NCBI GI NO: 13278567 NR Description: RIKEN cDNA 6720456J22 gene [Mus musculus]
  misc_feature (11)..(218): NCBI GI NO: 26371077 NR Description: unnamed protein product [Mus musculus]
  misc_feature (11)..(218): NCBI GI NO: 27229063 NR Description: proteasome 26S non-ATPase subunit 8 [Mus musculus]
  misc_feature (11)..(218): NCBI GI NO: 34855658 NR Description: similar to proteasome 26S non-ATPase subunit 8
MDPKMTEVTQMFARFKAAYARNDLNTCVTLLSQLKVHLTQFPSLPPLFQQTPNIVEELKLARDIYEHAVVLSVKLEDQDAFERDFCQLKPYYMDTCGIIPASPEEYPILGLNLLRLLVQNRIAEFHTELELLPAKALEHPCIKHAVELEQSFMEGAYNRVLSARQAVPHETYVYFIDLLAKTVRDEIAGCSEKGYDSLSVSDAKQMLMFSSDQDLHEYITEEHPEWEIKNGAVFFQKAKESQPLQGDPILAAYQPDAQLRQGAGAYCMI

SEQ ID NO: 30068 - protein, 265 aa, Zea mays subsp. mays
  peptide (1)..(265): Ceres Seq. ID no. 12408518
  misc_feature (105)..(246): Pfam Name: Pfam Description:  26S proteasome non-ATPase regulatory subunit Nin1/mts3
  misc_feature (1)..(246): NCBI GI NO: 17297985 NR Description: 26S proteasome regulatory particle non-ATPase subunit12
  misc_feature (1)..(246): NCBI GI NO: 15217661 NR Description: 26S proteasome regulatory subunit
  misc_feature (105)..(246): NCBI GI NO: 15238267 NR Description: putative protein; protein id: At5g42040.1
  misc_feature (2)..(231): NCBI GI NO: 38372874 NR Description: Probable 26S proteasome non-ATPase regulatory subunit 8
  misc_feature (1)..(255): NCBI GI NO: 21357229 NR Description: CG4157-PA [Drosophila melanogaster]
  misc_feature (5)..(214): NCBI GI NO: 40787635 NR Description: Unknown (protein for IMAGE:6055235) [Homo sapiens]
  misc_feature (7)..(214): NCBI GI NO: 13278567 NR Description: RIKEN cDNA 6720456J22 gene [Mus musculus]
  misc_feature (7)..(214): NCBI GI NO: 27229063 NR Description: proteasome 26S non-ATPase subunit 8 [Mus musculus]
  misc_feature (7)..(214): NCBI GI NO: 26371077 NR Description: unnamed protein product [Mus musculus]
  misc_feature (7)..(214): NCBI GI NO: 34855658 NR Description: similar to proteasome 26S non-ATPase subunit 8
MTEVTQMFARFKAAYARNDLNTCVTLLSQLKVHLTQFPSLPPLFQQTPNIVEELKLARDIYEHAVVLSVKLEDQDAFERDFCQLKPYYMDTCGIIPASPEEYPILGLNLLRLLVQNRIAEFHTELELLPAKALEHPCIKHAVELEQSFMEGAYNRVLSARQAVPHETYVYFIDLLAKTVRDEIAGCSEKGYDSLSVSDAKQMLMFSSDQDLHEYITEEHPEWEIKNGAVFFQKAKESQPLQGDPILAAYQPDAQLRQGAGAYCMI

SEQ ID NO: 30069 - DNA, 1686 bp, Zea mays subsp. mays
  misc_feature (1)..(1686): Ceres Seq. ID no. 12408511
acctatagctctctccgatccatgcagagctcggtggtcatgttgtcgagcacggtggcagcggcggccatggcatcgctgcgcaccctcccgctgccggtgctggtgcccctcgtcgcctcggggctcgtcttcctggccaccgtgctccgacgcttgctaaggcggcagcggccggtgtacctcctgaactacagctgccacctcccggacgcggagcggcaggtgaacctggaggtgtgcgagtacttcggcctcaagtgtcgccgctactccgacgacatcgccgacttcatgcggctggtgtacagcaagtccggtctgggccaggagaccttcgcgccgcccttcatctactcgggcaagttcgagaagacgctggcattcgcgatccaggaggccgaggagggtctgttcgccgtcgtggagcagctcctggcaaagtcggacgtgagtcccagcgacatcagcgtcctggtggtggcctgctccatgttctccccgatgccgtcgctggcgtccatgatcatgcaccggttcaatatgcggccggatgtgaagtcgtacagcgtggccgggatgggttgcagcgcggggaccgttggcatcgacacggcggcgcggtcgctgcgctctcggcggacgcccgggtacgcgctggtggtggtgacggagaacacgagcctaaactggtacttcggcaagaacaagcacatgctggtgaccaactgcatcttccgcgtgggcagcgcggcggcgctggtgacggacgtcccgtcccggcgcccggacgccaagtacgagctggtgcgcacgctgcggacgcaccacggcgcggacgacgcggccttcaacgcggcgctgcagatggaggacgaggagggcaacctgggcgtggcgctcaccaaggacctggtccgcgtcgccggtgcggcgctgcggaggcacatcaccacgctgggtccccaggtgctgccggtgtccgagatgctccggtacgcgtggcgcgtggcgcgcgcctacgcggccgggaacagcaaggccgcggcggcggaggtgcccgacttccagcgcgcgttcgagcacttctgcatccactcgggcgggaaggcggttatcgactcgatcgccgcggctgatggggttcgggccctacgtcgtggagccggcgcgctccacgctgcaccggttcggcaacacgtccagcagtctggtgttctacgagctggcctacttcgaggccaagcgccgcgtccgggccggcgaccgcctctggatgctggcgttcgggacggggttcaaggcgtgcagcaacgtctggcgcgcgctccgcgacgccgcgcccgacgccgacaacccatggaacggatgcgtccaccgctacccagtgccgccgccgccaccgtccaagacgcacaagcatgcttgatatagtactatgtgctcctccgtcgccgcgtctcgtgcctgtgtctgcgtcgattgtttgataagcaacatcaacgaaggcgtatgtatcctagctagggaccgggtcagttgtttgatacgcttggatgcatgatgatcagctgtctcattggctccaagaagacctatgggttgtttgatttctgtgtcagtgatatgtcatatgacaacatgagtatccctgtttggaaagtgaaatatataagaaatttaaat

SEQ ID NO: 30070 - protein, 477 aa, Zea mays subsp. mays
  peptide (1)..(477): Ceres Seq. ID no. 12408512
  misc_feature (273)..(376): Pfam Name: Pfam Description:  Chalcone and stilbene synthases
  misc_feature (40)..(376): NCBI GI NO: 15236133 NR Description: putative ketoacyl-CoA synthase
  misc_feature (2)..(376): NCBI GI NO: 9714501 NR Description: putative fatty acid elongase [Zea mays]
  misc_feature (34)..(376): NCBI GI NO: 15223556 NR Description: very-long-chain fatty acid condensing enzyme CUT1
  misc_feature (43)..(376): NCBI GI NO: 4091810 NR Description: fatty acid elongase 3-ketoacyl-CoA synthase 1
  misc_feature (43)..(376): NCBI GI NO: 22329274 NR Description: fatty acid elongase 3-ketoacyl-CoA synthase 1
  misc_feature (35)..(376): NCBI GI NO: 11066477 NR Description: fatty acid elongase 1-like protein
  misc_feature (12)..(376): NCBI GI NO: 15225767 NR Description: putative beta-ketoacyl-CoA synthase
  misc_feature (44)..(376): NCBI GI NO: 15226724 NR Description: putative beta-ketoacyl-CoA synthase
  misc_feature (35)..(376): NCBI GI NO: 1045614 NR Description: beta-ketoacyl-CoA synthase
  misc_feature (38)..(376): NCBI GI NO: 15219676 NR Description: putative beta-ketoacyl-CoA synthase
TYSSLRSMQSSVVMLSSTVAAAAMASLRTLPLPVLVPLVASGLVFLATVLRRLLRRQRPVYLLNYSCHLPDAERQVNLEVCEYFGLKCRRYSDDIADFMRLVYSKSGLGQETFAPPFIYSGKFEKTLAFAIQEAEEGLFAVVEQLLAKSDVSPSDISVLVVACSMFSPMPSLASMIMHRFNMRPDVKSYSVAGMGCSAGTVGIDTAARSLRSRRTPGYALVVVTENTSLNWYFGKNKHMLVTNCIFRVGSAAALVTDVPSRRPDAKYELVRTLRTHHGADDAAFNAALQMEDEEGNLGVALTKDLVRVAGAALRRHITTLGPQVLPVSEMLRYAWRVARAYAAGNSKAAAAEVPDFQRAFEHFCIHSGGKAVIDSIAAADGVRALRRGAGALHAAPVRQHVQQSGVLRAGLLRGQAPRPGRRPPLDAGVRDGVQGVQQRLARAPRRRARRRQPMERMRPPLPSAAAATVQDAQACLI

SEQ ID NO: 30071 - protein, 470 aa, Zea mays subsp. mays
  peptide (1)..(470): Ceres Seq. ID no. 12408513
  misc_feature (266)..(369): Pfam Name: Pfam Description:  Chalcone and stilbene synthases
  misc_feature (33)..(369): NCBI GI NO: 15236133 NR Description: putative ketoacyl-CoA synthase
  misc_feature (1)..(369): NCBI GI NO: 9714501 NR Description: putative fatty acid elongase [Zea mays]
  misc_feature (27)..(369): NCBI GI NO: 15223556 NR Description: very-long-chain fatty acid condensing enzyme CUT1
  misc_feature (36)..(369): NCBI GI NO: 4091810 NR Description: fatty acid elongase 3-ketoacyl-CoA synthase 1
  misc_feature (36)..(369): NCBI GI NO: 22329274 NR Description: fatty acid elongase 3-ketoacyl-CoA synthase 1
  misc_feature (28)..(369): NCBI GI NO: 11066477 NR Description: fatty acid elongase 1-like protein
  misc_feature (5)..(369): NCBI GI NO: 15225767 NR Description: putative beta-ketoacyl-CoA synthase
  misc_feature (37)..(369): NCBI GI NO: 15226724 NR Description: putative beta-ketoacyl-CoA synthase
  misc_feature (28)..(369): NCBI GI NO: 1045614 NR Description: beta-ketoacyl-CoA synthase
  misc_feature (31)..(369): NCBI GI NO: 15219676 NR Description: putative beta-ketoacyl-CoA synthase
MQSSVVMLSSTVAAAAMASLRTLPLPVLVPLVASGLVFLATVLRRLLRRQRPVYLLNYSCHLPDAERQVNLEVCEYFGLKCRRYSDDIADFMRLVYSKSGLGQETFAPPFIYSGKFEKTLAFAIQEAEEGLFAVVEQLLAKSDVSPSDISVLVVACSMFSPMPSLASMIMHRFNMRPDVKSYSVAGMGCSAGTVGIDTAARSLRSRRTPGYALVVVTENTSLNWYFGKNKHMLVTNCIFRVGSAAALVTDVPSRRPDAKYELVRTLRTHHGADDAAFNAALQMEDEEGNLGVALTKDLVRVAGAALRRHITTLGPQVLPVSEMLRYAWRVARAYAAGNSKAAAAEVPDFQRAFEHFCIHSGGKAVIDSIAAADGVRALRRGAGALHAAPVRQHVQQSGVLRAGLLRGQAPRPGRRPPLDAGVRDGVQGVQQRLARAPRRRARRRQPMERMRPPLPSAAAATVQDAQACLI

SEQ ID NO: 30072 - protein, 464 aa, Zea mays subsp. mays
  peptide (1)..(464): Ceres Seq. ID no. 12408514
  misc_feature (260)..(363): Pfam Name: Pfam Description:  Chalcone and stilbene synthases
  misc_feature (27)..(363): NCBI GI NO: 15236133 NR Description: putative ketoacyl-CoA synthase
  misc_feature (1)..(363): NCBI GI NO: 9714501 NR Description: putative fatty acid elongase [Zea mays]
  misc_feature (21)..(363): NCBI GI NO: 15223556 NR Description: very-long-chain fatty acid condensing enzyme CUT1
  misc_feature (30)..(363): NCBI GI NO: 4091810 NR Description: fatty acid elongase 3-ketoacyl-CoA synthase 1
  misc_feature (30)..(363): NCBI GI NO: 22329274 NR Description: fatty acid elongase 3-ketoacyl-CoA synthase 1
  misc_feature (22)..(363): NCBI GI NO: 11066477 NR Description: fatty acid elongase 1-like protein
  misc_feature (1)..(363): NCBI GI NO: 15225767 NR Description: putative beta-ketoacyl-CoA synthase
  misc_feature (31)..(363): NCBI GI NO: 15226724 NR Description: putative beta-ketoacyl-CoA synthase
  misc_feature (22)..(363): NCBI GI NO: 1045614 NR Description: beta-ketoacyl-CoA synthase
  misc_feature (25)..(363): NCBI GI NO: 15219676 NR Description: putative beta-ketoacyl-CoA synthase
MLSSTVAAAAMASLRTLPLPVLVPLVASGLVFLATVLRRLLRRQRPVYLLNYSCHLPDAERQVNLEVCEYFGLKCRRYSDDIADFMRLVYSKSGLGQETFAPPFIYSGKFEKTLAFAIQEAEEGLFAVVEQLLAKSDVSPSDISVLVVACSMFSPMPSLASMIMHRFNMRPDVKSYSVAGMGCSAGTVGIDTAARSLRSRRTPGYALVVVTENTSLNWYFGKNKHMLVTNCIFRVGSAAALVTDVPSRRPDAKYELVRTLRTHHGADDAAFNAALQMEDEEGNLGVALTKDLVRVAGAALRRHITTLGPQVLPVSEMLRYAWRVARAYAAGNSKAAAAEVPDFQRAFEHFCIHSGGKAVIDSIAAADGVRALRRGAGALHAAPVRQHVQQSGVLRAGLLRGQAPRPGRRPPLDAGVRDGVQGVQQRLARAPRRRARRRQPMERMRPPLPSAAAATVQDAQACLI

SEQ ID NO: 30073 - DNA, 1246 bp, Zea mays subsp. mays
  misc_feature (1)..(1246): Ceres Seq. ID no. 12352601
atagttcccgtgatggtcgactgattgacactgccaacctcccaacttcccaaatatatcgtcgtcggtcaatgtcgacgagctcgcagtgcacgctcatggaaggcgctatctcccttcctcgcaacacaagcagaattgccgtggttaccggcgcgaacagaggtatcgggctagaggtgtgccggcagctggctggcaatggcgtcaccgtcgtcttgacagcagtggacgaggagctaggcgcgaaagccgtcggcaatctccaagggctagctctctccgatgttctttctcaccagctggatatcacggatgcttccagcatcgctcggttggccaacttcttgaaggcccgattcgggaagttggatatcctggtcaataatgctgcggttgctggggtcgtgtactctcaagatcatttggatgatctagaaccgagagaggaaaagttcaatctcatggatagggatcagaggcttgaatggctgtggaggaactgccgggagacctaccatgctgcaaaggaatgcctgcagacaaactactacggcacaaagcatgtgatcgaagccttgctgcctctgctgaaagcctccgatgatggaagaatcgtcaatatatcctccgactttgggttgttaaggcatttcagaaacgaggatctgaagcaagtgctgaacgacgtcggcaacctcaccgaggagcggctggacgaactgctggaccagttcctgagagacttcaaggtcggcacggcagaagcgcgcgggtggccagtggcgttcgcggcgtacaaggtgagcaaggcggccgtgaacgcgtactcgaggatgctggcggcgaagcagcccgcgctgcgcgttaactgcgcgcatcccggctacgtcaagactgacataaccttacactcggggctcctggcgccggaggagggcgcgagtaatgtggtgaaggtggcgctgctgccggacggcggggtgaccggcgccttctttgaggagggcaatgagctggcctccttcgtgtgatgtcaggatcggcctggttcgctagctgcggctgtttgccatcgcgtgagctcacggagtgtttggacccctcggtctgatgtttaagtgtgtggtagcaggatgcaagacgattctggtaataaactgattatgtttgtgaacggtgataacctgatgatgtatgtgttgtaaatttagagaacggtgataacctgatgatgtatgtgttg

SEQ ID NO: 30074 - protein, 343 aa, Zea mays subsp. mays
  peptide (1)..(343): Ceres Seq. ID no. 12352602
  misc_feature (33)..(343): NCBI GI NO: 38346772 NR Description: OSJNBa0081C01.23
  misc_feature (33)..(343): NCBI GI NO: 38346769 NR Description: OSJNBa0081C01.20
  misc_feature (33)..(343): NCBI GI NO: 38346774 NR Description: OSJNBa0081C01.25
  misc_feature (33)..(343): NCBI GI NO: 38346768 NR Description: OSJNBa0081C01.19
  misc_feature (33)..(343): NCBI GI NO: 38346767 NR Description: OSJNBa0081C01.18
  misc_feature (39)..(342): NCBI GI NO: 15233062 NR Description: putative protein; protein id: At3g61220
  misc_feature (23)..(335): NCBI GI NO: 33146492 NR Description: carbonyl reductase -like protein
  misc_feature (44)..(337): NCBI GI NO: 25518668 NR Description: hypothetical protein T1N6
  misc_feature (45)..(337): NCBI GI NO: 18378884 NR Description: carbonyl reductase, putative; protein id:At1g01800
  misc_feature (39)..(342): NCBI GI NO: 15224100 NR Description: putative carbonyl reductase; protein id:At2g24190
SSRDGRLIDTANLPTSQIYRRRSMSTSSQCTLMEGAISLPRNTSRIAVVTGANRGIGLEVCRQLAGNGVTVVLTAVDEELGAKAVGNLQGLALSDVLSHQLDITDASSIARLANFLKARFGKLDILVNNAAVAGVVYSQDHLDDLEPREEKFNLMDRDQRLEWLWRNCRETYHAAKECLQTNYYGTKHVIEALLPLLKASDDGRIVNISSDFGLLRHFRNEDLKQVLNDVGNLTEERLDELLDQFLRDFKVGTAEARGWPVAFAAYKVSKAAVNAYSRMLAAKQPALRVNCAHPGYVKTDITLHSGLLAPEEGASNVVKVALLPDGGVTGAFFEEGNELASFV

SEQ ID NO: 30075 - protein, 320 aa, Zea mays subsp. mays
  peptide (1)..(320): Ceres Seq. ID no. 12352603
  misc_feature (10)..(320): NCBI GI NO: 38346772 NR Description: OSJNBa0081C01.23
  misc_feature (10)..(320): NCBI GI NO: 38346769 NR Description: OSJNBa0081C01.20
  misc_feature (10)..(320): NCBI GI NO: 38346774 NR Description: OSJNBa0081C01.25
  misc_feature (10)..(320): NCBI GI NO: 38346768 NR Description: OSJNBa0081C01.19
  misc_feature (10)..(320): NCBI GI NO: 38346767 NR Description: OSJNBa0081C01.18
  misc_feature (16)..(319): NCBI GI NO: 15233062 NR Description: putative protein; protein id: At3g61220
  misc_feature (1)..(312): NCBI GI NO: 33146492 NR Description: carbonyl reductase -like protein
  misc_feature (21)..(314): NCBI GI NO: 25518668 NR Description: hypothetical protein T1N6
  misc_feature (22)..(314): NCBI GI NO: 18378884 NR Description: carbonyl reductase, putative; protein id:At1g01800
  misc_feature (16)..(319): NCBI GI NO: 15224100 NR Description: putative carbonyl reductase; protein id:At2g24190
MSTSSQCTLMEGAISLPRNTSRIAVVTGANRGIGLEVCRQLAGNGVTVVLTAVDEELGAKAVGNLQGLALSDVLSHQLDITDASSIARLANFLKARFGKLDILVNNAAVAGVVYSQDHLDDLEPREEKFNLMDRDQRLEWLWRNCRETYHAAKECLQTNYYGTKHVIEALLPLLKASDDGRIVNISSDFGLLRHFRNEDLKQVLNDVGNLTEERLDELLDQFLRDFKVGTAEARGWPVAFAAYKVSKAAVNAYSRMLAAKQPALRVNCAHPGYVKTDITLHSGLLAPEEGASNVVKVALLPDGGVTGAFFEEGNELASFV

SEQ ID NO: 30076 - protein, 311 aa, Zea mays subsp. mays
  peptide (1)..(311): Ceres Seq. ID no. 12352604
  misc_feature (1)..(311): NCBI GI NO: 38346772 NR Description: OSJNBa0081C01.23
  misc_feature (1)..(311): NCBI GI NO: 38346769 NR Description: OSJNBa0081C01.20
  misc_feature (1)..(311): NCBI GI NO: 38346774 NR Description: OSJNBa0081C01.25
  misc_feature (1)..(311): NCBI GI NO: 38346768 NR Description: OSJNBa0081C01.19
  misc_feature (1)..(311): NCBI GI NO: 38346767 NR Description: OSJNBa0081C01.18
  misc_feature (7)..(310): NCBI GI NO: 15233062 NR Description: putative protein; protein id: At3g61220
  misc_feature (1)..(303): NCBI GI NO: 33146492 NR Description: carbonyl reductase -like protein
  misc_feature (12)..(305): NCBI GI NO: 25518668 NR Description: hypothetical protein T1N6
  misc_feature (13)..(305): NCBI GI NO: 18378884 NR Description: carbonyl reductase, putative; protein id:At1g01800
  misc_feature (7)..(310): NCBI GI NO: 15224100 NR Description: putative carbonyl reductase; protein id:At2g24190
MEGAISLPRNTSRIAVVTGANRGIGLEVCRQLAGNGVTVVLTAVDEELGAKAVGNLQGLALSDVLSHQLDITDASSIARLANFLKARFGKLDILVNNAAVAGVVYSQDHLDDLEPREEKFNLMDRDQRLEWLWRNCRETYHAAKECLQTNYYGTKHVIEALLPLLKASDDGRIVNISSDFGLLRHFRNEDLKQVLNDVGNLTEERLDELLDQFLRDFKVGTAEARGWPVAFAAYKVSKAAVNAYSRMLAAKQPALRVNCAHPGYVKTDITLHSGLLAPEEGASNVVKVALLPDGGVTGAFFEEGNELASFV

SEQ ID NO: 30077 - DNA, 1741 bp, Zea mays subsp. mays
  misc_feature (1)..(1741): Ceres Seq. ID no. 12405430
aaaacctcgtctcgcctccttcagtccatcccctcaaccccggcggccaaaagccggcgcaccgaagcggcgggccggcggcaagcggtggccatggcggagctaaagcggctgtcagagagccgggacctgacgcggatcgagcgcatcggcgcgcactcccacatccgggggctagggctggactcctccatggaggcgcgcgacgcctcggagggcatggtcgggcagctgcccgcgcgccgcgccgcggggctcatactccagctcatccgccagggcaagatcgccggccgcgccgttctcctcgcgggccagcccggcaccggcaagaccgcgctcgccatgggcatcgccaagtcgctcggcgcggagacgcccttcgcctccgtcgccgcctcggagctcttctcgctcgacctctccaagacggaggcgctcacgcaggccttccgccgcgccatcggcgtgcgcatcaaggaggagacggaaatcatcgagggcgaggtcgtggagatcttgatcgaccgccctttgtcggcctctgccgctggcggcagctcggctgcccctacaggtgctactgcggctggtaagtcgggtcggctcacgctgaagaccacggacatggaaacggtgtacgagctcgggggaaagatgattgaggctcttgggaaggagaaggtgcagagcggggatgtgattgcgcttgacaaggcctccgggaaggtcaccaagcttggacgctccattgggaggtcgcgggattatgatgccgttggcccgcacaccaagtttgtcaagtgtcctgatggcgagctccagaagcgcaaggagatcgtgcactgtgttaccttacatgagattgatgtcattaatagcaggacacagggttttcttgcactgttcactggtgacaccggtgaaattcgtgcagaggttcgggagcagattgacacaaaagtcgcagagtggagagaggaaggaaaagctgatattgtccctggtgttctgttcatcgatgaagttcacatgctagacattgagtgcttctccttcctcaaccgagcattggaaaatgacatggctccgatcctagtaatcgcaacaaacagagggatcacatccattcgtgggacaaactaccgctcgccacacgggatcccgccagacttccttgaccggttactgatcatcacgacgcagccctacacggaggacgagatcaggaagatcctggacatccggtgcgatgaggaggatgtggagatgtccgcggacgccaaggtcctgctcaccaaaatcggcgtggagacctcgctgcggtacgccatcaaccttatcacatctgccgcactagcctgccagaggcgcaaggggaaggtggtcgacatggaggacattagccgggtgtaccagttgttcctggacgtgaagcggtcgacgcagtacctgatggagtaccagagccagtacatgttcaacgaagtgcccggggaagcagatggagaggacgcgatgcaatcctagatgaacttttcttcaccaggtgtctgtgttagtatgtactgcgtgtctgcgtcgtctatttctggtgcatcttgcttgtttagttgctgttatttcctgacaaggcgtggtgtgtgcgatggactgcctgaaagctgatttaggtaactatatatgcaattcagatgtatcttagtaaaattcaccccagttggagtgacattgtttgttt

SEQ ID NO: 30078 - protein, 509 aa, Zea mays subsp. mays
  peptide (1)..(509): Ceres Seq. ID no. 12405431
  misc_feature (152)..(478): Pfam Name: Pfam Description:  TIP49 C-terminus
  misc_feature (32)..(508): NCBI GI NO: 15240788 NR Description: RuvB DNA helicase-like protein
  misc_feature (32)..(498): NCBI GI NO: 15229623 NR Description: RuvB DNA helicase - like protein
  misc_feature (32)..(500): NCBI GI NO: 6755382 NR Description: RuvB-like protein 2 [Mus musculus]
  misc_feature (32)..(497): NCBI GI NO: 29126859 NR Description: Similar to RuvB-like protein 2 [Xenopus laevis]
  misc_feature (37)..(500): NCBI GI NO: 5730023 NR Description: RuvB-like 2
  misc_feature (31)..(496): NCBI GI NO: 27819634 NR Description: RuvB-like protein 2 [Danio rerio]
  misc_feature (32)..(506): NCBI GI NO: 17737635 NR Description: reptin CG9750-PA
  misc_feature (37)..(442): NCBI GI NO: 4929561 NR Description: CGI-46 protein [Homo sapiens]
  misc_feature (37)..(509): NCBI GI NO: 23480914 NR Description: Arabidopsis thaliana At5g67630/K9I9_20
  misc_feature (38)..(496): NCBI GI NO: 38105112 NR Description: hypothetical protein MG03173.4
KTSSRLLQSIPSTPAAKSRRTEAAGRRQAVAMAELKRLSESRDLTRIERIGAHSHIRGLGLDSSMEARDASEGMVGQLPARRAAGLILQLIRQGKIAGRAVLLAGQPGTGKTALAMGIAKSLGAETPFASVAASELFSLDLSKTEALTQAFRRAIGVRIKEETEIIEGEVVEILIDRPLSASAAGGSSAAPTGATAAGKSGRLTLKTTDMETVYELGGKMIEALGKEKVQSGDVIALDKASGKVTKLGRSIGRSRDYDAVGPHTKFVKCPDGELQKRKEIVHCVTLHEIDVINSRTQGFLALFTGDTGEIRAEVREQIDTKVAEWREEGKADIVPGVLFIDEVHMLDIECFSFLNRALENDMAPILVIATNRGITSIRGTNYRSPHGIPPDFLDRLLIITTQPYTEDEIRKILDIRCDEEDVEMSADAKVLLTKIGVETSLRYAINLITSAALACQRRKGKVVDMEDISRVYQLFLDVKRSTQYLMEYQSQYMFNEVPGEADGEDAMQS

SEQ ID NO: 30079 - protein, 478 aa, Zea mays subsp. mays; identical to SEQ ID NO: 28661
  peptide (1)..(478): Ceres Seq. ID no. 12405432
  misc_feature (121)..(447): Pfam Name: Pfam Description:  TIP49 C-terminus
  misc_feature (1)..(477): NCBI GI NO: 15240788 NR Description: RuvB DNA helicase-like protein
  misc_feature (1)..(467): NCBI GI NO: 15229623 NR Description: RuvB DNA helicase - like protein
  misc_feature (1)..(469): NCBI GI NO: 6755382 NR Description: RuvB-like protein 2 [Mus musculus]
  misc_feature (1)..(466): NCBI GI NO: 29126859 NR Description: Similar to RuvB-like protein 2 [Xenopus laevis]
  misc_feature (6)..(469): NCBI GI NO: 5730023 NR Description: RuvB-like 2
  misc_feature (1)..(465): NCBI GI NO: 27819634 NR Description: RuvB-like protein 2 [Danio rerio]
  misc_feature (1)..(475): NCBI GI NO: 17737635 NR Description: reptin CG9750-PA
  misc_feature (6)..(411): NCBI GI NO: 4929561 NR Description: CGI-46 protein [Homo sapiens]
  misc_feature (6)..(478): NCBI GI NO: 23480914 NR Description: Arabidopsis thaliana At5g67630/K9I9_20
  misc_feature (7)..(465): NCBI GI NO: 38105112 NR Description: hypothetical protein MG03173.4

SEQ ID NO: 30080 - protein, 445 aa, Zea mays subsp. mays; identical to SEQ ID NO: 28662
  peptide (1)..(445): Ceres Seq. ID no. 12405433
  misc_feature (88)..(414): Pfam Name: Pfam Description:  TIP49 C-terminus
  misc_feature (1)..(444): NCBI GI NO: 15240788 NR Description: RuvB DNA helicase-like protein
  misc_feature (1)..(434): NCBI GI NO: 15229623 NR Description: RuvB DNA helicase - like protein
  misc_feature (1)..(436): NCBI GI NO: 6755382 NR Description: RuvB-like protein 2 [Mus musculus]
  misc_feature (1)..(433): NCBI GI NO: 29126859 NR Description: Similar to RuvB-like protein 2 [Xenopus laevis]
  misc_feature (1)..(436): NCBI GI NO: 5730023 NR Description: RuvB-like 2
  misc_feature (1)..(432): NCBI GI NO: 27819634 NR Description: RuvB-like protein 2 [Danio rerio]
  misc_feature (1)..(442): NCBI GI NO: 17737635 NR Description: reptin CG9750-PA
  misc_feature (1)..(378): NCBI GI NO: 4929561 NR Description: CGI-46 protein [Homo sapiens]
  misc_feature (1)..(445): NCBI GI NO: 23480914 NR Description: Arabidopsis thaliana At5g67630/K9I9_20
  misc_feature (1)..(432): NCBI GI NO: 38105112 NR Description: hypothetical protein MG03173.4

SEQ ID NO: 30081 - DNA, 1479 bp, Zea mays subsp. mays
  misc_feature (1)..(1479): Ceres Seq. ID no. 12343690
gcatctccctttaccattgtctcccccctcgtccgtcctcctcgccgccgcagaccaccgccgccgccgccgctgccgctgcgaacccttgtgaatcttcgttgtccgggctgtggggggcaggcatggcgctccggaggctgctgcaggggagcgtcctgccgcggataatcggcagggatttggcaccggccgtggcgccgttttcaacggagtctggggagaccattcgtgccacgctctttcccggcgatggcatcgggccagagatcgctgagtctgtcaagcaggtattcaatgttgcaggggtaccaattgaatgggaagaacactatgtcagtacagaagttgatcccagaacagagagttttttgacttgggaaagcctggagtcagtgcgtagaaataaagttggcttgaaaggacctatggctacacctattggaaagggccatcgatctttgaatcttacattaaggaaagaacttgggctctatgccaatgtcagaccttgcaacagcctcccaggttacaagaccagatacgatgatgttaaccttgtaacaattcgtgaaaatactgaaggagaatatagtggtcttgagcatcaggttgtgagaggtgttgtggaaagtttgaaaattattacacgccaagcaagtttgagagtggcagagtatgctttccattatgccaaggccaatggccgggaaagagtctctgcgatccacaaagccaatattatgaggaagacagatggtcttttcctcaagtgttgccgtgaagtggctgaaaagtaccctgaaattcaatacgaggaggtcatcattgacaattgctgtatgacgcttgtgaagaatcctggtctttttgacgtattagtgatgccaaatctctatggtgacattattagtgatctatgtgctggtttgatcgggggcttgggcctaacacccagttgcaatattggtgaaggtggcattttctggcagaagctgttcatggttctgctcctgatattgctggcaagaacctcgcgaacccgactgctcttatgctgagtgctgtcatgttgttgcgccacatgcaattcaacgacaaagcagaccggatccacaacgccatcctccagaccatcgccgaggggaagtacaggactgctgatcttggtggaaaggcatcgacatcagagtttacaaacgcagtctgtgatcacatctgagaaacggatgtgattcttccttctgattgttttgtcatcctaatattttttgtcacatatgagaggagctttagctttaagaggttaactggcagcacctcgaacttctttggggtgtttaacacggtttgagaccgtcaaataattttgtcacatttcttgctgttcagaaattctttcaacattggaatggagccaagaattgtctgtaataatcaacatcagcattataacagtatgtagggtttatcttattc

SEQ ID NO: 30082 - protein, 352 aa, Zea mays subsp. mays
  peptide (1)..(352): Ceres Seq. ID no. 12343691
  misc_feature (77)..(327): Pfam Name: Pfam Description:  Isocitrate/isopropylmalate dehydrogenase
  misc_feature (42)..(327): NCBI GI NO: 34903262 NR Description: unnamed protein product
  misc_feature (68)..(327): NCBI GI NO: 7431333 NR Description: probable isocitrate dehydrogenase (NAD) (EC1
  misc_feature (40)..(327): NCBI GI NO: 11251553 NR Description: 3-isopropylmalate dehydrogenase-like protein -Arabidopsis thaliana
  misc_feature (40)..(327): NCBI GI NO: 18414179 NR Description: putative protein; protein id: At5g03290
  misc_feature (78)..(327): NCBI GI NO: 28974492 NR Description: NAD-dependent isocitrate dehydrogenase alpha subunit
  misc_feature (68)..(327): NCBI GI NO: 266463 NR Description: 3-isopropylmalate dehydrogenase
  misc_feature (68)..(327): NCBI GI NO: 7427677 NR Description: 3-isopropylmalate dehydrogenase (EC 1
  misc_feature (45)..(327): NCBI GI NO: 21536667 NR Description: putative (NAD+) isocitrate dehydrogenase
  misc_feature (45)..(327): NCBI GI NO: 30681023 NR Description: isocitrate dehydrogenase
  misc_feature (43)..(332): NCBI GI NO: 31206479 NR Description: ENSANGP00000023556 [Anopheles gambiae]
ISLYHCLPPRPSSSPPQTTAAAAAAAANPCESSLSGLWGAGMALRRLLQGSVLPRIIGRDLAPAVAPFSTESGETIRATLFPGDGIGPEIAESVKQVFNVAGVPIEWEEHYVSTEVDPRTESFLTWESLESVRRNKVGLKGPMATPIGKGHRSLNLTLRKELGLYANVRPCNSLPGYKTRYDDVNLVTIRENTEGEYSGLEHQVVRGVVESLKIITRQASLRVAEYAFHYAKANGRERVSAIHKANIMRKTDGLFLKCCREVAEKYPEIQYEEVIIDNCCMTLVKNPGLFDVLVMPNLYGDIISDLCAGLIGGLGLTPSCNIGEGGIFWQKLFMVLLLILLARTSRTRLLLC

SEQ ID NO: 30083 - protein, 311 aa, Zea mays subsp. mays
  peptide (1)..(311): Ceres Seq. ID no. 12343692
  misc_feature (36)..(286): Pfam Name: Pfam Description:  Isocitrate/isopropylmalate dehydrogenase
  misc_feature (1)..(286): NCBI GI NO: 34903262 NR Description: unnamed protein product
  misc_feature (27)..(286): NCBI GI NO: 7431333 NR Description: probable isocitrate dehydrogenase (NAD) (EC1
  misc_feature (1)..(286): NCBI GI NO: 11251553 NR Description: 3-isopropylmalate dehydrogenase-like protein -Arabidopsis thaliana
  misc_feature (1)..(286): NCBI GI NO: 18414179 NR Description: putative protein; protein id: At5g03290
  misc_feature (37)..(286): NCBI GI NO: 28974492 NR Description: NAD-dependent isocitrate dehydrogenase alpha subunit
  misc_feature (27)..(286): NCBI GI NO: 266463 NR Description: 3-isopropylmalate dehydrogenase
  misc_feature (27)..(286): NCBI GI NO: 7427677 NR Description: 3-isopropylmalate dehydrogenase (EC 1
  misc_feature (4)..(286): NCBI GI NO: 21536667 NR Description: putative (NAD+) isocitrate dehydrogenase
  misc_feature (4)..(286): NCBI GI NO: 30681023 NR Description: isocitrate dehydrogenase
  misc_feature (2)..(291): NCBI GI NO: 31206479 NR Description: ENSANGP00000023556 [Anopheles gambiae]
MALRRLLQGSVLPRIIGRDLAPAVAPFSTESGETIRATLFPGDGIGPEIAESVKQVFNVAGVPIEWEEHYVSTEVDPRTESFLTWESLESVRRNKVGLKGPMATPIGKGHRSLNLTLRKELGLYANVRPCNSLPGYKTRYDDVNLVTIRENTEGEYSGLEHQVVRGVVESLKIITRQASLRVAEYAFHYAKANGRERVSAIHKANIMRKTDGLFLKCCREVAEKYPEIQYEEVIIDNCCMTLVKNPGLFDVLVMPNLYGDIISDLCAGLIGGLGLTPSCNIGEGGIFWQKLFMVLLLILLARTSRTRLLLC

SEQ ID NO: 30084 - protein, 210 aa, Zea mays subsp. mays
  peptide (1)..(210): Ceres Seq. ID no. 12343693
  misc_feature (1)..(185): Pfam Name: Pfam Description:  Isocitrate/isopropylmalate dehydrogenase
  misc_feature (1)..(185): NCBI GI NO: 34903262 NR Description: unnamed protein product
  misc_feature (1)..(185): NCBI GI NO: 7431333 NR Description: probable isocitrate dehydrogenase (NAD) (EC1
  misc_feature (1)..(185): NCBI GI NO: 11251553 NR Description: 3-isopropylmalate dehydrogenase-like protein -Arabidopsis thaliana
  misc_feature (1)..(185): NCBI GI NO: 18414179 NR Description: putative protein; protein id: At5g03290
  misc_feature (1)..(185): NCBI GI NO: 28974492 NR Description: NAD-dependent isocitrate dehydrogenase alpha subunit
  misc_feature (1)..(185): NCBI GI NO: 266463 NR Description: 3-isopropylmalate dehydrogenase
  misc_feature (1)..(185): NCBI GI NO: 7427677 NR Description: 3-isopropylmalate dehydrogenase (EC 1
  misc_feature (1)..(185): NCBI GI NO: 21536667 NR Description: putative (NAD+) isocitrate dehydrogenase
  misc_feature (1)..(185): NCBI GI NO: 30681023 NR Description: isocitrate dehydrogenase
  misc_feature (1)..(190): NCBI GI NO: 31206479 NR Description: ENSANGP00000023556 [Anopheles gambiae]
MATPIGKGHRSLNLTLRKELGLYANVRPCNSLPGYKTRYDDVNLVTIRENTEGEYSGLEHQVVRGVVESLKIITRQASLRVAEYAFHYAKANGRERVSAIHKANIMRKTDGLFLKCCREVAEKYPEIQYEEVIIDNCCMTLVKNPGLFDVLVMPNLYGDIISDLCAGLIGGLGLTPSCNIGEGGIFWQKLFMVLLLILLARTSRTRLLLC

SEQ ID NO: 30085 - DNA, 1221 bp, Zea mays subsp. mays
  misc_feature (1)..(1221): Ceres Seq. ID no. 12413244
  misc_feature (670)..(670): n is a, c, t, g, unknown, or other
gtcctctcttcttccaccaccacctcctactccgctgcaaccccaaatctctccttcctcgcatacgcgcgcagcggaggagctgagaccaacgaagaagaagaagaacaaccgagcaagcacaagcttagctagcgtgtaggtgtccaaggcgacgacggccgccgcgccaggctagccaaccagctgctcatcgctcctagctgcggagccgatatggctggcgccgacgtcgacgtcgggacggagctccgtctcggcctgccgggaggaggcgccgatgcggccaaggctgccaagaggggcttcgaggacaccatcgacctcaagctgaagctgcccaccgccggcatggaggaagctgccgccgccgccgccgccgccgccaagcccgagccggcagccgagaaggccaagaggcccgccgaggcgccggccgctgatgccgagaagccacccgcacccaaggcacaagctgtgggttggccaccagtccggtcataccgcaggaacgtcatgaccgtccagtctgtgaagagcaagaaggaagaggagcctgagaagcagcagtccgctgccaacgccggcggcaacggctccgccttcgtgaaggtcagcatggacggcgcgccctacctgcgcaaggtggacctgaagatgtacaacagcntacacggagctctccgttgctctgaagaagatgttcagcaccttcaccacatccgggaacaacatgaatgagggaaaactggttgatccggtcagcggtgctgatgtggtcactacttacgaagacaaggatggcgactggatgctcgttggcgacgtcccgtgggagatgtttgtcgagtcatgcaggcgtctgaggatcatgaagagttctgaagccataggtcttgcaccaagaacgaaggacaagtgcaagaacaggagctgaagaagatacagcgttaaagacgctgcccattgtgtcaaaagaatggtgcccttgcagtgtgctgcggtttttctagaaatataatgcgttttaattactagttggagggagacctgtcttgttcaatttgttcatggaccagaagcaataatctatctgtgtgtagctggattggtgttatgcgatgtcccctaccgtgtcccagaatctacttggtgattttatcccagtgttgttaatcaagcttgtgtgattgttaagtaaagggcatcaatgagactatt

SEQ ID NO: 30086 - protein, 174 aa, Zea mays subsp. mays
  peptide (1)..(174): Ceres Seq. ID no. 12413245
  misc_feature (10)..(151): Pfam Name: Pfam Description:  AUX/IAA family
  misc_feature (1)..(151): NCBI GI NO: 17154533 NR Description: putative IAA1 protein
  misc_feature (1)..(151): NCBI GI NO: 30962267 NR Description: Aux/IAA protein
  misc_feature (1)..(151): NCBI GI NO: 40539038 NR Description: putative auxin-responsive protein
  misc_feature (10)..(151): NCBI GI NO: 20385508 NR Description: auxin-regulated protein
  misc_feature (10)..(151): NCBI GI NO: 114734 NR Description: AUXIN-INDUCED PROTEIN AUX28
  misc_feature (10)..(151): NCBI GI NO: 21593352 NR Description: indoleacetic acid (IAA)-inducible gene (IAA7)
  misc_feature (10)..(151): NCBI GI NO: 15228943 NR Description: indoleacetic acid
  misc_feature (10)..(151): NCBI GI NO: 15229343 NR Description: auxin-induced protein; protein id: At3g04730
  misc_feature (33)..(151): NCBI GI NO: 4887022 NR Description: Nt-iaa4.1 deduced protein [Nicotiana tabacum]
  misc_feature (1)..(151): NCBI GI NO: 34904314 NR Description: unnamed protein product
  misc_feature (152)..(152): Xaa is any aa, unknown or other
MAGADVDVGTELRLGLPGGGADAAKAAKRGFEDTIDLKLKLPTAGMEEAAAAAAAAAKPEPAAEKAKRPAEAPAADAEKPPAPKAQAVGWPPVRSYRRNVMTVQSVKSKKEEEPEKQQSAANAGGNGSAFVKVSMDGAPYLRKVDLKMYNSXHGALRCSEEDVQHLHHIREQHE

SEQ ID NO: 30087 - protein, 129 aa, Zea mays subsp. mays
  peptide (1)..(129): Ceres Seq. ID no. 12413246
  misc_feature (1)..(106): Pfam Name: Pfam Description:  AUX/IAA family
  misc_feature (1)..(106): NCBI GI NO: 17154533 NR Description: putative IAA1 protein
  misc_feature (1)..(106): NCBI GI NO: 30962267 NR Description: Aux/IAA protein
  misc_feature (1)..(106): NCBI GI NO: 40539038 NR Description: putative auxin-responsive protein
  misc_feature (1)..(106): NCBI GI NO: 20385508 NR Description: auxin-regulated protein
  misc_feature (1)..(106): NCBI GI NO: 114734 NR Description: AUXIN-INDUCED PROTEIN AUX28
  misc_feature (1)..(106): NCBI GI NO: 21593352 NR Description: indoleacetic acid (IAA)-inducible gene (IAA7)
  misc_feature (1)..(106): NCBI GI NO: 15228943 NR Description: indoleacetic acid
  misc_feature (1)..(106): NCBI GI NO: 15229343 NR Description: auxin-induced protein; protein id: At3g04730
  misc_feature (1)..(106): NCBI GI NO: 4887022 NR Description: Nt-iaa4.1 deduced protein [Nicotiana tabacum]
  misc_feature (1)..(106): NCBI GI NO: 34904314 NR Description: unnamed protein product
  misc_feature (107)..(107): Xaa is any aa, unknown or other
MEEAAAAAAAAAKPEPAAEKAKRPAEAPAADAEKPPAPKAQAVGWPPVRSYRRNVMTVQSVKSKKEEEPEKQQSAANAGGNGSAFVKVSMDGAPYLRKVDLKMYNSXHGALRCSEEDVQHLHHIREQHE

SEQ ID NO: 30088 - DNA, 782 bp, Zea mays subsp. mays
  misc_feature (1)..(782): Ceres Seq. ID no. 12412537
actcagcccactacctttcagatttttcctcatctgccgccgcctgcacccaacaagcctctcgacgctagtcatggccgcttccaacggcgccgccgcggtcgacgagaccgtcgccgccaccgactccgtgcaggagcctccccagaagatctccaagatctctcccctgctcaaggtgaagaagctctccgagaaggccgtgctgccgtcccgcggctccgctctcgccgccggctacgacctctcgagcgccgaggagatggtggtgccggcgcgtggcaaggcgctcgtgccgaccgacctcagcgtcgccatcccgcacggaacctacgcgcgcatcgcgcccaggtcggggctggcgctgaagcactccatcgacgtgggcgccggcgtgatcgacgcggactaccgagggccccgtcggcgtcatcctcttcaaccactccgacgccgacttcgccgtgaagcccggcgacaggatcgcgcagatgatcatcgaggtgatcgcgacgcccgaggtcgcggaggtggaggacctcgacgccaccgtccgtggggacggagggttcgggtccaccggcgtctgaagggattcggtgtctaggttaggatggcgatgcaagccttggtgtcttttgttggctctaagaaatcgtgatgttcaccatcactatcctgctatcgataattagtattgagattagtacgtaggttgcgtagttagctcgatgcacgtactattgtcgagaactcgctattctgtgatgttgaaaatgtct

SEQ ID NO: 30089 - protein, 201 aa, Zea mays subsp. mays
  peptide (1)..(201): Ceres Seq. ID no. 12412538
  misc_feature (65)..(139): Pfam Name: Pfam Description:  dUTPase
  misc_feature (3)..(140): NCBI GI NO: 31126720 NR Description: putative deoxyuridine triphosphatase
  misc_feature (41)..(139): NCBI GI NO: 38566986 NR Description: probable dUTP pyrophosphatase [Neurospora crassa]
  misc_feature (28)..(139): NCBI GI NO: 40746988 NR Description: hypothetical protein AN0271.2
  misc_feature (60)..(139): NCBI GI NO: 19114785 NR Description: deoxyuridine 5'-triphosphate nucleotidohydrolase
  misc_feature (40)..(139): NCBI GI NO: 38047903 NR Description: similar to Drosophila melanogaster BcDNA:LD08534
  misc_feature (40)..(139): NCBI GI NO: 19921126 NR Description: CG4584-PA [Drosophila melanogaster]
  misc_feature (37)..(139): NCBI GI NO: 31235968 NR Description: ENSANGP00000012604 [Anopheles gambiae]
  misc_feature (57)..(139): NCBI GI NO: 24583610 NR Description: CG4584-PB [Drosophila melanogaster]
  misc_feature (49)..(139): NCBI GI NO: 1169437 NR Description: Deoxyuridine 5'-triphosphate nucleotidohydrolase
  misc_feature (4)..(139): NCBI GI NO: 16758374 NR Description: Deoxyuridinetriphosphatase (dUTPase); dUTPase
LSPLPFRFFLICRRLHPTSLSTLVMAASNGAAAVDETVAATDSVQEPPQKISKISPLLKVKKLSEKAVLPSRGSALAAGYDLSSAEEMVVPARGKALVPTDLSVAIPHGTYARIAPRSGLALKHSIDVGAGVIDADYRGPRRRHPLQPLRRRLRREARRQDRADDHRGDRDARGRGGGGPRRHRPWGRRVRVHRRLKGFGV

SEQ ID NO: 30090 - protein, 177 aa, Zea mays subsp. mays
  peptide (1)..(177): Ceres Seq. ID no. 12412539
  misc_feature (41)..(115): Pfam Name: Pfam Description:  dUTPase
  misc_feature (1)..(116): NCBI GI NO: 31126720 NR Description: putative deoxyuridine triphosphatase
  misc_feature (17)..(115): NCBI GI NO: 38566986 NR Description: probable dUTP pyrophosphatase [Neurospora crassa]
  misc_feature (4)..(115): NCBI GI NO: 40746988 NR Description: hypothetical protein AN0271.2
  misc_feature (36)..(115): NCBI GI NO: 19114785 NR Description: deoxyuridine 5'-triphosphate nucleotidohydrolase
  misc_feature (16)..(115): NCBI GI NO: 38047903 NR Description: similar to Drosophila melanogaster BcDNA:LD08534
  misc_feature (16)..(115): NCBI GI NO: 19921126 NR Description: CG4584-PA [Drosophila melanogaster]
  misc_feature (13)..(115): NCBI GI NO: 31235968 NR Description: ENSANGP00000012604 [Anopheles gambiae]
  misc_feature (33)..(115): NCBI GI NO: 24583610 NR Description: CG4584-PB [Drosophila melanogaster]
  misc_feature (25)..(115): NCBI GI NO: 1169437 NR Description: Deoxyuridine 5'-triphosphate nucleotidohydrolase
  misc_feature (1)..(115): NCBI GI NO: 16758374 NR Description: Deoxyuridinetriphosphatase (dUTPase); dUTPase
MAASNGAAAVDETVAATDSVQEPPQKISKISPLLKVKKLSEKAVLPSRGSALAAGYDLSSAEEMVVPARGKALVPTDLSVAIPHGTYARIAPRSGLALKHSIDVGAGVIDADYRGPRRRHPLQPLRRRLRREARRQDRADDHRGDRDARGRGGGGPRRHRPWGRRVRVHRRLKGFGV

SEQ ID NO: 30091 - protein, 155 aa, Zea mays subsp. mays
  peptide (1)..(155): Ceres Seq. ID no. 12412540
TQPTTFQIFPHLPPPAPNKPLDASHGRFQRRRRGRRDRRRHRLRAGASPEDLQDLSPAQGEEALREGRAAVPRLRSRRRLRPLERRGDGGAGAWQGARADRPQRRHPARNLRAHRAQVGAGAEALHRRGRRRDRRGLPRAPSASSSSTTPTPTSP

SEQ ID NO: 30092 - DNA, 1038 bp, Zea mays subsp. mays
  misc_feature (1)..(1038): Ceres Seq. ID no. 12412533
agttgcctttaagctcgcacgcgaaccgtcccacactctgcgcaagccactgccgctgccgctgccgccgccgccgccgccttcagtctccgtctccaccggtgccctcgtctcccagccgctgccgccgccgccgccgccccgtgagagccggcgcagcaatccggttgcttggggacgcagcgaggatgggcagcaccagcgcgttcgtcatcaggtggatcaacttcttcaccatgatactggcgctactggtggtgggcttcgggttctggatgagcacccacgacgacgagtgcaggcggaccttgaccgtccccgtcatcgccctcggtggagtgatcttcctcatatcgctcgtcggattccttggtgcctggaagaacatctcctgcttgctctggacatatctgatcatgctgttcgtggtcttggtggcaatcatggtgttcacggtgctcgcgtttatcataacaaactccggaagtggccatactgttcctggggctaggtataaagagtaccgtctccaggactacagctcctggtttgtcaaacagctcgatgacacggagaaatgggctcgcctgaaaagctgcctggtgaagatagatgactgcaatagcctgtcgagaagatacaagaccgcgagagaatacaagctcgcggacctcactcccatggagtcgggttgctgccgcccgccagcagagtgcgggttcccagctctgaacgcgtcctatttcgatctgagctatcacccggcgagcgccaacgccgactgcaaactgtacaggaacgcgcgctctgtccggtgctacgactgcggcggcggcggctggagggactgatgtgtgggcccatcctggcttcggccgagttatcttatctatctatagtatcgtgttaccgttcgcttctgtcaccgtgttagtgtccgttctacctttggattaggtgttggtacccctgttgttccctttggttgctcccgctatgaaacgagacgagagaagaatgagcaaggtttttgttcgc

SEQ ID NO: 30093 - protein, 282 aa, Zea mays subsp. mays
  peptide (1)..(282): Ceres Seq. ID no. 12412534
  misc_feature (66)..(275): Pfam Name: Pfam Description:  Tetraspanin family
  misc_feature (63)..(275): NCBI GI NO: 37535820 NR Description: putative senescence-associated protein
  misc_feature (63)..(275): NCBI GI NO: 30696823 NR Description: senescence-associated protein family
  misc_feature (136)..(275): NCBI GI NO: 25404415 NR Description: hypothetical protein F9N12.12
  misc_feature (74)..(275): NCBI GI NO: 29367553 NR Description: senescence-associated protein-like protein
  misc_feature (74)..(275): NCBI GI NO: 3551954 NR Description: senescence-associated protein 5
  misc_feature (63)..(275): NCBI GI NO: 20197174 NR Description: hypothetical protein [Arabidopsis thaliana]
  misc_feature (66)..(275): NCBI GI NO: 15231187 NR Description: putative protein; protein id: At3g45600
  misc_feature (70)..(275): NCBI GI NO: 15237490 NR Description: senescence-associated protein 5-like protein
  misc_feature (70)..(275): NCBI GI NO: 17979386 NR Description: putative senescence-associated protein 5
  misc_feature (74)..(275): NCBI GI NO: 15234374 NR Description: senescence-associated protein -like
LPLSSHANRPTLCASHCRCRCRRRRRLQSPSPPVPSSPSRCRRRRRPVRAGAAIRLLGDAARMGSTSAFVIRWINFFTMILALLVVGFGFWMSTHDDECRRTLTVPVIALGGVIFLISLVGFLGAWKNISCLLWTYLIMLFVVLVAIMVFTVLAFIITNSGSGHTVPGARYKEYRLQDYSSWFVKQLDDTEKWARLKSCLVKIDDCNSLSRRYKTAREYKLADLTPMESGCCRPPAECGFPALNASYFDLSYHPASANADCKLYRNARSVRCYDCGGGGWRD

SEQ ID NO: 30094 - protein, 220 aa, Zea mays subsp. mays
  peptide (1)..(220): Ceres Seq. ID no. 12412535
  misc_feature (4)..(213): Pfam Name: Pfam Description:  Tetraspanin family
  misc_feature (1)..(213): NCBI GI NO: 37535820 NR Description: putative senescence-associated protein
  misc_feature (1)..(213): NCBI GI NO: 30696823 NR Description: senescence-associated protein family
  misc_feature (74)..(213): NCBI GI NO: 25404415 NR Description: hypothetical protein F9N12.12
  misc_feature (12)..(213): NCBI GI NO: 29367553 NR Description: senescence-associated protein-like protein
  misc_feature (12)..(213): NCBI GI NO: 3551954 NR Description: senescence-associated protein 5
  misc_feature (1)..(213): NCBI GI NO: 20197174 NR Description: hypothetical protein [Arabidopsis thaliana]
  misc_feature (4)..(213): NCBI GI NO: 15231187 NR Description: putative protein; protein id: At3g45600
  misc_feature (8)..(213): NCBI GI NO: 15237490 NR Description: senescence-associated protein 5-like protein
  misc_feature (8)..(213): NCBI GI NO: 17979386 NR Description: putative senescence-associated protein 5
  misc_feature (12)..(213): NCBI GI NO: 15234374 NR Description: senescence-associated protein -like
MGSTSAFVIRWINFFTMILALLVVGFGFWMSTHDDECRRTLTVPVIALGGVIFLISLVGFLGAWKNISCLLWTYLIMLFVVLVAIMVFTVLAFIITNSGSGHTVPGARYKEYRLQDYSSWFVKQLDDTEKWARLKSCLVKIDDCNSLSRRYKTAREYKLADLTPMESGCCRPPAECGFPALNASYFDLSYHPASANADCKLYRNARSVRCYDCGGGGWRD

SEQ ID NO: 30095 - protein, 204 aa, Zea mays subsp. mays
  peptide (1)..(204): Ceres Seq. ID no. 12412536
  misc_feature (1)..(197): Pfam Name: Pfam Description:  Tetraspanin family
  misc_feature (1)..(197): NCBI GI NO: 37535820 NR Description: putative senescence-associated protein
  misc_feature (1)..(197): NCBI GI NO: 30696823 NR Description: senescence-associated protein family
  misc_feature (58)..(197): NCBI GI NO: 25404415 NR Description: hypothetical protein F9N12.12
  misc_feature (1)..(197): NCBI GI NO: 29367553 NR Description: senescence-associated protein-like protein
  misc_feature (1)..(197): NCBI GI NO: 3551954 NR Description: senescence-associated protein 5
  misc_feature (1)..(197): NCBI GI NO: 20197174 NR Description: hypothetical protein [Arabidopsis thaliana]
  misc_feature (1)..(197): NCBI GI NO: 15231187 NR Description: putative protein; protein id: At3g45600
  misc_feature (1)..(197): NCBI GI NO: 15237490 NR Description: senescence-associated protein 5-like protein
  misc_feature (1)..(197): NCBI GI NO: 17979386 NR Description: putative senescence-associated protein 5
  misc_feature (1)..(197): NCBI GI NO: 15234374 NR Description: senescence-associated protein -like
MILALLVVGFGFWMSTHDDECRRTLTVPVIALGGVIFLISLVGFLGAWKNISCLLWTYLIMLFVVLVAIMVFTVLAFIITNSGSGHTVPGARYKEYRLQDYSSWFVKQLDDTEKWARLKSCLVKIDDCNSLSRRYKTAREYKLADLTPMESGCCRPPAECGFPALNASYFDLSYHPASANADCKLYRNARSVRCYDCGGGGWRD

SEQ ID NO: 30096 - DNA, 862 bp, Zea mays subsp. mays
  misc_feature (1)..(862): Ceres Seq. ID no. 12401768
gcacgagaccattacctagaacatcctaatcgaaaaatctgagatacagacagattaatcaacgcccgcacctcctatgggcacgaccggcgacgctccggctccggcgggggatccgcaggaccgccaccgtacccaccccccggcggcgaagcagcggacgacgctggtgttcacgtacgggacgctgaagcgcggcttctccaaccaccgcctcctggaggagctcttcgcgagcggggacgcgtcgctggtgggccccgcggtgacgtcggcgcggctgccgctggtgtgcgggccgtaccgggtgccgttcctgctgaacctccccggcgccggcgccggggcgcaccgcgtgcgcggggaggcgtacgcggtgacggcccgcgggcttgcgcggctggacgagctggagggcgtggagacggggcactacgagcggctggccgtggccgtggacctcgagggcggcggcggcggcggcggcggcgcggtggatgcgatcgcctacttcgcgcaccggagctacgccaacgacatgtggcggcgcagcggggagaagggcgtccccgagtacacccacggcgtggcagccgggtatgtccggcgcaaggaccggccgcaggggcagacgttcctggagcagatccggatcttcaattcgtctcctcccaatccgcttaataatccctcctagctcgcgctgcctcaactccttcaattcagtttctccgatccgtgtcatacatgatccatataatattatgggatgtatgtggtcagatcgagaaggtgtgttatgtttaatctagacatggtctatattttatttaattatgtcaaataaattttatatcttcgc

SEQ ID NO: 30097 - protein, 206 aa, Zea mays subsp. mays
  peptide (1)..(206): Ceres Seq. ID no. 12401769
  misc_feature (39)..(149): Pfam Name: UPF0131 Pfam Description: Uncharacterised protein family
  misc_feature (1)..(197): NCBI GI NO: 29126342 NR Description: unknown protein
  misc_feature (18)..(198): NCBI GI NO: 18396380 NR Description: expressed protein; protein id: At3g02910
  misc_feature (18)..(198): NCBI GI NO: 21555032 NR Description: unknown [Arabidopsis thaliana]
  misc_feature (29)..(198): NCBI GI NO: 11387354 NR Description: Hypothetical protein At3g02910
  misc_feature (31)..(197): NCBI GI NO: 15237492 NR Description: unknown protein; protein id: At5g46720.1
  misc_feature (24)..(129): NCBI GI NO: 13279332 NR Description: Unknown (protein for IMAGE:2822295) [Homo sapiens]
  misc_feature (31)..(129): NCBI GI NO: 33875960 NR Description: LOC87769 protein [Homo sapiens]
MGTTGDAPAPAGDPQDRHRTHPPAAKQRTTLVFTYGTLKRGFSNHRLLEELFASGDASLVGPAVTSARLPLVCGPYRVPFLLNLPGAGAGAHRVRGEAYAVTARGLARLDELEGVETGHYERLAVAVDLEGGGGGGGGAVDAIAYFAHRSYANDMWRRSGEKGVPEYTHGVAAGYVRRKDRPQGQTFLEQIRIFNSSPPNPLNNPS

SEQ ID NO: 30098 - protein, 104 aa, Zea mays subsp. mays
  peptide (1)..(104): Ceres Seq. ID no. 12401770
MRSPTSRTGATPTTCGGAAGRRASPSTPTAWQPGMSGARTGRRGRRSWSRSGSSIRLLPIRLIIPPSSRCLNSFNSVSPIRVIHDPYNIMGCMWSDREGVLCLI

SEQ ID NO: 30099 - DNA, 1189 bp, Zea mays subsp. mays
  misc_feature (1)..(1189): Ceres Seq. ID no. 12401601
acgagaaacaccccacgtctcaagctgcccctttctcaccgccgcggccgccacgcgcagcagcaaccgagcaggagcgcagccagcaagctcaggcccgagccctactgcaaccgccgctgctaccgcactgaacaccatggccgacccggcggagcaccgtccagcggaggaggacgaggaagccgcggcggccggcgaggatgaggacaccggcgctcaggtcgcgcccatcgtgaagctggaggaggtcgccgttaccaccggagaggaggacgaggacgtacttgtcgacatgaaggcgaagctctaccggttcgacaaggaggcgaaccagtggaaagaacgtggcacaggcactgtgaagctgcttaagcacaaggagaccgccaaggtccgcctcgtcatgcgtcaggcgaagacgcttaagatctgtgctaaccatcttgtggtggcgacgactaagatgcaggagcacgcagggagcgacaagtcgtgcgtgtggcacgcgctggacttcgccgacggtgagctcaaggaggagatgtttgctatccgttttggatctgtcgagaattgcaagaagttcaaggacactgttgaagagatagctgaagagcaaggaaagaccgaggtgaaagaaaacgaggaagtctccattgccgccgcagatttggtacagaagttaacagtgacagaggctagcaaggagggagatgcagaggaagaggaggctcctgcatctgaccataagaaggatgctaaagggtaaagattgaaggcaaacaaggccaaatgattatgattccattcatttcgttgtcaaggttcatcttccccacaaattttcattacaaagtttcattgcattttctcctgagatgatttgtgtgtgtgtgtgtgtgtgtgtgtgttgggtgaaatctgagttgtcagtcatctacatgtctttcttggttgttagacttattctcagtcgcctgtttatctgggatggctaggtacatcatgtttgtacaattatttggggttgattttggaatggctctaaagctcgagatgagatagatggtatcatggtagttattagtgatgatttcttttcgcttcttgttcgttcgttctgaaataatatgggatgctttgttatacttgttgatccattattagcttgatgcatcgttgatcc

SEQ ID NO: 30100 - protein, 256 aa, Zea mays subsp. mays
  peptide (1)..(256): Ceres Seq. ID no. 12401602
  misc_feature (85)..(205): Pfam Name: Pfam Description:  RanBP1 domain
  misc_feature (45)..(255): NCBI GI NO: 14091665 NR Description: Ran binding protein-1 [Lycopersicon esculentum]
  misc_feature (51)..(256): NCBI GI NO: 15222310 NR Description: Ran-binding protein
  misc_feature (51)..(255): NCBI GI NO: 2058282 NR Description: atranbp1a [Arabidopsis thaliana]
  misc_feature (47)..(255): NCBI GI NO: 8843780 NR Description: contains similarity to small GTPase Ran bindingprotein 1~gene_id:MZN1
  misc_feature (47)..(255): NCBI GI NO: 30697102 NR Description: Ran binding protein 1 homolog - like
  misc_feature (53)..(254): NCBI GI NO: 2058284 NR Description: atranbp1b [Arabidopsis thaliana]
  misc_feature (52)..(254): NCBI GI NO: 20260400 NR Description: Ran binding protein [Arabidopsis thaliana]
  misc_feature (53)..(254): NCBI GI NO: 15227700 NR Description: Ran binding protein
  misc_feature (51)..(256): NCBI GI NO: 5106769 NR Description: Ran-binding protein siRanBP [Arabidopsis thaliana]
  misc_feature (31)..(209): NCBI GI NO: 6320205 NR Description: Yeast Ran Binder #1
RETPHVSSCPFLTAAAATRSSNRAGAQPASSGPSPTATAAATALNTMADPAEHRPAEEDEEAAAAGEDEDTGAQVAPIVKLEEVAVTTGEEDEDVLVDMKAKLYRFDKEANQWKERGTGTVKLLKHKETAKVRLVMRQAKTLKICANHLVVATTKMQEHAGSDKSCVWHALDFADGELKEEMFAIRFGSVENCKKFKDTVEEIAEEQGKTEVKENEEVSIAAADLVQKLTVTEASKEGDAEEEEAPASDHKKDAKG

SEQ ID NO: 30101 - protein, 210 aa, Zea mays subsp. mays; identical to SEQ ID NO: 29508
  peptide (1)..(210): Ceres Seq. ID no. 12401603
  misc_feature (39)..(159): Pfam Name: Pfam Description:  RanBP1 domain
  misc_feature (1)..(209): NCBI GI NO: 14091665 NR Description: Ran binding protein-1 [Lycopersicon esculentum]
  misc_feature (5)..(210): NCBI GI NO: 15222310 NR Description: Ran-binding protein
  misc_feature (5)..(209): NCBI GI NO: 2058282 NR Description: atranbp1a [Arabidopsis thaliana]
  misc_feature (1)..(209): NCBI GI NO: 8843780 NR Description: contains similarity to small GTPase Ran bindingprotein 1~gene_id:MZN1
  misc_feature (1)..(209): NCBI GI NO: 30697102 NR Description: Ran binding protein 1 homolog - like
  misc_feature (7)..(208): NCBI GI NO: 2058284 NR Description: atranbp1b [Arabidopsis thaliana]
  misc_feature (6)..(208): NCBI GI NO: 20260400 NR Description: Ran binding protein [Arabidopsis thaliana]
  misc_feature (7)..(208): NCBI GI NO: 15227700 NR Description: Ran binding protein
  misc_feature (5)..(210): NCBI GI NO: 5106769 NR Description: Ran-binding protein siRanBP [Arabidopsis thaliana]
  misc_feature (1)..(163): NCBI GI NO: 6320205 NR Description: Yeast Ran Binder #1

SEQ ID NO: 30102 - protein, 158 aa, Zea mays subsp. mays; identical to SEQ ID NO: 29509
  peptide (1)..(158): Ceres Seq. ID no. 12401604
  misc_feature (1)..(107): Pfam Name: Pfam Description:  RanBP1 domain
  misc_feature (1)..(157): NCBI GI NO: 14091665 NR Description: Ran binding protein-1 [Lycopersicon esculentum]
  misc_feature (1)..(158): NCBI GI NO: 15222310 NR Description: Ran-binding protein
  misc_feature (1)..(157): NCBI GI NO: 2058282 NR Description: atranbp1a [Arabidopsis thaliana]
  misc_feature (1)..(157): NCBI GI NO: 8843780 NR Description: contains similarity to small GTPase Ran bindingprotein 1~gene_id:MZN1
  misc_feature (1)..(157): NCBI GI NO: 30697102 NR Description: Ran binding protein 1 homolog - like
  misc_feature (1)..(156): NCBI GI NO: 2058284 NR Description: atranbp1b [Arabidopsis thaliana]
  misc_feature (1)..(156): NCBI GI NO: 20260400 NR Description: Ran binding protein [Arabidopsis thaliana]
  misc_feature (1)..(156): NCBI GI NO: 15227700 NR Description: Ran binding protein
  misc_feature (1)..(158): NCBI GI NO: 5106769 NR Description: Ran-binding protein siRanBP [Arabidopsis thaliana]
  misc_feature (1)..(111): NCBI GI NO: 6320205 NR Description: Yeast Ran Binder #1

SEQ ID NO: 30103 - DNA, 1628 bp, Zea mays subsp. mays
  misc_feature (1)..(1628): Ceres Seq. ID no. 12405418
ccctcctccccgcgccgccataccctccaacccgagaggaaccctaacaccaaaacgcccccggaggcagctaggagagctcgaatcaccagccatgtcggagcacgacctcacggcgctgatggcggcgcagctggaccgccacctggtgttccccctgctggagttcctccaggagcggcagctctactcggagtcggagatcctggaggccaagatccgcctcctcagcggcaccaacatggtcgactacgccatggacatccacaagtccctctacggcaccgacgacgtgcccgaggacatggtgaagcgccgcgccgaggtcgtctccaggctcaggtcgctcgaggaggccgcagccccgctcgtcgccttcctccagaacccgcagctcgtgcaggagttcaggcccgacaaacagtacaacatccacatgctccaggagcgataccagattggtcctgaccagattgaagctctgtatcagtatgccaaatttcagtttgagtgcggtaactactcaggggctgctgattacctgtaccagtatcgtgctttgtgcacaaacagtgagcgaaatgtgagtgccctctggggaaagctggcagcagaaatcctaatgcagaactgggacgtagctttggaggaactcaaccgcttgaaggaaataattgattcaaagaacttctcatcacctctgaatcagctccagaacaggatatggctgatgcattgggctctgttcatcttctttaaccatgaaaatggtagaaatgggatcattgatctgttcttccaggacaggtacttgaatgctatacagacaaatgcacaccatcttattaggtatctagctactgcagttgttgtcaacaaaaggagaaggaatatgcttaaagagttgattaaggtcattcaacaggagcaccatagctacaaggatcccgtaactgaatttctggaatgcttatatgttaactatgattttgatggtgctcaacagaaactcatagagtgtgagcaggttatactcaatgatccattcctgggaaagcgcattgaagagggaaattttgtcagtgttcctttgagagatgagttccttgagaatgctaggctgtttattttcgagacatactgccgtatccatcggtgcatcgatatcagcatgctttctcagaagttgaacatgagctacgatgaggccgagttgtggatcatgaatttggttagaagctcaaaactggatgccaggatcgattcagtatcaggaactctcatcatgacaaccaatcacgtcaatgtccatgagcagattgttgagagcttgaagggccttaatatgaggacctacatgctcgcaaagaacatcgttgagccagctcagcaggcaactcggtgaggatagcagacttcacagttttgagacgccaaggactagtttagagacaactgtaaacttttcgagctctattgtgtggcattggatttcaacacatggaaggtggcttgccgtttgatacagcttggaatattatgctgacattttcaatattttgtaatcggaatttcgtaacagtggatccttctcaatgtattgctattattttatgctgacattttct

SEQ ID NO: 30104 - protein, 467 aa, Zea mays subsp. mays
  peptide (1)..(467): Ceres Seq. ID no. 12405419
  misc_feature (315)..(431): Pfam Name: Pfam Description:  PCI domain
  misc_feature (32)..(465): NCBI GI NO: 34900328 NR Description: putative translation initiation factor 3
  misc_feature (35)..(467): NCBI GI NO: 18410687 NR Description: translation initiation factor 3 -like protein
  misc_feature (35)..(467): NCBI GI NO: 7689381 NR Description: eIF3e [Arabidopsis thaliana]
  misc_feature (32)..(462): NCBI GI NO: 34394686 NR Description: putative eukaryotic initiation factor 3E
  misc_feature (143)..(467): NCBI GI NO: 34900030 NR Description: putative eIF3e
  misc_feature (32)..(467): NCBI GI NO: 4503521 NR Description: murine mammary tumor integration site 6
  misc_feature (32)..(467): NCBI GI NO: 34866211 NR Description: similar to Eukaryotic translation initiation factor3 subunit 6
  misc_feature (32)..(467): NCBI GI NO: 38494387 NR Description: Murine mammary tumor integration site 6
  misc_feature (32)..(467): NCBI GI NO: 17389740 NR Description: eukaryotic translation initiation factor 3
  misc_feature (32)..(458): NCBI GI NO: 12847562 NR Description: unnamed protein product [Mus musculus]
PPPRAAIPSNPRGTLTPKRPRRQLGELESPAMSEHDLTALMAAQLDRHLVFPLLEFLQERQLYSESEILEAKIRLLSGTNMVDYAMDIHKSLYGTDDVPEDMVKRRAEVVSRLRSLEEAAAPLVAFLQNPQLVQEFRPDKQYNIHMLQERYQIGPDQIEALYQYAKFQFECGNYSGAADYLYQYRALCTNSERNVSALWGKLAAEILMQNWDVALEELNRLKEIIDSKNFSSPLNQLQNRIWLMHWALFIFFNHENGRNGIIDLFFQDRYLNAIQTNAHHLIRYLATAVVVNKRRRNMLKELIKVIQQEHHSYKDPVTEFLECLYVNYDFDGAQQKLIECEQVILNDPFLGKRIEEGNFVSVPLRDEFLENARLFIFETYCRIHRCIDISMLSQKLNMSYDEAELWIMNLVRSSKLDARIDSVSGTLIMTTNHVNVHEQIVESLKGLNMRTYMLAKNIVEPAQQATR

SEQ ID NO: 30105 - protein, 436 aa, Zea mays subsp. mays
  peptide (1)..(436): Ceres Seq. ID no. 12405420
  misc_feature (284)..(400): Pfam Name: Pfam Description:  PCI domain
  misc_feature (1)..(434): NCBI GI NO: 34900328 NR Description: putative translation initiation factor 3
  misc_feature (4)..(436): NCBI GI NO: 18410687 NR Description: translation initiation factor 3 -like protein
  misc_feature (4)..(436): NCBI GI NO: 7689381 NR Description: eIF3e [Arabidopsis thaliana]
  misc_feature (1)..(431): NCBI GI NO: 34394686 NR Description: putative eukaryotic initiation factor 3E
  misc_feature (112)..(436): NCBI GI NO: 34900030 NR Description: putative eIF3e
  misc_feature (1)..(436): NCBI GI NO: 4503521 NR Description: murine mammary tumor integration site 6
  misc_feature (1)..(436): NCBI GI NO: 34866211 NR Description: similar to Eukaryotic translation initiation factor3 subunit 6
  misc_feature (1)..(436): NCBI GI NO: 38494387 NR Description: Murine mammary tumor integration site 6
  misc_feature (1)..(436): NCBI GI NO: 17389740 NR Description: eukaryotic translation initiation factor 3
  misc_feature (1)..(427): NCBI GI NO: 12847562 NR Description: unnamed protein product [Mus musculus]
MSEHDLTALMAAQLDRHLVFPLLEFLQERQLYSESEILEAKIRLLSGTNMVDYAMDIHKSLYGTDDVPEDMVKRRAEVVSRLRSLEEAAAPLVAFLQNPQLVQEFRPDKQYNIHMLQERYQIGPDQIEALYQYAKFQFECGNYSGAADYLYQYRALCTNSERNVSALWGKLAAEILMQNWDVALEELNRLKEIIDSKNFSSPLNQLQNRIWLMHWALFIFFNHENGRNGIIDLFFQDRYLNAIQTNAHHLIRYLATAVVVNKRRRNMLKELIKVIQQEHHSYKDPVTEFLECLYVNYDFDGAQQKLIECEQVILNDPFLGKRIEEGNFVSVPLRDEFLENARLFIFETYCRIHRCIDISMLSQKLNMSYDEAELWIMNLVRSSKLDARIDSVSGTLIMTTNHVNVHEQIVESLKGLNMRTYMLAKNIVEPAQQATR

SEQ ID NO: 30106 - protein, 427 aa, Zea mays subsp. mays
  peptide (1)..(427): Ceres Seq. ID no. 12405421
  misc_feature (275)..(391): Pfam Name: Pfam Description:  PCI domain
  misc_feature (1)..(425): NCBI GI NO: 34900328 NR Description: putative translation initiation factor 3
  misc_feature (1)..(427): NCBI GI NO: 18410687 NR Description: translation initiation factor 3 -like protein
  misc_feature (1)..(427): NCBI GI NO: 7689381 NR Description: eIF3e [Arabidopsis thaliana]
  misc_feature (1)..(422): NCBI GI NO: 34394686 NR Description: putative eukaryotic initiation factor 3E
  misc_feature (103)..(427): NCBI GI NO: 34900030 NR Description: putative eIF3e
  misc_feature (1)..(427): NCBI GI NO: 4503521 NR Description: murine mammary tumor integration site 6
  misc_feature (1)..(427): NCBI GI NO: 34866211 NR Description: similar to Eukaryotic translation initiation factor3 subunit 6
  misc_feature (1)..(427): NCBI GI NO: 38494387 NR Description: Murine mammary tumor integration site 6
  misc_feature (1)..(427): NCBI GI NO: 17389740 NR Description: eukaryotic translation initiation factor 3
  misc_feature (1)..(418): NCBI GI NO: 12847562 NR Description: unnamed protein product [Mus musculus]
MAAQLDRHLVFPLLEFLQERQLYSESEILEAKIRLLSGTNMVDYAMDIHKSLYGTDDVPEDMVKRRAEVVSRLRSLEEAAAPLVAFLQNPQLVQEFRPDKQYNIHMLQERYQIGPDQIEALYQYAKFQFECGNYSGAADYLYQYRALCTNSERNVSALWGKLAAEILMQNWDVALEELNRLKEIIDSKNFSSPLNQLQNRIWLMHWALFIFFNHENGRNGIIDLFFQDRYLNAIQTNAHHLIRYLATAVVVNKRRRNMLKELIKVIQQEHHSYKDPVTEFLECLYVNYDFDGAQQKLIECEQVILNDPFLGKRIEEGNFVSVPLRDEFLENARLFIFETYCRIHRCIDISMLSQKLNMSYDEAELWIMNLVRSSKLDARIDSVSGTLIMTTNHVNVHEQIVESLKGLNMRTYMLAKNIVEPAQQATR

SEQ ID NO: 30107 - DNA, 1193 bp, Zea mays subsp. mays
  misc_feature (1)..(1193): Ceres Seq. ID no. 13498586
gctttacaactccccaccccatcccatccacacacacttcacccagcgcggcggccgccggccgccggcaatggaggccgtggcgcgcagcggcactacctttggcggttcgtgcggagacagagtggtacaacgaggttgtcctcagcgccgtggcgccaggcgactggtggcgcggcctgccgcacccggtgcagtcatggatgcgcaactgcgtcggcggttacctcctctatttcatctctggtttcctctggtgcttcgtcatctactactggaagcgccacgcctacatccccaaagatgccatccccacaaatgaagctatgaagaagcaaatagttgtagcatcgaaggctatgcctttttactgcgctcttccaactttatctgaatatatgattgagagcggatggactcggtgctacttcaatatcagcgaaattggtttttctatgtacctctgttatatggctatgtatctcatctttgtggagtttggaatttactggatgcacagggagttgcatgacataaaaccattatacaaatatctgcatgcaacccaccatatttacaacaaggagaataccttgtctccatttgctggacttgcatttcatccactggatggtattctgcaagcaataccgcatgtgttcgcgctcttcctctttccaacacacttcaggacacatattgcactcttgttcctagaggctgtgtggacaacaaacatccacgactgcattcatggcaagatatggccagtcatgggcgctggatatcacaccattcaccatacgacttaccgccacaactatggccactacaccatctggatggactggatgtttggtacgctcaatgagccagaagatatcctcaagaaggcttgagtttctcggagctgtggtatccctatggtgctggtgctggaactgctcgatctgttcccagtgtttctaatccgttgagcctgttcagcactgtctgtttatgtaggcatcagtgtgttaattagtttgctaggttcatatggctttgtgcttattctgtaatttagtgatgtttgtctcatgacgcaacggagttcaggacgaataaaactttgctagacacattctggattccagttgcttgtacaatgttgcaactcaactgtcaatataggatgtaaaacggattccttc

SEQ ID NO: 30108 - protein, 298 aa, Zea mays subsp. mays
  peptide (1)..(298): Ceres Seq. ID no. 13498587
  misc_feature (39)..(202): NCBI GI NO: 34895618 NR Description: putative sterol-C5(6)-desaturase
  misc_feature (237)..(297): NCBI GI NO: 34895618 NR Description: putative sterol-C5(6)-desaturase
  misc_feature (39)..(297): NCBI GI NO: 4426627 NR Description: sterol-C5(6)-desaturase homolog
  misc_feature (39)..(297): NCBI GI NO: 33301670 NR Description: Delta-7-sterol-C5
  misc_feature (39)..(291): NCBI GI NO: 5031219 NR Description: delta7 sterol C-5 desaturase
  misc_feature (39)..(291): NCBI GI NO: 15232935 NR Description: delta 7-sterol-C5-desaturase (STE1)
  misc_feature (39)..(291): NCBI GI NO: 21594971 NR Description: sterol-C5-desaturase [Arabidopsis thaliana]
  misc_feature (39)..(291): NCBI GI NO: 2129741 NR Description: C-5 sterol desaturase (EC 1
  misc_feature (39)..(291): NCBI GI NO: 15232937 NR Description: delta 7-sterol-C5-desaturase, putative
  misc_feature (72)..(291): NCBI GI NO: 25742651 NR Description: sterol-C5-desaturase
FTTPHPIPSTHTSPSAAAAGRRQWRPWRAAALPLAVRAETEWYNEVVLSAVAPGDWWRGLPHPVQSWMRNCVGGYLLYFISGFLWCFVIYYWKRHAYIPKDAIPTNEAMKKQIVVASKAMPFYCALPTLSEYMIESGWTRCYFNISEIGFSMYLCYMAMYLIFVEFGIYWMHRELHDIKPLYKYLHATHHIYNKENTLSPFAGLAFHPLDGILQAIPHVFALFLFPTHFRTHIALLFLEAVWTTNIHDCIHGKIWPVMGAGYHTIHHTTYRHNYGHYTIWMDWMFGTLNEPEDILKKA

SEQ ID NO: 30109 - protein, 231 aa, Zea mays subsp. mays
  peptide (1)..(231): Ceres Seq. ID no. 13498588
  misc_feature (1)..(135): NCBI GI NO: 34895618 NR Description: putative sterol-C5(6)-desaturase
  misc_feature (170)..(230): NCBI GI NO: 34895618 NR Description: putative sterol-C5(6)-desaturase
  misc_feature (1)..(230): NCBI GI NO: 4426627 NR Description: sterol-C5(6)-desaturase homolog
  misc_feature (1)..(230): NCBI GI NO: 33301670 NR Description: Delta-7-sterol-C5
  misc_feature (1)..(224): NCBI GI NO: 5031219 NR Description: delta7 sterol C-5 desaturase
  misc_feature (1)..(224): NCBI GI NO: 15232935 NR Description: delta 7-sterol-C5-desaturase (STE1)
  misc_feature (1)..(224): NCBI GI NO: 21594971 NR Description: sterol-C5-desaturase [Arabidopsis thaliana]
  misc_feature (1)..(224): NCBI GI NO: 2129741 NR Description: C-5 sterol desaturase (EC 1
  misc_feature (1)..(224): NCBI GI NO: 15232937 NR Description: delta 7-sterol-C5-desaturase, putative
  misc_feature (5)..(224): NCBI GI NO: 25742651 NR Description: sterol-C5-desaturase
MRNCVGGYLLYFISGFLWCFVIYYWKRHAYIPKDAIPTNEAMKKQIVVASKAMPFYCALPTLSEYMIESGWTRCYFNISEIGFSMYLCYMAMYLIFVEFGIYWMHRELHDIKPLYKYLHATHHIYNKENTLSPFAGLAFHPLDGILQAIPHVFALFLFPTHFRTHIALLFLEAVWTTNIHDCIHGKIWPVMGAGYHTIHHTTYRHNYGHYTIWMDWMFGTLNEPEDILKKA

SEQ ID NO: 30110 - protein, 190 aa, Zea mays subsp. mays
  peptide (1)..(190): Ceres Seq. ID no. 13498589
  misc_feature (1)..(94): NCBI GI NO: 34895618 NR Description: putative sterol-C5(6)-desaturase
  misc_feature (129)..(189): NCBI GI NO: 34895618 NR Description: putative sterol-C5(6)-desaturase
  misc_feature (1)..(189): NCBI GI NO: 4426627 NR Description: sterol-C5(6)-desaturase homolog
  misc_feature (1)..(189): NCBI GI NO: 33301670 NR Description: Delta-7-sterol-C5
  misc_feature (1)..(183): NCBI GI NO: 5031219 NR Description: delta7 sterol C-5 desaturase
  misc_feature (1)..(183): NCBI GI NO: 15232935 NR Description: delta 7-sterol-C5-desaturase (STE1)
  misc_feature (1)..(183): NCBI GI NO: 21594971 NR Description: sterol-C5-desaturase [Arabidopsis thaliana]
  misc_feature (1)..(183): NCBI GI NO: 2129741 NR Description: C-5 sterol desaturase (EC 1
  misc_feature (1)..(183): NCBI GI NO: 15232937 NR Description: delta 7-sterol-C5-desaturase, putative
  misc_feature (1)..(183): NCBI GI NO: 25742651 NR Description: sterol-C5-desaturase
MKKQIVVASKAMPFYCALPTLSEYMIESGWTRCYFNISEIGFSMYLCYMAMYLIFVEFGIYWMHRELHDIKPLYKYLHATHHIYNKENTLSPFAGLAFHPLDGILQAIPHVFALFLFPTHFRTHIALLFLEAVWTTNIHDCIHGKIWPVMGAGYHTIHHTTYRHNYGHYTIWMDWMFGTLNEPEDILKKA

SEQ ID NO: 30111 - DNA, 1201 bp, Zea mays subsp. mays; identical to SEQ ID NO: 29021
  misc_feature (1)..(1201): Ceres Seq. ID no. 13492541

SEQ ID NO: 30112 - protein, 317 aa, Zea mays subsp. mays; identical to SEQ ID NO: 29022
  peptide (1)..(317): Ceres Seq. ID no. 13492542
  misc_feature (82)..(220): Pfam Name: Pfam Description:  alpha/beta hydrolase fold
  misc_feature (1)..(220): NCBI GI NO: 24059850 NR Description: hydrolase-like protein
  misc_feature (220)..(317): NCBI GI NO: 24059850 NR Description: hydrolase-like protein
  misc_feature (5)..(310): NCBI GI NO: 27436745 NR Description: Hypothetical protein
  misc_feature (3)..(314): NCBI GI NO: 27436746 NR Description: Unknown protein
  misc_feature (54)..(313): NCBI GI NO: 34896168 NR Description: contains ESTs C73890
  misc_feature (6)..(309): NCBI GI NO: 30689631 NR Description: hydrolase, alpha/beta fold family
  misc_feature (43)..(315): NCBI GI NO: 22326938 NR Description: hydrolase, alpha/beta fold family
  misc_feature (57)..(309): NCBI GI NO: 21592805 NR Description: unknown [Arabidopsis thaliana]
  misc_feature (6)..(314): NCBI GI NO: 37533664 NR Description: putative hydrolase
  misc_feature (6)..(317): NCBI GI NO: 18411865 NR Description: hydrolase, alpha/beta fold family

SEQ ID NO: 30113 - protein, 311 aa, Zea mays subsp. mays; identical to SEQ ID NO: 29023
  peptide (1)..(311): Ceres Seq. ID no. 13492543
  misc_feature (111)..(220): Pfam Name: DUF390 Pfam Description: Protein of unknown function
  misc_feature (18)..(311): NCBI GI NO: 29247944 NR Description: GLP_26_54603_52153 [Giardia lamblia ATCC 50803]
  misc_feature (1)..(307): NCBI GI NO: 33865132 NR Description: possible N-terminal part of IF-2
  misc_feature (17)..(311): NCBI GI NO: 23018055 NR Description: hypothetical protein [Thermobifida fusca]
  misc_feature (55)..(259): NCBI GI NO: 23105938 NR Description: hypothetical protein [Azotobacter vinelandii]
  misc_feature (11)..(296): NCBI GI NO: 25989119 NR Description: unknown [Streptomyces aureofaciens]
  misc_feature (161)..(311): NCBI GI NO: 5032119 NR Description: Ser/Arg-related nuclear matrix protein
  misc_feature (12)..(298): NCBI GI NO: 14018072 NR Description: hypothetical protein [Oryza sativa]
  misc_feature (51)..(247): NCBI GI NO: 7494125 NR Description: myosin-IA - Acanthamoeba castellanii
  misc_feature (40)..(311): NCBI GI NO: 23105951 NR Description: hypothetical protein [Azotobacter vinelandii]
  misc_feature (44)..(272): NCBI GI NO: 538695 NR Description: hypothetical protein

SEQ ID NO: 30114 - protein, 187 aa, Zea mays subsp. mays; identical to SEQ ID NO: 29024
  peptide (1)..(187): Ceres Seq. ID no. 13492544
  misc_feature (5)..(142): NCBI GI NO: 5032119 NR Description: Ser/Arg-related nuclear matrix protein
  misc_feature (4)..(187): NCBI GI NO: 9845307 NR Description: pr5 [Rat cytomegalovirus]
  misc_feature (2)..(187): NCBI GI NO: 27375632 NR Description: blr0521 [Bradyrhizobium japonicum]

SEQ ID NO: 30115 - DNA, 1606 bp, Zea mays subsp. mays
  misc_feature (1)..(1606): Ceres Seq. ID no. 12344912
actccgtactcggcgctcctcccccgtcgccgccggaaatcaggaagcccaagtgctctcttgggtgcgctcgtcgccggtggcagtgagccagtgatgcatcttcatctccggcttccttattaggatcagcccgtcgatcgatcatggcgtcgtcgagctcggctgctactactagtggtgacagtcagggtctcaaggctcgagatgcctgcatcgtcggcgtcgcccgcacgcccatcggcgcacttctcgggtcgctgtcgtccctccccgccaccaagctcggctccatcgccatccagggtgctctcaagagggcgaaggtcgacccggcgctcgtgcaggaggttttcatgggcaacgtcctcagcgccaaccttggccaggctccggcaaggcaggcagcccttggcgccggcttgcccaactccgtgccatgtaccaccgtcaacaaagtttgttcctcgggaatgaaggctgtcatgtttgcggctcaaagtattcagctggggatcaacgatgttgtggtcgccggtggcatggaaagcatgtcgaatgccccaaaatatgtggctgaagcaagacgaggatcacggttcggacatgatgtccttgttgatgggatgctcaaggatggcctgtgggatgtctataacgatttcccgatgggaatgtgtgctgaattgtgttcagaccagcactcaatctcaagggaggagcaggattcgtatgctatcctcagcaatgaacgtggcatagcagctcaggacagcggtgcattttcttgggagattgttcctgttgaaatttcttctggtagagggaaaccaccagttgttgttgacaaggatgagagtcttgcaaagtttgatccagtaaagctgaagaaacttgggccaacttttaagacgaatggttctgtaacggctggcaattcttctagtataagtgatggcgctgctgcaattgtccttgtcagtggagagaaagccaagaatcttggccttgaagttattgcaaggattacagggtatgctgatgctgcacaggcacctgagctgtttacgacagctccagcccttgccattccaaaggctatatcaaatgcagctcttcaaacttcacagatagattattatgaagtaaatgaggctttctctgttgttgctatagctaatcagaggcttcttggtatcccttccggaaagctaaacttaagtggtggtgctgtttccctgggccatcctatcggttgcagtggtgcacggataattgtcactttgcttgggattcttagacagaaaaatggaaaatttggtgttgctggagtttgcaatggcggcggcggcgcttcagccctcgttttggagctcatgcaaccctcttcgcatatccattcatcattgtgaagttggtgcgagcaaattagcaagacaaaatttgtaaaatgtgctgtatctgtcgtgctgctcagcacagggcattatcttgtactcccttatatgggaaaatatagacgtatatatacccatggaaataacagaggcccggaagaataatgtacagacactgatacagccactgaaagaagacatgggtagtg

SEQ ID NO: 30116 - protein, 421 aa, Zea mays subsp. mays
  peptide (1)..(421): Ceres Seq. ID no. 12344913
  misc_feature (20)..(281): Pfam Name: Pfam Description:  Thiolase, N-terminal domain
  misc_feature (13)..(421): NCBI GI NO: 34894172 NR Description: putative acetoacyl-CoA-thiolase
  misc_feature (1)..(411): NCBI GI NO: 8777413 NR Description: acetyl-CoA C-acetyltransferase
  misc_feature (11)..(411): NCBI GI NO: 16417944 NR Description: acetyl Co-A acetyltransferase [Hevea brasiliensis]
  misc_feature (14)..(411): NCBI GI NO: 30695411 NR Description: acetyl-CoA C-acetyltransferase
  misc_feature (21)..(411): NCBI GI NO: 30695409 NR Description: acetyl-CoA C-acetyltransferase
  misc_feature (7)..(421): NCBI GI NO: 15238793 NR Description: acetoacyl-CoA-thiolase; protein id: At5g47720
  misc_feature (7)..(411): NCBI GI NO: 30695277 NR Description: acetyl-CoA C-acetyltransferase
  misc_feature (11)..(411): NCBI GI NO: 7433657 NR Description: acetyl-CoA C-acetyltransferase (EC 2
  misc_feature (24)..(409): NCBI GI NO: 19113478 NR Description: acetyl-coa acetyltransferase (EC 2.3.1.9)
  misc_feature (24)..(409): NCBI GI NO: 11257345 NR Description: probable acetyl-CoA C-acetyltransferase (EC2
MASSSSAATTSGDSQGLKARDACIVGVARTPIGALLGSLSSLPATKLGSIAIQGALKRAKVDPALVQEVFMGNVLSANLGQAPARQAALGAGLPNSVPCTTVNKVCSSGMKAVMFAAQSIQLGINDVVVAGGMESMSNAPKYVAEARRGSRFGHDVLVDGMLKDGLWDVYNDFPMGMCAELCSDQHSISREEQDSYAILSNERGIAAQDSGAFSWEIVPVEISSGRGKPPVVVDKDESLAKFDPVKLKKLGPTFKTNGSVTAGNSSSISDGAAAIVLVSGEKAKNLGLEVIARITGYADAAQAPELFTTAPALAIPKAISNAALQTSQIDYYEVNEAFSVVAIANQRLLGIPSGKLNLSGGAVSLGHPIGCSGARIIVTLLGILRQKNGKFGVAGVCNGGGGASALVLELMQPSSHIHSSL

SEQ ID NO: 30117 - protein, 351 aa, Zea mays subsp. mays
  peptide (1)..(351): Ceres Seq. ID no. 12344914
  misc_feature (1)..(211): Pfam Name: Pfam Description:  Thiolase, N-terminal domain
  misc_feature (1)..(351): NCBI GI NO: 34894172 NR Description: putative acetoacyl-CoA-thiolase
  misc_feature (1)..(341): NCBI GI NO: 8777413 NR Description: acetyl-CoA C-acetyltransferase
  misc_feature (1)..(341): NCBI GI NO: 16417944 NR Description: acetyl Co-A acetyltransferase [Hevea brasiliensis]
  misc_feature (1)..(341): NCBI GI NO: 30695411 NR Description: acetyl-CoA C-acetyltransferase
  misc_feature (1)..(341): NCBI GI NO: 30695409 NR Description: acetyl-CoA C-acetyltransferase
  misc_feature (1)..(351): NCBI GI NO: 15238793 NR Description: acetoacyl-CoA-thiolase; protein id: At5g47720
  misc_feature (1)..(341): NCBI GI NO: 30695277 NR Description: acetyl-CoA C-acetyltransferase
  misc_feature (1)..(341): NCBI GI NO: 7433657 NR Description: acetyl-CoA C-acetyltransferase (EC 2
  misc_feature (1)..(339): NCBI GI NO: 19113478 NR Description: acetyl-coa acetyltransferase (EC 2.3.1.9)
  misc_feature (1)..(339): NCBI GI NO: 11257345 NR Description: probable acetyl-CoA C-acetyltransferase (EC2
MGNVLSANLGQAPARQAALGAGLPNSVPCTTVNKVCSSGMKAVMFAAQSIQLGINDVVVAGGMESMSNAPKYVAEARRGSRFGHDVLVDGMLKDGLWDVYNDFPMGMCAELCSDQHSISREEQDSYAILSNERGIAAQDSGAFSWEIVPVEISSGRGKPPVVVDKDESLAKFDPVKLKKLGPTFKTNGSVTAGNSSSISDGAAAIVLVSGEKAKNLGLEVIARITGYADAAQAPELFTTAPALAIPKAISNAALQTSQIDYYEVNEAFSVVAIANQRLLGIPSGKLNLSGGAVSLGHPIGCSGARIIVTLLGILRQKNGKFGVAGVCNGGGGASALVLELMQPSSHIHSSL

SEQ ID NO: 30118 - protein, 312 aa, Zea mays subsp. mays
  peptide (1)..(312): Ceres Seq. ID no. 12344915
  misc_feature (1)..(172): Pfam Name: Pfam Description:  Thiolase, N-terminal domain
  misc_feature (1)..(312): NCBI GI NO: 34894172 NR Description: putative acetoacyl-CoA-thiolase
  misc_feature (1)..(302): NCBI GI NO: 8777413 NR Description: acetyl-CoA C-acetyltransferase
  misc_feature (1)..(302): NCBI GI NO: 16417944 NR Description: acetyl Co-A acetyltransferase [Hevea brasiliensis]
  misc_feature (1)..(302): NCBI GI NO: 30695411 NR Description: acetyl-CoA C-acetyltransferase
  misc_feature (1)..(302): NCBI GI NO: 30695409 NR Description: acetyl-CoA C-acetyltransferase
  misc_feature (1)..(312): NCBI GI NO: 15238793 NR Description: acetoacyl-CoA-thiolase; protein id: At5g47720
  misc_feature (1)..(302): NCBI GI NO: 30695277 NR Description: acetyl-CoA C-acetyltransferase
  misc_feature (1)..(302): NCBI GI NO: 7433657 NR Description: acetyl-CoA C-acetyltransferase (EC 2
  misc_feature (1)..(300): NCBI GI NO: 19113478 NR Description: acetyl-coa acetyltransferase (EC 2.3.1.9)
  misc_feature (1)..(300): NCBI GI NO: 11257345 NR Description: probable acetyl-CoA C-acetyltransferase (EC2
MKAVMFAAQSIQLGINDVVVAGGMESMSNAPKYVAEARRGSRFGHDVLVDGMLKDGLWDVYNDFPMGMCAELCSDQHSISREEQDSYAILSNERGIAAQDSGAFSWEIVPVEISSGRGKPPVVVDKDESLAKFDPVKLKKLGPTFKTNGSVTAGNSSSISDGAAAIVLVSGEKAKNLGLEVIARITGYADAAQAPELFTTAPALAIPKAISNAALQTSQIDYYEVNEAFSVVAIANQRLLGIPSGKLNLSGGAVSLGHPIGCSGARIIVTLLGILRQKNGKFGVAGVCNGGGGASALVLELMQPSSHIHSSL

SEQ ID NO: 30119 - DNA, 1171 bp, Zea mays subsp. mays
  misc_feature (1)..(1171): Ceres Seq. ID no. 12405407
agtcctctcctcccatccatctcatgcttcggtccacgcacccacccagccccaccagcggcagctccgcggcgccggcgtccagctccgacgccgcggcgatggtcgggggcggcgcggcggcgggcagcggcggcgcaccgagcggcgccaagctgctgcagatcctcaacgtgcgggtcgtgggcagcggcgaccgcgtggtggtgctgtcccacgggttcggcacggaccagtcggcgtggagccgcgtgctcccctacctcacccgcgaccaccgcgtggtgctctacgacctcgtctgcgccggcagcgtcaacccggagcacttcgacttccgccgctacgacacgctagactcgtacgtcgacgacctcctcgccatcctcgacgcgctccgcatcgcgcgctgcgccttcgtcggccactccgtctccgccatgatcggcatcctcgcctccatccgccgccccgagctcttcgccaagctcgtactcatcggcgcgtcgcccaggttcctgaacgaccacgactaccacggcgggttcgagctgccggagatccagcaggtgttcgacgcgatggcggccaactactcggcgtgggcgaccgggtacgccccgctggcggtgggcgcggacgtgccggcggcggtgcaggagttcagccgcaccctgttcaacatgcggccggacatctccctccacgtgtgccgcaccgtgttcaacaccgacctccgcggcgtgctgggcatggtgcggtccccctgcgtggtggtgcagaccacccgcgacgtctccgtcccggcctccgtcgccgcctacctcaaggcccacctcggcggccgcaccgccgtcgagttcctccagaccgagggccacctcccgcacctcagcgcccccggcctcctcgcgcaggtgctccgccgcgcgctcgcccggtactagcggagcgcctgccacctacggtcctggtggtcatcggtattttttaccgcctcgatttaccccgtgccgagaccggggacggggatcagataatgtggcgacccgcgccgtttgctgtgcgcgccatgactgtagactgtagtacgagtgtacgacttgttctggacttctggtacccgatttttttactgctttttaatggagagccgagcagtagcactggt

SEQ ID NO: 30120 - protein, 390 aa, Zea mays subsp. mays
  peptide (1)..(390): Ceres Seq. ID no. 12405408
  misc_feature (7)..(118): Pfam Name: Pfam Description:  Progesterone receptor
  misc_feature (8)..(356): NCBI GI NO: 22960097 NR Description: hypothetical protein [Rhodobacter sphaeroides]
  misc_feature (14)..(311): NCBI GI NO: 29247944 NR Description: GLP_26_54603_52153 [Giardia lamblia ATCC 50803]
  misc_feature (2)..(320): NCBI GI NO: 23018788 NR Description: hypothetical protein [Thermobifida fusca]
  misc_feature (40)..(301): NCBI GI NO: 79833 NR Description: hypothetical 119
  misc_feature (6)..(312): NCBI GI NO: 23104656 NR Description: hypothetical protein [Azotobacter vinelandii]
  misc_feature (30)..(317): NCBI GI NO: 29247944 NR Description: GLP_26_54603_52153 [Giardia lamblia ATCC 50803]
  misc_feature (5)..(358): NCBI GI NO: 23018788 NR Description: hypothetical protein [Thermobifida fusca]
VLSSHPSHASVHAPTQPHQRQLRGAGVQLRRRGDGRGRRGGGQRRRTERRQAAADPQRAGRGQRRPRGGAVPRVRHGPVGVEPRAPLPHPRPPRGALRPRLRRQRQPGALRLPPLRHARLVRRRPPRHPRRAPHRALRLRRPLRLRHDRHPRLHPPPRALRQARTHRRVAQVPERPRLPRRVRAAGDPAGVRRDGGQLLGVGDRVRPAGGGRGRAGGGAGVQPHPVQHAAGHLPPRVPHRVQHRPPRRAGHGAVPLRGGADHPRRLRPGLRRRLPQGPPRRPHRRRVPPDRGPPPAPQRPRPPRAGAPPRARPVLAERLPPTVLVVIGIFYRLDLPRAETGDGDQIMWRPAPFAVRAMTVDCSTSVRLVLDFWYPIFLLLFNGEPSSSTG

SEQ ID NO: 30121 - protein, 314 aa, Zea mays subsp. mays
  peptide (1)..(314): Ceres Seq. ID no. 12405409
  misc_feature (92)..(309): Pfam Name: Pfam Description:  alpha/beta hydrolase fold
  misc_feature (52)..(313): NCBI GI NO: 21593927 NR Description: unknown [Arabidopsis thaliana]
  misc_feature (52)..(313): NCBI GI NO: 18396732 NR Description: expressed protein; protein id: At3g03990
  misc_feature (172)..(309): NCBI GI NO: 40736991 NR Description: putative hydrolases
  misc_feature (57)..(173): NCBI GI NO: 40736991 NR Description: putative hydrolases
  misc_feature (57)..(309): NCBI GI NO: 15235567 NR Description: putative protein; protein id: At4g37470
  misc_feature (57)..(308): NCBI GI NO: 24216360 NR Description: Predicted hydrolases or acyltransferases
  misc_feature (52)..(311): NCBI GI NO: 15230110 NR Description: unknown protein; protein id: At3g24420.1
  misc_feature (56)..(312): NCBI GI NO: 34912326 NR Description: P0451D05.26
  misc_feature (58)..(312): NCBI GI NO: 22298700 NR Description: ORF_ID:tlr1157~hypothetical protein
  misc_feature (57)..(307): NCBI GI NO: 16080463 NR Description: similar to hydrolase [Bacillus subtilis]
SSPPIHLMLRSTHPPSPTSGSSAAPASSSDAAAMVGGGAAAGSGGAPSGAKLLQILNVRVVGSGDRVVVLSHGFGTDQSAWSRVLPYLTRDHRVVLYDLVCAGSVNPEHFDFRRYDTLDSYVDDLLAILDALRIARCAFVGHSVSAMIGILASIRRPELFAKLVLIGASPRFLNDHDYHGGFELPEIQQVFDAMAANYSAWATGYAPLAVGADVPAAVQEFSRTLFNMRPDISLHVCRTVFNTDLRGVLGMVRSPCVVVQTTRDVSVPASVAAYLKAHLGGRTAVEFLQTEGHLPHLSAPGLLAQVLRRALARY

SEQ ID NO: 30122 - protein, 307 aa, Zea mays subsp. mays
  peptide (1)..(307): Ceres Seq. ID no. 12405410
  misc_feature (85)..(302): Pfam Name: Pfam Description:  alpha/beta hydrolase fold
  misc_feature (45)..(306): NCBI GI NO: 21593927 NR Description: unknown [Arabidopsis thaliana]
  misc_feature (45)..(306): NCBI GI NO: 18396732 NR Description: expressed protein; protein id: At3g03990
  misc_feature (165)..(302): NCBI GI NO: 40736991 NR Description: putative hydrolases
  misc_feature (50)..(166): NCBI GI NO: 40736991 NR Description: putative hydrolases
  misc_feature (50)..(302): NCBI GI NO: 15235567 NR Description: putative protein; protein id: At4g37470
  misc_feature (50)..(301): NCBI GI NO: 24216360 NR Description: Predicted hydrolases or acyltransferases
  misc_feature (45)..(304): NCBI GI NO: 15230110 NR Description: unknown protein; protein id: At3g24420.1
  misc_feature (49)..(305): NCBI GI NO: 34912326 NR Description: P0451D05.26
  misc_feature (51)..(305): NCBI GI NO: 22298700 NR Description: ORF_ID:tlr1157~hypothetical protein
  misc_feature (50)..(300): NCBI GI NO: 16080463 NR Description: similar to hydrolase [Bacillus subtilis]
MLRSTHPPSPTSGSSAAPASSSDAAAMVGGGAAAGSGGAPSGAKLLQILNVRVVGSGDRVVVLSHGFGTDQSAWSRVLPYLTRDHRVVLYDLVCAGSVNPEHFDFRRYDTLDSYVDDLLAILDALRIARCAFVGHSVSAMIGILASIRRPELFAKLVLIGASPRFLNDHDYHGGFELPEIQQVFDAMAANYSAWATGYAPLAVGADVPAAVQEFSRTLFNMRPDISLHVCRTVFNTDLRGVLGMVRSPCVVVQTTRDVSVPASVAAYLKAHLGGRTAVEFLQTEGHLPHLSAPGLLAQVLRRALARY

SEQ ID NO: 30123 - DNA, 1723 bp, Zea mays subsp. mays
  misc_feature (1)..(1723): Ceres Seq. ID no. 12361433
gcacgagaccattacctagaacatcctaatcgaaaagccctttccctcttccctcccgtcgtcttcactccgacgcctcccctgccgccaccgctattgcctattgggagggcggtccctgtcgcgcgcgacgccgaggcttcgtgacggggacacgctgctaatttgtagcgcaccacacgccggctcggcctcggttgcgcctcgcctcgcctcgccaggggattactggtgggcagcgctcgtgcttgttgtgcagccggtgtgcgtctgctcgcggcctgcggcgatggggcaggacctcgtcgagatccacccgcgcgagctccagttcacatttgaggtgaagaaacaaagttcatgtgttgtctgcctaaccaacaagtccaacgaatatgttgcttttaaggttaaaacgacatcccctaaaagatactgtgttcgaccaaataccggggttatccttccgaggaaaacatgtgaattcacagttaccatgcaagcgctccggactgctccaccagacatgcaattaaaggacaagtttttagtacagaccacagttgttccttatggcacatctgatgaagaactcgttcctgccgttttctccaaagaaactggcagatacatcgaggaaagcaaattgagagttgttcttgttagttcataccaatccctcgaagagcaacccactaatggaattcatgacactgagccagctgttgaagttcctttactgaaagagatgccaaatttagggagcgaagtaccagatgttgcaaaagaaattcctgcccctctggtacaaggtccagcaattgtgaccggaataccttcacctgtcaaagaggttccaggcctgagagaaattcctgtgccactgaacgaagcaccaactttattggcagaatttccttcccctcaaaaagatccctctgctattacagttgaacatgcctctaatgttacaattgagcatgcccctgctatttccattgaatccccacctttgaaacaaagtgttccagtttttaaggaatctcctctgaaacaaagcgttgcagtttttaaggaatctcctcctttgaaacaaagcatttcagtttttaaggaatctcctccactggaggaaactactcctaaagaagctgttatgctaagtgaccgagggcttttcaatgtgcagaatcatcaattatcccatgtaacagaagatgttcagaatatgaaatcaaagctcaacaatcttgaatcaaaattggaagaggctgaaaagatgataataaggctaagagaagagagcagaaataccacccaggagcgggatgagctacagcaagaaatggtattcctaagaaagaagggaaccgcaaggagtcaaatgggtttccccctgctctttgtggtgtacgtggcgcttcttggtacctgtatcggttacctgctccgcatatgagttccaaacttcaaaaaagttcagcagatgggatatgcttcgtatgtgggcaagacaattgaacggcagttgcactccaaaatgttgaggggtgaatttattagcattattagttcggaacttcatatggttttgcacataacagcagtgccaaactaccatctgcctgtatgtatagaacagttactttttttcgcgttttatagaacccacccaaaagatgtctgctgcctcgtagactaacctgggattcttcttccatcc

SEQ ID NO: 30124 - protein, 389 aa, Zea mays subsp. mays
  peptide (1)..(389): Ceres Seq. ID no. 12361434
  misc_feature (1)..(389): NCBI GI NO: 34907216 NR Description: P0504E02.2
  misc_feature (1)..(388): NCBI GI NO: 30680831 NR Description: VAMP
  misc_feature (4)..(125): NCBI GI NO: 18411240 NR Description: putative proline-rich protein
  misc_feature (324)..(387): NCBI GI NO: 18411240 NR Description: putative proline-rich protein
  misc_feature (2)..(129): NCBI GI NO: 11288307 NR Description: 27k vesicle-associated membrane protein-associatedprotein
  misc_feature (265)..(388): NCBI GI NO: 11288307 NR Description: 27k vesicle-associated membrane protein-associatedprotein
  misc_feature (4)..(125): NCBI GI NO: 21592874 NR Description: putative proline-rich protein
  misc_feature (324)..(387): NCBI GI NO: 21592874 NR Description: putative proline-rich protein
  misc_feature (4)..(141): NCBI GI NO: 21554053 NR Description: putative VAMP-associated protein
  misc_feature (322)..(388): NCBI GI NO: 21554053 NR Description: putative VAMP-associated protein
MGQDLVEIHPRELQFTFEVKKQSSCVVCLTNKSNEYVAFKVKTTSPKRYCVRPNTGVILPRKTCEFTVTMQALRTAPPDMQLKDKFLVQTTVVPYGTSDEELVPAVFSKETGRYIEESKLRVVLVSSYQSLEEQPTNGIHDTEPAVEVPLLKEMPNLGSEVPDVAKEIPAPLVQGPAIVTGIPSPVKEVPGLREIPVPLNEAPTLLAEFPSPQKDPSAITVEHASNVTIEHAPAISIESPPLKQSVPVFKESPLKQSVAVFKESPPLKQSISVFKESPPLEETTPKEAVMLSDRGLFNVQNHQLSHVTEDVQNMKSKLNNLESKLEEAEKMIIRLREESRNTTQERDELQQEMVFLRKKGTARSQMGFPLLFVVYVALLGTCIGYLLRI

SEQ ID NO: 30125 - protein, 320 aa, Zea mays subsp. mays
  peptide (1)..(320): Ceres Seq. ID no. 12361435
  misc_feature (1)..(320): NCBI GI NO: 34907216 NR Description: P0504E02.2
  misc_feature (1)..(319): NCBI GI NO: 30680831 NR Description: VAMP
  misc_feature (1)..(56): NCBI GI NO: 18411240 NR Description: putative proline-rich protein
  misc_feature (255)..(318): NCBI GI NO: 18411240 NR Description: putative proline-rich protein
  misc_feature (1)..(60): NCBI GI NO: 11288307 NR Description: 27k vesicle-associated membrane protein-associatedprotein
  misc_feature (196)..(319): NCBI GI NO: 11288307 NR Description: 27k vesicle-associated membrane protein-associatedprotein
  misc_feature (1)..(56): NCBI GI NO: 21592874 NR Description: putative proline-rich protein
  misc_feature (255)..(318): NCBI GI NO: 21592874 NR Description: putative proline-rich protein
  misc_feature (1)..(72): NCBI GI NO: 21554053 NR Description: putative VAMP-associated protein
  misc_feature (253)..(319): NCBI GI NO: 21554053 NR Description: putative VAMP-associated protein
MQALRTAPPDMQLKDKFLVQTTVVPYGTSDEELVPAVFSKETGRYIEESKLRVVLVSSYQSLEEQPTNGIHDTEPAVEVPLLKEMPNLGSEVPDVAKEIPAPLVQGPAIVTGIPSPVKEVPGLREIPVPLNEAPTLLAEFPSPQKDPSAITVEHASNVTIEHAPAISIESPPLKQSVPVFKESPLKQSVAVFKESPPLKQSISVFKESPPLEETTPKEAVMLSDRGLFNVQNHQLSHVTEDVQNMKSKLNNLESKLEEAEKMIIRLREESRNTTQERDELQQEMVFLRKKGTARSQMGFPLLFVVYVALLGTCIGYLLRI

SEQ ID NO: 30126 - protein, 310 aa, Zea mays subsp. mays
  peptide (1)..(310): Ceres Seq. ID no. 12361436
  misc_feature (1)..(310): NCBI GI NO: 34907216 NR Description: P0504E02.2
  misc_feature (1)..(309): NCBI GI NO: 30680831 NR Description: VAMP
  misc_feature (1)..(46): NCBI GI NO: 18411240 NR Description: putative proline-rich protein
  misc_feature (245)..(308): NCBI GI NO: 18411240 NR Description: putative proline-rich protein
  misc_feature (1)..(50): NCBI GI NO: 11288307 NR Description: 27k vesicle-associated membrane protein-associatedprotein
  misc_feature (186)..(309): NCBI GI NO: 11288307 NR Description: 27k vesicle-associated membrane protein-associatedprotein
  misc_feature (1)..(46): NCBI GI NO: 21592874 NR Description: putative proline-rich protein
  misc_feature (245)..(308): NCBI GI NO: 21592874 NR Description: putative proline-rich protein
  misc_feature (1)..(62): NCBI GI NO: 21554053 NR Description: putative VAMP-associated protein
  misc_feature (243)..(309): NCBI GI NO: 21554053 NR Description: putative VAMP-associated protein
MQLKDKFLVQTTVVPYGTSDEELVPAVFSKETGRYIEESKLRVVLVSSYQSLEEQPTNGIHDTEPAVEVPLLKEMPNLGSEVPDVAKEIPAPLVQGPAIVTGIPSPVKEVPGLREIPVPLNEAPTLLAEFPSPQKDPSAITVEHASNVTIEHAPAISIESPPLKQSVPVFKESPLKQSVAVFKESPPLKQSISVFKESPPLEETTPKEAVMLSDRGLFNVQNHQLSHVTEDVQNMKSKLNNLESKLEEAEKMIIRLREESRNTTQERDELQQEMVFLRKKGTARSQMGFPLLFVVYVALLGTCIGYLLRI

SEQ ID NO: 30127 - DNA, 1770 bp, Zea mays subsp. mays
  misc_feature (1)..(1770): Ceres Seq. ID no. 12405403
aacacctccctcttttcctcgagcggtctaaccccaaaccctaaaccatggcgccgccggccccatccgtcggtccccgcctcctactccgccgcctcctctctacggctaccgaagcggcggcggagacacctgcgcccaccgcccccagctccgccgccgccgcgaagccggcgaaacaggacccgaggctgctctaccgtcgtttgtcggcgcttggaagcgccggggaggggagcgtgtcgcgggttttgaacaagtgggtgcgggagggcggcgcgacgcgaagcgacgacctcgtcaagcatgtcaaggagctccgcaagtacaagcgtcacgcccacgccctcgagttgatggattggatggtcaatgcaaggggtatgaacatgtcacacactaaccatgcaatacgtctggaactcatctataaagtgcgtggtcttgaggcagctgagaattattttgctaaccttcctgatccagcgaaaaatcatcgaacttacggctcccttcttagttgttattgctcagcaaaaatggaagagaaagcaacaaatctctaccgccagatggatgaacttggcatctggtccagtacactacccatcaacaatcttatgtccctttacatgaagttagaccagtataggaaggttgttagtctctttgaggagatgaaactgaagaatgttaaaccgaatagcctcacatgctgcattttaatgaccagctatgcagcattgaacaagatagatgacattgaagaacttctaacaaatggtagaaaaagatgtgactcttgggtggtctgcatacagcacacttgcttctatctatgtaaatgctggacaatttggaaaagcagaatctgctctgaagaaacttgagggccttatcagtgctcatgatgacagacagccttttgatttccttctgagcctatacgcttcactaggaaatttgagcgaggtcaatagggtatggaatgtgataaagtccaaattctcgaaggtaactaacacaagctaccttggcatgcttcacgctctttacaagctcaatgatattgaccgtatgaagcagatctatatggagtgggaatctaattatgaaacctttgatgtaaagctgacgaatatgatgattcgcagccatctgaaggttggcatgaccgaggaagcagaaatgttggtggagaaggtcaaggaaaatggtgcagagtttgacaccaaaacatgtgagttgtttcttgatcactacatgggcactgaggacatgaactcagcactgaactggttagagaatatgactaaactctccaagaaagcagagaagctcgatcaggacaggatctacaagttccagaagtatttcgaagaacacaaggatgctgacggtgcagagaggttctgcaactgcctgaggacgctagggtgcattgacgggaaagcatacgagtctctcttacgcacatacttggcagccggtaagaaaagctgttcactccgccaacagataaaaaacgataaggttgagatctgctatgacattgggaagctatctcaagaggttgggcgacaaggggcgatgagatacatatttatcttcgtttttaatttgagagagattagttctgttgatcctgtacgtccatgagcatcagaaaccaaatgtcggtccaacggttgaaaatgtatcagttctttcgttgttcatgaaaaggatagctcatggctgggctggtatcgttccggcttttgcgttcct

SEQ ID NO: 30128 - protein, 292 aa, Zea mays subsp. mays
  peptide (1)..(292): Ceres Seq. ID no. 12405404
  misc_feature (1)..(230): NCBI GI NO: 34905486 NR Description: P0682B08.18
  misc_feature (10)..(269): NCBI GI NO: 34905490 NR Description: P0682B08.20
  misc_feature (3)..(252): NCBI GI NO: 18411800 NR Description: expressed protein; protein id: At4g01990
  misc_feature (3)..(252): NCBI GI NO: 25407143 NR Description: hypothetical protein AT4g01990
  misc_feature (10)..(265): NCBI GI NO: 15217734 NR Description: hypothetical protein; protein id: At1g02370
  misc_feature (10)..(265): NCBI GI NO: 17529324 NR Description: unknown protein [Arabidopsis thaliana]
  misc_feature (10)..(267): NCBI GI NO: 15219808 NR Description: hypothetical protein; protein id: At1g60770.1
  misc_feature (3)..(254): NCBI GI NO: 15235508 NR Description: hypothetical protein; protein id: At4g02820
  misc_feature (3)..(254): NCBI GI NO: 17064738 NR Description: Unknown protein [Arabidopsis thaliana]
  misc_feature (1)..(230): NCBI GI NO: 22329290 NR Description: hypothetical protein; protein id: At1g02150
MVEKDVTLGWSAYSTLASIYVNAGQFGKAESALKKLEGLISAHDDRQPFDFLLSLYASLGNLSEVNRVWNVIKSKFSKVTNTSYLGMLHALYKLNDIDRMKQIYMEWESNYETFDVKLTNMMIRSHLKVGMTEEAEMLVEKVKENGAEFDTKTCELFLDHYMGTEDMNSALNWLENMTKLSKKAEKLDQDRIYKFQKYFEEHKDADGAERFCNCLRTLGCIDGKAYESLLRTYLAAGKKSCSLRQQIKNDKVEICYDIGKLSQEVGRQGAMRYIFIFVFNLREISSVDPVRP

SEQ ID NO: 30129 - protein, 280 aa, Zea mays subsp. mays
  peptide (1)..(280): Ceres Seq. ID no. 12405405
  misc_feature (151)..(185): Pfam Name: Pfam Description:  PPR repeat
  misc_feature (78)..(245): NCBI GI NO: 34905486 NR Description: P0682B08.18
  misc_feature (17)..(243): NCBI GI NO: 34905490 NR Description: P0682B08.20
  misc_feature (13)..(243): NCBI GI NO: 18411800 NR Description: expressed protein; protein id: At4g01990
  misc_feature (13)..(243): NCBI GI NO: 25407143 NR Description: hypothetical protein AT4g01990
  misc_feature (19)..(243): NCBI GI NO: 15217734 NR Description: hypothetical protein; protein id: At1g02370
  misc_feature (19)..(243): NCBI GI NO: 17529324 NR Description: unknown protein [Arabidopsis thaliana]
  misc_feature (50)..(264): NCBI GI NO: 15219808 NR Description: hypothetical protein; protein id: At1g60770.1
  misc_feature (7)..(279): NCBI GI NO: 15235508 NR Description: hypothetical protein; protein id: At4g02820
  misc_feature (7)..(279): NCBI GI NO: 17064738 NR Description: Unknown protein [Arabidopsis thaliana]
  misc_feature (50)..(240): NCBI GI NO: 22329290 NR Description: hypothetical protein; protein id: At1g02150
MAPPAPSVGPRLLLRRLLSTATEAAAETPAPTAPSSAAAAKPAKQDPRLLYRRLSALGSAGEGSVSRVLNKWVREGGATRSDDLVKHVKELRKYKRHAHALELMDWMVNARGMNMSHTNHAIRLELIYKVRGLEAAENYFANLPDPAKNHRTYGSLLSCYCSAKMEEKATNLYRQMDELGIWSSTLPINNLMSLYMKLDQYRKVVSLFEEMKLKNVKPNSLTCCILMTSYAALNKIDDIEELLTNGRKRCDSWVVCIQHTCFYLCKCWTIWKSRICSEET

SEQ ID NO: 30130 - protein, 206 aa, Zea mays subsp. mays
  peptide (1)..(206): Ceres Seq. ID no. 12405406
  misc_feature (1)..(144): NCBI GI NO: 34905486 NR Description: P0682B08.18
  misc_feature (1)..(183): NCBI GI NO: 34905490 NR Description: P0682B08.20
  misc_feature (1)..(166): NCBI GI NO: 18411800 NR Description: expressed protein; protein id: At4g01990
  misc_feature (1)..(166): NCBI GI NO: 25407143 NR Description: hypothetical protein AT4g01990
  misc_feature (1)..(179): NCBI GI NO: 15217734 NR Description: hypothetical protein; protein id: At1g02370
  misc_feature (1)..(179): NCBI GI NO: 17529324 NR Description: unknown protein [Arabidopsis thaliana]
  misc_feature (1)..(181): NCBI GI NO: 15219808 NR Description: hypothetical protein; protein id: At1g60770.1
  misc_feature (1)..(168): NCBI GI NO: 15235508 NR Description: hypothetical protein; protein id: At4g02820
  misc_feature (1)..(168): NCBI GI NO: 17064738 NR Description: Unknown protein [Arabidopsis thaliana]
  misc_feature (1)..(144): NCBI GI NO: 22329290 NR Description: hypothetical protein; protein id: At1g02150
MLHALYKLNDIDRMKQIYMEWESNYETFDVKLTNMMIRSHLKVGMTEEAEMLVEKVKENGAEFDTKTCELFLDHYMGTEDMNSALNWLENMTKLSKKAEKLDQDRIYKFQKYFEEHKDADGAERFCNCLRTLGCIDGKAYESLLRTYLAAGKKSCSLRQQIKNDKVEICYDIGKLSQEVGRQGAMRYIFIFVFNLREISSVDPVRP

SEQ ID NO: 30131 - DNA, 1389 bp, Zea mays subsp. mays
  misc_feature (1)..(1389): Ceres Seq. ID no. 12405399
gcacgagaccattacctagaacatcctaatcgaaaagagccccacggcggccatcctctgcgcgggcgttccagagcatgtacgcgcagatggtgtgcgggctgtgccagcggcaggacgtgctgcgcgtgggcgccgtgttcgcgtcgggcctcctccgcgccatccgcttcctccagctcaactgggagcagctggcggaggacatcgaggccggctcgctgaccccgcgcgtgaccgacccgtcggtgcgcgaggcggtcgccggcatcctccgccctgaccccgcggtcgccgagctggtccgctccgagtgctccgggggcgactgggcgggcatcgtcacccgcatttggcccaacaccaagtacctggacgtgatcgtcaccggcgccatggcgcagtacatcccgacgctcaagcactacagcggcgggctcccgatggcgtgcaccatgtacgcgtcctcggagtgctacttcgggctgaacctccggcccatgtgcgacccgtcggaggtgtcctacaccctgatgcccaacatgtgctacttcgagttcctgccgatgggcggcgccgtcgacgcgagccagctggtggacctcggccgcgtggagcgcgggcgcgagtacgagctggtgatcaccacgtacgcggggctgaaccggtaccgcgtcggcgacgtgctccaggtgaccggcttccacaactcggcgccgcagttccggttcgtgcgccgcaagaacgtgctgctgtccatcgagtcggacaagacggacgaggccgagctgcagcgcgccgtggagcgcgcgtccgcgctgctccgcccgcacggcgccgccgtggtggagtacaccagccaggcctacaccaagagcatcccgggccactacgtcgtctactgggagctcctgcaggccaaggggggcgccgcggtggacggggagacgctggaagggtgctgcctcgagatggaggaggcgctgaacgcggtgtacaggcagagccgcgtggccgacggctccatcggcccgctggagatccgggtggtccggccgggcaccttcgaggagctcatggactacgccatctcccgcggcgcgtcgatcaaccagtacaaggtgccccggtgcgtgacgttcccgcccatcatcgagctcctggactcccgcgtcgtgtccagccacttgagccccgcgctgccgcactggaccgccggccagcgctccggctccggctccggctccgactagacacagcggcagggcggcgaggcgtgtccgtgtccaggcgcgcttaattagactgtggaaatcatctgctgcgtgtcgcagacgtagaagaatgcccgtgaaaacttaaatactatttgttaattttggagttttg

SEQ ID NO: 30132 - protein, 391 aa, Zea mays subsp. mays
  peptide (1)..(391): Ceres Seq. ID no. 12405400
  misc_feature (1)..(361): Pfam Name: Pfam Description:  GH3 auxin-responsive promoter
  misc_feature (1)..(383): NCBI GI NO: 15226032 NR Description: putative auxin-regulated protein
  misc_feature (1)..(383): NCBI GI NO: 4887010 NR Description: Nt-gh3 deduced protein [Nicotiana tabacum]
  misc_feature (1)..(383): NCBI GI NO: 15227787 NR Description: unknown protein; protein id: At2g23170
  misc_feature (1)..(379): NCBI GI NO: 34909816 NR Description: putative auxin-responsive GH3 protein
  misc_feature (1)..(383): NCBI GI NO: 15235538 NR Description: auxin-responsive GH3 - like protein
  misc_feature (1)..(383): NCBI GI NO: 99921 NR Description: auxin-regulated protein GH3 - soybean
  misc_feature (1)..(383): NCBI GI NO: 15218026 NR Description: auxin-regulated protein GH3, putative
  misc_feature (1)..(386): NCBI GI NO: 15239653 NR Description: auxin-responsive-like protein
  misc_feature (1)..(386): NCBI GI NO: 17978966 NR Description: AT5g54510/F24B18_13 [Arabidopsis thaliana]
  misc_feature (1)..(386): NCBI GI NO: 15237038 NR Description: GH3 like protein; protein id: At4g27260
MYAQMVCGLCQRQDVLRVGAVFASGLLRAIRFLQLNWEQLAEDIEAGSLTPRVTDPSVREAVAGILRPDPAVAELVRSECSGGDWAGIVTRIWPNTKYLDVIVTGAMAQYIPTLKHYSGGLPMACTMYASSECYFGLNLRPMCDPSEVSYTLMPNMCYFEFLPMGGAVDASQLVDLGRVERGREYELVITTYAGLNRYRVGDVLQVTGFHNSAPQFRFVRRKNVLLSIESDKTDEAELQRAVERASALLRPHGAAVVEYTSQAYTKSIPGHYVVYWELLQAKGGAAVDGETLEGCCLEMEEALNAVYRQSRVADGSIGPLEIRVVRPGTFEELMDYAISRGASINQYKVPRCVTFPPIIELLDSRVVSSHLSPALPHWTAGQRSGSGSGSD

SEQ ID NO: 30133 - protein, 387 aa, Zea mays subsp. mays
  peptide (1)..(387): Ceres Seq. ID no. 12405401
  misc_feature (1)..(357): Pfam Name: Pfam Description:  GH3 auxin-responsive promoter
  misc_feature (1)..(379): NCBI GI NO: 15226032 NR Description: putative auxin-regulated protein
  misc_feature (1)..(379): NCBI GI NO: 4887010 NR Description: Nt-gh3 deduced protein [Nicotiana tabacum]
  misc_feature (1)..(379): NCBI GI NO: 15227787 NR Description: unknown protein; protein id: At2g23170
  misc_feature (1)..(375): NCBI GI NO: 34909816 NR Description: putative auxin-responsive GH3 protein
  misc_feature (1)..(379): NCBI GI NO: 15235538 NR Description: auxin-responsive GH3 - like protein
  misc_feature (1)..(379): NCBI GI NO: 99921 NR Description: auxin-regulated protein GH3 - soybean
  misc_feature (1)..(379): NCBI GI NO: 15218026 NR Description: auxin-regulated protein GH3, putative
  misc_feature (1)..(382): NCBI GI NO: 15239653 NR Description: auxin-responsive-like protein
  misc_feature (1)..(382): NCBI GI NO: 17978966 NR Description: AT5g54510/F24B18_13 [Arabidopsis thaliana]
  misc_feature (1)..(382): NCBI GI NO: 15237038 NR Description: GH3 like protein; protein id: At4g27260
MVCGLCQRQDVLRVGAVFASGLLRAIRFLQLNWEQLAEDIEAGSLTPRVTDPSVREAVAGILRPDPAVAELVRSECSGGDWAGIVTRIWPNTKYLDVIVTGAMAQYIPTLKHYSGGLPMACTMYASSECYFGLNLRPMCDPSEVSYTLMPNMCYFEFLPMGGAVDASQLVDLGRVERGREYELVITTYAGLNRYRVGDVLQVTGFHNSAPQFRFVRRKNVLLSIESDKTDEAELQRAVERASALLRPHGAAVVEYTSQAYTKSIPGHYVVYWELLQAKGGAAVDGETLEGCCLEMEEALNAVYRQSRVADGSIGPLEIRVVRPGTFEELMDYAISRGASINQYKVPRCVTFPPIIELLDSRVVSSHLSPALPHWTAGQRSGSGSGSD

SEQ ID NO: 30134 - protein, 285 aa, Zea mays subsp. mays
  peptide (1)..(285): Ceres Seq. ID no. 12405402
  misc_feature (1)..(255): Pfam Name: Pfam Description:  GH3 auxin-responsive promoter
  misc_feature (1)..(277): NCBI GI NO: 15226032 NR Description: putative auxin-regulated protein
  misc_feature (1)..(277): NCBI GI NO: 4887010 NR Description: Nt-gh3 deduced protein [Nicotiana tabacum]
  misc_feature (1)..(277): NCBI GI NO: 15227787 NR Description: unknown protein; protein id: At2g23170
  misc_feature (1)..(273): NCBI GI NO: 34909816 NR Description: putative auxin-responsive GH3 protein
  misc_feature (1)..(277): NCBI GI NO: 15235538 NR Description: auxin-responsive GH3 - like protein
  misc_feature (1)..(277): NCBI GI NO: 99921 NR Description: auxin-regulated protein GH3 - soybean
  misc_feature (1)..(277): NCBI GI NO: 15218026 NR Description: auxin-regulated protein GH3, putative
  misc_feature (1)..(280): NCBI GI NO: 15239653 NR Description: auxin-responsive-like protein
  misc_feature (1)..(280): NCBI GI NO: 17978966 NR Description: AT5g54510/F24B18_13 [Arabidopsis thaliana]
  misc_feature (1)..(280): NCBI GI NO: 15237038 NR Description: GH3 like protein; protein id: At4g27260
MAQYIPTLKHYSGGLPMACTMYASSECYFGLNLRPMCDPSEVSYTLMPNMCYFEFLPMGGAVDASQLVDLGRVERGREYELVITTYAGLNRYRVGDVLQVTGFHNSAPQFRFVRRKNVLLSIESDKTDEAELQRAVERASALLRPHGAAVVEYTSQAYTKSIPGHYVVYWELLQAKGGAAVDGETLEGCCLEMEEALNAVYRQSRVADGSIGPLEIRVVRPGTFEELMDYAISRGASINQYKVPRCVTFPPIIELLDSRVVSSHLSPALPHWTAGQRSGSGSGSD

SEQ ID NO: 30135 - DNA, 1343 bp, Zea mays subsp. mays
  misc_feature (1)..(1343): Ceres Seq. ID no. 12405393
aaccaaagctagctactttgttgctgtttttattcgtttgtcacataagcagtggtggtcggtcggccggcgacaatgagcggccgtgtgttcgtcctggccgctgccttcggcgtgctgctcgccgcagccgccgtgtcctcgaggcccgtcctgactccgctgggtactagccgccctgctgccggcgacctgtccgtgtacttccacgcggactcgtgcccgcagctggagacgatcgtgcggtccagcgtggacgcgggcgctccagcagaacgtccgtctgacggcgggtctcctccgcctcttgttccacgactgcttcccgcagggctgcgacgcgtccatcctcctggacaacggcgagcgcggcctcccgcccaacgtggggctgcagcaggaggccgtgcagctggtggaggacatccgcgggaaggtgcacgcggcgtgcgggcccaccgtgtcgtgcgccgacatcacggtgctggccacccgcgacgccgtgagcctgtccggcgggccttccttcacggtgccgctggggcggctggacagcgcggcgccggcgtccagcaacgacgtgttcacgctgccgccgccgacggcgacggtggacgagctgctgacggcgttcgggagcaagaacctgtcggacccggcggacctggtggcgctgtcgggcgcgcacacggtggggaaggcgcggtgcagctcgttcggcgacgtggcgggcccggccaccgacgacgtgacgcggtgcgtgacggcgacgtgctcggcccccgggagcggcgacacgctgcgggacctggacttcctgacgcccgccgtgttcgacaacctctacttcgtggagctgacgctgaggaagaacaagggggtgatgctgccgtcggaccaagggctggtgagcgacccgcgcacgagctggctcgtccagggcttcgccgacaaccactggtggttcttcgaccagttcaggacctccatgatcaagatgagccagctcaggggaccccaggggaacgtcggcgagatccgccgtaactgcttccgccccaacaccaacggcatcgccgcctctgcttgagttgactgaccaggcaccgatccatccgccggtgaggactcatcacttcactttcactgtgtctgtgtgtaataattaataataataaaacaacaacaacaaccccagcccgtacgtgccgtgtgaggggggcacgtggttgtgccgtcaccaccatgtcggcgtcgtccatgcatgtcgcattaccgatttttgttcatgttccgatctcatctcatcatctcgctatcaataacaattatactagtgtttt

SEQ ID NO: 30136 - protein, 323 aa, Zea mays subsp. mays
  peptide (1)..(323): Ceres Seq. ID no. 12405394
  misc_feature (4)..(67): NCBI GI NO: 5777628 NR Description: CAA303716.1 protein [Oryza sativa]
  misc_feature (8)..(67): NCBI GI NO: 38345511 NR Description: OSJNBa0039K24.14
  misc_feature (36)..(67): NCBI GI NO: 5777624 NR Description: CAA303712.1 protein [Oryza sativa]
  misc_feature (36)..(67): NCBI GI NO: 38345508 NR Description: OSJNBa0039K24.10
MSGRVFVLAAAFGVLLAAAAVSSRPVLTPLGTSRPAAGDLSVYFHADSCPQLETIVRSSVDAGAPAERPSDGGSPPPLVPRLLPAGLRRVHPPGQRRARPPAQRGAAAGGRAAGGGHPREGARGVRAHRVVRRHHGAGHPRRREPVRRAFLHGAAGAAGQRGAGVQQRRVHAAAADGDGGRAADGVREQEPVGPGGPGGAVGRAHGGEGAVQLVRRRGGPGHRRRDAVRDGDVLGPRERRHAAGPGLPDARRVRQPLLRGADAEEEQGGDAAVGPRAGERPAHELARPGLRRQPLVVLRPVQDLHDQDEPAQGTPGERRRDPP

SEQ ID NO: 30137 - DNA, 830 bp, Zea mays subsp. mays
  misc_feature (1)..(830): Ceres Seq. ID no. 12369086
accgctcttctcccgaagacccgaactccacgccacatatctctcctcttttctctcttttttctctccgtactctccccacgcaggtggcagctatggcggaggacgcccccaacgcagccgccgagggcggccagcccgctcctcccgagggatccgccgatgccgccccgttggctactgcgggcgccaaggccgcggaggcgctgctcccgtcgctcagcatctgggccgccgtcgcagcgcacgcgcgacgccgtggtgcgccgcctcgtgcagacgctcgcggcgcccagcgtcctctcccagcgctacggcgccgttccggagcccgaggccgagcgcgccgccgcggccgtcgaggccaaggccttcgcggccgcctccaagtccgccgccgccgagtccccggcctctatcgaggaggggattgaggtgctccaggcgtactccaaggaggtcagccgccgcctcctcgagctcgccaagaccaggtccgccgctgcgacggcgcccgccgaggggagcgtgcaggaggccgaggactcgtcggcgactgctccagccgccgaggaggctgccgtaaaagaggagtaaggcttcggcccgtgctttgatccaccgacagttgctgttattttggcatttggtcggaatgttattcatcgtcccccctgcatatgtttactagtatatctattgtctatctattagagattgcttgtgacaagagtgactgatgtttgttccaagaacatatatagtattaagctatatatcaaccgcgcgtccttcgcattgcaaatgtgaaggttgctcgtgtacgtttt

SEQ ID NO: 30138 - protein, 198 aa, Zea mays subsp. mays
  peptide (1)..(198): Ceres Seq. ID no. 12369087
  misc_feature (78)..(191): NCBI GI NO: 33146512 NR Description: putative MFP1 attachment factor 1
  misc_feature (78)..(192): NCBI GI NO: 26006500 NR Description: Unknown protein
  misc_feature (78)..(190): NCBI GI NO: 7546727 NR Description: MFP1 attachment factor 1 [Zea mays]
  misc_feature (50)..(182): NCBI GI NO: 7546729 NR Description: MFP1 attachment factor 1 [Glycine max]
  misc_feature (78)..(198): NCBI GI NO: 7546725 NR Description: MFP1 attachment factor 1 [Lycopersicon esculentum]
  misc_feature (78)..(172): NCBI GI NO: 37533022 NR Description: hypothetical protein
  misc_feature (78)..(176): NCBI GI NO: 7546731 NR Description: MFP1 attachment factor 1 [Canna edulis]
  misc_feature (78)..(190): NCBI GI NO: 21618109 NR Description: MFP1 attachment factor 1 [Arabidopsis thaliana]
  misc_feature (78)..(190): NCBI GI NO: 15239170 NR Description: putative protein; protein id: At5g43070
  misc_feature (78)..(192): NCBI GI NO: 18401618 NR Description: expressed protein; protein id: At1g47200
TALLPKTRTPRHISLLFSLFFLSVLSPRRWQLWRRTPPTQPPRAASPLLPRDPPMPPRWLLRAPRPRRRCSRRSASGPPSQRTRDAVVRRLVQTLAAPSVLSQRYGAVPEPEAERAAAAVEAKAFAAASKSAAAESPASIEEGIEVLQAYSKEVSRRLLELAKTRSAAATAPAEGSVQEAEDSSATAPAAEEAAVKEE

SEQ ID NO: 30139 - protein, 194 aa, Zea mays subsp. mays
  peptide (1)..(194): Ceres Seq. ID no. 12369088
  misc_feature (91)..(194): Pfam Name: Pfam Description:  Cupin
  misc_feature (23)..(194): NCBI GI NO: 25989119 NR Description: unknown [Streptomyces aureofaciens]
  misc_feature (98)..(194): NCBI GI NO: 6523547 NR Description: hydroxyproline-rich glycoprotein DZ-HRGP
  misc_feature (98)..(194): NCBI GI NO: 14253159 NR Description: VMP3 protein [Volvox carteri f. nagariensis]
  misc_feature (80)..(192): NCBI GI NO: 17506453 NR Description: AT4g02720 T10P11 1 like (59.0 kD)
  misc_feature (98)..(194): NCBI GI NO: 6523547 NR Description: hydroxyproline-rich glycoprotein DZ-HRGP
  misc_feature (62)..(191): NCBI GI NO: 21234143 NR Description: putative integral membrane protein
  misc_feature (37)..(183): NCBI GI NO: 141449 NR Description: Hypothetical 35.5 kDa protein in transposon TN4556
  misc_feature (84)..(190): NCBI GI NO: 5305335 NR Description: proline-rich mucin homolog
  misc_feature (98)..(182): NCBI GI NO: 6523547 NR Description: hydroxyproline-rich glycoprotein DZ-HRGP
  misc_feature (113)..(194): NCBI GI NO: 22330241 NR Description: similar to extensin-like protein
PLFSRRPELHATYLSSFLSFFSPYSPHAGGSYGGGRPQRSRRGRPARSSRGIRRCRPVGYCGRQGRGGAAPVAQHLGRRRSARATPWCAASCRRSRRPASSPSATAPFRSPRPSAPPRPSRPRPSRPPPSPPPPSPRPLSRRGLRCSRRTPRRSAAASSSSPRPGPPLRRRPPRGACRRPRTRRRLLQPPRRLP

SEQ ID NO: 30140 - protein, 144 aa, Zea mays subsp. mays
  peptide (1)..(144): Ceres Seq. ID no. 12369089
  misc_feature (24)..(137): NCBI GI NO: 33146512 NR Description: putative MFP1 attachment factor 1
  misc_feature (24)..(138): NCBI GI NO: 26006500 NR Description: Unknown protein
  misc_feature (24)..(136): NCBI GI NO: 7546727 NR Description: MFP1 attachment factor 1 [Zea mays]
  misc_feature (1)..(128): NCBI GI NO: 7546729 NR Description: MFP1 attachment factor 1 [Glycine max]
  misc_feature (24)..(144): NCBI GI NO: 7546725 NR Description: MFP1 attachment factor 1 [Lycopersicon esculentum]
  misc_feature (24)..(118): NCBI GI NO: 37533022 NR Description: hypothetical protein
  misc_feature (24)..(122): NCBI GI NO: 7546731 NR Description: MFP1 attachment factor 1 [Canna edulis]
  misc_feature (24)..(136): NCBI GI NO: 21618109 NR Description: MFP1 attachment factor 1 [Arabidopsis thaliana]
  misc_feature (24)..(136): NCBI GI NO: 15239170 NR Description: putative protein; protein id: At5g43070
  misc_feature (24)..(138): NCBI GI NO: 18401618 NR Description: expressed protein; protein id: At1g47200
MPPRWLLRAPRPRRRCSRRSASGPPSQRTRDAVVRRLVQTLAAPSVLSQRYGAVPEPEAERAAAAVEAKAFAAASKSAAAESPASIEEGIEVLQAYSKEVSRRLLELAKTRSAAATAPAEGSVQEAEDSSATAPAAEEAAVKEE

SEQ ID NO: 30141 - DNA, 1566 bp, Zea mays subsp. mays
  misc_feature (1)..(1566): Ceres Seq. ID no. 12405381
aatacttcgatagtaactgtttgtgtgggaaattactaaaaacactttttgtttgtgtgggaaagaagaaaaaaagaactaacgttaaaggcggcttgtgttgtggcgcagggcaccagcagcagtgggcgctccccttcgccggctccttgcaggtcagtccgccgccgcagcaggcgcaaccggataggaagggccgcggcggaggcggggtcatggattcaggctccagatccagcggcggagccgggttcgacgacgaagacggcctcaccacgcgccgcgaggtctcctcctcgctccaagatttggcagtaagggtggattggaagggtgggagctgcagcgatggcggtacaaatcaggggccaaacacaccacggtcaaaacactcggccacagagcagcgcagacgcagcaagatcaatgataggtttcagatacttagggagctgttgccacacaatgatcaaaagagagacaaagcaacatttctcttggaggttattgaatatatacgttttttgcaagagaaagcgcaaaaatacgaggcaacattcccagaatggaaccaagaaaatccaacgatgcttccgtggagtaaaggccaaatcccaggagattccccgcctgacccttcacatttcgtgagaaatggatcctcccctggatctaatttcactgggaaactcgatgataatcacacatctgcagctgcatcaggggcactggaccaggcagaaactaatcacgtggctagcggctgctacagatcatcagaaactccggcgaatattacaaataatgctatatctcagtcccaacctcaatggacaggtccgtcccctgtggatgactctgcagtgaaaagtgaaatgcttaacagccaggagttggcaatagatgaaggaatgatcagtgtgtccagtacctattcccaagagttacttatctcgttgtctcacgcccttcagagctcaggtgtggatctgtcccaaaccagcatctctgtgcagatcaacctgggaaagcgtgctggcaagagatctgcatctgctggtggtgtatcctccaactccaaggaaccaccagccgatccagcatctagtaacgaactaggcggccatcacgtgacaacgttgggagctagcgctgacggtctcctcccccacgcgacgaaacggcataaacgggacaacagctgatgatgggcctctctcactccgcctcgttcccagacgacagacggattgatcattcttttttttttctcccagcccgacgggaggctctctcttggattggttgcacatcgcgtgctcggtgatgggctgagaccccggctgtattctttttgatttgatcgctcccgccgccatcccctgtctagcccattgtttttacgtagaggaacgaaccgtggagcttcccattgcggattgtgaagccgctcttcttgtacacaggcttccattcatctgagaagcttcttcccctccttgaacaggtctctccgcgttttagacctgtatactagcaacctgtaagatatgattatgatgtccc

SEQ ID NO: 30142 - protein, 400 aa, Zea mays subsp. mays
  peptide (1)..(400): Ceres Seq. ID no. 12405382
  misc_feature (126)..(176): Pfam Name: Pfam Description:  Helix-loop-helix DNA-binding domain
  misc_feature (72)..(347): NCBI GI NO: 21555388 NR Description: putative DNA-binding protein
  misc_feature (116)..(347): NCBI GI NO: 15221582 NR Description: putative DNA-binding protein; protein id:At1g69010
  misc_feature (74)..(349): NCBI GI NO: 30682248 NR Description: bHLH protein family [Arabidopsis thaliana]
  misc_feature (74)..(349): NCBI GI NO: 11358566 NR Description: myc-like protein - Arabidopsis thaliana
  misc_feature (113)..(397): NCBI GI NO: 9758063 NR Description: DNA-binding protein-like [Arabidopsis thaliana]
  misc_feature (113)..(236): NCBI GI NO: 15241563 NR Description: putative protein; protein id: At5g38860.1
  misc_feature (293)..(397): NCBI GI NO: 15241563 NR Description: putative protein; protein id: At5g38860.1
  misc_feature (173)..(347): NCBI GI NO: 19310568 NR Description: putative DNA-binding protein
  misc_feature (53)..(178): NCBI GI NO: 34907076 NR Description: OSJNBa0093F16.27
YFDSNCLCGKLLKTLFVCVGKKKKRTNVKGGLCCGAGHQQQWALPFAGSLQVSPPPQQAQPDRKGRGGGGVMDSGSRSSGGAGFDDEDGLTTRREVSSSLQDLAVRVDWKGGSCSDGGTNQGPNTPRSKHSATEQRRRSKINDRFQILRELLPHNDQKRDKATFLLEVIEYIRFLQEKAQKYEATFPEWNQENPTMLPWSKGQIPGDSPPDPSHFVRNGSSPGSNFTGKLDDNHTSAAASGALDQAETNHVASGCYRSSETPANITNNAISQSQPQWTGPSPVDDSAVKSEMLNSQELAIDEGMISVSSTYSQELLISLSHALQSSGVDLSQTSISVQINLGKRAGKRSASAGGVSSNSKEPPADPASSNELGGHHVTTLGASADGLLPHATKRHKRDNS

SEQ ID NO: 30143 - protein, 329 aa, Zea mays subsp. mays
  peptide (1)..(329): Ceres Seq. ID no. 12405383
  misc_feature (55)..(105): Pfam Name: Pfam Description:  Helix-loop-helix DNA-binding domain
  misc_feature (1)..(276): NCBI GI NO: 21555388 NR Description: putative DNA-binding protein
  misc_feature (45)..(276): NCBI GI NO: 15221582 NR Description: putative DNA-binding protein; protein id:At1g69010
  misc_feature (3)..(278): NCBI GI NO: 30682248 NR Description: bHLH protein family [Arabidopsis thaliana]
  misc_feature (3)..(278): NCBI GI NO: 11358566 NR Description: myc-like protein - Arabidopsis thaliana
  misc_feature (42)..(326): NCBI GI NO: 9758063 NR Description: DNA-binding protein-like [Arabidopsis thaliana]
  misc_feature (42)..(165): NCBI GI NO: 15241563 NR Description: putative protein; protein id: At5g38860.1
  misc_feature (222)..(326): NCBI GI NO: 15241563 NR Description: putative protein; protein id: At5g38860.1
  misc_feature (102)..(276): NCBI GI NO: 19310568 NR Description: putative DNA-binding protein
  misc_feature (1)..(107): NCBI GI NO: 34907076 NR Description: OSJNBa0093F16.27
MDSGSRSSGGAGFDDEDGLTTRREVSSSLQDLAVRVDWKGGSCSDGGTNQGPNTPRSKHSATEQRRRSKINDRFQILRELLPHNDQKRDKATFLLEVIEYIRFLQEKAQKYEATFPEWNQENPTMLPWSKGQIPGDSPPDPSHFVRNGSSPGSNFTGKLDDNHTSAAASGALDQAETNHVASGCYRSSETPANITNNAISQSQPQWTGPSPVDDSAVKSEMLNSQELAIDEGMISVSSTYSQELLISLSHALQSSGVDLSQTSISVQINLGKRAGKRSASAGGVSSNSKEPPADPASSNELGGHHVTTLGASADGLLPHATKRHKRDNS

SEQ ID NO: 30144 - protein, 205 aa, Zea mays subsp. mays
  peptide (1)..(205): Ceres Seq. ID no. 12405384
  misc_feature (1)..(152): NCBI GI NO: 21555388 NR Description: putative DNA-binding protein
  misc_feature (1)..(152): NCBI GI NO: 15221582 NR Description: putative DNA-binding protein; protein id:At1g69010
  misc_feature (1)..(154): NCBI GI NO: 30682248 NR Description: bHLH protein family [Arabidopsis thaliana]
  misc_feature (1)..(154): NCBI GI NO: 11358566 NR Description: myc-like protein - Arabidopsis thaliana
  misc_feature (1)..(202): NCBI GI NO: 9758063 NR Description: DNA-binding protein-like [Arabidopsis thaliana]
  misc_feature (1)..(41): NCBI GI NO: 15241563 NR Description: putative protein; protein id: At5g38860.1
  misc_feature (98)..(202): NCBI GI NO: 15241563 NR Description: putative protein; protein id: At5g38860.1
  misc_feature (1)..(152): NCBI GI NO: 19310568 NR Description: putative DNA-binding protein
MLPWSKGQIPGDSPPDPSHFVRNGSSPGSNFTGKLDDNHTSAAASGALDQAETNHVASGCYRSSETPANITNNAISQSQPQWTGPSPVDDSAVKSEMLNSQELAIDEGMISVSSTYSQELLISLSHALQSSGVDLSQTSISVQINLGKRAGKRSASAGGVSSNSKEPPADPASSNELGGHHVTTLGASADGLLPHATKRHKRDNS

SEQ ID NO: 30145 - DNA, 800 bp, Zea mays subsp. mays
  misc_feature (1)..(800): Ceres Seq. ID no. 12348080
acgttctgtcgttctcgcttgaggcggcccgcggccttctcgaagccctccctcgctccgtgctcgtggctcccgcacgatccccacattccttggccggctccgcgctcgtgctctcgttgggatcgttgtcagttcagtggaaatgcattcttcggcaatgccacacccagtgatcagaggcacattgagaagccttttaaagtgaaggaggcagaacctgtgaatgtgacaaaaccttcaccacacaagctgctggttctaggaggaagtggtttcgttggatcacacgtttgcaaagaggctttggacaaaggtttagttgtctctagtcttaatagatcgggaaagccatccttaaatgaaccttgggctgacaaagttatatggaaccaaggcaacctccttgaaccagcttcattgaaggatgctatggataatgtttctgcagtggtatcttgtgtcggaggttttggatcaaattcattcatgtataagattaatgggactgcaaacatcaatggccatcagggctgcagctgagaaaggtgtaaagagatttgtatatgtgtcagctgcagactttggattagtgaattatttattgcaaggctattacgagggcatagggcttctgaagctgaattgttgtcaaagtttacatatggaggttgataaatggattaatggaaaaggtcgctgacatcgcaccaaggctgatctgcaccatatctaaaagaattatcaacaaaagaacagtgcaagaggctatggtcaataggagatggattggtgatatt

SEQ ID NO: 30146 - protein, 180 aa, Zea mays subsp. mays
  peptide (1)..(180): Ceres Seq. ID no. 12348081
  misc_feature (53)..(180): NCBI GI NO: 18416362 NR Description: putative protein; protein id: At5g10730
  misc_feature (53)..(180): NCBI GI NO: 10129651 NR Description: putative protein [Arabidopsis thaliana]
  misc_feature (83)..(180): NCBI GI NO: 18417824 NR Description: putative protein; protein id: At5g15910
  misc_feature (83)..(180): NCBI GI NO: 21592373 NR Description: unknown [Arabidopsis thaliana]
  misc_feature (7)..(180): NCBI GI NO: 38346147 NR Description: OSJNBb0118P14.7
  misc_feature (74)..(180): NCBI GI NO: 18398333 NR Description: expressed protein; protein id: At1g32220
  misc_feature (84)..(163): NCBI GI NO: 19076008 NR Description: hypothetical protein [Schizosaccharomyces pombe]
  misc_feature (84)..(156): NCBI GI NO: 40745869 NR Description: hypothetical protein AN1860.2
  misc_feature (84)..(156): NCBI GI NO: 6323321 NR Description: Hypothetical ORF; Ylr290cp
TFCRSRLRRPAAFSKPSLAPCSWLPHDPHIPWPAPRSCSRWDRCQFSGNAFFGNATPSDQRHIEKPFKVKEAEPVNVTKPSPHKLLVLGGSGFVGSHVCKEALDKGLVVSSLNRSGKPSLNEPWADKVIWNQGNLLEPASLKDAMDNVSAVVSCVGGFGSNSFMYKINGTANINGHQGCS

SEQ ID NO: 30147 - protein, 91 aa, Zea mays subsp. mays
  peptide (1)..(91): Ceres Seq. ID no. 12348082
  misc_feature (23)..(66): NCBI GI NO: 11346175 NR Description: hypothetical protein F1N13_50 - Arabidopsisthaliana
MLWIMFLQWYLVSEVLDQIHSCIRLMGLQTSMAIRAAAEKGVKRFVYVSAADFGLVNYLLQGYYEGIGLLKLNCCQSLHMEVDKWINGKGR

SEQ ID NO: 30148 - DNA, 1606 bp, Zea mays subsp. mays
  misc_feature (1)..(1606): Ceres Seq. ID no. 12408467
acgagaagggcaccgatctgggaaggcattgtcttgttgtactttcccttccggcagtggcctcgattcgcatccccttttcccgtccatgcgcgcgccggcgggcggtgccagtgccagtgccaccgcgctcgcggcggccatgaacattaagcagccgctgcacggcgcatcgacgctgttcgcgctgctctccctctcgctgctcctcctccgcctgctcctccgcctccgcctggcggccttccgcgacgcggcgctgtcgctccacctgctggcgcgcctccgcttccgccccgtcctcctctgcctcccgtcagcctgccacgacggcggcgccggcgccaccacgctgcgcgtctggtgccccgccgccccatcctccaagccgccgctgctcctcctccacggcttcggcggggacgccaagtggacgtgggcgcgcaacctcccgcgcctgtcccgccacttccacgtgtacgcgccggacctcgtgttcttcggcgcgcagtcccggtccgcgtcgccgctgcgctccgtggcgttccaggcccgctgcgccgccgaggccatgcgcctcctcggcgtgccccgctacgacgtcgcggggatcagctacggcggcttcgtcgcctaccggatggccgccgccgaggccagggacgccgtgggcaggctcgtcatcatgaccaccggcgtcgcggccacgcccggggagatgcgggcgatggcggcgcgcgaggaccgcaccgtcgaggatgcgctgctgccggacaccgccgaggggctgcgcttcctcgtaagacgctccatgcatcgccccccgccttggatgccggacttcgtgcttgacgacttcatccagctcatgtacgtggaccagaaaagggagagggcagagttgctgcacgaacttctcaagaccggagctggcttcgaccccctgccggttcttacccaggaaacactgatcatctggggcgacaaagaccaggtgttccccgtcgacctcggccacaggctgcacaggcttctgggcgagaggtccaggctagagatcgtcagggacgcagggcacgcgctgcagctggagggcgccgaccacgtcaaccgctccatcaagtcgttcctcctggacgagcgggtcggcccgggagccggcgcgggccgcaagtaggacgaggccttctcccgtccaggcccacaagcaaacggaggcctgctcgcagtcgcaggtgcctgcgtacttgcgttgcagagctgcaatgcaacagtgccaacgccagctgtagttaagcagcggagcggcaatgacctgcacgcacgcagacgcccccaccgccccgcaatcatgcagcgctggggctactggttacataagtacagagaagcgtcgctccggactactagtttgttttgtacaataatgtctgaaagaatgagcttgtgcggccgaaattccgagagctgtcttttgtctggtgccctggcgcgcacagtctgtctctgttgtttctttaggctcagccttatgggataacgacatatttaggacagctccaacaataatttgtaagctaaattcaagcattttattttatatttc

SEQ ID NO: 30149 - protein, 391 aa, Zea mays subsp. mays
  peptide (1)..(391): Ceres Seq. ID no. 12408468
  misc_feature (157)..(288): Pfam Name: Pfam Description:  alpha/beta hydrolase fold
  misc_feature (57)..(288): NCBI GI NO: 27436747 NR Description: Hypothetical protein
  misc_feature (287)..(379): NCBI GI NO: 27436747 NR Description: Hypothetical protein
  misc_feature (77)..(376): NCBI GI NO: 33146617 NR Description: hydrolase-like protein
  misc_feature (104)..(384): NCBI GI NO: 18420566 NR Description: Expressed protein; protein id: At4g39955
  misc_feature (104)..(384): NCBI GI NO: 21536873 NR Description: putative hydrolase [Arabidopsis thaliana]
  misc_feature (98)..(382): NCBI GI NO: 37533664 NR Description: putative hydrolase
  misc_feature (109)..(379): NCBI GI NO: 15242419 NR Description: putative hydrolase; protein id: At5g09430.1
  misc_feature (98)..(384): NCBI GI NO: 27436745 NR Description: Hypothetical protein
  misc_feature (79)..(378): NCBI GI NO: 21592821 NR Description: unknown [Arabidopsis thaliana]
  misc_feature (79)..(378): NCBI GI NO: 18394481 NR Description: expressed protein; protein id: At1g17430
REGHRSGKALSCCTFPSGSGLDSHPLFPSMRAPAGGASASATALAAAMNIKQPLHGASTLFALLSLSLLLLRLLLRLRLAAFRDAALSLHLLARLRFRPVLLCLPSACHDGGAGATTLRVWCPAAPSSKPPLLLLHGFGGDAKWTWARNLPRLSRHFHVYAPDLVFFGAQSRSASPLRSVAFQARCAAEAMRLLGVPRYDVAGISYGGFVAYRMAAAEARDAVGRLVIMTTGVAATPGEMRAMAAREDRTVEDALLPDTAEGLRFLVRRSMHRPPPWMPDFVLDDFIQLMYVDQKRERAELLHELLKTGAGFDPLPVLTQETLIIWGDKDQVFPVDLGHRLHRLLGERSRLEIVRDAGHALQLEGADHVNRSIKSFLLDERVGPGAGAGRK

SEQ ID NO: 30150 - protein, 362 aa, Zea mays subsp. mays
  peptide (1)..(362): Ceres Seq. ID no. 12408469
  misc_feature (128)..(259): Pfam Name: Pfam Description:  alpha/beta hydrolase fold
  misc_feature (28)..(259): NCBI GI NO: 27436747 NR Description: Hypothetical protein
  misc_feature (258)..(350): NCBI GI NO: 27436747 NR Description: Hypothetical protein
  misc_feature (48)..(347): NCBI GI NO: 33146617 NR Description: hydrolase-like protein
  misc_feature (75)..(355): NCBI GI NO: 18420566 NR Description: Expressed protein; protein id: At4g39955
  misc_feature (75)..(355): NCBI GI NO: 21536873 NR Description: putative hydrolase [Arabidopsis thaliana]
  misc_feature (69)..(353): NCBI GI NO: 37533664 NR Description: putative hydrolase
  misc_feature (80)..(350): NCBI GI NO: 15242419 NR Description: putative hydrolase; protein id: At5g09430.1
  misc_feature (69)..(355): NCBI GI NO: 27436745 NR Description: Hypothetical protein
  misc_feature (50)..(349): NCBI GI NO: 21592821 NR Description: unknown [Arabidopsis thaliana]
  misc_feature (50)..(349): NCBI GI NO: 18394481 NR Description: expressed protein; protein id: At1g17430
MRAPAGGASASATALAAAMNIKQPLHGASTLFALLSLSLLLLRLLLRLRLAAFRDAALSLHLLARLRFRPVLLCLPSACHDGGAGATTLRVWCPAAPSSKPPLLLLHGFGGDAKWTWARNLPRLSRHFHVYAPDLVFFGAQSRSASPLRSVAFQARCAAEAMRLLGVPRYDVAGISYGGFVAYRMAAAEARDAVGRLVIMTTGVAATPGEMRAMAAREDRTVEDALLPDTAEGLRFLVRRSMHRPPPWMPDFVLDDFIQLMYVDQKRERAELLHELLKTGAGFDPLPVLTQETLIIWGDKDQVFPVDLGHRLHRLLGERSRLEIVRDAGHALQLEGADHVNRSIKSFLLDERVGPGAGAGRK

SEQ ID NO: 30151 - protein, 344 aa, Zea mays subsp. mays
  peptide (1)..(344): Ceres Seq. ID no. 12408470
  misc_feature (110)..(241): Pfam Name: Pfam Description:  alpha/beta hydrolase fold
  misc_feature (10)..(241): NCBI GI NO: 27436747 NR Description: Hypothetical protein
  misc_feature (240)..(332): NCBI GI NO: 27436747 NR Description: Hypothetical protein
  misc_feature (30)..(329): NCBI GI NO: 33146617 NR Description: hydrolase-like protein
  misc_feature (57)..(337): NCBI GI NO: 18420566 NR Description: Expressed protein; protein id: At4g39955
  misc_feature (57)..(337): NCBI GI NO: 21536873 NR Description: putative hydrolase [Arabidopsis thaliana]
  misc_feature (51)..(335): NCBI GI NO: 37533664 NR Description: putative hydrolase
  misc_feature (62)..(332): NCBI GI NO: 15242419 NR Description: putative hydrolase; protein id: At5g09430.1
  misc_feature (51)..(337): NCBI GI NO: 27436745 NR Description: Hypothetical protein
  misc_feature (32)..(331): NCBI GI NO: 21592821 NR Description: unknown [Arabidopsis thaliana]
  misc_feature (32)..(331): NCBI GI NO: 18394481 NR Description: expressed protein; protein id: At1g17430
MNIKQPLHGASTLFALLSLSLLLLRLLLRLRLAAFRDAALSLHLLARLRFRPVLLCLPSACHDGGAGATTLRVWCPAAPSSKPPLLLLHGFGGDAKWTWARNLPRLSRHFHVYAPDLVFFGAQSRSASPLRSVAFQARCAAEAMRLLGVPRYDVAGISYGGFVAYRMAAAEARDAVGRLVIMTTGVAATPGEMRAMAAREDRTVEDALLPDTAEGLRFLVRRSMHRPPPWMPDFVLDDFIQLMYVDQKRERAELLHELLKTGAGFDPLPVLTQETLIIWGDKDQVFPVDLGHRLHRLLGERSRLEIVRDAGHALQLEGADHVNRSIKSFLLDERVGPGAGAGRK

SEQ ID NO: 30152 - DNA, 1182 bp, Zea mays subsp. mays
  misc_feature (1)..(1182): Ceres Seq. ID no. 12352605
aacctgtgcttccttccgtcgtcttcctgcctcctcttctgttcaccgctctggcgctctcctatactcttctctctctctcgctgaggcaggcggggggcagcctttcctccccggtcgccatcctcgtttatatacacacaccctctcttgccgaaccactgctcgcttctctgcctgcttctgcttgagtcgtgccagtgacccgtgaccgtgaccgcgagcttcagggacgcgggcggcggcgatcatggcgtggcgcggcccgctcggagccggagaggaggccctggacagcggcctcgagctcagcctcggcctcccggcatacttcgcccggccttcaggtttggacgccgccagggaggagcccgccgaggcctctgtctacgctatccaggccgccagtgggagcaatgtctccaaggcaagggtcaggccagcgggcgcggcgccggtggtggggtggccgccggtgcggtcgttccggaggaacctggccgcctcctcctccaggccgtcgtcggggaaacacacccgccaggagggcagcgccaaggacggcctgttcgtgaagatcaacatggacggcgtgccgatcaggcgcaaggtggacctcacggcgtacggcggctacgccgacctctccgccgccgtcggcaagctcttccgcggcctgcttgccgctcagagggaccgagcggccacggcgggtggcgaggaggaggaggagggggagggccccgtgatcggcggcgactacacgctggtgtacgaggacgacgagggcgacagggtccttgccggcgacgtcccctgggagatgttcgtggccaccgccaagaggctgcgcgtgctcaagagctccgacgtgccggcctcgtcggtgacgctgggagctgggggcccggagaggtctgcagccgactgctgctgctgaaacgtgctctgcttcgtcagctgcttgtaaaaagtcccgagtggaggagacgaggagtggccctatccctggcctcttttttgtgtgttgctcttgctgcctttctgctagtggtactagtattgggtgccagtaaaaagtaggagaacaaagtcatgacggtattaaggatgtaatgtgcaagattagcagtggtagtagtcgtaaggtgtttaatgaatctacggtctctgttttggggc

SEQ ID NO: 30153 - protein, 229 aa, Zea mays subsp. mays
  peptide (1)..(229): Ceres Seq. ID no. 12352606
  misc_feature (19)..(209): Pfam Name: Pfam Description:  AUX/IAA family
  misc_feature (1)..(226): NCBI GI NO: 34906394 NR Description: P0710E05.9
  misc_feature (99)..(222): NCBI GI NO: 15218080 NR Description: auxin regulated protein IAA18, putative
  misc_feature (18)..(100): NCBI GI NO: 15218080 NR Description: auxin regulated protein IAA18, putative
  misc_feature (99)..(222): NCBI GI NO: 21594025 NR Description: auxin regulated protein IAA18, putative
  misc_feature (18)..(100): NCBI GI NO: 21594025 NR Description: auxin regulated protein IAA18, putative
  misc_feature (50)..(222): NCBI GI NO: 4093155 NR Description: phytochrome-associated protein 1
  misc_feature (50)..(222): NCBI GI NO: 21593333 NR Description: phytochrome-associated protein 1 (PAP1)
  misc_feature (50)..(222): NCBI GI NO: 15228226 NR Description: phytochrome-associated protein 1
  misc_feature (18)..(222): NCBI GI NO: 25296228 NR Description: auxin-induced protein IAA18
  misc_feature (54)..(217): NCBI GI NO: 34909384 NR Description: putative phytochrome-associated protein
MAWRGPLGAGEEALDSGLELSLGLPAYFARPSGLDAAREEPAEASVYAIQAASGSNVSKARVRPAGAAPVVGWPPVRSFRRNLAASSSRPSSGKHTRQEGSAKDGLFVKINMDGVPIRRKVDLTAYGGYADLSAAVGKLFRGLLAAQRDRAATAGGEEEEEGEGPVIGGDYTLVYEDDEGDRVLAGDVPWEMFVATAKRLRVLKSSDVPASSVTLGAGGPERSAADCCC

SEQ ID NO: 30154 - protein, 118 aa, Zea mays subsp. mays
  peptide (1)..(118): Ceres Seq. ID no. 12352607
  misc_feature (1)..(98): Pfam Name: Pfam Description:  AUX/IAA family
  misc_feature (1)..(115): NCBI GI NO: 34906394 NR Description: P0710E05.9
  misc_feature (1)..(111): NCBI GI NO: 15218080 NR Description: auxin regulated protein IAA18, putative
  misc_feature (1)..(111): NCBI GI NO: 21594025 NR Description: auxin regulated protein IAA18, putative
  misc_feature (1)..(111): NCBI GI NO: 4093155 NR Description: phytochrome-associated protein 1
  misc_feature (1)..(111): NCBI GI NO: 21593333 NR Description: phytochrome-associated protein 1 (PAP1)
  misc_feature (1)..(111): NCBI GI NO: 15228226 NR Description: phytochrome-associated protein 1
  misc_feature (1)..(111): NCBI GI NO: 25296228 NR Description: auxin-induced protein IAA18
  misc_feature (1)..(106): NCBI GI NO: 34909384 NR Description: putative phytochrome-associated protein
  misc_feature (1)..(96): NCBI GI NO: 20269051 NR Description: aux/IAA protein
  misc_feature (1)..(96): NCBI GI NO: 29465672 NR Description: Aux/IAA protein [Vitis vinifera]
MDGVPIRRKVDLTAYGGYADLSAAVGKLFRGLLAAQRDRAATAGGEEEEEGEGPVIGGDYTLVYEDDEGDRVLAGDVPWEMFVATAKRLRVLKSSDVPASSVTLGAGGPERSAADCCC

SEQ ID NO: 30155 - DNA, 469 bp, Zea mays subsp. mays
  misc_feature (1)..(469): Ceres Seq. ID no. 1439681
ctcggtaaggaatccccttttaagggttgctcgggttcctcttcctgctgcgattcatcccgttcttgccccctacggttcaccccggagcgcgtttcctggtcaactaaggccggcatgaagggctgctcagagcgcttgctgtttctgctgctgctgctggcatcgtcgtcgttactgtccgctgtgattgccgcgcasagaacttgccccgccgacctcgacagcaaatgcgatggtggcgcgtctgatgatgattgggagggggagttcttccccggcgtcccgaaaatcaagtatgagggtccaacaagcaagaaccctcttgcttataagtggtataacaaggaggaagtgattctcggtaagaagatgaaggattggatgcgcttcagtgttgcgttctggcacacgttccgcggtactggcgctgatcctttcggtgctcctacaaakacttggccttggg

SEQ ID NO: 30156 - protein, 156 aa, Zea mays subsp. mays
  peptide (1)..(156): Ceres Seq. ID no. 1439682
  misc_feature (50)..(155): NCBI GI NO: 34395196 NR Description: putative xylose isomerase
  misc_feature (50)..(155): NCBI GI NO: 34899308 NR Description: putative xylose isomerase
  misc_feature (50)..(155): NCBI GI NO: 2130051 NR Description: xylose isomerase (EC 5.3.1.5) - barley
  misc_feature (50)..(155): NCBI GI NO: 6175480 NR Description: Xylose isomerase
  misc_feature (45)..(155): NCBI GI NO: 17433690 NR Description: Xylose isomerase
  misc_feature (45)..(155): NCBI GI NO: 30696901 NR Description: expressed protein [Arabidopsis thaliana]
  misc_feature (45)..(155): NCBI GI NO: 30696904 NR Description: expressed protein [Arabidopsis thaliana]
  misc_feature (45)..(155): NCBI GI NO: 21537178 NR Description: xylose isomerase [Arabidopsis thaliana]
  misc_feature (92)..(155): NCBI GI NO: 32472084 NR Description: xylose isomerase [Pirellula sp.]
  misc_feature (90)..(155): NCBI GI NO: 139827 NR Description: Xylose isomerase
  misc_feature (67)..(67): Xaa is any aa, unknown or other
  misc_feature (152)..(152): Xaa is any aa, unknown or other
LGKESPFKGCSGSSSCCDSSRSCPLRFTPERVSWSTKAGMKGCSERLLFLLLLLASSSLLSAVIAAXRTCPADLDSKCDGGASDDDWEGEFFPGVPKIKYEGPTSKNPLAYKWYNKEEVILGKKMKDWMRFSVAFWHTFRGTGADPFGAPTXTWPW

SEQ ID NO: 30157 - protein, 117 aa, Zea mays subsp. mays
  peptide (1)..(117): Ceres Seq. ID no. 1439683
  misc_feature (11)..(116): NCBI GI NO: 34395196 NR Description: putative xylose isomerase
  misc_feature (11)..(116): NCBI GI NO: 34899308 NR Description: putative xylose isomerase
  misc_feature (11)..(116): NCBI GI NO: 2130051 NR Description: xylose isomerase (EC 5.3.1.5) - barley
  misc_feature (11)..(116): NCBI GI NO: 6175480 NR Description: Xylose isomerase
  misc_feature (6)..(116): NCBI GI NO: 17433690 NR Description: Xylose isomerase
  misc_feature (6)..(116): NCBI GI NO: 30696901 NR Description: expressed protein [Arabidopsis thaliana]
  misc_feature (6)..(116): NCBI GI NO: 30696904 NR Description: expressed protein [Arabidopsis thaliana]
  misc_feature (6)..(116): NCBI GI NO: 21537178 NR Description: xylose isomerase [Arabidopsis thaliana]
  misc_feature (53)..(116): NCBI GI NO: 32472084 NR Description: xylose isomerase [Pirellula sp.]
  misc_feature (51)..(116): NCBI GI NO: 139827 NR Description: Xylose isomerase
  misc_feature (28)..(28): Xaa is any aa, unknown or other
  misc_feature (113)..(113): Xaa is any aa, unknown or other
MKGCSERLLFLLLLLASSSLLSAVIAAXRTCPADLDSKCDGGASDDDWEGEFFPGVPKIKYEGPTSKNPLAYKWYNKEEVILGKKMKDWMRFSVAFWHTFRGTGADPFGAPTXTWPW

SEQ ID NO: 30158 - DNA, 1585 bp, Zea mays subsp. mays
  misc_feature (1)..(1585): Ceres Seq. ID no. 12408463
aacccacacatccgacgccgaggaagtaggaagcacgagcagcatatgtcacagagggccagcgtcccacactcctcctgcatagccttcgcgctccattcccatctcctggtctccagtgagatgtgccccagctcctattggcagcaatagctattctccgctttccttttttttcccccttcctttcttcccgtctggctttggtttccgtttgatcgagctggctctcagtttccgtttttagttttgttggcatctttgctctcggatccgtctctccctaactcctgaaacccaaaagggagagaagaaaccgggcaagcaagcaaccaagcgagcgatgggtgtcaagggattcgtcgagggcggcatcgcctccatcgtggccggctgctccacccacccgctggacctcatcaaggtccgcatgcagctgcagggggaggcggcggccgccgtggcgccgcagccggcgctgcgcccggcgctcgccttccacgccgggggccacgccgtcgcgctcccgcaccaccaccaccacgacatcccggcgccaccgcggaagcccgggccgctggccgtcggcgcgcagatcctgcggtccgagggcgccgcgggcctcttctcgggggtgtccgccaccatgctgcggcagacgctctactccaccacgcggatggggctgtacgacatcctcaagaccaggtgggcccgggagaacggcggcgtcctcccgctgcaccgcaagatcttggccggcctcgtcgccggcggcgtcggcgccgccgtgggcaacccggccgacgtggccatggtgcggatgcaggcggacgggcgcctgcccctcgcggagcgccggaactaccgcggcgtcggcgacgccatcggccggatggcgcgcgacgagggcgtgcgcagcctctggcgcgggtcctcgctcaccgtcaaccgcgccatgatcgtcacggcgtcgcagctggccacgtacgaccaggccaaggaggccatcctggcgcgccgcggcccgggcgccgacgggctcgccacgcacgtggccgccagcttcaccgccggcatcgtcgccgccgccgcgtccaaccccgtcgacgtcgtcaagacgaggatgatgaacatgaaggtggcgcccggcgcgcccccgccctacgccggcgccgtcgactgcgccctcaagaccgtcaggtcggagggacccatggcgctgtacaaggggttcatccccaccgtcatgcgccaggggcccttcaccgttgtgctcttcgtcacgctcgagcaggtgcgcaaggtcttcaagggcgtcgagttctgagaccggcgacgaggaaagatgatgacgacaacaaacgttgcgctgccagttcgtcaccgcgttcgctgccaagaataataacccgctgccaccctagaggccgcgactactattacgccctttgcttgcattgcatcccgtgttagacttgtgctcatgcgcttcactgcatcctgttgtatctggatggatttgaccaaatgcaaattgccaacatttttattaattaaaattgctactgcaatgtctcaaccc

SEQ ID NO: 30159 - protein, 328 aa, Zea mays subsp. mays
  peptide (1)..(328): Ceres Seq. ID no. 12408464
  misc_feature (1)..(328): NCBI GI NO: 15227225 NR Description: mitochondrial carrier protein family
  misc_feature (1)..(328): NCBI GI NO: 21554157 NR Description: putative mitochondrial dicarboxylate carrierprotein
  misc_feature (1)..(328): NCBI GI NO: 13878155 NR Description: putative mitochondrial dicarboxylate carrierprotein
  misc_feature (1)..(324): NCBI GI NO: 15233884 NR Description: mitochondrial carrier protein family
  misc_feature (1)..(328): NCBI GI NO: 15242423 NR Description: mitochondrial carrier protein family
  misc_feature (85)..(324): NCBI GI NO: 21312994 NR Description: solute carrier family 25
  misc_feature (1)..(37): NCBI GI NO: 21312994 NR Description: solute carrier family 25
  misc_feature (85)..(324): NCBI GI NO: 1580888 NR Description: 2-oxoglutarate carrier protein
  misc_feature (1)..(37): NCBI GI NO: 1580888 NR Description: 2-oxoglutarate carrier protein
  misc_feature (85)..(324): NCBI GI NO: 27807211 NR Description: solute carrier family 25
MGVKGFVEGGIASIVAGCSTHPLDLIKVRMQLQGEAAAAVAPQPALRPALAFHAGGHAVALPHHHHHDIPAPPRKPGPLAVGAQILRSEGAAGLFSGVSATMLRQTLYSTTRMGLYDILKTRWARENGGVLPLHRKILAGLVAGGVGAAVGNPADVAMVRMQADGRLPLAERRNYRGVGDAIGRMARDEGVRSLWRGSSLTVNRAMIVTASQLATYDQAKEAILARRGPGADGLATHVAASFTAGIVAAAASNPVDVVKTRMMNMKVAPGAPPPYAGAVDCALKTVRSEGPMALYKGFIPTVMRQGPFTVVLFVTLEQVRKVFKGVEF

SEQ ID NO: 30160 - protein, 299 aa, Zea mays subsp. mays
  peptide (1)..(299): Ceres Seq. ID no. 12408465
  misc_feature (1)..(299): NCBI GI NO: 15227225 NR Description: mitochondrial carrier protein family
  misc_feature (1)..(299): NCBI GI NO: 21554157 NR Description: putative mitochondrial dicarboxylate carrierprotein
  misc_feature (1)..(299): NCBI GI NO: 13878155 NR Description: putative mitochondrial dicarboxylate carrierprotein
  misc_feature (1)..(295): NCBI GI NO: 15233884 NR Description: mitochondrial carrier protein family
  misc_feature (1)..(299): NCBI GI NO: 15242423 NR Description: mitochondrial carrier protein family
  misc_feature (56)..(295): NCBI GI NO: 21312994 NR Description: solute carrier family 25
  misc_feature (56)..(295): NCBI GI NO: 1580888 NR Description: 2-oxoglutarate carrier protein
  misc_feature (56)..(295): NCBI GI NO: 27807211 NR Description: solute carrier family 25
  misc_feature (56)..(295): NCBI GI NO: 21361114 NR Description: solute carrier family 25
  misc_feature (56)..(297): NCBI GI NO: 19913109 NR Description: dicarboxylate/tricarboxylate carrier
MQLQGEAAAAVAPQPALRPALAFHAGGHAVALPHHHHHDIPAPPRKPGPLAVGAQILRSEGAAGLFSGVSATMLRQTLYSTTRMGLYDILKTRWARENGGVLPLHRKILAGLVAGGVGAAVGNPADVAMVRMQADGRLPLAERRNYRGVGDAIGRMARDEGVRSLWRGSSLTVNRAMIVTASQLATYDQAKEAILARRGPGADGLATHVAASFTAGIVAAAASNPVDVVKTRMMNMKVAPGAPPPYAGAVDCALKTVRSEGPMALYKGFIPTVMRQGPFTVVLFVTLEQVRKVFKGVEF

SEQ ID NO: 30161 - protein, 227 aa, Zea mays subsp. mays
  peptide (1)..(227): Ceres Seq. ID no. 12408466
  misc_feature (1)..(227): NCBI GI NO: 15227225 NR Description: mitochondrial carrier protein family
  misc_feature (1)..(227): NCBI GI NO: 21554157 NR Description: putative mitochondrial dicarboxylate carrierprotein
  misc_feature (1)..(227): NCBI GI NO: 13878155 NR Description: putative mitochondrial dicarboxylate carrierprotein
  misc_feature (1)..(223): NCBI GI NO: 15233884 NR Description: mitochondrial carrier protein family
  misc_feature (1)..(227): NCBI GI NO: 15242423 NR Description: mitochondrial carrier protein family
  misc_feature (1)..(223): NCBI GI NO: 21312994 NR Description: solute carrier family 25
  misc_feature (1)..(223): NCBI GI NO: 1580888 NR Description: 2-oxoglutarate carrier protein
  misc_feature (1)..(223): NCBI GI NO: 27807211 NR Description: solute carrier family 25
  misc_feature (1)..(223): NCBI GI NO: 21361114 NR Description: solute carrier family 25
  misc_feature (1)..(225): NCBI GI NO: 19913109 NR Description: dicarboxylate/tricarboxylate carrier
MLRQTLYSTTRMGLYDILKTRWARENGGVLPLHRKILAGLVAGGVGAAVGNPADVAMVRMQADGRLPLAERRNYRGVGDAIGRMARDEGVRSLWRGSSLTVNRAMIVTASQLATYDQAKEAILARRGPGADGLATHVAASFTAGIVAAAASNPVDVVKTRMMNMKVAPGAPPPYAGAVDCALKTVRSEGPMALYKGFIPTVMRQGPFTVVLFVTLEQVRKVFKGVEF

SEQ ID NO: 30162 - DNA, 1427 bp, Zea mays subsp. mays
  misc_feature (1)..(1427): Ceres Seq. ID no. 12405016
aagcaagcaagagactgagagaggcaggtaatacatacctgcgactgcgacgagtgagtaaagcttcatcttcttcctccttcctccggcctcttcctgagtgctgcacgcagtgcgtaggaaggaactcgcgtacgtacgtgtgctagctagctagctcgaccacgcgcagcacgcaggcgcgtagtagctcgatcgatcgaccgccggccggaaatgtcgaccaactcgaggtccaactccagggccaacttcaacaacgagatccatgacatcggcacggcgcagaactccagcatgccccccacgtactacgaccggtcgctggcggacatcttccctccgcacctcctcaagaaggtggtctcggaggtggtgtccacgttcctgctggtgttcgtcacgtgcggggcggcggggatctacggcagcgacaaggaccgcatctcgcagctggggcagtcggtcgccggcgggctcatcgtcaccgtcatgatctacgccgtcggacacatctcgggcgcgcacatgaaccccgccgtcacgctcgcgttcgccgtgttccgccatttcccctggatccaggtcccgttctactgggcggcgcagttcaccggcagcatctgcgcgtcgttcgtgctcaaggccgtgctgcaccccatcgccgtgctgggcaccaccacgccgacggggccgcactggcactcgctcgtcatcgagatcatcgtcaccttcaacatgatgttcgtcaccctcgccgtcgccacggacacgagagcggtgggtgagttggcggggttggcagttggttccgcggtttgcattacgtccatcttcgcaggggcagtgtcgggcggatcgatgaacccggcgaggacgctggggccggcgctggcgagcaacctctacaccggcctctggatctacttcctgggccccgtcctcggcacgctctccggggcctggacctacacctacatccgcttcgaggaggcgcccagccacaaggacatgtcgcagaagctctcctccttcaagctccgccgcctgcagagccagtccgtcgcggtcgacgacgacgagctcgaccacatccaagtgtgattcatgctccatcgatcagagagtgcgcacttgtttactcctcagtcctctcactctatgtatcggcaacactccctaggatatactagtggtccgtagtcatggtctatgtctatgtgtcgctcttctctcgatccatgcacgtccgtggcgcggtgtggatgggctcgctctgtcaaatgtgccaatgagctggagcttaattttgggacgaacactgtgccgtgtgctgtgtgcagccagtcgtactcgtacctctcctgctatcacttgttccaaaagcttctttggtgcttacataaagatcatctgtgccttgcacg

SEQ ID NO: 30163 - protein, 295 aa, Zea mays subsp. mays
  peptide (1)..(295): Ceres Seq. ID no. 12405017
  misc_feature (39)..(252): Pfam Name: Pfam Description:  Major intrinsic protein
  misc_feature (1)..(295): NCBI GI NO: 13447787 NR Description: NOD26-like membrane integral protein ZmNIP2-1
  misc_feature (2)..(293): NCBI GI NO: 13447789 NR Description: NOD26-like membrane integral protein ZmNIP2-2
  misc_feature (2)..(293): NCBI GI NO: 13448045 NR Description: NOD26-like membrane integral protein ZmNIP2-3
  misc_feature (16)..(283): NCBI GI NO: 33468424 NR Description: Nod26-like protein [Cucurbita pepo]
  misc_feature (45)..(277): NCBI GI NO: 9971217 NR Description: MIP [Adiantum capillus-veneris]
  misc_feature (35)..(284): NCBI GI NO: 15777893 NR Description: early embryogenesis aquaglyceroporin [Pinus taeda]
  misc_feature (46)..(284): NCBI GI NO: 13447785 NR Description: NOD26-like membrane integral protein ZmNIP1-1
  misc_feature (40)..(274): NCBI GI NO: 37536006 NR Description: putative nodulin-26
  misc_feature (41)..(282): NCBI GI NO: 1076748 NR Description: major intrinsic protein - rice
  misc_feature (33)..(274): NCBI GI NO: 15235034 NR Description: major intrinsic protein
MSTNSRSNSRANFNNEIHDIGTAQNSSMPPTYYDRSLADIFPPHLLKKVVSEVVSTFLLVFVTCGAAGIYGSDKDRISQLGQSVAGGLIVTVMIYAVGHISGAHMNPAVTLAFAVFRHFPWIQVPFYWAAQFTGSICASFVLKAVLHPIAVLGTTTPTGPHWHSLVIEIIVTFNMMFVTLAVATDTRAVGELAGLAVGSAVCITSIFAGAVSGGSMNPARTLGPALASNLYTGLWIYFLGPVLGTLSGAWTYTYIRFEEAPSHKDMSQKLSSFKLRRLQSQSVAVDDDELDHIQV

SEQ ID NO: 30164 - protein, 268 aa, Zea mays subsp. mays
  peptide (1)..(268): Ceres Seq. ID no. 12405018
  misc_feature (12)..(225): Pfam Name: Pfam Description:  Major intrinsic protein
  misc_feature (1)..(268): NCBI GI NO: 13447787 NR Description: NOD26-like membrane integral protein ZmNIP2-1
  misc_feature (1)..(266): NCBI GI NO: 13447789 NR Description: NOD26-like membrane integral protein ZmNIP2-2
  misc_feature (1)..(266): NCBI GI NO: 13448045 NR Description: NOD26-like membrane integral protein ZmNIP2-3
  misc_feature (1)..(256): NCBI GI NO: 33468424 NR Description: Nod26-like protein [Cucurbita pepo]
  misc_feature (18)..(250): NCBI GI NO: 9971217 NR Description: MIP [Adiantum capillus-veneris]
  misc_feature (8)..(257): NCBI GI NO: 15777893 NR Description: early embryogenesis aquaglyceroporin [Pinus taeda]
  misc_feature (19)..(257): NCBI GI NO: 13447785 NR Description: NOD26-like membrane integral protein ZmNIP1-1
  misc_feature (13)..(247): NCBI GI NO: 37536006 NR Description: putative nodulin-26
  misc_feature (14)..(255): NCBI GI NO: 1076748 NR Description: major intrinsic protein - rice
  misc_feature (6)..(247): NCBI GI NO: 15235034 NR Description: major intrinsic protein
MPPTYYDRSLADIFPPHLLKKVVSEVVSTFLLVFVTCGAAGIYGSDKDRISQLGQSVAGGLIVTVMIYAVGHISGAHMNPAVTLAFAVFRHFPWIQVPFYWAAQFTGSICASFVLKAVLHPIAVLGTTTPTGPHWHSLVIEIIVTFNMMFVTLAVATDTRAVGELAGLAVGSAVCITSIFAGAVSGGSMNPARTLGPALASNLYTGLWIYFLGPVLGTLSGAWTYTYIRFEEAPSHKDMSQKLSSFKLRRLQSQSVAVDDDELDHIQV

SEQ ID NO: 30165 - protein, 203 aa, Zea mays subsp. mays
  peptide (1)..(203): Ceres Seq. ID no. 12405019
  misc_feature (1)..(160): Pfam Name: Pfam Description:  Major intrinsic protein
  misc_feature (1)..(203): NCBI GI NO: 13447787 NR Description: NOD26-like membrane integral protein ZmNIP2-1
  misc_feature (1)..(201): NCBI GI NO: 13447789 NR Description: NOD26-like membrane integral protein ZmNIP2-2
  misc_feature (1)..(201): NCBI GI NO: 13448045 NR Description: NOD26-like membrane integral protein ZmNIP2-3
  misc_feature (1)..(191): NCBI GI NO: 33468424 NR Description: Nod26-like protein [Cucurbita pepo]
  misc_feature (1)..(185): NCBI GI NO: 9971217 NR Description: MIP [Adiantum capillus-veneris]
  misc_feature (1)..(192): NCBI GI NO: 15777893 NR Description: early embryogenesis aquaglyceroporin [Pinus taeda]
  misc_feature (1)..(192): NCBI GI NO: 13447785 NR Description: NOD26-like membrane integral protein ZmNIP1-1
  misc_feature (1)..(182): NCBI GI NO: 37536006 NR Description: putative nodulin-26
  misc_feature (1)..(190): NCBI GI NO: 1076748 NR Description: major intrinsic protein - rice
  misc_feature (1)..(182): NCBI GI NO: 15235034 NR Description: major intrinsic protein
MIYAVGHISGAHMNPAVTLAFAVFRHFPWIQVPFYWAAQFTGSICASFVLKAVLHPIAVLGTTTPTGPHWHSLVIEIIVTFNMMFVTLAVATDTRAVGELAGLAVGSAVCITSIFAGAVSGGSMNPARTLGPALASNLYTGLWIYFLGPVLGTLSGAWTYTYIRFEEAPSHKDMSQKLSSFKLRRLQSQSVAVDDDELDHIQV

SEQ ID NO: 30166 - DNA, 1881 bp, Zea mays subsp. mays
  misc_feature (1)..(1881): Ceres Seq. ID no. 12379651
gtcgcgcacacctcagtctcctgccgtgcgtagtgtgtacgggcaaggcggcagagctagctttcactacactcagtggccattgccgttgctagctttcaatagctcttagctgcaatgtcggcggcggcgtcgcagagcagtgtcaaggcaatggcggcggccgcagccgctgtggcaatgctgctctcggccgcggcggcggtggccgcgcagcacgattacggcgacgccctgcacaagtgcatcctcttcttcgaggggcagcgctcggggaggctcccgccggaccagcgcctccgctggcgccgcgactccggcctccacgacggcgccgcggccggggtggatctgaccggagggtactacgacgccggcgacaacgtgaagttcgggttcccgatggcgtttcacggcgacgctcatgtcgtggggcctgatcgacttcgggcgcagcttcgggccccacagggaggaggcccggaaggcggtgcggtgggcgacggactacctgatgaaggcgacggcgaagcggaacacggtgtacgtgcaggtgggcgacgcgttccgcgaccacgcgtgctgggagcggcccgaggacatggacaccccgcgcaccgtgtacaaggtggacccgtcccacccgggctccgacgtcgccgccgagaccgccgccgcgctcgccgccggctccatcgtcttccgcgacgccgaccccgcctactccaagcgcctcctcgaccgcgccgtcgccgtgttcgagttcgcggacaagtaccggggcccctacagcagcagcctccacgcggcggtgtgcccctgctactgcgactactccggataccaggacgagctgctgtggggcgcggcgtggctgcacaaggcgacgcggcggcgggagtaccgcgagtacatcaagaggaacgaggtggtgctcggcgccagcgacgccatcaacgagttcggctgggacaacaagcacgccggcatcaacgtcctcatctcaaaggaggttctgatggggaaggacgagtacttccagtccttccgtgtcaacgccgacaacttcatgtgcaccctcctccccggcatctccaatcacccccagatccagtactccccaggcgggctgctgttcaaggtcgggagcagcaacatgcagcacgtgacgcagctgtcgttcctcctgctggcctactccaactacctgagccacgccggcgggcgcgtctcgtgcggctcgtcgtcggcgtcgccggtgcagctccgccgcgtggccaagcggcaggtggactacatactgggcgacaacccgctgcggatgtcgtacatggttggggtacggcgcgcggttcccgcggcggatccaccaccgccgccagctccgctgccgtccgtggcggcgcacccggcgcggatcggctgcaaggccggcgccgcctactacaccagcccggcgcccaacccgaacctgctcgtgggcgccgtcgtgggcgggcccaccgacgactccgacgccttccccgacgcgcgcgccgtgttccagcagtcctagcccaccacgtacatcaacgcgccgctcatgggcctcctcgcctacttctcggcacatcccaacccagccgagtcgggcggcgactgaaaaaagcctagggagagtgatagatgacgaacgcacgcacgggcctgggtattttagatgggctttggtttgtcttgttcgggcccgattgttgcctggtgtatccgtacgagtagttgtaactagttaaccagagccactcccttgcctgcaaaagaaagaccagggaagaggaattagtaggctccaagattgtattagctgttaagattatatacgctagtagcaaggttaactgt

SEQ ID NO: 30167 - protein, 511 aa, Zea mays subsp. mays
  peptide (1)..(511): Ceres Seq. ID no. 12379652
  misc_feature (35)..(98): Pfam Name: Pfam Description:  Glycosyl hydrolase family 9
  misc_feature (14)..(98): NCBI GI NO: 3549291 NR Description: endo-1,4-beta-glucanase precursor
  misc_feature (12)..(98): NCBI GI NO: 4220423 NR Description: putative cellulase [Fragaria x ananassa]
  misc_feature (12)..(98): NCBI GI NO: 4972234 NR Description: endo-beta-1,4-glucanase [Fragaria x ananassa]
  misc_feature (11)..(98): NCBI GI NO: 15223222 NR Description: glycosyl hydrolase family 9
  misc_feature (21)..(98): NCBI GI NO: 2440035 NR Description: endo-1,4-beta-glucanase [Arabidopsis thaliana]
  misc_feature (12)..(98): NCBI GI NO: 3892180 NR Description: cellulase [Fragaria x ananassa]
  misc_feature (31)..(98): NCBI GI NO: 16903351 NR Description: endo-beta-1,4-glucanase precursor
  misc_feature (22)..(98): NCBI GI NO: 1655547 NR Description: cellulase; endo-beta-1,4-glucanase
  misc_feature (25)..(98): NCBI GI NO: 7488978 NR Description: cellulase (EC 3.2.1.4) Cel2 precursor - tomato
  misc_feature (11)..(98): NCBI GI NO: 15220676 NR Description: glycosyl hydrolase family 9; protein id:At1g23210
MSAAASQSSVKAMAAAAAAVAMLLSAAAAVAAQHDYGDALHKCILFFEGQRSGRLPPDQRLRWRRDSGLHDGAAAGVDLTGGYYDAGDNVKFGFPMAFHGDAHVVGPDRLRAQLRAPQGGGPEGGAVGDGLPDEGDGEAEHGVRAGGRRVPRPRVLGAARGHGHPAHRVQGGPVPPGLRRRRRDRRRARRRLHRLPRRRPRLLQAPPRPRRRRVRVRGQVPGPLQQQPPRGGVPLLLRLLRIPGRAAVGRGVAAQGDAAAGVPRVHQEERGGARRQRRHQRVRLGQQARRHQRPHLKGGSDGEGRVLPVLPCQRRQLHVHPPPRHLQSPPDPVLPRRAAVQGREQQHAARDAAVVPPAGLLQLPEPRRRARLVRLVVGVAGAAPPRGQAAGGLHTGRQPAADVVHGWGTARGSRGGSTTAASSAAVRGGAPGADRLQGRRRLLHQPGAQPEPARGRRRGRAHRRLRRLPRRARRVPAVLAHHVHQRAAHGPPRLLLGTSQPSRVGRRLKKA

SEQ ID NO: 30168 - protein, 499 aa, Zea mays subsp. mays
  peptide (1)..(499): Ceres Seq. ID no. 12379653
  misc_feature (23)..(86): Pfam Name: Pfam Description:  Glycosyl hydrolase family 9
  misc_feature (2)..(86): NCBI GI NO: 3549291 NR Description: endo-1,4-beta-glucanase precursor
  misc_feature (1)..(86): NCBI GI NO: 4220423 NR Description: putative cellulase [Fragaria x ananassa]
  misc_feature (1)..(86): NCBI GI NO: 4972234 NR Description: endo-beta-1,4-glucanase [Fragaria x ananassa]
  misc_feature (1)..(86): NCBI GI NO: 15223222 NR Description: glycosyl hydrolase family 9
  misc_feature (9)..(86): NCBI GI NO: 2440035 NR Description: endo-1,4-beta-glucanase [Arabidopsis thaliana]
  misc_feature (1)..(86): NCBI GI NO: 3892180 NR Description: cellulase [Fragaria x ananassa]
  misc_feature (19)..(86): NCBI GI NO: 16903351 NR Description: endo-beta-1,4-glucanase precursor
  misc_feature (10)..(86): NCBI GI NO: 1655547 NR Description: cellulase; endo-beta-1,4-glucanase
  misc_feature (13)..(86): NCBI GI NO: 7488978 NR Description: cellulase (EC 3.2.1.4) Cel2 precursor - tomato
  misc_feature (1)..(86): NCBI GI NO: 15220676 NR Description: glycosyl hydrolase family 9; protein id:At1g23210
MAAAAAAVAMLLSAAAAVAAQHDYGDALHKCILFFEGQRSGRLPPDQRLRWRRDSGLHDGAAAGVDLTGGYYDAGDNVKFGFPMAFHGDAHVVGPDRLRAQLRAPQGGGPEGGAVGDGLPDEGDGEAEHGVRAGGRRVPRPRVLGAARGHGHPAHRVQGGPVPPGLRRRRRDRRRARRRLHRLPRRRPRLLQAPPRPRRRRVRVRGQVPGPLQQQPPRGGVPLLLRLLRIPGRAAVGRGVAAQGDAAAGVPRVHQEERGGARRQRRHQRVRLGQQARRHQRPHLKGGSDGEGRVLPVLPCQRRQLHVHPPPRHLQSPPDPVLPRRAAVQGREQQHAARDAAVVPPAGLLQLPEPRRRARLVRLVVGVAGAAPPRGQAAGGLHTGRQPAADVVHGWGTARGSRGGSTTAASSAAVRGGAPGADRLQGRRRLLHQPGAQPEPARGRRRGRAHRRLRRLPRRARRVPAVLAHHVHQRAAHGPPRLLLGTSQPSRVGRRLKKA

SEQ ID NO: 30169 - protein, 490 aa, Zea mays subsp. mays
  peptide (1)..(490): Ceres Seq. ID no. 12379654
  misc_feature (14)..(77): Pfam Name: Pfam Description:  Glycosyl hydrolase family 9
  misc_feature (1)..(77): NCBI GI NO: 3549291 NR Description: endo-1,4-beta-glucanase precursor
  misc_feature (1)..(77): NCBI GI NO: 4220423 NR Description: putative cellulase [Fragaria x ananassa]
  misc_feature (1)..(77): NCBI GI NO: 4972234 NR Description: endo-beta-1,4-glucanase [Fragaria x ananassa]
  misc_feature (1)..(77): NCBI GI NO: 15223222 NR Description: glycosyl hydrolase family 9
  misc_feature (1)..(77): NCBI GI NO: 2440035 NR Description: endo-1,4-beta-glucanase [Arabidopsis thaliana]
  misc_feature (1)..(77): NCBI GI NO: 3892180 NR Description: cellulase [Fragaria x ananassa]
  misc_feature (10)..(77): NCBI GI NO: 16903351 NR Description: endo-beta-1,4-glucanase precursor
  misc_feature (1)..(77): NCBI GI NO: 1655547 NR Description: cellulase; endo-beta-1,4-glucanase
  misc_feature (4)..(77): NCBI GI NO: 7488978 NR Description: cellulase (EC 3.2.1.4) Cel2 precursor - tomato
  misc_feature (1)..(77): NCBI GI NO: 15220676 NR Description: glycosyl hydrolase family 9; protein id:At1g23210
MLLSAAAAVAAQHDYGDALHKCILFFEGQRSGRLPPDQRLRWRRDSGLHDGAAAGVDLTGGYYDAGDNVKFGFPMAFHGDAHVVGPDRLRAQLRAPQGGGPEGGAVGDGLPDEGDGEAEHGVRAGGRRVPRPRVLGAARGHGHPAHRVQGGPVPPGLRRRRRDRRRARRRLHRLPRRRPRLLQAPPRPRRRRVRVRGQVPGPLQQQPPRGGVPLLLRLLRIPGRAAVGRGVAAQGDAAAGVPRVHQEERGGARRQRRHQRVRLGQQARRHQRPHLKGGSDGEGRVLPVLPCQRRQLHVHPPPRHLQSPPDPVLPRRAAVQGREQQHAARDAAVVPPAGLLQLPEPRRRARLVRLVVGVAGAAPPRGQAAGGLHTGRQPAADVVHGWGTARGSRGGSTTAASSAAVRGGAPGADRLQGRRRLLHQPGAQPEPARGRRRGRAHRRLRRLPRRARRVPAVLAHHVHQRAAHGPPRLLLGTSQPSRVGRRLKKA

SEQ ID NO: 30170 - protein, 376 aa, Zea mays subsp. mays
  peptide (1)..(376): Ceres Seq. ID no. 12379655
  misc_feature (1)..(376): Pfam Name: Pfam Description:  Glycosyl hydrolase family 9
  misc_feature (1)..(376): NCBI GI NO: 3549291 NR Description: endo-1,4-beta-glucanase precursor
  misc_feature (1)..(376): NCBI GI NO: 4220423 NR Description: putative cellulase [Fragaria x ananassa]
  misc_feature (1)..(376): NCBI GI NO: 4972234 NR Description: endo-beta-1,4-glucanase [Fragaria x ananassa]
  misc_feature (1)..(376): NCBI GI NO: 15223222 NR Description: glycosyl hydrolase family 9
  misc_feature (1)..(376): NCBI GI NO: 2440035 NR Description: endo-1,4-beta-glucanase [Arabidopsis thaliana]
  misc_feature (1)..(376): NCBI GI NO: 3892180 NR Description: cellulase [Fragaria x ananassa]
  misc_feature (1)..(376): NCBI GI NO: 16903351 NR Description: endo-beta-1,4-glucanase precursor
  misc_feature (1)..(376): NCBI GI NO: 1655547 NR Description: cellulase; endo-beta-1,4-glucanase
  misc_feature (1)..(376): NCBI GI NO: 7488978 NR Description: cellulase (EC 3.2.1.4) Cel2 precursor - tomato
  misc_feature (1)..(376): NCBI GI NO: 15220676 NR Description: glycosyl hydrolase family 9; protein id:At1g23210
MSWGLIDFGRSFGPHREEARKAVRWATDYLMKATAKRNTVYVQVGDAFRDHACWERPEDMDTPRTVYKVDPSHPGSDVAAETAAALAAGSIVFRDADPAYSKRLLDRAVAVFEFADKYRGPYSSSLHAAVCPCYCDYSGYQDELLWGAAWLHKATRRREYREYIKRNEVVLGASDAINEFGWDNKHAGINVLISKEVLMGKDEYFQSFRVNADNFMCTLLPGISNHPQIQYSPGGLLFKVGSSNMQHVTQLSFLLLAYSNYLSHAGGRVSCGSSSASPVQLRRVAKRQVDYILGDNPLRMSYMVGVRRAVPAADPPPPPAPLPSVAAHPARIGCKAGAAYYTSPAPNPNLLVGAVVGGPTDDSDAFPDARAVFQQS

SEQ ID NO: 30171 - DNA, 1342 bp, Zea mays subsp. mays
  misc_feature (1)..(1342): Ceres Seq. ID no. 12546334
aatatataccgttcctccgttcgtcccctccggccctctctccatccctgcccacgaccctccgccaccaggcaccagccatcgcctgcatcagatctcccgcccgtccgttacatcccagggcgacgcggccgcggccatgacgccatcctcagctctcgccctcgcgcaccacgccgcggtatccccgctcccgtcctccacgccgcggccctcccccaggtccagctctctgagcctgggcccgggctccgccgggctcgggccgcgccggctcgtcgcggcggcgcccccacgggcgttcttctcctcgtccccctaccagccgccccagccggaggggttctcgcagcaccgcgagtacggcctggtccccatggtcatcgagaccacctcccggggggagcgcgcctacgacatcttctcgcgcctgcttaaggagcgcatcgtctgcatccacgggcccatcgccgacgacacggcctcgctcgtcgtcgcgcagctgctcttcctcgagtccgagaacccgctcaagcccgtccacctctacatcaactcccccgggggcgtcgtcaccgcggggctcgccatctacgacaccatgcagtacatccgctgccccgtcaccaccctctgcatcggccaggcggcctccatgggctcgctcctcctcgcggctggggcgccgggtgagaggcgcgcgcttcccaacgccagggtcatgatccaccagccctcgggcggcgcgcaggggcaagccaccgacatcgccatccaggccaaggagatcctcaaaatgcgcgaccgcctcaacaagatctaccagaagcacacgcgccagcccatcgataagattgagcagtgcatggagagggacctcttcatggaccctgaagaggcgcgcgactggggcctcatcgacgaggtcatcgagaatcgacctgcctcgttcatgcccgacggaatcggtggaggcctcgatgtgcccaggctcggtggcgttggcggcggacgggggagggacgtcgaggaaccttccgcggtgtgaggattggcctcaaaggtgaaatccttcctcatccggtggatgtgttgtttgttgttagatccaaaggttcaattcttactatacaaggttaaccttgttattatggttatggaaacgtccggctccccattgtccttgttgcttaaattgcttcaattgagctattggggatataattattgcaactctaaggaaattctgcactgttgatactgataaattgacacagtattgtgtatgttgtactatatttgtatcaattccatgccaggacattcaaactttttcctcttt

SEQ ID NO: 30172 - protein, 348 aa, Zea mays subsp. mays
  peptide (1)..(348): Ceres Seq. ID no. 12546335
  misc_feature (132)..(313): Pfam Name: Pfam Description:  Clp protease
  misc_feature (90)..(346): NCBI GI NO: 38344435 NR Description: OSJNBa0038O10.7
  misc_feature (119)..(323): NCBI GI NO: 18420643 NR Description: ATP-dependent Clp protease proteolytic subunit
  misc_feature (123)..(316): NCBI GI NO: 31238393 NR Description: ENSANGP00000017225 [Anopheles gambiae]
  misc_feature (69)..(314): NCBI GI NO: 34882298 NR Description: similar to ClpP protease [Rattus norvegicus]
  misc_feature (123)..(321): NCBI GI NO: 6685315 NR Description: ATP-dependent Clp protease proteolytic subunit
  misc_feature (83)..(314): NCBI GI NO: 8393156 NR Description: caseinolytic protease
  misc_feature (119)..(314): NCBI GI NO: 5174419 NR Description: endopeptidase Clp precursor
  misc_feature (123)..(316): NCBI GI NO: 23014984 NR Description: hypothetical protein
  misc_feature (119)..(321): NCBI GI NO: 20129427 NR Description: CG5045-PA [Drosophila melanogaster]
  misc_feature (123)..(316): NCBI GI NO: 22967580 NR Description: hypothetical protein [Rhodospirillum rubrum]
IYTVPPFVPSGPLSIPAHDPPPPGTSHRLHQISRPSVTSQGDAAAAMTPSSALALAHHAAVSPLPSSTPRPSPRSSSLSLGPGSAGLGPRRLVAAAPPRAFFSSSPYQPPQPEGFSQHREYGLVPMVIETTSRGERAYDIFSRLLKERIVCIHGPIADDTASLVVAQLLFLESENPLKPVHLYINSPGGVVTAGLAIYDTMQYIRCPVTTLCIGQAASMGSLLLAAGAPGERRALPNARVMIHQPSGGAQGQATDIAIQAKEILKMRDRLNKIYQKHTRQPIDKIEQCMERDLFMDPEEARDWGLIDEVIENRPASFMPDGIGGGLDVPRLGGVGGGRGRDVEEPSAV

SEQ ID NO: 30173 - protein, 302 aa, Zea mays subsp. mays
  peptide (1)..(302): Ceres Seq. ID no. 12546336
  misc_feature (86)..(267): Pfam Name: Pfam Description:  Clp protease
  misc_feature (44)..(300): NCBI GI NO: 38344435 NR Description: OSJNBa0038O10.7
  misc_feature (73)..(277): NCBI GI NO: 18420643 NR Description: ATP-dependent Clp protease proteolytic subunit
  misc_feature (77)..(270): NCBI GI NO: 31238393 NR Description: ENSANGP00000017225 [Anopheles gambiae]
  misc_feature (23)..(268): NCBI GI NO: 34882298 NR Description: similar to ClpP protease [Rattus norvegicus]
  misc_feature (77)..(275): NCBI GI NO: 6685315 NR Description: ATP-dependent Clp protease proteolytic subunit
  misc_feature (37)..(268): NCBI GI NO: 8393156 NR Description: caseinolytic protease
  misc_feature (73)..(268): NCBI GI NO: 5174419 NR Description: endopeptidase Clp precursor
  misc_feature (77)..(270): NCBI GI NO: 23014984 NR Description: hypothetical protein
  misc_feature (73)..(275): NCBI GI NO: 20129427 NR Description: CG5045-PA [Drosophila melanogaster]
  misc_feature (77)..(270): NCBI GI NO: 22967580 NR Description: hypothetical protein [Rhodospirillum rubrum]
MTPSSALALAHHAAVSPLPSSTPRPSPRSSSLSLGPGSAGLGPRRLVAAAPPRAFFSSSPYQPPQPEGFSQHREYGLVPMVIETTSRGERAYDIFSRLLKERIVCIHGPIADDTASLVVAQLLFLESENPLKPVHLYINSPGGVVTAGLAIYDTMQYIRCPVTTLCIGQAASMGSLLLAAGAPGERRALPNARVMIHQPSGGAQGQATDIAIQAKEILKMRDRLNKIYQKHTRQPIDKIEQCMERDLFMDPEEARDWGLIDEVIENRPASFMPDGIGGGLDVPRLGGVGGGRGRDVEEPSAV

SEQ ID NO: 30174 - protein, 223 aa, Zea mays subsp. mays
  peptide (1)..(223): Ceres Seq. ID no. 12546337
  misc_feature (7)..(188): Pfam Name: Pfam Description:  Clp protease
  misc_feature (1)..(221): NCBI GI NO: 38344435 NR Description: OSJNBa0038O10.7
  misc_feature (1)..(198): NCBI GI NO: 18420643 NR Description: ATP-dependent Clp protease proteolytic subunit
  misc_feature (1)..(191): NCBI GI NO: 31238393 NR Description: ENSANGP00000017225 [Anopheles gambiae]
  misc_feature (1)..(189): NCBI GI NO: 34882298 NR Description: similar to ClpP protease [Rattus norvegicus]
  misc_feature (1)..(196): NCBI GI NO: 6685315 NR Description: ATP-dependent Clp protease proteolytic subunit
  misc_feature (1)..(189): NCBI GI NO: 8393156 NR Description: caseinolytic protease
  misc_feature (1)..(189): NCBI GI NO: 5174419 NR Description: endopeptidase Clp precursor
  misc_feature (1)..(191): NCBI GI NO: 23014984 NR Description: hypothetical protein
  misc_feature (1)..(196): NCBI GI NO: 20129427 NR Description: CG5045-PA [Drosophila melanogaster]
  misc_feature (1)..(191): NCBI GI NO: 22967580 NR Description: hypothetical protein [Rhodospirillum rubrum]
MVIETTSRGERAYDIFSRLLKERIVCIHGPIADDTASLVVAQLLFLESENPLKPVHLYINSPGGVVTAGLAIYDTMQYIRCPVTTLCIGQAASMGSLLLAAGAPGERRALPNARVMIHQPSGGAQGQATDIAIQAKEILKMRDRLNKIYQKHTRQPIDKIEQCMERDLFMDPEEARDWGLIDEVIENRPASFMPDGIGGGLDVPRLGGVGGGRGRDVEEPSAV

SEQ ID NO: 30175 - DNA, 1251 bp, Zea mays subsp. mays
  misc_feature (1)..(1251): Ceres Seq. ID no. 12566852
tagactatcataaggaaacaaactagctattacaagggaataatccagactgctatcagtcctgatcttgctgattggatccgtcaatataagactgatccactaccatacttgctatttcctaaaacagaataagtaaactagcaccaatcaaggattactttcctaacaatgcatatatccgtatcaacctacagaatgtttttactggatctaaactcaatctaggtcattcctattgtcattgatatatctgtgcaaagtgcaaacctacatacccatctaaacattatttcagagtaatagtttctacatggatcatgttgcttctatggctgtctcatgtttgatactggacattagaatatgctcctttcaagttcttgcgtaaaagaaaattttgcattctgattctactgttttttttggagcatcatgttagctgaaacctcaggtgtcctgaatatgtcaagcatccctctggttctgaaaaatttcaacaatccagcattaaagagtgccatttgtgccttttccatgcagataacttggcagctaacttcagcagagaattagcagactacataatctacattatcgatgtctctggtggggacaagataccaagaaaaggtggccctgggataacccaggccgatctgttggtgcgtcgtgctgtattcaccagcatcatctataaccttgtgcacttaacttcatttgtagctctgcaaacttattttgacttttgcacactggtcatattttattggccggcataaaatgtctgagtttctgaactcaggtaataaacaagacagacctaacacctgctgttggagctgatctgtctgtaatggagcgagacgcacttcgcatgcgcgaaggagggccctttgtgtttgcacaggtgaaacatggagtgggcgtggaggggatcgtgaaccatattctgcaggcgtgggagatcgcgactggtaataagcggcgataagatctcacgacttggggccatatgttggatgcagatttgattcagtcggcacttccacatgcatgtgtcatctgttcgtttctcaataaattctgcgtcatttgctgctgattgtacttgacaagtagagacatggatggactcttaaaattccatccatgtgttaaatgacatattcgagacatccttttctcaataaactctgcatcatttggtgaattgcacttgagaagtaaagacatggagccttaaaattc

SEQ ID NO: 30176 - protein, 46 aa, Zea mays subsp. mays
  peptide (1)..(46): Ceres Seq. ID no. 12566853
MLAETSGVLNMSSIPLVLKNFNNPALKSAICAFSMQITWQLTSAEN

SEQ ID NO: 30177 - protein, 45 aa, Zea mays subsp. mays
  peptide (1)..(45): Ceres Seq. ID no. 12566854
  misc_feature (1)..(45): NCBI GI NO: 13161906 NR Description: urease accessory protein G [Solanum tuberosum]
  misc_feature (1)..(45): NCBI GI NO: 13161908 NR Description: urease accessory protein G [Solanum tuberosum]
  misc_feature (1)..(45): NCBI GI NO: 13161912 NR Description: urease accessory protein G [Solanum tuberosum]
  misc_feature (1)..(45): NCBI GI NO: 13161910 NR Description: urease accessory protein G [Solanum tuberosum]
  misc_feature (1)..(45): NCBI GI NO: 13161904 NR Description: urease accessory protein G [Solanum tuberosum]
  misc_feature (1)..(45): NCBI GI NO: 15226754 NR Description: putative urease accessory protein
  misc_feature (1)..(45): NCBI GI NO: 25313831 NR Description: urease accessory protein UREG
  misc_feature (1)..(33): NCBI GI NO: 5524682 NR Description: Ni-binding urease accessory protein UreG
  misc_feature (1)..(41): NCBI GI NO: 40746949 NR Description: hypothetical protein AN0232.2
  misc_feature (1)..(39): NCBI GI NO: 23136287 NR Description: hypothetical protein [Cytophaga hutchinsonii]
MERDALRMREGGPFVFAQVKHGVGVEGIVNHILQAWEIATGNKRR

SEQ ID NO: 30178 - protein, 38 aa, Zea mays subsp. mays
  peptide (1)..(38): Ceres Seq. ID no. 12566855
  misc_feature (1)..(38): NCBI GI NO: 13161906 NR Description: urease accessory protein G [Solanum tuberosum]
  misc_feature (1)..(38): NCBI GI NO: 13161908 NR Description: urease accessory protein G [Solanum tuberosum]
  misc_feature (1)..(38): NCBI GI NO: 13161912 NR Description: urease accessory protein G [Solanum tuberosum]
  misc_feature (1)..(38): NCBI GI NO: 13161910 NR Description: urease accessory protein G [Solanum tuberosum]
  misc_feature (1)..(38): NCBI GI NO: 13161904 NR Description: urease accessory protein G [Solanum tuberosum]
  misc_feature (1)..(38): NCBI GI NO: 15226754 NR Description: putative urease accessory protein
  misc_feature (1)..(38): NCBI GI NO: 25313831 NR Description: urease accessory protein UREG
  misc_feature (1)..(26): NCBI GI NO: 5524682 NR Description: Ni-binding urease accessory protein UreG
  misc_feature (1)..(34): NCBI GI NO: 40746949 NR Description: hypothetical protein AN0232.2
  misc_feature (1)..(32): NCBI GI NO: 23136287 NR Description: hypothetical protein [Cytophaga hutchinsonii]
MREGGPFVFAQVKHGVGVEGIVNHILQAWEIATGNKRR

SEQ ID NO: 30179 - DNA, 1287 bp, Zea mays subsp. mays
  misc_feature (1)..(1287): Ceres Seq. ID no. 12356579
ctaaaactaaggcatagcggtaaacaccaccgaagtctcagcttctccgaggaaggggcgcaattgctgaagcagccacttcaccttgggcccatacagaaatggcggcttcttgcgcctccacactcccttcactttccttcgtttcctcctccagttcatcccgccgattcaggcgctctggtgtggtggccatggccagcgttgggcagaaggtgtatgcgcccggtgtggcggtgtcggagggcaatggcgggctgccgaaaatcgacctcaaatccccgcacgggagcgaggctgagatttatctgtttggagcgtgtgttacttctttcaaagtccctaatggcaaggacctgctctttgttcgaccagatgctgtgtttaatggacagaaacccatcagcggtggaattccacattgtttcccccagtttggcccaggtcccatgcagcagcatgggtttgcacggaatgtgaattggtctatcacagattcagaagtcacagaaggagatccagctgtaactttggaactgaaagatgacacttatagccgttctatgtgggatttcagcttccatgcactgtacaaggtttccctgcactctaaaagcttgtcaacaactctagcaataataaatacagatgacaagcctttctcattcaactcagccctccacacttatttcagtgcttccataactggcgtttctgtgaaaggtctaaaaggttgcaagactctcaataaggaccctgacccaaaaaatcctttggagggcaaagaagagagggaagaggtgacttttccaggattcgtcgactgcgtctaccttggtgcaccaagtgaactcatcctggacaatggattgggtgacaaaattgccattgcaaattcaaattggtcagatgcagtcttgtggaatcctcacttgcagatggaggcctgctacaaagattttgtctgtgtggaaaacgccaagattgaaatggtacaactggagccaaaacaatcttgggtggcagaacagaaaattgaactagtctgatgataatgtcttgcagcaactgcatcaagtagagtgagacgcagatggcgctcccccagtgtcattcttcatggcacatgtcatcacaatagctatacatgtgatgttttctgttaaaaagaataaatgatgcaaatcatgaatttttttctagcagtctgatgtgtattgaattgcaaatgtacaatttgaactgcatggatctgttgaaataaagggagtgcccatttgatctttg

SEQ ID NO: 30180 - protein, 315 aa, Zea mays subsp. mays
  peptide (1)..(315): Ceres Seq. ID no. 12356580
  misc_feature (54)..(310): Pfam Name: Pfam Description:  Aldose 1-epimerase
  misc_feature (11)..(314): NCBI GI NO: 15240009 NR Description: apospory-associated protein C-like
  misc_feature (10)..(315): NCBI GI NO: 6970044 NR Description: apospory-associated protein C; APOC
  misc_feature (42)..(296): NCBI GI NO: 40253263 NR Description: putative Aldose 1-epimerase
  misc_feature (41)..(296): NCBI GI NO: 38344152 NR Description: OSJNBa0041A02.19
  misc_feature (27)..(296): NCBI GI NO: 2501555 NR Description: POSSIBLE APOSPORY-ASSOCIATED PROTEIN C
  misc_feature (15)..(296): NCBI GI NO: 19387263 NR Description: putative apospory-associated protein C
  misc_feature (46)..(296): NCBI GI NO: 15242099 NR Description: apospory-associated protein C
  misc_feature (68)..(315): NCBI GI NO: 31238518 NR Description: ENSANGP00000005193 [Anopheles gambiae]
  misc_feature (47)..(306): NCBI GI NO: 21593295 NR Description: possible apospory-associated like protein
  misc_feature (47)..(306): NCBI GI NO: 18416643 NR Description: possible apospory-associated like protein
MAASCASTLPSLSFVSSSSSSRRFRRSGVVAMASVGQKVYAPGVAVSEGNGGLPKIDLKSPHGSEAEIYLFGACVTSFKVPNGKDLLFVRPDAVFNGQKPISGGIPHCFPQFGPGPMQQHGFARNVNWSITDSEVTEGDPAVTLELKDDTYSRSMWDFSFHALYKVSLHSKSLSTTLAIINTDDKPFSFNSALHTYFSASITGVSVKGLKGCKTLNKDPDPKNPLEGKEEREEVTFPGFVDCVYLGAPSELILDNGLGDKIAIANSNWSDAVLWNPHLQMEACYKDFVCVENAKIEMVQLEPKQSWVAEQKIELV

SEQ ID NO: 30181 - protein, 284 aa, Zea mays subsp. mays
  peptide (1)..(284): Ceres Seq. ID no. 12356581
  misc_feature (23)..(279): Pfam Name: Pfam Description:  Aldose 1-epimerase
  misc_feature (1)..(283): NCBI GI NO: 15240009 NR Description: apospory-associated protein C-like
  misc_feature (1)..(284): NCBI GI NO: 6970044 NR Description: apospory-associated protein C; APOC
  misc_feature (11)..(265): NCBI GI NO: 40253263 NR Description: putative Aldose 1-epimerase
  misc_feature (10)..(265): NCBI GI NO: 38344152 NR Description: OSJNBa0041A02.19
  misc_feature (1)..(265): NCBI GI NO: 2501555 NR Description: POSSIBLE APOSPORY-ASSOCIATED PROTEIN C
  misc_feature (1)..(265): NCBI GI NO: 19387263 NR Description: putative apospory-associated protein C
  misc_feature (15)..(265): NCBI GI NO: 15242099 NR Description: apospory-associated protein C
  misc_feature (37)..(284): NCBI GI NO: 31238518 NR Description: ENSANGP00000005193 [Anopheles gambiae]
  misc_feature (16)..(275): NCBI GI NO: 21593295 NR Description: possible apospory-associated like protein
  misc_feature (16)..(275): NCBI GI NO: 18416643 NR Description: possible apospory-associated like protein
MASVGQKVYAPGVAVSEGNGGLPKIDLKSPHGSEAEIYLFGACVTSFKVPNGKDLLFVRPDAVFNGQKPISGGIPHCFPQFGPGPMQQHGFARNVNWSITDSEVTEGDPAVTLELKDDTYSRSMWDFSFHALYKVSLHSKSLSTTLAIINTDDKPFSFNSALHTYFSASITGVSVKGLKGCKTLNKDPDPKNPLEGKEEREEVTFPGFVDCVYLGAPSELILDNGLGDKIAIANSNWSDAVLWNPHLQMEACYKDFVCVENAKIEMVQLEPKQSWVAEQKIELV

SEQ ID NO: 30182 - protein, 199 aa, Zea mays subsp. mays
  peptide (1)..(199): Ceres Seq. ID no. 12356582
  misc_feature (1)..(194): Pfam Name: Pfam Description:  Aldose 1-epimerase
  misc_feature (1)..(198): NCBI GI NO: 15240009 NR Description: apospory-associated protein C-like
  misc_feature (1)..(199): NCBI GI NO: 6970044 NR Description: apospory-associated protein C; APOC
  misc_feature (1)..(180): NCBI GI NO: 40253263 NR Description: putative Aldose 1-epimerase
  misc_feature (1)..(180): NCBI GI NO: 38344152 NR Description: OSJNBa0041A02.19
  misc_feature (1)..(180): NCBI GI NO: 2501555 NR Description: POSSIBLE APOSPORY-ASSOCIATED PROTEIN C
  misc_feature (1)..(180): NCBI GI NO: 19387263 NR Description: putative apospory-associated protein C
  misc_feature (1)..(180): NCBI GI NO: 15242099 NR Description: apospory-associated protein C
  misc_feature (1)..(199): NCBI GI NO: 31238518 NR Description: ENSANGP00000005193 [Anopheles gambiae]
  misc_feature (1)..(190): NCBI GI NO: 21593295 NR Description: possible apospory-associated like protein
  misc_feature (1)..(190): NCBI GI NO: 18416643 NR Description: possible apospory-associated like protein
MQQHGFARNVNWSITDSEVTEGDPAVTLELKDDTYSRSMWDFSFHALYKVSLHSKSLSTTLAIINTDDKPFSFNSALHTYFSASITGVSVKGLKGCKTLNKDPDPKNPLEGKEEREEVTFPGFVDCVYLGAPSELILDNGLGDKIAIANSNWSDAVLWNPHLQMEACYKDFVCVENAKIEMVQLEPKQSWVAEQKIELV

SEQ ID NO: 30183 - DNA, 1165 bp, Zea mays subsp. mays
  misc_feature (1)..(1165): Ceres Seq. ID no. 12387009
  misc_feature (228)..(228): n is a, c, t, g, unknown, or other
gagctaccccatttccccacccccagcaccccactccccgcttccatttccttggaccccaccaccgcgcctacatccctcagagctcagatgcagccgccggcgaccgagatgcacccggccgccgacgccgccacctccgccgccaccgcgcaggccgacactactgctcgcgccgccgtccccgcatccgatccacccccgcccccgccggcgccggcggctganacggtcgatccgccgcccccgccgccagcgccggcgcccaagacggtcacctggagcgagaagctcacgtccgactcgccgacgcacgtgcacgccgccgccgcggcggagtccagccagtacgtgtcccgtgggcccgcatcctcgtctaagggcgccgtggaggcgatgagggagacgctgtcaaggtgggggaagtcgtggggggagaccaccaagctggtcgagagcctcagccgcgacacgtggcaacacttcaagactggacctagttttactgaagctgctatgggacgcctagcacaagggactaaagttttagcagaaggaggctatgaaaaaatatttaagcagaccttcgaggttcttccagacgaggagctgaaaatatgctatgcgtgctatctctcaacatcagcaggtcctgtcatgggagtcttgtatatttctacagcgaagattgctttctgcagtgacaatcctctgtcatacaaagctggaaataaaactgaatggagttactacaaggtggtcattcctcttcaccagctaagagcagctaatccttcagtaagcaaagtaaatcccgctgagaagtacattcaggtcgtttccgttgaagggcatgagttctggttcatgggttttctaatgtacgacaaggctgcagccagtcttcaagaagccttggctagtgctcgtgagttgcaaccgtgaagacaccaagtggtgttctttccggttacatacatcagtttccacatctcgagttcaggctgggtcgctgggattcttctcctgtttcagatcctttttgctgaagcttttgacacagtacacccacaggcctgcatacgtgtcagaaatgtgtgccattcctgtcaatgttgtaatcatgacagatatttatatatatggaaaaacactgccgctgtcc

SEQ ID NO: 30184 - protein, 314 aa, Zea mays subsp. mays
  peptide (1)..(314): Ceres Seq. ID no. 12387010
  misc_feature (190)..(266): Pfam Name: Pfam Description:  GRAM domain
  misc_feature (31)..(306): NCBI GI NO: 18399985 NR Description: Expressed protein; protein id: At2g22475
  misc_feature (31)..(306): NCBI GI NO: 21592789 NR Description: unknown [Arabidopsis thaliana]
  misc_feature (31)..(306): NCBI GI NO: 26452129 NR Description: unknown protein [Arabidopsis thaliana]
  misc_feature (38)..(313): NCBI GI NO: 34902414 NR Description: Putative FH protein interacting protein FIP1
  misc_feature (53)..(308): NCBI GI NO: 15217869 NR Description: FH protein interacting protein FIP1
  misc_feature (42)..(310): NCBI GI NO: 34906818 NR Description: contains EST C91668
  misc_feature (63)..(306): NCBI GI NO: 29788871 NR Description: putative ABA-responsive protein
  misc_feature (173)..(310): NCBI GI NO: 33146631 NR Description: putative FH protein interacting protein FIP1
  misc_feature (148)..(313): NCBI GI NO: 15240044 NR Description: ABA-responsive protein - like
  misc_feature (173)..(295): NCBI GI NO: 25405043 NR Description: protein TEL1S.3 [imported] - Arabidopsis thaliana
  misc_feature (76)..(76): Xaa is any aa, unknown or other
ELPHFPTPSTPLPASISLDPTTAPTSLRAQMQPPATEMHPAADAATSAATAQADTTARAAVPASDPPPPPPAPAAXTVDPPPPPPAPAPKTVTWSEKLTSDSPTHVHAAAAAESSQYVSRGPASSSKGAVEAMRETLSRWGKSWGETTKLVESLSRDTWQHFKTGPSFTEAAMGRLAQGTKVLAEGGYEKIFKQTFEVLPDEELKICYACYLSTSAGPVMGVLYISTAKIAFCSDNPLSYKAGNKTEWSYYKVVIPLHQLRAANPSVSKVNPAEKYIQVVSVEGHEFWFMGFLMYDKAAASLQEALASARELQP

SEQ ID NO: 30185 - protein, 284 aa, Zea mays subsp. mays
  peptide (1)..(284): Ceres Seq. ID no. 12387011
  misc_feature (160)..(236): Pfam Name: Pfam Description:  GRAM domain
  misc_feature (1)..(276): NCBI GI NO: 18399985 NR Description: Expressed protein; protein id: At2g22475
  misc_feature (1)..(276): NCBI GI NO: 21592789 NR Description: unknown [Arabidopsis thaliana]
  misc_feature (1)..(276): NCBI GI NO: 26452129 NR Description: unknown protein [Arabidopsis thaliana]
  misc_feature (8)..(283): NCBI GI NO: 34902414 NR Description: Putative FH protein interacting protein FIP1
  misc_feature (23)..(278): NCBI GI NO: 15217869 NR Description: FH protein interacting protein FIP1
  misc_feature (12)..(280): NCBI GI NO: 34906818 NR Description: contains EST C91668
  misc_feature (33)..(276): NCBI GI NO: 29788871 NR Description: putative ABA-responsive protein
  misc_feature (143)..(280): NCBI GI NO: 33146631 NR Description: putative FH protein interacting protein FIP1
  misc_feature (118)..(283): NCBI GI NO: 15240044 NR Description: ABA-responsive protein - like
  misc_feature (143)..(265): NCBI GI NO: 25405043 NR Description: protein TEL1S.3 [imported] - Arabidopsis thaliana
  misc_feature (46)..(46): Xaa is any aa, unknown or other
MQPPATEMHPAADAATSAATAQADTTARAAVPASDPPPPPPAPAAXTVDPPPPPPAPAPKTVTWSEKLTSDSPTHVHAAAAAESSQYVSRGPASSSKGAVEAMRETLSRWGKSWGETTKLVESLSRDTWQHFKTGPSFTEAAMGRLAQGTKVLAEGGYEKIFKQTFEVLPDEELKICYACYLSTSAGPVMGVLYISTAKIAFCSDNPLSYKAGNKTEWSYYKVVIPLHQLRAANPSVSKVNPAEKYIQVVSVEGHEFWFMGFLMYDKAAASLQEALASARELQP

SEQ ID NO: 30186 - protein, 277 aa, Zea mays subsp. mays
  peptide (1)..(277): Ceres Seq. ID no. 12387012
  misc_feature (153)..(229): Pfam Name: Pfam Description:  GRAM domain
  misc_feature (1)..(269): NCBI GI NO: 18399985 NR Description: Expressed protein; protein id: At2g22475
  misc_feature (1)..(269): NCBI GI NO: 21592789 NR Description: unknown [Arabidopsis thaliana]
  misc_feature (1)..(269): NCBI GI NO: 26452129 NR Description: unknown protein [Arabidopsis thaliana]
  misc_feature (1)..(276): NCBI GI NO: 34902414 NR Description: Putative FH protein interacting protein FIP1
  misc_feature (16)..(271): NCBI GI NO: 15217869 NR Description: FH protein interacting protein FIP1
  misc_feature (5)..(273): NCBI GI NO: 34906818 NR Description: contains EST C91668
  misc_feature (26)..(269): NCBI GI NO: 29788871 NR Description: putative ABA-responsive protein
  misc_feature (136)..(273): NCBI GI NO: 33146631 NR Description: putative FH protein interacting protein FIP1
  misc_feature (111)..(276): NCBI GI NO: 15240044 NR Description: ABA-responsive protein - like
  misc_feature (136)..(258): NCBI GI NO: 25405043 NR Description: protein TEL1S.3 [imported] - Arabidopsis thaliana
  misc_feature (39)..(39): Xaa is any aa, unknown or other
MHPAADAATSAATAQADTTARAAVPASDPPPPPPAPAAXTVDPPPPPPAPAPKTVTWSEKLTSDSPTHVHAAAAAESSQYVSRGPASSSKGAVEAMRETLSRWGKSWGETTKLVESLSRDTWQHFKTGPSFTEAAMGRLAQGTKVLAEGGYEKIFKQTFEVLPDEELKICYACYLSTSAGPVMGVLYISTAKIAFCSDNPLSYKAGNKTEWSYYKVVIPLHQLRAANPSVSKVNPAEKYIQVVSVEGHEFWFMGFLMYDKAAASLQEALASARELQP

SEQ ID NO: 30187 - DNA, 1500 bp, Zea mays subsp. mays
  misc_feature (1)..(1500): Ceres Seq. ID no. 12408444
aagttcgatccagattatagcagctagctcaccgtcaccgacatacagtacaatagcagcttattagcttgtgtcagtccatccatccatccatggagaaactcgtctacttcgcgaccattatatccttatccatggcggcgctgctagtgccactccgcgtacagtgcgaagaagcagctagagctgctgctgccagaagctgccatgccggcaccggagcttctgcttctgcaccagccgcagcagcagcgtggaaaaggagctgcggcggcggcaaggcggggaagcagcagccgcaggtggagggcatgttcgtgttcgggagctcgctggtggacaacggcaacaacaactttctcaacggctccggcgtgcgcgcagactacctcccctacggcgtggacttccccctcggcccctccggccgtttctccaacggccgcaacgtcatcgacgcgctcggcgagctcctcggcctccccgggctcgtcccacccttcgccgacccgcgcacccggcgggcccgcgccgcgctgcgcggcgtcaacttcgcctccggcggctccggcatcctggagcacaccgggcagggcaaggtggtgagcctgcggcagcagatcaccaactttgagtcggtgacccttcctgacctgcgggcccaactgcgtggaccagctgcggccgccaaccactggatcaagggtcaagattccttccacaagtgctacctctccaagtgcctcttcgtcatcggcacaggtggcaatgactacctgctcgactacttcaaccccgggaacggcacccaaggtgggccgcccttgtcagagttcactgcgtctctcatcaccaagctctccggacatcttcagaggttgtacgctcttggcgcacggaagtttgtgatcttctcgatccagccgaccgggtgcacccccgtggtacgggcgttcctcaacatcaccggcggcgcctgcatcgagccggtgaacgacgcggtggcgctcttcaacgccgagctcaggcggctggtggatggcgcgaggcggcgcatgcccgccgccaggttcgcctttatcgactcctacaggatcatcaaggacatgctggaccaccccgccaaacatggcgttagggagacgagcagagcctgctgcgagatgtcgaggagctcgtcgggcgtgctgtgcaagaagcaggggcccatctgcagcgaccggacggagtacgtcttcttcgacgggctgcacccgacggacgccgtgaacgccaggatcgcgcgcaagggctacggctccagctcgcccgaccacgcctaccccatcaacgtcaagaagctagccatgctgtagcccttgtagaagctagccatgcatgcttgtaacctagctttgtactagtagtaataatctagaattaatgcctacctcatcaacgccaacatcgttcgactacttactagtagtactagttctctgtgaaatagtctaataagcc

SEQ ID NO: 30188 - protein, 420 aa, Zea mays subsp. mays
  peptide (1)..(420): Ceres Seq. ID no. 12408445
  misc_feature (75)..(399): Pfam Name: Pfam Description:  GDSL-like Lipase/Acylhydrolase
  misc_feature (68)..(420): NCBI GI NO: 15220514 NR Description: lipase/hydrolase, putative; protein id:At1g29670
  misc_feature (68)..(420): NCBI GI NO: 21592417 NR Description: lipase/hydrolase, putative [Arabidopsis thaliana]
  misc_feature (62)..(420): NCBI GI NO: 34909504 NR Description: putative GDSL-motif lipase/hydrolase-like protein
  misc_feature (66)..(420): NCBI GI NO: 18398991 NR Description: unknown protein; protein id: At1g33811
  misc_feature (69)..(418): NCBI GI NO: 34910808 NR Description: GDSL-motif lipase/hydrolase-like protein
  misc_feature (66)..(420): NCBI GI NO: 21553940 NR Description: GDSL-motif lipase/hydrolase-like protein
  misc_feature (53)..(420): NCBI GI NO: 21594055 NR Description: lipase/hydrolase, putative [Arabidopsis thaliana]
  misc_feature (66)..(420): NCBI GI NO: 15242458 NR Description: GDSL-motif lipase/hydrolase-like protein
  misc_feature (53)..(420): NCBI GI NO: 15220512 NR Description: lipase/hydrolase, putative; protein id:At1g29660
  misc_feature (75)..(420): NCBI GI NO: 7485419 NR Description: hypothetical protein F13C5
MEKLVYFATIISLSMAALLVPLRVQCEEAARAAAARSCHAGTGASASAPAAAAAWKRSCGGGKAGKQQPQVEGMFVFGSSLVDNGNNNFLNGSGVRADYLPYGVDFPLGPSGRFSNGRNVIDALGELLGLPGLVPPFADPRTRRARAALRGVNFASGGSGILEHTGQGKVVSLRQQITNFESVTLPDLRAQLRGPAAAANHWIKGQDSFHKCYLSKCLFVIGTGGNDYLLDYFNPGNGTQGGPPLSEFTASLITKLSGHLQRLYALGARKFVIFSIQPTGCTPVVRAFLNITGGACIEPVNDAVALFNAELRRLVDGARRRMPAARFAFIDSYRIIKDMLDHPAKHGVRETSRACCEMSRSSSGVLCKKQGPICSDRTEYVFFDGLHPTDAVNARIARKGYGSSSPDHAYPINVKKLAML

SEQ ID NO: 30189 - protein, 406 aa, Zea mays subsp. mays
  peptide (1)..(406): Ceres Seq. ID no. 12408446
  misc_feature (61)..(385): Pfam Name: Pfam Description:  GDSL-like Lipase/Acylhydrolase
  misc_feature (54)..(406): NCBI GI NO: 15220514 NR Description: lipase/hydrolase, putative; protein id:At1g29670
  misc_feature (54)..(406): NCBI GI NO: 21592417 NR Description: lipase/hydrolase, putative [Arabidopsis thaliana]
  misc_feature (48)..(406): NCBI GI NO: 34909504 NR Description: putative GDSL-motif lipase/hydrolase-like protein
  misc_feature (52)..(406): NCBI GI NO: 18398991 NR Description: unknown protein; protein id: At1g33811
  misc_feature (55)..(404): NCBI GI NO: 34910808 NR Description: GDSL-motif lipase/hydrolase-like protein
  misc_feature (52)..(406): NCBI GI NO: 21553940 NR Description: GDSL-motif lipase/hydrolase-like protein
  misc_feature (39)..(406): NCBI GI NO: 21594055 NR Description: lipase/hydrolase, putative [Arabidopsis thaliana]
  misc_feature (52)..(406): NCBI GI NO: 15242458 NR Description: GDSL-motif lipase/hydrolase-like protein
  misc_feature (39)..(406): NCBI GI NO: 15220512 NR Description: lipase/hydrolase, putative; protein id:At1g29660
  misc_feature (61)..(406): NCBI GI NO: 7485419 NR Description: hypothetical protein F13C5
MAALLVPLRVQCEEAARAAAARSCHAGTGASASAPAAAAAWKRSCGGGKAGKQQPQVEGMFVFGSSLVDNGNNNFLNGSGVRADYLPYGVDFPLGPSGRFSNGRNVIDALGELLGLPGLVPPFADPRTRRARAALRGVNFASGGSGILEHTGQGKVVSLRQQITNFESVTLPDLRAQLRGPAAAANHWIKGQDSFHKCYLSKCLFVIGTGGNDYLLDYFNPGNGTQGGPPLSEFTASLITKLSGHLQRLYALGARKFVIFSIQPTGCTPVVRAFLNITGGACIEPVNDAVALFNAELRRLVDGARRRMPAARFAFIDSYRIIKDMLDHPAKHGVRETSRACCEMSRSSSGVLCKKQGPICSDRTEYVFFDGLHPTDAVNARIARKGYGSSSPDHAYPINVKKLAML

SEQ ID NO: 30190 - protein, 347 aa, Zea mays subsp. mays
  peptide (1)..(347): Ceres Seq. ID no. 12408447
  misc_feature (2)..(326): Pfam Name: Pfam Description:  GDSL-like Lipase/Acylhydrolase
  misc_feature (1)..(347): NCBI GI NO: 15220514 NR Description: lipase/hydrolase, putative; protein id:At1g29670
  misc_feature (1)..(347): NCBI GI NO: 21592417 NR Description: lipase/hydrolase, putative [Arabidopsis thaliana]
  misc_feature (1)..(347): NCBI GI NO: 34909504 NR Description: putative GDSL-motif lipase/hydrolase-like protein
  misc_feature (1)..(347): NCBI GI NO: 18398991 NR Description: unknown protein; protein id: At1g33811
  misc_feature (1)..(345): NCBI GI NO: 34910808 NR Description: GDSL-motif lipase/hydrolase-like protein
  misc_feature (1)..(347): NCBI GI NO: 21553940 NR Description: GDSL-motif lipase/hydrolase-like protein
  misc_feature (1)..(347): NCBI GI NO: 21594055 NR Description: lipase/hydrolase, putative [Arabidopsis thaliana]
  misc_feature (1)..(347): NCBI GI NO: 15242458 NR Description: GDSL-motif lipase/hydrolase-like protein
  misc_feature (1)..(347): NCBI GI NO: 15220512 NR Description: lipase/hydrolase, putative; protein id:At1g29660
  misc_feature (2)..(347): NCBI GI NO: 7485419 NR Description: hypothetical protein F13C5
MFVFGSSLVDNGNNNFLNGSGVRADYLPYGVDFPLGPSGRFSNGRNVIDALGELLGLPGLVPPFADPRTRRARAALRGVNFASGGSGILEHTGQGKVVSLRQQITNFESVTLPDLRAQLRGPAAAANHWIKGQDSFHKCYLSKCLFVIGTGGNDYLLDYFNPGNGTQGGPPLSEFTASLITKLSGHLQRLYALGARKFVIFSIQPTGCTPVVRAFLNITGGACIEPVNDAVALFNAELRRLVDGARRRMPAARFAFIDSYRIIKDMLDHPAKHGVRETSRACCEMSRSSSGVLCKKQGPICSDRTEYVFFDGLHPTDAVNARIARKGYGSSSPDHAYPINVKKLAML

SEQ ID NO: 30191 - DNA, 1094 bp, Zea mays subsp. mays
  misc_feature (1)..(1094): Ceres Seq. ID no. 12359506
agcaacctcccttcctttccctcccccacccctcctgctgcagtctctcctcctcagcggacccggtcctggatggccgccttcttcgctgctgctccgccgccggcggcgggtgctctcgcgtcgttccaccacgaggagcagcagcgtcaggacgccgccgaggagctgtaccacgtggacgacgacgtcggcggccagcaggggaagctgtgcgccaggggccactggcgccccgccgaggacgccaagctcaaggagctcgtcgcgcagtacgggccccagaactggaacctcatcgccgagaggctggacggcagatcagggaagagctgccgcctgcggtggttcaaccagctagacccgcggatcaaccgccgggccttctccggcgaggaggaggagcggctgctggcggcgcaccgcgcgtacggcaacaagtgggcgctcatcgcgcgcctcttccccggccgcaccgacaacgccgtcaagaaccactggcacgtcctcatggcgcgcaagcagcgggagcacaccggcgcgctccgccggcgcaagccctcgtcctcgccctcgccggacccggcgccgccgccgccgcaattggcgcccgtcgtcgtcctcctccaccaccaccagcagcaccacgccggctcgcctccgcgcgccgccgctcacgcgcagttacacggcagcggacacccgcgcgcacagcggcggcgagtccgacgagaccgcgtccacctgcaccaccgacctgtccctcggctccgccgccccccctgcttctaccagagtggctacgacgcggccccgcgcgccgcggccttcgcgccgagcgcgcgctccgccttctccgcgccgccggcgtcggcgcgccatggcgagccacgctccgacgacaaggtgtcgccgcccttcttcgacttcctcggcgtcggcgcggcatgatcggggagggggcccccgcggcggtgtacaggaggcgggccgaaagacgcgtagtttagctttagggtccagttaatgatcaagaacatggcctgagagaggagaaagaatggtgatgaactggtgtcgtggcactgcagagt

SEQ ID NO: 30192 - protein, 335 aa, Zea mays subsp. mays
  peptide (1)..(335): Ceres Seq. ID no. 12359507
  misc_feature (205)..(260): Pfam Name: Pfam Description:  Extensin-like region
QPPFLSLPHPSCCSLSSSADPVLDGRLLRCCSAAGGGCSRVVPPRGAAASGRRRGAVPRGRRRRRPAGEAVRQGPLAPRRGRQAQGARRAVRAPELEPHRREAGRQIREELPPAVVQPARPADQPPGLLRRGGGAAAGGAPRVRQQVGAHRAPLPRPHRQRRQEPLARPHGAQAAGAHRRAPPAQALVLALAGPGAAAAAIGARRRPPPPPPAAPRRLASARRRSRAVTRQRTPARTAAASPTRPRPPAPPTCPSAPPPPLLLPEWLRRGPARRGLRAERALRLLRAAGVGAPWRATLRRQGVAALLRLPRRRRGMIGEGAPAAVYRRRAERRVV

SEQ ID NO: 30193 - protein, 316 aa, Zea mays subsp. mays
  peptide (1)..(316): Ceres Seq. ID no. 12359508
  misc_feature (74)..(120): Pfam Name: Pfam Description:  Myb-like DNA-binding domain
  misc_feature (74)..(191): NCBI GI NO: 18396049 NR Description: myb-related protein, putative
  misc_feature (74)..(191): NCBI GI NO: 25403271 NR Description: protein T24P13.16
  misc_feature (73)..(199): NCBI GI NO: 15222362 NR Description: MYB-family transcription factor, putative
  misc_feature (66)..(194): NCBI GI NO: 9759057 NR Description: Myb-like transcription factor-like protein
  misc_feature (66)..(194): NCBI GI NO: 15238028 NR Description: MYB56 R2R3-MYB factor family member
  misc_feature (71)..(185): NCBI GI NO: 21321780 NR Description: putative Myb/Myb-related protein
  misc_feature (72)..(193): NCBI GI NO: 6979341 NR Description: myb-like protein [Oryza sativa]
  misc_feature (71)..(179): NCBI GI NO: 31980093 NR Description: MYB transcription factor R2R3 type
  misc_feature (70)..(212): NCBI GI NO: 18406019 NR Description: expressed protein; protein id: At3g29020
  misc_feature (71)..(192): NCBI GI NO: 11358543 NR Description: myb-related transcription factor MYB54
SNLPSFPSPTPPAAVSPPQRTRSWMAAFFAAAPPPAAGALASFHHEEQQRQDAAEELYHVDDDVGGQQGKLCARGHWRPAEDAKLKELVAQYGPQNWNLIAERLDGRSGKSCRLRWFNQLDPRINRRAFSGEEEERLLAAHRAYGNKWALIARLFPGRTDNAVKNHWHVLMARKQREHTGALRRRKPSSSPSPDPAPPPPQLAPVVVLLHHHQQHHAGSPPRAAAHAQLHGSGHPRAQRRRVRRDRVHLHHRPVPRLRRPPCFYQSGYDAAPRAAAFAPSARSAFSAPPASARHGEPRSDDKVSPPFFDFLGVGAA

SEQ ID NO: 30194 - protein, 292 aa, Zea mays subsp. mays
  peptide (1)..(292): Ceres Seq. ID no. 12359509
  misc_feature (50)..(96): Pfam Name: Pfam Description:  Myb-like DNA-binding domain
  misc_feature (50)..(167): NCBI GI NO: 18396049 NR Description: myb-related protein, putative
  misc_feature (50)..(167): NCBI GI NO: 25403271 NR Description: protein T24P13.16
  misc_feature (49)..(175): NCBI GI NO: 15222362 NR Description: MYB-family transcription factor, putative
  misc_feature (42)..(170): NCBI GI NO: 9759057 NR Description: Myb-like transcription factor-like protein
  misc_feature (42)..(170): NCBI GI NO: 15238028 NR Description: MYB56 R2R3-MYB factor family member
  misc_feature (47)..(161): NCBI GI NO: 21321780 NR Description: putative Myb/Myb-related protein
  misc_feature (48)..(169): NCBI GI NO: 6979341 NR Description: myb-like protein [Oryza sativa]
  misc_feature (47)..(155): NCBI GI NO: 31980093 NR Description: MYB transcription factor R2R3 type
  misc_feature (46)..(188): NCBI GI NO: 18406019 NR Description: expressed protein; protein id: At3g29020
  misc_feature (47)..(168): NCBI GI NO: 11358543 NR Description: myb-related transcription factor MYB54
MAAFFAAAPPPAAGALASFHHEEQQRQDAAEELYHVDDDVGGQQGKLCARGHWRPAEDAKLKELVAQYGPQNWNLIAERLDGRSGKSCRLRWFNQLDPRINRRAFSGEEEERLLAAHRAYGNKWALIARLFPGRTDNAVKNHWHVLMARKQREHTGALRRRKPSSSPSPDPAPPPPQLAPVVVLLHHHQQHHAGSPPRAAAHAQLHGSGHPRAQRRRVRRDRVHLHHRPVPRLRRPPCFYQSGYDAAPRAAAFAPSARSAFSAPPASARHGEPRSDDKVSPPFFDFLGVGAA

SEQ ID NO: 30195 - DNA, 1621 bp, Zea mays subsp. mays
  misc_feature (1)..(1621): Ceres Seq. ID no. 12408436
ctctcttttccgccctccacccctcgcgagctctccacccctccacacgaccctcctcggcggcggcggcggcgatgcagatggcggcgaccaccaccgagtcccaaccggccgtgccgcctcaacaccctcacgcccacccccacgcgcccccgcagcatgctcatccgcaccaccacatgccgcagccacggtgggtcgtcatcccgtacccgccgccgccgcccatggtggccgcgccaccaccaccgccgcagtttgccaagcacttcgctgctgggccgccgccgccgccccaagctggtgctgggcgccgcacgccgaccccgccctcgtctggatccggcgggaacgggtgcgaagaaaataaaaccatttgggtcggtgacctccagtactggatggatgaaaactacctacataactgcttcgggcccagcggcgaggtggttacaataaaagttatccgcaataggcaaacaggacagtcagaggggtatggatttgttgagttcttttctcatgcatcagcagagaaagctcttcagaattttactggtcatgtgatgccaaacactgaccggccatttaaattgaactgggcatcgtatagcatgggtgaaaagcgatctgaagtggcttctgatcactcgatatttgttggcgatctagctgctgatgtcactgatgaaatgctgctggagcttttctccagcaagtaccgctcggtgaaaggagctaaagttattattgatgcaaacacaggccgttccaggggctatggatttgtcaggtttggagacgacaacgacaaatctcatgccatgtctgaaatgaatggtgtatattgctctacgaggccaattcgtataggacctgcgactcccagaagatcttcaggtgattctggctcctcgactcctggtcattcagatggtgattcttctaacagaacggtatatgttggtgggcttgaccccaatgtcagtgaagatgaactgagaaaagcctttgccaaatatgatcttgcctctgtgaaaattcctctaggaaagcaatgtggctttgttcaatttgttagcagaactgatgctgaagaagcactacaaggattaaatggatcactcattggaaagcaggcagttcgcctttcatgggtccgcagcccatcacataagcagtctaggggtgactccgtcaacaggaggaacaacatgtactatggcacaccattctacggcggatatggctatgcctccccggtgccacacccaaacatgtacgctgcagcgtatggcacgtacccgctatatggcaaccagcagctagtgagctagagagctcccctccgacgtgtcccctctgacgggaaacaaaggttttggtccggtgagcatagtagcgtcaggtgagaaggtgcctttataaggctgtcctaagaagtgggcgagatatgttgttgcatcgttatcgttatggtgcctgtaactgttgtgtgtgccgtgtgcgtccggaagaattggatggaatggaactcgtggcttgttgtagtacatcagagagtcatgttattctttcaagaaattttgacttggaaataaattaaactattgtttgtgcg

SEQ ID NO: 30196 - protein, 444 aa, Zea mays subsp. mays
  peptide (1)..(444): Ceres Seq. ID no. 12408437
  misc_feature (218)..(290): Pfam Name: a.k.a. RRM, RBD, or RNP domain Pfam Description: RNA recognition motif.
  misc_feature (62)..(437): NCBI GI NO: 15594035 NR Description: nucleic acid binding protein [Nicotiana tabacum]
  misc_feature (62)..(316): NCBI GI NO: 9663769 NR Description: RNA Binding Protein 47 [Nicotiana plumbaginifolia]
  misc_feature (302)..(444): NCBI GI NO: 9663769 NR Description: RNA Binding Protein 47 [Nicotiana plumbaginifolia]
  misc_feature (61)..(441): NCBI GI NO: 34896988 NR Description: putative RNA binding protein [Oryza sativa]
  misc_feature (104)..(316): NCBI GI NO: 7489196 NR Description: RNA binding protein homolog - common tobacco
  misc_feature (302)..(444): NCBI GI NO: 7489196 NR Description: RNA binding protein homolog - common tobacco
  misc_feature (21)..(444): NCBI GI NO: 15220241 NR Description: RNA binding protein 47
  misc_feature (104)..(316): NCBI GI NO: 7489112 NR Description: DNA binding protein ACBF - common tobacco
  misc_feature (302)..(444): NCBI GI NO: 7489112 NR Description: DNA binding protein ACBF - common tobacco
  misc_feature (21)..(444): NCBI GI NO: 15220233 NR Description: RNA binding protein 47
LFSALHPSRALHPSTRPSSAAAAAMQMAATTTESQPAVPPQHPHAHPHAPPQHAHPHHHMPQPRWVVIPYPPPPPMVAAPPPPPQFAKHFAAGPPPPPQAGAGRRTPTPPSSGSGGNGCEENKTIWVGDLQYWMDENYLHNCFGPSGEVVTIKVIRNRQTGQSEGYGFVEFFSHASAEKALQNFTGHVMPNTDRPFKLNWASYSMGEKRSEVASDHSIFVGDLAADVTDEMLLELFSSKYRSVKGAKVIIDANTGRSRGYGFVRFGDDNDKSHAMSEMNGVYCSTRPIRIGPATPRRSSGDSGSSTPGHSDGDSSNRTVYVGGLDPNVSEDELRKAFAKYDLASVKIPLGKQCGFVQFVSRTDAEEALQGLNGSLIGKQAVRLSWVRSPSHKQSRGDSVNRRNNMYYGTPFYGGYGYASPVPHPNMYAAAYGTYPLYGNQQLVS

SEQ ID NO: 30197 - protein, 420 aa, Zea mays subsp. mays
  peptide (1)..(420): Ceres Seq. ID no. 12408438
  misc_feature (194)..(266): Pfam Name: a.k.a. RRM, RBD, or RNP domain Pfam Description: RNA recognition motif.
  misc_feature (38)..(413): NCBI GI NO: 15594035 NR Description: nucleic acid binding protein [Nicotiana tabacum]
  misc_feature (38)..(292): NCBI GI NO: 9663769 NR Description: RNA Binding Protein 47 [Nicotiana plumbaginifolia]
  misc_feature (278)..(420): NCBI GI NO: 9663769 NR Description: RNA Binding Protein 47 [Nicotiana plumbaginifolia]
  misc_feature (37)..(417): NCBI GI NO: 34896988 NR Description: putative RNA binding protein [Oryza sativa]
  misc_feature (80)..(292): NCBI GI NO: 7489196 NR Description: RNA binding protein homolog - common tobacco
  misc_feature (278)..(420): NCBI GI NO: 7489196 NR Description: RNA binding protein homolog - common tobacco
  misc_feature (1)..(420): NCBI GI NO: 15220241 NR Description: RNA binding protein 47
  misc_feature (80)..(292): NCBI GI NO: 7489112 NR Description: DNA binding protein ACBF - common tobacco
  misc_feature (278)..(420): NCBI GI NO: 7489112 NR Description: DNA binding protein ACBF - common tobacco
  misc_feature (1)..(420): NCBI GI NO: 15220233 NR Description: RNA binding protein 47
MQMAATTTESQPAVPPQHPHAHPHAPPQHAHPHHHMPQPRWVVIPYPPPPPMVAAPPPPPQFAKHFAAGPPPPPQAGAGRRTPTPPSSGSGGNGCEENKTIWVGDLQYWMDENYLHNCFGPSGEVVTIKVIRNRQTGQSEGYGFVEFFSHASAEKALQNFTGHVMPNTDRPFKLNWASYSMGEKRSEVASDHSIFVGDLAADVTDEMLLELFSSKYRSVKGAKVIIDANTGRSRGYGFVRFGDDNDKSHAMSEMNGVYCSTRPIRIGPATPRRSSGDSGSSTPGHSDGDSSNRTVYVGGLDPNVSEDELRKAFAKYDLASVKIPLGKQCGFVQFVSRTDAEEALQGLNGSLIGKQAVRLSWVRSPSHKQSRGDSVNRRNNMYYGTPFYGGYGYASPVPHPNMYAAAYGTYPLYGNQQLVS

SEQ ID NO: 30198 - protein, 418 aa, Zea mays subsp. mays
  peptide (1)..(418): Ceres Seq. ID no. 12408439
  misc_feature (192)..(264): Pfam Name: a.k.a. RRM, RBD, or RNP domain Pfam Description: RNA recognition motif.
  misc_feature (36)..(411): NCBI GI NO: 15594035 NR Description: nucleic acid binding protein [Nicotiana tabacum]
  misc_feature (36)..(290): NCBI GI NO: 9663769 NR Description: RNA Binding Protein 47 [Nicotiana plumbaginifolia]
  misc_feature (276)..(418): NCBI GI NO: 9663769 NR Description: RNA Binding Protein 47 [Nicotiana plumbaginifolia]
  misc_feature (35)..(415): NCBI GI NO: 34896988 NR Description: putative RNA binding protein [Oryza sativa]
  misc_feature (78)..(290): NCBI GI NO: 7489196 NR Description: RNA binding protein homolog - common tobacco
  misc_feature (276)..(418): NCBI GI NO: 7489196 NR Description: RNA binding protein homolog - common tobacco
  misc_feature (1)..(418): NCBI GI NO: 15220241 NR Description: RNA binding protein 47
  misc_feature (78)..(290): NCBI GI NO: 7489112 NR Description: DNA binding protein ACBF - common tobacco
  misc_feature (276)..(418): NCBI GI NO: 7489112 NR Description: DNA binding protein ACBF - common tobacco
  misc_feature (1)..(418): NCBI GI NO: 15220233 NR Description: RNA binding protein 47
MAATTTESQPAVPPQHPHAHPHAPPQHAHPHHHMPQPRWVVIPYPPPPPMVAAPPPPPQFAKHFAAGPPPPPQAGAGRRTPTPPSSGSGGNGCEENKTIWVGDLQYWMDENYLHNCFGPSGEVVTIKVIRNRQTGQSEGYGFVEFFSHASAEKALQNFTGHVMPNTDRPFKLNWASYSMGEKRSEVASDHSIFVGDLAADVTDEMLLELFSSKYRSVKGAKVIIDANTGRSRGYGFVRFGDDNDKSHAMSEMNGVYCSTRPIRIGPATPRRSSGDSGSSTPGHSDGDSSNRTVYVGGLDPNVSEDELRKAFAKYDLASVKIPLGKQCGFVQFVSRTDAEEALQGLNGSLIGKQAVRLSWVRSPSHKQSRGDSVNRRNNMYYGTPFYGGYGYASPVPHPNMYAAAYGTYPLYGNQQLVS

SEQ ID NO: 30199 - DNA, 1930 bp, Zea mays subsp. mays
  misc_feature (1)..(1930): Ceres Seq. ID no. 12566856
gcacgagaccattacctagaacatcctaatcaaaaaaatttctcgcggcgtcgttccgtcccaaatatcgccccgcgatcccccacctcgccgactggctcccccgctccacctcgtcgacgggcagaggagacccctcagggccgggatcggactcctctttcaccgccaacgcataccagtgatgaagatcttccgctgaagcttgctcaagctgcaataaagcatgacggttgtgcacataatgatgcttaatcattcatgttgcgaaaccctccagtggaacttccttcttctgatgcaaccatgtataggtggacctagttttgaggtggatgcgctgagttttgaaggtggcgagggatctttgctgcggggttctatttgttctcagtgatttttggcaaacactctttggttagattaagaatcatggaaaggtacaaattgatacggaagataggtgatggaacctgtgggaatgtttttatggcttctaatgtagaaactaatgaaattgttgctgttaaaaaaatgaagagaaaattttgtcattgggaagaatgtattagtctgcgagaagtgaaggcccttcagaaactatttcaccctaacattgtgaagctgaaggaagtgacgatggaaaaccatgagctgttcttcatctttgaacacatggagtgcaatttatatgatgtcataagggaaaggcaagttgctttccctgaaagggatataaggaactttatggtccagatactgcaaggtcttgcatatatgcataataatgggtattttcaccgtgatttaaaacctgagaatttgttggtgacaaatggtattattaaaattgctgactttgggttggcaagagaaatatcttccaatcctccttacactgattatgtttccaccagatggtatcgggctccagaggttctactgcaatcttcagtttatacacctgctattgacatgtgggcggttggtgctattttggctgagctttttacactgtccccactttttcctggtgaaagtgaaactgaccagctttacaaaatatgcactgtgcttgggacccctgattgcactatttggccagagggaatgaacctgcctcgttcatgcagctttaagttttttcagaatcctccaagaaacttatgggagcttattcctaatgcttcatctgaagcaatcgatttgatccagcaactttgttcctgggatcctcgaaggaggccaactgctgagcaagcattacaacatcctttcttcaatgtatgcaattgggtaccaagacctgtacatgatgcttaccatacaaaaacaaacggacctaaagctgaaccaagattggaactgaacctgtgggatttcagcacagaacctgatgattgtgtccttgatttaactctcagtctgaagccaagtttttctggaacagaccttggtaagcatgttccacgacgtacagaagaggaaattctcctgtacccgggatttgagaatacccctgtgaagtccggtttttggcctctggtgccatctgatcgtcccgttggtgatgttccggccataccatcctggcagcaggcgtacatggttgacagccaaggcgcattttctggctctccgttcttgcagtcgaacctgttggagaaccgttcgttagcacctatccggcaggtgaatttcttctgacggagacaggattaacagattcatacgattcttgatacgtccagcttctcgctgtatacacactatcttgaataaagtgttgccagtagaggaaatgtatatacagttcgttcgtagctcttgagcttctttctttctagagtacctctttttttttaatcgtctgttcatattccacaccactcctatgtaaataacggcatgcatgataatctctctccct

SEQ ID NO: 30200 - protein, 424 aa, Zea mays subsp. mays
  peptide (1)..(424): Ceres Seq. ID no. 12566857
  misc_feature (4)..(283): Pfam Name: Pfam Description:  Protein kinase domain
  misc_feature (1)..(424): NCBI GI NO: 34897492 NR Description: putative protein kinase
  misc_feature (1)..(386): NCBI GI NO: 7710959 NR Description: putative Cdc2-related protein kinase CRK2
  misc_feature (1)..(423): NCBI GI NO: 30682312 NR Description: serine/threonine protein kinase (MHK)
  misc_feature (1)..(423): NCBI GI NO: 481207 NR Description: serine/threonine-specific protein kinase MHK (EC2
  misc_feature (1)..(423): NCBI GI NO: 15235551 NR Description: serine/threonine-specific protein kinase MHK
  misc_feature (1)..(309): NCBI GI NO: 18415242 NR Description: kinase-like protein; protein id: At4g19110
  misc_feature (1)..(309): NCBI GI NO: 30684655 NR Description: protein kinase, putative [Arabidopsis thaliana]
  misc_feature (1)..(290): NCBI GI NO: 15450860 NR Description: serine/threonine-protein kinase Mak
  misc_feature (1)..(290): NCBI GI NO: 27948450 NR Description: GAMYB-binding protein
  misc_feature (1)..(290): NCBI GI NO: 18422554 NR Description: serine/threonine-protein kinase Mak
MERYKLIRKIGDGTCGNVFMASNVETNEIVAVKKMKRKFCHWEECISLREVKALQKLFHPNIVKLKEVTMENHELFFIFEHMECNLYDVIRERQVAFPERDIRNFMVQILQGLAYMHNNGYFHRDLKPENLLVTNGIIKIADFGLAREISSNPPYTDYVSTRWYRAPEVLLQSSVYTPAIDMWAVGAILAELFTLSPLFPGESETDQLYKICTVLGTPDCTIWPEGMNLPRSCSFKFFQNPPRNLWELIPNASSEAIDLIQQLCSWDPRRRPTAEQALQHPFFNVCNWVPRPVHDAYHTKTNGPKAEPRLELNLWDFSTEPDDCVLDLTLSLKPSFSGTDLGKHVPRRTEEEILLYPGFENTPVKSGFWPLVPSDRPVGDVPAIPSWQQAYMVDSQGAFSGSPFLQSNLLENRSLAPIRQVNFF

SEQ ID NO: 30201 - protein, 405 aa, Zea mays subsp. mays
  peptide (1)..(405): Ceres Seq. ID no. 12566858
  misc_feature (1)..(264): Pfam Name: Pfam Description:  Protein kinase domain
  misc_feature (1)..(405): NCBI GI NO: 34897492 NR Description: putative protein kinase
  misc_feature (1)..(367): NCBI GI NO: 7710959 NR Description: putative Cdc2-related protein kinase CRK2
  misc_feature (1)..(404): NCBI GI NO: 30682312 NR Description: serine/threonine protein kinase (MHK)
  misc_feature (1)..(404): NCBI GI NO: 481207 NR Description: serine/threonine-specific protein kinase MHK (EC2
  misc_feature (1)..(404): NCBI GI NO: 15235551 NR Description: serine/threonine-specific protein kinase MHK
  misc_feature (1)..(290): NCBI GI NO: 18415242 NR Description: kinase-like protein; protein id: At4g19110
  misc_feature (1)..(290): NCBI GI NO: 30684655 NR Description: protein kinase, putative [Arabidopsis thaliana]
  misc_feature (1)..(271): NCBI GI NO: 15450860 NR Description: serine/threonine-protein kinase Mak
  misc_feature (1)..(271): NCBI GI NO: 27948450 NR Description: GAMYB-binding protein
  misc_feature (1)..(271): NCBI GI NO: 18422554 NR Description: serine/threonine-protein kinase Mak
MASNVETNEIVAVKKMKRKFCHWEECISLREVKALQKLFHPNIVKLKEVTMENHELFFIFEHMECNLYDVIRERQVAFPERDIRNFMVQILQGLAYMHNNGYFHRDLKPENLLVTNGIIKIADFGLAREISSNPPYTDYVSTRWYRAPEVLLQSSVYTPAIDMWAVGAILAELFTLSPLFPGESETDQLYKICTVLGTPDCTIWPEGMNLPRSCSFKFFQNPPRNLWELIPNASSEAIDLIQQLCSWDPRRRPTAEQALQHPFFNVCNWVPRPVHDAYHTKTNGPKAEPRLELNLWDFSTEPDDCVLDLTLSLKPSFSGTDLGKHVPRRTEEEILLYPGFENTPVKSGFWPLVPSDRPVGDVPAIPSWQQAYMVDSQGAFSGSPFLQSNLLENRSLAPIRQVNFF

SEQ ID NO: 30202 - protein, 390 aa, Zea mays subsp. mays
  peptide (1)..(390): Ceres Seq. ID no. 12566859
  misc_feature (1)..(249): Pfam Name: Pfam Description:  Protein kinase domain
  misc_feature (1)..(390): NCBI GI NO: 34897492 NR Description: putative protein kinase
  misc_feature (1)..(352): NCBI GI NO: 7710959 NR Description: putative Cdc2-related protein kinase CRK2
  misc_feature (1)..(389): NCBI GI NO: 30682312 NR Description: serine/threonine protein kinase (MHK)
  misc_feature (1)..(389): NCBI GI NO: 481207 NR Description: serine/threonine-specific protein kinase MHK (EC2
  misc_feature (1)..(389): NCBI GI NO: 15235551 NR Description: serine/threonine-specific protein kinase MHK
  misc_feature (1)..(275): NCBI GI NO: 18415242 NR Description: kinase-like protein; protein id: At4g19110
  misc_feature (1)..(275): NCBI GI NO: 30684655 NR Description: protein kinase, putative [Arabidopsis thaliana]
  misc_feature (1)..(256): NCBI GI NO: 15450860 NR Description: serine/threonine-protein kinase Mak
  misc_feature (1)..(256): NCBI GI NO: 18422554 NR Description: serine/threonine-protein kinase Mak
  misc_feature (1)..(256): NCBI GI NO: 27948450 NR Description: GAMYB-binding protein
MKRKFCHWEECISLREVKALQKLFHPNIVKLKEVTMENHELFFIFEHMECNLYDVIRERQVAFPERDIRNFMVQILQGLAYMHNNGYFHRDLKPENLLVTNGIIKIADFGLAREISSNPPYTDYVSTRWYRAPEVLLQSSVYTPAIDMWAVGAILAELFTLSPLFPGESETDQLYKICTVLGTPDCTIWPEGMNLPRSCSFKFFQNPPRNLWELIPNASSEAIDLIQQLCSWDPRRRPTAEQALQHPFFNVCNWVPRPVHDAYHTKTNGPKAEPRLELNLWDFSTEPDDCVLDLTLSLKPSFSGTDLGKHVPRRTEEEILLYPGFENTPVKSGFWPLVPSDRPVGDVPAIPSWQQAYMVDSQGAFSGSPFLQSNLLENRSLAPIRQVNFF

SEQ ID NO: 30203 - DNA, 1511 bp, Zea mays subsp. mays
  misc_feature (1)..(1511): Ceres Seq. ID no. 12566628
aaagtcaaaagggcaagagggggcaaaaagggagaaatttcctctcacaaaaccctcgccagcttatcccccttcctccctcacacgatctctcctcgacggctaacccggattgccgtctcaggctcgggatccgggcgctcgcggtgatggacggcggcggcggcgctggcggcgcggagggggagctcacggcgcaggagacagcgctctacgaccgccagatccgcgtctggggcgtcgatgcccagaagagactaagtaaggcgcacgtgcttgtgtgtggcatgaacggaaccaccatcgagttctgcaagaatattgttctagctggagttggaagtttatccttgatggatgataatgtagtcacagaggaggatctgaatgcaaatttcctaattcctcctgatgagagcatatatggtggtagatctcgagcccaagtttgctgcgagtctttgatagatttcaatcctatggttcgagtttctgttgaaaagggtgatccatcattaattgatggagaattccttgacaagtttgacattgttgtacttagccgtgcatctcttaaaacaaagttgttgattaatgaaaactgtcgaaagagaagcaaacacattgcattttatactatagattgcaaggattcatgtggtgaaatatttgttgacttacagaagcatagctatgttcagaaaaagcctggaggagcaactgaacaacaggagttgacatattctagtcttcaggaagctatctctgtgccttggaatagtctaccgaagaagacggcaaaattatactttgctatgagagtactggaggattatgaattatctgaagggcgcagccctggcgaaacaacactttctgatatagatgcagttctggctcggaggaaggatatgtgtgataaaatgtctttgaatgagtctcgtattcctactactctcgtggaacgactgctagcagctggaaagaaggagcatcctcctgtatgtgctatccttggtggtattcttggtcaggaggtgatcaaatcgatatcctgcaagggcgatccagtcaagaatttcttctatttcgatgtggctgacggtaaaggtgtcatcgaggatatcccaccaccaccacctgcaaaataaagcactcagctgtgtaactctcgactcgacttggttcactaatcgttttctgtacccactcagcttcgaacatgtagcaacttttagatctagagccatgtgaaaaaaggcaagtttgactttaacccagatgtttagggattgttcgagcagcaaactgtgacagtatgtatgcatcgacaatttaaagctgaagtctggacggtttccatgcttttgggggcggatttcctttgttgtccctttacccatttgtcaaatttggtagcggtggttggggggagtggggaatgaagtgagaaggctatgtttataactgtgaaccgacggttgcagctatacatatcgtcatgcctgtgc

SEQ ID NO: 30204 - protein, 382 aa, Zea mays subsp. mays
  peptide (1)..(382): Ceres Seq. ID no. 12566629
  misc_feature (87)..(225): Pfam Name: Pfam Description:  ThiF family
  misc_feature (62)..(375): NCBI GI NO: 18416454 NR Description: ubiquitin activating enzyme - like protein
  misc_feature (62)..(375): NCBI GI NO: 22652852 NR Description: SUMO activating enzyme 1b [Arabidopsis thaliana]
  misc_feature (62)..(375): NCBI GI NO: 18423184 NR Description: ubiquitin activating enzyme; protein id:At5g50680
  misc_feature (62)..(375): NCBI GI NO: 30695912 NR Description: SUMO activating enzyme 1b (SAE1b)
  misc_feature (62)..(375): NCBI GI NO: 7488411 NR Description: ubiquitin-activating enzyme homolog F13M23
  misc_feature (62)..(375): NCBI GI NO: 21554965 NR Description: ubiquitin activating enzyme [Arabidopsis thaliana]
  misc_feature (62)..(375): NCBI GI NO: 3647283 NR Description: ubiquitin activating enzyme
  misc_feature (143)..(375): NCBI GI NO: 25494393 NR Description: probable ubiquitin activating enzyme 2
  misc_feature (52)..(235): NCBI GI NO: 9790247 NR Description: ubiquitin-like 1
  misc_feature (242)..(377): NCBI GI NO: 9790247 NR Description: ubiquitin-like 1
SQKGKRGQKGRNFLSQNPRQLIPLPPSHDLSSTANPDCRLRLGIRALAVMDGGGGAGGAEGELTAQETALYDRQIRVWGVDAQKRLSKAHVLVCGMNGTTIEFCKNIVLAGVGSLSLMDDNVVTEEDLNANFLIPPDESIYGGRSRAQVCCESLIDFNPMVRVSVEKGDPSLIDGEFLDKFDIVVLSRASLKTKLLINENCRKRSKHIAFYTIDCKDSCGEIFVDLQKHSYVQKKPGGATEQQELTYSSLQEAISVPWNSLPKKTAKLYFAMRVLEDYELSEGRSPGETTLSDIDAVLARRKDMCDKMSLNESRIPTTLVERLLAAGKKEHPPVCAILGGILGQEVIKSISCKGDPVKNFFYFDVADGKGVIEDIPPPPPAK

SEQ ID NO: 30205 - protein, 333 aa, Zea mays subsp. mays
  peptide (1)..(333): Ceres Seq. ID no. 12566630
  misc_feature (38)..(176): Pfam Name: Pfam Description:  ThiF family
  misc_feature (13)..(326): NCBI GI NO: 18416454 NR Description: ubiquitin activating enzyme - like protein
  misc_feature (13)..(326): NCBI GI NO: 22652852 NR Description: SUMO activating enzyme 1b [Arabidopsis thaliana]
  misc_feature (13)..(326): NCBI GI NO: 18423184 NR Description: ubiquitin activating enzyme; protein id:At5g50680
  misc_feature (13)..(326): NCBI GI NO: 30695912 NR Description: SUMO activating enzyme 1b (SAE1b)
  misc_feature (13)..(326): NCBI GI NO: 7488411 NR Description: ubiquitin-activating enzyme homolog F13M23
  misc_feature (13)..(326): NCBI GI NO: 21554965 NR Description: ubiquitin activating enzyme [Arabidopsis thaliana]
  misc_feature (13)..(326): NCBI GI NO: 3647283 NR Description: ubiquitin activating enzyme
  misc_feature (94)..(326): NCBI GI NO: 25494393 NR Description: probable ubiquitin activating enzyme 2
  misc_feature (3)..(186): NCBI GI NO: 9790247 NR Description: ubiquitin-like 1
  misc_feature (193)..(328): NCBI GI NO: 9790247 NR Description: ubiquitin-like 1
MDGGGGAGGAEGELTAQETALYDRQIRVWGVDAQKRLSKAHVLVCGMNGTTIEFCKNIVLAGVGSLSLMDDNVVTEEDLNANFLIPPDESIYGGRSRAQVCCESLIDFNPMVRVSVEKGDPSLIDGEFLDKFDIVVLSRASLKTKLLINENCRKRSKHIAFYTIDCKDSCGEIFVDLQKHSYVQKKPGGATEQQELTYSSLQEAISVPWNSLPKKTAKLYFAMRVLEDYELSEGRSPGETTLSDIDAVLARRKDMCDKMSLNESRIPTTLVERLLAAGKKEHPPVCAILGGILGQEVIKSISCKGDPVKNFFYFDVADGKGVIEDIPPPPPAK

SEQ ID NO: 30206 - protein, 287 aa, Zea mays subsp. mays
  peptide (1)..(287): Ceres Seq. ID no. 12566631
  misc_feature (1)..(130): Pfam Name: Pfam Description:  ThiF family
  misc_feature (1)..(280): NCBI GI NO: 18416454 NR Description: ubiquitin activating enzyme - like protein
  misc_feature (1)..(280): NCBI GI NO: 22652852 NR Description: SUMO activating enzyme 1b [Arabidopsis thaliana]
  misc_feature (1)..(280): NCBI GI NO: 18423184 NR Description: ubiquitin activating enzyme; protein id:At5g50680
  misc_feature (1)..(280): NCBI GI NO: 30695912 NR Description: SUMO activating enzyme 1b (SAE1b)
  misc_feature (1)..(280): NCBI GI NO: 7488411 NR Description: ubiquitin-activating enzyme homolog F13M23
  misc_feature (1)..(280): NCBI GI NO: 21554965 NR Description: ubiquitin activating enzyme [Arabidopsis thaliana]
  misc_feature (1)..(280): NCBI GI NO: 3647283 NR Description: ubiquitin activating enzyme
  misc_feature (48)..(280): NCBI GI NO: 25494393 NR Description: probable ubiquitin activating enzyme 2
  misc_feature (1)..(140): NCBI GI NO: 9790247 NR Description: ubiquitin-like 1
  misc_feature (147)..(282): NCBI GI NO: 9790247 NR Description: ubiquitin-like 1
MNGTTIEFCKNIVLAGVGSLSLMDDNVVTEEDLNANFLIPPDESIYGGRSRAQVCCESLIDFNPMVRVSVEKGDPSLIDGEFLDKFDIVVLSRASLKTKLLINENCRKRSKHIAFYTIDCKDSCGEIFVDLQKHSYVQKKPGGATEQQELTYSSLQEAISVPWNSLPKKTAKLYFAMRVLEDYELSEGRSPGETTLSDIDAVLARRKDMCDKMSLNESRIPTTLVERLLAAGKKEHPPVCAILGGILGQEVIKSISCKGDPVKNFFYFDVADGKGVIEDIPPPPPAK

SEQ ID NO: 30207 - DNA, 1711 bp, Zea mays subsp. mays
  misc_feature (1)..(1711): Ceres Seq. ID no. 12566632
cgttctgagtgaaaccattctccgttcaacgtgtactggtctaccccgggcccggtccgcaccccgccgtcgcacccgcacggcacccccttcgtcccttccgcaagaaaggaaacgagagagaaaatcgagtgaaaaggaagggaaacaacataacaaatcgcaaagaggcgtcttccaagtttgtagggttaccggatcggaggagcatccccgcctaggtcaccacagccatggttcgcggatcgctaggcaagcttgcgtcgcgcgccctctccgtcgccgggagatggcagcaccagcagcttcgccgcctcaacatccacgagtaccagggtgcggagttgatggggaagtacggtatcaacgtacccaggggtgcggcggcggggtccgtacaggaggtcaatgacgccttgaagaacatgttccccagtgagaaagagatagttgttaaaagtcaaatccttgctggtggccgagggctgggaactttcaaaagtgggctgcaaggaggtgtccatattgttaaggctgaggaagctgaaagcattgcacgtaaaatgttaggccagattctggtaacgaaacaaactggtccggagggaaagattgtgagcaaggtctacttgtgtgagaaactgtctcttactaatgagatgtattttgccatcacccttgataggaaaactgctggtccgctcattattgcttgcagcaagggaggaaccagtattgaagatcttgcggagaagtatcctgatatgattatcaaggttcctgttgatgtatttaaaggaataacagacgaggatgcagctaaagttgttgatggtctagctctaaagtcagcggataggcagtcttctatagaacagattaagaaactgtatgaacttttctgcaagtctgattgcacattgctggagataaatcctctggcggagacagctgacaacaagcttgttgctgctgatgcaaagttgaactttgatgataatgctgcatttagacagaaagaaatatttgcacttcgtgatacaactcaggaagaccccagggaggtcgctgctgccaaagcagatttgaactatattggtcttgatggagagattggttgcatggtgaatggagcaggattggccatggcgaccatggatattataaagttgcatggtgggacgcctgccaatttccttgatgttggtgggagtgcatcagaggggcaggttgtggaagcttttaagatactgacttcagatgatagagtgaaggcaattctagtgaacatttttgggggcattatgaaatgtgacgtgatagcaagtggaattgttaatgctgctaaacaggttgacctgaaggttcctgttgttgttcggttggaaggcaccaatgtagaccaaggaaaaaggattcttaaggaaagtggaatgactttgatcactgcagaagatcttgatgatgcggcagagaaagctgtaaaagcatccgtcaaataactatagtgtatcaatctgaagcttattttcttcactggtacaagatgagcagtgctcttttacggatttcgggctggggcagaagtcgcgaactgcaacttttttgaagcggggttattttgacctagttttcctgttaaacattgccagtgccgaaactttgtcgtctcatgttgataaacatttatcggggccattgggcagctgct

SEQ ID NO: 30208 - protein, 422 aa, Zea mays subsp. mays
  peptide (1)..(422): Ceres Seq. ID no. 12566633
  misc_feature (71)..(233): Pfam Name: Pfam Description:  ATP-grasp domain
  misc_feature (2)..(419): NCBI GI NO: 15225353 NR Description: succinyl-CoA ligase beta subunit
  misc_feature (2)..(419): NCBI GI NO: 21593189 NR Description: succinyl-CoA ligase beta subunit
  misc_feature (6)..(419): NCBI GI NO: 27803873 NR Description: succinyl CoA ligase beta subunit
  misc_feature (24)..(422): NCBI GI NO: 28829983 NR Description: similar to Sus scrofa (Pig). Succinyl-CoA ligase
  misc_feature (24)..(418): NCBI GI NO: 28828953 NR Description: similar to Mus musculus (Mouse)
  misc_feature (21)..(420): NCBI GI NO: 34874487 NR Description: similar to Succinyl-CoA ligase
  misc_feature (1)..(420): NCBI GI NO: 20876884 NR Description: succinate-Coenzyme A ligase
  misc_feature (1)..(420): NCBI GI NO: 11321583 NR Description: succinate-CoA ligase, ADP-forming, beta subunit
  misc_feature (1)..(420): NCBI GI NO: 21263997 NR Description: Succinyl-CoA ligase
  misc_feature (1)..(420): NCBI GI NO: 34364605 NR Description: hypothetical protein [Homo sapiens]
MVRGSLGKLASRALSVAGRWQHQQLRRLNIHEYQGAELMGKYGINVPRGAAAGSVQEVNDALKNMFPSEKEIVVKSQILAGGRGLGTFKSGLQGGVHIVKAEEAESIARKMLGQILVTKQTGPEGKIVSKVYLCEKLSLTNEMYFAITLDRKTAGPLIIACSKGGTSIEDLAEKYPDMIIKVPVDVFKGITDEDAAKVVDGLALKSADRQSSIEQIKKLYELFCKSDCTLLEINPLAETADNKLVAADAKLNFDDNAAFRQKEIFALRDTTQEDPREVAAAKADLNYIGLDGEIGCMVNGAGLAMATMDIIKLHGGTPANFLDVGGSASEGQVVEAFKILTSDDRVKAILVNIFGGIMKCDVIASGIVNAAKQVDLKVPVVVRLEGTNVDQGKRILKESGMTLITAEDLDDAAEKAVKASVK

SEQ ID NO: 30209 - protein, 384 aa, Zea mays subsp. mays
  peptide (1)..(384): Ceres Seq. ID no. 12566634
  misc_feature (33)..(195): Pfam Name: Pfam Description:  ATP-grasp domain
  misc_feature (1)..(381): NCBI GI NO: 15225353 NR Description: succinyl-CoA ligase beta subunit
  misc_feature (1)..(381): NCBI GI NO: 21593189 NR Description: succinyl-CoA ligase beta subunit
  misc_feature (1)..(381): NCBI GI NO: 27803873 NR Description: succinyl CoA ligase beta subunit
  misc_feature (1)..(384): NCBI GI NO: 28829983 NR Description: similar to Sus scrofa (Pig). Succinyl-CoA ligase
  misc_feature (1)..(380): NCBI GI NO: 28828953 NR Description: similar to Mus musculus (Mouse)
  misc_feature (1)..(382): NCBI GI NO: 34874487 NR Description: similar to Succinyl-CoA ligase
  misc_feature (1)..(382): NCBI GI NO: 20876884 NR Description: succinate-Coenzyme A ligase
  misc_feature (1)..(382): NCBI GI NO: 11321583 NR Description: succinate-CoA ligase, ADP-forming, beta subunit
  misc_feature (1)..(382): NCBI GI NO: 21263997 NR Description: Succinyl-CoA ligase
  misc_feature (1)..(382): NCBI GI NO: 34364605 NR Description: hypothetical protein [Homo sapiens]
MGKYGINVPRGAAAGSVQEVNDALKNMFPSEKEIVVKSQILAGGRGLGTFKSGLQGGVHIVKAEEAESIARKMLGQILVTKQTGPEGKIVSKVYLCEKLSLTNEMYFAITLDRKTAGPLIIACSKGGTSIEDLAEKYPDMIIKVPVDVFKGITDEDAAKVVDGLALKSADRQSSIEQIKKLYELFCKSDCTLLEINPLAETADNKLVAADAKLNFDDNAAFRQKEIFALRDTTQEDPREVAAAKADLNYIGLDGEIGCMVNGAGLAMATMDIIKLHGGTPANFLDVGGSASEGQVVEAFKILTSDDRVKAILVNIFGGIMKCDVIASGIVNAAKQVDLKVPVVVRLEGTNVDQGKRILKESGMTLITAEDLDDAAEKAVKASVK

SEQ ID NO: 30210 - protein, 358 aa, Zea mays subsp. mays
  peptide (1)..(358): Ceres Seq. ID no. 12566635
  misc_feature (7)..(169): Pfam Name: Pfam Description:  ATP-grasp domain
  misc_feature (1)..(355): NCBI GI NO: 15225353 NR Description: succinyl-CoA ligase beta subunit
  misc_feature (1)..(355): NCBI GI NO: 21593189 NR Description: succinyl-CoA ligase beta subunit
  misc_feature (1)..(355): NCBI GI NO: 27803873 NR Description: succinyl CoA ligase beta subunit
  misc_feature (1)..(358): NCBI GI NO: 28829983 NR Description: similar to Sus scrofa (Pig). Succinyl-CoA ligase
  misc_feature (1)..(354): NCBI GI NO: 28828953 NR Description: similar to Mus musculus (Mouse)
  misc_feature (1)..(356): NCBI GI NO: 34874487 NR Description: similar to Succinyl-CoA ligase
  misc_feature (1)..(356): NCBI GI NO: 20876884 NR Description: succinate-Coenzyme A ligase
  misc_feature (1)..(356): NCBI GI NO: 11321583 NR Description: succinate-CoA ligase, ADP-forming, beta subunit
  misc_feature (1)..(356): NCBI GI NO: 21263997 NR Description: Succinyl-CoA ligase
  misc_feature (1)..(356): NCBI GI NO: 34364605 NR Description: hypothetical protein [Homo sapiens]
MFPSEKEIVVKSQILAGGRGLGTFKSGLQGGVHIVKAEEAESIARKMLGQILVTKQTGPEGKIVSKVYLCEKLSLTNEMYFAITLDRKTAGPLIIACSKGGTSIEDLAEKYPDMIIKVPVDVFKGITDEDAAKVVDGLALKSADRQSSIEQIKKLYELFCKSDCTLLEINPLAETADNKLVAADAKLNFDDNAAFRQKEIFALRDTTQEDPREVAAAKADLNYIGLDGEIGCMVNGAGLAMATMDIIKLHGGTPANFLDVGGSASEGQVVEAFKILTSDDRVKAILVNIFGGIMKCDVIASGIVNAAKQVDLKVPVVVRLEGTNVDQGKRILKESGMTLITAEDLDDAAEKAVKASVK

SEQ ID NO: 30211 - DNA, 1277 bp, Zea mays subsp. mays
  misc_feature (1)..(1277): Ceres Seq. ID no. 12352611
aggcacaaggaagaacgaagagagatcagcgacttaacaacaataatggccaccgccatagttcccacggacgccgagctgctgcaggcgcaggccgacctgtggcgccacagcctctactacctgacatccatggcgctcaagtgcgcggtggagctccacatcccgaccgccatccacaacctaggcgggtctgccacgctgccggacctcgtggccgcgctgtccctgccagcggccaagctcccgttcctcgggcgcgtgatgcggctgctggtcacgtcggggcgtcttcgcgtcgtccgacgacgtgcagtaccggctgaacccgctgtcctggctgctggtggagggcgtggagtcggaggaccacacctaccagaagtacttcgtgctgggcaccgtctcccgccactacgtggaggccggcatgtccctggccgactggttcaagaaggaggaggacgaggaccgccagctgccgtcgccgttcgaggccctgcacggggtgcccctcgtccacgagagcaccaagctgctggacgaggagctggacagggtcgtggaggaaggcgtggccgcgcacgacaacctggccatcgggaccgtcatacgggagtgcggcgccgacgtcttcagcggcctccgctcgctcacctactgctgcggcaggcaggggaacgccagcgcggccgccatcgtcaaggccttcccagacatcaagtgcaccgtgctcaaccttcccagggtcgtcgaggagacgacgaccaagaccatcaccatcccgcctgcgcaggctgtcatgctcaagctcgtcctgcacttctggagcgacgacgactgcgtcaagatcctggagctgtgcaggaaggccatcccttcccgccaagaaggagggaaggtgatcatcattgagatactcctgggcccgtacatggggccggtcatgtacgaggcccagctgctgatggacatgctcatgatggtgaacaccaagggcaggcagcgcggcgaagacgactggcgccacatctttaccaaggctggcttctccgactacaaggttgtcaagaaaatcggagctcgtggtgtcatcgaggtctacccatgatccatgatcgatgtcatgtgactgtgagaggacgatactgtacaattaaataaacggggtatctagctactactcagcttttgtacctcgagatccatgcatgttaattacttgcttccatctgttttcaaaatgcatctatgtaatgtacttcgcttcttcgtcc

SEQ ID NO: 30212 - protein, 304 aa, Zea mays subsp. mays
  peptide (1)..(304): Ceres Seq. ID no. 12352612
  misc_feature (29)..(96): NCBI GI NO: 27777630 NR Description: O-methyltransferase [Secale cereale]
  misc_feature (16)..(96): NCBI GI NO: 7447882 NR Description: herbicide safener binding protein 1 - maize
  misc_feature (12)..(96): NCBI GI NO: 38175602 NR Description: putative catechol O-methyltransferase
  misc_feature (1)..(96): NCBI GI NO: 453244 NR Description: flavonoid 7-O-methyltransferase
  misc_feature (1)..(96): NCBI GI NO: 2130032 NR Description: catechol O-methyltransferase (EC 2.1.1.6) - barley
  misc_feature (23)..(96): NCBI GI NO: 37530600 NR Description: putative o-methyltransferase ZRP4
  misc_feature (23)..(95): NCBI GI NO: 1353193 NR Description: O-METHYLTRANSFERASE ZRP4 (OMT)
  misc_feature (20)..(103): NCBI GI NO: 37530606 NR Description: putative o-methyltransferase ZRP4
  misc_feature (26)..(96): NCBI GI NO: 34909608 NR Description: putative o-methyltransferase
  misc_feature (26)..(96): NCBI GI NO: 20514369 NR Description: orcinol O-methyltransferase [Rosa hybrid cultivar]
RHKEERREISDLTTIMATAIVPTDAELLQAQADLWRHSLYYLTSMALKCAVELHIPTAIHNLGGSATLPDLVAALSLPAAKLPFLGRVMRLLVTSGRLRVVRRRAVPAEPAVLAAGGGRGVGGPHLPEVLRAGHRLPPLRGGRHVPGRLVQEGGGRGPPAAVAVRGPARGAPRPREHQAAGRGAGQGRGGRRGRARQPGHRDRHTGVRRRRLQRPPLAHLLLRQAGERQRGRHRQGLPRHQVHRAQPSQGRRGDDDQDHHHPACAGCHAQARPALLERRRLRQDPGAVQEGHPFPPRRREGDHH

SEQ ID NO: 30213 - protein, 289 aa, Zea mays subsp. mays
  peptide (1)..(289): Ceres Seq. ID no. 12352613
  misc_feature (14)..(81): NCBI GI NO: 27777630 NR Description: O-methyltransferase [Secale cereale]
  misc_feature (1)..(81): NCBI GI NO: 7447882 NR Description: herbicide safener binding protein 1 - maize
  misc_feature (1)..(81): NCBI GI NO: 38175602 NR Description: putative catechol O-methyltransferase
  misc_feature (1)..(81): NCBI GI NO: 453244 NR Description: flavonoid 7-O-methyltransferase
  misc_feature (1)..(81): NCBI GI NO: 2130032 NR Description: catechol O-methyltransferase (EC 2.1.1.6) - barley
  misc_feature (8)..(81): NCBI GI NO: 37530600 NR Description: putative o-methyltransferase ZRP4
  misc_feature (8)..(80): NCBI GI NO: 1353193 NR Description: O-METHYLTRANSFERASE ZRP4 (OMT)
  misc_feature (5)..(88): NCBI GI NO: 37530606 NR Description: putative o-methyltransferase ZRP4
  misc_feature (11)..(81): NCBI GI NO: 34909608 NR Description: putative o-methyltransferase
  misc_feature (11)..(81): NCBI GI NO: 20514369 NR Description: orcinol O-methyltransferase [Rosa hybrid cultivar]
MATAIVPTDAELLQAQADLWRHSLYYLTSMALKCAVELHIPTAIHNLGGSATLPDLVAALSLPAAKLPFLGRVMRLLVTSGRLRVVRRRAVPAEPAVLAAGGGRGVGGPHLPEVLRAGHRLPPLRGGRHVPGRLVQEGGGRGPPAAVAVRGPARGAPRPREHQAAGRGAGQGRGGRRGRARQPGHRDRHTGVRRRRLQRPPLAHLLLRQAGERQRGRHRQGLPRHQVHRAQPSQGRRGDDDQDHHHPACAGCHAQARPALLERRRLRQDPGAVQEGHPFPPRRREGDHH

SEQ ID NO: 30214 - protein, 260 aa, Zea mays subsp. mays
  peptide (1)..(260): Ceres Seq. ID no. 12352614
  misc_feature (1)..(52): NCBI GI NO: 27777630 NR Description: O-methyltransferase [Secale cereale]
  misc_feature (1)..(52): NCBI GI NO: 7447882 NR Description: herbicide safener binding protein 1 - maize
  misc_feature (1)..(52): NCBI GI NO: 38175602 NR Description: putative catechol O-methyltransferase
  misc_feature (1)..(52): NCBI GI NO: 453244 NR Description: flavonoid 7-O-methyltransferase
  misc_feature (1)..(52): NCBI GI NO: 2130032 NR Description: catechol O-methyltransferase (EC 2.1.1.6) - barley
  misc_feature (1)..(52): NCBI GI NO: 37530600 NR Description: putative o-methyltransferase ZRP4
  misc_feature (1)..(51): NCBI GI NO: 1353193 NR Description: O-METHYLTRANSFERASE ZRP4 (OMT)
  misc_feature (1)..(59): NCBI GI NO: 37530606 NR Description: putative o-methyltransferase ZRP4
  misc_feature (1)..(52): NCBI GI NO: 34909608 NR Description: putative o-methyltransferase
  misc_feature (1)..(52): NCBI GI NO: 20514369 NR Description: orcinol O-methyltransferase [Rosa hybrid cultivar]
MALKCAVELHIPTAIHNLGGSATLPDLVAALSLPAAKLPFLGRVMRLLVTSGRLRVVRRRAVPAEPAVLAAGGGRGVGGPHLPEVLRAGHRLPPLRGGRHVPGRLVQEGGGRGPPAAVAVRGPARGAPRPREHQAAGRGAGQGRGGRRGRARQPGHRDRHTGVRRRRLQRPPLAHLLLRQAGERQRGRHRQGLPRHQVHRAQPSQGRRGDDDQDHHHPACAGCHAQARPALLERRRLRQDPGAVQEGHPFPPRRREGDHH

SEQ ID NO: 30215 - protein, 226 aa, Zea mays subsp. mays
  peptide (1)..(226): Ceres Seq. ID no. 12352615
  misc_feature (1)..(203): Pfam Name: Pfam Description:  O-methyltransferase
  misc_feature (1)..(225): NCBI GI NO: 27777630 NR Description: O-methyltransferase [Secale cereale]
  misc_feature (1)..(226): NCBI GI NO: 7447882 NR Description: herbicide safener binding protein 1 - maize
  misc_feature (1)..(226): NCBI GI NO: 38175602 NR Description: putative catechol O-methyltransferase
  misc_feature (1)..(226): NCBI GI NO: 453244 NR Description: flavonoid 7-O-methyltransferase
  misc_feature (1)..(226): NCBI GI NO: 2130032 NR Description: catechol O-methyltransferase (EC 2.1.1.6) - barley
  misc_feature (1)..(226): NCBI GI NO: 37530600 NR Description: putative o-methyltransferase ZRP4
  misc_feature (1)..(226): NCBI GI NO: 1353193 NR Description: O-METHYLTRANSFERASE ZRP4 (OMT)
  misc_feature (1)..(226): NCBI GI NO: 37530606 NR Description: putative o-methyltransferase ZRP4
  misc_feature (10)..(226): NCBI GI NO: 34909608 NR Description: putative o-methyltransferase
  misc_feature (3)..(226): NCBI GI NO: 20514369 NR Description: orcinol O-methyltransferase [Rosa hybrid cultivar]
MSLADWFKKEEDEDRQLPSPFEALHGVPLVHESTKLLDEELDRVVEEGVAAHDNLAIGTVIRECGADVFSGLRSLTYCCGRQGNASAAAIVKAFPDIKCTVLNLPRVVEETTTKTITIPPAQAVMLKLVLHFWSDDDCVKILELCRKAIPSRQEGGKVIIIEILLGPYMGPVMYEAQLLMDMLMMVNTKGRQRGEDDWRHIFTKAGFSDYKVVKKIGARGVIEVYP

SEQ ID NO: 30216 - DNA, 1345 bp, Zea mays subsp. mays
  misc_feature (1)..(1345): Ceres Seq. ID no. 13494398
agaacatcctaatcgaaaaaccccactgctcggtgttcactccggtcgggccatggcgcgcgccggcgtctctaccgcgccgctctcccgcactcacctcctcccaccacgtccttccctcctccacaacacgcagcaccactccctcctcctccggccccagcgcaaggcgcccgccaccaccgcggcggcgctgccgccggccgcggacctcccggcgctgtccctcccggccgcggccgccgcggctgccgcgctggcggcggcggtgtcactttccgaccccgagcggcggcggcgctcgcaggccgaggcggccggcggaggtgacaaggaggccgtccgcgcctacttcaactccacggggttcgagcggtggcgcaagatctacgggtcggcgacggagggcgtgaaccgcgtgcagcttgacatccgcgagggccacgcgcagacggtggcggcggcgctggccatgctccgcgactccccgctggagctgtcgggcgccaccgtgtgcgacgccggctgcgggacggggtcgctggccatcccgctcgcggcggcgggcgccgacgtcctggcctccgacatctcggcggccatggtgtcggaggcgcagcggcaggcggcggcgcagtcgtcgtcgtcgtcgttccggatgccgcggttcgaggtccgcgacctggagagcctggaggggcggtacgacgtggtggtgtgcctggacgtgctcatccactacccgcgggaggaggcgcgcgccatgatccgccacctcgcgtcgctggcggacaagcggctgctcatcagcttcgcgcccaggacgctctacttcgacttcctcaagcgcgtgggcgagctgttcccgggcccgtcaaaggccacgcgcgcctacctgcacgccgaggccgacatcgaggacgcgctccgccaggccggctggcgcgtcgccaaccgcggcttcatctccacgcagttctacttcgccaagctcttcgacgccgtgcccgtcggctcctcgacgtagccgtgtaggccgcccgccgtgtgcttgtgtgtttgtttgcctcacgcgactgtttatagagctccagacggtcgccgcagcgcgcgcggcggcgtagcctgtttgtacttgcaagctcactcagttccattccgtagcttgatgccttgattgattcccacgtagacttccatcgacaaacacaattgcagggttttgagtttttgacccaaacgacacgacaaagagttcttatcatccaggggcctcgaccaccgtgctcgttttacaaaagctgtaattaaagactactttgcaagattatcgtgattttcattc

SEQ ID NO: 30217 - protein, 341 aa, Zea mays subsp. mays
  peptide (1)..(341): Ceres Seq. ID no. 13494399
  misc_feature (18)..(341): NCBI GI NO: 6006382 NR Description: Similar to magnesium-protoporphyrin IXmethyltransferase
  misc_feature (53)..(337): NCBI GI NO: 15234905 NR Description: magnesium-protoporphyrin O-methyltransferase
  misc_feature (35)..(336): NCBI GI NO: 7839365 NR Description: S-adenosyl-L-methionine Mg-protoporphyrin IXmethyltranserase
  misc_feature (110)..(335): NCBI GI NO: 16332013 NR Description: Mg-protoporphyrin IX methyl transferase
  misc_feature (110)..(335): NCBI GI NO: 7470730 NR Description: magnesium-protoporphyrin IX methyltransferase (EC2
  misc_feature (96)..(336): NCBI GI NO: 22297994 NR Description: Mg-protoporphyrin IX methyl transferase
  misc_feature (110)..(334): NCBI GI NO: 17230693 NR Description: Mg-protoporphyrin IX methyl transferase
  misc_feature (110)..(334): NCBI GI NO: 23130334 NR Description: hypothetical protein [Nostoc punctiforme]
  misc_feature (110)..(335): NCBI GI NO: 23040051 NR Description: hypothetical protein
EHPNRKTPLLGVHSGRAMARAGVSTAPLSRTHLLPPRPSLLHNTQHHSLLLRPQRKAPATTAAALPPAADLPALSLPAAAAAAAALAAAVSLSDPERRRRSQAEAAGGGDKEAVRAYFNSTGFERWRKIYGSATEGVNRVQLDIREGHAQTVAAALAMLRDSPLELSGATVCDAGCGTGSLAIPLAAAGADVLASDISAAMVSEAQRQAAAQSSSSSFRMPRFEVRDLESLEGRYDVVVCLDVLIHYPREEARAMIRHLASLADKRLLISFAPRTLYFDFLKRVGELFPGPSKATRAYLHAEADIEDALRQAGWRVANRGFISTQFYFAKLFDAVPVGSST

SEQ ID NO: 30218 - protein, 324 aa, Zea mays subsp. mays
  peptide (1)..(324): Ceres Seq. ID no. 13494400
  misc_feature (1)..(324): NCBI GI NO: 6006382 NR Description: Similar to magnesium-protoporphyrin IXmethyltransferase
  misc_feature (36)..(320): NCBI GI NO: 15234905 NR Description: magnesium-protoporphyrin O-methyltransferase
  misc_feature (18)..(319): NCBI GI NO: 7839365 NR Description: S-adenosyl-L-methionine Mg-protoporphyrin IXmethyltranserase
  misc_feature (93)..(318): NCBI GI NO: 16332013 NR Description: Mg-protoporphyrin IX methyl transferase
  misc_feature (93)..(318): NCBI GI NO: 7470730 NR Description: magnesium-protoporphyrin IX methyltransferase (EC2
  misc_feature (79)..(319): NCBI GI NO: 22297994 NR Description: Mg-protoporphyrin IX methyl transferase
  misc_feature (93)..(317): NCBI GI NO: 17230693 NR Description: Mg-protoporphyrin IX methyl transferase
  misc_feature (93)..(317): NCBI GI NO: 23130334 NR Description: hypothetical protein [Nostoc punctiforme]
  misc_feature (93)..(318): NCBI GI NO: 23040051 NR Description: hypothetical protein
MARAGVSTAPLSRTHLLPPRPSLLHNTQHHSLLLRPQRKAPATTAAALPPAADLPALSLPAAAAAAAALAAAVSLSDPERRRRSQAEAAGGGDKEAVRAYFNSTGFERWRKIYGSATEGVNRVQLDIREGHAQTVAAALAMLRDSPLELSGATVCDAGCGTGSLAIPLAAAGADVLASDISAAMVSEAQRQAAAQSSSSSFRMPRFEVRDLESLEGRYDVVVCLDVLIHYPREEARAMIRHLASLADKRLLISFAPRTLYFDFLKRVGELFPGPSKATRAYLHAEADIEDALRQAGWRVANRGFISTQFYFAKLFDAVPVGSST

SEQ ID NO: 30219 - protein, 184 aa, Zea mays subsp. mays
  peptide (1)..(184): Ceres Seq. ID no. 13494401
  misc_feature (1)..(184): NCBI GI NO: 6006382 NR Description: Similar to magnesium-protoporphyrin IXmethyltransferase
  misc_feature (1)..(180): NCBI GI NO: 15234905 NR Description: magnesium-protoporphyrin O-methyltransferase
  misc_feature (1)..(179): NCBI GI NO: 7839365 NR Description: S-adenosyl-L-methionine Mg-protoporphyrin IXmethyltranserase
  misc_feature (1)..(178): NCBI GI NO: 16332013 NR Description: Mg-protoporphyrin IX methyl transferase
  misc_feature (1)..(178): NCBI GI NO: 7470730 NR Description: magnesium-protoporphyrin IX methyltransferase (EC2
  misc_feature (1)..(179): NCBI GI NO: 22297994 NR Description: Mg-protoporphyrin IX methyl transferase
  misc_feature (1)..(177): NCBI GI NO: 17230693 NR Description: Mg-protoporphyrin IX methyl transferase
  misc_feature (1)..(177): NCBI GI NO: 23130334 NR Description: hypothetical protein [Nostoc punctiforme]
  misc_feature (1)..(178): NCBI GI NO: 23040051 NR Description: hypothetical protein
MLRDSPLELSGATVCDAGCGTGSLAIPLAAAGADVLASDISAAMVSEAQRQAAAQSSSSSFRMPRFEVRDLESLEGRYDVVVCLDVLIHYPREEARAMIRHLASLADKRLLISFAPRTLYFDFLKRVGELFPGPSKATRAYLHAEADIEDALRQAGWRVANRGFISTQFYFAKLFDAVPVGSST

SEQ ID NO: 30220 - DNA, 1350 bp, Zea mays subsp. mays
  misc_feature (1)..(1350): Ceres Seq. ID no. 12408432
atcacactcgcacagtctcaccacagcgagcgagagcaaggcgcccaagcaaccaccgcgagaacaagtcgcagccaaacagccccgtctcccagcgaagcttgagcttgcattattctaccatgtcttccatggagctgctccacgccgtcgtcccggagaagcagagcgaggaggaggtcgcgcccgcagcgacgaccacgagcagcagcgccaccgccacgggcggggacgagggcgcccacgtgctccaggggtgggccaagaggaagcgctcgcgccgccagcgatcggaggaggagaacctcgcgctctgcctcctcatgctctcccgcggtggccaccaccgcgtccaggcgccgccaacgccggtcccgtccgcggcgccggccgccgcggagttcaggtgctccgtctgcggcaagtccttcagctcctaccaggcgctggggggccacaagaccagccaccgcgtcaagctgcccacccctcctcctcctcctcctgctgtaactgtcccggcagcagtgcccgtcccggaggcccccgccccgaccaccgtcgtcgtcccgccgctgccgccagtcgaggtcggccgcgagccggccacgtcatccaccgccgcgtcctccgacggggcggcctcgagcagagtccaccggtgctccatctgccacaaggagttcccgaccggccaggcgctcggcgggcacaagaggaagcactacgacgggggcgtcggcagcgccgccgcgtccaccgacgtcccggcggcgcccgccgagacgtccgccgaggtcgggagctccgccgcgcgtgcgttcgacctcaacctcccggccgtgccggagttcgtgttccggtgcggcaagcccggcaagatgtgggaggaggacgaggaggtgcagagccccctcgccttcaagaagccccgcctcctcatgaccgcgtgaaaccgctgcgcgcgcgggcggcggatctcatctcatcacccgtccaagattttggtccgcagctgccgagttcagcggtggaagtggaacacactattcgttcattcatttcgtatggtgccagtagcgctattgtttgatttttgtggctgctcctcttgtacagtaccgagtgcgagaaaagatgcatagtcatcgtatacataccaatacaataccgtacctataggtcttcctattcctgtggaagagtagaacttgtatccttattagctgtcagttcatacacacttggttctcattatcagagatcattggtgaattagtggttttgtatcataagcttattgtaaatgatggattggagattagtatggaatcagatacccatttgtgc

SEQ ID NO: 30221 - protein, 363 aa, Zea mays subsp. mays
  peptide (1)..(363): Ceres Seq. ID no. 12408433
  misc_feature (45)..(331): NCBI GI NO: 29247944 NR Description: GLP_26_54603_52153 [Giardia lamblia ATCC 50803]
  misc_feature (48)..(324): NCBI GI NO: 29247944 NR Description: GLP_26_54603_52153 [Giardia lamblia ATCC 50803]
SHSHSLTTASESKAPKQPPREQVAAKQPRLPAKLELALFYHVFHGAAPRRRPGEAERGGGRARSDDHEQQRHRHGRGRGRPRAPGVGQEEALAPPAIGGGEPRALPPHALPRWPPPRPGAANAGPVRGAGRRGVQVLRLRQVLQLLPGAGGPQDQPPRQAAHPSSSSSCCNCPGSSARPGGPRPDHRRRPAAAASRGRPRAGHVIHRRVLRRGGLEQSPPVLHLPQGVPDRPGARRAQEEALRRGRRQRRRVHRRPGGARRDVRRGRELRRACVRPQPPGRAGVRVPVRQARQDVGGGRGGAEPPRLQEAPPPHDRVKPLRARAADLISSPVQDFGPQLPSSAVEVEHTIRSFISYGASSAIV

SEQ ID NO: 30222 - protein, 316 aa, Zea mays subsp. mays
  peptide (1)..(316): Ceres Seq. ID no. 12408434
  misc_feature (219)..(241): Pfam Name: Pfam Description:  Zinc finger, C2H2 type
  misc_feature (39)..(313): NCBI GI NO: 12698882 NR Description: zinc finger transcription factor ZF1
  misc_feature (54)..(313): NCBI GI NO: 34925590 NR Description: Zinc-finger protein 1 (WZF1)
  misc_feature (45)..(184): NCBI GI NO: 34015350 NR Description: putative zinc finger transcription factor
  misc_feature (204)..(314): NCBI GI NO: 33331578 NR Description: zinc finger protein [Capsicum annuum]
  misc_feature (87)..(161): NCBI GI NO: 33331578 NR Description: zinc finger protein [Capsicum annuum]
  misc_feature (57)..(186): NCBI GI NO: 31075792 NR Description: zinc finger transcription factor OsZFP34
  misc_feature (179)..(316): NCBI GI NO: 31075792 NR Description: zinc finger transcription factor OsZFP34
  misc_feature (203)..(314): NCBI GI NO: 7488707 NR Description: probable zinc finger protein SCOF-1
  misc_feature (86)..(181): NCBI GI NO: 7488707 NR Description: probable zinc finger protein SCOF-1
  misc_feature (63)..(173): NCBI GI NO: 34393438 NR Description: putative zinc finger transcription factor ZF1
HTRTVSPQRARARRPSNHRENKSQPNSPVSQRSLSLHYSTMSSMELLHAVVPEKQSEEEVAPAATTTSSSATATGGDEGAHVLQGWAKRKRSRRQRSEEENLALCLLMLSRGGHHRVQAPPTPVPSAAPAAAEFRCSVCGKSFSSYQALGGHKTSHRVKLPTPPPPPPAVTVPAAVPVPEAPAPTTVVVPPLPPVEVGREPATSSTAASSDGAASSRVHRCSICHKEFPTGQALGGHKRKHYDGGVGSAAASTDVPAAPAETSAEVGSSAARAFDLNLPAVPEFVFRCGKPGKMWEEDEEVQSPLAFKKPRLLMTA

SEQ ID NO: 30223 - protein, 276 aa, Zea mays subsp. mays
  peptide (1)..(276): Ceres Seq. ID no. 12408435
  misc_feature (179)..(201): Pfam Name: Pfam Description:  Zinc finger, C2H2 type
  misc_feature (1)..(273): NCBI GI NO: 12698882 NR Description: zinc finger transcription factor ZF1
  misc_feature (14)..(273): NCBI GI NO: 34925590 NR Description: Zinc-finger protein 1 (WZF1)
  misc_feature (5)..(144): NCBI GI NO: 34015350 NR Description: putative zinc finger transcription factor
  misc_feature (164)..(274): NCBI GI NO: 33331578 NR Description: zinc finger protein [Capsicum annuum]
  misc_feature (47)..(121): NCBI GI NO: 33331578 NR Description: zinc finger protein [Capsicum annuum]
  misc_feature (17)..(146): NCBI GI NO: 31075792 NR Description: zinc finger transcription factor OsZFP34
  misc_feature (139)..(276): NCBI GI NO: 31075792 NR Description: zinc finger transcription factor OsZFP34
  misc_feature (163)..(274): NCBI GI NO: 7488707 NR Description: probable zinc finger protein SCOF-1
  misc_feature (46)..(141): NCBI GI NO: 7488707 NR Description: probable zinc finger protein SCOF-1
  misc_feature (23)..(133): NCBI GI NO: 34393438 NR Description: putative zinc finger transcription factor ZF1
MSSMELLHAVVPEKQSEEEVAPAATTTSSSATATGGDEGAHVLQGWAKRKRSRRQRSEEENLALCLLMLSRGGHHRVQAPPTPVPSAAPAAAEFRCSVCGKSFSSYQALGGHKTSHRVKLPTPPPPPPAVTVPAAVPVPEAPAPTTVVVPPLPPVEVGREPATSSTAASSDGAASSRVHRCSICHKEFPTGQALGGHKRKHYDGGVGSAAASTDVPAAPAETSAEVGSSAARAFDLNLPAVPEFVFRCGKPGKMWEEDEEVQSPLAFKKPRLLMTA

SEQ ID NO: 30224 - DNA, 985 bp, Zea mays subsp. mays
  misc_feature (1)..(985): Ceres Seq. ID no. 12360792
gcagcgaggaacgtgatcagaatcagccagtggtgcttgtgacggggtgctcggagggcggcatcggccacgcgatggcacgcgccttcgctgcggccgggtgcgccgtcgtggccacggcgcggtcacgcggttccatgcgcggtctcgacggcgacccgcggttcctgctgctggagctcgacgtgcgctccgacgagagcgcgcgcgccgccgtggcggatgcgctgcgggagcacggccgcatcgacgtgctcgtcaacaacgctggggttcacctcgtcgcaccactcgccgaggtgcccatggagtccttccaccaggttttcgacaccaatgtctatggtgcaatgaggttaattcaatctgttattcctcacatgatggaaagaaggaaaggaacaattgtgaatgttggaagtattaccgctctggcacctggaccatgggctggtgtgtattcagcatccaaagctgctcttcatgcattgagtgactcgttaagggttgaactaagaagcttcggcataaacgtgatgaccgtcgccccaggagggacgaggtcgaatcttgggaattcttctgcagccaagtatgatcagatgcacgagtggaagtactacaagaaatacgaggaagggctccgagccaggactggcatttcccagggccccaggtccactccagcagaagagcttgcaaaggcggtggttgcatcggttctaaagaagaaccctccagcttggttcgcttacggccagtactctctattctgtcgattttgtattatgcaccgctatggttcagagattgcctctataagtttgtcatgaaatgttagtccctggaagaataatggctgtatggaccaaagagagagctggacaggcccagttcaattcatttcattgtactgacagcctgttacgtcgtactcctatattgtatatatagaactatgctctgtacctgttggcaacttggc

SEQ ID NO: 30225 - protein, 276 aa, Zea mays subsp. mays
  peptide (1)..(276): Ceres Seq. ID no. 12360793
  misc_feature (46)..(255): NCBI GI NO: 38567881 NR Description: OSJNBa0036B21.7
  misc_feature (3)..(255): NCBI GI NO: 26453106 NR Description: unknown protein [Arabidopsis thaliana]
  misc_feature (3)..(255): NCBI GI NO: 30682984 NR Description: short-chain dehydrogenase/reductase family protein
  misc_feature (104)..(255): NCBI GI NO: 11358313 NR Description: hypothetical protein T31P16
  misc_feature (3)..(122): NCBI GI NO: 11358313 NR Description: hypothetical protein T31P16
  misc_feature (9)..(264): NCBI GI NO: 18424923 NR Description: Expressed protein; protein id: At5g65205
  misc_feature (9)..(250): NCBI GI NO: 10178182 NR Description: contains similarity todehydrogenase~gene_id:MQN23
  misc_feature (46)..(264): NCBI GI NO: 26450169 NR Description: unknown protein [Arabidopsis thaliana]
  misc_feature (9)..(255): NCBI GI NO: 23058177 NR Description: hypothetical protein
  misc_feature (7)..(246): NCBI GI NO: 32039035 NR Description: hypothetical protein
SEERDQNQPVVLVTGCSEGGIGHAMARAFAAAGCAVVATARSRGSMRGLDGDPRFLLLELDVRSDESARAAVADALREHGRIDVLVNNAGVHLVAPLAEVPMESFHQVFDTNVYGAMRLIQSVIPHMMERRKGTIVNVGSITALAPGPWAGVYSASKAALHALSDSLRVELRSFGINVMTVAPGGTRSNLGNSSAAKYDQMHEWKYYKKYEEGLRARTGISQGPRSTPAEELAKAVVASVLKKNPPAWFAYGQYSLFCRFCIMHRYGSEIASISLS

SEQ ID NO: 30226 - protein, 252 aa, Zea mays subsp. mays
  peptide (1)..(252): Ceres Seq. ID no. 12360794
  misc_feature (22)..(231): NCBI GI NO: 38567881 NR Description: OSJNBa0036B21.7
  misc_feature (1)..(231): NCBI GI NO: 26453106 NR Description: unknown protein [Arabidopsis thaliana]
  misc_feature (1)..(231): NCBI GI NO: 30682984 NR Description: short-chain dehydrogenase/reductase family protein
  misc_feature (80)..(231): NCBI GI NO: 11358313 NR Description: hypothetical protein T31P16
  misc_feature (1)..(98): NCBI GI NO: 11358313 NR Description: hypothetical protein T31P16
  misc_feature (1)..(240): NCBI GI NO: 18424923 NR Description: Expressed protein; protein id: At5g65205
  misc_feature (1)..(226): NCBI GI NO: 10178182 NR Description: contains similarity todehydrogenase~gene_id:MQN23
  misc_feature (22)..(240): NCBI GI NO: 26450169 NR Description: unknown protein [Arabidopsis thaliana]
  misc_feature (1)..(231): NCBI GI NO: 23058177 NR Description: hypothetical protein
  misc_feature (1)..(222): NCBI GI NO: 32039035 NR Description: hypothetical protein
MARAFAAAGCAVVATARSRGSMRGLDGDPRFLLLELDVRSDESARAAVADALREHGRIDVLVNNAGVHLVAPLAEVPMESFHQVFDTNVYGAMRLIQSVIPHMMERRKGTIVNVGSITALAPGPWAGVYSASKAALHALSDSLRVELRSFGINVMTVAPGGTRSNLGNSSAAKYDQMHEWKYYKKYEEGLRARTGISQGPRSTPAEELAKAVVASVLKKNPPAWFAYGQYSLFCRFCIMHRYGSEIASISLS

SEQ ID NO: 30227 - protein, 231 aa, Zea mays subsp. mays
  peptide (1)..(231): Ceres Seq. ID no. 12360795
  misc_feature (1)..(210): NCBI GI NO: 38567881 NR Description: OSJNBa0036B21.7
  misc_feature (1)..(210): NCBI GI NO: 26453106 NR Description: unknown protein [Arabidopsis thaliana]
  misc_feature (1)..(210): NCBI GI NO: 30682984 NR Description: short-chain dehydrogenase/reductase family protein
  misc_feature (59)..(210): NCBI GI NO: 11358313 NR Description: hypothetical protein T31P16
  misc_feature (1)..(77): NCBI GI NO: 11358313 NR Description: hypothetical protein T31P16
  misc_feature (1)..(219): NCBI GI NO: 18424923 NR Description: Expressed protein; protein id: At5g65205
  misc_feature (1)..(205): NCBI GI NO: 10178182 NR Description: contains similarity todehydrogenase~gene_id:MQN23
  misc_feature (1)..(219): NCBI GI NO: 26450169 NR Description: unknown protein [Arabidopsis thaliana]
  misc_feature (1)..(210): NCBI GI NO: 23058177 NR Description: hypothetical protein
  misc_feature (1)..(201): NCBI GI NO: 32039035 NR Description: hypothetical protein
MRGLDGDPRFLLLELDVRSDESARAAVADALREHGRIDVLVNNAGVHLVAPLAEVPMESFHQVFDTNVYGAMRLIQSVIPHMMERRKGTIVNVGSITALAPGPWAGVYSASKAALHALSDSLRVELRSFGINVMTVAPGGTRSNLGNSSAAKYDQMHEWKYYKKYEEGLRARTGISQGPRSTPAEELAKAVVASVLKKNPPAWFAYGQYSLFCRFCIMHRYGSEIASISLS

SEQ ID NO: 30228 - DNA, 1796 bp, Zea mays subsp. mays
  misc_feature (1)..(1796): Ceres Seq. ID no. 12365735
ctcccacagtcccactcctctctctctcgcgctctctctctttcatcgccaccaccgccgtgaaatccgcacgcgtgcttcctgtcgatttttgagctgtgactgtgagcgccatgcgccgtggaggctgtgtccggaaatggcaccgaggcagtggccgcggcgccggcgaaggaggtgagcaccaagcaggcgtctttccgggaggagagcaacttcctggacgatctcaaggagagcgagcgtaaggcgcttgccgagctccgcgacaaggtcgaggcggccatcgtggagggcaagctgttcgacgacggtaagccggaggtgaaggagaaggagaaggagaaggaggaggccaagaagaaggcagtggagaagaaagatgagcagcccgaagccgaggagaagggagaggaggatgacaagaaggaggccgacgccgaggaggagaagaaggaaggcgtggaggaaggggagaagaaggaaggccaggaggaaggggagaaggaggaggccgaggaggagagcggagacgacaccaagcaggaggccaaggaagaggaagccgacgacaaggcggcggcgaaggagccggagacggcggccgttgtcgtcgacaaggacatcgcgctgtggggcgtgcctttgctccctagcaagggcgacgaggccaccgacgtggtgctcctcaagttcctccgcgcgcgcgacttcaaggccggcgccgcgttcgagatgctccgccgcacgctccgctggcgcagggactggaccggcttcagctccggcgccgagtccgacgccgacctccccgaggagctcgcgggcgcgtgctacctcgacggcgcagaccacgagggccacccggtgtgctacaacgcgctgggcgtgttcgcggacgacgccgtgtacaagaaggcgctgggcaccgaggaaggcaaggccaggttcctccggtggcgggtgcgcgccatggagcgccacgtcgccgagctggacctgaggcccggcggcgtcgcgtcgctgctgcaggtgatcgacctcaggaactcgccggggccggccaagaaggacttccgagtcgccgtcaagcaggtctcgacctgttccaggacaactaccccgagctcgtcgcgagaaacatcttggtcaacgtgccgttctggtactacgcgttcagcaccctgttctacccgttcctgacgcagaggacgaagagcaagttcgtcgttgctcgcccgtcaaaggtcaccgagaccctcctcaagtacattccgatcgaggccatcccggtgaagtacggcggcctgaagcgcgacggcgacaccgagttctcggcggacgacggcgaggtcgcggaggtcaccgtcaagggaagctccacggagaccatcgagatcgaagctactgaggctgatgccacgctgacatgggacctgactgtgctggggtgggaggtgaactacaaggaggagttcgtgccggcggacgagggctcctacactatcatcgtcaggaaaggcaagaagatggcgtccggcgaggaggcggtccgcaactcgttccgcgccggcgagccgggcaaggtcgtgctcaccgtccagaacacctcgcacaggaagaagaaggtgctgttcaggcacaaggccaagagcgcctgcgccaagaagtgctgagaggctaagaaatttgggagtgaaattggttgtggatttcaatattcgttacattctttgtgtgtgtgtaaggagagagagagagaacattgttcgctgattatttgaggtggttgttgc

SEQ ID NO: 30229 - protein, 206 aa, Zea mays subsp. mays
  peptide (1)..(206): Ceres Seq. ID no. 12365736
  misc_feature (1)..(52): Pfam Name: Pfam Description:  TT viral orf 1
  misc_feature (1)..(206): NCBI GI NO: 5821145 NR Description: RNA binding protein [Homo sapiens]
  misc_feature (1)..(206): NCBI GI NO: 25143299 NR Description: pre-mRNA splicing SR protein related RSR-1 (68
  misc_feature (1)..(206): NCBI GI NO: 5821143 NR Description: RNA binding protein [Homo sapiens]
  misc_feature (1)..(206): NCBI GI NO: 6649242 NR Description: splicing coactivator subunit SRm300 [Homo sapiens]
  misc_feature (1)..(206): NCBI GI NO: 19923466 NR Description: splicing coactivator subunit SRm300
  misc_feature (1)..(206): NCBI GI NO: 28972153 NR Description: mKIAA0324 protein [Mus musculus]
  misc_feature (1)..(206): NCBI GI NO: 28574039 NR Description: Salivary gland secretion 1 CG3047-PA
  misc_feature (1)..(206): NCBI GI NO: 5821151 NR Description: RNA binding protein [Homo sapiens]
  misc_feature (1)..(206): NCBI GI NO: 14017923 NR Description: KIAA1853 protein [Homo sapiens]
  misc_feature (1)..(206): NCBI GI NO: 6634015 NR Description: KIAA0324 protein [Homo sapiens]
MSSPKPRRRERRMTRRRPTPRRRRRKAWRKGRRRKARRKGRRRRPRRRAETTPSRRPRKRKPTTRRRRRSRRRRPLSSTRTSRCGACLCSLARATRPPTWCSSSSSARATSRPAPRSRCSAARSAGAGTGPASAPAPSPTPTSPRSSRARATSTAQTTRATRCATTRWACSRTTPCTRRRWAPRKARPGSSGGGCAPWSATSPSWT

SEQ ID NO: 30230 - protein, 194 aa, Zea mays subsp. mays
  peptide (1)..(194): Ceres Seq. ID no. 12365737
  misc_feature (1)..(62): Pfam Name: Pfam Description:  Cupin
  misc_feature (1)..(194): NCBI GI NO: 5821145 NR Description: RNA binding protein [Homo sapiens]
  misc_feature (1)..(194): NCBI GI NO: 25143299 NR Description: pre-mRNA splicing SR protein related RSR-1 (68
  misc_feature (1)..(194): NCBI GI NO: 5821143 NR Description: RNA binding protein [Homo sapiens]
  misc_feature (1)..(194): NCBI GI NO: 6649242 NR Description: splicing coactivator subunit SRm300 [Homo sapiens]
  misc_feature (1)..(194): NCBI GI NO: 19923466 NR Description: splicing coactivator subunit SRm300
  misc_feature (1)..(194): NCBI GI NO: 28972153 NR Description: mKIAA0324 protein [Mus musculus]
  misc_feature (1)..(194): NCBI GI NO: 28574039 NR Description: Salivary gland secretion 1 CG3047-PA
  misc_feature (1)..(194): NCBI GI NO: 5821151 NR Description: RNA binding protein [Homo sapiens]
  misc_feature (1)..(194): NCBI GI NO: 14017923 NR Description: KIAA1853 protein [Homo sapiens]
  misc_feature (1)..(194): NCBI GI NO: 6634015 NR Description: KIAA0324 protein [Homo sapiens]
MTRRRPTPRRRRRKAWRKGRRRKARRKGRRRRPRRRAETTPSRRPRKRKPTTRRRRRSRRRRPLSSTRTSRCGACLCSLARATRPPTWCSSSSSARATSRPAPRSRCSAARSAGAGTGPASAPAPSPTPTSPRSSRARATSTAQTTRATRCATTRWACSRTTPCTRRRWAPRKARPGSSGGGCAPWSATSPSWT

SEQ ID NO: 30231 - protein, 155 aa, Zea mays subsp. mays
  peptide (1)..(155): Ceres Seq. ID no. 12365738
  misc_feature (32)..(121): Pfam Name: Pfam Description:  CRAL/TRIO domain
  misc_feature (1)..(121): NCBI GI NO: 18397616 NR Description: expressed protein; protein id: At1g30690
  misc_feature (1)..(121): NCBI GI NO: 14334978 NR Description: unknown protein [Arabidopsis thaliana]
  misc_feature (1)..(120): NCBI GI NO: 34907288 NR Description: contains ESTsAU093915
  misc_feature (1)..(120): NCBI GI NO: 8894548 NR Description: hypothetical protein [Cicer arietinum]
  misc_feature (1)..(120): NCBI GI NO: 15218383 NR Description: cytosolic factor, putative; protein id:At1g72160
  misc_feature (1)..(120): NCBI GI NO: 30680992 NR Description: expressed protein [Arabidopsis thaliana]
  misc_feature (1)..(120): NCBI GI NO: 15081614 NR Description: At1g72160/T9N14_8 [Arabidopsis thaliana]
  misc_feature (1)..(130): NCBI GI NO: 15230555 NR Description: putative protein; protein id: At3g51670
  misc_feature (1)..(120): NCBI GI NO: 15219901 NR Description: unknown protein; protein id: At1g22530.1
  misc_feature (1)..(120): NCBI GI NO: 15218382 NR Description: cytosolic factor, putative; protein id:At1g72150
MLRRTLRWRRDWTGFSSGAESDADLPEELAGACYLDGADHEGHPVCYNALGVFADDAVYKKALGTEEGKARFLRWRVRAMERHVAELDLRPGGVASLLQVIDLRNSPGPAKKDFRVAVKQVSTCSRTTTPSSSRETSWSTCRSGTTRSAPCSTRS

SEQ ID NO: 30232 - DNA, 1172 bp, Zea mays subsp. mays
  misc_feature (1)..(1172): Ceres Seq. ID no. 12408417
atccgcaagtccgcaacccccactactacagtgcccgccgccgctgcgtccaccacctcctttcccaactcctccgcgtacccccgccctctccggcggcccgcgtaaccacccgcgcagatggcgacggcggccacggcgtccgctacggcggcgacccgcttcacgctcctagcgggcgccggcctccgcagccgcatcagccgcctccccaccgccgtgcggttccagcgccagcgggggctcaccaccaccgcgctcctgaagaccgccgacctccagcccaaggagcagggcaagcccgagacgctcgactaccgcgtgttcctcgtcgacggcgggggccggaaggtgtcgccgtggcacgacgtcccgctgcgcgccggggacggggtgttccacttcgtcgtcgagatacccaaggagagcagcgccaagatggaggtcgccaccgacgaggccttcacgcccatcaagcaggacaccaagaagggcaaccttcgatactacccgtacaacattaactggaactatgggttacttcctcaaacatgggaggacccaacttctgcaaattctgaggttgaaggagcatttggggataatgatcctgttgatgttgttgagataggtgaaaggcgtgccaatgtcggggatgttcttaaggttaagccattggcagctttagcaatgattgatgagggagagcttgactggaaaattgtggccatttctttggatgacccgaaagcatctcttgtgaacgacgtggatgatgttgagaagcattttccggggacactgactgccatcagagactggttcagagactacaagatacctgatggaaagcctgctaacaaatttggtctgggcaacaagcccgcaagcaaggaatacgccctgaaggtcattcaagagaccaacgaatcatgggaaaaattggtaaagaggaatattcccgctggagagctctcgttggcctgattttggcccatgggaagccaccacattcttttgaactgctttcgtgagcatgtcgttttgtatgctgtgaccatgcttcttcgtttgcattccaaacctttttacgaactgtttaataaaaatgatcttgtcggatgaataatgattctggtgcgagtttaccagaacggcaaggagtgtttctc

SEQ ID NO: 30233 - protein, 288 aa, Zea mays subsp. mays
  peptide (1)..(288): Ceres Seq. ID no. 12408418
  misc_feature (94)..(274): Pfam Name: Pfam Description:  Inorganic pyrophosphatase
  misc_feature (1)..(287): NCBI GI NO: 15242465 NR Description: inorganic pyrophosphatase - like protein
  misc_feature (1)..(287): NCBI GI NO: 21592878 NR Description: inorganic pyrophosphatase-like protein
  misc_feature (12)..(287): NCBI GI NO: 14571671 NR Description: inorganic pyrophosphatase precursor
  misc_feature (1)..(282): NCBI GI NO: 17539266 NR Description: Inorganic pyrophosphatase [Caenorhabditis elegans]
  misc_feature (1)..(282): NCBI GI NO: 39585749 NR Description: Hypothetical protein CBG03439
  misc_feature (56)..(278): NCBI GI NO: 34852506 NR Description: similar to RIKEN cDNA 2010317E03
  misc_feature (59)..(278): NCBI GI NO: 26353394 NR Description: unnamed protein product [Mus musculus]
  misc_feature (57)..(282): NCBI GI NO: 25290351 NR Description: protein C47E12.4
  misc_feature (56)..(278): NCBI GI NO: 27754065 NR Description: RIKEN cDNA 2010317E03 [Mus musculus]
  misc_feature (56)..(278): NCBI GI NO: 585322 NR Description: Inorganic pyrophosphatase
MATAATASATAATRFTLLAGAGLRSRISRLPTAVRFQRQRGLTTTALLKTADLQPKEQGKPETLDYRVFLVDGGGRKVSPWHDVPLRAGDGVFHFVVEIPKESSAKMEVATDEAFTPIKQDTKKGNLRYYPYNINWNYGLLPQTWEDPTSANSEVEGAFGDNDPVDVVEIGERRANVGDVLKVKPLAALAMIDEGELDWKIVAISLDDPKASLVNDVDDVEKHFPGTLTAIRDWFRDYKIPDGKPANKFGLGNKPASKEYALKVIQETNESWEKLVKRNIPAGELSLA

SEQ ID NO: 30234 - protein, 182 aa, Zea mays subsp. mays
  peptide (1)..(182): Ceres Seq. ID no. 12408419
  misc_feature (1)..(168): Pfam Name: Pfam Description:  Inorganic pyrophosphatase
  misc_feature (1)..(181): NCBI GI NO: 15242465 NR Description: inorganic pyrophosphatase - like protein
  misc_feature (1)..(181): NCBI GI NO: 21592878 NR Description: inorganic pyrophosphatase-like protein
  misc_feature (1)..(181): NCBI GI NO: 14571671 NR Description: inorganic pyrophosphatase precursor
  misc_feature (1)..(176): NCBI GI NO: 17539266 NR Description: Inorganic pyrophosphatase [Caenorhabditis elegans]
  misc_feature (1)..(176): NCBI GI NO: 39585749 NR Description: Hypothetical protein CBG03439
  misc_feature (1)..(172): NCBI GI NO: 34852506 NR Description: similar to RIKEN cDNA 2010317E03
  misc_feature (1)..(172): NCBI GI NO: 26353394 NR Description: unnamed protein product [Mus musculus]
  misc_feature (1)..(176): NCBI GI NO: 25290351 NR Description: protein C47E12.4
  misc_feature (1)..(172): NCBI GI NO: 27754065 NR Description: RIKEN cDNA 2010317E03 [Mus musculus]
  misc_feature (1)..(172): NCBI GI NO: 585322 NR Description: Inorganic pyrophosphatase
MEVATDEAFTPIKQDTKKGNLRYYPYNINWNYGLLPQTWEDPTSANSEVEGAFGDNDPVDVVEIGERRANVGDVLKVKPLAALAMIDEGELDWKIVAISLDDPKASLVNDVDDVEKHFPGTLTAIRDWFRDYKIPDGKPANKFGLGNKPASKEYALKVIQETNESWEKLVKRNIPAGELSLA

SEQ ID NO: 30235 - protein, 173 aa, Zea mays subsp. mays
  peptide (1)..(173): Ceres Seq. ID no. 12408420
PQVRNPHYYSARRRCVHHLLSQLLRVPPPSPAARVTTRADGDGGHGVRYGGDPLHAPSGRRPPQPHQPPPHRRAVPAPAGAHHHRAPEDRRPPAQGAGQARDARLPRVPRRRRGPEGVAVARRPAARRGRGVPLRRRDTQGEQRQDGGRHRRGLHAHQAGHQEGQPSILPVQH

SEQ ID NO: 30236 - DNA, 1675 bp, Zea mays subsp. mays
  misc_feature (1)..(1675): Ceres Seq. ID no. 12545410
gcacgagaccattacctagaacatcctaatcgaaaaatccccgccccgcgcaccgcgagctagctagctactgacacccggcgccggcgccgagtacaatacaaggaaagcagcatggtgttcgagcagcaacaggaggaggcggtgttgccgggcgcggtgcacgggcaccggctctccacggtggtgccgagctccgtgacgggggaggtggactacgcgctggcggacgcggacctggccttcaagctgcactacctgcgcggggtgtactactaccggtccggggacggcctcgccaccaaggtgctcaaggaccccatgttcccgtggctggacgaccacttccccgtcgccggccgcgtccgccgcgccgaggcggagggggacggcgcgcggccctacatcaagtgcaacgactgcggcgtgcgcatcgtggaggccaggtgcgaccgcgacatggccgagtggatccgcgacggcggcgcgcccggcaggatcaggcagctctgctacgacaaggtgctcggccccgagctcttcttctcgccgctgctctacgtccagatcacaaacttcaaatgcggtgggctggcgctggggttcagctgggcgcacctcatcggcgacatcccgtcggccgccacctgcttcaacaagtgggcgcagatcctcagcggcaagaagccggaagccaccgtcctcaccccgccgaaccagccgctgcagggccagtcccccgcggcgccgcgctccgtcaagcaggtcgggcccatggaggacctctggctggtccccgcgggccgcgacatggcgtgctactccttccacgtcagcgacgcggtgctcaagaagctccaccagcagcagaatgggcgccaggacgcggccgctggcaccttcgagctcgtgtcggcgctggtgtggcaggcggtggccaagatcaggggcgacgtggacaccgtgaccgtggtcagggccgacgctgccgcgcggagcggcaagtccctggccaacgagatgaaggtcgggtacgtggagtcggcggggtcgtcgccggcgaagacggacgtcgcggagctggcggcgctgctggccaagaacgtggtcgacgagaccgccgcggtggcggcgttccagggggacgtgctcgtgtacggcggcgccaacctaacgctcgtggacatggagcaggtggacctgtacgggctggagatcaaggggcagcgcccggtccacgtggagtacggcatggacggcgtcggcgacgagggcgcggtgctggtgcagcccgacgccgacgggcgcggccgcctcgtcacggcggttttgcccggcgacgagatcgacagcctccgcgcagcgctcggtagcgcgctgcaggtcgcctgaaaactctagtacgtatcataatactacgctgctgcctacgtgctcgttgcatcgttcggtttcgcgatatcagagtaccacctcttgaagaaagtgtagtagcgtaatgaggcgtgactagtgatgggatgtattgtattgcaggatgttgcgcaaatactgtggtcgatttgcgatgtttgttctgtatcgcatgatgtttccttaataagctgctcgaatagatcatgcatgctcaatgtaccaatatttacactggagactagacaaaaacaatcgtttg

SEQ ID NO: 30237 - protein, 425 aa, Zea mays subsp. mays
  peptide (1)..(425): Ceres Seq. ID no. 12545411
  misc_feature (14)..(421): Pfam Name: Pfam Description:  Transferase family
  misc_feature (1)..(425): NCBI GI NO: 2130139 NR Description: hypothetical protein - maize
  misc_feature (1)..(422): NCBI GI NO: 38345799 NR Description: OSJNBa0085I10.16
  misc_feature (160)..(422): NCBI GI NO: 38568010 NR Description: OSJNBa0070C17.2
  misc_feature (7)..(415): NCBI GI NO: 21593424 NR Description: fatty acid elongase-like protein (cer2-like)
  misc_feature (7)..(415): NCBI GI NO: 18403923 NR Description: expressed protein; protein id: At3g23840
  misc_feature (5)..(415): NCBI GI NO: 15236357 NR Description: fatty acid elongase - like protein
  misc_feature (20)..(415): NCBI GI NO: 15233851 NR Description: CER2; protein id: At4g24510
  misc_feature (1)..(152): NCBI GI NO: 38568009 NR Description: OSJNBa0070C17.1
  misc_feature (35)..(407): NCBI GI NO: 30017587 NR Description: unknown protein
  misc_feature (20)..(294): NCBI GI NO: 15239747 NR Description: anthranilate N-benzoyltransferase
MVFEQQQEEAVLPGAVHGHRLSTVVPSSVTGEVDYALADADLAFKLHYLRGVYYYRSGDGLATKVLKDPMFPWLDDHFPVAGRVRRAEAEGDGARPYIKCNDCGVRIVEARCDRDMAEWIRDGGAPGRIRQLCYDKVLGPELFFSPLLYVQITNFKCGGLALGFSWAHLIGDIPSAATCFNKWAQILSGKKPEATVLTPPNQPLQGQSPAAPRSVKQVGPMEDLWLVPAGRDMACYSFHVSDAVLKKLHQQQNGRQDAAAGTFELVSALVWQAVAKIRGDVDTVTVVRADAAARSGKSLANEMKVGYVESAGSSPAKTDVAELAALLAKNVVDETAAVAAFQGDVLVYGGANLTLVDMEQVDLYGLEIKGQRPVHVEYGMDGVGDEGAVLVQPDADGRGRLVTAVLPGDEIDSLRAALGSALQVA

SEQ ID NO: 30238 - protein, 356 aa, Zea mays subsp. mays
  peptide (1)..(356): Ceres Seq. ID no. 12545412
  misc_feature (1)..(352): Pfam Name: Pfam Description:  Transferase family
  misc_feature (1)..(356): NCBI GI NO: 2130139 NR Description: hypothetical protein - maize
  misc_feature (1)..(353): NCBI GI NO: 38345799 NR Description: OSJNBa0085I10.16
  misc_feature (91)..(353): NCBI GI NO: 38568010 NR Description: OSJNBa0070C17.2
  misc_feature (1)..(346): NCBI GI NO: 21593424 NR Description: fatty acid elongase-like protein (cer2-like)
  misc_feature (1)..(346): NCBI GI NO: 18403923 NR Description: expressed protein; protein id: At3g23840
  misc_feature (1)..(346): NCBI GI NO: 15236357 NR Description: fatty acid elongase - like protein
  misc_feature (1)..(346): NCBI GI NO: 15233851 NR Description: CER2; protein id: At4g24510
  misc_feature (1)..(83): NCBI GI NO: 38568009 NR Description: OSJNBa0070C17.1
  misc_feature (1)..(338): NCBI GI NO: 30017587 NR Description: unknown protein
  misc_feature (1)..(225): NCBI GI NO: 15239747 NR Description: anthranilate N-benzoyltransferase
MFPWLDDHFPVAGRVRRAEAEGDGARPYIKCNDCGVRIVEARCDRDMAEWIRDGGAPGRIRQLCYDKVLGPELFFSPLLYVQITNFKCGGLALGFSWAHLIGDIPSAATCFNKWAQILSGKKPEATVLTPPNQPLQGQSPAAPRSVKQVGPMEDLWLVPAGRDMACYSFHVSDAVLKKLHQQQNGRQDAAAGTFELVSALVWQAVAKIRGDVDTVTVVRADAAARSGKSLANEMKVGYVESAGSSPAKTDVAELAALLAKNVVDETAAVAAFQGDVLVYGGANLTLVDMEQVDLYGLEIKGQRPVHVEYGMDGVGDEGAVLVQPDADGRGRLVTAVLPGDEIDSLRAALGSALQVA

SEQ ID NO: 30239 - protein, 310 aa, Zea mays subsp. mays
  peptide (1)..(310): Ceres Seq. ID no. 12545413
  misc_feature (1)..(306): Pfam Name: Pfam Description:  Transferase family
  misc_feature (1)..(310): NCBI GI NO: 2130139 NR Description: hypothetical protein - maize
  misc_feature (1)..(307): NCBI GI NO: 38345799 NR Description: OSJNBa0085I10.16
  misc_feature (45)..(307): NCBI GI NO: 38568010 NR Description: OSJNBa0070C17.2
  misc_feature (1)..(300): NCBI GI NO: 21593424 NR Description: fatty acid elongase-like protein (cer2-like)
  misc_feature (1)..(300): NCBI GI NO: 18403923 NR Description: expressed protein; protein id: At3g23840
  misc_feature (1)..(300): NCBI GI NO: 15236357 NR Description: fatty acid elongase - like protein
  misc_feature (1)..(300): NCBI GI NO: 15233851 NR Description: CER2; protein id: At4g24510
  misc_feature (1)..(37): NCBI GI NO: 38568009 NR Description: OSJNBa0070C17.1
  misc_feature (1)..(292): NCBI GI NO: 30017587 NR Description: unknown protein
  misc_feature (1)..(179): NCBI GI NO: 15239747 NR Description: anthranilate N-benzoyltransferase
MAEWIRDGGAPGRIRQLCYDKVLGPELFFSPLLYVQITNFKCGGLALGFSWAHLIGDIPSAATCFNKWAQILSGKKPEATVLTPPNQPLQGQSPAAPRSVKQVGPMEDLWLVPAGRDMACYSFHVSDAVLKKLHQQQNGRQDAAAGTFELVSALVWQAVAKIRGDVDTVTVVRADAAARSGKSLANEMKVGYVESAGSSPAKTDVAELAALLAKNVVDETAAVAAFQGDVLVYGGANLTLVDMEQVDLYGLEIKGQRPVHVEYGMDGVGDEGAVLVQPDADGRGRLVTAVLPGDEIDSLRAALGSALQVA

SEQ ID NO: 30240 - DNA, 1237 bp, Zea mays subsp. mays
  misc_feature (1)..(1237): Ceres Seq. ID no. 13498675
  misc_feature (86)..(86): n is a, c, t, g, unknown, or other
gcacgagaccattacctagaacatcctaatcgaaaagatttgattccctatccctgcgctgcccacctcccctttcccgcctgtgncctcccattcacttgcccccttttttccctctcccgacctcccaattcccgaaatcacccccgacactccccacccaagaacccctcgtccccacctcgccatgggcagcgccgccgcctcgccgccgccgtccgggaagctgacgcaggaagagctgaagcgcgtggcggcgcaccgcgcggtggagttcgtggagcccggcatgacgctgggcctgggcacgggctccacggcggcgcacgcgctggaccgcctgggcgacctcctccgcgcgggcgcgctgccgggggtggccggcgtgcccacctccctcaagacggaggcccacgcggcgcgcgccgggatcccgctgctcccgctcccgggcgccaggatcgcgctctccatcgacggcgccgacgaggtcgacccggacctcaacctcgtcaagggccgcggcggctcgctgctccgcgagaagatgatcgagggcgccggcgcccgcttcgtcgtcatcgtcgacgagtccaagctcgtgccgcgcctcggctgcacgggcgccatccccgtcgaggtcatccccttcggcgcgctccacacgctgggcctcatccgcggcctcttcgacggattgcctggattccacgccaggctgaggactgtccccgccgctcccgccaaggggggagaagactcggactcggagtcggagcagcccttcgtcaccgacaacggcaactacatcgtcgagatgttcttcgaggacggcatccgcggcgacctgcgcgacatcagtgaccgcctgctccggatcaccggcgtcgtagagcacggcatgttcctgggcatggccaccaccgtcatcgtcgccaacaaggacggcacggtgtcagtcatggacaggaagaagtagcagtagtaatctacaagcagtagcctgttcttcgaaacagcgatcgcctgatcaccggcatgttccttgacgtggccaccaccaccatcgtcgctgccaacagcgacgacaagaagtactaataattttgcaagtagcctgtgtctgtgcaacacccagctactcttatctaagttggagttgtatcgtgtccgtgcgttatcctcatatgctgagtgtctgcaggagtatgttaatcatcatcctggtgttattatc

SEQ ID NO: 30241 - protein, 287 aa, Zea mays subsp. mays
  peptide (1)..(287): Ceres Seq. ID no. 13498676
  misc_feature (70)..(287): Pfam Name: Pfam Description:  HlyD family secretion protein
  misc_feature (29)..(29): Xaa is any aa, unknown or other
ARDHYLEHPNRKDLIPYPCAAHLPFPACXLPFTCPLFSLSRPPNSRNHPRHSPPKNPSSPPRHGQRRRLAAAVREADAGRAEARGGAPRGGVRGARHDAGPGHGLHGGARAGPPGRPPPRGRAAGGGRRAHLPQDGGPRGARRDPAAPAPGRQDRALHRRRRRGRPGPQPRQGPRRLAAPREDDRGRRRPLRRHRRRVQARAAPRLHGRHPRRGHPLRRAPHAGPHPRPLRRIAWIPRQAEDCPRRSRQGGRRLGLGVGAALRHRQRQLHRRDVLRGRHPRRPARHQ

SEQ ID NO: 30242 - protein, 263 aa, Zea mays subsp. mays
  peptide (1)..(263): Ceres Seq. ID no. 13498677
  misc_feature (64)..(254): Pfam Name: phosphoriboisomerase A Pfam Description: Ribose 5-phosphate isomerase A
  misc_feature (1)..(263): NCBI GI NO: 38347196 NR Description: OSJNBa0023J03.8
  misc_feature (3)..(261): NCBI GI NO: 21592672 NR Description: putative ribose 5-phosphate isomerase
  misc_feature (3)..(261): NCBI GI NO: 15223936 NR Description: ribose 5-phosphate isomerase -related
  misc_feature (3)..(261): NCBI GI NO: 13430836 NR Description: putative ribose 5-phosphate isomerase
  misc_feature (1)..(254): NCBI GI NO: 15226223 NR Description: ribose 5-phosphate isomerase -related
  misc_feature (6)..(258): NCBI GI NO: 18654317 NR Description: ribose-5-phosphate isomerase [Spinacia oleracea]
  misc_feature (3)..(258): NCBI GI NO: 34393836 NR Description: putative ribose-5-phosphate isomerase
  misc_feature (3)..(258): NCBI GI NO: 34393835 NR Description: putative ribose-5-phosphate isomerase
  misc_feature (1)..(261): NCBI GI NO: 15229349 NR Description: ribose 5-phosphate isomerase -related
  misc_feature (1)..(261): NCBI GI NO: 21594002 NR Description: putative ribose 5-phosphate isomerase
MGSAAASPPPSGKLTQEELKRVAAHRAVEFVEPGMTLGLGTGSTAAHALDRLGDLLRAGALPGVAGVPTSLKTEAHAARAGIPLLPLPGARIALSIDGADEVDPDLNLVKGRGGSLLREKMIEGAGARFVVIVDESKLVPRLGCTGAIPVEVIPFGALHTLGLIRGLFDGLPGFHARLRTVPAAPAKGGEDSDSESEQPFVTDNGNYIVEMFFEDGIRGDLRDISDRLLRITGVVEHGMFLGMATTVIVANKDGTVSVMDRKK

SEQ ID NO: 30243 - protein, 229 aa, Zea mays subsp. mays
  peptide (1)..(229): Ceres Seq. ID no. 13498678
  misc_feature (30)..(220): Pfam Name: phosphoriboisomerase A Pfam Description: Ribose 5-phosphate isomerase A
  misc_feature (1)..(229): NCBI GI NO: 38347196 NR Description: OSJNBa0023J03.8
  misc_feature (1)..(227): NCBI GI NO: 21592672 NR Description: putative ribose 5-phosphate isomerase
  misc_feature (1)..(227): NCBI GI NO: 15223936 NR Description: ribose 5-phosphate isomerase -related
  misc_feature (1)..(227): NCBI GI NO: 13430836 NR Description: putative ribose 5-phosphate isomerase
  misc_feature (1)..(220): NCBI GI NO: 15226223 NR Description: ribose 5-phosphate isomerase -related
  misc_feature (1)..(224): NCBI GI NO: 18654317 NR Description: ribose-5-phosphate isomerase [Spinacia oleracea]
  misc_feature (1)..(224): NCBI GI NO: 34393836 NR Description: putative ribose-5-phosphate isomerase
  misc_feature (1)..(224): NCBI GI NO: 34393835 NR Description: putative ribose-5-phosphate isomerase
  misc_feature (1)..(227): NCBI GI NO: 15229349 NR Description: ribose 5-phosphate isomerase -related
  misc_feature (1)..(227): NCBI GI NO: 21594002 NR Description: putative ribose 5-phosphate isomerase
MTLGLGTGSTAAHALDRLGDLLRAGALPGVAGVPTSLKTEAHAARAGIPLLPLPGARIALSIDGADEVDPDLNLVKGRGGSLLREKMIEGAGARFVVIVDESKLVPRLGCTGAIPVEVIPFGALHTLGLIRGLFDGLPGFHARLRTVPAAPAKGGEDSDSESEQPFVTDNGNYIVEMFFEDGIRGDLRDISDRLLRITGVVEHGMFLGMATTVIVANKDGTVSVMDRKK

SEQ ID NO: 30244 - DNA, 1602 bp, Zea mays subsp. mays
  misc_feature (1)..(1602): Ceres Seq. ID no. 12356556
aaacgaaaacgagccagccgggcaaacaacactcacatcttacaccagccgcactcccctgtcctcctctccgagacgagacggacgggacggcaggcaccaccgcaccggcgccaccccacccgccggctcagagcgggggcccggccacccgaatcacacagatcggaacgccggaggaggagcaacgcgggcgcggagaggcccgccagcgaaggcgcagtgcaagctctgggttcccggatccgataccaccggtctctcggcgagtgtgtaatccagcgagcgagcgctcggtttttgccgtgagagcgggagatgagtgctctgaagaaatccgacaagaaagccgccctcgacttcgcggcatggagcttcaacgtcaccacgtcggtcggactcatcatggtcaacaaggcgttgatggctacgtatggattcagttttgccacgacattaactgggcttcattttgtgaccactaccttgatgactatcgtatttcgatggttaggcctgagccagccatcccacttacccctagcagatctagttaaatttgtgatattttcgaacttgtcaattgttgggatgaatgtgagcttgatgtggaactctgtgggcttttatcagatagcaaagctgtgcatgatacctgcatcctgtcttctggaggttgtctttgatcatgtacattattcccgggacacaaagctgagcataatggtcgtgcttataggagttgcagtctgcacagttactgatgtcagtgtgaatgcaagaggtctaatcgcggctgttatagctgtttggagcacagctttgcaacaatattatgtccattttctccaacgcaagtactctttgaactcattcaacctgctgggccacactgctccagcccaagctgggtcactcctgctagtgggaccatttgcagattacttgttgacaggcaaaagggtggatcacttcagtttctcatcacttgctctgtttttcctggcactctcatgcttcatcgccattggtgttaatctgagccaattcatctgtattgggcgcttctctgctgtatccttccaagtcttaggccacatgaagaccgtacttgttctgtcccttgggttcctactctttggcaaggagggcctgaatcttcaggtagtccttgggatggttctggccgttcttggaatgatatggtacgggaacgcatctgccaaaccaggcggcaaagagcggcgcagcgtcctaccgctgaggtctgcaagtctcaagggaagttcggaagaaaagggcggtgccgagaaatagtcttgctctctctgattgccaacttgaacggggagttttccgttccaaggttgaatttctggtgaggtgacgtgaagtaccacatattgggaactcttgcctaatatttgacgcagagaacaaactcgttccatctagaaacccaggattgttatagttacaggtatactgtaaaggttcattttttttggcgctctgaatcaatttgcagtgaggggaaagacagacatggttgttacgagtcttcaagacagttttttatcgaatatataatgcagttgtttg

SEQ ID NO: 30245 - protein, 332 aa, Zea mays subsp. mays
  peptide (1)..(332): Ceres Seq. ID no. 12356557
  misc_feature (1)..(325): NCBI GI NO: 18420440 NR Description: putative protein; protein id: At4g39390
  misc_feature (1)..(327): NCBI GI NO: 30313364 NR Description: putative transmembrane protein [Oryza sativa]
  misc_feature (1)..(332): NCBI GI NO: 15234794 NR Description: hypothetical protein; protein id: At4g09810.1
  misc_feature (1)..(325): NCBI GI NO: 21593003 NR Description: unknown [Arabidopsis thaliana]
  misc_feature (1)..(332): NCBI GI NO: 18399097 NR Description: expressed protein; protein id: At1g34020
  misc_feature (1)..(332): NCBI GI NO: 21595054 NR Description: unknown [Arabidopsis thaliana]
  misc_feature (1)..(325): NCBI GI NO: 7486049 NR Description: hypothetical protein F23K16
  misc_feature (6)..(314): NCBI GI NO: 18394949 NR Description: expressed protein; protein id: At1g21070
  misc_feature (1)..(314): NCBI GI NO: 21536703 NR Description: unknown [Arabidopsis thaliana]
  misc_feature (6)..(307): NCBI GI NO: 18411172 NR Description: expressed protein; protein id: At1g76670
MSALKKSDKKAALDFAAWSFNVTTSVGLIMVNKALMATYGFSFATTLTGLHFVTTTLMTIVFRWLGLSQPSHLPLADLVKFVIFSNLSIVGMNVSLMWNSVGFYQIAKLCMIPASCLLEVVFDHVHYSRDTKLSIMVVLIGVAVCTVTDVSVNARGLIAAVIAVWSTALQQYYVHFLQRKYSLNSFNLLGHTAPAQAGSLLLVGPFADYLLTGKRVDHFSFSSLALFFLALSCFIAIGVNLSQFICIGRFSAVSFQVLGHMKTVLVLSLGFLLFGKEGLNLQVVLGMVLAVLGMIWYGNASAKPGGKERRSVLPLRSASLKGSSEEKGGAEK

SEQ ID NO: 30246 - protein, 303 aa, Zea mays subsp. mays
  peptide (1)..(303): Ceres Seq. ID no. 12356558
  misc_feature (1)..(296): NCBI GI NO: 18420440 NR Description: putative protein; protein id: At4g39390
  misc_feature (1)..(298): NCBI GI NO: 30313364 NR Description: putative transmembrane protein [Oryza sativa]
  misc_feature (1)..(303): NCBI GI NO: 15234794 NR Description: hypothetical protein; protein id: At4g09810.1
  misc_feature (1)..(296): NCBI GI NO: 21593003 NR Description: unknown [Arabidopsis thaliana]
  misc_feature (1)..(303): NCBI GI NO: 18399097 NR Description: expressed protein; protein id: At1g34020
  misc_feature (1)..(303): NCBI GI NO: 21595054 NR Description: unknown [Arabidopsis thaliana]
  misc_feature (1)..(296): NCBI GI NO: 7486049 NR Description: hypothetical protein F23K16
  misc_feature (1)..(285): NCBI GI NO: 18394949 NR Description: expressed protein; protein id: At1g21070
  misc_feature (1)..(285): NCBI GI NO: 21536703 NR Description: unknown [Arabidopsis thaliana]
  misc_feature (1)..(278): NCBI GI NO: 18411172 NR Description: expressed protein; protein id: At1g76670
MVNKALMATYGFSFATTLTGLHFVTTTLMTIVFRWLGLSQPSHLPLADLVKFVIFSNLSIVGMNVSLMWNSVGFYQIAKLCMIPASCLLEVVFDHVHYSRDTKLSIMVVLIGVAVCTVTDVSVNARGLIAAVIAVWSTALQQYYVHFLQRKYSLNSFNLLGHTAPAQAGSLLLVGPFADYLLTGKRVDHFSFSSLALFFLALSCFIAIGVNLSQFICIGRFSAVSFQVLGHMKTVLVLSLGFLLFGKEGLNLQVVLGMVLAVLGMIWYGNASAKPGGKERRSVLPLRSASLKGSSEEKGGAEK

SEQ ID NO: 30247 - protein, 297 aa, Zea mays subsp. mays
  peptide (1)..(297): Ceres Seq. ID no. 12356559
  misc_feature (1)..(290): NCBI GI NO: 18420440 NR Description: putative protein; protein id: At4g39390
  misc_feature (1)..(292): NCBI GI NO: 30313364 NR Description: putative transmembrane protein [Oryza sativa]
  misc_feature (1)..(297): NCBI GI NO: 15234794 NR Description: hypothetical protein; protein id: At4g09810.1
  misc_feature (1)..(290): NCBI GI NO: 21593003 NR Description: unknown [Arabidopsis thaliana]
  misc_feature (1)..(297): NCBI GI NO: 18399097 NR Description: expressed protein; protein id: At1g34020
  misc_feature (1)..(297): NCBI GI NO: 21595054 NR Description: unknown [Arabidopsis thaliana]
  misc_feature (1)..(290): NCBI GI NO: 7486049 NR Description: hypothetical protein F23K16
  misc_feature (1)..(279): NCBI GI NO: 18394949 NR Description: expressed protein; protein id: At1g21070
  misc_feature (1)..(279): NCBI GI NO: 21536703 NR Description: unknown [Arabidopsis thaliana]
  misc_feature (1)..(272): NCBI GI NO: 18411172 NR Description: expressed protein; protein id: At1g76670
MATYGFSFATTLTGLHFVTTTLMTIVFRWLGLSQPSHLPLADLVKFVIFSNLSIVGMNVSLMWNSVGFYQIAKLCMIPASCLLEVVFDHVHYSRDTKLSIMVVLIGVAVCTVTDVSVNARGLIAAVIAVWSTALQQYYVHFLQRKYSLNSFNLLGHTAPAQAGSLLLVGPFADYLLTGKRVDHFSFSSLALFFLALSCFIAIGVNLSQFICIGRFSAVSFQVLGHMKTVLVLSLGFLLFGKEGLNLQVVLGMVLAVLGMIWYGNASAKPGGKERRSVLPLRSASLKGSSEEKGGAEK

SEQ ID NO: 30248 - DNA, 1161 bp, Zea mays subsp. mays
  misc_feature (1)..(1161): Ceres Seq. ID no. 12340900
aactcacaaggcttttacacgactagttctgcgaggctaagagcagaaaaaactccacctgcctggctgatttcatcaactccggcggcttggagaagacgaagctgctccagaatccgataggaagtttggtgctcgcgtgttgacgggttgatttcggtgcgccgatggggcaggcgttccgcaagctgttcgatgccttcctcggcaccagcgagatgagggttgtgatgcttggtctggatgccgccggtaaaaccaccatcttgtacaagctgcaaatcggggaggttttgtcgactgttcccacgattggtttcaatgtcgagaaagttcaatacaagaatgtgatgtttactgtttgggatgttggtggccaagaaaagttgaggcccttgtggaggcactacttcaacaatactgatggcttgatctatgtagttgattcattggatcgggagaggattggaaaagctaaagctgaatttcaggcaataatcaatgatcctttcatgcttaacagtgtcatattggtatttgccaataaacaagatatgaaaggggcaatgacaccaatggaggtgtgtgagggccttggcctctacgatttgaagaatcgcacctggcacatccaaggctcctgtgcgcttaaaggtgatggcctttatgagggcttggactggatggcaagcactctgaaggaattgcaagcttcaggtcgcctaccctctggagggacatcgttgttctaagaagcaaatctgcatgtaagatccttgggttgatactagtaataatggatcaagagatcatcaatgatgttaacatcttgatgagaatttcctttcaaattcatgctgcactgctcaggctccgtggggtgattctactaaagaaaaggtgaaacatgggcctgaccgcataaaaatatcggtcatgcgtttgtactcacccctggggatttcttgtcaatgatctaacctgtgatataggccttgtaacttccgttgtgagtaagtttcattcaaagctaaccggcggatgcatttgtcacatatgagaattgaggagtcaacttccacatcctgttgttgtaagaatttctgtaaatcgaagttggcaaacataatttatctcaacaagttggtccggtcattatcc

SEQ ID NO: 30249 - protein, 194 aa, Zea mays subsp. mays
  peptide (1)..(194): Ceres Seq. ID no. 12340901
  misc_feature (4)..(177): Pfam Name: Pfam Description:  ADP-ribosylation factor family
  misc_feature (1)..(192): NCBI GI NO: 37537196 NR Description: putative ADP-ribosylation factor
  misc_feature (1)..(184): NCBI GI NO: 15237901 NR Description: ADP-ribosylation factor -like protein
  misc_feature (1)..(184): NCBI GI NO: 15228464 NR Description: putative ADP-ribosylation factor
  misc_feature (1)..(184): NCBI GI NO: 34897926 NR Description: Similar to Drosophila melanogaster ADP-ribosylationfactor 1
  misc_feature (1)..(178): NCBI GI NO: 3182915 NR Description: ADP-RIBOSYLATION FACTOR
  misc_feature (1)..(178): NCBI GI NO: 32401087 NR Description: ADP-ribosylation factor 1 [Aiptasia pulchella]
  misc_feature (1)..(179): NCBI GI NO: 461532 NR Description: ADP-RIBOSYLATION FACTOR
  misc_feature (1)..(178): NCBI GI NO: 17136866 NR Description: ADP ribosylation factor 79F CG8385-PB
  misc_feature (1)..(178): NCBI GI NO: 31240205 NR Description: ENSANGP00000015770 [Anopheles gambiae]
  misc_feature (1)..(179): NCBI GI NO: 40747088 NR Description: ARF_AJECA ADP-RIBOSYLATION FACTOR
MGQAFRKLFDAFLGTSEMRVVMLGLDAAGKTTILYKLQIGEVLSTVPTIGFNVEKVQYKNVMFTVWDVGGQEKLRPLWRHYFNNTDGLIYVVDSLDRERIGKAKAEFQAIINDPFMLNSVILVFANKQDMKGAMTPMEVCEGLGLYDLKNRTWHIQGSCALKGDGLYEGLDWMASTLKELQASGRLPSGGTSLF

SEQ ID NO: 30250 - protein, 177 aa, Zea mays subsp. mays
  peptide (1)..(177): Ceres Seq. ID no. 12340902
  misc_feature (1)..(160): Pfam Name: Pfam Description:  ADP-ribosylation factor family
  misc_feature (1)..(175): NCBI GI NO: 37537196 NR Description: putative ADP-ribosylation factor
  misc_feature (1)..(167): NCBI GI NO: 15237901 NR Description: ADP-ribosylation factor -like protein
  misc_feature (1)..(167): NCBI GI NO: 15228464 NR Description: putative ADP-ribosylation factor
  misc_feature (1)..(167): NCBI GI NO: 34897926 NR Description: Similar to Drosophila melanogaster ADP-ribosylationfactor 1
  misc_feature (1)..(161): NCBI GI NO: 3182915 NR Description: ADP-RIBOSYLATION FACTOR
  misc_feature (1)..(161): NCBI GI NO: 32401087 NR Description: ADP-ribosylation factor 1 [Aiptasia pulchella]
  misc_feature (1)..(162): NCBI GI NO: 461532 NR Description: ADP-RIBOSYLATION FACTOR
  misc_feature (1)..(161): NCBI GI NO: 17136866 NR Description: ADP ribosylation factor 79F CG8385-PB
  misc_feature (1)..(161): NCBI GI NO: 31240205 NR Description: ENSANGP00000015770 [Anopheles gambiae]
  misc_feature (1)..(162): NCBI GI NO: 40747088 NR Description: ARF_AJECA ADP-RIBOSYLATION FACTOR
MRVVMLGLDAAGKTTILYKLQIGEVLSTVPTIGFNVEKVQYKNVMFTVWDVGGQEKLRPLWRHYFNNTDGLIYVVDSLDRERIGKAKAEFQAIINDPFMLNSVILVFANKQDMKGAMTPMEVCEGLGLYDLKNRTWHIQGSCALKGDGLYEGLDWMASTLKELQASGRLPSGGTSLF

SEQ ID NO: 30251 - protein, 173 aa, Zea mays subsp. mays
  peptide (1)..(173): Ceres Seq. ID no. 12340903
  misc_feature (1)..(156): Pfam Name: Pfam Description:  ADP-ribosylation factor family
  misc_feature (1)..(171): NCBI GI NO: 37537196 NR Description: putative ADP-ribosylation factor
  misc_feature (1)..(163): NCBI GI NO: 15237901 NR Description: ADP-ribosylation factor -like protein
  misc_feature (1)..(163): NCBI GI NO: 15228464 NR Description: putative ADP-ribosylation factor
  misc_feature (1)..(163): NCBI GI NO: 34897926 NR Description: Similar to Drosophila melanogaster ADP-ribosylationfactor 1
  misc_feature (1)..(157): NCBI GI NO: 3182915 NR Description: ADP-RIBOSYLATION FACTOR
  misc_feature (1)..(157): NCBI GI NO: 32401087 NR Description: ADP-ribosylation factor 1 [Aiptasia pulchella]
  misc_feature (1)..(158): NCBI GI NO: 461532 NR Description: ADP-RIBOSYLATION FACTOR
  misc_feature (1)..(157): NCBI GI NO: 17136866 NR Description: ADP ribosylation factor 79F CG8385-PB
  misc_feature (1)..(157): NCBI GI NO: 31240205 NR Description: ENSANGP00000015770 [Anopheles gambiae]
  misc_feature (1)..(158): NCBI GI NO: 40747088 NR Description: ARF_AJECA ADP-RIBOSYLATION FACTOR
MLGLDAAGKTTILYKLQIGEVLSTVPTIGFNVEKVQYKNVMFTVWDVGGQEKLRPLWRHYFNNTDGLIYVVDSLDRERIGKAKAEFQAIINDPFMLNSVILVFANKQDMKGAMTPMEVCEGLGLYDLKNRTWHIQGSCALKGDGLYEGLDWMASTLKELQASGRLPSGGTSLF

SEQ ID NO: 30252 - DNA, 1323 bp, Zea mays subsp. mays
  misc_feature (1)..(1323): Ceres Seq. ID no. 12408405
aagcttgggagttgggagtgacaccgcggcacctccactgcagtagtcttgttgccggcggcggcggcgggcggcggcgcggagaaattcggcgaacgatggcggactccggaagcctgaggaagcgggaggagaaggaagaggaggacgacattgtctgcctggatccttccttcttcgtggaccgcagctacgagatgacgaccttcaccttcggatcccacgagttgcgcctcctctgcctccgcgccgcttccactgattttgatcttactggacagttagtgtggccaggggcagtccttatgaacaactacctatctcaacaccctgaaattgtgaagggatgttcagtagttgagctaggatctgggattggcattactggcatattgtgtagccgtttctgcaaggaggttgtcttgactgatcacaatgatgaagttctggagattataaagaaaaatatagagttgcagtcatgttctgagaatgcacatgcagtgttgacagccgagaaactagagtggggaaactcagatcatttaagcggtattattgaaaaacatcctggtggatttgatcttgttcttggagctgatatttgcttccagcaatctagcatttcctgcctctttgatactgtagagaggattgttcgtattcaagctggtaaatgcagattcatattggcttatgtatcccgaactaaagtcatggatgcactagtactcaaggaagctgaaaagcatggaatgcgtgttgaagaagtgaacggaacaagaacaaccatctcgaatcttgaaggagtcatatttgacattaccctgaaatgacagtccgtccttcgactctcctttgtcgaagtgcttgagtggttattcgtcatgaagtcctgtgtaacttccttttagcgggaaaatcgaagttccgcatcatgatgagctggagttgtgtcagttgtatctctgtagaggaggaggcaccacagtaagaacattagccgatgatggtctttgattcatgcgcccatttggtgtggctttctactgttcaactgctccatcctttaagccaatatataagatgtaagatgcgtgctacaactttctcggactatctatctatctatcggtgagatgaccagactgtgaaagttcctgtgacaaggagttgctgaaagcagtgccatcatgtatgggttgcagatgcttggtctgaactctgtaaaaggctctggattaccatgagtttttcgtgcttggtgcagtagcatgtaagtaagcaccaactgaacagaagaaaccttcagcacccccttcg

SEQ ID NO: 30253 - protein, 277 aa, Zea mays subsp. mays
  peptide (1)..(277): Ceres Seq. ID no. 12408406
  misc_feature (33)..(277): NCBI GI NO: 33146643 NR Description: unknown protein
  misc_feature (34)..(277): NCBI GI NO: 26449997 NR Description: unknown protein [Arabidopsis thaliana]
  misc_feature (152)..(277): NCBI GI NO: 30683273 NR Description: expressed protein [Arabidopsis thaliana]
  misc_feature (34)..(125): NCBI GI NO: 7460191 NR Description: hypothetical protein At2g26810
  misc_feature (34)..(125): NCBI GI NO: 30683273 NR Description: expressed protein [Arabidopsis thaliana]
  misc_feature (41)..(267): NCBI GI NO: 30683042 NR Description: expressed protein [Arabidopsis thaliana]
  misc_feature (41)..(267): NCBI GI NO: 20197178 NR Description: hypothetical protein [Arabidopsis thaliana]
  misc_feature (41)..(267): NCBI GI NO: 25407826 NR Description: hypothetical protein At2g26200
  misc_feature (66)..(215): NCBI GI NO: 34877084 NR Description: similar to RIKEN cDNA 2310038H17
  misc_feature (91)..(254): NCBI GI NO: 28950234 NR Description: conserved hypothetical protein [Neurospora crassa]
AWELGVTPRHLHCSSLVAGGGGGRRRGEIRRTMADSGSLRKREEKEEEDDIVCLDPSFFVDRSYEMTTFTFGSHELRLLCLRAASTDFDLTGQLVWPGAVLMNNYLSQHPEIVKGCSVVELGSGIGITGILCSRFCKEVVLTDHNDEVLEIIKKNIELQSCSENAHAVLTAEKLEWGNSDHLSGIIEKHPGGFDLVLGADICFQQSSISCLFDTVERIVRIQAGKCRFILAYVSRTKVMDALVLKEAEKHGMRVEEVNGTRTTISNLEGVIFDITLK

SEQ ID NO: 30254 - protein, 245 aa, Zea mays subsp. mays
  peptide (1)..(245): Ceres Seq. ID no. 12408407
  misc_feature (1)..(245): NCBI GI NO: 33146643 NR Description: unknown protein
  misc_feature (2)..(245): NCBI GI NO: 26449997 NR Description: unknown protein [Arabidopsis thaliana]
  misc_feature (120)..(245): NCBI GI NO: 30683273 NR Description: expressed protein [Arabidopsis thaliana]
  misc_feature (2)..(93): NCBI GI NO: 7460191 NR Description: hypothetical protein At2g26810
  misc_feature (2)..(93): NCBI GI NO: 30683273 NR Description: expressed protein [Arabidopsis thaliana]
  misc_feature (9)..(235): NCBI GI NO: 30683042 NR Description: expressed protein [Arabidopsis thaliana]
  misc_feature (9)..(235): NCBI GI NO: 20197178 NR Description: hypothetical protein [Arabidopsis thaliana]
  misc_feature (9)..(235): NCBI GI NO: 25407826 NR Description: hypothetical protein At2g26200
  misc_feature (34)..(183): NCBI GI NO: 34877084 NR Description: similar to RIKEN cDNA 2310038H17
  misc_feature (59)..(222): NCBI GI NO: 28950234 NR Description: conserved hypothetical protein [Neurospora crassa]
MADSGSLRKREEKEEEDDIVCLDPSFFVDRSYEMTTFTFGSHELRLLCLRAASTDFDLTGQLVWPGAVLMNNYLSQHPEIVKGCSVVELGSGIGITGILCSRFCKEVVLTDHNDEVLEIIKKNIELQSCSENAHAVLTAEKLEWGNSDHLSGIIEKHPGGFDLVLGADICFQQSSISCLFDTVERIVRIQAGKCRFILAYVSRTKVMDALVLKEAEKHGMRVEEVNGTRTTISNLEGVIFDITLK

SEQ ID NO: 30255 - protein, 212 aa, Zea mays subsp. mays
  peptide (1)..(212): Ceres Seq. ID no. 12408408
  misc_feature (1)..(212): NCBI GI NO: 33146643 NR Description: unknown protein
  misc_feature (1)..(212): NCBI GI NO: 26449997 NR Description: unknown protein [Arabidopsis thaliana]
  misc_feature (87)..(212): NCBI GI NO: 30683273 NR Description: expressed protein [Arabidopsis thaliana]
  misc_feature (1)..(60): NCBI GI NO: 7460191 NR Description: hypothetical protein At2g26810
  misc_feature (1)..(60): NCBI GI NO: 30683273 NR Description: expressed protein [Arabidopsis thaliana]
  misc_feature (1)..(202): NCBI GI NO: 30683042 NR Description: expressed protein [Arabidopsis thaliana]
  misc_feature (1)..(202): NCBI GI NO: 20197178 NR Description: hypothetical protein [Arabidopsis thaliana]
  misc_feature (1)..(202): NCBI GI NO: 25407826 NR Description: hypothetical protein At2g26200
  misc_feature (1)..(150): NCBI GI NO: 34877084 NR Description: similar to RIKEN cDNA 2310038H17
  misc_feature (26)..(189): NCBI GI NO: 28950234 NR Description: conserved hypothetical protein [Neurospora crassa]
MTTFTFGSHELRLLCLRAASTDFDLTGQLVWPGAVLMNNYLSQHPEIVKGCSVVELGSGIGITGILCSRFCKEVVLTDHNDEVLEIIKKNIELQSCSENAHAVLTAEKLEWGNSDHLSGIIEKHPGGFDLVLGADICFQQSSISCLFDTVERIVRIQAGKCRFILAYVSRTKVMDALVLKEAEKHGMRVEEVNGTRTTISNLEGVIFDITLK

SEQ ID NO: 30256 - DNA, 2037 bp, Zea mays subsp. mays
  misc_feature (1)..(2037): Ceres Seq. ID no. 12408401
cttcgcccaactcgtcccattatttctctaaaaatccaacaaataaatccttgtgccagcagaaagtatagatcgtgttagctaaaagacatccgcgatgacgtcgacagcggtggggggcgagccggcggcgttgccacgggtactggcggtggagcaaagccgactttttcccggagccctcgttccagagctggcgcgcgtacggcggcgcgctcttgtccactgggccacggctgcgcgaccgcgtcacgagtcgctcatccgaggccgttgaggcggggacgctgctcgcccagagcgagaaccccctccggcggtgcctgtcgtgggtggatctcgccttcctcggattcggctccgtcgtcggctcgggcgtcttcgtgctcaccggccaggaggcgcggttcgacgccggcccggccatcccgctggcctacgccgccgcgggcttctcggcgctgctctcgtccttctgctacgcggagctcgccggcgagatcccgtcggctggcggctcgttctcgtacctgcgcgtcgagctcggggacctggccgcgttcatcgccgccgggaacatcctgctcgaggccgtggtgggcgcggccggcctgggccggtcctggacgtcgtacctcgcggcgctcatcggccgcgacagcgacgcgctccgcatccacgtccccgcgctcgccgacggcttcaatctgctggacccgatcgccgtcgtcgtgctgtgcgccacttccgcgctcgccgtgtccggcgcgcgcctcacctccaccgtcaactcggtggcgtccgcggtcggcatcgccatcatcgcgttcgtgctggccgcggggttctcgcacttcgagccagccaacctcgcgccgtcattcttccccttcggcgccgcgggcgtcttccgcgcggcggccgtcgtgtactggtcctacacgggattcgacatggtggccaccatggccgaggagaccaagaaccccggcccgcgacgtgccgctgggcctcatctcgtccatgtccgccatcaccctcgtctactgcgccatgtccctcgcgctcgtggggatgcagcgctacagcgacattgacgccaacgcggcctactcggtggcgttcgcggcggccgggatgaagtgggcgcgctacgtcgtggcgctcggcgcgctcaagggcatgacgagcggcctcctcgtcggcgcgctcggccaggcgcgctacaccacgcagatcgcgcgcacgcacatgatcccgccctacttcgcgctcgtgcaccccaggaccggcacgcccatctacgccaccatcgccgtcacgctcggcgccgcctgcgtcgcgctcttctccagcctcgacgtgctcgcgtccgtctcctccatcagcacgctcttcatcttcgcgctcgtcgccgttgcgctcctcgtccgacgatactacgtcgcgggaaccacgtcacccgcgcaggcccgcaccttcgtcggcttcctggcgctgatcgtgctgtcgtccatcgggctgtccgtgtactacaactcgggctacgctgctcggtggcccgggtacgtagcgttcggcgctttgtgggcggccggcacggcggggctggcgctattcgcggagcagcagcgcgcgcccagggtatacggcgcgccgctcatgccgtggctgccggccatgtccgtcgccacaaacctcttccttatgggctctctcggctccctcgcctacatgcgctttggcatctgcacggcggcgatgcttgtgtactacgtgctcttcagcgtgcacgccacctatgacatggtgcactctcaaggtcagacgacatcggcggccgacgctgccaccgacggagtggagcagaggaagataatgccggtgtgacacagaggatgtcatttcttggttagttgagcaaaaggtttgttcaactgtagtgtagggtagacttgagtttggtttgttcaattgctctagttaattggatccctcgttcagaatagctcatctgtatgaaaaaatggtttgtgc

SEQ ID NO: 30257 - protein, 288 aa, Zea mays subsp. mays
  peptide (1)..(288): Ceres Seq. ID no. 12408402
  misc_feature (1)..(264): NCBI GI NO: 34903850 NR Description: unnamed protein product
  misc_feature (1)..(264): NCBI GI NO: 15220035 NR Description: putative amino acid transporter
  misc_feature (1)..(266): NCBI GI NO: 15226868 NR Description: putative amino acid transporter
  misc_feature (1)..(279): NCBI GI NO: 30685317 NR Description: amino acid transport protein AAT1
  misc_feature (1)..(266): NCBI GI NO: 19699365 NR Description: At2g34960/F19I3.19 [Arabidopsis thaliana]
  misc_feature (1)..(279): NCBI GI NO: 1076291 NR Description: amino acid transport protein AAT1
  misc_feature (1)..(261): NCBI GI NO: 15228334 NR Description: putative amino acid transporter
  misc_feature (1)..(261): NCBI GI NO: 15238312 NR Description: amino acid transport - like protein
  misc_feature (1)..(260): NCBI GI NO: 38345948 NR Description: OSJNBb0103I08.20
  misc_feature (1)..(139): NCBI GI NO: 37521235 NR Description: probable amino acid transporter
MSAITLVYCAMSLALVGMQRYSDIDANAAYSVAFAAAGMKWARYVVALGALKGMTSGLLVGALGQARYTTQIARTHMIPPYFALVHPRTGTPIYATIAVTLGAACVALFSSLDVLASVSSISTLFIFALVAVALLVRRYYVAGTTSPAQARTFVGFLALIVLSSIGLSVYYNSGYAARWPGYVAFGALWAAGTAGLALFAEQQRAPRVYGAPLMPWLPAMSVATNLFLMGSLGSLAYMRFGICTAAMLVYYVLFSVHATYDMVHSQGQTTSAADAATDGVEQRKIMPV

SEQ ID NO: 30258 - protein, 278 aa, Zea mays subsp. mays
  peptide (1)..(278): Ceres Seq. ID no. 12408403
  misc_feature (1)..(254): NCBI GI NO: 34903850 NR Description: unnamed protein product
  misc_feature (1)..(254): NCBI GI NO: 15220035 NR Description: putative amino acid transporter
  misc_feature (1)..(256): NCBI GI NO: 15226868 NR Description: putative amino acid transporter
  misc_feature (1)..(269): NCBI GI NO: 30685317 NR Description: amino acid transport protein AAT1
  misc_feature (1)..(256): NCBI GI NO: 19699365 NR Description: At2g34960/F19I3.19 [Arabidopsis thaliana]
  misc_feature (1)..(269): NCBI GI NO: 1076291 NR Description: amino acid transport protein AAT1
  misc_feature (1)..(251): NCBI GI NO: 15228334 NR Description: putative amino acid transporter
  misc_feature (1)..(251): NCBI GI NO: 15238312 NR Description: amino acid transport - like protein
  misc_feature (1)..(250): NCBI GI NO: 38345948 NR Description: OSJNBb0103I08.20
  misc_feature (1)..(129): NCBI GI NO: 37521235 NR Description: probable amino acid transporter
MSLALVGMQRYSDIDANAAYSVAFAAAGMKWARYVVALGALKGMTSGLLVGALGQARYTTQIARTHMIPPYFALVHPRTGTPIYATIAVTLGAACVALFSSLDVLASVSSISTLFIFALVAVALLVRRYYVAGTTSPAQARTFVGFLALIVLSSIGLSVYYNSGYAARWPGYVAFGALWAAGTAGLALFAEQQRAPRVYGAPLMPWLPAMSVATNLFLMGSLGSLAYMRFGICTAAMLVYYVLFSVHATYDMVHSQGQTTSAADAATDGVEQRKIMPV

SEQ ID NO: 30259 - protein, 271 aa, Zea mays subsp. mays
  peptide (1)..(271): Ceres Seq. ID no. 12408404
  misc_feature (1)..(247): NCBI GI NO: 34903850 NR Description: unnamed protein product
  misc_feature (1)..(247): NCBI GI NO: 15220035 NR Description: putative amino acid transporter
  misc_feature (1)..(249): NCBI GI NO: 15226868 NR Description: putative amino acid transporter
  misc_feature (1)..(262): NCBI GI NO: 30685317 NR Description: amino acid transport protein AAT1
  misc_feature (1)..(249): NCBI GI NO: 19699365 NR Description: At2g34960/F19I3.19 [Arabidopsis thaliana]
  misc_feature (1)..(262): NCBI GI NO: 1076291 NR Description: amino acid transport protein AAT1
  misc_feature (1)..(244): NCBI GI NO: 15228334 NR Description: putative amino acid transporter
  misc_feature (1)..(244): NCBI GI NO: 15238312 NR Description: amino acid transport - like protein
  misc_feature (1)..(243): NCBI GI NO: 38345948 NR Description: OSJNBb0103I08.20
  misc_feature (1)..(122): NCBI GI NO: 37521235 NR Description: probable amino acid transporter
MQRYSDIDANAAYSVAFAAAGMKWARYVVALGALKGMTSGLLVGALGQARYTTQIARTHMIPPYFALVHPRTGTPIYATIAVTLGAACVALFSSLDVLASVSSISTLFIFALVAVALLVRRYYVAGTTSPAQARTFVGFLALIVLSSIGLSVYYNSGYAARWPGYVAFGALWAAGTAGLALFAEQQRAPRVYGAPLMPWLPAMSVATNLFLMGSLGSLAYMRFGICTAAMLVYYVLFSVHATYDMVHSQGQTTSAADAATDGVEQRKIMPV

SEQ ID NO: 30260 - DNA, 1450 bp, Zea mays subsp. mays
  misc_feature (1)..(1450): Ceres Seq. ID no. 12423817
  misc_feature (1206)..(1206): n is a, c, t, g, unknown, or other
cactctgcctttccattcccccatccgccatggcggcgccgccggagctcgttgacgacacgatcgccgagatctgcctccgccttcccccggacgagcccgcgcacctcgtccgtgccgccctggtctccaggcgctggcgccgcatcctctccggcggggccttcctccgccggtaccgcgcgttccacggggcaccccctctgctcggcttcgtcgacaacaccatcgggctccacggcgccacggcccctcgcttctcccccaccacctcatccggctcccctttccccaggcggacgttcgactgcatctgctgggaggccctcgactgccgccacggccgcgtcctcctcggcctcttcgccgagagggtcaacctcgtcgtgtgggaccccgtcaccggcgaccactgtgggctgcctgaccccggggtgctccccggttactacagcgcggcggtgctctgcgccgcgcgcggctgcgaccacctccactgccgcggcggcggcccgttccgcgtcgtcctggcgggcatggactacttctcaagggacgccggcgtgcgggcgcgcctctactgctcggaggccgctgcctgggtcgcctctgctcagttggcctccgattcccatgtcatgcggaagcccagcgcgctcgtcggagacaacgtctacttccagctcatggagggtgacgtgtttctgaggtacgacatgggcaggaaccgtctgtccaccttcgaccctccggcggcgcacgtcgacgaagggggcgtcgtgctcatgcccatgggcggtgacggctcgctggggcttgccggcgtcaggggatcaaggctttgcctgtggtcgacgagtgtcggcgcagaggggattggaaggatgggttcgacgcggggacattgagcttatgacacggatcccctttatgccctatagcgaagcacatgtgattgcttctgcggagggcttgggtttcggtacaatcttcttggtctcaactgaggttggcctcttcgcggtcgacctcaaatcagggcaggagcgcaaactaagcgagcctgggaactacaacgacttcgctgtcttccccttcatgagcttctatactccagactgtacaagcggcaaggtaccgtcacccaggaggacacactaatcactgtaatactgaggcgaagaatggtattgcctggctcatctncagatccatcaagttgagtttgcaggtgctgtcatctttctgttgcaggaatgacgtctcgcaagaaacacaagccatgaagccaacatattggtcgcttatgctcctatgctctctagctgattcttagatgcataatgtatacgcagccttttttttgttctcgtaatatgtgtgttgtttggttcacatatttgtaatataataggtaacagataacgttaaattatgtttgtttaaatcc

SEQ ID NO: 30261 - protein, 301 aa, Zea mays subsp. mays
  peptide (1)..(301): Ceres Seq. ID no. 12423818
  misc_feature (14)..(61): Pfam Name: Pfam Description:  F-box domain
  misc_feature (9)..(291): NCBI GI NO: 34395380 NR Description: unknown protein
  misc_feature (11)..(292): NCBI GI NO: 33146558 NR Description: unknown protein
  misc_feature (11)..(292): NCBI GI NO: 34915424 NR Description: hypothetical protein~similar to Oryza sativachromosome1
  misc_feature (11)..(291): NCBI GI NO: 34394504 NR Description: unknown protein
  misc_feature (10)..(284): NCBI GI NO: 34915420 NR Description: contains EST C98814
  misc_feature (13)..(290): NCBI GI NO: 34914028 NR Description: OJ1014_G12.29
  misc_feature (10)..(301): NCBI GI NO: 34915428 NR Description: hypothetical protein~similar to Oryza sativachromosome1
  misc_feature (10)..(291): NCBI GI NO: 35215058 NR Description: hypothetical protein
  misc_feature (12)..(294): NCBI GI NO: 34394503 NR Description: unknown protein
  misc_feature (16)..(284): NCBI GI NO: 35215055 NR Description: hypothetical protein
LCLSIPPSAMAAPPELVDDTIAEICLRLPPDEPAHLVRAALVSRRWRRILSGGAFLRRYRAFHGAPPLLGFVDNTIGLHGATAPRFSPTTSSGSPFPRRTFDCICWEALDCRHGRVLLGLFAERVNLVVWDPVTGDHCGLPDPGVLPGYYSAAVLCAARGCDHLHCRGGGPFRVVLAGMDYFSRDAGVRARLYCSEAAAWVASAQLASDSHVMRKPSALVGDNVYFQLMEGDVFLRYDMGRNRLSTFDPPAAHVDEGGVVLMPMGGDGSLGLAGVRGSRLCLWSTSVGAEGIGRMGSTRGH

SEQ ID NO: 30262 - protein, 292 aa, Zea mays subsp. mays
  peptide (1)..(292): Ceres Seq. ID no. 12423819
  misc_feature (5)..(52): Pfam Name: Pfam Description:  F-box domain
  misc_feature (1)..(282): NCBI GI NO: 34395380 NR Description: unknown protein
  misc_feature (2)..(283): NCBI GI NO: 33146558 NR Description: unknown protein
  misc_feature (2)..(283): NCBI GI NO: 34915424 NR Description: hypothetical protein~similar to Oryza sativachromosome1
  misc_feature (2)..(282): NCBI GI NO: 34394504 NR Description: unknown protein
  misc_feature (1)..(275): NCBI GI NO: 34915420 NR Description: contains EST C98814
  misc_feature (4)..(281): NCBI GI NO: 34914028 NR Description: OJ1014_G12.29
  misc_feature (1)..(292): NCBI GI NO: 34915428 NR Description: hypothetical protein~similar to Oryza sativachromosome1
  misc_feature (1)..(282): NCBI GI NO: 35215058 NR Description: hypothetical protein
  misc_feature (3)..(285): NCBI GI NO: 34394503 NR Description: unknown protein
  misc_feature (7)..(275): NCBI GI NO: 35215055 NR Description: hypothetical protein
MAAPPELVDDTIAEICLRLPPDEPAHLVRAALVSRRWRRILSGGAFLRRYRAFHGAPPLLGFVDNTIGLHGATAPRFSPTTSSGSPFPRRTFDCICWEALDCRHGRVLLGLFAERVNLVVWDPVTGDHCGLPDPGVLPGYYSAAVLCAARGCDHLHCRGGGPFRVVLAGMDYFSRDAGVRARLYCSEAAAWVASAQLASDSHVMRKPSALVGDNVYFQLMEGDVFLRYDMGRNRLSTFDPPAAHVDEGGVVLMPMGGDGSLGLAGVRGSRLCLWSTSVGAEGIGRMGSTRGH

SEQ ID NO: 30263 - protein, 235 aa, Zea mays subsp. mays
  peptide (1)..(235): Ceres Seq. ID no. 12423820
  misc_feature (16)..(235): Pfam Name: Pfam Description:  Equine herpesvirus glycoprotein gp2
  misc_feature (16)..(235): NCBI GI NO: 17221114 NR Description: glycoprotein gp2 [Equine herpesvirus 1]
  misc_feature (16)..(235): NCBI GI NO: 13592175 NR Description: ppg3 [Leishmania major]
  misc_feature (16)..(235): NCBI GI NO: 17221116 NR Description: glycoprotein gp2 [Equine herpesvirus 1]
  misc_feature (22)..(229): NCBI GI NO: 11359723 NR Description: proteophosphoglycan, membrane-associated
  misc_feature (16)..(229): NCBI GI NO: 5420387 NR Description: proteophosphoglycan [Leishmania major]
  misc_feature (16)..(229): NCBI GI NO: 13592175 NR Description: ppg3 [Leishmania major]
  misc_feature (16)..(229): NCBI GI NO: 13592175 NR Description: ppg3 [Leishmania major]
  misc_feature (19)..(235): NCBI GI NO: 9626808 NR Description: membrane glycoprotein [Equine herpesvirus 1]
  misc_feature (16)..(229): NCBI GI NO: 11359723 NR Description: proteophosphoglycan, membrane-associated
  misc_feature (10)..(229): NCBI GI NO: 13592175 NR Description: ppg3 [Leishmania major]
HSAFPFPHPPWRRRRSSLTTRSPRSASAFPRTSPRTSSVPPWSPGAGAASSPAGPSSAGTARSTGHPLCSASSTTPSGSTAPRPLASPPPPHPAPLSPGGRSTASAGRPSTAATAASSSASSPRGSTSSCGTPSPATTVGCLTPGCSPVTTARRCSAPRAAATTSTAAAAARSASSWRAWTTSQGTPACGRASTARRPLPGSPLLSWPPIPMSCGSPARSSETTSTSSSWRVTCF

SEQ ID NO: 30264 - DNA, 1511 bp, Zea mays subsp. mays
  misc_feature (1)..(1511): Ceres Seq. ID no. 12408397
  misc_feature (1063)..(1063): n is a, c, t, g, unknown, or other
  misc_feature (1134)..(1134): n is a, c, t, g, unknown, or other
  misc_feature (1089)..(1089): n is a, c, t, g, unknown, or other
  misc_feature (1078)..(1078): n is a, c, t, g, unknown, or other
  misc_feature (1136)..(1136): n is a, c, t, g, unknown, or other
cctgcccgcagctgagctcccccatagttactagctagcttatattgcatatctcctccccctcctccgtcctcgctagctcgtgttcttcttcctctcatcttttgcttgtcctccattccatcgatctcctattcctgtgccgaccgcgaggccatcgtcaaagagaaacacagagcgggtcggggactctcggggagtcgggggaggctgctagtgctagctagctcgaccatatacagtttgtgggcgcggccgggcgggcaacaagctgctaaggtaccagcataccacccatctccatggctttcctggtggagcggtgcggcgagatggtggtgtcgatggagagcccgcacgcgaaccggtgccggcgccgttcctgaccaagacgtaccagctggtggacgacccctgcaccgaccacttcgtgtcgtggggcgacgacgacaccaccttcgtcgtgtggcgcccgcccgagttcgcccgcgacctcctcccaaactacttcaagcacaacaacttctccagcttcgtcaggcagctcaacacctatggcttcaggaagatagtggcggacaggtgggagttcgccaacgagttcttcaggaagggcgccaagcacctcctcgccgagatccaccggaggaagtcgtcgcagccgctgccgacgccgctgccgccgcaccagccctaccaccaccaccaccaccatctccaccaccacctcagcccgttctccccgccgccgctggcacagccggtgccgtcgtaccaccaccaccacttccaagaagagcccatcgccaccgccaccgcgccgcacggcggtgctcaagccgccgccgccggcggcaacaatgaaggcagcggcgccggctccggcggggactttctggccgcgctgtcggaggacaaccggcagctgtggcggcgcaactcgctgctgctgtcggagctggcgcacatgaagaagctctacaacgacatcatctacttcctgcagaaccacgtggccccggtgacgagcccctcgtcggcggcgcacgcgtccctgcccaangcgccggcggcggcngcgccgcggcntcctcctgcaggctaatggagctggacccggcggactccccatcncnccgccgcggcggccggaggcggacgacggcacggacacggtgaagctgttcggcgtggccctgcagggcaagaagaagaagcgggcgcaccaggaggatggggacgacggcaaccatgagcagggaagcagcgacgtctagccgccggccggcttgcattgctagctctctcgttcgtgtacatacagagatcagatcagagagtagtagtttgcctcgctagctaggctaggctaggctttggtaattttcttctgagtgcgtactgaaattaatgtgcaagagcgaagtgtttgtctgagtaaaactaacaagaatctacggatgcgtgcatggaagctaagctagatgcagaggcttgcaccaccttctctt

SEQ ID NO: 30265 - protein, 45 aa, Zea mays subsp. mays
  peptide (1)..(45): Ceres Seq. ID no. 12408398
  misc_feature (1)..(29): NCBI GI NO: 15220101 NR Description: heat shock transcription factor, putative
  misc_feature (1)..(24): NCBI GI NO: 2129832 NR Description: heat shock transcription factor HSF5 - soybean
  misc_feature (1)..(40): NCBI GI NO: 33146640 NR Description: putative heat shock transcription factor HSF5
  misc_feature (1)..(40): NCBI GI NO: 33146639 NR Description: heat shock transcription factor -like protein
  misc_feature (1)..(16): NCBI GI NO: 5821136 NR Description: heat shock factor [Nicotiana tabacum]
  misc_feature (1)..(29): NCBI GI NO: 33591098 NR Description: heat shock factor RHSF2
  misc_feature (1)..(30): NCBI GI NO: 2129830 NR Description: heat shock transcription factor HSF31 - soybean
  misc_feature (1)..(16): NCBI GI NO: 15234583 NR Description: heat shock transcription factor HSF4
  misc_feature (1)..(16): NCBI GI NO: 2129612 NR Description: heat shock transcription factor HSF4
  misc_feature (1)..(16): NCBI GI NO: 123684 NR Description: HEAT SHOCK FACTOR PROTEIN HSF24
  misc_feature (32)..(32): Xaa is any aa, unknown or other
  misc_feature (37)..(37): Xaa is any aa, unknown or other
  misc_feature (41)..(41): Xaa is any aa, unknown or other
MKKLYNDIIYFLQNHVAPVTSPSSAAHASLPXAPAAXAPRXPPAG

SEQ ID NO: 30266 - protein, 41 aa, Zea mays subsp. mays
  peptide (1)..(41): Ceres Seq. ID no. 12408399
MGTTATMSREAATSSRRPACIASSLVRVHTEIRSESSSLPR

SEQ ID NO: 30267 - protein, 36 aa, Zea mays subsp. mays
  peptide (1)..(36): Ceres Seq. ID no. 12408400
  misc_feature (1)..(36): NCBI GI NO: 28574039 NR Description: Salivary gland secretion 1 CG3047-PA
  misc_feature (1)..(36): NCBI GI NO: 28574039 NR Description: Salivary gland secretion 1 CG3047-PA
  misc_feature (1)..(36): NCBI GI NO: 28574039 NR Description: Salivary gland secretion 1 CG3047-PA
  misc_feature (1)..(36): NCBI GI NO: 28574039 NR Description: Salivary gland secretion 1 CG3047-PA
  misc_feature (1)..(36): NCBI GI NO: 28574039 NR Description: Salivary gland secretion 1 CG3047-PA
  misc_feature (1)..(36): NCBI GI NO: 28574039 NR Description: Salivary gland secretion 1 CG3047-PA
  misc_feature (1)..(36): NCBI GI NO: 28574039 NR Description: Salivary gland secretion 1 CG3047-PA
  misc_feature (1)..(36): NCBI GI NO: 28574039 NR Description: Salivary gland secretion 1 CG3047-PA
  misc_feature (1)..(36): NCBI GI NO: 28574039 NR Description: Salivary gland secretion 1 CG3047-PA
  misc_feature (1)..(36): NCBI GI NO: 28574039 NR Description: Salivary gland secretion 1 CG3047-PA
MKAAAPAPAGTFWPRCRRTTGSCGGATRCCCRSWRT

SEQ ID NO: 30268 - DNA, 1528 bp, Zea mays subsp. mays
  misc_feature (1)..(1528): Ceres Seq. ID no. 12408393
atctcgcttgcgaaacaaaggacggcgcgcgagaggaggggaaaggaaaacaaccaccacgaccccgtccattccgttccacttccacccgagctcagcgatcgcggcggcggatgcggatggggaaggggctgtcgtcgcgggcggggtcgcggcaccggcagttccgcgcccgagccatgacccgcgtcgacgacctccaggaggtcttctcgggcctgcagtccgcgcgcaaggactcacgctccgcggacgccgccgtcctcgaggcgcagctccagcagatgctgcgcgagtggcgctccgagctcaacgctccctctcccacctcctccctgcagggcaacgccagggaactgtcggatccgccttcggatactcttcgtctactgcagttggtggtggccgaggaggaggatgacgccacgagcaagatggtcgagcagcagcagcagcccccacctccgctcccagctaaccggagccagggccacgcgcatgttgtgtgccagggcatgaagccggagccgcacgaggaagcagttgacgttgctgtggaccagccgcagctgctgagtcagggggttctgcctaatggtgctgctaccgcgtctgcggtgttccatgatcagctgtactatgtgaaccaggagctcacggtcgaggattttctttatgatgatgattacaagatagatctttctgggtctaatctggatgtcattaataacctagaagggattgttcagctggaatatccagatcacaatttgccgcaagggttagcccctaatgcataccttgacatgaatagttgtgggcagagtgccggggctgttttcctgcacatgccagatttgctcacaacaatgacttcagcaccttctgcattcctgaagccaaaatgcgctctctgggactgccccaggcctgctattggatcagaaagatggcataattattgcagcatgtatcatgctgatttggctgtgcaggaagagggccctccgggcacaatgcctgtgatccgtccaagaggcattgatctgaaagatggccccctgtttgctgctcttagtgcaaaagtccaaggaaaaaatgttggggtccctatctgtgaaggagctgccactgcaaagtctccatggaatgcacctgaacttttcgatctttacatatttgaaggtgaatctatcagagaatggttgttttttgacaaaccaaggagggcatttgatagtggaaatcggaagcagcggtccttgccagactacaacggccgtggttggcatgaatctaggaagcaggtgatgaaggactttgggggtctgaagaggtcctattacatggatccacaaccatccaacagctatgaatggcacctatatgaatatgagatcaatgactgtgatgcttttgccttatatcggcttgaattcaagtcttcagatgcaaagaaaattgcaaaatccaaattaggttgtaatccactgaatgaaattcagcagcaaatggatagactcagtcc

SEQ ID NO: 30269 - protein, 508 aa, Zea mays subsp. mays
  peptide (1)..(508): Ceres Seq. ID no. 12408394
  misc_feature (48)..(507): NCBI GI NO: 34909602 NR Description: P0435B05.21
  misc_feature (62)..(267): NCBI GI NO: 18405962 NR Description: expressed protein; protein id: At2g42400
  misc_feature (294)..(504): NCBI GI NO: 18405962 NR Description: expressed protein; protein id: At2g42400
  misc_feature (105)..(507): NCBI GI NO: 15218694 NR Description: unknown protein; protein id: At1g28520.1
  misc_feature (62)..(504): NCBI GI NO: 25370817 NR Description: hypothetical protein At2g42400
  misc_feature (386)..(507): NCBI GI NO: 6691215 NR Description: F1K23.24 [Arabidopsis thaliana]
  misc_feature (47)..(217): NCBI GI NO: 15218694 NR Description: unknown protein; protein id: At1g28520.1
LACETKDGAREEGKGKQPPRPRPFRSTSTRAQRSRRRMRMGKGLSSRAGSRHRQFRARAMTRVDDLQEVFSGLQSARKDSRSADAAVLEAQLQQMLREWRSELNAPSPTSSLQGNARELSDPPSDTLRLLQLVVAEEEDDATSKMVEQQQQPPPPLPANRSQGHAHVVCQGMKPEPHEEAVDVAVDQPQLLSQGVLPNGAATASAVFHDQLYYVNQELTVEDFLYDDDYKIDLSGSNLDVINNLEGIVQLEYPDHNLPQGLAPNAYLDMNSCGQSAGAVFLHMPDLLTTMTSAPSAFLKPKCALWDCPRPAIGSERWHNYCSMYHADLAVQEEGPPGTMPVIRPRGIDLKDGPLFAALSAKVQGKNVGVPICEGAATAKSPWNAPELFDLYIFEGESIREWLFFDKPRRAFDSGNRKQRSLPDYNGRGWHESRKQVMKDFGGLKRSYYMDPQPSNSYEWHLYEYEINDCDAFALYRLEFKSSDAKKIAKSKLGCNPLNEIQQQMDRLS

SEQ ID NO: 30270 - protein, 471 aa, Zea mays subsp. mays
  peptide (1)..(471): Ceres Seq. ID no. 12408395
  misc_feature (11)..(470): NCBI GI NO: 34909602 NR Description: P0435B05.21
  misc_feature (25)..(230): NCBI GI NO: 18405962 NR Description: expressed protein; protein id: At2g42400
  misc_feature (257)..(467): NCBI GI NO: 18405962 NR Description: expressed protein; protein id: At2g42400
  misc_feature (68)..(470): NCBI GI NO: 15218694 NR Description: unknown protein; protein id: At1g28520.1
  misc_feature (25)..(467): NCBI GI NO: 25370817 NR Description: hypothetical protein At2g42400
  misc_feature (349)..(470): NCBI GI NO: 6691215 NR Description: F1K23.24 [Arabidopsis thaliana]
  misc_feature (10)..(180): NCBI GI NO: 15218694 NR Description: unknown protein; protein id: At1g28520.1
MRMGKGLSSRAGSRHRQFRARAMTRVDDLQEVFSGLQSARKDSRSADAAVLEAQLQQMLREWRSELNAPSPTSSLQGNARELSDPPSDTLRLLQLVVAEEEDDATSKMVEQQQQPPPPLPANRSQGHAHVVCQGMKPEPHEEAVDVAVDQPQLLSQGVLPNGAATASAVFHDQLYYVNQELTVEDFLYDDDYKIDLSGSNLDVINNLEGIVQLEYPDHNLPQGLAPNAYLDMNSCGQSAGAVFLHMPDLLTTMTSAPSAFLKPKCALWDCPRPAIGSERWHNYCSMYHADLAVQEEGPPGTMPVIRPRGIDLKDGPLFAALSAKVQGKNVGVPICEGAATAKSPWNAPELFDLYIFEGESIREWLFFDKPRRAFDSGNRKQRSLPDYNGRGWHESRKQVMKDFGGLKRSYYMDPQPSNSYEWHLYEYEINDCDAFALYRLEFKSSDAKKIAKSKLGCNPLNEIQQQMDRLS

SEQ ID NO: 30271 - protein, 469 aa, Zea mays subsp. mays
  peptide (1)..(469): Ceres Seq. ID no. 12408396
  misc_feature (9)..(468): NCBI GI NO: 34909602 NR Description: P0435B05.21
  misc_feature (23)..(228): NCBI GI NO: 18405962 NR Description: expressed protein; protein id: At2g42400
  misc_feature (255)..(465): NCBI GI NO: 18405962 NR Description: expressed protein; protein id: At2g42400
  misc_feature (66)..(468): NCBI GI NO: 15218694 NR Description: unknown protein; protein id: At1g28520.1
  misc_feature (23)..(465): NCBI GI NO: 25370817 NR Description: hypothetical protein At2g42400
  misc_feature (347)..(468): NCBI GI NO: 6691215 NR Description: F1K23.24 [Arabidopsis thaliana]
  misc_feature (8)..(178): NCBI GI NO: 15218694 NR Description: unknown protein; protein id: At1g28520.1
MGKGLSSRAGSRHRQFRARAMTRVDDLQEVFSGLQSARKDSRSADAAVLEAQLQQMLREWRSELNAPSPTSSLQGNARELSDPPSDTLRLLQLVVAEEEDDATSKMVEQQQQPPPPLPANRSQGHAHVVCQGMKPEPHEEAVDVAVDQPQLLSQGVLPNGAATASAVFHDQLYYVNQELTVEDFLYDDDYKIDLSGSNLDVINNLEGIVQLEYPDHNLPQGLAPNAYLDMNSCGQSAGAVFLHMPDLLTTMTSAPSAFLKPKCALWDCPRPAIGSERWHNYCSMYHADLAVQEEGPPGTMPVIRPRGIDLKDGPLFAALSAKVQGKNVGVPICEGAATAKSPWNAPELFDLYIFEGESIREWLFFDKPRRAFDSGNRKQRSLPDYNGRGWHESRKQVMKDFGGLKRSYYMDPQPSNSYEWHLYEYEINDCDAFALYRLEFKSSDAKKIAKSKLGCNPLNEIQQQMDRLS

SEQ ID NO: 30272 - DNA, 1814 bp, Zea mays subsp. mays
  misc_feature (1)..(1814): Ceres Seq. ID no. 12406604
gcacgagaccattacctagaacatcctaatcgaaaatcatttcctctcttttgacgacggaaacgaggcacgatcacacgctgaacgcttccgccccgccgccaccttccccgctctcctccctccgctcgcctccgcttccgttccgcgccctgcccccggaaggcaagcaaagccctcgctacttgcggagcgtcgttggtcaaaccctagcacacgtacgagcaggccagccccgcccgctcccattcccaggccctcatccatggcggcgctctccgtgcccctccacgccgccgccggatcccgcgccgccgcggccgaccccgtcaaggttccgtgcgtgaggagcactggttcagcccatttcggccgcgccttcccctccgtcgcggtctcctctttggctgcgaggcacatcgagccgatgagagcgatagctacacaggcgccccctgccgtgccacaatatttgagtggcgagaagacaaagatcggcatcaacggctttgggcggattggcaggttggtcctgcgaattgcaactagcagagacgatattgaagttgtggctgtgaatgaccctttcgttgatgctaagtacatggcctatatgttcaagtatgactctactcatggcccgtttaaaggttctatttgtgttgtggatgattcaaccctggagatcaatgggaagaaggtcacaattacaagcaaaagagatcctgcagagattccatggggtaactttggggctgaatatgttgttgaatcttctggtgtctttacaacgactgataaagcatcagcacacttaaagggtggtgctaagaaagtggtgatatctgcaccatcagcagatgctcccatgtttgtagttggagttaatgagaatagctatgattcgaagatgaatgttgtttctaatgcaagttgcaccaccaactgccttgctccacttgccaaggttgtacatgaggaatttggcatcgtggagggccttatgacaactgttcatgccacaacagccacccagaagaccgttgatggtccttcaatgaaggattggagagaggacgtggtgctggccaaaacataattcctagctccactggtgcagcaaaggctgttggaaaagttctgcctgagctgaatggaaagctcactggcatggccttccgagttccaacaccaaatgtctctgttgtggacttgacatgccggattgagaaaaacgcctcctatgatgatgtgaaagcagccatcaaggcggcatcagagggtgcactcaaaggaattcttggctacacagacgaggacgttgtttccaatgattttgttggtgattctaggtcaagcatctttgatgccaaggctggtatcggactgagctcttctttcatgaagctcgtgtcttggtatgacaacgagtggggctacagcaaccgggttctggatctgatcgcccacatggccctcgtcagcgccgccgccaagctctgacgtccgtgctcgttcctccagtagtagcctaggagaaaggctgcaattttgacggccattttctgttagctgttgtctggaataaagatcaaatgctgtaacacttcgaactcgcgcgagactggactcagatccatggcctgtattttagttgtagaagggggcaaatttgcaccgtagtaccatggcatggttatacgcggaattgttgattgatgagtcgttgtacggtttgtcgacttgatgatatgttgatgtgggagcccctgaatgaggcggtattaatggaaatatataggatggcaatggct

SEQ ID NO: 30273 - protein, 277 aa, Zea mays subsp. mays
  peptide (1)..(277): Ceres Seq. ID no. 12406605
  misc_feature (5)..(269): NCBI GI NO: 2129471 NR Description: glyceraldehyde-3-phosphate dehydrogenase
  misc_feature (5)..(269): NCBI GI NO: 2129472 NR Description: glyceraldehyde-3-phosphate dehydrogenase
  misc_feature (32)..(269): NCBI GI NO: 18072805 NR Description: glyceraldehyde-3-phosphate dehydrogenase
  misc_feature (29)..(269): NCBI GI NO: 27754473 NR Description: putative glyceraldehyde-3-phosphate dehydrogenase
  misc_feature (29)..(269): NCBI GI NO: 15219206 NR Description: putative glyceraldehyde-3-phosphate dehydrogenase
  misc_feature (29)..(269): NCBI GI NO: 21618027 NR Description: putative glyceraldehyde-3-phosphate dehydrogenase
  misc_feature (48)..(269): NCBI GI NO: 3059140 NR Description: NAD-dependent glyceraldehyde-3-phosphatedehydrogenase
  misc_feature (39)..(269): NCBI GI NO: 15219406 NR Description: glyceraldehyde-3-phosphate dehydrogenase, putative
  misc_feature (29)..(269): NCBI GI NO: 25284351 NR Description: hypothetical protein F3O9
  misc_feature (48)..(269): NCBI GI NO: 3059122 NR Description: glyeraldehyde-3-phosphate dehydrogenase
MAALSVPLHAAAGSRAAAADPVKVPCVRSTGSAHFGRAFPSVAVSSLAARHIEPMRAIATQAPPAVPQYLSGEKTKIGINGFGRIGRLVLRIATSRDDIEVVAVNDPFVDAKYMAYMFKYDSTHGPFKGSICVVDDSTLEINGKKVTITSKRDPAEIPWGNFGAEYVVESSGVFTTTDKASAHLKGGAKKVVISAPSADAPMFVVGVNENSYDSKMNVVSNASCTTNCLAPLAKVVHEEFGIVEGLMTTVHATTATQKTVDGPSMKDWREDVVLAKT

SEQ ID NO: 30274 - protein, 223 aa, Zea mays subsp. mays
  peptide (1)..(223): Ceres Seq. ID no. 12406606
  misc_feature (1)..(215): NCBI GI NO: 2129471 NR Description: glyceraldehyde-3-phosphate dehydrogenase
  misc_feature (1)..(215): NCBI GI NO: 2129472 NR Description: glyceraldehyde-3-phosphate dehydrogenase
  misc_feature (1)..(215): NCBI GI NO: 18072805 NR Description: glyceraldehyde-3-phosphate dehydrogenase
  misc_feature (1)..(215): NCBI GI NO: 27754473 NR Description: putative glyceraldehyde-3-phosphate dehydrogenase
  misc_feature (1)..(215): NCBI GI NO: 15219206 NR Description: putative glyceraldehyde-3-phosphate dehydrogenase
  misc_feature (1)..(215): NCBI GI NO: 21618027 NR Description: putative glyceraldehyde-3-phosphate dehydrogenase
  misc_feature (1)..(215): NCBI GI NO: 3059140 NR Description: NAD-dependent glyceraldehyde-3-phosphatedehydrogenase
  misc_feature (1)..(215): NCBI GI NO: 15219406 NR Description: glyceraldehyde-3-phosphate dehydrogenase, putative
  misc_feature (1)..(215): NCBI GI NO: 25284351 NR Description: hypothetical protein F3O9
  misc_feature (1)..(215): NCBI GI NO: 3059122 NR Description: glyeraldehyde-3-phosphate dehydrogenase
MRAIATQAPPAVPQYLSGEKTKIGINGFGRIGRLVLRIATSRDDIEVVAVNDPFVDAKYMAYMFKYDSTHGPFKGSICVVDDSTLEINGKKVTITSKRDPAEIPWGNFGAEYVVESSGVFTTTDKASAHLKGGAKKVVISAPSADAPMFVVGVNENSYDSKMNVVSNASCTTNCLAPLAKVVHEEFGIVEGLMTTVHATTATQKTVDGPSMKDWREDVVLAKT

SEQ ID NO: 30275 - protein, 164 aa, Zea mays subsp. mays
  peptide (1)..(164): Ceres Seq. ID no. 12406607
  misc_feature (1)..(156): NCBI GI NO: 2129471 NR Description: glyceraldehyde-3-phosphate dehydrogenase
  misc_feature (1)..(156): NCBI GI NO: 2129472 NR Description: glyceraldehyde-3-phosphate dehydrogenase
  misc_feature (1)..(156): NCBI GI NO: 18072805 NR Description: glyceraldehyde-3-phosphate dehydrogenase
  misc_feature (1)..(156): NCBI GI NO: 27754473 NR Description: putative glyceraldehyde-3-phosphate dehydrogenase
  misc_feature (1)..(156): NCBI GI NO: 15219206 NR Description: putative glyceraldehyde-3-phosphate dehydrogenase
  misc_feature (1)..(156): NCBI GI NO: 21618027 NR Description: putative glyceraldehyde-3-phosphate dehydrogenase
  misc_feature (1)..(156): NCBI GI NO: 3059140 NR Description: NAD-dependent glyceraldehyde-3-phosphatedehydrogenase
  misc_feature (1)..(156): NCBI GI NO: 15219406 NR Description: glyceraldehyde-3-phosphate dehydrogenase, putative
  misc_feature (1)..(156): NCBI GI NO: 25284351 NR Description: hypothetical protein F3O9
  misc_feature (1)..(156): NCBI GI NO: 3059122 NR Description: glyeraldehyde-3-phosphate dehydrogenase
MAYMFKYDSTHGPFKGSICVVDDSTLEINGKKVTITSKRDPAEIPWGNFGAEYVVESSGVFTTTDKASAHLKGGAKKVVISAPSADAPMFVVGVNENSYDSKMNVVSNASCTTNCLAPLAKVVHEEFGIVEGLMTTVHATTATQKTVDGPSMKDWREDVVLAKT

SEQ ID NO: 30276 - DNA, 1859 bp, Zea mays subsp. mays
  misc_feature (1)..(1859): Ceres Seq. ID no. 13498667
gaaaaagaacagaggttattcgttttggctacccgttttgaagacgatgatgagtccggcgtcggagcgcagcctcatcatccagagcgacgacgacgacgacgcccgatccggccacgacgtggaggagccggagccagagcaggagcaggactccgactcctcgtcgtcgtcctcatcctgcgccaccccacgccgcggcccaagctcacccccctacatccagcaatggccgcagagttacaggcaatcgatcgacattctcagcagcgtgcagtcacccaacctgacctttctggggactccaactctgagcaggctgtcgaactcattcctcgccatcaccgattctttccggagcaaggcccccgaaacgatctctagctttatcaagccactccttggccccacgccaagtgacgatcagcagcggcagcatgaaggcacccgaaagagttccgagtaccttgtgccctcgagaagatcatctctgcagcagatcccagaggatcaaaagccacctgtaggtggccatggggcgtctcatgaccagaactgctcttacacccagggagtgatgaatggaataaatgttctatgtggtgtggggatcctatcaacaccttatgccatcaaacaggggggctggattgggctggcgatactctgtatatatgctcttctcgcatggtacacaggtgtgctcctgcgccattgcctggacagcaaggagggcctcaagacatacccagatattggccatgcagcctttggcagcacaggccgcatagttatctcgataatactgtacgtggagttgtatgcatgttgcatcgagtatttgatattggagggtgacaatttgtcaaaattattccccaatgctcacctgaccattgggagcatgacactgaactcacatgtattttttgcaatcttgactaccatcatagtcatgccaaccacctggctccgtgacctgagctggctgagctacatttcagctgggggtgtcattgcatcaatccttgtagtcatctgcctgttcttggttggggttgtcaatgatgtcggctttgagaatgaagggactgcactgaacgccccaggaattcctattgcaattggattatatggttactgctactcagggcatgggttttttccaaatatctattcttccctgaagaatcgcaaccagtttccttcaattctttttacttgtattgggctgtctacctttttgtatgctggtgctgcagtgatgggatacaaaatgtttggtgaagccacagagtcccaattcacactcaacttaccagataattctgtcatttctaagattgctgtttggacaacggtggcaaatccaataaccaaatatgcattaactattattccattggctatgagtttggaagagctgctgccaccaaaccaacaaaagtattttacaataatcatgcttagatcatctctggtgatatcaaccctcctgattgctctatttgtgcctttctttggacttgtgatggccttggttggttctttgtttgccatgcttgtgacctacattttgccttgcgcgtgttttttggcgatcctcaagacaaaagtggggtggcatcagatagcagcttgctcgttcatcatagttgtcggggtttgctgtgcctacgtgggaacatactcgtccctgtcgaagataatccagaactacgcgtagcacagctgttcctgtgatcctgtatatgcatctgcctgacaaaatcatgtgtgtgctatatgggccgaacatatgtacaagatgaaagtttaccattcaattcactcgatgtataataaattattggtgcctc

SEQ ID NO: 30277 - protein, 574 aa, Zea mays subsp. mays
  peptide (1)..(574): Ceres Seq. ID no. 13498668
  misc_feature (199)..(562): Pfam Name: Pfam Description:  Tryptophan/tyrosine permease family
  misc_feature (21)..(571): NCBI GI NO: 30687791 NR Description: amino acid transporter family
  misc_feature (21)..(571): NCBI GI NO: 15292735 NR Description: unknown protein [Arabidopsis thaliana]
  misc_feature (157)..(569): NCBI GI NO: 30679549 NR Description: amino acid transporter family
  misc_feature (31)..(142): NCBI GI NO: 30679549 NR Description: amino acid transporter family
  misc_feature (21)..(526): NCBI GI NO: 25408639 NR Description: hypothetical protein At2g39130
  misc_feature (96)..(570): NCBI GI NO: 22326569 NR Description: amino acid transporter family
  misc_feature (49)..(117): NCBI GI NO: 22326569 NR Description: amino acid transporter family
  misc_feature (157)..(569): NCBI GI NO: 11358406 NR Description: hypothetical protein T7H20
  misc_feature (31)..(142): NCBI GI NO: 11358406 NR Description: hypothetical protein T7H20
  misc_feature (101)..(513): NCBI GI NO: 15233103 NR Description: amino acid transporter family
KKNRGYSFWLPVLKTMMSPASERSLIIQSDDDDDARSGHDVEEPEPEQEQDSDSSSSSSSCATPRRGPSSPPYIQQWPQSYRQSIDILSSVQSPNLTFLGTPTLSRLSNSFLAITDSFRSKAPETISSFIKPLLGPTPSDDQQRQHEGTRKSSEYLVPSRRSSLQQIPEDQKPPVGGHGASHDQNCSYTQGVMNGINVLCGVGILSTPYAIKQGGWIGLAILCIYALLAWYTGVLLRHCLDSKEGLKTYPDIGHAAFGSTGRIVISIILYVELYACCIEYLILEGDNLSKLFPNAHLTIGSMTLNSHVFFAILTTIIVMPTTWLRDLSWLSYISAGGVIASILVVICLFLVGVVNDVGFENEGTALNAPGIPIAIGLYGYCYSGHGFFPNIYSSLKNRNQFPSILFTCIGLSTFLYAGAAVMGYKMFGEATESQFTLNLPDNSVISKIAVWTTVANPITKYALTIIPLAMSLEELLPPNQQKYFTIIMLRSSLVISTLLIALFVPFFGLVMALVGSLFAMLVTYILPCACFLAILKTKVGWHQIAACSFIIVVGVCCAYVGTYSSLSKIIQNYA

SEQ ID NO: 30278 - protein, 559 aa, Zea mays subsp. mays
  peptide (1)..(559): Ceres Seq. ID no. 13498669
  misc_feature (184)..(547): Pfam Name: Pfam Description:  Tryptophan/tyrosine permease family
  misc_feature (6)..(556): NCBI GI NO: 30687791 NR Description: amino acid transporter family
  misc_feature (6)..(556): NCBI GI NO: 15292735 NR Description: unknown protein [Arabidopsis thaliana]
  misc_feature (142)..(554): NCBI GI NO: 30679549 NR Description: amino acid transporter family
  misc_feature (16)..(127): NCBI GI NO: 30679549 NR Description: amino acid transporter family
  misc_feature (6)..(511): NCBI GI NO: 25408639 NR Description: hypothetical protein At2g39130
  misc_feature (81)..(555): NCBI GI NO: 22326569 NR Description: amino acid transporter family
  misc_feature (34)..(102): NCBI GI NO: 22326569 NR Description: amino acid transporter family
  misc_feature (142)..(554): NCBI GI NO: 11358406 NR Description: hypothetical protein T7H20
  misc_feature (16)..(127): NCBI GI NO: 11358406 NR Description: hypothetical protein T7H20
  misc_feature (86)..(498): NCBI GI NO: 15233103 NR Description: amino acid transporter family
MMSPASERSLIIQSDDDDDARSGHDVEEPEPEQEQDSDSSSSSSSCATPRRGPSSPPYIQQWPQSYRQSIDILSSVQSPNLTFLGTPTLSRLSNSFLAITDSFRSKAPETISSFIKPLLGPTPSDDQQRQHEGTRKSSEYLVPSRRSSLQQIPEDQKPPVGGHGASHDQNCSYTQGVMNGINVLCGVGILSTPYAIKQGGWIGLAILCIYALLAWYTGVLLRHCLDSKEGLKTYPDIGHAAFGSTGRIVISIILYVELYACCIEYLILEGDNLSKLFPNAHLTIGSMTLNSHVFFAILTTIIVMPTTWLRDLSWLSYISAGGVIASILVVICLFLVGVVNDVGFENEGTALNAPGIPIAIGLYGYCYSGHGFFPNIYSSLKNRNQFPSILFTCIGLSTFLYAGAAVMGYKMFGEATESQFTLNLPDNSVISKIAVWTTVANPITKYALTIIPLAMSLEELLPPNQQKYFTIIMLRSSLVISTLLIALFVPFFGLVMALVGSLFAMLVTYILPCACFLAILKTKVGWHQIAACSFIIVVGVCCAYVGTYSSLSKIIQNYA

SEQ ID NO: 30279 - protein, 558 aa, Zea mays subsp. mays
  peptide (1)..(558): Ceres Seq. ID no. 13498670
  misc_feature (183)..(546): Pfam Name: Pfam Description:  Tryptophan/tyrosine permease family
  misc_feature (5)..(555): NCBI GI NO: 30687791 NR Description: amino acid transporter family
  misc_feature (5)..(555): NCBI GI NO: 15292735 NR Description: unknown protein [Arabidopsis thaliana]
  misc_feature (141)..(553): NCBI GI NO: 30679549 NR Description: amino acid transporter family
  misc_feature (15)..(126): NCBI GI NO: 30679549 NR Description: amino acid transporter family
  misc_feature (5)..(510): NCBI GI NO: 25408639 NR Description: hypothetical protein At2g39130
  misc_feature (80)..(554): NCBI GI NO: 22326569 NR Description: amino acid transporter family
  misc_feature (33)..(101): NCBI GI NO: 22326569 NR Description: amino acid transporter family
  misc_feature (141)..(553): NCBI GI NO: 11358406 NR Description: hypothetical protein T7H20
  misc_feature (15)..(126): NCBI GI NO: 11358406 NR Description: hypothetical protein T7H20
  misc_feature (85)..(497): NCBI GI NO: 15233103 NR Description: amino acid transporter family
MSPASERSLIIQSDDDDDARSGHDVEEPEPEQEQDSDSSSSSSSCATPRRGPSSPPYIQQWPQSYRQSIDILSSVQSPNLTFLGTPTLSRLSNSFLAITDSFRSKAPETISSFIKPLLGPTPSDDQQRQHEGTRKSSEYLVPSRRSSLQQIPEDQKPPVGGHGASHDQNCSYTQGVMNGINVLCGVGILSTPYAIKQGGWIGLAILCIYALLAWYTGVLLRHCLDSKEGLKTYPDIGHAAFGSTGRIVISIILYVELYACCIEYLILEGDNLSKLFPNAHLTIGSMTLNSHVFFAILTTIIVMPTTWLRDLSWLSYISAGGVIASILVVICLFLVGVVNDVGFENEGTALNAPGIPIAIGLYGYCYSGHGFFPNIYSSLKNRNQFPSILFTCIGLSTFLYAGAAVMGYKMFGEATESQFTLNLPDNSVISKIAVWTTVANPITKYALTIIPLAMSLEELLPPNQQKYFTIIMLRSSLVISTLLIALFVPFFGLVMALVGSLFAMLVTYILPCACFLAILKTKVGWHQIAACSFIIVVGVCCAYVGTYSSLSKIIQNYA

SEQ ID NO: 30280 - DNA, 1781 bp, Zea mays subsp. mays
  misc_feature (1)..(1781): Ceres Seq. ID no. 12408381
aaactccaaatccaatccaagcaagtcctccccatgctcctcccgctcctcctcctcgccgccttcctccatggcttggcggaggcgcagggcggcctcccgtcgctgccgatcggggtgaactacggcgcgaacgcagacaacctaccctcgcccgccgccgtggcggcgttcctggccaagagcacgaccatcgaccgcgtgaagctgttcgacgcgaacccggccttcctcgacgcgttcgccgccaacgcgccctccatcgccctcgccgtctccatccccaactccgccctcccgtccttcgccgacagatccacgggcctggacgcggcgcgcgggtgggtccgcgacaacctgtccccgcacgtgtccgcgggcgccaacatcaccctcctcatggcggggaacgaggtgctgggccccaccgtgtgcccgacctcgtcgtggcgctgctcccggccatgcgccgcctgtaccaggcgctgcagctggagggcctgcccaaggtccacgtcaccacgccgcactacctcggcatcctggcgccctcggacgggatcccctccaacgcgagcttccgcccggggctggacgccaaggtgctggcgcccatgctcaggttccacaacgacaccggctcccccttcatggtgaacgcctacccctacttcagctacaacgccgccacgctggactacgcggtgttccgccccaacgccggcgtgtacgacccggcgacgcggctcaactacaccagcatgttcgacgcgcagatggacgccatccacacggcgatgaagaagctcgggtacggcggcgtgcagatcgcggtgggcgaggccgggtggcccaccaaggcggaggccgggcaggtcggcgtaggccccgaggaggccagggatttcaacgccggcatgatccgggtgtgcagcggcgggaagggcacgccgctgatgcctgggaggacgttcgagacgtacgtcttctcgctgttcgacgagaaccagaagcccgggccggtcgcggagcggaacttcggcatcttcaacacggatctcacacccaaatacgacctggggctgctccgccaaggaccgcagtctggatctccaaccccatctccggagccctcgccgtcggtcggcggaggcaagtggtgcgtggccaagtccggcgcgagcgcaaccgacctgcagaacaacattaactacgcctgtgcctacgtcgactgtaggccgatccagagcggcggcgcgtgcttggaccccaacaacatccactcacatgcctcgtacgtcatgaacgcgtactaccaggccaatggcatgcacgactatgactgcgacttcaagggcaccggcgtggtcacctccagtgaccccagttacgggagctgcaaatacaacgcctcctcctgacggcgcgcagcaagtccagctggcactactgcaccagcctccagtccacatcgtcctccagctccaggctccagccatggccacgctggggacgggaggaggtccgtactgccgccgggcttgcgccacatacttgtatactcatgtctcacacccatgcttcttgttgctctcaaccactactagcactactatttgtctagttccataattacaagtccctctcccctcatgttaacttgatcattgtccgtgtgtagtggactagtggtggtgaataaaatagcttccattccatgtagacaaacaaacaaattgtaacatctgttatccttgggttatttgatatatttatttttc

SEQ ID NO: 30281 - protein, 472 aa, Zea mays subsp. mays
  peptide (1)..(472): Ceres Seq. ID no. 12408382
  misc_feature (146)..(361): Pfam Name: Pfam Description:  Glycosyl hydrolases family 17
  misc_feature (146)..(468): NCBI GI NO: 1706551 NR Description: GLUCAN ENDO-1,3-BETA-GLUCOSIDASE PRECURSOR ((1-
  misc_feature (151)..(467): NCBI GI NO: 11279328 NR Description: glucan endo-1,3-beta-D-glucosidase (EC 3.2.1.39)
  misc_feature (146)..(468): NCBI GI NO: 21617932 NR Description: beta-1,3-glucanase-like protein
  misc_feature (146)..(468): NCBI GI NO: 15028379 NR Description: putative beta-1,3-glucanase [Arabidopsis thaliana]
  misc_feature (146)..(468): NCBI GI NO: 15233271 NR Description: glycosyl hydrolase family 17
  misc_feature (147)..(468): NCBI GI NO: 31126737 NR Description: putative beta 1,3-glucanase
  misc_feature (146)..(466): NCBI GI NO: 15225516 NR Description: glycosyl hydrolase family 17; protein id:At2g39640
  misc_feature (147)..(472): NCBI GI NO: 14279169 NR Description: beta-1,3-glucanase-like protein [Olea europaea]
  misc_feature (147)..(383): NCBI GI NO: 34395169 NR Description: putative glucan endo-1
  misc_feature (147)..(419): NCBI GI NO: 34900642 NR Description: putative glucan endo-1
TPNPIQASPPHAPPAPPPRRLPPWLGGGAGRPPVAADRGELRRERRQPTLARRRGGVPGQEHDHRPREAVRREPGLPRRVRRQRALHRPRRLHPQLRPPVLRRQIHGPGRGARVGPRQPVPARVRGRQHHPPHGGERGAGPHRVPDLVVALLPAMRRLYQALQLEGLPKVHVTTPHYLGILAPSDGIPSNASFRPGLDAKVLAPMLRFHNDTGSPFMVNAYPYFSYNAATLDYAVFRPNAGVYDPATRLNYTSMFDAQMDAIHTAMKKLGYGGVQIAVGEAGWPTKAEAGQVGVGPEEARDFNAGMIRVCSGGKGTPLMPGRTFETYVFSLFDENQKPGPVAERNFGIFNTDLTPKYDLGLLRQGPQSGSPTPSPEPSPSVGGGKWCVAKSGASATDLQNNINYACAYVDCRPIQSGGACLDPNNIHSHASYVMNAYYQANGMHDYDCDFKGTGVVTSSDPSYGSCKYNASS

SEQ ID NO: 30282 - protein, 318 aa, Zea mays subsp. mays
  peptide (1)..(318): Ceres Seq. ID no. 12408383
  misc_feature (1)..(207): Pfam Name: Pfam Description:  Glycosyl hydrolases family 17
  misc_feature (1)..(314): NCBI GI NO: 1706551 NR Description: GLUCAN ENDO-1,3-BETA-GLUCOSIDASE PRECURSOR ((1-
  misc_feature (1)..(313): NCBI GI NO: 11279328 NR Description: glucan endo-1,3-beta-D-glucosidase (EC 3.2.1.39)
  misc_feature (1)..(314): NCBI GI NO: 21617932 NR Description: beta-1,3-glucanase-like protein
  misc_feature (1)..(314): NCBI GI NO: 15028379 NR Description: putative beta-1,3-glucanase [Arabidopsis thaliana]
  misc_feature (1)..(314): NCBI GI NO: 15233271 NR Description: glycosyl hydrolase family 17
  misc_feature (1)..(314): NCBI GI NO: 31126737 NR Description: putative beta 1,3-glucanase
  misc_feature (1)..(312): NCBI GI NO: 15225516 NR Description: glycosyl hydrolase family 17; protein id:At2g39640
  misc_feature (1)..(318): NCBI GI NO: 14279169 NR Description: beta-1,3-glucanase-like protein [Olea europaea]
  misc_feature (1)..(229): NCBI GI NO: 34395169 NR Description: putative glucan endo-1
  misc_feature (1)..(265): NCBI GI NO: 34900642 NR Description: putative glucan endo-1
MRRLYQALQLEGLPKVHVTTPHYLGILAPSDGIPSNASFRPGLDAKVLAPMLRFHNDTGSPFMVNAYPYFSYNAATLDYAVFRPNAGVYDPATRLNYTSMFDAQMDAIHTAMKKLGYGGVQIAVGEAGWPTKAEAGQVGVGPEEARDFNAGMIRVCSGGKGTPLMPGRTFETYVFSLFDENQKPGPVAERNFGIFNTDLTPKYDLGLLRQGPQSGSPTPSPEPSPSVGGGKWCVAKSGASATDLQNNINYACAYVDCRPIQSGGACLDPNNIHSHASYVMNAYYQANGMHDYDCDFKGTGVVTSSDPSYGSCKYNASS

SEQ ID NO: 30283 - protein, 268 aa, Zea mays subsp. mays
  peptide (1)..(268): Ceres Seq. ID no. 12408384
  misc_feature (1)..(157): Pfam Name: Pfam Description:  Glycosyl hydrolases family 17
  misc_feature (1)..(264): NCBI GI NO: 1706551 NR Description: GLUCAN ENDO-1,3-BETA-GLUCOSIDASE PRECURSOR ((1-
  misc_feature (1)..(263): NCBI GI NO: 11279328 NR Description: glucan endo-1,3-beta-D-glucosidase (EC 3.2.1.39)
  misc_feature (1)..(264): NCBI GI NO: 21617932 NR Description: beta-1,3-glucanase-like protein
  misc_feature (1)..(264): NCBI GI NO: 15028379 NR Description: putative beta-1,3-glucanase [Arabidopsis thaliana]
  misc_feature (1)..(264): NCBI GI NO: 15233271 NR Description: glycosyl hydrolase family 17
  misc_feature (1)..(264): NCBI GI NO: 31126737 NR Description: putative beta 1,3-glucanase
  misc_feature (1)..(262): NCBI GI NO: 15225516 NR Description: glycosyl hydrolase family 17; protein id:At2g39640
  misc_feature (1)..(268): NCBI GI NO: 14279169 NR Description: beta-1,3-glucanase-like protein [Olea europaea]
  misc_feature (1)..(179): NCBI GI NO: 34395169 NR Description: putative glucan endo-1
  misc_feature (1)..(215): NCBI GI NO: 34900642 NR Description: putative glucan endo-1
MLRFHNDTGSPFMVNAYPYFSYNAATLDYAVFRPNAGVYDPATRLNYTSMFDAQMDAIHTAMKKLGYGGVQIAVGEAGWPTKAEAGQVGVGPEEARDFNAGMIRVCSGGKGTPLMPGRTFETYVFSLFDENQKPGPVAERNFGIFNTDLTPKYDLGLLRQGPQSGSPTPSPEPSPSVGGGKWCVAKSGASATDLQNNINYACAYVDCRPIQSGGACLDPNNIHSHASYVMNAYYQANGMHDYDCDFKGTGVVTSSDPSYGSCKYNASS

SEQ ID NO: 30284 - DNA, 1608 bp, Zea mays subsp. mays
  misc_feature (1)..(1608): Ceres Seq. ID no. 12408379
aaacgggcggcctcgtagcggagtcctagtcctctcgctttctccctgcgattcgcctcagcttccatccgatccgattcgggagtcgggactcgggagatagaggcagacggagagagaagaaaggcaaggcaatcgccgcgcgcgtgcttcctgccttctcggtcggctccagctcgccgttcattcccgcaatcccgctccgctcgcggtatcgggccgtggtagtgatgccgctggctgagccgccccagtggcgccgcaaagccacggatttcttctccacatctagtgtcaagctgaagcaggcagggcaatcggccggggataatatagctgatgttgctgggaaggttgggtccgcggtgaagagtcggtgggtcgtcttccaggaggctaggcagcagcagcagcaacggccaccgcatgagacagtgcaagagcgtatcatcaccgctgctgccaccactggtttgcttttcaggaaaggcatttcagagacaaaggagaaggttgcagtgggaaaggttaaagttgaagaggttgctaaaaaaactgcagataaaagcaagaatatcttgaacaatattgaacgctggcagaagggagtcgcaagcactgatgtgtttggtgttcctattgaagccactgtacaacgagagcaatctggtaaagctgtgcccttggtgctagtgagatgtgcagactacctggttatatcaggtttgaataatgagtacttattcaaatctgaaggtgacaaaaaagttcttcagcagttagtttctctttacaatgaagactctggcgcatctttacctgaaggtgtgaatcctattgatgtaggtgcactggtgaagtgctaccttgccagtatccctgagccgcttactacattttcgctttatgatgagcttcgagctgcgagggttagcattcctgatcttagggatatattgaagaagcttccaaatgtgaactacatgacaatagagtttgttacagcattgcttcttcgagtcagccataaatcatcacttaacaagatggactcccgcagccttgctgtggaatttgcgcctttgatcatgtggcggcaaggtgatgctggcacagatttgcgtaaccacctcaagttaaccctgaaaccgcctccaaaaattgtggatacaacatcaaatactgccacgtgggacctgtttgatgaggatggcgaggatgcttcatcccagatccccttggacgatgcttcacccccagactacaactccattgaggtcatccagtgtctgatcgagcatcataatgccatcttcactgatgcaaatgaaaccgtgtggagatgatcaaggtctcctctagatctctctggtgttagctcgtgctacgtattagttccaggtaggaaggtggattaccgtccgttattgttagggataagcattttggccggaacatttttggagtaggtttgtatatatgcgctagtgttaattctccccgggactaggatctggtcatgttatagcaatataagtcttgggtggatgtaaaccagatggacacgattgtgctgcatttgctaaattcggcttatacactgctgtt

SEQ ID NO: 30285 - protein, 371 aa, Zea mays subsp. mays
  peptide (1)..(371): Ceres Seq. ID no. 12408380
  misc_feature (151)..(290): Pfam Name: Pfam Description:  RhoGAP domain
  misc_feature (1)..(371): NCBI GI NO: 28564771 NR Description: putative auxin-regulated protein
  misc_feature (1)..(371): NCBI GI NO: 18424478 NR Description: auxin-regulated protein; protein id: At5g61530
  misc_feature (1)..(371): NCBI GI NO: 21553593 NR Description: unknown [Arabidopsis thaliana]
  misc_feature (133)..(298): NCBI GI NO: 2624718 NR Description: Gtpase-Activation Domain From Rhogap
  misc_feature (133)..(298): NCBI GI NO: 3402094 NR Description: Chain A, Complex Between Cdc42hs
  misc_feature (133)..(298): NCBI GI NO: 3660275 NR Description: Chain A, RhoRHOGAPGDP(DOT)ALF4 COMPLEX
  misc_feature (133)..(298): NCBI GI NO: 6730013 NR Description: Chain B
  misc_feature (133)..(298): NCBI GI NO: 4139447 NR Description: Chain B
  misc_feature (125)..(287): NCBI GI NO: 34878082 NR Description: similar to Glucocorticoid receptor DNA bindingfactor 1
  misc_feature (6)..(355): NCBI GI NO: 34865207 NR Description: similar to p190-B [Rattus norvegicus]
MPLAEPPQWRRKATDFFSTSSVKLKQAGQSAGDNIADVAGKVGSAVKSRWVVFQEARQQQQQRPPHETVQERIITAAATTGLLFRKGISETKEKVAVGKVKVEEVAKKTADKSKNILNNIERWQKGVASTDVFGVPIEATVQREQSGKAVPLVLVRCADYLVISGLNNEYLFKSEGDKKVLQQLVSLYNEDSGASLPEGVNPIDVGALVKCYLASIPEPLTTFSLYDELRAARVSIPDLRDILKKLPNVNYMTIEFVTALLLRVSHKSSLNKMDSRSLAVEFAPLIMWRQGDAGTDLRNHLKLTLKPPPKIVDTTSNTATWDLFDEDGEDASSQIPLDDASPPDYNSIEVIQCLIEHHNAIFTDANETVWR

SEQ ID NO: 30286 - DNA, 1228 bp, Zea mays subsp. mays
  misc_feature (1)..(1228): Ceres Seq. ID no. 12344372
actgcttgcagttgcgccacgcccgccaccccgccaggccgccactagggtttttcggggcctcgccatcgtctccgaccccgtgtctccgaacaacatcgcgcggccgccgcctcctcccagtcgccatggtcaggctcaccgccgacctgatatggaagagcccgcacttcttcaacgccgtcaaggagcgcgagctcgacctccgaggcaacaagatcgccgtcatcgagaatgtcggagccaccgaggaccagtttgacacaattgacttgtcggataatgagattgtcaagcttgaaaacttcccatacttgaatcgtcttggcactctactagttaataataacagaatcacacgtatcaatcccaatcttggcgagtttttgccaaagctgcatacgctggtgctcacgaataatcgtctgacaaatcttgcggagattgatcccctggcatctcttccaaagctacaattccttagcttactggataatactgtaactaagcagccagattacaggctgtatgtgatccataaattgaagcatttgcgtttgctggatttcaagaaagtgaaacaacaggagagagttgcggcagcgaaaaagttccactcaaaggaagcagaggaagaggcaaagaaggtgcctgccaaaacgtttactcctggtctgcctgatgctcaggacatcacaatggagccacaaggtcctaaagtagttgctccaactcctgaacaaatcacagctatcaaggctgctattgcaaatgcccacactctcgaggaagctgcaaggctagaacaggtactaagcactggccaagttcctgctgaatttgcagtgcccaagcccgatgcaaacatggccgaagcttcagatggagccgagaagatggacacagatggtgagaaccaagagggcggtgaggctgatgggcagaaacaaggcgaaggaagcacaagcaccccaattcaggaggattgaaggcatggtgacatgggctgggtcatccattgtctgagttttaggtttgccagttttcgtgggggtgcaggaaagagctagagccttgttgccgcagaactccccctctatggatcgcatgtggatgctaacaacattcttgcttatttttgcagtagatggtactgagaacagaatcagatgttgtaaactatacatacagtcgtgcatgttgccgaatgaaccattgtttcggtcgt

SEQ ID NO: 30287 - protein, 328 aa, Zea mays subsp. mays
  peptide (1)..(328): Ceres Seq. ID no. 12344373
  misc_feature (43)..(288): NCBI GI NO: 322619 NR Description: U2 snRNP protein A' - Arabidopsis thaliana
  misc_feature (43)..(288): NCBI GI NO: 15218274 NR Description: putative U2 small nuclear ribonucleoprotein A
  misc_feature (43)..(302): NCBI GI NO: 4507121 NR Description: u2 small nuclear ribonucleoprotein polypeptide A'
  misc_feature (43)..(302): NCBI GI NO: 31077165 NR Description: U2 small nuclear ribonucleoprotein A'
  misc_feature (43)..(302): NCBI GI NO: 7263962 NR Description: bA395L14
  misc_feature (43)..(327): NCBI GI NO: 3955033 NR Description: U2 snRNP-specific A' protein [Salmo salar]
  misc_feature (43)..(295): NCBI GI NO: 34857187 NR Description: similar to U2 small nuclear ribonucleoproteinpolypeptide A
  misc_feature (43)..(302): NCBI GI NO: 31077178 NR Description: U2 small nuclear ribonucleoprotein A'
  misc_feature (43)..(302): NCBI GI NO: 31981942 NR Description: U2 small nuclear ribonucleoprotein polypeptide A'
  misc_feature (43)..(302): NCBI GI NO: 7021537 NR Description: U2 small nuclear ribonucleoprotein A'
CLQLRHARHPARPPLGFFGASPSSPTPCLRTTSRGRRLLPVAMVRLTADLIWKSPHFFNAVKERELDLRGNKIAVIENVGATEDQFDTIDLSDNEIVKLENFPYLNRLGTLLVNNNRITRINPNLGEFLPKLHTLVLTNNRLTNLAEIDPLASLPKLQFLSLLDNTVTKQPDYRLYVIHKLKHLRLLDFKKVKQQERVAAAKKFHSKEAEEEAKKVPAKTFTPGLPDAQDITMEPQGPKVVAPTPEQITAIKAAIANAHTLEEAARLEQVLSTGQVPAEFAVPKPDANMAEASDGAEKMDTDGENQEGGEADGQKQGEGSTSTPIQED

SEQ ID NO: 30288 - protein, 286 aa, Zea mays subsp. mays
  peptide (1)..(286): Ceres Seq. ID no. 12344374
  misc_feature (1)..(246): NCBI GI NO: 322619 NR Description: U2 snRNP protein A' - Arabidopsis thaliana
  misc_feature (1)..(246): NCBI GI NO: 15218274 NR Description: putative U2 small nuclear ribonucleoprotein A
  misc_feature (1)..(260): NCBI GI NO: 4507121 NR Description: u2 small nuclear ribonucleoprotein polypeptide A'
  misc_feature (1)..(260): NCBI GI NO: 31077165 NR Description: U2 small nuclear ribonucleoprotein A'
  misc_feature (1)..(260): NCBI GI NO: 7263962 NR Description: bA395L14
  misc_feature (1)..(285): NCBI GI NO: 3955033 NR Description: U2 snRNP-specific A' protein [Salmo salar]
  misc_feature (1)..(253): NCBI GI NO: 34857187 NR Description: similar to U2 small nuclear ribonucleoproteinpolypeptide A
  misc_feature (1)..(260): NCBI GI NO: 31077178 NR Description: U2 small nuclear ribonucleoprotein A'
  misc_feature (1)..(260): NCBI GI NO: 31981942 NR Description: U2 small nuclear ribonucleoprotein polypeptide A'
  misc_feature (1)..(260): NCBI GI NO: 7021537 NR Description: U2 small nuclear ribonucleoprotein A'
MVRLTADLIWKSPHFFNAVKERELDLRGNKIAVIENVGATEDQFDTIDLSDNEIVKLENFPYLNRLGTLLVNNNRITRINPNLGEFLPKLHTLVLTNNRLTNLAEIDPLASLPKLQFLSLLDNTVTKQPDYRLYVIHKLKHLRLLDFKKVKQQERVAAAKKFHSKEAEEEAKKVPAKTFTPGLPDAQDITMEPQGPKVVAPTPEQITAIKAAIANAHTLEEAARLEQVLSTGQVPAEFAVPKPDANMAEASDGAEKMDTDGENQEGGEADGQKQGEGSTSTPIQED

SEQ ID NO: 30289 - DNA, 1202 bp, Zea mays subsp. mays
  misc_feature (1)..(1202): Ceres Seq. ID no. 12412510
agaagaaagctccaatctttctcgccctctcgcggttcggaggagggacccgggcgcaaagactaaagcgcaggtgagctccgggcggggaagatgttccccagcctgatccaccacgctagccacggccgacccgacgtcgccgtcgccgaggacgcaccacgcagtggctgcgggttagggctgcccgggcacggcggcgggcccagcgtggtgctcacggccgatcccaagcctaggctccgctggacggccgacctccacgaccgtttcgtcgatgccgtcgcccagctcggcgggcctgataaagcaacaccgaaagctatcatgaggacaatgggagtgaagggcctcaccctttttcacttgaaaagccatcttcagaaatacagattgggaagacagtctggaaaagagttaacggagcaatcaaaagatgcttcttaccttatggaagctcaaagtggaacaactttgtctcctagaggttctactccagatgtgaaagagagtcaagaagttaaagaagcactcagagcacaaatggaagtgcaacgaagattgcacgaacaagtggaggtccagaagcatatgcagatccgaatggaggcgaaccagaagtacatcgacacgatactagataaggcgttcaagatagtatctgagcaactgagtggcttcagcatatctgaccaagacctaccgattctcacctctgctagggccatgcttagccctgcagatcacttgagttcgtctgtcttcccccagctctccgtcagctccgttagccttcacaatcctggtcctggaggagggaaaggccttccgcatgttgccgacagccacgtgttctcccagaggccacctgaacaattcaagcgcaaatcacgttgagaagcattgctagctcgacgcagatgcatgacctgatcaagggcacactggaaaatcagaggaatttcgtctgacatgtgcacggtgcaatcgttcgcccatcctcccgtagcacatctgtgaaaatcaaggttatcttggtctatttcggtacatctagactgacctttattaatatctaatgtaatgcctaagtggactagataagtaattcgcttgttgtataaactgcccagctgtaggatccagttttaaagtcctgttccacgcacttaaaacttgggggccgtctcttgggcggcttc

SEQ ID NO: 30290 - protein, 267 aa, Zea mays subsp. mays
  peptide (1)..(267): Ceres Seq. ID no. 12412511
  misc_feature (49)..(100): Pfam Name: Pfam Description:  Myb-like DNA-binding domain
  misc_feature (1)..(266): NCBI GI NO: 29647444 NR Description: P0410E11.32
  misc_feature (28)..(236): NCBI GI NO: 18404044 NR Description: transfactor, putative; protein id: At3g24120
  misc_feature (40)..(197): NCBI GI NO: 18414049 NR Description: putative protein; protein id: At4g13640
  misc_feature (28)..(236): NCBI GI NO: 11994231 NR Description: contains similarity to transfactor~gene_id:MUJ8.2
  misc_feature (28)..(214): NCBI GI NO: 32470629 NR Description: putative phosphate starvation response regulator
  misc_feature (36)..(185): NCBI GI NO: 25406584 NR Description: hypothetical protein T8K14.15
  misc_feature (40)..(197): NCBI GI NO: 7485694 NR Description: hypothetical protein F18A5
  misc_feature (29)..(115): NCBI GI NO: 15242435 NR Description: putative protein; protein id: At5g45580.1
  misc_feature (145)..(187): NCBI GI NO: 15242435 NR Description: putative protein; protein id: At5g45580.1
  misc_feature (36)..(185): NCBI GI NO: 30699418 NR Description: transfactor -related [Arabidopsis thaliana]
MFPSLIHHASHGRPDVAVAEDAPRSGCGLGLPGHGGGPSVVLTADPKPRLRWTADLHDRFVDAVAQLGGPDKATPKAIMRTMGVKGLTLFHLKSHLQKYRLGRQSGKELTEQSKDASYLMEAQSGTTLSPRGSTPDVKESQEVKEALRAQMEVQRRLHEQVEVQKHMQIRMEANQKYIDTILDKAFKIVSEQLSGFSISDQDLPILTSARAMLSPADHLSSSVFPQLSVSSVSLHNPGPGGGKGLPHVADSHVFSQRPPEQFKRKSR

SEQ ID NO: 30291 - protein, 189 aa, Zea mays subsp. mays
  peptide (1)..(189): Ceres Seq. ID no. 12412512
  misc_feature (1)..(188): NCBI GI NO: 29647444 NR Description: P0410E11.32
  misc_feature (1)..(158): NCBI GI NO: 18404044 NR Description: transfactor, putative; protein id: At3g24120
  misc_feature (1)..(119): NCBI GI NO: 18414049 NR Description: putative protein; protein id: At4g13640
  misc_feature (1)..(158): NCBI GI NO: 11994231 NR Description: contains similarity to transfactor~gene_id:MUJ8.2
  misc_feature (1)..(136): NCBI GI NO: 32470629 NR Description: putative phosphate starvation response regulator
  misc_feature (1)..(107): NCBI GI NO: 25406584 NR Description: hypothetical protein T8K14.15
  misc_feature (1)..(119): NCBI GI NO: 7485694 NR Description: hypothetical protein F18A5
  misc_feature (1)..(37): NCBI GI NO: 15242435 NR Description: putative protein; protein id: At5g45580.1
  misc_feature (67)..(109): NCBI GI NO: 15242435 NR Description: putative protein; protein id: At5g45580.1
  misc_feature (1)..(107): NCBI GI NO: 30699418 NR Description: transfactor -related [Arabidopsis thaliana]
MRTMGVKGLTLFHLKSHLQKYRLGRQSGKELTEQSKDASYLMEAQSGTTLSPRGSTPDVKESQEVKEALRAQMEVQRRLHEQVEVQKHMQIRMEANQKYIDTILDKAFKIVSEQLSGFSISDQDLPILTSARAMLSPADHLSSSVFPQLSVSSVSLHNPGPGGGKGLPHVADSHVFSQRPPEQFKRKSR

SEQ ID NO: 30292 - protein, 186 aa, Zea mays subsp. mays
  peptide (1)..(186): Ceres Seq. ID no. 12412513
  misc_feature (1)..(185): NCBI GI NO: 29647444 NR Description: P0410E11.32
  misc_feature (1)..(155): NCBI GI NO: 18404044 NR Description: transfactor, putative; protein id: At3g24120
  misc_feature (1)..(116): NCBI GI NO: 18414049 NR Description: putative protein; protein id: At4g13640
  misc_feature (1)..(155): NCBI GI NO: 11994231 NR Description: contains similarity to transfactor~gene_id:MUJ8.2
  misc_feature (1)..(133): NCBI GI NO: 32470629 NR Description: putative phosphate starvation response regulator
  misc_feature (1)..(104): NCBI GI NO: 25406584 NR Description: hypothetical protein T8K14.15
  misc_feature (1)..(116): NCBI GI NO: 7485694 NR Description: hypothetical protein F18A5
  misc_feature (1)..(34): NCBI GI NO: 15242435 NR Description: putative protein; protein id: At5g45580.1
  misc_feature (64)..(106): NCBI GI NO: 15242435 NR Description: putative protein; protein id: At5g45580.1
  misc_feature (1)..(104): NCBI GI NO: 30699418 NR Description: transfactor -related [Arabidopsis thaliana]
MGVKGLTLFHLKSHLQKYRLGRQSGKELTEQSKDASYLMEAQSGTTLSPRGSTPDVKESQEVKEALRAQMEVQRRLHEQVEVQKHMQIRMEANQKYIDTILDKAFKIVSEQLSGFSISDQDLPILTSARAMLSPADHLSSSVFPQLSVSSVSLHNPGPGGGKGLPHVADSHVFSQRPPEQFKRKSR

SEQ ID NO: 30293 - DNA, 1690 bp, Zea mays subsp. mays
  misc_feature (1)..(1690): Ceres Seq. ID no. 12373176
gttcctgccgacgccgccggcaagccgcacgccgtgctcgtgccgttcccggcgcagggccacgtcacaccgatgctgaagctagcaaagatcctccactgccggggcttccacgtcaccttcgtcaacagcgagtacaaccgccgccgcttgctccggtcccgcggcgcggacgcgctcgacggcctcccaggcttccgtttcgcgaccatcccggatggcctgccgccgtccgacaccgacgccacccaggacgtgccgtccctctgccgctccacggaggagacctgtctcccgcatttcagggccctgctccagtgtctcaacgcctcctcccctgtcccctgacgtgccgctggtcacctgcgtcgtcggcgacgacatcatgggctttaccttggatgccgccagggagataggcgtgccgtgcgctctgttctggactgccagcacctgcgggtacatgggctaccgctactaccgcaccctcatcgacaagggcatcttcccgttgaaagaggagcagctgacgaatgggttcttagacacgccggtggagttcgcgccgcccgggatgagcaagcacatgcggctcaaggacttcccaagcttcatgcgctccacggacccctacgagttcatggtccactacgccgtcagggtgacggatcacacagccggcgcggacgccgtccttctcaacaccttcgacgagctcgagcaggaggcgctggacgccatgcgcgccgtgatctcatctgccgcgtccatcaacaccatcggcccgctcaccctcctcgccgaacagatcgtgcccagaggcagccaactggactcgctgggctctaacctctggaaggaggacgcctcctgcttccgctggctcgacggccggaagcccaggtccgtggtgttcgtgaactacggcagtgtgacggtgatgaccagcgcggagctggtggagttcgcgtggggtctggccaacagcggccacgacttcctgtggatcatccggccggacctcgtaagcggcgacgccgccgtgctgcccccggagttccaggaggcgatcgaggggcgcggcctgctggcgaactggtgcgctcaggacgcggtgctgcgtcacgaggcggtgggcgtgttcctgacgcactctgggtggaactcgacgctggagagcctctgcgccggggtgccgatgctgtgctggcctttcttcgcggagcagcagaccaactgccggtacacatgcgcggagtggggcgtggagatcggccacgacgtgcgacgggaggccgtggaagagaagatacgggaggccatgggcggggagaaagggaaggagatgcgtcgccgactcgccgcgcggtggagtggcgggagaccgccgtgcgcgcgacgcggcccggcgggcgctcgtacgccaacctggagaagctggtgactgacgtactcctctcgggtggcaagaattattaaacctccttgctatcaggcttcaggcatcagcactgctccatatgcatgcataaaccatcaaatacactttagctcagttttaagatctacgtgtcattgctctctctagtacgtgatgtattatgcacccgcctcttgttggcattattgttgtattatttagatctggtttctggaaacgagtgtgcatatattttgattctctaagcgg

SEQ ID NO: 30294 - protein, 408 aa, Zea mays subsp. mays
  peptide (1)..(408): Ceres Seq. ID no. 12373177
  misc_feature (44)..(385): Pfam Name: Pfam Description:  UDP-glucoronosyl and UDP-glucosyl transferase
  misc_feature (42)..(385): NCBI GI NO: 38569188 NR Description: OSJNBa0086B14.13
  misc_feature (45)..(385): NCBI GI NO: 38569140 NR Description: OSJNBb0033P05.8
  misc_feature (45)..(385): NCBI GI NO: 38344775 NR Description: OSJNBb0026L04.6
  misc_feature (46)..(398): NCBI GI NO: 38344776 NR Description: OSJNBb0026L04.7
  misc_feature (48)..(382): NCBI GI NO: 38344780 NR Description: OSJNBb0026L04.11
  misc_feature (45)..(385): NCBI GI NO: 19911203 NR Description: glucosyltransferase-10 [Vigna angularis]
  misc_feature (44)..(385): NCBI GI NO: 15219870 NR Description: UDP-glucose glucosyltransferase
  misc_feature (44)..(385): NCBI GI NO: 17065006 NR Description: UDP-glucose glucosyltransferase
  misc_feature (44)..(385): NCBI GI NO: 25286821 NR Description: T16E15.2 protein - Arabidopsis thaliana
  misc_feature (44)..(385): NCBI GI NO: 15219876 NR Description: UDP-glucose glucosyltransferase, putative
MACRRPTPTPPRTCRPSAAPRRRPVSRISGPCSSVSTPPPLSPDVPLVTCVVGDDIMGFTLDAAREIGVPCALFWTASTCGYMGYRYYRTLIDKGIFPLKEEQLTNGFLDTPVEFAPPGMSKHMRLKDFPSFMRSTDPYEFMVHYAVRVTDHTAGADAVLLNTFDELEQEALDAMRAVISSAASINTIGPLTLLAEQIVPRGSQLDSLGSNLWKEDASCFRWLDGRKPRSVVFVNYGSVTVMTSAELVEFAWGLANSGHDFLWIIRPDLVSGDAAVLPPEFQEAIEGRGLLANWCAQDAVLRHEAVGVFLTHSGWNSTLESLCAGVPMLCWPFFAEQQTNCRYTCAEWGVEIGHDVRREAVEEKIREAMGGEKGKEMRRRLAARWSGGRPPCARRGPAGARTPTWRSW

SEQ ID NO: 30295 - protein, 352 aa, Zea mays subsp. mays
  peptide (1)..(352): Ceres Seq. ID no. 12373178
  misc_feature (1)..(329): Pfam Name: Pfam Description:  UDP-glucoronosyl and UDP-glucosyl transferase
  misc_feature (1)..(329): NCBI GI NO: 38569188 NR Description: OSJNBa0086B14.13
  misc_feature (1)..(329): NCBI GI NO: 38569140 NR Description: OSJNBb0033P05.8
  misc_feature (1)..(329): NCBI GI NO: 38344775 NR Description: OSJNBb0026L04.6
  misc_feature (1)..(342): NCBI GI NO: 38344776 NR Description: OSJNBb0026L04.7
  misc_feature (1)..(326): NCBI GI NO: 38344780 NR Description: OSJNBb0026L04.11
  misc_feature (1)..(329): NCBI GI NO: 19911203 NR Description: glucosyltransferase-10 [Vigna angularis]
  misc_feature (1)..(329): NCBI GI NO: 15219870 NR Description: UDP-glucose glucosyltransferase
  misc_feature (1)..(329): NCBI GI NO: 17065006 NR Description: UDP-glucose glucosyltransferase
  misc_feature (1)..(329): NCBI GI NO: 25286821 NR Description: T16E15.2 protein - Arabidopsis thaliana
  misc_feature (1)..(329): NCBI GI NO: 15219876 NR Description: UDP-glucose glucosyltransferase, putative
MGFTLDAAREIGVPCALFWTASTCGYMGYRYYRTLIDKGIFPLKEEQLTNGFLDTPVEFAPPGMSKHMRLKDFPSFMRSTDPYEFMVHYAVRVTDHTAGADAVLLNTFDELEQEALDAMRAVISSAASINTIGPLTLLAEQIVPRGSQLDSLGSNLWKEDASCFRWLDGRKPRSVVFVNYGSVTVMTSAELVEFAWGLANSGHDFLWIIRPDLVSGDAAVLPPEFQEAIEGRGLLANWCAQDAVLRHEAVGVFLTHSGWNSTLESLCAGVPMLCWPFFAEQQTNCRYTCAEWGVEIGHDVRREAVEEKIREAMGGEKGKEMRRRLAARWSGGRPPCARRGPAGARTPTWRSW

SEQ ID NO: 30296 - protein, 326 aa, Zea mays subsp. mays
  peptide (1)..(326): Ceres Seq. ID no. 12373179
  misc_feature (1)..(303): Pfam Name: Pfam Description:  UDP-glucoronosyl and UDP-glucosyl transferase
  misc_feature (1)..(303): NCBI GI NO: 38569188 NR Description: OSJNBa0086B14.13
  misc_feature (1)..(303): NCBI GI NO: 38569140 NR Description: OSJNBb0033P05.8
  misc_feature (1)..(303): NCBI GI NO: 38344775 NR Description: OSJNBb0026L04.6
  misc_feature (1)..(316): NCBI GI NO: 38344776 NR Description: OSJNBb0026L04.7
  misc_feature (1)..(300): NCBI GI NO: 38344780 NR Description: OSJNBb0026L04.11
  misc_feature (1)..(303): NCBI GI NO: 19911203 NR Description: glucosyltransferase-10 [Vigna angularis]
  misc_feature (1)..(303): NCBI GI NO: 15219870 NR Description: UDP-glucose glucosyltransferase
  misc_feature (1)..(303): NCBI GI NO: 17065006 NR Description: UDP-glucose glucosyltransferase
  misc_feature (1)..(303): NCBI GI NO: 25286821 NR Description: T16E15.2 protein - Arabidopsis thaliana
  misc_feature (1)..(303): NCBI GI NO: 15219876 NR Description: UDP-glucose glucosyltransferase, putative
MGYRYYRTLIDKGIFPLKEEQLTNGFLDTPVEFAPPGMSKHMRLKDFPSFMRSTDPYEFMVHYAVRVTDHTAGADAVLLNTFDELEQEALDAMRAVISSAASINTIGPLTLLAEQIVPRGSQLDSLGSNLWKEDASCFRWLDGRKPRSVVFVNYGSVTVMTSAELVEFAWGLANSGHDFLWIIRPDLVSGDAAVLPPEFQEAIEGRGLLANWCAQDAVLRHEAVGVFLTHSGWNSTLESLCAGVPMLCWPFFAEQQTNCRYTCAEWGVEIGHDVRREAVEEKIREAMGGEKGKEMRRRLAARWSGGRPPCARRGPAGARTPTWRSW

SEQ ID NO: 30297 - DNA, 1522 bp, Zea mays subsp. mays
  misc_feature (1)..(1522): Ceres Seq. ID no. 12373476
ctgggtcttctataccgtgcctcatctagtcatctcgtctcaggttgcggccgaaccagagccccgtcccaactccaccacctctcttctctacggcgcgagcaagggcggcgccggccgcggcgtcggcgggaaccgggcctcgctctccccatctctccgatcacttctgtcctgtgaaaatggcggatgaactacgctcaacgtctgtgggtcagaagttccatgggcagtccgtgctgttgagcagaatctcttcctattccgccatgaacaaccctgtattcaacaatgcctattctgcttacaatgtgccccagaggtcatatcatgggatgaatgcaactgctggactctcatctgtcatggcaccatctcctgtctttgcttctgccccaaaagagaaaggcttttctggatttatgatcgactttatgatgggtggagtttctgctgctgtctccaagacagctgcagctccgattgagcgtgtcaagcttttgattcagaaccaggatgaaatgctcaagactggcaggctttctgaaccgtacaagggtattggggactgctttggccggacaatcagagatgagggttttgtctcactgtggagaggaaacacagctaatgtcatccgttacttccccacacaggcattgaactttgcgttcaaggatcacttcaagcgcatgttcaactttaagaaggacaaggatgggtactggaagtggtttgctggaaatctggcttctggtggagctgctggtgcttgctctctattctttgtctattctctggactacgcccgtacgcgtttggccaatgatgccaaggctgcaaagaagggtggtgagaggcagttcaatggactcgttgatgtttaccgcaagacccttgccagtgatggtattcgtggcctctaccgtggattcaatatctcttgtgtggggatcattgtgtaccgaggtctttactttggtatgtatgattccctgaagccagtgcttcttgttggtaccctgcaggataacttcttggccagcttcttgctcgggtggggtataaccattggtgctggccttgcctcctaccccattgacactgttcgccgtcgcatgatgatgacatctggtgaggccgtcaagtacaacagctccttggacgctttcaagcagattgtcgcaaaggagggtaccaagtccctcttcaagggtgctggcgcaaacatcctccgcgctgtagctggtgctggtgtccttgctgggtacgacaagctccaggtggttgtcttcggcaagaagtacgggtctggtggtggctaaggatgtataatgatgatgacgacgaacaacaaacatgatgttttaggtgcctcctttaagtaaacatacgtacggaccctcgacaccattttaagttcgctctcgcagaggctggtgagtttgtagcgtggctgtgaccgcacctctttttatgtcagagattggaaataagtgacgttagaaattgctgtcttgct

SEQ ID NO: 30298 - protein, 380 aa, Zea mays subsp. mays
  peptide (1)..(380): Ceres Seq. ID no. 12373477
  misc_feature (1)..(379): NCBI GI NO: 399015 NR Description: ADP,ATP carrier protein, mitochondrial precursor
  misc_feature (1)..(379): NCBI GI NO: 2780194 NR Description: adenine nucleotide translocator [Lupinus albus]
  misc_feature (1)..(379): NCBI GI NO: 113460 NR Description: ADP,ATP carrier protein 2, mitochondrial precursor
  misc_feature (3)..(380): NCBI GI NO: 15235280 NR Description: mitochondrial ADP,ATP carrier protein, putative
  misc_feature (1)..(379): NCBI GI NO: 1890116 NR Description: ADP/ATP translocator [Lycopersicon esculentum]
  misc_feature (1)..(379): NCBI GI NO: 485517 NR Description: ADP,ATP carrier protein - rice
  misc_feature (1)..(379): NCBI GI NO: 100424 NR Description: ADP,ATP carrier protein precursor - potato
  misc_feature (1)..(379): NCBI GI NO: 444790 NR Description: nucleotide translocator
  misc_feature (1)..(379): NCBI GI NO: 22168 NR Description: adenine nucleotide translocator [Zea mays]
  misc_feature (1)..(379): NCBI GI NO: 113457 NR Description: ADP,ATP carrier protein, mitochondrial precursor
MADELRSTSVGQKFHGQSVLLSRISSYSAMNNPVFNNAYSAYNVPQRSYHGMNATAGLSSVMAPSPVFASAPKEKGFSGFMIDFMMGGVSAAVSKTAAAPIERVKLLIQNQDEMLKTGRLSEPYKGIGDCFGRTIRDEGFVSLWRGNTANVIRYFPTQALNFAFKDHFKRMFNFKKDKDGYWKWFAGNLASGGAAGACSLFFVYSLDYARTRLANDAKAAKKGGERQFNGLVDVYRKTLASDGIRGLYRGFNISCVGIIVYRGLYFGMYDSLKPVLLVGTLQDNFLASFLLGWGITIGAGLASYPIDTVRRRMMMTSGEAVKYNSSLDAFKQIVAKEGTKSLFKGAGANILRAVAGAGVLAGYDKLQVVVFGKKYGSGGG

SEQ ID NO: 30299 - protein, 351 aa, Zea mays subsp. mays
  peptide (1)..(351): Ceres Seq. ID no. 12373478
  misc_feature (1)..(350): NCBI GI NO: 399015 NR Description: ADP,ATP carrier protein, mitochondrial precursor
  misc_feature (1)..(350): NCBI GI NO: 2780194 NR Description: adenine nucleotide translocator [Lupinus albus]
  misc_feature (1)..(350): NCBI GI NO: 113460 NR Description: ADP,ATP carrier protein 2, mitochondrial precursor
  misc_feature (1)..(351): NCBI GI NO: 15235280 NR Description: mitochondrial ADP,ATP carrier protein, putative
  misc_feature (1)..(350): NCBI GI NO: 1890116 NR Description: ADP/ATP translocator [Lycopersicon esculentum]
  misc_feature (1)..(350): NCBI GI NO: 485517 NR Description: ADP,ATP carrier protein - rice
  misc_feature (1)..(350): NCBI GI NO: 100424 NR Description: ADP,ATP carrier protein precursor - potato
  misc_feature (1)..(350): NCBI GI NO: 444790 NR Description: nucleotide translocator
  misc_feature (1)..(350): NCBI GI NO: 22168 NR Description: adenine nucleotide translocator [Zea mays]
  misc_feature (1)..(350): NCBI GI NO: 113457 NR Description: ADP,ATP carrier protein, mitochondrial precursor
MNNPVFNNAYSAYNVPQRSYHGMNATAGLSSVMAPSPVFASAPKEKGFSGFMIDFMMGGVSAAVSKTAAAPIERVKLLIQNQDEMLKTGRLSEPYKGIGDCFGRTIRDEGFVSLWRGNTANVIRYFPTQALNFAFKDHFKRMFNFKKDKDGYWKWFAGNLASGGAAGACSLFFVYSLDYARTRLANDAKAAKKGGERQFNGLVDVYRKTLASDGIRGLYRGFNISCVGIIVYRGLYFGMYDSLKPVLLVGTLQDNFLASFLLGWGITIGAGLASYPIDTVRRRMMMTSGEAVKYNSSLDAFKQIVAKEGTKSLFKGAGANILRAVAGAGVLAGYDKLQVVVFGKKYGSGGG

SEQ ID NO: 30300 - protein, 329 aa, Zea mays subsp. mays
  peptide (1)..(329): Ceres Seq. ID no. 12373479
  misc_feature (1)..(328): NCBI GI NO: 399015 NR Description: ADP,ATP carrier protein, mitochondrial precursor
  misc_feature (1)..(328): NCBI GI NO: 2780194 NR Description: adenine nucleotide translocator [Lupinus albus]
  misc_feature (1)..(328): NCBI GI NO: 113460 NR Description: ADP,ATP carrier protein 2, mitochondrial precursor
  misc_feature (1)..(329): NCBI GI NO: 15235280 NR Description: mitochondrial ADP,ATP carrier protein, putative
  misc_feature (1)..(328): NCBI GI NO: 1890116 NR Description: ADP/ATP translocator [Lycopersicon esculentum]
  misc_feature (1)..(328): NCBI GI NO: 485517 NR Description: ADP,ATP carrier protein - rice
  misc_feature (1)..(328): NCBI GI NO: 100424 NR Description: ADP,ATP carrier protein precursor - potato
  misc_feature (1)..(328): NCBI GI NO: 444790 NR Description: nucleotide translocator
  misc_feature (1)..(328): NCBI GI NO: 22168 NR Description: adenine nucleotide translocator [Zea mays]
  misc_feature (1)..(328): NCBI GI NO: 113457 NR Description: ADP,ATP carrier protein, mitochondrial precursor
MNATAGLSSVMAPSPVFASAPKEKGFSGFMIDFMMGGVSAAVSKTAAAPIERVKLLIQNQDEMLKTGRLSEPYKGIGDCFGRTIRDEGFVSLWRGNTANVIRYFPTQALNFAFKDHFKRMFNFKKDKDGYWKWFAGNLASGGAAGACSLFFVYSLDYARTRLANDAKAAKKGGERQFNGLVDVYRKTLASDGIRGLYRGFNISCVGIIVYRGLYFGMYDSLKPVLLVGTLQDNFLASFLLGWGITIGAGLASYPIDTVRRRMMMTSGEAVKYNSSLDAFKQIVAKEGTKSLFKGAGANILRAVAGAGVLAGYDKLQVVVFGKKYGSGGG

SEQ ID NO: 30301 - DNA, 1843 bp, Zea mays subsp. mays
  misc_feature (1)..(1843): Ceres Seq. ID no. 12367930
aactcggcaactccgcctcccaagtcacacccccactccctcgctcaccagaggaactagcggaccaggcaaagccgagccgcaaccgcgaagatcttgcgtggcctccttttcccagatcgtcactgtgccgctcgtgccctccactcccggtccgcccaaccaataatccatccatccatccaccaccaccaccccgctgcggcgatgtgcggcggcgccatcctctcgggtttcatcccgccgtccggggtggcggcggcggcggcggcggccaagaagaagcagcagcagcggtgccgtgtgactgcggacctgctatggccggggcccggcagtaaggaagctccccaggaccaggaggaggacttcgaggccgacttccgcgagttcgagcgcggcctcggcgaggatgacgtggacagcgccggcgaaggcggcgaccccgaggtccaggagcttcctccgccggagccgacgaggtttgccttcgccaccgcggccaaggcagcagttgatggcgtgatgacgacgactccaaaggatgtcaaaggagatagaccagtaaagcgcggccggaagaaccagtacaggggaatccggcagcgcccttggggcaaatgggcagctgagatcagggaccctaacaagggcgtccgcgtctggctcggaacctacaacaccgccgaggaggcagctagggcatacgacgccgaagctcgcaagatccgcggcaagaaagcgaaggtgaatttccccgatgacgacgcgccaggcactggtcacaggccagcgaacgcagcgcctaggctagtagctccacccccaccccccaaggcctgcgccgatgagatctttaacaacctgaagaacgacgacgacgacaacaacaacaacaacgatgatctgtttgcgatgtttgcgttcggtgacaataagaagaaggttcctgcagcgaagccagccgccgccgagggtggcagtggcagtggcagcttcctcgtccctgcgcctgcggtggcggtggtgcccggtaataagaggaggtcgtccgcgaccaacactatgctctccgtctccgacgaccagcgcagcaactcctacggctccggctcctccgacttggtggggtcgtggtcgtgggacgacgacgcggcggccgccgccatgacctcggactacacctcctcggtcttcgctcccgataacgccgtgctgccggcggcgtcttacacgcaaggcggagcgccgaagagaatgaggagcagctacggcggcgcgccgcccagcctcgcacatgacgcggccatgcctggctttggccttgataaagtgagctaccaccactaccaggcgttgcctccttattacgtcgggagcagcaacgcgtcggtgggcaacctcggtcttctgcagcaggctgatgatgctccagctccacaggatggggcgagcgccggggatatctggagcctcgacgagctgctcatgctggcagcagctggtgcttattgagaaccgcaagaaaaaaaaatgtgttgggcgctgctagctggagacgagacgagggcgagaggcagttgcatcatccgccatccgctatcgttttgtctctcctatatctagtatatatatgcttctggcagtcgaactctatggcaatgcgtgtgtatagtgtgttgctgccgtctatgattggaagcgagctcgagactggttcaataattcacctttgcctaccgtcgtaccgccggcctgctggactgtagtgtgcgtactgcatatatatgccataattatgtatgcactcctcctatataaactatattattatgatgtgctt

SEQ ID NO: 30302 - protein, 435 aa, Zea mays subsp. mays
  peptide (1)..(435): Ceres Seq. ID no. 12367931
  misc_feature (125)..(188): Pfam Name: Pfam Description:  AP2 domain
  misc_feature (1)..(253): NCBI GI NO: 19880313 NR Description: putative EREBP-type transcription factor
  misc_feature (267)..(435): NCBI GI NO: 19880313 NR Description: putative EREBP-type transcription factor
  misc_feature (1)..(200): NCBI GI NO: 33331083 NR Description: ethylene responsive protein [Glycine max]
  misc_feature (1)..(206): NCBI GI NO: 6176534 NR Description: EREBP-like protein [Oryza sativa]
  misc_feature (1)..(264): NCBI GI NO: 30961941 NR Description: C-repeat/DRE-binding factor [Nicotiana tabacum]
  misc_feature (1)..(268): NCBI GI NO: 37538128 NR Description: JERF3 [Lycopersicon esculentum]
  misc_feature (1)..(222): NCBI GI NO: 6689918 NR Description: transcription factor EREBP1 [Oryza sativa]
  misc_feature (1)..(237): NCBI GI NO: 21593779 NR Description: AP2 domain containing protein, putative
  misc_feature (1)..(237): NCBI GI NO: 15220971 NR Description: AP2 domain protein RAP2
  misc_feature (32)..(233): NCBI GI NO: 38343926 NR Description: ethylene transcription factor [Fagus sylvatica]
MCGGAILSGFIPPSGVAAAAAAAKKKQQQRCRVTADLLWPGPGSKEAPQDQEEDFEADFREFERGLGEDDVDSAGEGGDPEVQELPPPEPTRFAFATAAKAAVDGVMTTTPKDVKGDRPVKRGRKNQYRGIRQRPWGKWAAEIRDPNKGVRVWLGTYNTAEEAARAYDAEARKIRGKKAKVNFPDDDAPGTGHRPANAAPRLVAPPPPPKACADEIFNNLKNDDDDNNNNNDDLFAMFAFGDNKKKVPAAKPAAAEGGSGSGSFLVPAPAVAVVPGNKRRSSATNTMLSVSDDQRSNSYGSGSSDLVGSWSWDDDAAAAAMTSDYTSSVFAPDNAVLPAASYTQGGAPKRMRSSYGGAPPSLAHDAAMPGFGLDKVSYHHYQALPPYYVGSSNASVGNLGLLQQADDAPAPQDGASAGDIWSLDELLMLAAAGAY

SEQ ID NO: 30303 - protein, 329 aa, Zea mays subsp. mays
  peptide (1)..(329): Ceres Seq. ID no. 12367932
  misc_feature (19)..(82): Pfam Name: Pfam Description:  AP2 domain
  misc_feature (1)..(147): NCBI GI NO: 19880313 NR Description: putative EREBP-type transcription factor
  misc_feature (161)..(329): NCBI GI NO: 19880313 NR Description: putative EREBP-type transcription factor
  misc_feature (1)..(94): NCBI GI NO: 33331083 NR Description: ethylene responsive protein [Glycine max]
  misc_feature (1)..(100): NCBI GI NO: 6176534 NR Description: EREBP-like protein [Oryza sativa]
  misc_feature (1)..(158): NCBI GI NO: 30961941 NR Description: C-repeat/DRE-binding factor [Nicotiana tabacum]
  misc_feature (1)..(162): NCBI GI NO: 37538128 NR Description: JERF3 [Lycopersicon esculentum]
  misc_feature (1)..(116): NCBI GI NO: 6689918 NR Description: transcription factor EREBP1 [Oryza sativa]
  misc_feature (1)..(131): NCBI GI NO: 21593779 NR Description: AP2 domain containing protein, putative
  misc_feature (1)..(131): NCBI GI NO: 15220971 NR Description: AP2 domain protein RAP2
  misc_feature (1)..(127): NCBI GI NO: 38343926 NR Description: ethylene transcription factor [Fagus sylvatica]
MTTTPKDVKGDRPVKRGRKNQYRGIRQRPWGKWAAEIRDPNKGVRVWLGTYNTAEEAARAYDAEARKIRGKKAKVNFPDDDAPGTGHRPANAAPRLVAPPPPPKACADEIFNNLKNDDDDNNNNNDDLFAMFAFGDNKKKVPAAKPAAAEGGSGSGSFLVPAPAVAVVPGNKRRSSATNTMLSVSDDQRSNSYGSGSSDLVGSWSWDDDAAAAAMTSDYTSSVFAPDNAVLPAASYTQGGAPKRMRSSYGGAPPSLAHDAAMPGFGLDKVSYHHYQALPPYYVGSSNASVGNLGLLQQADDAPAPQDGASAGDIWSLDELLMLAAAGAY

SEQ ID NO: 30304 - DNA, 1608 bp, Zea mays subsp. mays
  misc_feature (1)..(1608): Ceres Seq. ID no. 12349247
aacagaaacgaaagagcctccaaaacctcgcaacaaccccgtgacacccacacccatccgccctgcccctcctcgcgctccccaccaaccccgacgagcggcgatgaccggcacggtgtccaagctggcggcgccccggcctgcggcgccaccgctccggccggcgtccatccgcgccgccgcaatcgccttcgctccctccccgcgccgggtcagcgtctccgtcgccgggcgggccaggatcccctccgtcattgcgatggcttctgccaaggaaggaaatggagcaccgaccaagaaaacctcccttcacgatctctacgagctccagggcctctccccgtggtatgacaacctctgccgacctgtcaccgacttgctgccccttatcgccagcggtgttcgtggagtcaccagcaaccctacaattttccagaaggccatctcatcctccagcgcatatgatgatcagttcaagcagctcatttcgggcggaaaggacgcggagagcgcttactgggaactcgttataaaggatatccaagacgcgtgcagtctttttgagcctatctacgatgagaccgatggggctgatgggtatgtctccgtggaggtgtctcctaggttggcaaatgacactcaaggaactgttgaggcggcaaagtggttacacaaagtggtcaaccgccccaatgtctacataaagatccctgctaccgccgaatgtgttccttccatccgggaagttatcgctaatggcattagcgtcaacgtcacgcttattttctctattgcgacatacgaggctgtgattgatgcttaccttgatgggctagaggcttcgggcttgagcgacttatctcgagttaccagtgtcgcatccttctttgtcagccgagtcgacacccttatcgacaaaatgcttgaaaagattggaacacctgaggcacttgccttgagagggaaggctgccgtcgcacaggccaaactagcaaatcggctctaccagaagaaattctctggcccaaggtgggaggcgttggccaagaaaggtgccaagaaacagaggttgttgtgggcatccaccggtgtcaagaacccagcttatcccgacactctttacatcgacagtctcattggacctgacacggtcaacacgatgcccgaccaagctttgcaggcattcatagaccacggcactgtctcgaggacagttgatgcgaatgtgtccgaggcggaaggtgtatacagcgccttggagaagcttggcattgactgggccgaggtcggaaagcagcttgagctggaaggtgtggactccttcaagaagagctttgacagcctactcgtgagcctgcaggagaagggcaacagcctcaagacggcaactgtgtaaaactgagaagattgggtaccggcgggtgaacgattttactaaataaaatgctagcttgctggctctcttagtttttacgatgtacctttgctctccattttctgaatcgggattgtattctaggcttgcctggccgtcattgtgtgaccaacgttcatggcttgggacgtaaacggttggaaaacatctctgttactttctatacgattttt

SEQ ID NO: 30305 - protein, 464 aa, Zea mays subsp. mays
  peptide (1)..(464): Ceres Seq. ID no. 12349248
  misc_feature (113)..(452): Pfam Name: Pfam Description:  Transaldolase
  misc_feature (143)..(460): NCBI GI NO: 34907042 NR Description: putative transaldolase
  misc_feature (86)..(143): NCBI GI NO: 34907042 NR Description: putative transaldolase
  misc_feature (35)..(90): NCBI GI NO: 34907042 NR Description: putative transaldolase
  misc_feature (81)..(463): NCBI GI NO: 15240625 NR Description: transaldolase - like protein; protein id:At5g13420
  misc_feature (46)..(464): NCBI GI NO: 10441272 NR Description: transaldolase [Lycopersicon esculentum]
  misc_feature (83)..(460): NCBI GI NO: 7489279 NR Description: transaldolase (EC 2.2.1.2) - potato
  misc_feature (46)..(464): NCBI GI NO: 32481059 NR Description: transaldolase [Lycopersicon esculentum]
  misc_feature (110)..(453): NCBI GI NO: 29832856 NR Description: putative transaldolase
  misc_feature (98)..(456): NCBI GI NO: 29828309 NR Description: putative transaldolase
  misc_feature (111)..(449): NCBI GI NO: 23019683 NR Description: hypothetical protein [Thermobifida fusca]
TETKEPPKPRNNPVTPTPIRPAPPRAPHQPRRAAMTGTVSKLAAPRPAAPPLRPASIRAAAIAFAPSPRRVSVSVAGRARIPSVIAMASAKEGNGAPTKKTSLHDLYELQGLSPWYDNLCRPVTDLLPLIASGVRGVTSNPTIFQKAISSSSAYDDQFKQLISGGKDAESAYWELVIKDIQDACSLFEPIYDETDGADGYVSVEVSPRLANDTQGTVEAAKWLHKVVNRPNVYIKIPATAECVPSIREVIANGISVNVTLIFSIATYEAVIDAYLDGLEASGLSDLSRVTSVASFFVSRVDTLIDKMLEKIGTPEALALRGKAAVAQAKLANRLYQKKFSGPRWEALAKKGAKKQRLLWASTGVKNPAYPDTLYIDSLIGPDTVNTMPDQALQAFIDHGTVSRTVDANVSEAEGVYSALEKLGIDWAEVGKQLELEGVDSFKKSFDSLLVSLQEKGNSLKTATV

SEQ ID NO: 30306 - protein, 430 aa, Zea mays subsp. mays
  peptide (1)..(430): Ceres Seq. ID no. 12349249
  misc_feature (79)..(418): Pfam Name: Pfam Description:  Transaldolase
  misc_feature (109)..(426): NCBI GI NO: 34907042 NR Description: putative transaldolase
  misc_feature (52)..(109): NCBI GI NO: 34907042 NR Description: putative transaldolase
  misc_feature (1)..(56): NCBI GI NO: 34907042 NR Description: putative transaldolase
  misc_feature (47)..(429): NCBI GI NO: 15240625 NR Description: transaldolase - like protein; protein id:At5g13420
  misc_feature (12)..(430): NCBI GI NO: 10441272 NR Description: transaldolase [Lycopersicon esculentum]
  misc_feature (49)..(426): NCBI GI NO: 7489279 NR Description: transaldolase (EC 2.2.1.2) - potato
  misc_feature (12)..(430): NCBI GI NO: 32481059 NR Description: transaldolase [Lycopersicon esculentum]
  misc_feature (76)..(419): NCBI GI NO: 29832856 NR Description: putative transaldolase
  misc_feature (64)..(422): NCBI GI NO: 29828309 NR Description: putative transaldolase
  misc_feature (77)..(415): NCBI GI NO: 23019683 NR Description: hypothetical protein [Thermobifida fusca]
MTGTVSKLAAPRPAAPPLRPASIRAAAIAFAPSPRRVSVSVAGRARIPSVIAMASAKEGNGAPTKKTSLHDLYELQGLSPWYDNLCRPVTDLLPLIASGVRGVTSNPTIFQKAISSSSAYDDQFKQLISGGKDAESAYWELVIKDIQDACSLFEPIYDETDGADGYVSVEVSPRLANDTQGTVEAAKWLHKVVNRPNVYIKIPATAECVPSIREVIANGISVNVTLIFSIATYEAVIDAYLDGLEASGLSDLSRVTSVASFFVSRVDTLIDKMLEKIGTPEALALRGKAAVAQAKLANRLYQKKFSGPRWEALAKKGAKKQRLLWASTGVKNPAYPDTLYIDSLIGPDTVNTMPDQALQAFIDHGTVSRTVDANVSEAEGVYSALEKLGIDWAEVGKQLELEGVDSFKKSFDSLLVSLQEKGNSLKTATV

SEQ ID NO: 30307 - protein, 378 aa, Zea mays subsp. mays
  peptide (1)..(378): Ceres Seq. ID no. 12349250
  misc_feature (27)..(366): Pfam Name: Pfam Description:  Transaldolase
  misc_feature (57)..(374): NCBI GI NO: 34907042 NR Description: putative transaldolase
  misc_feature (1)..(57): NCBI GI NO: 34907042 NR Description: putative transaldolase
  misc_feature (1)..(377): NCBI GI NO: 15240625 NR Description: transaldolase - like protein; protein id:At5g13420
  misc_feature (1)..(378): NCBI GI NO: 10441272 NR Description: transaldolase [Lycopersicon esculentum]
  misc_feature (1)..(374): NCBI GI NO: 7489279 NR Description: transaldolase (EC 2.2.1.2) - potato
  misc_feature (1)..(378): NCBI GI NO: 32481059 NR Description: transaldolase [Lycopersicon esculentum]
  misc_feature (24)..(367): NCBI GI NO: 29832856 NR Description: putative transaldolase
  misc_feature (12)..(370): NCBI GI NO: 29828309 NR Description: putative transaldolase
  misc_feature (25)..(363): NCBI GI NO: 23019683 NR Description: hypothetical protein [Thermobifida fusca]
  misc_feature (25)..(367): NCBI GI NO: 23335136 NR Description: hypothetical protein
MASAKEGNGAPTKKTSLHDLYELQGLSPWYDNLCRPVTDLLPLIASGVRGVTSNPTIFQKAISSSSAYDDQFKQLISGGKDAESAYWELVIKDIQDACSLFEPIYDETDGADGYVSVEVSPRLANDTQGTVEAAKWLHKVVNRPNVYIKIPATAECVPSIREVIANGISVNVTLIFSIATYEAVIDAYLDGLEASGLSDLSRVTSVASFFVSRVDTLIDKMLEKIGTPEALALRGKAAVAQAKLANRLYQKKFSGPRWEALAKKGAKKQRLLWASTGVKNPAYPDTLYIDSLIGPDTVNTMPDQALQAFIDHGTVSRTVDANVSEAEGVYSALEKLGIDWAEVGKQLELEGVDSFKKSFDSLLVSLQEKGNSLKTATV

SEQ ID NO: 30308 - DNA, 411 bp, Zea mays subsp. mays
  misc_feature (1)..(411): Ceres Seq. ID no. 2870951
gaaccctagcgccccgcccgtcctgccgccgccgcagccgccatcgcacggccatkggtatcgatctcgtagccggcggccgcaacaagawraccaagcgcacggcsccaagtccgacgatgtctacctcaagctcctcgtcaagctctaccgcttccttgtgcgcaggacaaagagcaacttcaacgccgtgatcctcaagcgcctcttcatgagcaagaccaaccgcccgccgctctcgatgcgccgcctcgtcaggttcatggaggggaagggtgatcagatcgccgtgattgtgggcacgtgaccgacgacaagaggatcagcgaggtgccggcgatgaaggtctgcgcgctcaggttcactgagacagcgagggccaggatcatcaatgctggcggctgcagcgag

SEQ ID NO: 30309 - protein, 101 aa, Zea mays subsp. mays
  peptide (1)..(101): Ceres Seq. ID no. 2870952
  misc_feature (37)..(101): NCBI GI NO: 34393858 NR Description: putative cytoplasmic ribosomal protein L18
  misc_feature (37)..(101): NCBI GI NO: 15241061 NR Description: 60S ribosomal protein - like; protein id:At5g27850
  misc_feature (37)..(101): NCBI GI NO: 606970 NR Description: cytoplasmic ribosomal protein L18
  misc_feature (37)..(101): NCBI GI NO: 15230011 NR Description: putative 60S ribosomal protein L18
  misc_feature (37)..(101): NCBI GI NO: 34897628 NR Description: cytoplasmic ribosomal protein L18 [Oryza sativa]
  misc_feature (37)..(101): NCBI GI NO: 4506607 NR Description: ribosomal protein L18; 60S ribosomal protein L18
  misc_feature (37)..(101): NCBI GI NO: 12840700 NR Description: unnamed protein product [Mus musculus]
  misc_feature (37)..(101): NCBI GI NO: 21264500 NR Description: 60S ribosomal protein L18
  misc_feature (37)..(101): NCBI GI NO: 13592057 NR Description: ribosomal protein L18 [Rattus norvegicus]
  misc_feature (37)..(101): NCBI GI NO: 18204442 NR Description: ribosomal protein L18 [Homo sapiens]
  misc_feature (19)..(19): Xaa is any aa, unknown or other
  misc_feature (30)..(30): Xaa is any aa, unknown or other
  misc_feature (31)..(31): Xaa is any aa, unknown or other
  misc_feature (36)..(36): Xaa is any aa, unknown or other
NPSAPPVLPPPQPPSHGHXYRSRSRRPQQXXQAHGXKSDDVYLKLLVKLYRFLVRRTKSNFNAVILKRLFMSKTNRPPLSMRRLVRFMEGKGDQIAVIVGT

SEQ ID NO: 30310 - protein, 63 aa, Zea mays subsp. mays
  peptide (1)..(63): Ceres Seq. ID no. 2870953
  misc_feature (19)..(36): NCBI GI NO: 34393858 NR Description: putative cytoplasmic ribosomal protein L18
  misc_feature (19)..(36): NCBI GI NO: 15241061 NR Description: 60S ribosomal protein - like; protein id:At5g27850
  misc_feature (19)..(36): NCBI GI NO: 606970 NR Description: cytoplasmic ribosomal protein L18
  misc_feature (19)..(36): NCBI GI NO: 15230011 NR Description: putative 60S ribosomal protein L18
  misc_feature (19)..(36): NCBI GI NO: 34897628 NR Description: cytoplasmic ribosomal protein L18 [Oryza sativa]
  misc_feature (19)..(36): NCBI GI NO: 7440855 NR Description: ribosomal protein L18
  misc_feature (18)..(18): Xaa is any aa, unknown or other
  misc_feature (30)..(30): Xaa is any aa, unknown or other
  misc_feature (35)..(35): Xaa is any aa, unknown or other
TLAPRPSCRRRSRHRTAXGIDLVAGGRNKXTKRTXPSPTMSTSSSSSSSTASLCAGQRATSTP

SEQ ID NO: 30311 - DNA, 1198 bp, Zea mays subsp. mays
  misc_feature (1)..(1198): Ceres Seq. ID no. 12407607
agatccatttcccactcgatcgccaataatggagtttccgcaccaccaccaccaccacggccatcgccgcgacgacgacgaagacgaccgcagaggcccgcctcccccggtctacggcggctacggccagccaccgccacccgacccgtacggccgcgcgcccgtcgaccccgatccgtacggtcgacctccgccccagtccgcgtacggtggggccggggacgcctacggccacagcgggccaaggctacgcgcccccgccggcctacggcgccgggggcgggtacggcaacgtcgtccacgtcgcgcacgaggtcggcgacgagaggccttactacggcggcggcggcggcggtcttggtggcgcctacggaggcggtggctccgagtacggccacgagggccgaccgcaccacggcggcggcggatcccagtacggccacgagacacgcccgcaccacggcggcgggggcggcgccccgcctgtgaggcagcagacgtacaggatctactgcaaggctggggaggaccagtacagcctcgcctcccgcgacggcaaggtctgcctcgtgcgcacggaccgtgatgacgacgcgcagcactggatcaaggacatgaagtacagcaccagggtgaaggatgaggaaggctaccctgccatcgtcctcgtcaacaaagccactggagaggctctcaagcattcccttggccagtcacaccctgttcttctgacccgccataatccagactccctggacgagtctgtcctgtggacagagagcagggacgttggggatgggttccgctgcattaggatggtcaacaacatctacctgaactttgatgctttacatggagacaaggaccatggtggtgtgcgcgacggggacggcccttgtgctgtgggagtggtgcgagggagacaaccagcgctggaagattgttccctggtgaacaaggaaatgtgtgaccgagcccgcaccaaggaggagctcctgccgttataagtgaagtgattggtactgaagtttctggaaataagaggctcttctgagatgcctgtttgtgtgagtatttgcgtttccattccgttttcatgataataaaacgcattgattattaatatatgtaatgtgatgctacactgagtggcagcgttggtatatatttgtaagaattaagaacccattgttgttgg

SEQ ID NO: 30312 - protein, 194 aa, Zea mays subsp. mays
  peptide (1)..(194): Ceres Seq. ID no. 12407608
  misc_feature (29)..(157): Pfam Name: Pfam Description:  Dehydrin
  misc_feature (14)..(85): NCBI GI NO: 18404934 NR Description: expressed protein; protein id: At2g39050
  misc_feature (14)..(85): NCBI GI NO: 25408635 NR Description: hypothetical protein At2g39050
  misc_feature (10)..(80): NCBI GI NO: 34894060 NR Description: putative r40c1 protein
DPFPTRSPIMEFPHHHHHHGHRRDDDEDDRRGPPPPVYGGYGQPPPPDPYGRAPVDPDPYGRPPPQSAYGGAGDAYGHSGPRLRAPAGLRRRGRVRQRRPRRARGRRREALLRRRRRRSWWRLRRRWLRVRPRGPTAPRRRRIPVRPRDTPAPRRRGRRPACEAADVQDLLQGWGGPVQPRLPRRQGLPRAHGP

SEQ ID NO: 30313 - protein, 185 aa, Zea mays subsp. mays
  peptide (1)..(185): Ceres Seq. ID no. 12407609
  misc_feature (20)..(148): Pfam Name: Pfam Description:  Dehydrin
  misc_feature (5)..(76): NCBI GI NO: 18404934 NR Description: expressed protein; protein id: At2g39050
  misc_feature (5)..(76): NCBI GI NO: 25408635 NR Description: hypothetical protein At2g39050
  misc_feature (1)..(71): NCBI GI NO: 34894060 NR Description: putative r40c1 protein
MEFPHHHHHHGHRRDDDEDDRRGPPPPVYGGYGQPPPPDPYGRAPVDPDPYGRPPPQSAYGGAGDAYGHSGPRLRAPAGLRRRGRVRQRRPRRARGRRREALLRRRRRRSWWRLRRRWLRVRPRGPTAPRRRRIPVRPRDTPAPRRRGRRPACEAADVQDLLQGWGGPVQPRLPRRQGLPRAHGP

SEQ ID NO: 30314 - protein, 162 aa, Zea mays subsp. mays
  peptide (1)..(162): Ceres Seq. ID no. 12407610
  misc_feature (94)..(162): Pfam Name: Pfam Description:  Equine herpesvirus glycoprotein gp2
  misc_feature (94)..(162): NCBI GI NO: 11278206 NR Description: membrane glycoprotein
  misc_feature (81)..(162): NCBI GI NO: 17221102 NR Description: glycoprotein gp2 [Equine herpesvirus 1]
  misc_feature (90)..(162): NCBI GI NO: 11360308 NR Description: mucin MUC5B, tracheobronchial
  misc_feature (90)..(162): NCBI GI NO: 23821885 NR Description: Mucin 5B precursor
  misc_feature (83)..(162): NCBI GI NO: 17384256 NR Description: mucin 5 [Homo sapiens]
  misc_feature (83)..(162): NCBI GI NO: 17221102 NR Description: glycoprotein gp2 [Equine herpesvirus 1]
  misc_feature (44)..(162): NCBI GI NO: 11278206 NR Description: membrane glycoprotein
  misc_feature (44)..(162): NCBI GI NO: 17221116 NR Description: glycoprotein gp2 [Equine herpesvirus 1]
  misc_feature (44)..(162): NCBI GI NO: 17221102 NR Description: glycoprotein gp2 [Equine herpesvirus 1]
  misc_feature (44)..(162): NCBI GI NO: 11278205 NR Description: membrane glycoprotein
RSISHSIANNGVSAPPPPPRPSPRRRRRRPQRPASPGLRRLRPATATRPVRPRARRPRSVRSTSAPVRVRWGRGRLRPQRAKATRPRRPTAPGAGTATSSTSRTRSATRGLTTAAAAAVLVAPTEAVAPSTATRADRTTAAADPSTATRHARTTAAGAAPRL

SEQ ID NO: 30315 - protein, 130 aa, Zea mays subsp. mays
  peptide (1)..(130): Ceres Seq. ID no. 12407611
  misc_feature (1)..(91): NCBI GI NO: 34894060 NR Description: putative r40c1 protein
  misc_feature (1)..(91): NCBI GI NO: 18404934 NR Description: expressed protein; protein id: At2g39050
  misc_feature (1)..(91): NCBI GI NO: 25408635 NR Description: hypothetical protein At2g39050
  misc_feature (1)..(91): NCBI GI NO: 7489573 NR Description: r40g3 protein - rice
  misc_feature (1)..(91): NCBI GI NO: 7489571 NR Description: r40c1 protein - rice
  misc_feature (1)..(91): NCBI GI NO: 34902150 NR Description: Putative r40c1 protein - rice
  misc_feature (1)..(91): NCBI GI NO: 7489571 NR Description: r40c1 protein - rice
  misc_feature (1)..(91): NCBI GI NO: 34902150 NR Description: Putative r40c1 protein - rice
  misc_feature (1)..(91): NCBI GI NO: 34394517 NR Description: r40g2 protein
  misc_feature (1)..(91): NCBI GI NO: 34394518 NR Description: putative r40c2 protein
MKYSTRVKDEEGYPAIVLVNKATGEALKHSLGQSHPVLLTRHNPDSLDESVLWTESRDVGDGFRCIRMVNNIYLNFDALHGDKDHGGVRDGDGPCAVGVVRGRQPALEDCSLVNKEMCDRARTKEELLPL

SEQ ID NO: 30316 - DNA, 1783 bp, Zea mays subsp. mays
  misc_feature (1)..(1783): Ceres Seq. ID no. 12350029
atgcctcaaggcctccactgtccactcctctcgtacaaccataccagtgctgttcgttgctctgtacgtagctcttctccaactacgtaacgtaactagctagtacgtgtacgtccagcacttggattggatggctcccctgcgactgcgagcgggagcggcggcgccaatggcggcggccgccgccacggtcgtgctggccgccatacttgcgctgttcggctgctgtgccgctgccgcgtccgccgccgccaccgacgtgacggccgcggcagagctggaccgcatcgacaggctgccgggccagcccccggtcaacttctccatgtactccggctacgtcaccgtcgacgccgccgcggggcgggcgctcttctactggctcatggaggcctccggcgtgccggcgggctccgctccgctcgtgctctggctcaacggcgggcccgggtgctcctctcttggctacggcgctatggaggagctcggcgccttccgcgtcaaccccgacggcgccacgctctccttgaatccctacgcctggaacaatgtggcgaatgtgctgttcttggactcgccggccggcgttggctactcctacaccaacaccaccgacgacctgtacgctgctggtgacaacaagacagctcatgactcatatgctttcttgataaattggttggaacggttcccacagtacaagcatcgtgatttctacatcactggagagagctatggaggccactatgtccctcaattgtcttggttagtgtaccaaaacaacaaaggaattaagaatccaaccttaaacttcaaaggcttcatggttggaaatgcggtaattgacgattaccatgactacatgggcacatttgagtattggtggacacatgggcttatctccgatgaaacttatgcaaagttgtgggaggattgtaaaaatgatgtgtctgagaacccctccgaggaatgccaaaagatttatgaggttgctgaggctgagcaagggaatattgatttgtatagcatctacacacctacttgtaagaagacttcattgcaaaagcgcagactaataaggggaagaatgccctggctgccgagaggatacgatccttgcaccgagctgtacatcacgaagtactgcaacttgcccgaggtgcaggacgccttccatgccaatgttactggaataccatacgcctgggtgggctgcagtgacccaatatatgagtactggaaggattcgccgaggtccatgcttccgatctaccgtgaactcatctcggcaggcctaaggatatgggtcttcagcggcgacaccgactccgtcgtgcccctcacggcgacgaggtactccatcgacgcgctgtctctgccaacgatcaccaagtggtacccttggtactacgacgaagaggttggtggatggtgccaggtgtacgagggcctgacgctggtgacggtccgaggcgcggggcacgaggtccccctccaccgtccgccgcagggcctcaagctgttcgagcacttcctgcggggcgagcccatgcccaagcctgtcgagagcgtccagtcgttctagatgagcttgctgccgcgcttggctagttggctttgatgaatagtaaggccggacatgtggcaagccatctccactccacatttcttcaccacgttttcaataactggcgctggccgaaataataagagcagaacgaataaaatgccgctcgctagaatgatctggctgtgcgtgtttgctttcgagttatttttatat

SEQ ID NO: 30317 - protein, 484 aa, Zea mays subsp. mays
  peptide (1)..(484): Ceres Seq. ID no. 12350030
  misc_feature (17)..(477): NCBI GI NO: 34895992 NR Description: putative carboxypeptidase D
  misc_feature (24)..(475): NCBI GI NO: 34908012 NR Description: putative carboxypeptidase D
  misc_feature (13)..(475): NCBI GI NO: 20455471 NR Description: Serine carboxypeptidase II precursor
  misc_feature (13)..(475): NCBI GI NO: 7428204 NR Description: carboxypeptidase D (EC 3
  misc_feature (51)..(475): NCBI GI NO: 7428205 NR Description: carboxypeptidase D (EC 3.4.16.6) - wheat
  misc_feature (32)..(475): NCBI GI NO: 15231911 NR Description: putative serine carboxypeptidase II
  misc_feature (49)..(475): NCBI GI NO: 15227493 NR Description: putative serine carboxypeptidase II
  misc_feature (163)..(484): NCBI GI NO: 2493493 NR Description: Serine carboxypeptidase II-1 precursor (CP-MII.1)
  misc_feature (49)..(476): NCBI GI NO: 13877871 NR Description: putative serine carboxypeptidase II
  misc_feature (49)..(476): NCBI GI NO: 15234795 NR Description: SERINE CARBOXYPEPTIDASE II-like protein
MAPLRLRAGAAAPMAAAAATVVLAAILALFGCCAAAASAAATDVTAAAELDRIDRLPGQPPVNFSMYSGYVTVDAAAGRALFYWLMEASGVPAGSAPLVLWLNGGPGCSSLGYGAMEELGAFRVNPDGATLSLNPYAWNNVANVLFLDSPAGVGYSYTNTTDDLYAAGDNKTAHDSYAFLINWLERFPQYKHRDFYITGESYGGHYVPQLSWLVYQNNKGIKNPTLNFKGFMVGNAVIDDYHDYMGTFEYWWTHGLISDETYAKLWEDCKNDVSENPSEECQKIYEVAEAEQGNIDLYSIYTPTCKKTSLQKRRLIRGRMPWLPRGYDPCTELYITKYCNLPEVQDAFHANVTGIPYAWVGCSDPIYEYWKDSPRSMLPIYRELISAGLRIWVFSGDTDSVVPLTATRYSIDALSLPTITKWYPWYYDEEVGGWCQVYEGLTLVTVRGAGHEVPLHRPPQGLKLFEHFLRGEPMPKPVESVQSF

SEQ ID NO: 30318 - protein, 471 aa, Zea mays subsp. mays
  peptide (1)..(471): Ceres Seq. ID no. 12350031
  misc_feature (4)..(464): NCBI GI NO: 34895992 NR Description: putative carboxypeptidase D
  misc_feature (11)..(462): NCBI GI NO: 34908012 NR Description: putative carboxypeptidase D
  misc_feature (1)..(462): NCBI GI NO: 20455471 NR Description: Serine carboxypeptidase II precursor
  misc_feature (1)..(462): NCBI GI NO: 7428204 NR Description: carboxypeptidase D (EC 3
  misc_feature (38)..(462): NCBI GI NO: 7428205 NR Description: carboxypeptidase D (EC 3.4.16.6) - wheat
  misc_feature (19)..(462): NCBI GI NO: 15231911 NR Description: putative serine carboxypeptidase II
  misc_feature (36)..(462): NCBI GI NO: 15227493 NR Description: putative serine carboxypeptidase II
  misc_feature (150)..(471): NCBI GI NO: 2493493 NR Description: Serine carboxypeptidase II-1 precursor (CP-MII.1)
  misc_feature (36)..(463): NCBI GI NO: 13877871 NR Description: putative serine carboxypeptidase II
  misc_feature (36)..(463): NCBI GI NO: 15234795 NR Description: SERINE CARBOXYPEPTIDASE II-like protein
MAAAAATVVLAAILALFGCCAAAASAAATDVTAAAELDRIDRLPGQPPVNFSMYSGYVTVDAAAGRALFYWLMEASGVPAGSAPLVLWLNGGPGCSSLGYGAMEELGAFRVNPDGATLSLNPYAWNNVANVLFLDSPAGVGYSYTNTTDDLYAAGDNKTAHDSYAFLINWLERFPQYKHRDFYITGESYGGHYVPQLSWLVYQNNKGIKNPTLNFKGFMVGNAVIDDYHDYMGTFEYWWTHGLISDETYAKLWEDCKNDVSENPSEECQKIYEVAEAEQGNIDLYSIYTPTCKKTSLQKRRLIRGRMPWLPRGYDPCTELYITKYCNLPEVQDAFHANVTGIPYAWVGCSDPIYEYWKDSPRSMLPIYRELISAGLRIWVFSGDTDSVVPLTATRYSIDALSLPTITKWYPWYYDEEVGGWCQVYEGLTLVTVRGAGHEVPLHRPPQGLKLFEHFLRGEPMPKPVESVQSF

SEQ ID NO: 30319 - protein, 419 aa, Zea mays subsp. mays
  peptide (1)..(419): Ceres Seq. ID no. 12350032
  misc_feature (1)..(412): NCBI GI NO: 34895992 NR Description: putative carboxypeptidase D
  misc_feature (1)..(410): NCBI GI NO: 34908012 NR Description: putative carboxypeptidase D
  misc_feature (1)..(410): NCBI GI NO: 20455471 NR Description: Serine carboxypeptidase II precursor
  misc_feature (1)..(410): NCBI GI NO: 7428204 NR Description: carboxypeptidase D (EC 3
  misc_feature (1)..(410): NCBI GI NO: 7428205 NR Description: carboxypeptidase D (EC 3.4.16.6) - wheat
  misc_feature (1)..(410): NCBI GI NO: 15231911 NR Description: putative serine carboxypeptidase II
  misc_feature (1)..(410): NCBI GI NO: 15227493 NR Description: putative serine carboxypeptidase II
  misc_feature (98)..(419): NCBI GI NO: 2493493 NR Description: Serine carboxypeptidase II-1 precursor (CP-MII.1)
  misc_feature (1)..(411): NCBI GI NO: 13877871 NR Description: putative serine carboxypeptidase II
  misc_feature (1)..(411): NCBI GI NO: 15234795 NR Description: SERINE CARBOXYPEPTIDASE II-like protein
MYSGYVTVDAAAGRALFYWLMEASGVPAGSAPLVLWLNGGPGCSSLGYGAMEELGAFRVNPDGATLSLNPYAWNNVANVLFLDSPAGVGYSYTNTTDDLYAAGDNKTAHDSYAFLINWLERFPQYKHRDFYITGESYGGHYVPQLSWLVYQNNKGIKNPTLNFKGFMVGNAVIDDYHDYMGTFEYWWTHGLISDETYAKLWEDCKNDVSENPSEECQKIYEVAEAEQGNIDLYSIYTPTCKKTSLQKRRLIRGRMPWLPRGYDPCTELYITKYCNLPEVQDAFHANVTGIPYAWVGCSDPIYEYWKDSPRSMLPIYRELISAGLRIWVFSGDTDSVVPLTATRYSIDALSLPTITKWYPWYYDEEVGGWCQVYEGLTLVTVRGAGHEVPLHRPPQGLKLFEHFLRGEPMPKPVESVQSF

SEQ ID NO: 30320 - DNA, 1246 bp, Zea mays subsp. mays
  misc_feature (1)..(1246): Ceres Seq. ID no. 12343033
gttggactctagccatttactgcaagaagccattttctttcttctctagccgccgccgccgccggccggaacctggcgccgagcgcccttctcttcctatccagccgcagctgccagggcgtagtactcctggccggcgtctccctcctctcttcctgcgcattctcctctctggaaaggttttgcaggtttcacacttcttatcatggatgataagaacaaagtcaagaaggaaatagatggcccccttggacccccacctcgcaaggggggacttaaattcgcaccaaaagtacctcagaagaaacctgctaaggttgtcccaaagaaggaaccagttgaagagagaaaggaggatgctttggataaggagttattgatgaaacttaagatgtcgcaaaacaagtatccctcaagaattaagtccgacgaaaagccaagaagtggtacacaggttgcatttggacaaggaaactcttattatgcaagaaattttcccatgcccaaaaaggattcttcagcaggtggagcttcgaagttaccaaaagaatatgcagaaccatgggactatagccatgattatcctgttactctcccactaaggaagccctactctggaaatcctgaaattctggatgaggaagaatttggagaatcttctgccagcaggacccaagatgatgaattatctgcagcagagcagcttggattaatggatatgtcgtcggaatcacagttcctcttcttccagttgccatcctctcttcctttaccgaggcagccacaatcagttgctgaccctaacgaagtccgcgatgagaaacgtgagggcatgaggccatcatcgcacaatggctcgaaactcaaagaggttcctgaaggctatatggggaaaatgctcgtatataagagtggtaaagtgaagatgaagataggagacactctctttgatgtttcatttggctcgaattgcatgttttcccaggaggttgcagcaatcaacatcagagaaaaacattgctgtacggtgggagagatcagcaagcgtgcaatcatcaccccagatattaactacatgttgggttctgttgacaagatggaagaatagtccattggtttctttcgcgcaaaccatatagaccatattatgccattacaagatagttttgctttcttatagagaacgacctgtgatgccctctcagacttcttcaagaaaagatgcctcaaacaaaggaatgtgccg

SEQ ID NO: 30321 - protein, 300 aa, Zea mays subsp. mays
  peptide (1)..(300): Ceres Seq. ID no. 12343034
  misc_feature (183)..(288): Pfam Name: Pfam Description:  RNA polymerase III RPC4
  misc_feature (42)..(299): NCBI GI NO: 21740741 NR Description: OSJNBa0072K14.6
  misc_feature (17)..(298): NCBI GI NO: 15242400 NR Description: putative protein; protein id: At5g09380.1
  misc_feature (115)..(251): NCBI GI NO: 7486060 NR Description: hypothetical protein F24A6
  misc_feature (115)..(251): NCBI GI NO: 15234965 NR Description: hypothetical protein; protein id: At4g25180.1
  misc_feature (250)..(299): NCBI GI NO: 7486060 NR Description: hypothetical protein F24A6
  misc_feature (250)..(299): NCBI GI NO: 15234965 NR Description: hypothetical protein; protein id: At4g25180.1
  misc_feature (144)..(292): NCBI GI NO: 34907504 NR Description: B1099D03.22
  misc_feature (13)..(292): NCBI GI NO: 34874432 NR Description: similar to DNA-directed RNA polymerase III 47 kDapolypeptide
  misc_feature (13)..(292): NCBI GI NO: 12850356 NR Description: unnamed protein product [Mus musculus]
  misc_feature (13)..(292): NCBI GI NO: 31981109 NR Description: polymerase
MDDKNKVKKEIDGPLGPPPRKGGLKFAPKVPQKKPAKVVPKKEPVEERKEDALDKELLMKLKMSQNKYPSRIKSDEKPRSGTQVAFGQGNSYYARNFPMPKKDSSAGGASKLPKEYAEPWDYSHDYPVTLPLRKPYSGNPEILDEEEFGESSASRTQDDELSAAEQLGLMDMSSESQFLFFQLPSSLPLPRQPQSVADPNEVRDEKREGMRPSSHNGSKLKEVPEGYMGKMLVYKSGKVKMKIGDTLFDVSFGSNCMFSQEVAAINIREKHCCTVGEISKRAIITPDINYMLGSVDKMEE

SEQ ID NO: 30322 - protein, 242 aa, Zea mays subsp. mays
  peptide (1)..(242): Ceres Seq. ID no. 12343035
  misc_feature (125)..(230): Pfam Name: Pfam Description:  RNA polymerase III RPC4
  misc_feature (1)..(241): NCBI GI NO: 21740741 NR Description: OSJNBa0072K14.6
  misc_feature (1)..(240): NCBI GI NO: 15242400 NR Description: putative protein; protein id: At5g09380.1
  misc_feature (57)..(193): NCBI GI NO: 7486060 NR Description: hypothetical protein F24A6
  misc_feature (57)..(193): NCBI GI NO: 15234965 NR Description: hypothetical protein; protein id: At4g25180.1
  misc_feature (192)..(241): NCBI GI NO: 7486060 NR Description: hypothetical protein F24A6
  misc_feature (192)..(241): NCBI GI NO: 15234965 NR Description: hypothetical protein; protein id: At4g25180.1
  misc_feature (86)..(234): NCBI GI NO: 34907504 NR Description: B1099D03.22
  misc_feature (1)..(234): NCBI GI NO: 34874432 NR Description: similar to DNA-directed RNA polymerase III 47 kDapolypeptide
  misc_feature (1)..(234): NCBI GI NO: 12850356 NR Description: unnamed protein product [Mus musculus]
  misc_feature (1)..(234): NCBI GI NO: 31981109 NR Description: polymerase
MKLKMSQNKYPSRIKSDEKPRSGTQVAFGQGNSYYARNFPMPKKDSSAGGASKLPKEYAEPWDYSHDYPVTLPLRKPYSGNPEILDEEEFGESSASRTQDDELSAAEQLGLMDMSSESQFLFFQLPSSLPLPRQPQSVADPNEVRDEKREGMRPSSHNGSKLKEVPEGYMGKMLVYKSGKVKMKIGDTLFDVSFGSNCMFSQEVAAINIREKHCCTVGEISKRAIITPDINYMLGSVDKMEE

SEQ ID NO: 30323 - protein, 238 aa, Zea mays subsp. mays
  peptide (1)..(238): Ceres Seq. ID no. 12343036
  misc_feature (121)..(226): Pfam Name: Pfam Description:  RNA polymerase III RPC4
  misc_feature (1)..(237): NCBI GI NO: 21740741 NR Description: OSJNBa0072K14.6
  misc_feature (1)..(236): NCBI GI NO: 15242400 NR Description: putative protein; protein id: At5g09380.1
  misc_feature (53)..(189): NCBI GI NO: 7486060 NR Description: hypothetical protein F24A6
  misc_feature (53)..(189): NCBI GI NO: 15234965 NR Description: hypothetical protein; protein id: At4g25180.1
  misc_feature (188)..(237): NCBI GI NO: 7486060 NR Description: hypothetical protein F24A6
  misc_feature (188)..(237): NCBI GI NO: 15234965 NR Description: hypothetical protein; protein id: At4g25180.1
  misc_feature (82)..(230): NCBI GI NO: 34907504 NR Description: B1099D03.22
  misc_feature (1)..(230): NCBI GI NO: 34874432 NR Description: similar to DNA-directed RNA polymerase III 47 kDapolypeptide
  misc_feature (1)..(230): NCBI GI NO: 12850356 NR Description: unnamed protein product [Mus musculus]
  misc_feature (1)..(230): NCBI GI NO: 31981109 NR Description: polymerase
MSQNKYPSRIKSDEKPRSGTQVAFGQGNSYYARNFPMPKKDSSAGGASKLPKEYAEPWDYSHDYPVTLPLRKPYSGNPEILDEEEFGESSASRTQDDELSAAEQLGLMDMSSESQFLFFQLPSSLPLPRQPQSVADPNEVRDEKREGMRPSSHNGSKLKEVPEGYMGKMLVYKSGKVKMKIGDTLFDVSFGSNCMFSQEVAAINIREKHCCTVGEISKRAIITPDINYMLGSVDKMEE

SEQ ID NO: 30324 - DNA, 1254 bp, Zea mays subsp. mays
  misc_feature (1)..(1254): Ceres Seq. ID no. 12402364
gcacgagaccattacctagaacatcctaatcaaaaataacggaacgtcgtccagatctcgatcggccggtggccgccgtggtcagtaaggcaggcatggcatccgaggtagccggcctcgccgtggtctcggccgccgcgtccgtggccctggtctacgctcgtctcgccacctcgcggctggctcccggcaccccccgcctcgcggcgctgctcccggtgctcctactcctcccagtcctccccttcgccttctcctccatccacctccgcaccgtctccgccttcttcctcgtctggctctgcggcttcaagctcctcctcctcgccgcggggcacgacgggccgctccaccccgccctcccgctcgtgcgcttcgtcgcgtgcgccgcgctgcccatcaaggtccgggacgagaacgacaagcagcagcaaactcggataccccgctcctctctcccttcgggattcctgctgtcctacgcggccaaggcggcgctcttctccgcgctcgtctccgtccggtgctacagggcgcggatgcccgcgtacgccgtgcccgtgttcgacggcgcgcacgtgtacctcatgctggagctcttcctcgcgtccgccgcggcgctcgcgcgcgcgctgctgggcgcggagctggagccgcagttcgaccggccgtacctcgcttcctccctgcgcgacttctggggccggcggtggaacctcatggtccccggcgtgctccggccctgcgtgtaccgccccgtgcgcgcccgcttcggcgccgccgcgggcgtgctcgcggcgttcctcgtgtccggggccatgcacgaggtcatgttctactacatcacgctggaggccgggaccggggaggtgaccgcgttcttcgcgctgcacggcgcgtgcgcggtggccgagcggtggatggcgcggcagggcggcatgtggcggccgccgcggcccgtcgcgacggcgctgacgctggcgttcgtgacggggacggggtcgtggctattctttgcgcccgtgatccgaagccggctggacgaggccatcatcgcagagtgcgaggggatgcttgcgttcttggagcgcgctggccggaatctagccgcgatggcacatttcatttgaacctctgtaaggtagagttatttggaaccgtgatactcccaacactgggcttctgaaaatcagtatcccgaacagagcaattgtaattttagtattataattcatagaacttcagatttctggt

SEQ ID NO: 30325 - protein, 344 aa, Zea mays subsp. mays
  peptide (1)..(344): Ceres Seq. ID no. 12402365
  misc_feature (29)..(312): Pfam Name: Pfam Description:  MBOAT family
  misc_feature (19)..(344): NCBI GI NO: 28812087 NR Description: putative wax synthase protein
  misc_feature (4)..(342): NCBI GI NO: 38345254 NR Description: OSJNBb0011N17.15
  misc_feature (8)..(339): NCBI GI NO: 38345253 NR Description: OSJNBb0011N17.14
  misc_feature (8)..(337): NCBI GI NO: 38347115 NR Description: OSJNBa0009K15.12
  misc_feature (1)..(337): NCBI GI NO: 34911838 NR Description: wax synthase-like protein
  misc_feature (3)..(331): NCBI GI NO: 27728714 NR Description: wax synthase isoform 1 [Vitis vinifera]
  misc_feature (3)..(331): NCBI GI NO: 27728716 NR Description: wax synthase isoform 2 [Vitis vinifera]
  misc_feature (1)..(323): NCBI GI NO: 15240500 NR Description: wax synthase-like protein; protein id: At5g55380
  misc_feature (4)..(332): NCBI GI NO: 11362836 NR Description: wax synthase [imported] - Simmondsia chinensis
  misc_feature (1)..(332): NCBI GI NO: 15240496 NR Description: putative protein; protein id: At5g55340
MASEVAGLAVVSAAASVALVYARLATSRLAPGTPRLAALLPVLLLLPVLPFAFSSIHLRTVSAFFLVWLCGFKLLLLAAGHDGPLHPALPLVRFVACAALPIKVRDENDKQQQTRIPRSSLPSGFLLSYAAKAALFSALVSVRCYRARMPAYAVPVFDGAHVYLMLELFLASAAALARALLGAELEPQFDRPYLASSLRDFWGRRWNLMVPGVLRPCVYRPVRARFGAAAGVLAAFLVSGAMHEVMFYYITLEAGTGEVTAFFALHGACAVAERWMARQGGMWRPPRPVATALTLAFVTGTGSWLFFAPVIRSRLDEAIIAECEGMLAFLERAGRNLAAMAHFI

SEQ ID NO: 30326 - protein, 196 aa, Zea mays subsp. mays
  peptide (1)..(196): Ceres Seq. ID no. 12402366
  misc_feature (1)..(164): Pfam Name: Pfam Description:  MBOAT family
  misc_feature (1)..(196): NCBI GI NO: 28812087 NR Description: putative wax synthase protein
  misc_feature (1)..(194): NCBI GI NO: 38345254 NR Description: OSJNBb0011N17.15
  misc_feature (1)..(191): NCBI GI NO: 38345253 NR Description: OSJNBb0011N17.14
  misc_feature (1)..(189): NCBI GI NO: 38347115 NR Description: OSJNBa0009K15.12
  misc_feature (1)..(189): NCBI GI NO: 34911838 NR Description: wax synthase-like protein
  misc_feature (1)..(183): NCBI GI NO: 27728714 NR Description: wax synthase isoform 1 [Vitis vinifera]
  misc_feature (1)..(183): NCBI GI NO: 27728716 NR Description: wax synthase isoform 2 [Vitis vinifera]
  misc_feature (1)..(175): NCBI GI NO: 15240500 NR Description: wax synthase-like protein; protein id: At5g55380
  misc_feature (1)..(184): NCBI GI NO: 11362836 NR Description: wax synthase [imported] - Simmondsia chinensis
  misc_feature (1)..(184): NCBI GI NO: 15240496 NR Description: putative protein; protein id: At5g55340
MPAYAVPVFDGAHVYLMLELFLASAAALARALLGAELEPQFDRPYLASSLRDFWGRRWNLMVPGVLRPCVYRPVRARFGAAAGVLAAFLVSGAMHEVMFYYITLEAGTGEVTAFFALHGACAVAERWMARQGGMWRPPRPVATALTLAFVTGTGSWLFFAPVIRSRLDEAIIAECEGMLAFLERAGRNLAAMAHFI

SEQ ID NO: 30327 - protein, 180 aa, Zea mays subsp. mays
  peptide (1)..(180): Ceres Seq. ID no. 12402367
  misc_feature (1)..(148): Pfam Name: Pfam Description:  MBOAT family
  misc_feature (1)..(180): NCBI GI NO: 28812087 NR Description: putative wax synthase protein
  misc_feature (1)..(178): NCBI GI NO: 38345254 NR Description: OSJNBb0011N17.15
  misc_feature (1)..(175): NCBI GI NO: 38345253 NR Description: OSJNBb0011N17.14
  misc_feature (1)..(173): NCBI GI NO: 38347115 NR Description: OSJNBa0009K15.12
  misc_feature (1)..(173): NCBI GI NO: 34911838 NR Description: wax synthase-like protein
  misc_feature (1)..(167): NCBI GI NO: 27728714 NR Description: wax synthase isoform 1 [Vitis vinifera]
  misc_feature (1)..(167): NCBI GI NO: 27728716 NR Description: wax synthase isoform 2 [Vitis vinifera]
  misc_feature (1)..(159): NCBI GI NO: 15240500 NR Description: wax synthase-like protein; protein id: At5g55380
  misc_feature (1)..(168): NCBI GI NO: 11362836 NR Description: wax synthase [imported] - Simmondsia chinensis
  misc_feature (1)..(168): NCBI GI NO: 15240496 NR Description: putative protein; protein id: At5g55340
MLELFLASAAALARALLGAELEPQFDRPYLASSLRDFWGRRWNLMVPGVLRPCVYRPVRARFGAAAGVLAAFLVSGAMHEVMFYYITLEAGTGEVTAFFALHGACAVAERWMARQGGMWRPPRPVATALTLAFVTGTGSWLFFAPVIRSRLDEAIIAECEGMLAFLERAGRNLAAMAHFI

SEQ ID NO: 30328 - DNA, 1534 bp, Zea mays subsp. mays
  misc_feature (1)..(1534): Ceres Seq. ID no. 12373172
tcgtattacgtactcctgcatagcgatagcatagcttagcttgcttccccaatgccaatgtcatcgacagcacaaatggcttccctcgccgttctcatcatttccctcgtctttgcggcgcttgcctccgacgccgccgcaggcgtccgcgtcgagctcacgcgcgtccacgccgaccccagcgtgaccgcgtcccagttcgtccgcggcgccctgcgccgcgacatgcaccggcacaacgccaggaagctagccctagccgcgtcgtctggcgccacggtgtccgcgccgacccagaactcgcccaccgccggggagtacctgatggcgctggccatcggcacgccgccgctgccgtaccaggccatcgccgacacgggcagcgacctcatctggacgcagtgcgcgccctgcacctcccagtgcttccgccagccgacgccgctgtacaacccgtccagctccaccacgttcgccgtgctcccgtgcaacagctcgctgagcgtatgcgcggcggcgctggccgggaccgggacggccccgccgccggggtgcgcgtgcacgtacaacgtcacgtacggcagcgggtggacgagtgtctttcaggggtccgagaccttcacgttcgggtccacgccggccggtcagtcccgcgtccctggcatcgccttcggctgcagcaccgccagcagcggcttcaacgcctcgtccgcgtccggcctcgtcgggctgggcagggggaggctgtcgctcgtctcccagctcggcgtccccaagttctcctactgcctcacgccgtaccaggacaccaacagcacgagcacgctcctcctcgggccgtcggcgtcgctcaacggcaccgccggcgtcagctccacgcctttcgtcgccagcccttccactgcgcccatgaacaccttctactatctcaacctgaccggcatatccctcggcacgacggcactgtccatcccgcccgacgccttcttgctcaacgcggacggcaccgggcgggctcatcatcgactctggcaccaccatcacattactgggcaacacggcgtaccagcaggtccgggcagcggtcgtctccctggtgacgctgcccaccacagacgggtcggcagccacggggctcgacctgtgcttcatgctgccctcctcaacgtcggcgccgccggccatgccgagcatgacgctccacttcaacggcgcggacatggtgctcccggcggacagctacatgatgtcggacgactccggcttgtggtgcctggccatgcagaaccagaccgacggcgaggtaaacattctcggcaactaccagcagcaaaacatgcacatcctctacgacattgggcaggagacattgtcgtttgctccggccaaatgcagcgcgctctgatcagagctttacagaactgaaaatatgtgcgcgcaattgcataaggatcgtgatttttttaactatatattatgtaaaaatgtcgtgttgcttgggttgggttgtaaagcaggagatatttttccttcc

SEQ ID NO: 30329 - protein, 457 aa, Zea mays subsp. mays
  peptide (1)..(457): Ceres Seq. ID no. 12373173
  misc_feature (50)..(320): Pfam Name: Pfam Description:  Eukaryotic aspartyl protease
  misc_feature (7)..(320): NCBI GI NO: 34898762 NR Description: OJ1131_E05.5
  misc_feature (31)..(320): NCBI GI NO: 38344829 NR Description: OSJNBa0064H22.10
  misc_feature (30)..(320): NCBI GI NO: 30678047 NR Description: chloroplast nucleoid DNA binding protein -related
  misc_feature (92)..(320): NCBI GI NO: 20197342 NR Description: putative chloroplast nucleoid DNA binding protein
  misc_feature (13)..(309): NCBI GI NO: 38344830 NR Description: OSJNBa0064H22.11
  misc_feature (7)..(302): NCBI GI NO: 15242803 NR Description: putative protein; protein id: At5g33340.1
  misc_feature (50)..(309): NCBI GI NO: 37536476 NR Description: putative nucleoid DNA binding protein
  misc_feature (50)..(309): NCBI GI NO: 37536468 NR Description: putative nucleoid DNA binding protein
  misc_feature (26)..(320): NCBI GI NO: 15223368 NR Description: chloroplast nucleoid DNA binding protein, putative
  misc_feature (26)..(320): NCBI GI NO: 21594980 NR Description: chloroplast nucleoid DNA binding protein, putative
MPMSSTAQMASLAVLIISLVFAALASDAAAGVRVELTRVHADPSVTASQFVRGALRRDMHRHNARKLALAASSGATVSAPTQNSPTAGEYLMALAIGTPPLPYQAIADTGSDLIWTQCAPCTSQCFRQPTPLYNPSSSTTFAVLPCNSSLSVCAAALAGTGTAPPPGCACTYNVTYGSGWTSVFQGSETFTFGSTPAGQSRVPGIAFGCSTASSGFNASSASGLVGLGRGRLSLVSQLGVPKFSYCLTPYQDTNSTSTLLLGPSASLNGTAGVSSTPFVASPSTAPMNTFYYLNLTGISLGTTALSIPPDAFLLNADGTGRAHHRLWHHHHITGQHGVPAGPGSGRLPGDAAHHRRVGSHGARPVLHAALLNVGAAGHAEHDAPLQRRGHGAPGGQLHDVGRLRLVVPGHAEPDRRRGKHSRQLPAAKHAHPLRHWAGDIVVCSGQMQRALIRALQN

SEQ ID NO: 30330 - protein, 455 aa, Zea mays subsp. mays
  peptide (1)..(455): Ceres Seq. ID no. 12373174
  misc_feature (48)..(318): Pfam Name: Pfam Description:  Eukaryotic aspartyl protease
  misc_feature (5)..(318): NCBI GI NO: 34898762 NR Description: OJ1131_E05.5
  misc_feature (29)..(318): NCBI GI NO: 38344829 NR Description: OSJNBa0064H22.10
  misc_feature (28)..(318): NCBI GI NO: 30678047 NR Description: chloroplast nucleoid DNA binding protein -related
  misc_feature (90)..(318): NCBI GI NO: 20197342 NR Description: putative chloroplast nucleoid DNA binding protein
  misc_feature (11)..(307): NCBI GI NO: 38344830 NR Description: OSJNBa0064H22.11
  misc_feature (5)..(300): NCBI GI NO: 15242803 NR Description: putative protein; protein id: At5g33340.1
  misc_feature (48)..(307): NCBI GI NO: 37536476 NR Description: putative nucleoid DNA binding protein
  misc_feature (48)..(307): NCBI GI NO: 37536468 NR Description: putative nucleoid DNA binding protein
  misc_feature (24)..(318): NCBI GI NO: 15223368 NR Description: chloroplast nucleoid DNA binding protein, putative
  misc_feature (24)..(318): NCBI GI NO: 21594980 NR Description: chloroplast nucleoid DNA binding protein, putative
MSSTAQMASLAVLIISLVFAALASDAAAGVRVELTRVHADPSVTASQFVRGALRRDMHRHNARKLALAASSGATVSAPTQNSPTAGEYLMALAIGTPPLPYQAIADTGSDLIWTQCAPCTSQCFRQPTPLYNPSSSTTFAVLPCNSSLSVCAAALAGTGTAPPPGCACTYNVTYGSGWTSVFQGSETFTFGSTPAGQSRVPGIAFGCSTASSGFNASSASGLVGLGRGRLSLVSQLGVPKFSYCLTPYQDTNSTSTLLLGPSASLNGTAGVSSTPFVASPSTAPMNTFYYLNLTGISLGTTALSIPPDAFLLNADGTGRAHHRLWHHHHITGQHGVPAGPGSGRLPGDAAHHRRVGSHGARPVLHAALLNVGAAGHAEHDAPLQRRGHGAPGGQLHDVGRLRLVVPGHAEPDRRRGKHSRQLPAAKHAHPLRHWAGDIVVCSGQMQRALIRALQN

SEQ ID NO: 30331 - protein, 449 aa, Zea mays subsp. mays
  peptide (1)..(449): Ceres Seq. ID no. 12373175
  misc_feature (42)..(312): Pfam Name: Pfam Description:  Eukaryotic aspartyl protease
  misc_feature (1)..(312): NCBI GI NO: 34898762 NR Description: OJ1131_E05.5
  misc_feature (23)..(312): NCBI GI NO: 38344829 NR Description: OSJNBa0064H22.10
  misc_feature (22)..(312): NCBI GI NO: 30678047 NR Description: chloroplast nucleoid DNA binding protein -related
  misc_feature (84)..(312): NCBI GI NO: 20197342 NR Description: putative chloroplast nucleoid DNA binding protein
  misc_feature (5)..(301): NCBI GI NO: 38344830 NR Description: OSJNBa0064H22.11
  misc_feature (1)..(294): NCBI GI NO: 15242803 NR Description: putative protein; protein id: At5g33340.1
  misc_feature (42)..(301): NCBI GI NO: 37536476 NR Description: putative nucleoid DNA binding protein
  misc_feature (42)..(301): NCBI GI NO: 37536468 NR Description: putative nucleoid DNA binding protein
  misc_feature (18)..(312): NCBI GI NO: 15223368 NR Description: chloroplast nucleoid DNA binding protein, putative
  misc_feature (18)..(312): NCBI GI NO: 21594980 NR Description: chloroplast nucleoid DNA binding protein, putative
MASLAVLIISLVFAALASDAAAGVRVELTRVHADPSVTASQFVRGALRRDMHRHNARKLALAASSGATVSAPTQNSPTAGEYLMALAIGTPPLPYQAIADTGSDLIWTQCAPCTSQCFRQPTPLYNPSSSTTFAVLPCNSSLSVCAAALAGTGTAPPPGCACTYNVTYGSGWTSVFQGSETFTFGSTPAGQSRVPGIAFGCSTASSGFNASSASGLVGLGRGRLSLVSQLGVPKFSYCLTPYQDTNSTSTLLLGPSASLNGTAGVSSTPFVASPSTAPMNTFYYLNLTGISLGTTALSIPPDAFLLNADGTGRAHHRLWHHHHITGQHGVPAGPGSGRLPGDAAHHRRVGSHGARPVLHAALLNVGAAGHAEHDAPLQRRGHGAPGGQLHDVGRLRLVVPGHAEPDRRRGKHSRQLPAAKHAHPLRHWAGDIVVCSGQMQRALIRALQN

SEQ ID NO: 30332 - DNA, 1582 bp, Zea mays subsp. mays
  misc_feature (1)..(1582): Ceres Seq. ID no. 13577851
  misc_feature (155)..(155): n is a, c, t, g, unknown, or other
  misc_feature (470)..(470): n is a, c, t, g, unknown, or other
  misc_feature (1326)..(1326): n is a, c, t, g, unknown, or other
  misc_feature (1380)..(1380): n is a, c, t, g, unknown, or other
  misc_feature (360)..(360): n is a, c, t, g, unknown, or other
  misc_feature (366)..(366): n is a, c, t, g, unknown, or other
  misc_feature (159)..(159): n is a, c, t, g, unknown, or other
  misc_feature (437)..(437): n is a, c, t, g, unknown, or other
  misc_feature (156)..(156): n is a, c, t, g, unknown, or other
  misc_feature (458)..(458): n is a, c, t, g, unknown, or other
  misc_feature (429)..(429): n is a, c, t, g, unknown, or other
  misc_feature (172)..(172): n is a, c, t, g, unknown, or other
  misc_feature (393)..(393): n is a, c, t, g, unknown, or other
gaccagaggcggagagcactatagtcacgagctccacagtccaagctcgcactcgcaagtgctagcatctctcgggaatggcggagtcgcgtggtttcgtgatgacggctgtgatggtggtggtggtggccatggtatcagtggcgccgcgcggnnggnaggcgaagacgancgattgagccgtgctcggggtccgactcttgcccggcgctgctgggctacacgctctacgccgacatgaaggtgtccgaggtggccgcgctcttctccgtcgacccggcggcgttgctggccgccaacgcgctcgacttcggcgccccagggtgcggcgcacgcatcctgcccatgggcctcttcgtncgcgtncccacccgctgctcctgcgccgacggntccgcaagtccgtctccgtccgctacgccgcgcgcncggccganacgctcgccaccgtctccgangtcgtcttcgcngggctcgcctcctccgaccagatccgcaacgagaacggcctcacctccgacgaccccgacgcgccgctcgacgccggccagaagctcgccatcccgctgccatgcgtctgcttcaactcgtccgacaacaacctccccgcggtgtacctctcctacgtcgtgcaggtcggggacaccgtgcccgccatcgctgcaagctacgagaccaccgtcacggatgtcatgaatgtcaatgccatggggagtcccgtcgccgcgccaggcgacattctcgccatcccattgccagcatgtgcatctgcatttccaaaatctgcatcagaccacggactgattgtagcgaatggaacttacgcgcttaccgctagcaactgtgtgcagtgtagctgtggacctggcagcctcaatctatattgcacgccaacttcactgtcgggaacctgtcctagtatgcaatgtcctaacagcaacgtgatgcttggcaatgtgagcacccatccaaccggcgctggatgcaacgtctctgcttgcagctacggaggttttgttaatggaactataacagcttcgctaaccggaggtctccaagccagatgcccaggaccacgccagtttcccgcactgacggaaccacctaccacggtgagccacgactcgacgtaccttcctccgttatcagcgcctgggccagcggaagctggtggcgtcatgcctgagccaggctcgccagggccaggcgcctcggtgcaagcagggcccttcacgctcccgaaagtgtctaaggccaatggccccgctggcagcgtttcagcagctccgttggtgggtaaaccacttcaaatcctacccgtcctgntctcctgcctagccttctacttgcagctctgagtgaacccacatcgcgatgagntctttagcatagtatgcttttgaagcaccaagggacatcattgctcgatcactccctctgagttgttgttctagctttgtttcgcgaaatctccccggcaaaactgcgcgcctaaacggcatatctgatgatgtgttcgctgcttttgtacaaaaagacaatggccctgtgtaaagcagtaaagtggtagctattgttctcc

SEQ ID NO: 30333 - protein, 221 aa, Zea mays subsp. mays
  peptide (1)..(221): Ceres Seq. ID no. 13577852
  misc_feature (1)..(221): NCBI GI NO: 18395044 NR Description: expressed protein [Arabidopsis thaliana]
  misc_feature (1)..(198): NCBI GI NO: 30699276 NR Description: expressed protein [Arabidopsis thaliana]
  misc_feature (1)..(113): NCBI GI NO: 30687570 NR Description: expressed protein [Arabidopsis thaliana]
  misc_feature (1)..(198): NCBI GI NO: 25406518 NR Description: unknown protein T5M16.22
  misc_feature (1)..(126): NCBI GI NO: 28207683 NR Description: Erwinia induced protein 1 [Solanum tuberosum]
  misc_feature (1)..(125): NCBI GI NO: 22758281 NR Description: Unknown protein
  misc_feature (1)..(116): NCBI GI NO: 18398317 NR Description: delta-8 sphingolipid desaturase
  misc_feature (1)..(116): NCBI GI NO: 21593990 NR Description: unknown [Arabidopsis thaliana]
  misc_feature (212)..(212): Xaa is any aa, unknown or other
MNVNAMGSPVAAPGDILAIPLPACASAFPKSASDHGLIVANGTYALTASNCVQCSCGPGSLNLYCTPTSLSGTCPSMQCPNSNVMLGNVSTHPTGAGCNVSACSYGGFVNGTITASLTGGLQARCPGPRQFPALTEPPTTVSHDSTYLPPLSAPGPAEAGGVMPEPGSPGPGASVQAGPFTLPKVSKANGPAGSVSAAPLVGKPLQILPVLXSCLAFYLQL

SEQ ID NO: 30334 - protein, 216 aa, Zea mays subsp. mays
  peptide (1)..(216): Ceres Seq. ID no. 13577853
  misc_feature (1)..(216): NCBI GI NO: 18395044 NR Description: expressed protein [Arabidopsis thaliana]
  misc_feature (1)..(193): NCBI GI NO: 30699276 NR Description: expressed protein [Arabidopsis thaliana]
  misc_feature (1)..(108): NCBI GI NO: 30687570 NR Description: expressed protein [Arabidopsis thaliana]
  misc_feature (1)..(193): NCBI GI NO: 25406518 NR Description: unknown protein T5M16.22
  misc_feature (1)..(121): NCBI GI NO: 28207683 NR Description: Erwinia induced protein 1 [Solanum tuberosum]
  misc_feature (1)..(120): NCBI GI NO: 22758281 NR Description: Unknown protein
  misc_feature (1)..(111): NCBI GI NO: 18398317 NR Description: delta-8 sphingolipid desaturase
  misc_feature (1)..(111): NCBI GI NO: 21593990 NR Description: unknown [Arabidopsis thaliana]
  misc_feature (207)..(207): Xaa is any aa, unknown or other
MGSPVAAPGDILAIPLPACASAFPKSASDHGLIVANGTYALTASNCVQCSCGPGSLNLYCTPTSLSGTCPSMQCPNSNVMLGNVSTHPTGAGCNVSACSYGGFVNGTITASLTGGLQARCPGPRQFPALTEPPTTVSHDSTYLPPLSAPGPAEAGGVMPEPGSPGPGASVQAGPFTLPKVSKANGPAGSVSAAPLVGKPLQILPVLXSCLAFYLQL

SEQ ID NO: 30335 - protein, 152 aa, Zea mays subsp. mays
  peptide (1)..(152): Ceres Seq. ID no. 13577854
  misc_feature (47)..(149): Pfam Name: Pfam Description:  Mucin-like glycoprotein
  misc_feature (1)..(79): NCBI GI NO: 18395044 NR Description: expressed protein [Arabidopsis thaliana]
  misc_feature (1)..(52): NCBI GI NO: 30699276 NR Description: expressed protein [Arabidopsis thaliana]
  misc_feature (1)..(79): NCBI GI NO: 30687570 NR Description: expressed protein [Arabidopsis thaliana]
  misc_feature (1)..(52): NCBI GI NO: 25406518 NR Description: unknown protein T5M16.22
  misc_feature (47)..(152): NCBI GI NO: 8650496 NR Description: 163R* [porcine adenovirus 3]
  misc_feature (15)..(152): NCBI GI NO: 15233976 NR Description: leucine-rich repeat extensin family
  misc_feature (53)..(152): NCBI GI NO: 33866833 NR Description: conserved hypothetical protein
  misc_feature (53)..(152): NCBI GI NO: 9630030 NR Description: unknown
  misc_feature (44)..(152): NCBI GI NO: 9630030 NR Description: unknown
  misc_feature (48)..(152): NCBI GI NO: 32699068 NR Description: hypothetical protein FLJ35107 [Homo sapiens]
  misc_feature (41)..(41): Xaa is any aa, unknown or other
  misc_feature (43)..(43): Xaa is any aa, unknown or other
  misc_feature (52)..(52): Xaa is any aa, unknown or other
  misc_feature (64)..(64): Xaa is any aa, unknown or other
  misc_feature (67)..(67): Xaa is any aa, unknown or other
  misc_feature (74)..(74): Xaa is any aa, unknown or other
  misc_feature (78)..(78): Xaa is any aa, unknown or other
MKVSEVAALFSVDPAALLAANALDFGAPGCGARILPMGLFXRXPTRCSCADXSASPSPSATPRXRPXRSPPSPXSSSXGSPPPTRSATRTASPPTTPTRRSTPARSSPSRCHASASTRPTTTSPRCTSPTSCRSGTPCPPSLQATRPPSRMS

SEQ ID NO: 30336 - DNA, 1422 bp, Zea mays subsp. mays
  misc_feature (1)..(1422): Ceres Seq. ID no. 12351428
acgttctctgcacgttcatgttcgtcgtcacctccggattccccgaaatagacaaattcgcccacaccacaccctccgccgctgcacgcctccacgcctcgcccacccataggccatagccggtagatactttcatcaaagatagcacacaggattcgccccgccggttcgcgtgaaaaggagccgacgaatccacctacccgcattcgggctccagcgccaccccgtgccatcgggctgcgtccgctaacgaccgcccgttcgcgcagggcccagggtgtgggagggagcaatggtcgctgggatggaggcggaggaaggggtgatggcgacggacttcttctggtcgtacacggacgagccgcacgcgtcgcgccgccgggagatcctggccaagtacccgcagatcaaggagctcttcggcccggatccgtgggccttcctcaagattggtttggtcgtgtcgcttcagctatggactgctacattcctccgtgacgccagctggctgaagctactgacggtgtcctacttcttcgggtcgtttctaaaccacaacctgttcctggccatccacgagctgagccacaaccttgccttcgcgaccccatccctgaaccgctggctgggcatcttcgctgaacctccccatcggtgtgcccatgtccatcacgttccagaagtaccacctggagcaccaccggttccagggcgtggacggcgtggacatggacatcccgagccaggcggaggcgcgcgccgtgaggagcgccgccggcaagtccgcgtgggtcgtgctccagctcttcttctacgctctgcggccgctgttcctgaagccgaagcctccgggcctgtgggagctgaccaacctggcggcccaggtcggcctcgacgccgggctcgtgtacctgtgcggctggaggtcgctggcctaccttgtcctctccacgttcgtcggcggcggccatgcaccccatggcgggccacttcatctcggagcactacgtgttcagccccgagcaggagacctactcgtactacgggcccctgaacctggtggcgtggcacgtggggtaccacaacgagcaccacgacttccccaggatcccgggcacccggctgcacagggtgaaggagatggcgccggagtactacgacggcctcgagtcgtacaggtcctggagccaggtcatttacatgtacatcatggaccggacggtcggcccgttcagccggatgaagaggaaggcgcagaagaaagactcgtagtcgccgtgtgctcaatttgttttttttttggtcgcgtgtgatgtgaactcatgtttggtgtaagcatttcgattcgtcggaacagcttgtttgtgatatcaatggctcgttttttcgtgctggatccaccgtgcccagcacgagctgtcg

SEQ ID NO: 30337 - protein, 253 aa, Zea mays subsp. mays
  peptide (1)..(253): Ceres Seq. ID no. 12351429
  misc_feature (6)..(119): NCBI GI NO: 20147520 NR Description: putative sphingolipid delta 4 desaturase DES-1
  misc_feature (6)..(119): NCBI GI NO: 15234510 NR Description: putative fatty acid desaturase
  misc_feature (11)..(119): NCBI GI NO: 17136246 NR Description: infertile crescent CG9078-PA
  misc_feature (11)..(119): NCBI GI NO: 4505193 NR Description: sphingolipid delta 4 desaturase
  misc_feature (11)..(119): NCBI GI NO: 34304727 NR Description: fatty acid desaturase [Microtus fortis]
  misc_feature (11)..(119): NCBI GI NO: 38174707 NR Description: Unknown (protein for MGC:75791)
  misc_feature (11)..(116): NCBI GI NO: 16758022 NR Description: degenerative spermatocyte homolog
  misc_feature (11)..(116): NCBI GI NO: 6681175 NR Description: degenerative spermatocyte homolog (Drosophila)
  misc_feature (11)..(116): NCBI GI NO: 20147516 NR Description: sphingolipid delta 4 desaturase protein DES1
  misc_feature (14)..(119): NCBI GI NO: 18583655 NR Description: similar to sphingolipid delta 4 desaturase/C-4hydroxylase protein DES2
MVAGMEAEEGVMATDFFWSYTDEPHASRRREILAKYPQIKELFGPDPWAFLKIGLVVSLQLWTATFLRDASWLKLLTVSYFFGSFLNHNLFLAIHELSHNLAFATPSLNRWLGIFAEPPHRCAHVHHVPEVPPGAPPVPGRGRRGHGHPEPGGGARREERRRQVRVGRAPALLLRSAAAVPEAEASGPVGADQPGGPGRPRRRARVPVRLEVAGLPCPLHVRRRRPCTPWRATSSRSTTCSAPSRRPTRTTGP

SEQ ID NO: 30338 - protein, 249 aa, Zea mays subsp. mays
  peptide (1)..(249): Ceres Seq. ID no. 12351430
  misc_feature (2)..(115): NCBI GI NO: 20147520 NR Description: putative sphingolipid delta 4 desaturase DES-1
  misc_feature (2)..(115): NCBI GI NO: 15234510 NR Description: putative fatty acid desaturase
  misc_feature (7)..(115): NCBI GI NO: 17136246 NR Description: infertile crescent CG9078-PA
  misc_feature (7)..(115): NCBI GI NO: 4505193 NR Description: sphingolipid delta 4 desaturase
  misc_feature (7)..(115): NCBI GI NO: 34304727 NR Description: fatty acid desaturase [Microtus fortis]
  misc_feature (7)..(115): NCBI GI NO: 38174707 NR Description: Unknown (protein for MGC:75791)
  misc_feature (7)..(112): NCBI GI NO: 16758022 NR Description: degenerative spermatocyte homolog
  misc_feature (7)..(112): NCBI GI NO: 6681175 NR Description: degenerative spermatocyte homolog (Drosophila)
  misc_feature (7)..(112): NCBI GI NO: 20147516 NR Description: sphingolipid delta 4 desaturase protein DES1
  misc_feature (10)..(115): NCBI GI NO: 18583655 NR Description: similar to sphingolipid delta 4 desaturase/C-4hydroxylase protein DES2
MEAEEGVMATDFFWSYTDEPHASRRREILAKYPQIKELFGPDPWAFLKIGLVVSLQLWTATFLRDASWLKLLTVSYFFGSFLNHNLFLAIHELSHNLAFATPSLNRWLGIFAEPPHRCAHVHHVPEVPPGAPPVPGRGRRGHGHPEPGGGARREERRRQVRVGRAPALLLRSAAAVPEAEASGPVGADQPGGPGRPRRRARVPVRLEVAGLPCPLHVRRRRPCTPWRATSSRSTTCSAPSRRPTRTTGP

SEQ ID NO: 30339 - protein, 242 aa, Zea mays subsp. mays
  peptide (1)..(242): Ceres Seq. ID no. 12351431
  misc_feature (1)..(108): NCBI GI NO: 20147520 NR Description: putative sphingolipid delta 4 desaturase DES-1
  misc_feature (1)..(108): NCBI GI NO: 15234510 NR Description: putative fatty acid desaturase
  misc_feature (1)..(108): NCBI GI NO: 17136246 NR Description: infertile crescent CG9078-PA
  misc_feature (1)..(108): NCBI GI NO: 4505193 NR Description: sphingolipid delta 4 desaturase
  misc_feature (1)..(108): NCBI GI NO: 34304727 NR Description: fatty acid desaturase [Microtus fortis]
  misc_feature (1)..(108): NCBI GI NO: 38174707 NR Description: Unknown (protein for MGC:75791)
  misc_feature (1)..(105): NCBI GI NO: 16758022 NR Description: degenerative spermatocyte homolog
  misc_feature (1)..(105): NCBI GI NO: 6681175 NR Description: degenerative spermatocyte homolog (Drosophila)
  misc_feature (1)..(105): NCBI GI NO: 20147516 NR Description: sphingolipid delta 4 desaturase protein DES1
  misc_feature (3)..(108): NCBI GI NO: 18583655 NR Description: similar to sphingolipid delta 4 desaturase/C-4hydroxylase protein DES2
MATDFFWSYTDEPHASRRREILAKYPQIKELFGPDPWAFLKIGLVVSLQLWTATFLRDASWLKLLTVSYFFGSFLNHNLFLAIHELSHNLAFATPSLNRWLGIFAEPPHRCAHVHHVPEVPPGAPPVPGRGRRGHGHPEPGGGARREERRRQVRVGRAPALLLRSAAAVPEAEASGPVGADQPGGPGRPRRRARVPVRLEVAGLPCPLHVRRRRPCTPWRATSSRSTTCSAPSRRPTRTTGP

SEQ ID NO: 30340 - DNA, 1162 bp, Zea mays subsp. mays
  misc_feature (1)..(1162): Ceres Seq. ID no. 12344858
aacccgccagaggcccgatcgtcccacactcccaccacgcgacaggaacacaaaaaccctagcacaagcccacacgacgccacccggccccggacggccggccccccccgtcccacgttcccaccgggctccgagcacaaaaccctaaccttctcgctattaaagtcggcgtccagtccgtcggctgctgctacgccaccgaatccgcatctcctcgccggtcgcgcacgggcaaagcagcgatggcagcagcgacggcagttggcggacacgacagggtggaggctgcggcgtcgtccgcgggggctgtgctggccgtcgccgttgcctcgcagaggttgataggcctgctcgctcttgcggttcaaactgtaaattgtgtagcagaaatatataatgaagaccagcaggaaatatacaagttattatatggaagaatcaaatctgaaaatgtccctgaaattaaggctgggtcagatgatgatgatgacgatgaagacgatgaagatgaagatgaagatgaagatgatgatgatgatgatgatgatgatgatgatgatgagggtggtgacgacgacgatgaagacgatgatgatgaagaggggggtgatgaagatgatgatcctgaggctaatggtgaaggggggagtgatgatgacgacgatgataacgatggtgatgatgatggtaacgatgatgacgacgatgaagatgatgacgaagatgaagatgaagaggatgacgacgatgaggaagaacagccaccttccaagaagaagaagtgatttgctctttcatggattcacctcagcttctccatgctgttagttgtgttgtttagatcatggaacagctttgggacaaatgttgcttgtcatggtattatagtgtaggaaaccttgacatctgatgttaaatcgttatcctactttctcctctgcatgtagtcttaattgtgtgttttagatttttactttattggagctgtgattgtgtcatgccattcagttttattctgctgaggccagtgtcatgccattcaatttatttcttttactgaggcctgagcactcaggcctggattgtatgtgatgctatgtctgttactgagaaggttgagccaggccagaactgtatttgatgagttgcagattcttgagct

SEQ ID NO: 30341 - protein, 180 aa, Zea mays subsp. mays
  peptide (1)..(180): Ceres Seq. ID no. 12344859
  misc_feature (51)..(179): Pfam Name: Pfam Description:  Mpp10 protein
  misc_feature (79)..(179): NCBI GI NO: 35210494 NR Description: aspartic acid-rich protein aspolin2
  misc_feature (79)..(179): NCBI GI NO: 23481405 NR Description: hypothetical protein [Plasmodium yoelii yoelii]
  misc_feature (76)..(172): NCBI GI NO: 35210492 NR Description: aspartic acid-rich protein aspolin1
  misc_feature (76)..(172): NCBI GI NO: 35210494 NR Description: aspartic acid-rich protein aspolin2
  misc_feature (69)..(172): NCBI GI NO: 33284873 NR Description: SI:bZ1G18
  misc_feature (79)..(172): NCBI GI NO: 35210492 NR Description: aspartic acid-rich protein aspolin1
  misc_feature (79)..(172): NCBI GI NO: 35210492 NR Description: aspartic acid-rich protein aspolin1
  misc_feature (79)..(172): NCBI GI NO: 35210492 NR Description: aspartic acid-rich protein aspolin1
  misc_feature (79)..(172): NCBI GI NO: 35210492 NR Description: aspartic acid-rich protein aspolin1
  misc_feature (79)..(172): NCBI GI NO: 35210492 NR Description: aspartic acid-rich protein aspolin1
MAAATAVGGHDRVEAAASSAGAVLAVAVASQRLIGLLALAVQTVNCVAEIYNEDQQEIYKLLYGRIKSENVPEIKAGSDDDDDDEDDEDEDEDEDDDDDDDDDDDDEGGDDDDEDDDDEEGGDEDDDPEANGEGGSDDDDDDNDGDDDGNDDDDDEDDDEDEDEEDDDDEEEQPPSKKKK

SEQ ID NO: 30342 - protein, 143 aa, Zea mays subsp. mays
  peptide (1)..(143): Ceres Seq. ID no. 12344860
MKTSRKYTSYYMEESNLKMSLKLRLGQMMMMTMKTMKMKMKMKMMMMMMMMMMMMRVVTTTMKTMMMKRGVMKMMILRLMVKGGVMMTTMITMVMMMVTMMTTMKMMTKMKMKRMTTMRKNSHLPRRRSDLLFHGFTSASPCC

SEQ ID NO: 30343 - protein, 132 aa, Zea mays subsp. mays
  peptide (1)..(132): Ceres Seq. ID no. 12344861
MEESNLKMSLKLRLGQMMMMTMKTMKMKMKMKMMMMMMMMMMMMRVVTTTMKTMMMKRGVMKMMILRLMVKGGVMMTTMITMVMMMVTMMTTMKMMTKMKMKRMTTMRKNSHLPRRRSDLLFHGFTSASPCC

SEQ ID NO: 30344 - DNA, 1703 bp, Zea mays subsp. mays
  misc_feature (1)..(1703): Ceres Seq. ID no. 12347254
aaaggttgtggggtgataaactcgtggactgatgcaaccaggacatgctattttgaatagtgattctcttttgtctgagtcggactgctgatgagcttactgaatctacctcttgtacttgtctatgtgtgcagcggctgagaaagcaagagtaaagagcaatgggctcaccaaagaggctttggtgccaaaggatgccaatggcaatgccatctcagcgcaaactttcaccttccgtgagcttgctaccgccaccaggaacttcaggcccgagtgcttcctgggagagggaggttttggacgtgtttacaagggccgccttgagagcacaggccaggttgttgctataaagcagcttaacagggatgggcttcaaggaaacagagaatttctagtagaagttctcatgctcagcttactacatcatcaaaacctggttaatttgattggttattgtgctgatggagaccagagacttcttgtttatgaatatatgccttctggatcacttgaagatcatttgcacgatctacctcttgataaagaggccttggactggaacaccaggatgaaaattgcagcaggtgctgccaaaggactggagtaccttcatgacaaagctaatccaccagttatttatagggatttcaagtcatcgaacattctgttggatgaaagtttccacccgaagctgtctgattttggacttgctaagttgggtccagttggcgacaaatcacatgtctcaacacgtgtaatgggtacatatggttattgtgcaccagaatatgctatgacagggcagctgacagtgaagtctgacgtgtatagttttggggttgtcttgctagagttgattactggccgtagggctattgacagcaccagaccacatggagaacaaaatcttgtctcatgggcacgtcctctgtttaacgacagaagaaagctccctaagatggctgacccgaggctggaagggcgataccccatgcgtgggctttaccaagcccttgcagtggcttcgatgtgcattcagtcggaggctgcttcacgcccactgattgcagatgtcgtgactgctctgtcctacttggcatcccagccatatgatcccaacgcagctcttgcttcaaggaagccaggcggcgatcagcgaagcaagcctggcgagaacggcagggcagtttccaggaatgatgaaactggaagctccggccacaaaacacctgccaaggaccgagaggactcacctagggacctcccagcgatcctgaacaaggaccttgaccgggagcgcatggtggccgaggcgaagatgtggggcgaccgggagcgcatggtggccgaggctaagatgtggggcgaccgagagcgcatggtggctgaggcgaagatgtggggtgaaaattggcgtgacaagcggcgtgcagagattgggcaggggagcctggattcggttactgggaacagctagggggcaattaagcgaacagaaacgtgacatccacccatgcatttcgtttgtttatttccaggtccattttcgttctggcggcggtcggcaggccccagggttgtacatttctaggtcagggaagagtgggaaagcggcagcgttgtactggacagtgaatgcatgtggttgtacatgtaaattctcagaaaagttttgtgagaatgaaaggacatatttgagttcc

SEQ ID NO: 30345 - protein, 450 aa, Zea mays subsp. mays
  peptide (1)..(450): Ceres Seq. ID no. 12347255
  misc_feature (8)..(265): NCBI GI NO: 21740745 NR Description: OSJNBa0072K14.10
  misc_feature (266)..(449): NCBI GI NO: 21740745 NR Description: OSJNBa0072K14.10
  misc_feature (3)..(405): NCBI GI NO: 15240038 NR Description: protein kinase-like; protein id: At5g13160
  misc_feature (415)..(445): NCBI GI NO: 15240038 NR Description: protein kinase-like; protein id: At5g13160
  misc_feature (17)..(414): NCBI GI NO: 15238886 NR Description: protein kinase -like protein; protein id:At5g18610
  misc_feature (415)..(445): NCBI GI NO: 15238886 NR Description: protein kinase -like protein; protein id:At5g18610
  misc_feature (5)..(445): NCBI GI NO: 34907210 NR Description: putative serine/threonine kinase PBS1 protein
  misc_feature (17)..(333): NCBI GI NO: 34394036 NR Description: putative protein serine/threonine kinase BNK1
  misc_feature (3)..(347): NCBI GI NO: 11259782 NR Description: protein kinase-like - Arabidopsis thaliana
  misc_feature (3)..(347): NCBI GI NO: 30679773 NR Description: protein kinase family [Arabidopsis thaliana]
MCAAAEKARVKSNGLTKEALVPKDANGNAISAQTFTFRELATATRNFRPECFLGEGGFGRVYKGRLESTGQVVAIKQLNRDGLQGNREFLVEVLMLSLLHHQNLVNLIGYCADGDQRLLVYEYMPSGSLEDHLHDLPLDKEALDWNTRMKIAAGAAKGLEYLHDKANPPVIYRDFKSSNILLDESFHPKLSDFGLAKLGPVGDKSHVSTRVMGTYGYCAPEYAMTGQLTVKSDVYSFGVVLLELITGRRAIDSTRPHGEQNLVSWARPLFNDRRKLPKMADPRLEGRYPMRGLYQALAVASMCIQSEAASRPLIADVVTALSYLASQPYDPNAALASRKPGGDQRSKPGENGRAVSRNDETGSSGHKTPAKDREDSPRDLPAILNKDLDRERMVAEAKMWGDRERMVAEAKMWGDRERMVAEAKMWGENWRDKRRAEIGQGSLDSVTGNS

SEQ ID NO: 30346 - protein, 356 aa, Zea mays subsp. mays; identical to SEQ ID NO: 24893
  peptide (1)..(356): Ceres Seq. ID no. 12347256
  misc_feature (1)..(171): NCBI GI NO: 21740745 NR Description: OSJNBa0072K14.10
  misc_feature (172)..(355): NCBI GI NO: 21740745 NR Description: OSJNBa0072K14.10
  misc_feature (1)..(311): NCBI GI NO: 15240038 NR Description: protein kinase-like; protein id: At5g13160
  misc_feature (321)..(351): NCBI GI NO: 15240038 NR Description: protein kinase-like; protein id: At5g13160
  misc_feature (1)..(320): NCBI GI NO: 15238886 NR Description: protein kinase -like protein; protein id:At5g18610
  misc_feature (321)..(351): NCBI GI NO: 15238886 NR Description: protein kinase -like protein; protein id:At5g18610
  misc_feature (1)..(351): NCBI GI NO: 34907210 NR Description: putative serine/threonine kinase PBS1 protein
  misc_feature (1)..(239): NCBI GI NO: 34394036 NR Description: putative protein serine/threonine kinase BNK1
  misc_feature (1)..(253): NCBI GI NO: 11259782 NR Description: protein kinase-like - Arabidopsis thaliana
  misc_feature (1)..(253): NCBI GI NO: 30679773 NR Description: protein kinase family [Arabidopsis thaliana]

SEQ ID NO: 30347 - protein, 327 aa, Zea mays subsp. mays
  peptide (1)..(327): Ceres Seq. ID no. 12347257
  misc_feature (1)..(142): NCBI GI NO: 21740745 NR Description: OSJNBa0072K14.10
  misc_feature (143)..(326): NCBI GI NO: 21740745 NR Description: OSJNBa0072K14.10
  misc_feature (1)..(282): NCBI GI NO: 15240038 NR Description: protein kinase-like; protein id: At5g13160
  misc_feature (292)..(322): NCBI GI NO: 15240038 NR Description: protein kinase-like; protein id: At5g13160
  misc_feature (1)..(291): NCBI GI NO: 15238886 NR Description: protein kinase -like protein; protein id:At5g18610
  misc_feature (292)..(322): NCBI GI NO: 15238886 NR Description: protein kinase -like protein; protein id:At5g18610
  misc_feature (1)..(322): NCBI GI NO: 34907210 NR Description: putative serine/threonine kinase PBS1 protein
  misc_feature (1)..(210): NCBI GI NO: 34394036 NR Description: putative protein serine/threonine kinase BNK1
  misc_feature (1)..(224): NCBI GI NO: 11259782 NR Description: protein kinase-like - Arabidopsis thaliana
  misc_feature (1)..(224): NCBI GI NO: 30679773 NR Description: protein kinase family [Arabidopsis thaliana]
MPSGSLEDHLHDLPLDKEALDWNTRMKIAAGAAKGLEYLHDKANPPVIYRDFKSSNILLDESFHPKLSDFGLAKLGPVGDKSHVSTRVMGTYGYCAPEYAMTGQLTVKSDVYSFGVVLLELITGRRAIDSTRPHGEQNLVSWARPLFNDRRKLPKMADPRLEGRYPMRGLYQALAVASMCIQSEAASRPLIADVVTALSYLASQPYDPNAALASRKPGGDQRSKPGENGRAVSRNDETGSSGHKTPAKDREDSPRDLPAILNKDLDRERMVAEAKMWGDRERMVAEAKMWGDRERMVAEAKMWGENWRDKRRAEIGQGSLDSVTGNS

SEQ ID NO: 30348 - DNA, 1345 bp, Zea mays subsp. mays
  misc_feature (1)..(1345): Ceres Seq. ID no. 12344822
attcacaattccacatgccgctgctcaccagcacgcactgtggccgatgcgccatcgatctcatttcatgcatgccgaattatttccccccggcccctgcacaagtctagagtctagagtctagacactagactgtcttgttcagttctgacttattatctgatcatgatccgttgttattaggtgtgtgtgtgatcatgagtggatagtaagagatgataagcggcaacctcaccaatgaagacctgggggccgggcgcaccaaggccgaggggccgacgaccgcggccggggccgtcgtcgcaaagagtcccgtgctgccgagctcccggcactggccgccgtcgacggagtccaggatcgtgcgcgtgtcgcgggtcttcggcggcaaggaccggcacagcaaggtgaggacggtcaaggggctgcgcgaccggcgcgtgcggctgtccgtgccgacggcgatacagctctacgacctccaggaccggctgggcctcagccagccgagcaaggtggtggactggctgctcgacgccgcgcagcacgagatcgacaagctgcctccgcttcagttcccaccgcaggcagcgcaggacctcgtcgcccatctgccgccgccatccatggtggcgcccttcgcagccgaccgggccgaggccgacggcgacaaacgccactgccacgccggcgtcaaagggctcatgggcctcaacaattccatccgcctcgtcaacgccaccatgccgctggctcacggcttgtactacacgcccggcgagtcttggaccggtaccaatgccgatgatgccgccgcccatgatcatcagacggtggctcacggccactcgcccttctcatctctgctgtctcttgctgctccggggcctcagctcgtcttctactcgtcggaaggcggcggattcaccatgaaagaagaagccaccggttatcagttcccagtacaaaatagcctcgaccactcgcaaggccagctctcactgagctcagctagaagcttccttcgccccggcaaccagggatgattaggtcactgatctctactgctccaagaaggtacgtagaagaataaagcttggtgtagtagtaatcaagtactcatttgaaggttccgtaacggttgtaactgcagttttgagatgctattgtttggtatgatcgagtagagggtctctagcatgcataattgaggttatttttgcaggacatgcaatgcaattcgttgcttcttttttatacaaggaagcaacgacaggtcatatgggtgtgtgtgtttgtttgtattgtaataacaattttaataatccattcttgattttgtgtc

SEQ ID NO: 30349 - protein, 276 aa, Zea mays subsp. mays
  peptide (1)..(276): Ceres Seq. ID no. 12344823
  misc_feature (45)..(163): Pfam Name: Pfam Description:  TCP family transcription factor
  misc_feature (1)..(163): NCBI GI NO: 34909780 NR Description: P0512C01.32
  misc_feature (37)..(122): NCBI GI NO: 15239489 NR Description: DNA binding protein - like; protein id: At5g60970
  misc_feature (1)..(124): NCBI GI NO: 18396089 NR Description: expressed protein; protein id: At3g02150
  misc_feature (1)..(124): NCBI GI NO: 30678498 NR Description: TCP family transcription factor TFPD
  misc_feature (31)..(123): NCBI GI NO: 15241512 NR Description: putative helix-loop-helix DNA binding protein
  misc_feature (41)..(226): NCBI GI NO: 33146716 NR Description: putative transcription factor PCF6
  misc_feature (39)..(119): NCBI GI NO: 18397402 NR Description: expressed protein; protein id: At1g30210
  misc_feature (47)..(119): NCBI GI NO: 25369264 NR Description: probable basic helix-loop-helix DNA binding proteinTCP2
  misc_feature (47)..(119): NCBI GI NO: 7486304 NR Description: hypothetical protein F28J12
  misc_feature (47)..(119): NCBI GI NO: 18415079 NR Description: teosinte branched1 - like protein
MISGNLTNEDLGAGRTKAEGPTTAAGAVVAKSPVLPSSRHWPPSTESRIVRVSRVFGGKDRHSKVRTVKGLRDRRVRLSVPTAIQLYDLQDRLGLSQPSKVVDWLLDAAQHEIDKLPPLQFPPQAAQDLVAHLPPPSMVAPFAADRAEADGDKRHCHAGVKGLMGLNNSIRLVNATMPLAHGLYYTPGESWTGTNADDAAAHDHQTVAHGHSPFSSLLSLAAPGPQLVFYSSEGGGFTMKEEATGYQFPVQNSLDHSQGQLSLSSARSFLRPGNQG

SEQ ID NO: 30350 - protein, 139 aa, Zea mays subsp. mays
  peptide (1)..(139): Ceres Seq. ID no. 12344824
  misc_feature (1)..(26): NCBI GI NO: 34909780 NR Description: P0512C01.32
  misc_feature (1)..(89): NCBI GI NO: 33146716 NR Description: putative transcription factor PCF6
  misc_feature (1)..(11): NCBI GI NO: 21624267 NR Description: transcription factor PCF8
  misc_feature (1)..(11): NCBI GI NO: 20975253 NR Description: transcription factor PCF5
  misc_feature (1)..(38): NCBI GI NO: 20269127 NR Description: TCP1 protein [Lupinus albus]
MVAPFAADRAEADGDKRHCHAGVKGLMGLNNSIRLVNATMPLAHGLYYTPGESWTGTNADDAAAHDHQTVAHGHSPFSSLLSLAAPGPQLVFYSSEGGGFTMKEEATGYQFPVQNSLDHSQGQLSLSSARSFLRPGNQG

SEQ ID NO: 30351 - DNA, 1354 bp, Zea mays subsp. mays
  misc_feature (1)..(1354): Ceres Seq. ID no. 12408354
aaacccgtgtccccctcgtttccgctcttctgctcctcgcgccgccgcagcgacccgacgacaggtaatggcttccgccgcggtgctccggaacgccggatctcgccgcctcttctcctaccccaccctccgtgctgctgcaatctcgggacccgccgtgctaccagatgcgcccgtggcggcgtcggtggcggcccagccgcccccgctggcctggacactctgggcgatgtccatggccaccttcacacgcacgaagccccatgtgaacgtcggcaccattgggcacgtcgaacacggcaaaaccagtctcactgccgctattaccaagggaatatcaactacaaggaattctgcttgcagatgatgctatggtgcctatctcctctcctttgactcctccactaggtgacagtgaagaaactgacaaaaagggggctgtggtaaaacgcctaaaggtccaagccataaaaaaagatatcaaacagagtcccaagaaggtgaatctagtagcaaagctggttcgaggtatgcgtgtagaagatgccctactgcagctgcaagtgactgttaaaagggctgccaaaaccgtttaccaggtgatccattctgctcgggccaatgcatctcacaaccatggattggatcctgataagctcattgttgaggaggcctttgtgggaaagggacttttcctgaagagagtgtcttaccatgccagagggaggtccggcattatggtgcgaccaaggtgcagactgacagtggtggttagagaagctacagctgaggaggaggcaaagatcgccaaactcagggtgagcaactacaagaagctgaccaggaaggagcagcagcttatgcctcacaggctcatcgaggttagcccgaggtggattcgcaagaggaaagcggaggctggtgctacggcgtagtactttatgtatgcagaacctgcattcactgctttgcacatccgaggagcgaacatgccttccctggcacaaatacttgatcctctctcggtgtcgattcacgcaaacgggttacaaagccaggcttgttcgttttgctctcaatccatgtggattggatgtgtttaaatcgcaaacaagtcaaaatcttttataagtttttctaatctcatcaaatccacgtgggatagagaataatcgaacaagaccataggtggattcaactatttggtaatcttggtcgtttggagtctaggaagagaggaaattgctatgtatttcagcgatgtgcattgtagccaactaaaatctcgccaaagcattggatgtgcatgagacacgtaccattgcttctacaatttcatgcaactattggtttc

SEQ ID NO: 30352 - protein, 187 aa, Zea mays subsp. mays
  peptide (1)..(187): Ceres Seq. ID no. 12408355
  misc_feature (32)..(136): Pfam Name: Pfam Description:  Ribosomal protein L22p/L17e
  misc_feature (1)..(187): NCBI GI NO: 34912678 NR Description: P0686E09.8
  misc_feature (3)..(178): NCBI GI NO: 22330190 NR Description: chloroplast 50S ribosomal protein L22, putative
  misc_feature (3)..(178): NCBI GI NO: 25405544 NR Description: hypothetical protein F19K6.5
  misc_feature (3)..(178): NCBI GI NO: 7485901 NR Description: hypothetical protein F20O9
  misc_feature (3)..(178): NCBI GI NO: 18417177 NR Description: Expressed protein; protein id: At4g28360
  misc_feature (3)..(178): NCBI GI NO: 25407603 NR Description: copper-binding protein-like
  misc_feature (21)..(143): NCBI GI NO: 15965114 NR Description: PROBABLE 50S RIBOSOMAL PROTEIN L22
  misc_feature (3)..(140): NCBI GI NO: 23010684 NR Description: hypothetical protein
  misc_feature (28)..(134): NCBI GI NO: 30248423 NR Description: Ribosomal protein L22p / L17e
  misc_feature (28)..(136): NCBI GI NO: 30018385 NR Description: LSU ribosomal protein L22P
MVPISSPLTPPLGDSEETDKKGAVVKRLKVQAIKKDIKQSPKKVNLVAKLVRGMRVEDALLQLQVTVKRAAKTVYQVIHSARANASHNHGLDPDKLIVEEAFVGKGLFLKRVSYHARGRSGIMVRPRCRLTVVVREATAEEEAKIAKLRVSNYKKLTRKEQQLMPHRLIEVSPRWIRKRKAEAGATA

SEQ ID NO: 30353 - protein, 134 aa, Zea mays subsp. mays
  peptide (1)..(134): Ceres Seq. ID no. 12408356
  misc_feature (1)..(83): Pfam Name: Pfam Description:  Ribosomal protein L22p/L17e
  misc_feature (1)..(134): NCBI GI NO: 34912678 NR Description: P0686E09.8
  misc_feature (1)..(125): NCBI GI NO: 22330190 NR Description: chloroplast 50S ribosomal protein L22, putative
  misc_feature (1)..(125): NCBI GI NO: 25405544 NR Description: hypothetical protein F19K6.5
  misc_feature (1)..(125): NCBI GI NO: 7485901 NR Description: hypothetical protein F20O9
  misc_feature (1)..(125): NCBI GI NO: 18417177 NR Description: Expressed protein; protein id: At4g28360
  misc_feature (1)..(125): NCBI GI NO: 25407603 NR Description: copper-binding protein-like
  misc_feature (1)..(90): NCBI GI NO: 15965114 NR Description: PROBABLE 50S RIBOSOMAL PROTEIN L22
  misc_feature (1)..(87): NCBI GI NO: 23010684 NR Description: hypothetical protein
  misc_feature (1)..(81): NCBI GI NO: 30248423 NR Description: Ribosomal protein L22p / L17e
  misc_feature (1)..(83): NCBI GI NO: 30018385 NR Description: LSU ribosomal protein L22P
MRVEDALLQLQVTVKRAAKTVYQVIHSARANASHNHGLDPDKLIVEEAFVGKGLFLKRVSYHARGRSGIMVRPRCRLTVVVREATAEEEAKIAKLRVSNYKKLTRKEQQLMPHRLIEVSPRWIRKRKAEAGATA

SEQ ID NO: 30354 - protein, 131 aa, Zea mays subsp. mays
  peptide (1)..(131): Ceres Seq. ID no. 12408357
KPVSPSFPLFCSSRRRSDPTTGNGFRRGAPERRISPPLLLPHPPCCCNLGTRRATRCARGGVGGGPAAPAGLDTLGDVHGHLHTHEAPCERRHHWARRTRQNQSHCRYYQGNINYKEFCLQMMLWCLSPLL

SEQ ID NO: 30355 - DNA, 1755 bp, Zea mays subsp. mays
  misc_feature (1)..(1755): Ceres Seq. ID no. 12344379
aaaccgaagcagcgacagagctcttccctcccacacgctcggcgctctgtccgccagaaatctcgtcgctggtagaagagaatcgtgccatttgtcatgtcaggaggatcttcaccatcatcaaggcgaaacagctttaattctttgtctaaggacctagaccttccttcagagcaaggttgtctctccattgttgtacttggggcttctggtgaccttgctaagaagaaaacattcccagccctctaccacctctttgagcagggattcatacaatctggagaagtccatatatttggttatgctagatcaaatctttctgatgatgggttaagagaacgcattcgtgggtatctcaaaggagccccagaagatctttcagaatttttgcaactaataaaatatgtcagtggttcctatgatactggagaaggatttgagaaactgaacagggcaatatcagagtatgaggtgtcaaagagttcaggaagctatcgcaggctcttttatttggcattgcctccatctgtctacccttcagtgtgcaaaatgatcagaacatattgcatgaatccatcttctcaccctggatggaccagagtcattgttgagaagccctttggaaaggacttggattccgctgaagaattaagtgcccaacttggggagctattcgaggaacaccaactatacaggatagaccattacctgggaaaagagttggtccaaaacttgcttgttcttcgttttgccaaccgattattcttgcctctttggaaccgcgacaatattgataatatacagattgtattcagggaagactttggtactgaagggcgtggaggatattttgaccaatatggaatcattcgtgatatcattcagaatcatttactgcaggttttctgtttggttgcaatggaaaagcctgtctcccttaagcctgagcacatcagagatgagaaagtcaaggttctgcaatctgtgaaccctattaagcctgaagaggtagtccttgggcaatacgatggctacaaggatgaccctacagtgccagatgactcgaataccccaacttttgcatctgttgttcttcgggtacacaatgaaagatgggaaggtgttcctttcattcttaaagctggtaaagcattgagttcaaagaaagcagaagttcgggtgcaattcaaggatgtccctggtgacatttttagaagcaagaagcaaggaagaaatgagtttgttatacgcctccaaccatcagaagccatgtacatgaaactaactgttaagaagcctgggttagaaatggctactgaacaaagtgaacttgatctgtcatatgggatgcggtaccaaaatgtcaaaattcctgaggcatatgaacgccttatcttggatacaataagaggtgatcagcagcactttgttcgcagagatgagctacaggctgcttggaagatcttcactcctttgctgcatgacattgacgacggcaagctgaaggccctcccgtatgaacctggcagccggggacccaaggaagccgacgaattgagcgcgagagttggatacgtgcagacccacggttacatatgggtaccgccgacccttgcatagaagagaatacgaattgtttgtacctaggaagatccgagtgtcctacaataaagctgtgcgtatatgctcattttcgctatatcgcctgccgttgtaataatgttgtgctggatatgaaataaaattgcgtgttcc

SEQ ID NO: 30356 - protein, 507 aa, Zea mays subsp. mays
  peptide (1)..(507): Ceres Seq. ID no. 12344380
  misc_feature (214)..(498): Pfam Name: Pfam Description:  Glucose-6-phosphate dehydrogenase
  misc_feature (1)..(507): NCBI GI NO: 19071787 NR Description: glucose-6-phosphate dehydrogenase [Oryza sativa]
  misc_feature (1)..(507): NCBI GI NO: 8918502 NR Description: glucose-6-phosphate dehydrogenase
  misc_feature (1)..(507): NCBI GI NO: 8918504 NR Description: glucose-6-phosphate dehydrogenase
  misc_feature (1)..(507): NCBI GI NO: 8918506 NR Description: glucose-6-phosphate dehydrogenase
  misc_feature (10)..(506): NCBI GI NO: 585165 NR Description: Glucose-6-phosphate 1-dehydrogenase
  misc_feature (15)..(506): NCBI GI NO: 3021508 NR Description: glucose-6-phosphate dehydrogenase
  misc_feature (8)..(506): NCBI GI NO: 3021510 NR Description: glucose-6-phosphate dehydrogenase
  misc_feature (1)..(506): NCBI GI NO: 15237485 NR Description: glucose-6-phosphate dehydrogenase
  misc_feature (1)..(506): NCBI GI NO: 25283727 NR Description: glucose-6-phosphate 1-dehydrogenase (EC 1.1.1.49)
  misc_feature (10)..(501): NCBI GI NO: 31205007 NR Description: ENSANGP00000018551 [Anopheles gambiae]
MSGGSSPSSRRNSFNSLSKDLDLPSEQGCLSIVVLGASGDLAKKKTFPALYHLFEQGFIQSGEVHIFGYARSNLSDDGLRERIRGYLKGAPEDLSEFLQLIKYVSGSYDTGEGFEKLNRAISEYEVSKSSGSYRRLFYLALPPSVYPSVCKMIRTYCMNPSSHPGWTRVIVEKPFGKDLDSAEELSAQLGELFEEHQLYRIDHYLGKELVQNLLVLRFANRLFLPLWNRDNIDNIQIVFREDFGTEGRGGYFDQYGIIRDIIQNHLLQVFCLVAMEKPVSLKPEHIRDEKVKVLQSVNPIKPEEVVLGQYDGYKDDPTVPDDSNTPTFASVVLRVHNERWEGVPFILKAGKALSSKKAEVRVQFKDVPGDIFRSKKQGRNEFVIRLQPSEAMYMKLTVKKPGLEMATEQSELDLSYGMRYQNVKIPEAYERLILDTIRGDQQHFVRRDELQAAWKIFTPLLHDIDDGKLKALPYEPGSRGPKEADELSARVGYVQTHGYIWVPPTLA

SEQ ID NO: 30357 - protein, 356 aa, Zea mays subsp. mays
  peptide (1)..(356): Ceres Seq. ID no. 12344381
  misc_feature (63)..(347): Pfam Name: Pfam Description:  Glucose-6-phosphate dehydrogenase
  misc_feature (1)..(356): NCBI GI NO: 19071787 NR Description: glucose-6-phosphate dehydrogenase [Oryza sativa]
  misc_feature (1)..(356): NCBI GI NO: 8918502 NR Description: glucose-6-phosphate dehydrogenase
  misc_feature (1)..(356): NCBI GI NO: 8918504 NR Description: glucose-6-phosphate dehydrogenase
  misc_feature (1)..(356): NCBI GI NO: 8918506 NR Description: glucose-6-phosphate dehydrogenase
  misc_feature (1)..(355): NCBI GI NO: 585165 NR Description: Glucose-6-phosphate 1-dehydrogenase
  misc_feature (1)..(355): NCBI GI NO: 3021508 NR Description: glucose-6-phosphate dehydrogenase
  misc_feature (1)..(355): NCBI GI NO: 3021510 NR Description: glucose-6-phosphate dehydrogenase
  misc_feature (1)..(355): NCBI GI NO: 15237485 NR Description: glucose-6-phosphate dehydrogenase
  misc_feature (1)..(355): NCBI GI NO: 25283727 NR Description: glucose-6-phosphate 1-dehydrogenase (EC 1.1.1.49)
  misc_feature (1)..(350): NCBI GI NO: 31205007 NR Description: ENSANGP00000018551 [Anopheles gambiae]
MIRTYCMNPSSHPGWTRVIVEKPFGKDLDSAEELSAQLGELFEEHQLYRIDHYLGKELVQNLLVLRFANRLFLPLWNRDNIDNIQIVFREDFGTEGRGGYFDQYGIIRDIIQNHLLQVFCLVAMEKPVSLKPEHIRDEKVKVLQSVNPIKPEEVVLGQYDGYKDDPTVPDDSNTPTFASVVLRVHNERWEGVPFILKAGKALSSKKAEVRVQFKDVPGDIFRSKKQGRNEFVIRLQPSEAMYMKLTVKKPGLEMATEQSELDLSYGMRYQNVKIPEAYERLILDTIRGDQQHFVRRDELQAAWKIFTPLLHDIDDGKLKALPYEPGSRGPKEADELSARVGYVQTHGYIWVPPTLA

SEQ ID NO: 30358 - protein, 350 aa, Zea mays subsp. mays
  peptide (1)..(350): Ceres Seq. ID no. 12344382
  misc_feature (57)..(341): Pfam Name: Pfam Description:  Glucose-6-phosphate dehydrogenase
  misc_feature (1)..(350): NCBI GI NO: 19071787 NR Description: glucose-6-phosphate dehydrogenase [Oryza sativa]
  misc_feature (1)..(350): NCBI GI NO: 8918502 NR Description: glucose-6-phosphate dehydrogenase
  misc_feature (1)..(350): NCBI GI NO: 8918504 NR Description: glucose-6-phosphate dehydrogenase
  misc_feature (1)..(350): NCBI GI NO: 8918506 NR Description: glucose-6-phosphate dehydrogenase
  misc_feature (1)..(349): NCBI GI NO: 585165 NR Description: Glucose-6-phosphate 1-dehydrogenase
  misc_feature (1)..(349): NCBI GI NO: 3021508 NR Description: glucose-6-phosphate dehydrogenase
  misc_feature (1)..(349): NCBI GI NO: 3021510 NR Description: glucose-6-phosphate dehydrogenase
  misc_feature (1)..(349): NCBI GI NO: 15237485 NR Description: glucose-6-phosphate dehydrogenase
  misc_feature (1)..(349): NCBI GI NO: 25283727 NR Description: glucose-6-phosphate 1-dehydrogenase (EC 1.1.1.49)
  misc_feature (1)..(344): NCBI GI NO: 31205007 NR Description: ENSANGP00000018551 [Anopheles gambiae]
MNPSSHPGWTRVIVEKPFGKDLDSAEELSAQLGELFEEHQLYRIDHYLGKELVQNLLVLRFANRLFLPLWNRDNIDNIQIVFREDFGTEGRGGYFDQYGIIRDIIQNHLLQVFCLVAMEKPVSLKPEHIRDEKVKVLQSVNPIKPEEVVLGQYDGYKDDPTVPDDSNTPTFASVVLRVHNERWEGVPFILKAGKALSSKKAEVRVQFKDVPGDIFRSKKQGRNEFVIRLQPSEAMYMKLTVKKPGLEMATEQSELDLSYGMRYQNVKIPEAYERLILDTIRGDQQHFVRRDELQAAWKIFTPLLHDIDDGKLKALPYEPGSRGPKEADELSARVGYVQTHGYIWVPPTLA

SEQ ID NO: 30359 - DNA, 1429 bp, Zea mays subsp. mays
  misc_feature (1)..(1429): Ceres Seq. ID no. 12407159
aaaaatttttccttaaaactgcctcctcagttagaaaaagccacgcaactttgcaagtcacgacctcatggaagaggtgagccaccccgtgacggattgacaccaagtcagtctcactcaagtaaagtggacgccaagtcagtcacactcacaccaccgtagcacacaccagtacaccacacactcgcctttccgatcccatccctctccagccaccttcctccgctcgccgtgcttctgcttcctccgccaccaccgccggcatggctgcgcgctgcccctacttcgccgtcgaggagtcctcccgcggcatccgctcgggggagtccccggccgcggcgctccgccggatcctcgcgacgcctggtgcgcaccaggcgccctgctgctacgacgcgctcggcgcgcgcctcgtcgagcgcgcggggtttccgatcgggttcatgggcggtttctgtgtttctgccgcgcgacttggcttgcctgatgttggcctcatttcctatggagaaatggtagatcaagggcgtctcatcaatgaagctgtttcaatcccagtgattggtgatggagacaatggttacggaaactctatgaatatcaagagaaccataaaaggatatatcaatgctggttttgctggaattatgcttgaggatcaggtggcacctaaagcatgtggacatactgaaggaaggaaagtcatatcaagggaggaagctgtcatgcacataaaagctgctgtagatgctaggaaagagagtggctctgacattgttattgtagcaaggacagattctcgccaagctatttctcatgatgaagcattatggagggtgaaagcatttgctgatgctggagcagatgttctatttattgatgcccttgcttcagtagaagagatgaaagcattttgtgcggttgcaccagaagttccaaagatggcaaacatgttagaaggtggtggtaaaactcccatattgagccctgctgaacttgaggaaattggtttcaggcttgtagtatatcctttatccttagttggggtatcaatgcgtgcaatgcaggatgctctagttgcgataaaagacggcggtgtacctccacctagcgtcctgccatcttttcaggagatcaaggatacattgggtttcaaccgctattataaagaagagaaacaataccaagtggacaagtgaaggaagcagctgaagtctgatcctgtggattcagtcggatcgtggccatggcttaatttccaccggacatgctgggcttccaccggacatgatgcagaccaatcgtatttatgttgagttgtaatcgaacgctgcgtagcgcagtatcccgaagaacatatatatggggtcttctcttccgtttctgctctgctgtggtttcaataatcccgaaactgtgattccagttt

SEQ ID NO: 30360 - protein, 311 aa, Zea mays subsp. mays
  peptide (1)..(311): Ceres Seq. ID no. 12407160
  misc_feature (24)..(204): Pfam Name: Pfam Description:  Isocitrate lyase family
  misc_feature (1)..(307): NCBI GI NO: 38347227 NR Description: OSJNBa0044M19.9
  misc_feature (1)..(309): NCBI GI NO: 32490267 NR Description: OSJNBb0116K07.9
  misc_feature (10)..(311): NCBI GI NO: 30689278 NR Description: carboxyphosphonoenolpyruvate mutase -related
  misc_feature (10)..(311): NCBI GI NO: 30689282 NR Description: carboxyphosphonoenolpyruvate mutase -related
  misc_feature (10)..(307): NCBI GI NO: 25408843 NR Description: probable carboxyphosphonoenolpyruvate mutase
  misc_feature (22)..(310): NCBI GI NO: 23043034 NR Description: hypothetical protein
  misc_feature (40)..(301): NCBI GI NO: 40747280 NR Description: hypothetical protein AN9369.2
  misc_feature (12)..(308): NCBI GI NO: 40739091 NR Description: hypothetical protein AN6882.2
  misc_feature (22)..(308): NCBI GI NO: 17229355 NR Description: carboxyphosphonoenolpyruvate phosphonomutase
  misc_feature (16)..(259): NCBI GI NO: 33599708 NR Description: carboxyvinyl-carboxyphosphonate phosphorylmutase
MAARCPYFAVEESSRGIRSGESPAAALRRILATPGAHQAPCCYDALGARLVERAGFPIGFMGGFCVSAARLGLPDVGLISYGEMVDQGRLINEAVSIPVIGDGDNGYGNSMNIKRTIKGYINAGFAGIMLEDQVAPKACGHTEGRKVISREEAVMHIKAAVDARKESGSDIVIVARTDSRQAISHDEALWRVKAFADAGADVLFIDALASVEEMKAFCAVAPEVPKMANMLEGGGKTPILSPAELEEIGFRLVVYPLSLVGVSMRAMQDALVAIKDGGVPPPSVLPSFQEIKDTLGFNRYYKEEKQYQVDK

SEQ ID NO: 30361 - protein, 251 aa, Zea mays subsp. mays
  peptide (1)..(251): Ceres Seq. ID no. 12407161
  misc_feature (1)..(144): Pfam Name: Pfam Description:  Isocitrate lyase family
  misc_feature (1)..(247): NCBI GI NO: 38347227 NR Description: OSJNBa0044M19.9
  misc_feature (1)..(249): NCBI GI NO: 32490267 NR Description: OSJNBb0116K07.9
  misc_feature (1)..(251): NCBI GI NO: 30689278 NR Description: carboxyphosphonoenolpyruvate mutase -related
  misc_feature (1)..(251): NCBI GI NO: 30689282 NR Description: carboxyphosphonoenolpyruvate mutase -related
  misc_feature (1)..(247): NCBI GI NO: 25408843 NR Description: probable carboxyphosphonoenolpyruvate mutase
  misc_feature (1)..(250): NCBI GI NO: 23043034 NR Description: hypothetical protein
  misc_feature (1)..(241): NCBI GI NO: 40747280 NR Description: hypothetical protein AN9369.2
  misc_feature (1)..(248): NCBI GI NO: 40739091 NR Description: hypothetical protein AN6882.2
  misc_feature (1)..(248): NCBI GI NO: 17229355 NR Description: carboxyphosphonoenolpyruvate phosphonomutase
  misc_feature (1)..(199): NCBI GI NO: 33599708 NR Description: carboxyvinyl-carboxyphosphonate phosphorylmutase
MGGFCVSAARLGLPDVGLISYGEMVDQGRLINEAVSIPVIGDGDNGYGNSMNIKRTIKGYINAGFAGIMLEDQVAPKACGHTEGRKVISREEAVMHIKAAVDARKESGSDIVIVARTDSRQAISHDEALWRVKAFADAGADVLFIDALASVEEMKAFCAVAPEVPKMANMLEGGGKTPILSPAELEEIGFRLVVYPLSLVGVSMRAMQDALVAIKDGGVPPPSVLPSFQEIKDTLGFNRYYKEEKQYQVDK

SEQ ID NO: 30362 - protein, 228 aa, Zea mays subsp. mays
  peptide (1)..(228): Ceres Seq. ID no. 12407162
  misc_feature (1)..(121): Pfam Name: Pfam Description:  Isocitrate lyase family
  misc_feature (1)..(224): NCBI GI NO: 38347227 NR Description: OSJNBa0044M19.9
  misc_feature (1)..(226): NCBI GI NO: 32490267 NR Description: OSJNBb0116K07.9
  misc_feature (1)..(228): NCBI GI NO: 30689278 NR Description: carboxyphosphonoenolpyruvate mutase -related
  misc_feature (1)..(228): NCBI GI NO: 30689282 NR Description: carboxyphosphonoenolpyruvate mutase -related
  misc_feature (1)..(224): NCBI GI NO: 25408843 NR Description: probable carboxyphosphonoenolpyruvate mutase
  misc_feature (1)..(227): NCBI GI NO: 23043034 NR Description: hypothetical protein
  misc_feature (1)..(218): NCBI GI NO: 40747280 NR Description: hypothetical protein AN9369.2
  misc_feature (1)..(225): NCBI GI NO: 40739091 NR Description: hypothetical protein AN6882.2
  misc_feature (1)..(225): NCBI GI NO: 17229355 NR Description: carboxyphosphonoenolpyruvate phosphonomutase
  misc_feature (1)..(176): NCBI GI NO: 33599708 NR Description: carboxyvinyl-carboxyphosphonate phosphorylmutase
MVDQGRLINEAVSIPVIGDGDNGYGNSMNIKRTIKGYINAGFAGIMLEDQVAPKACGHTEGRKVISREEAVMHIKAAVDARKESGSDIVIVARTDSRQAISHDEALWRVKAFADAGADVLFIDALASVEEMKAFCAVAPEVPKMANMLEGGGKTPILSPAELEEIGFRLVVYPLSLVGVSMRAMQDALVAIKDGGVPPPSVLPSFQEIKDTLGFNRYYKEEKQYQVDK

SEQ ID NO: 30363 - DNA, 970 bp, Zea mays subsp. mays
  misc_feature (1)..(970): Ceres Seq. ID no. 12391403
gtcgaaaccacagccacacaggcagccggtgctgggcctcggcactcggcagccatggttcgccttgcgaagttctatctcgtctgctacaactccctccaatcgctcggatggttcgtcgccctcctccgcctcgtgccctgcctcgtccctcccttccctgtccactccgcgtacgtggtcgccggcgacctcatctgtttcctgcagacatgtgcgatccttgaaacggtccacgctgccatcggattggtgccgaccgcgccacttcttgctttcttgcaatggggagggaggatccacttcatcctggctgttgtccggcaaattcgcgaggttcagagcagtccatctgtgttcataacatttatagcttggagcatatctgaggtcatccgttactctcactatgctctgagtaccttaaaagtttgtccagcatggctgacttatctcaggtacactgcttttatcccgctgtatccaatcggggttggtccaggagaaatgtggacaatgtaccaagccctcccatttgtgaagaagagggacctttactcaggtttcttcgagaagttctccatgagctaccgttcctttctagtgggtgtgctggtgctctacccgttcctgtggctgaagctgtaccagcacgtgttcaagcagcgcaagtccaagctggggaaggggagcaggaagaaacgggcctgagaaaatctggctctgctcagctcagctcagctcagctgccacttgttgctgtcatgtgaaacgctaacgggtcattgtggatttttgttttggaagaaaatctttgagttgttgtctgatgcgacggtgaaggttttgctgaatcgggcagtaattggattacgctttgggttctctgtttgtttcaattgctctgcgttttatgtctgtattaacatacatcaagcatatataatagtcatgttgctgctgcgagtct

SEQ ID NO: 30364 - protein, 236 aa, Zea mays subsp. mays
  peptide (1)..(236): Ceres Seq. ID no. 12391404
  misc_feature (70)..(229): Pfam Name: Pfam Description:  Protein tyrosine phosphatase-like protein
  misc_feature (19)..(232): NCBI GI NO: 26453242 NR Description: unknown protein [Arabidopsis thaliana]
  misc_feature (3)..(228): NCBI GI NO: 27882121 NR Description: Similar to RIKEN cDNA 6330408J20 gene
  misc_feature (11)..(235): NCBI GI NO: 34869216 NR Description: similar to protein tyrosine phosphatase-likeprotein PTPLB
  misc_feature (11)..(235): NCBI GI NO: 20892371 NR Description: similar to protein tyrosine phosphatase-likeprotein PTPLB
  misc_feature (11)..(235): NCBI GI NO: 12963741 NR Description: protein tyrosine phosphatase-like protein PTPLB
  misc_feature (92)..(235): NCBI GI NO: 37550654 NR Description: similar to protein tyrosine phosphatase-likeprotein PTPLB
  misc_feature (11)..(78): NCBI GI NO: 37550654 NR Description: similar to protein tyrosine phosphatase-likeprotein PTPLB
  misc_feature (22)..(227): NCBI GI NO: 6851207 NR Description: protein tyrosine phosphatase-like protein PTPLA
  misc_feature (11)..(227): NCBI GI NO: 7305421 NR Description: protein tyrosine phosphatase-like
  misc_feature (11)..(227): NCBI GI NO: 12845340 NR Description: unnamed protein product [Mus musculus]
VETTATQAAGAGPRHSAAMVRLAKFYLVCYNSLQSLGWFVALLRLVPCLVPPFPVHSAYVVAGDLICFLQTCAILETVHAAIGLVPTAPLLAFLQWGGRIHFILAVVRQIREVQSSPSVFITFIAWSISEVIRYSHYALSTLKVCPAWLTYLRYTAFIPLYPIGVGPGEMWTMYQALPFVKKRDLYSGFFEKFSMSYRSFLVGVLVLYPFLWLKLYQHVFKQRKSKLGKGSRKKRA

SEQ ID NO: 30365 - protein, 218 aa, Zea mays subsp. mays
  peptide (1)..(218): Ceres Seq. ID no. 12391405
  misc_feature (52)..(211): Pfam Name: Pfam Description:  Protein tyrosine phosphatase-like protein
  misc_feature (1)..(214): NCBI GI NO: 26453242 NR Description: unknown protein [Arabidopsis thaliana]
  misc_feature (1)..(210): NCBI GI NO: 27882121 NR Description: Similar to RIKEN cDNA 6330408J20 gene
  misc_feature (1)..(217): NCBI GI NO: 34869216 NR Description: similar to protein tyrosine phosphatase-likeprotein PTPLB
  misc_feature (1)..(217): NCBI GI NO: 20892371 NR Description: similar to protein tyrosine phosphatase-likeprotein PTPLB
  misc_feature (1)..(217): NCBI GI NO: 12963741 NR Description: protein tyrosine phosphatase-like protein PTPLB
  misc_feature (74)..(217): NCBI GI NO: 37550654 NR Description: similar to protein tyrosine phosphatase-likeprotein PTPLB
  misc_feature (1)..(60): NCBI GI NO: 37550654 NR Description: similar to protein tyrosine phosphatase-likeprotein PTPLB
  misc_feature (4)..(209): NCBI GI NO: 6851207 NR Description: protein tyrosine phosphatase-like protein PTPLA
  misc_feature (1)..(209): NCBI GI NO: 7305421 NR Description: protein tyrosine phosphatase-like
  misc_feature (1)..(209): NCBI GI NO: 12845340 NR Description: unnamed protein product [Mus musculus]
MVRLAKFYLVCYNSLQSLGWFVALLRLVPCLVPPFPVHSAYVVAGDLICFLQTCAILETVHAAIGLVPTAPLLAFLQWGGRIHFILAVVRQIREVQSSPSVFITFIAWSISEVIRYSHYALSTLKVCPAWLTYLRYTAFIPLYPIGVGPGEMWTMYQALPFVKKRDLYSGFFEKFSMSYRSFLVGVLVLYPFLWLKLYQHVFKQRKSKLGKGSRKKRA

SEQ ID NO: 30366 - protein, 120 aa, Zea mays subsp. mays
  peptide (1)..(120): Ceres Seq. ID no. 12391406
SKPQPHRQPVLGLGTRQPWFALRSSISSATTPSNRSDGSSPSSASCPASSLPSLSTPRTWSPATSSVSCRHVRSLKRSTLPSDWCRPRHFLLSCNGEGGSTSSWLLSGKFARFRAVHLCS

SEQ ID NO: 30367 - DNA, 1659 bp, Zea mays subsp. mays
  misc_feature (1)..(1659): Ceres Seq. ID no. 12412308
atttccgttggttcttgacctcagctcgctcctctcactcacctctatatatgccccgccctcttgcccgtgttggtggtaccccgcgtcgccctccgtcgtctcagcgtatgttgtgcatgtgaagagagagaggaagagggtgacgagcgagaaaaaagctagtagagtgatagcttgacaagacgcattgaagcgaaggccacgcataccaaagcaacctcaccatcgctcgcaagctactcgatcaaggacattattgtcgcaacgagctagcaagaataatccgcgttagtttcgcgaaggtggtacatatggctcgcatcctcgtgctggctctgctcaccatcgcgagcctcctcctgccgccggtcgtcgcgagccagcaggcggcggccaagtgcgagtacagaaagcactccggccaccggtacaggcacccggtgggcgtgcggaagatcgtggtggacgcgggcggcgccggcgacttcgtctccatccagcgcgccgtcgactccgtgccggagggcaacaccgtgcgcgtcatcgtgcagatcaacgccggcacgtacatagagaaggtggtagtgccggcgtcgaagccgtacgtcacgttccagggcgccgggcgcgacgtgacggtggtggagtggcacgaccgggccagcgaccgcggccccgacgggcagccgctccgcacctacaacaccgcctcagtaaccatcctagctaactatttcaacgctaagaacatcagcttcaagaacacagctccggcgccgatgcccggcacgcaaggagggcaggcggtggcgttccgcatctccggcgacaaggccttcttcttcggctgcgggttctacggcgcgcaggacacgctgtgcgacgacgccggccggcactacttccgcgactgctacatcgagggctccatcgacttcgtcttcggcaacgcccgctccctctacaaggactgcgagctgcactcgacggcgcagcggttcggctcggtggcggcgcacgggctgcgcgacccgtgcgagcgcaccggcttcgccttcgtcaactgccgggtgaccggcacggggcggctctacgtggggcgggccatggggcagtactcgcgcaatcgtctacgcctacacctacttcgacagcgtcatcgcgccaggcggctgggatgactgggaccacaccagcaacaagagcatgacggcgttcttcgggatgtacaggaactggggccccggcgtcgacgccgtgcacggcgtctcctgggcgcgagagctcgactacttcgccgcccgccctttcctcggcaagagcttcgtcaacggataccactggctcacacctgatgtctgaaaaacacacaaacacacgcgcgagagtcaggagacacatcgattacagcaaaccagattaatttattcgtacagcataaagacagaataagacaccatttacaagccactgaatatgtatagtgatccactggcgcagaagtcagattcaagattcatttcgtctataaaaaatagtttccaaaacttcgtcatgtgcagtgtaaactagacagtgagcagtgagtctgttatgtctctgcataggagaccttggatgtgcaattcaagttgttccattatgtttgaatctgcg

SEQ ID NO: 30368 - protein, 289 aa, Zea mays subsp. mays
  peptide (1)..(289): Ceres Seq. ID no. 12412309
  misc_feature (49)..(271): Pfam Name: Pfam Description:  Pectinesterase
  misc_feature (5)..(271): NCBI GI NO: 38345478 NR Description: OSJNBa0010H02.16
  misc_feature (34)..(271): NCBI GI NO: 15238111 NR Description: pectinesterase family; protein id: At5g47500
  misc_feature (34)..(271): NCBI GI NO: 9758778 NR Description: pectin methylesterase-like [Arabidopsis thaliana]
  misc_feature (49)..(271): NCBI GI NO: 34909402 NR Description: putative pectin methylesterase
  misc_feature (57)..(271): NCBI GI NO: 15241163 NR Description: pectinesterase family; protein id: At5g19730
  misc_feature (47)..(271): NCBI GI NO: 15240544 NR Description: pectinesterase family; protein id: At5g55590.1
  misc_feature (39)..(270): NCBI GI NO: 15228023 NR Description: pectinesterase family; protein id: At2g36710.1
  misc_feature (39)..(270): NCBI GI NO: 27754550 NR Description: putative pectinesterase family protein
  misc_feature (38)..(271): NCBI GI NO: 15228022 NR Description: pectinesterase family; protein id: At2g36700.1
  misc_feature (49)..(271): NCBI GI NO: 15226598 NR Description: pectinesterase family; protein id: At2g21610.1
MARILVLALLTIASLLLPPVVASQQAAAKCEYRKHSGHRYRHPVGVRKIVVDAGGAGDFVSIQRAVDSVPEGNTVRVIVQINAGTYIEKVVVPASKPYVTFQGAGRDVTVVEWHDRASDRGPDGQPLRTYNTASVTILANYFNAKNISFKNTAPAPMPGTQGGQAVAFRISGDKAFFFGCGFYGAQDTLCDDAGRHYFRDCYIEGSIDFVFGNARSLYKDCELHSTAQRFGSVAAHGLRDPCERTGFAFVNCRVTGTGRLYVGRAMGQYSRNRLRLHLLRQRHRARRLG

SEQ ID NO: 30369 - DNA, 1215 bp, Zea mays subsp. mays
  misc_feature (1)..(1215): Ceres Seq. ID no. 13665996
accggccaccgcgaatccagagccccacgccccgtccgaaccccagagcagagcaaagcctcctcgacctccctgtccccagccttccccgatggcccgcacgaagcagacggcgcgcaagtcgacgggcgggccatcggggagggctggtcagggattcaaacagaggcttctcagcatatgggggttctacaagcatcatcaatgggctggaatggtgctcctgtacttgctgccactcctgttgtcaagaaagtcatgaggctggatgttccagtagacaagtatcctaactacaactttgttggtcgtttattggggccgcgaggtaactccctgaaaagggttgaagcttcaacccaatgtagagtttacattcgaggacggggttctgtgaaagactctgttaaggaagacaagctgagggataaacctgggtatgaacaccttaatgaacaactgcatgtgcttgtggaagcagagtttccagcagatatggttgatgtgcgtcttaatcaagctgtgtccatcctagaggatcttcttaaaccaattgacgagtccatggactactacaagaagcagcagctgagggagctggcgattctaaatggcacactgagagaggaaagcccaagccctcacctcagccctagtgtgtcccccttcaactccaccgggatgaagcgcgcaaaaacagggcggtaatctctgttccgaaagccttcatccccccaaatcaatcatggttcaatgcccaattattacacaagctactgctggagatgattggtgatgcatatgctgggatcatcagtgatggcctatgcctgtcatgatctgtgcgctttatcgacaagcacacaaacatgcctgtgctgtgcttggacgaatggtctccgggcttgttgtttgactctactattatttattctttgtgcttctgactgcctaagtattattaacattattggtttgggaaagtgttaacaaggcccggttggccagtcgctgtagaaagcttggggagaggaggggggggtgtcaatgtgacggacaataataaggtttcgttggtgtacctgagatagttgtaatatgtcatgtgctgatgcttttgtgtggtgctagtacaagacaaccagacagctatagttgaggcaatgattattttgcgttcataaaatgcatgtcggtgtgctttcttcatggttc

SEQ ID NO: 30370 - protein, 235 aa, Zea mays subsp. mays
  peptide (1)..(235): Ceres Seq. ID no. 13665997
  misc_feature (88)..(142): Pfam Name: Pfam Description:  KH domain
  misc_feature (33)..(235): NCBI GI NO: 34907446 NR Description: P0434C04.5
  misc_feature (33)..(233): NCBI GI NO: 16930473 NR Description: At1g09660/F21M12_5 [Arabidopsis thaliana]
  misc_feature (33)..(233): NCBI GI NO: 22329449 NR Description: KH domain quaking protein, putative
  misc_feature (39)..(235): NCBI GI NO: 12322716 NR Description: unknown protein; 28504-31237
  misc_feature (39)..(235): NCBI GI NO: 30680583 NR Description: KH domain protein [Arabidopsis thaliana]
  misc_feature (39)..(235): NCBI GI NO: 40645104 NR Description: hypothetical protein [Nicotiana tabacum]
  misc_feature (39)..(234): NCBI GI NO: 15224909 NR Description: KH domain protein [Arabidopsis thaliana]
  misc_feature (43)..(232): NCBI GI NO: 34900448 NR Description: contains EST C27129
  misc_feature (33)..(233): NCBI GI NO: 15236738 NR Description: KH domain protein [Arabidopsis thaliana]
  misc_feature (33)..(233): NCBI GI NO: 20268733 NR Description: unknown protein [Arabidopsis thaliana]
TGHRESRAPRPVRTPEQSKASSTSLSPAFPDGPHEADGAQVDGRAIGEGWSGIQTEASQHMGVLQASSMGWNGAPVLAATPVVKKVMRLDVPVDKYPNYNFVGRLLGPRGNSLKRVEASTQCRVYIRGRGSVKDSVKEDKLRDKPGYEHLNEQLHVLVEAEFPADMVDVRLNQAVSILEDLLKPIDESMDYYKKQQLRELAILNGTLREESPSPHLSPSVSPFNSTGMKRAKTGR

SEQ ID NO: 30371 - protein, 175 aa, Zea mays subsp. mays
  peptide (1)..(175): Ceres Seq. ID no. 13665998
  misc_feature (28)..(82): Pfam Name: Pfam Description:  KH domain
  misc_feature (1)..(175): NCBI GI NO: 34907446 NR Description: P0434C04.5
  misc_feature (1)..(173): NCBI GI NO: 16930473 NR Description: At1g09660/F21M12_5 [Arabidopsis thaliana]
  misc_feature (1)..(173): NCBI GI NO: 22329449 NR Description: KH domain quaking protein, putative
  misc_feature (1)..(175): NCBI GI NO: 12322716 NR Description: unknown protein; 28504-31237
  misc_feature (1)..(175): NCBI GI NO: 30680583 NR Description: KH domain protein [Arabidopsis thaliana]
  misc_feature (1)..(175): NCBI GI NO: 40645104 NR Description: hypothetical protein [Nicotiana tabacum]
  misc_feature (1)..(174): NCBI GI NO: 15224909 NR Description: KH domain protein [Arabidopsis thaliana]
  misc_feature (1)..(172): NCBI GI NO: 34900448 NR Description: contains EST C27129
  misc_feature (1)..(173): NCBI GI NO: 15236738 NR Description: KH domain protein [Arabidopsis thaliana]
  misc_feature (1)..(173): NCBI GI NO: 20268733 NR Description: unknown protein [Arabidopsis thaliana]
MGVLQASSMGWNGAPVLAATPVVKKVMRLDVPVDKYPNYNFVGRLLGPRGNSLKRVEASTQCRVYIRGRGSVKDSVKEDKLRDKPGYEHLNEQLHVLVEAEFPADMVDVRLNQAVSILEDLLKPIDESMDYYKKQQLRELAILNGTLREESPSPHLSPSVSPFNSTGMKRAKTGR

SEQ ID NO: 30372 - protein, 167 aa, Zea mays subsp. mays
  peptide (1)..(167): Ceres Seq. ID no. 13665999
  misc_feature (20)..(74): Pfam Name: Pfam Description:  KH domain
  misc_feature (1)..(167): NCBI GI NO: 34907446 NR Description: P0434C04.5
  misc_feature (1)..(165): NCBI GI NO: 16930473 NR Description: At1g09660/F21M12_5 [Arabidopsis thaliana]
  misc_feature (1)..(165): NCBI GI NO: 22329449 NR Description: KH domain quaking protein, putative
  misc_feature (1)..(167): NCBI GI NO: 12322716 NR Description: unknown protein; 28504-31237
  misc_feature (1)..(167): NCBI GI NO: 30680583 NR Description: KH domain protein [Arabidopsis thaliana]
  misc_feature (1)..(167): NCBI GI NO: 40645104 NR Description: hypothetical protein [Nicotiana tabacum]
  misc_feature (1)..(166): NCBI GI NO: 15224909 NR Description: KH domain protein [Arabidopsis thaliana]
  misc_feature (1)..(164): NCBI GI NO: 34900448 NR Description: contains EST C27129
  misc_feature (1)..(165): NCBI GI NO: 15236738 NR Description: KH domain protein [Arabidopsis thaliana]
  misc_feature (1)..(165): NCBI GI NO: 20268733 NR Description: unknown protein [Arabidopsis thaliana]
MGWNGAPVLAATPVVKKVMRLDVPVDKYPNYNFVGRLLGPRGNSLKRVEASTQCRVYIRGRGSVKDSVKEDKLRDKPGYEHLNEQLHVLVEAEFPADMVDVRLNQAVSILEDLLKPIDESMDYYKKQQLRELAILNGTLREESPSPHLSPSVSPFNSTGMKRAKTGR

SEQ ID NO: 30373 - DNA, 1312 bp, Zea mays subsp. mays
  misc_feature (1)..(1312): Ceres Seq. ID no. 12408327
actctactcccggtaccggaggccggagctatccaattcccttcccacccagaccgcgatccctaaccctacccaatgtcctcgccgccgccggcttcgcccatggccgccgagaatgaggcctgcgactgggcggagatgccgtcggacgcgctcgcggccgtgttcgcgaagctggacgtggccgagatcctgtccggcgccgggctggtctgccgcgcgtggcaccgtctcgcggcctcggaccctacgctgtggcgccgcgtcgacatgtgctaccagggggaccagctgcagaccgaggaggtcgaggccatggcgcgcgccgcggtcgaccgctctgcgggcaccatggaggcgttctgtgccgagaccttcgtcaacgacgacctggctccgctacatctctcagagggccccctcattgaagagcctccatctctgcctgtgccattacgtcactaatcaaggttttgcagaggcagttaattgcttccctcagctcaaggagctagacattacattctgctcattgtatggcatcgtgtgtgagactgctgggagagcctgcccgcagcttaaatgcttcaggttgaatgagcgctggtctattcttcaaagcgagtttgcaccctacgagggcatggatgatgacacggaagcattagggatcgctagcaccatgcctgggctccaagaacttcagttgatcggtaacaacctgaccaatgacggactcgtggcaatccttgaccgttgccctcgccttgaatcccttgacattcgccaatgctacaacatacagatggacgacgcactgagatcgaaatgcgctaggatacgagatctgaagcttcctcacgactccatctccgacttcaagtatcgggcttacatcgtcagcagcatagccaactcgggctctgattttgaggttgatatgtatgatgatctgctggatgtggtcactgaagatgatgatgctgatttcgatgacatggatgatttcgatgatacagtctcagatggaggcatgtacgatgatgacttggatatctgaaattaggaatcggttcaaacagcttttccgtggaccatgtaagtgctgttagctggaatggtttcccgtcccttttctttgagattcgggtagctatgatggaatctccctgatgttcatacttctgcgcctctccatttgttaagaagctggagtagctgaactggttctaatcgatgtacaactgttgtttttttattctgaacctttgttaattggtattttaataataacctagggcaaaaaatgtgt

SEQ ID NO: 30374 - protein, 352 aa, Zea mays subsp. mays
  peptide (1)..(352): Ceres Seq. ID no. 12408328
  misc_feature (132)..(343): NCBI GI NO: 40253673 NR Description: putative N7 protein
  misc_feature (137)..(351): NCBI GI NO: 40253669 NR Description: F-box protein-like
  misc_feature (131)..(351): NCBI GI NO: 38637156 NR Description: F-box protein family-like
  misc_feature (128)..(292): NCBI GI NO: 18412953 NR Description: F-box protein family, AtFBL9/AtFBL23
  misc_feature (128)..(295): NCBI GI NO: 18412951 NR Description: F-box protein family, AtFBL22
  misc_feature (128)..(337): NCBI GI NO: 18412947 NR Description: F-box protein family, AtFBL20
  misc_feature (128)..(337): NCBI GI NO: 21593361 NR Description: F-box protein family, AtFBL20
  misc_feature (132)..(295): NCBI GI NO: 25376524 NR Description: N7-like protein [imported] - Arabidopsis thaliana
  misc_feature (131)..(338): NCBI GI NO: 38637159 NR Description: F-box protein family-like
  misc_feature (220)..(329): NCBI GI NO: 40253668 NR Description: glutamic acid-rich protein precursor-like protein
LYSRYRRPELSNSLPTQTAIPNPTQCPRRRRLRPWPPRMRPATGRRCRRTRSRPCSRSWTWPRSCPAPGWSAARGTVSRPRTLRCGAASTCATRGTSCRPRRSRPWRAPRSTALRAPWRRSVPRPSSTTTWLRYISQRAPSLKSLHLCLCHYVTNQGFAEAVNCFPQLKELDITFCSLYGIVCETAGRACPQLKCFRLNERWSILQSEFAPYEGMDDDTEALGIASTMPGLQELQLIGNNLTNDGLVAILDRCPRLESLDIRQCYNIQMDDALRSKCARIRDLKLPHDSISDFKYRAYIVSSIANSGSDFEVDMYDDLLDVVTEDDDADFDDMDDFDDTVSDGGMYDDDLDI

SEQ ID NO: 30375 - protein, 314 aa, Zea mays subsp. mays
  peptide (1)..(314): Ceres Seq. ID no. 12408329
  misc_feature (94)..(305): NCBI GI NO: 40253673 NR Description: putative N7 protein
  misc_feature (99)..(313): NCBI GI NO: 40253669 NR Description: F-box protein-like
  misc_feature (93)..(313): NCBI GI NO: 38637156 NR Description: F-box protein family-like
  misc_feature (90)..(254): NCBI GI NO: 18412953 NR Description: F-box protein family, AtFBL9/AtFBL23
  misc_feature (90)..(257): NCBI GI NO: 18412951 NR Description: F-box protein family, AtFBL22
  misc_feature (90)..(299): NCBI GI NO: 18412947 NR Description: F-box protein family, AtFBL20
  misc_feature (90)..(299): NCBI GI NO: 21593361 NR Description: F-box protein family, AtFBL20
  misc_feature (94)..(257): NCBI GI NO: 25376524 NR Description: N7-like protein [imported] - Arabidopsis thaliana
  misc_feature (93)..(300): NCBI GI NO: 38637159 NR Description: F-box protein family-like
  misc_feature (182)..(291): NCBI GI NO: 40253668 NR Description: glutamic acid-rich protein precursor-like protein
MRPATGRRCRRTRSRPCSRSWTWPRSCPAPGWSAARGTVSRPRTLRCGAASTCATRGTSCRPRRSRPWRAPRSTALRAPWRRSVPRPSSTTTWLRYISQRAPSLKSLHLCLCHYVTNQGFAEAVNCFPQLKELDITFCSLYGIVCETAGRACPQLKCFRLNERWSILQSEFAPYEGMDDDTEALGIASTMPGLQELQLIGNNLTNDGLVAILDRCPRLESLDIRQCYNIQMDDALRSKCARIRDLKLPHDSISDFKYRAYIVSSIANSGSDFEVDMYDDLLDVVTEDDDADFDDMDDFDDTVSDGGMYDDDLDI

SEQ ID NO: 30376 - DNA, 1287 bp, Zea mays subsp. mays
  misc_feature (1)..(1287): Ceres Seq. ID no. 12408316
aagcgacgcgaagcaccgaggagaggcggcgagagttcttggtcggctagatggaaaaggcgggccagaagcggcggccgctgacggtgatggcatcctcatcgtcgcaggtggcagcagcgcggggcatgggcatgaccaacccactggcggagtggaccgaccgcgtcaggtcgctggaggccggcgtgctggcgtggctagcgaagcagcccacccacgtcgaggccgccgtggtcacggcggtcggcgccgtgcagggcgccgcgctcgggcgggctcatgggcacgcttgcgcccgacggcggggcccgcgctccctgtgccgccgccgccgccggggaccgacccaaaggtcttggcctccttcaagcaagcgcaggctttagcgggtggacccctggtgcaagcacgaaactttgcggtcatgactggtgcgaatgctggcatatcttgtgtcatgagaaggataagaggagtggaggatgtccagggcagcatggcagcagcttttggttctggggctctattctccatcgtgagtggaatggggaccccaaatccagtagctaatgcaattacaactggtgttggttttgctgtatttcaaggtggttttttcatgatctctcaaaaattttcacagccacagagtggagatacatactattctcgtggaagaagcatgctgcaaaagttaggccttcagaactatgagaagaacttcaagaagggtctcctaactgatcaaaccttgccccttcttacggacagtgctctcagagatgtgaagatcccgcctggccccaggctcctcatacttgatcacattaaaagagatccagagttgacaaaagcaaattaagtgatcggcactgcggcactgcctcacggtgccagttcttttccccctcgagttgcagaaattggaccaggagaaccgtttaatttagctattcagtgacgacctctttggagcagtatttggttgtgcttactagtatatgttttctagtcatcattcacgcttttttttgagccgaagtgtttgcaaatcactctgatcttggaatgacagaattttgtattctcaaaggtttatgctgatcaatccagattttactactagtttagggatgtcaaacgaagggaaactgcaattcgcacattttatttggcttctggatggtagtttggttctgatctgtaacgtttagccctttgctaagctgtgtcctgcataaggctttgcggcctgattaatataagcacacatgttggaatttc

SEQ ID NO: 30377 - protein, 287 aa, Zea mays subsp. mays
  peptide (1)..(287): Ceres Seq. ID no. 12408317
  misc_feature (111)..(213): Pfam Name: Pfam Description:  Tim17/Tim22/Tim23 family
  misc_feature (32)..(279): NCBI GI NO: 32487911 NR Description: OJ000315_02.15
  misc_feature (111)..(283): NCBI GI NO: 15238598 NR Description: putative protein; protein id: At5g24650
  misc_feature (111)..(283): NCBI GI NO: 21593899 NR Description: unknown [Arabidopsis thaliana]
  misc_feature (111)..(283): NCBI GI NO: 15229167 NR Description: putative protein; protein id: At3g49560
SDAKHRGEAARVLGRLDGKGGPEAAAADGDGILIVAGGSSAGHGHDQPTGGVDRPRQVAGGRRAGVASEAAHPRRGRRGHGGRRRAGRRARAGSWARLRPTAGPALPVPPPPPGTDPKVLASFKQAQALAGGPLVQARNFAVMTGANAGISCVMRRIRGVEDVQGSMAAAFGSGALFSIVSGMGTPNPVANAITTGVGFAVFQGGFFMISQKFSQPQSGDTYYSRGRSMLQKLGLQNYEKNFKKGLLTDQTLPLLTDSALRDVKIPPGPRLLILDHIKRDPELTKAN

SEQ ID NO: 30378 - protein, 145 aa, Zea mays subsp. mays
  peptide (1)..(145): Ceres Seq. ID no. 12408318
  misc_feature (1)..(71): Pfam Name: Pfam Description:  Tim17/Tim22/Tim23 family
  misc_feature (1)..(137): NCBI GI NO: 32487911 NR Description: OJ000315_02.15
  misc_feature (1)..(141): NCBI GI NO: 15238598 NR Description: putative protein; protein id: At5g24650
  misc_feature (1)..(141): NCBI GI NO: 21593899 NR Description: unknown [Arabidopsis thaliana]
  misc_feature (1)..(141): NCBI GI NO: 15229167 NR Description: putative protein; protein id: At3g49560
MTGANAGISCVMRRIRGVEDVQGSMAAAFGSGALFSIVSGMGTPNPVANAITTGVGFAVFQGGFFMISQKFSQPQSGDTYYSRGRSMLQKLGLQNYEKNFKKGLLTDQTLPLLTDSALRDVKIPPGPRLLILDHIKRDPELTKAN

SEQ ID NO: 30379 - DNA, 1540 bp, Zea mays subsp. mays
  misc_feature (1)..(1540): Ceres Seq. ID no. 12408314
gaaagcaggatgttcctacctttaaccaagtggaccaagatctctatcatcgactccctgcccccctcctcctcttctatataaaccatacactgaaacgacgtctaattgtgctgtgatccaggcagcagtgagctcagtacacagctaggcacagcgacggggtccggtccagggccatggctaaggaaagcaagctaacggccggagtggccgccgcgctgaccgtcgtcgctgcttgcgcgctatgcctgctgctgccggcgacggcccgcgcgcagctccgggtgggattctacgacaccagctgccccaacgccgaggccctcgtccgccaggccgtcgcggccgccttcgccaaggacgccggcatcgccgccggcctcatccgcctccacttccacgactgctttgtcaggggctgtgatggatccgtcctcctcaccgtgaatcctggcggcgggcagactgagcgtgacgccctcccaaacaacccgagcctccgcggcttcgacgtgatcgacgccgccaagaccgccgttgagcagagctgcccgcgcacagtctcgtgcgccgacatcgtcgccttcgccgcccgcgacagcatcagtctcaccgggagcgtctcgtaccaggtccccgcgggccggcgcgacggccgcgtgtccaacgcgacggagaccgtcgacctacccccgcccacctccacggcgcaaagcctgaccgacttgttcaaggccaaggagcttagcgtggaggacatggtcgtcctctccggcgctcacaccgtcggccgctccttctgcgcctccttcttcaagcgcgtctggaacacaagcacgaaccccgctaccgcaatcgtggacgcggggctgagcccgtcgtacgcgcagctactacgcgcgctgtgcccgtcaaacacgacgcagacgacgccgatcacgacggccatggacccgggaacgcccaacgtgctggacaacaactactacaagcttcctgcctcgcggcatggggctcttcttctccgacaacccgctgcgcgtgaacccgcagatggccgcgctggtgagcagcttcgcgtccaacgagacgctgtggaaggagaaattcgcggcggccatggtaaagatgggacgcatccaggtgcagacagggacgtgcggagaggtccgtctcaactgcggcgtcgtcaacccgagttcgtactcgtcgtcgtcggcggtggagctgggttcgagcgcgccagcagccgtcggtgaagagggctacgccgcgagctagtagctcgcataccagtcttcggccgccgtcgttgtcgagatcaatgattttttttctctctctcgcatgcatccctcttctgcttttattttgtcgcgtggactgtggtttttgttgtgtcgatgatctttgttgtgtgccagtgccactaaacgtacgcatgccggccggcgaactcttaacttcggtggcgggtaataataagcatatgtatgagtaagatgagattgtgtcaatttagggtgtggatgctttc

SEQ ID NO: 30380 - protein, 360 aa, Zea mays subsp. mays
  peptide (1)..(360): Ceres Seq. ID no. 12408315
  misc_feature (51)..(291): Pfam Name: Pfam Description:  Peroxidase
  misc_feature (27)..(291): NCBI GI NO: 12056448 NR Description: peroxidase [Zea mays]
  misc_feature (9)..(273): NCBI GI NO: 34894758 NR Description: putative peroxidase
  misc_feature (29)..(273): NCBI GI NO: 34894752 NR Description: putative peroxidase
  misc_feature (1)..(273): NCBI GI NO: 34894760 NR Description: putative peroxidase
  misc_feature (10)..(273): NCBI GI NO: 34894748 NR Description: putative peroxidase
  misc_feature (26)..(271): NCBI GI NO: 12056452 NR Description: peroxidase [Zea mays]
  misc_feature (18)..(291): NCBI GI NO: 4760700 NR Description: peroxidase 1 [Scutellaria baicalensis]
  misc_feature (1)..(272): NCBI GI NO: 12056450 NR Description: peroxidase [Zea mays]
  misc_feature (1)..(279): NCBI GI NO: 478409 NR Description: peroxidase (EC 1.11.1.7), cationic - adzuki bean
  misc_feature (28)..(294): NCBI GI NO: 27261088 NR Description: putative peroxidase
MAKESKLTAGVAAALTVVAACALCLLLPATARAQLRVGFYDTSCPNAEALVRQAVAAAFAKDAGIAAGLIRLHFHDCFVRGCDGSVLLTVNPGGGQTERDALPNNPSLRGFDVIDAAKTAVEQSCPRTVSCADIVAFAARDSISLTGSVSYQVPAGRRDGRVSNATETVDLPPPTSTAQSLTDLFKAKELSVEDMVVLSGAHTVGRSFCASFFKRVWNTSTNPATAIVDAGLSPSYAQLLRALCPSNTTQTTPITTAMDPGTPNVLDNNYYKLPASRHGALLLRQPAAREPADGRAGEQLRVQRDAVEGEIRGGHGKDGTHPGADRDVRRGPSQLRRRQPEFVLVVVGGGAGFERASSRR

SEQ ID NO: 30381 - DNA, 1301 bp, Zea mays subsp. mays
  misc_feature (1)..(1301): Ceres Seq. ID no. 12401930
ctacaacgcaccctacggtggctacccaccgcagggaccgtcaagaggtggcatgggctgggaccagaggccgggcccaccaacccatccttcgtaccagggtggtggttctgactactacaagcagggatctcagccatatgatagccagccacccagctaccctcctgggccagggaattacaacagttatgggcaatcccagggccctaactatggccaacctcagtatccgcaacatgcacctcaacagaactacagccatggctatggtgatcctagatacaatgccccccctccgaaccagcagtactatggtcagccaccgatggccccgcagcaaggctatcctcaacagccagatccctatgctaggcctccatacagtggacctggtcaatggacccccaggggtgctcccgccgcagatggctcctaccaggcgccaccttcatcttatgggccaccgtctcagcaacctcctgcttatgggcaaacatatggtgcagcaacgggacctgatgggtatggtcaacagggttacccacagcagggtggccaggtaccagcttcatatggtcagagtgcaccagcagctccaggatatcctcagcaaggcacgcagcaaggtggctatgcacagtacccgcagacccaaccagcatatggtgatcaagcagctcaagccaatgcgaactatgggtaccagggagctccagcagatcccaactacggaagtgcgtacccacagcagccagggtatggtcctcctggtcaggcaactggtcaggctggttatgcatcctctgcgccagcggccagccagcctgtgtatggccaggctggatatacccagccacctacaaatcctccaagttatgatcagtctgcagcaccagcggcgactcagagcggttatgctgcgccccctgcaaatccacaacagcctgctgcagcaaaaggggtctcgccacagcctgctgctgctgctgctgctggatatggtgctagcgggcagtggacggcatgagcctcgtcttccgaacttcgatgacagcaaggtcaggttggatatccgcttttggcgcgtgtttgaatgtttgcatcttttggatgtctgtggacgcatcatgtagggcttgaccccgttatcgaaagagattgtaaccccttgagttgtgatactggacatcttctgtagtatctacgagtagttgcttaatgtgacttttaaacattctattcagtttggatgttccttgtcttgctacttcacagcttgccaagccagtaatctttgg

SEQ ID NO: 30382 - protein, 377 aa, Zea mays subsp. mays
  peptide (1)..(377): Ceres Seq. ID no. 12401931
TTHPTVATHRRDRQEVAWAGTRGRAHQPILRTRVVVLTTTSRDLSHMIASHPATLLGQGITTVMGNPRALTMANLSIRNMHLNRTTAMAMVILDTMPPLRTSSTMVSHRWPRSKAILNSQIPMLGLHTVDLVNGPPGVLPPQMAPTRRHLHLMGHRLSNLLLMGKHMVQQRDLMGMVNRVTHSRVARYQLHMVRVHQQLQDILSKARSKVAMHSTRRPNQHMVIKQLKPMRTMGTRELQQIPTTEVRTHSSQGMVLLVRQLVRLVMHPLRQRPASLCMARLDIPSHLQILQVMISLQHQRRLRAVMLRPLQIHNSLLQQKGSRHSLLLLLLLDMVLAGSGRHEPRLPNFDDSKVRLDIRFWRVFECLHLLDVCGRIM

SEQ ID NO: 30383 - protein, 342 aa, Zea mays subsp. mays
  peptide (1)..(342): Ceres Seq. ID no. 12401932
  misc_feature (6)..(342): Pfam Name: Pfam Description:  High molecular weight glutenin subunit
  misc_feature (6)..(342): NCBI GI NO: 14329761 NR Description: high molecular weight glutenin subunit x
  misc_feature (6)..(342): NCBI GI NO: 14329731 NR Description: high molecular weight glutenin subunit x
  misc_feature (34)..(338): NCBI GI NO: 542527 NR Description: collagen - silkworm
  misc_feature (7)..(342): NCBI GI NO: 542527 NR Description: collagen - silkworm
  misc_feature (7)..(342): NCBI GI NO: 14329757 NR Description: high molecular weight glutenin subunit x
  misc_feature (7)..(339): NCBI GI NO: 6684162 NR Description: glutenin
  misc_feature (11)..(342): NCBI GI NO: 14329729 NR Description: high molecular weight glutenin subunit x
  misc_feature (11)..(342): NCBI GI NO: 14329739 NR Description: high molecular weight glutenin subunit x
  misc_feature (11)..(342): NCBI GI NO: 14329751 NR Description: high molecular weight glutenin subunit x
  misc_feature (6)..(342): NCBI GI NO: 14329757 NR Description: high molecular weight glutenin subunit x
YNAPYGGYPPQGPSRGGMGWDQRPGPPTHPSYQGGGSDYYKQGSQPYDSQPPSYPPGPGNYNSYGQSQGPNYGQPQYPQHAPQQNYSHGYGDPRYNAPPPNQQYYGQPPMAPQQGYPQQPDPYARPPYSGPGQWTPRGAPAADGSYQAPPSSYGPPSQQPPAYGQTYGAATGPDGYGQQGYPQQGGQVPASYGQSAPAAPGYPQQGTQQGGYAQYPQTQPAYGDQAAQANANYGYQGAPADPNYGSAYPQQPGYGPPGQATGQAGYASSAPAASQPVYGQAGYTQPPTNPPSYDQSAAPAATQSGYAAPPANPQQPAAAKGVSPQPAAAAAAGYGASGQWTA

SEQ ID NO: 30384 - protein, 331 aa, Zea mays subsp. mays
  peptide (1)..(331): Ceres Seq. ID no. 12401933
MIASHPATLLGQGITTVMGNPRALTMANLSIRNMHLNRTTAMAMVILDTMPPLRTSSTMVSHRWPRSKAILNSQIPMLGLHTVDLVNGPPGVLPPQMAPTRRHLHLMGHRLSNLLLMGKHMVQQRDLMGMVNRVTHSRVARYQLHMVRVHQQLQDILSKARSKVAMHSTRRPNQHMVIKQLKPMRTMGTRELQQIPTTEVRTHSSQGMVLLVRQLVRLVMHPLRQRPASLCMARLDIPSHLQILQVMISLQHQRRLRAVMLRPLQIHNSLLQQKGSRHSLLLLLLLDMVLAGSGRHEPRLPNFDDSKVRLDIRFWRVFECLHLLDVCGRIM

SEQ ID NO: 30385 - DNA, 918 bp, Zea mays subsp. mays
  misc_feature (1)..(918): Ceres Seq. ID no. 12346185
cgggtgcctcgcttcgctttgcgcgcgattcgatccaggctttggttggaggcatggcctcgtcgcccgcgagcagctacgactgctccttcaaggtcctgcttatcggggattcggccgtcggcaagagcagcctcctcgtcagcttcgtctccgccgctcacatcgacgacgacatcgcgccaaccataggggtggattttaaaatcaaatttctcagtgtgggtgggaagaaactaaaactgacaatatgggacactgccggtcaagagaggttcaggacaattaccagctcttactacaggggtgctcatgggattattttagtttatgacgttacaaagagggagagtttcacaaatttggctgatgtgtggaccaaggaaatagagttacactcaacaaataaggaatgcatcaaaatgcttgttggaaataaagtggacaaggatgaggacagaatggtgacaaaagaagaaggtcttgaatttgcacaagaacgtggatgtctctttgtcgagagtagtgctaaaacaagagaaaacgtggaaaaatgttttgaagagcttgcattaaagattctccaggttcccagtctcttggaggaaggttcttcggttgttaagaggaacactctgactctgaaacaaaagcaggagaatgcaaaccgaagtggaggatgctgtcagtaggtcggccagttcttgttgcaagccactcgaggtatcatatatttaggtccttgtaagttgtattgggatgtagatgagttgtatctaaatgcacagcggcagagccaatgcaagtgatgggagaactaaccacttgaggttttggtgtgaattgatctgtacagaagaaaagccttctcttgtttttcctgtttcttgatgtggtaatttgtgcaagtgatgggag

SEQ ID NO: 30386 - protein, 229 aa, Zea mays subsp. mays
  peptide (1)..(229): Ceres Seq. ID no. 12346186
  misc_feature (31)..(195): Pfam Name: Pfam Description:  Ras family
  misc_feature (18)..(229): NCBI GI NO: 15451614 NR Description: Putative GTP-binding protein [Oryza sativa]
  misc_feature (17)..(229): NCBI GI NO: 37534998 NR Description: putative GTP-binding protein
  misc_feature (20)..(228): NCBI GI NO: 1370172 NR Description: RAB1X [Lotus japonicus]
  misc_feature (19)..(228): NCBI GI NO: 18414255 NR Description: putative protein; protein id: At5g03530
  misc_feature (19)..(228): NCBI GI NO: 1370174 NR Description: RAB1Y [Lotus japonicus]
  misc_feature (19)..(228): NCBI GI NO: 15218575 NR Description: GTP-binding protein
  misc_feature (19)..(228): NCBI GI NO: 15232785 NR Description: GTP-binding protein, putative
  misc_feature (87)..(228): NCBI GI NO: 25294118 NR Description: protein F9C16.3 [imported] - Arabidopsis thaliana
  misc_feature (19)..(86): NCBI GI NO: 25294118 NR Description: protein F9C16.3 [imported] - Arabidopsis thaliana
  misc_feature (29)..(227): NCBI GI NO: 40807131 NR Description: Unknown (protein for MGC:77145) [Danio rerio]
GASLRFARDSIQALVGGMASSPASSYDCSFKVLLIGDSAVGKSSLLVSFVSAAHIDDDIAPTIGVDFKIKFLSVGGKKLKLTIWDTAGQERFRTITSSYYRGAHGIILVYDVTKRESFTNLADVWTKEIELHSTNKECIKMLVGNKVDKDEDRMVTKEEGLEFAQERGCLFVESSAKTRENVEKCFEELALKILQVPSLLEEGSSVVKRNTLTLKQKQENANRSGGCCQ

SEQ ID NO: 30387 - protein, 212 aa, Zea mays subsp. mays
  peptide (1)..(212): Ceres Seq. ID no. 12346187
  misc_feature (14)..(178): Pfam Name: Pfam Description:  Ras family
  misc_feature (1)..(212): NCBI GI NO: 15451614 NR Description: Putative GTP-binding protein [Oryza sativa]
  misc_feature (1)..(212): NCBI GI NO: 37534998 NR Description: putative GTP-binding protein
  misc_feature (3)..(211): NCBI GI NO: 1370172 NR Description: RAB1X [Lotus japonicus]
  misc_feature (2)..(211): NCBI GI NO: 18414255 NR Description: putative protein; protein id: At5g03530
  misc_feature (2)..(211): NCBI GI NO: 1370174 NR Description: RAB1Y [Lotus japonicus]
  misc_feature (2)..(211): NCBI GI NO: 15218575 NR Description: GTP-binding protein
  misc_feature (2)..(211): NCBI GI NO: 15232785 NR Description: GTP-binding protein, putative
  misc_feature (70)..(211): NCBI GI NO: 25294118 NR Description: protein F9C16.3 [imported] - Arabidopsis thaliana
  misc_feature (2)..(69): NCBI GI NO: 25294118 NR Description: protein F9C16.3 [imported] - Arabidopsis thaliana
  misc_feature (12)..(210): NCBI GI NO: 40807131 NR Description: Unknown (protein for MGC:77145) [Danio rerio]
MASSPASSYDCSFKVLLIGDSAVGKSSLLVSFVSAAHIDDDIAPTIGVDFKIKFLSVGGKKLKLTIWDTAGQERFRTITSSYYRGAHGIILVYDVTKRESFTNLADVWTKEIELHSTNKECIKMLVGNKVDKDEDRMVTKEEGLEFAQERGCLFVESSAKTRENVEKCFEELALKILQVPSLLEEGSSVVKRNTLTLKQKQENANRSGGCCQ

SEQ ID NO: 30388 - DNA, 1317 bp, Zea mays subsp. mays
  misc_feature (1)..(1317): Ceres Seq. ID no. 12360003
attcagcccatcgctagctctcgcgtctcgcctgtctcctctagtagcacaagaccacgagggattaagcgatgacaacctctaagctcgctgtcctcactctgtttgccctgctcggctccgtgtcatgccagtccggtggctactacttctacccaaccccgcagcaaccatctccaacacccagccctccttctagtccgcaactcatggtcggatactacaaggacaagtgtgccgcttacgtggatgttgaagctattgtcaagaagcacgtcaaggccaccgatgctggcatgcaggccgggcttgtccgtctcttattccacgactgcttcgtccgtggatgcgacggctccgtcctcctcgacacgttcagcaacgacaccagcctgaccccagagaagttcggcgtgcccaacttccccagcctgcggggcttcgaggtgatcgacgcggccaaggccgagatcgaggcggcgtgccccggcacggtctcgtgcgcggacatcgtcgcgttcgccgcccgcgacgcgtcctacttcctcagcggcggcggcatcagcttcgccatgcccgcggggcgctacgacgggaacgtctccctcgccagcgagaccctccccaacctgccctcgccgttcaccggcttcgaccagctcgtcaaggtgttcgccgacaaagggctcgacgccttcgacatgatcacgctctccggcgcgcacagcatcggccgctcccactgctcctccttcaccagggaccgcctgccgcccagcaacaccaccgacatagatccagcgttcgccgccacgctgcaggctagctgcgcttcgcccaacggcaccgacaacacggtcatgcaggacttcaagacccccgacgtcctggacaaccagtactacaagaacgtgctggcccacaaggttctcttcacgtcggacgccgcgctcaccaccaacttcacgtccaacaacctggtgcgcgcctacgcggacttcgtgccctatctgtggcagcagaagttcgccaaagccatggtgaagatggccggcgtcgagatcaaaaccgccgccaacggagagatcaggaagacatgccgcaaggtcaacagcaggtcctgatcagatggcgtaccggcgggcttccaatttcctaagttttgcctttacatacattcccctgatctcccctaatatctgcctttatgctgtatacattctttgtttcgttttccagctgtatgcctgcttttatgctgtataatttaaatttgattgaatattacatcttttgaaatccaagcaaattttcatc

SEQ ID NO: 30389 - protein, 350 aa, Zea mays subsp. mays
  peptide (1)..(350): Ceres Seq. ID no. 12360004
  misc_feature (67)..(299): Pfam Name: Pfam Description:  Peroxidase
  misc_feature (15)..(347): NCBI GI NO: 27261088 NR Description: putative peroxidase
  misc_feature (1)..(347): NCBI GI NO: 27261087 NR Description: putative peroxidase
  misc_feature (1)..(347): NCBI GI NO: 27261097 NR Description: putative peroxidase
  misc_feature (45)..(347): NCBI GI NO: 27261094 NR Description: putative peroxidase
  misc_feature (37)..(347): NCBI GI NO: 34896266 NR Description: putative peroxidase [Oryza sativa]
  misc_feature (37)..(347): NCBI GI NO: 34896268 NR Description: putative peroxidase [Oryza sativa]
  misc_feature (46)..(347): NCBI GI NO: 12039346 NR Description: putative peroxidase [Oryza sativa]
  misc_feature (30)..(347): NCBI GI NO: 34896944 NR Description: putative peroxidase [Oryza sativa]
  misc_feature (46)..(347): NCBI GI NO: 12039335 NR Description: putative peroxidase [Oryza sativa]
  misc_feature (46)..(347): NCBI GI NO: 12039354 NR Description: putative peroxidase [Oryza sativa]
MTTSKLAVLTLFALLGSVSCQSGGYYFYPTPQQPSPTPSPPSSPQLMVGYYKDKCAAYVDVEAIVKKHVKATDAGMQAGLVRLLFHDCFVRGCDGSVLLDTFSNDTSLTPEKFGVPNFPSLRGFEVIDAAKAEIEAACPGTVSCADIVAFAARDASYFLSGGGISFAMPAGRYDGNVSLASETLPNLPSPFTGFDQLVKVFADKGLDAFDMITLSGAHSIGRSHCSSFTRDRLPPSNTTDIDPAFAATLQASCASPNGTDNTVMQDFKTPDVLDNQYYKNVLAHKVLFTSDAALTTNFTSNNLVRAYADFVPYLWQQKFAKAMVKMAGVEIKTAANGEIRKTCRKVNSRS

SEQ ID NO: 30390 - protein, 304 aa, Zea mays subsp. mays
  peptide (1)..(304): Ceres Seq. ID no. 12360005
  misc_feature (21)..(253): Pfam Name: Pfam Description:  Peroxidase
  misc_feature (1)..(301): NCBI GI NO: 27261088 NR Description: putative peroxidase
  misc_feature (1)..(301): NCBI GI NO: 27261087 NR Description: putative peroxidase
  misc_feature (1)..(301): NCBI GI NO: 27261097 NR Description: putative peroxidase
  misc_feature (1)..(301): NCBI GI NO: 27261094 NR Description: putative peroxidase
  misc_feature (1)..(301): NCBI GI NO: 34896266 NR Description: putative peroxidase [Oryza sativa]
  misc_feature (1)..(301): NCBI GI NO: 34896268 NR Description: putative peroxidase [Oryza sativa]
  misc_feature (1)..(301): NCBI GI NO: 12039346 NR Description: putative peroxidase [Oryza sativa]
  misc_feature (1)..(301): NCBI GI NO: 34896944 NR Description: putative peroxidase [Oryza sativa]
  misc_feature (1)..(301): NCBI GI NO: 12039335 NR Description: putative peroxidase [Oryza sativa]
  misc_feature (1)..(301): NCBI GI NO: 12039354 NR Description: putative peroxidase [Oryza sativa]
MVGYYKDKCAAYVDVEAIVKKHVKATDAGMQAGLVRLLFHDCFVRGCDGSVLLDTFSNDTSLTPEKFGVPNFPSLRGFEVIDAAKAEIEAACPGTVSCADIVAFAARDASYFLSGGGISFAMPAGRYDGNVSLASETLPNLPSPFTGFDQLVKVFADKGLDAFDMITLSGAHSIGRSHCSSFTRDRLPPSNTTDIDPAFAATLQASCASPNGTDNTVMQDFKTPDVLDNQYYKNVLAHKVLFTSDAALTTNFTSNNLVRAYADFVPYLWQQKFAKAMVKMAGVEIKTAANGEIRKTCRKVNSRS

SEQ ID NO: 30391 - protein, 275 aa, Zea mays subsp. mays
  peptide (1)..(275): Ceres Seq. ID no. 12360006
  misc_feature (1)..(224): Pfam Name: Pfam Description:  Peroxidase
  misc_feature (1)..(272): NCBI GI NO: 27261088 NR Description: putative peroxidase
  misc_feature (1)..(272): NCBI GI NO: 27261087 NR Description: putative peroxidase
  misc_feature (1)..(272): NCBI GI NO: 27261097 NR Description: putative peroxidase
  misc_feature (1)..(272): NCBI GI NO: 27261094 NR Description: putative peroxidase
  misc_feature (1)..(272): NCBI GI NO: 34896266 NR Description: putative peroxidase [Oryza sativa]
  misc_feature (1)..(272): NCBI GI NO: 34896268 NR Description: putative peroxidase [Oryza sativa]
  misc_feature (1)..(272): NCBI GI NO: 12039346 NR Description: putative peroxidase [Oryza sativa]
  misc_feature (1)..(272): NCBI GI NO: 34896944 NR Description: putative peroxidase [Oryza sativa]
  misc_feature (1)..(272): NCBI GI NO: 12039335 NR Description: putative peroxidase [Oryza sativa]
  misc_feature (1)..(272): NCBI GI NO: 12039354 NR Description: putative peroxidase [Oryza sativa]
MQAGLVRLLFHDCFVRGCDGSVLLDTFSNDTSLTPEKFGVPNFPSLRGFEVIDAAKAEIEAACPGTVSCADIVAFAARDASYFLSGGGISFAMPAGRYDGNVSLASETLPNLPSPFTGFDQLVKVFADKGLDAFDMITLSGAHSIGRSHCSSFTRDRLPPSNTTDIDPAFAATLQASCASPNGTDNTVMQDFKTPDVLDNQYYKNVLAHKVLFTSDAALTTNFTSNNLVRAYADFVPYLWQQKFAKAMVKMAGVEIKTAANGEIRKTCRKVNSRS

SEQ ID NO: 30392 - DNA, 850 bp, Zea mays subsp. mays
  misc_feature (1)..(850): Ceres Seq. ID no. 12423783
ctatgaaagtctgaaaatagctagtggattgagcggagcgtgcctctgcggtccgataggcgggttcgcatccggccatccgatactctgccagtgcggccgcgcggcggcggagcaaccacgcgcgcagaccgccgtcgccacctcctccctccctccgctccccggcgtgcgtccgatccaccaggaatcgaaggctcccacacgcccccacgcgatgctgcgcaacttcccgcaggcccggaggctcctcaggcggatggggttcgagaaggaggacgcctacttctggaagcagatgggcaaggccatgctctgcacgtacacgctcttcggcgtcgtctggctctggaacgagacgtcgccgctcgggtggtggacgctcaagccgcgccccaaggaagaaagagagatggcacacctctacgagcgcaggaagttcccgtaccctggcgatgatgaggcggtcgaggagtttgtaaagagcggaggtgctcttggaaccacaattggacccaggggattcgctgacgccaatatggattctgaaaacatgcagaagcagctgcagtctaagaagttcgagcaggaagcacagaaactgtggattcggatgaggaatgaggtcgtacaggagctccaggagaaggggtttgatatcgagtgaatttgaaacctgcagtatggtcggcgctgaggatgttaaaacttaaaaccacttgccatctaaattggagaactgtataacttaggaataaaagagtttgtagctatctttttaactaactatctggtgctgcattcttggtgctgctagattgtaccgaaaataaattttgatgtcttgtgg

SEQ ID NO: 30393 - protein, 221 aa, Zea mays subsp. mays
  peptide (1)..(221): Ceres Seq. ID no. 12423784
  misc_feature (73)..(221): NCBI GI NO: 14587335 NR Description: P0460H02.16
  misc_feature (80)..(221): NCBI GI NO: 21592650 NR Description: unknown [Arabidopsis thaliana]
  misc_feature (80)..(221): NCBI GI NO: 15237778 NR Description: putative protein; protein id: At5g58920
YESLKIASGLSGACLCGPIGGFASGHPILCQCGRAAAEQPRAQTAVATSSLPPLPGVRPIHQESKAPTRPHAMLRNFPQARRLLRRMGFEKEDAYFWKQMGKAMLCTYTLFGVVWLWNETSPLGWWTLKPRPKEEREMAHLYERRKFPYPGDDEAVEEFVKSGGALGTTIGPRGFADANMDSENMQKQLQSKKFEQEAQKLWIRMRNEVVQELQEKGFDIE

SEQ ID NO: 30394 - protein, 149 aa, Zea mays subsp. mays
  peptide (1)..(149): Ceres Seq. ID no. 12423785
  misc_feature (1)..(149): NCBI GI NO: 14587335 NR Description: P0460H02.16
  misc_feature (8)..(149): NCBI GI NO: 21592650 NR Description: unknown [Arabidopsis thaliana]
  misc_feature (8)..(149): NCBI GI NO: 15237778 NR Description: putative protein; protein id: At5g58920
MLRNFPQARRLLRRMGFEKEDAYFWKQMGKAMLCTYTLFGVVWLWNETSPLGWWTLKPRPKEEREMAHLYERRKFPYPGDDEAVEEFVKSGGALGTTIGPRGFADANMDSENMQKQLQSKKFEQEAQKLWIRMRNEVVQELQEKGFDIE

SEQ ID NO: 30395 - protein, 135 aa, Zea mays subsp. mays
  peptide (1)..(135): Ceres Seq. ID no. 12423786
  misc_feature (1)..(135): NCBI GI NO: 14587335 NR Description: P0460H02.16
  misc_feature (1)..(135): NCBI GI NO: 21592650 NR Description: unknown [Arabidopsis thaliana]
  misc_feature (1)..(135): NCBI GI NO: 15237778 NR Description: putative protein; protein id: At5g58920
MGFEKEDAYFWKQMGKAMLCTYTLFGVVWLWNETSPLGWWTLKPRPKEEREMAHLYERRKFPYPGDDEAVEEFVKSGGALGTTIGPRGFADANMDSENMQKQLQSKKFEQEAQKLWIRMRNEVVQELQEKGFDIE

SEQ ID NO: 30396 - DNA, 1606 bp, Zea mays subsp. mays
  misc_feature (1)..(1606): Ceres Seq. ID no. 12350293
gattcattccccctctcccctctccaagacccaaaaccctaacccctacgacccccgtgaccgccgccgccgtcgatgcctgcgctctccgacgtcgcgcttcaggctgccatcgccggcaacctccgcctcctgaagctggtggcgagcaagatgaatctgcgcgaagcgaaggacgccgctgggcggaacgcgctccacctggccgcggagatgggccgtcttgaggtttgcaggttcctggtggaggaatcgggcttcgaggtgaacttcgcctgcgccgaaggcgggtcgccggtccactgcgccgcggccgggggcagcgagagcgtcttgggctaccttctcgaccacggtggcgaccctgtgatgccggactccatgggctccactccactgcatgatgcggcagaggaagggcattgtgcggctgtgaggatgctgctgtccaagggtgtcgatgtggatccacacggctgtcgtgggacgccgctgcacttggcctgctccaatgaccgggatcaggttgttaggatcctgctggaacatggcgcagatcccaacaaagtttcggtcatgtcctcccaccactcatgatggcatactgtggcggttctttgagatgcatgaagctactgattgaggctggtgcggatgtgaacttgattgctccttctggagtaattttggctcaggcagtttgtgatgggtcaactgagattgtcaagtttttgctagaggttggagctgatcctaacattcctgatgaggatgggaaaatcccgatcatgtacccagcatttaatgggcatcgggatcttgttgaaattctatttcctaagacaagaccagtttcatctttgccagactggagcgttgatgggattattagaagtatgaaagatctgtttttcaagcctcaggatgcagctgtggtggaaaaaaagatagctgatgcgaagtcacaagggaaggaagctttcgcaaggggagagtaccctgcagcagtatacttctataccatggtactagagaacgaccttgatgctactgcgtttgccaaccggagcctgtgctggttgcggctgagggagggggccaaggctctgttagatgctcaacagtgcaaaatgatacggcctcgttggtcgaaggcatggtatcgcgagggcgcggctctcagcttgctgaaggactaccaaggggcagtcaacgcgttcacggaagcattgaaactggatcctgcaagtttagagatcaagaaagccttaagggaggccaccgattccctggcgaacgttggccgctccggagaacagaacccatgagctgctgctgcatccatgtgctttatctcacgttaagaatcctctaacactatgtggctcagcctcatattatatgttgatatatgtcgccttaacgcactgctggagatactagtttcgatctcagcctatatgttttgctccttcgggatgcagcctaagatacatgtggcaaccaagtgaggttgggcagggtagcatatctatggactggttgaactattatatgtatctggatatctaagtgcacctgttgctcctagtaaagttgcagttct

SEQ ID NO: 30397 - protein, 244 aa, Zea mays subsp. mays
  peptide (1)..(244): Ceres Seq. ID no. 12350294
  misc_feature (152)..(185): Pfam Name: Pfam Description:  TPR Domain
  misc_feature (1)..(233): NCBI GI NO: 27542766 NR Description: ankyrin-like protein-like protein
  misc_feature (1)..(227): NCBI GI NO: 27542768 NR Description: ankyrin-like protein-like protein
  misc_feature (9)..(241): NCBI GI NO: 34896852 NR Description: putative ankyrin [Oryza sativa]
  misc_feature (103)..(241): NCBI GI NO: 15229331 NR Description: ankyrin-like protein; protein id: At3g04710
  misc_feature (1)..(103): NCBI GI NO: 15229331 NR Description: ankyrin-like protein; protein id: At3g04710
  misc_feature (115)..(226): NCBI GI NO: 13435243 NR Description: putative gag-pol polyprotein [Oryza sativa]
  misc_feature (8)..(110): NCBI GI NO: 13435243 NR Description: putative gag-pol polyprotein [Oryza sativa]
  misc_feature (1)..(243): NCBI GI NO: 24745936 NR Description: ankyrin-like protein [Solanum tuberosum]
  misc_feature (8)..(233): NCBI GI NO: 38637543 NR Description: ankyrin-like protein
  misc_feature (8)..(233): NCBI GI NO: 13435247 NR Description: putative ankyrin [Oryza sativa]
MMAYCGGSLRCMKLLIEAGADVNLIAPSGVILAQAVCDGSTEIVKFLLEVGADPNIPDEDGKIPIMYPAFNGHRDLVEILFPKTRPVSSLPDWSVDGIIRSMKDLFFKPQDAAVVEKKIADAKSQGKEAFARGEYPAAVYFYTMVLENDLDATAFANRSLCWLRLREGAKALLDAQQCKMIRPRWSKAWYREGAALSLLKDYQGAVNAFTEALKLDPASLEIKKALREATDSLANVGRSGEQNP

SEQ ID NO: 30398 - protein, 243 aa, Zea mays subsp. mays
  peptide (1)..(243): Ceres Seq. ID no. 12350295
  misc_feature (151)..(184): Pfam Name: Pfam Description:  TPR Domain
  misc_feature (1)..(232): NCBI GI NO: 27542766 NR Description: ankyrin-like protein-like protein
  misc_feature (1)..(226): NCBI GI NO: 27542768 NR Description: ankyrin-like protein-like protein
  misc_feature (8)..(240): NCBI GI NO: 34896852 NR Description: putative ankyrin [Oryza sativa]
  misc_feature (102)..(240): NCBI GI NO: 15229331 NR Description: ankyrin-like protein; protein id: At3g04710
  misc_feature (1)..(102): NCBI GI NO: 15229331 NR Description: ankyrin-like protein; protein id: At3g04710
  misc_feature (114)..(225): NCBI GI NO: 13435243 NR Description: putative gag-pol polyprotein [Oryza sativa]
  misc_feature (7)..(109): NCBI GI NO: 13435243 NR Description: putative gag-pol polyprotein [Oryza sativa]
  misc_feature (1)..(242): NCBI GI NO: 24745936 NR Description: ankyrin-like protein [Solanum tuberosum]
  misc_feature (7)..(232): NCBI GI NO: 38637543 NR Description: ankyrin-like protein
  misc_feature (7)..(232): NCBI GI NO: 13435247 NR Description: putative ankyrin [Oryza sativa]
MAYCGGSLRCMKLLIEAGADVNLIAPSGVILAQAVCDGSTEIVKFLLEVGADPNIPDEDGKIPIMYPAFNGHRDLVEILFPKTRPVSSLPDWSVDGIIRSMKDLFFKPQDAAVVEKKIADAKSQGKEAFARGEYPAAVYFYTMVLENDLDATAFANRSLCWLRLREGAKALLDAQQCKMIRPRWSKAWYREGAALSLLKDYQGAVNAFTEALKLDPASLEIKKALREATDSLANVGRSGEQNP

SEQ ID NO: 30399 - protein, 233 aa, Zea mays subsp. mays
  peptide (1)..(233): Ceres Seq. ID no. 12350296
  misc_feature (141)..(174): Pfam Name: Pfam Description:  TPR Domain
  misc_feature (1)..(222): NCBI GI NO: 27542766 NR Description: ankyrin-like protein-like protein
  misc_feature (1)..(216): NCBI GI NO: 27542768 NR Description: ankyrin-like protein-like protein
  misc_feature (1)..(230): NCBI GI NO: 34896852 NR Description: putative ankyrin [Oryza sativa]
  misc_feature (92)..(230): NCBI GI NO: 15229331 NR Description: ankyrin-like protein; protein id: At3g04710
  misc_feature (1)..(92): NCBI GI NO: 15229331 NR Description: ankyrin-like protein; protein id: At3g04710
  misc_feature (104)..(215): NCBI GI NO: 13435243 NR Description: putative gag-pol polyprotein [Oryza sativa]
  misc_feature (1)..(99): NCBI GI NO: 13435243 NR Description: putative gag-pol polyprotein [Oryza sativa]
  misc_feature (1)..(232): NCBI GI NO: 24745936 NR Description: ankyrin-like protein [Solanum tuberosum]
  misc_feature (1)..(222): NCBI GI NO: 38637543 NR Description: ankyrin-like protein
  misc_feature (1)..(222): NCBI GI NO: 13435247 NR Description: putative ankyrin [Oryza sativa]
MKLLIEAGADVNLIAPSGVILAQAVCDGSTEIVKFLLEVGADPNIPDEDGKIPIMYPAFNGHRDLVEILFPKTRPVSSLPDWSVDGIIRSMKDLFFKPQDAAVVEKKIADAKSQGKEAFARGEYPAAVYFYTMVLENDLDATAFANRSLCWLRLREGAKALLDAQQCKMIRPRWSKAWYREGAALSLLKDYQGAVNAFTEALKLDPASLEIKKALREATDSLANVGRSGEQNP

SEQ ID NO: 30400 - DNA, 775 bp, Zea mays subsp. mays; identical to SEQ ID NO: 24113
  misc_feature (1)..(775): Ceres Seq. ID no. 12544805

SEQ ID NO: 30401 - protein, 164 aa, Zea mays subsp. mays; identical to SEQ ID NO: 24114
  peptide (1)..(164): Ceres Seq. ID no. 12544806
  misc_feature (2)..(100): Pfam Name: Pfam Description:  Ribosomal protein L21e
  misc_feature (1)..(164): NCBI GI NO: 37535194 NR Description: 60S ribosomal protein L21
  misc_feature (1)..(164): NCBI GI NO: 11276828 NR Description: ribosomal protein L21 [imported] - rice
  misc_feature (1)..(164): NCBI GI NO: 18406015 NR Description: 60S ribosomal protein L21, putative
  misc_feature (1)..(164): NCBI GI NO: 18391042 NR Description: putative 60S ribosomal protein L21
  misc_feature (1)..(157): NCBI GI NO: 15213768 NR Description: ribosomal protein L21 [Spodoptera frugiperda]
  misc_feature (1)..(155): NCBI GI NO: 6094029 NR Description: 60S RIBOSOMAL PROTEIN L21
  misc_feature (1)..(157): NCBI GI NO: 38048363 NR Description: similar to Drosophila melanogaster CG12775
  misc_feature (1)..(157): NCBI GI NO: 20129705 NR Description: CG12775-PA [Drosophila melanogaster]
  misc_feature (1)..(155): NCBI GI NO: 40741182 NR Description: hypothetical protein AN4802.2
  misc_feature (1)..(155): NCBI GI NO: 6319668 NR Description: Homology to rat L21; Rpl21ap

SEQ ID NO: 30402 - protein, 141 aa, Zea mays subsp. mays; identical to SEQ ID NO: 24115
  peptide (1)..(141): Ceres Seq. ID no. 12544807

SEQ ID NO: 30403 - protein, 113 aa, Zea mays subsp. mays; identical to SEQ ID NO: 24116
  peptide (1)..(113): Ceres Seq. ID no. 12544808
  misc_feature (1)..(113): NCBI GI NO: 37535194 NR Description: 60S ribosomal protein L21
  misc_feature (1)..(113): NCBI GI NO: 11276828 NR Description: ribosomal protein L21 [imported] - rice
  misc_feature (1)..(113): NCBI GI NO: 18406015 NR Description: 60S ribosomal protein L21, putative
  misc_feature (1)..(113): NCBI GI NO: 18391042 NR Description: putative 60S ribosomal protein L21
  misc_feature (1)..(106): NCBI GI NO: 15213768 NR Description: ribosomal protein L21 [Spodoptera frugiperda]
  misc_feature (1)..(104): NCBI GI NO: 6094029 NR Description: 60S RIBOSOMAL PROTEIN L21
  misc_feature (1)..(106): NCBI GI NO: 38048363 NR Description: similar to Drosophila melanogaster CG12775
  misc_feature (1)..(106): NCBI GI NO: 20129705 NR Description: CG12775-PA [Drosophila melanogaster]
  misc_feature (1)..(104): NCBI GI NO: 40741182 NR Description: hypothetical protein AN4802.2
  misc_feature (1)..(104): NCBI GI NO: 6319668 NR Description: Homology to rat L21; Rpl21ap

SEQ ID NO: 30404 - DNA, 739 bp, Zea mays subsp. mays
  misc_feature (1)..(739): Ceres Seq. ID no. 12352966
aatcactgccaaatcccccagaaaatcaactcctccccaattccacgctgccaccaactcgccgtcctccgcgccaagcaccaaagctccgatggcccgcacgaagcagacggcgcgcaagtcgacgggcggcaaggcgccccgcaagcagctggcgaccaaggcggcgcgcaagtctgcgccggccaccggcggcgtgaagaagccccaccgcttccgccccggcaccgtcgcgctccgggagatccgcaagtaccagaagagcacggagctgctcatccgcaagttgcccttccagcgcctcgtccgtgagatcgcgcaggacttcaagaccgatctccgcttccagtcctccgccgtcgccgcgctgcaggaggccgccgaggcctaccttgtggggctctttgaggacactaacctctgtgccatccacgccaagcgcgtcaccatcatgcccaaggacatccagctcgcgcgccgtatcaggggcgagagggcctgagcgaggctggctcctctcaccgcaggcggcgtcgttgttgcttcgggcctgcttgtaggacttgtgcttctcttggtttcctttctggtggcagtggcatcttggtaccattgtgcttgttcttagaatcttagggatagagagttgttcagttgctgggtaacctgattgtttatcttgcattcctgcctctgtaatggttgtctgctgtcttaatggaaatgatatttgctttct

SEQ ID NO: 30405 - protein, 166 aa, Zea mays subsp. mays
  peptide (1)..(166): Ceres Seq. ID no. 12352967
  misc_feature (47)..(165): Pfam Name: Pfam Description:  Core histone H2A/H2B/H3/H4
  misc_feature (31)..(166): NCBI GI NO: 15232146 NR Description: histone H3, putative; protein id: At3g27360
  misc_feature (31)..(166): NCBI GI NO: 122087 NR Description: Histone H3
  misc_feature (31)..(166): NCBI GI NO: 1362108 NR Description: histone H3 homolog - common tobacco
  misc_feature (31)..(166): NCBI GI NO: 166384 NR Description: histone H3 (H3-1.1)
  misc_feature (32)..(166): NCBI GI NO: 70753 NR Description: histone H3 - garden pea (tentative sequence)
  misc_feature (32)..(166): NCBI GI NO: 122083 NR Description: Histone H3
  misc_feature (20)..(166): NCBI GI NO: 34876364 NR Description: similar to CG31613-PA [Rattus norvegicus]
  misc_feature (31)..(166): NCBI GI NO: 122070 NR Description: Histone H3
  misc_feature (31)..(166): NCBI GI NO: 37546835 NR Description: similar to histone protein Hist2h3c1
  misc_feature (31)..(166): NCBI GI NO: 34876396 NR Description: similar to H3 histone family, member I
ITAKSPRKSTPPQFHAATNSPSSAPSTKAPMARTKQTARKSTGGKAPRKQLATKAARKSAPATGGVKKPHRFRPGTVALREIRKYQKSTELLIRKLPFQRLVREIAQDFKTDLRFQSSAVAALQEAAEAYLVGLFEDTNLCAIHAKRVTIMPKDIQLARRIRGERA

SEQ ID NO: 30406 - protein, 136 aa, Zea mays subsp. mays
  peptide (1)..(136): Ceres Seq. ID no. 12352968
  misc_feature (17)..(135): Pfam Name: Pfam Description:  Core histone H2A/H2B/H3/H4
  misc_feature (1)..(136): NCBI GI NO: 15232146 NR Description: histone H3, putative; protein id: At3g27360
  misc_feature (1)..(136): NCBI GI NO: 122087 NR Description: Histone H3
  misc_feature (1)..(136): NCBI GI NO: 1362108 NR Description: histone H3 homolog - common tobacco
  misc_feature (1)..(136): NCBI GI NO: 166384 NR Description: histone H3 (H3-1.1)
  misc_feature (2)..(136): NCBI GI NO: 70753 NR Description: histone H3 - garden pea (tentative sequence)
  misc_feature (2)..(136): NCBI GI NO: 122083 NR Description: Histone H3
  misc_feature (1)..(136): NCBI GI NO: 34876364 NR Description: similar to CG31613-PA [Rattus norvegicus]
  misc_feature (1)..(136): NCBI GI NO: 122070 NR Description: Histone H3
  misc_feature (1)..(136): NCBI GI NO: 37546835 NR Description: similar to histone protein Hist2h3c1
  misc_feature (1)..(136): NCBI GI NO: 34876396 NR Description: similar to H3 histone family, member I
MARTKQTARKSTGGKAPRKQLATKAARKSAPATGGVKKPHRFRPGTVALREIRKYQKSTELLIRKLPFQRLVREIAQDFKTDLRFQSSAVAALQEAAEAYLVGLFEDTNLCAIHAKRVTIMPKDIQLARRIRGERA

SEQ ID NO: 30407 - protein, 103 aa, Zea mays subsp. mays
  peptide (1)..(103): Ceres Seq. ID no. 12352969
NHCQIPQKINSSPIPRCHQLAVLRAKHQSSDGPHEADGAQVDGRQGAPQAAGDQGGAQVCAGHRRREEAPPLPPRHRRAPGDPQVPEEHGAAHPQVALPAPRP

SEQ ID NO: 30408 - DNA, 1396 bp, Zea mays subsp. mays
  misc_feature (1)..(1396): Ceres Seq. ID no. 12407155
  misc_feature (387)..(387): n is a, c, t, g, unknown, or other
  misc_feature (309)..(309): n is a, c, t, g, unknown, or other
  misc_feature (212)..(212): n is a, c, t, g, unknown, or other
  misc_feature (388)..(388): n is a, c, t, g, unknown, or other
  misc_feature (301)..(301): n is a, c, t, g, unknown, or other
  misc_feature (317)..(317): n is a, c, t, g, unknown, or other
  misc_feature (302)..(302): n is a, c, t, g, unknown, or other
agtcacaactcacaatcacccagcgacagacaacaactacccagtccgtcgtcccggcttccgtgcgggccggggtttcccacgagcgcgcacggcacggcgccgccagcaaggtcacgagtcgggtggaggcatcggacatggccaccacgacggtgacgacgactgcggaggcggcgagcgcgcccgggaagcggcgcggcggggggtgntgcgccctcgcggcggcggcggcgagcgtcgtgcccgtgaaggcggcgggtgagcaggggcagcagccgctgccgctgccgcggctggnncggttcnaggagctnccggactacctgcgcgacaacgagttcatccacgcgcactaccgctgcgagtggtccgtccgcgacgcgnngcgcagcgccctcgcctggcacaacgagacgctcaacgtctggagccatctcggaggcttcttcctgttcctgtacctcgccgtcgccgagccaacggggacggtggccggcggcgccggcgccggagccgccccgggtatcgtgacgttcgtgctcgcgtcggccaacacctcctggtcttcgtgggaggccagcagtaactcgagcttgacggccagcaagggtttgatggccgtgttcgggagcagcgacggcgacgcccacgcggtgccgaggtggccgcggacggtgttcctggcgggcgcgatggcgtgcctggcggtgagcgcggcggcgcacctgctggcgtgccactcgcgccgcttcacgcgcctcttctggcagctcgactacgcggggatcgcggtgatgatcgtcgcctccttcttccctcccgtctactacgccttcctcggccgcgcccgcacgcagctcgtctacctgtccgccgtcaccctgctgggcctgctggtggtggcgctgctcctggcgcccgcgcgctcgtcgccgcgcctgcgccacctccgcgccggcctcttcgtgtccatggccttctccggggtgctgccggcgctgcacgcgctgtggctcaactgggtacaccgcgagtgccacctcgcgctggcgctcgagctcctcatgggcctcgtgtacgccgccggcgccgggttctacgtcacccgcgtgccggagcgctggagccccggcaggttcgactgcgtcggccacagccaccagatcttccacgtgctcgtgctcgtcggcgcgctcacgcactacgccgccaccgccatcctcatcgactggcgagaggcgatggccgtcgctgccggcggggcatcggtgctctcgtgatccgtgactgcaaagcagcgcagtgtatatgtaggtgaagggggtactatcgattcgttcattctttgtacgcgacgtcgatttatttacctcaatcgaaatatttgttcggc

SEQ ID NO: 30409 - protein, 426 aa, Zea mays subsp. mays
  peptide (1)..(426): Ceres Seq. ID no. 12407156
  misc_feature (134)..(405): Pfam Name: Hly-III / UPF0073 Pfam Description: Uncharacterised protein family
  misc_feature (88)..(414): NCBI GI NO: 18377749 NR Description: unknown protein [Arabidopsis thaliana]
  misc_feature (88)..(414): NCBI GI NO: 30688829 NR Description: expressed protein [Arabidopsis thaliana]
  misc_feature (90)..(414): NCBI GI NO: 13272399 NR Description: hypothetical protein [Arabidopsis thaliana]
  misc_feature (90)..(414): NCBI GI NO: 18400468 NR Description: expressed protein; protein id: At2g24150
  misc_feature (221)..(414): NCBI GI NO: 25407688 NR Description: hypothetical protein AT4g30850
  misc_feature (88)..(169): NCBI GI NO: 25407688 NR Description: hypothetical protein AT4g30850
  misc_feature (238)..(414): NCBI GI NO: 25309925 NR Description: hypothetical protein At2g24150
  misc_feature (90)..(157): NCBI GI NO: 25309925 NR Description: hypothetical protein At2g24150
  misc_feature (204)..(413): NCBI GI NO: 15241302 NR Description: putative protein; protein id: At5g20270
  misc_feature (91)..(158): NCBI GI NO: 15241302 NR Description: putative protein; protein id: At5g20270
  misc_feature (70)..(70): Xaa is any aa, unknown or other
  misc_feature (100)..(100): Xaa is any aa, unknown or other
  misc_feature (103)..(103): Xaa is any aa, unknown or other
  misc_feature (105)..(105): Xaa is any aa, unknown or other
  misc_feature (129)..(129): Xaa is any aa, unknown or other
SQLTITQRQTTTTQSVVPASVRAGVSHERARHGAASKVTSRVEASDMATTTVTTTAEAASAPGKRRGGGXCALAAAAASVVPVKAAGEQGQQPLPLPRLXRFXEXPDYLRDNEFIHAHYRCEWSVRDAXRSALAWHNETLNVWSHLGGFFLFLYLAVAEPTGTVAGGAGAGAAPGIVTFVLASANTSWSSWEASSNSSLTASKGLMAVFGSSDGDAHAVPRWPRTVFLAGAMACLAVSAAAHLLACHSRRFTRLFWQLDYAGIAVMIVASFFPPVYYAFLGRARTQLVYLSAVTLLGLLVVALLLAPARSSPRLRHLRAGLFVSMAFSGVLPALHALWLNWVHRECHLALALELLMGLVYAAGAGFYVTRVPERWSPGRFDCVGHSHQIFHVLVLVGALTHYAATAILIDWREAMAVAAGGASVLS

SEQ ID NO: 30410 - protein, 380 aa, Zea mays subsp. mays
  peptide (1)..(380): Ceres Seq. ID no. 12407157
  misc_feature (88)..(359): Pfam Name: Hly-III / UPF0073 Pfam Description: Uncharacterised protein family
  misc_feature (42)..(368): NCBI GI NO: 18377749 NR Description: unknown protein [Arabidopsis thaliana]
  misc_feature (42)..(368): NCBI GI NO: 30688829 NR Description: expressed protein [Arabidopsis thaliana]
  misc_feature (44)..(368): NCBI GI NO: 13272399 NR Description: hypothetical protein [Arabidopsis thaliana]
  misc_feature (44)..(368): NCBI GI NO: 18400468 NR Description: expressed protein; protein id: At2g24150
  misc_feature (175)..(368): NCBI GI NO: 25407688 NR Description: hypothetical protein AT4g30850
  misc_feature (42)..(123): NCBI GI NO: 25407688 NR Description: hypothetical protein AT4g30850
  misc_feature (192)..(368): NCBI GI NO: 25309925 NR Description: hypothetical protein At2g24150
  misc_feature (44)..(111): NCBI GI NO: 25309925 NR Description: hypothetical protein At2g24150
  misc_feature (158)..(367): NCBI GI NO: 15241302 NR Description: putative protein; protein id: At5g20270
  misc_feature (45)..(112): NCBI GI NO: 15241302 NR Description: putative protein; protein id: At5g20270
  misc_feature (24)..(24): Xaa is any aa, unknown or other
  misc_feature (54)..(54): Xaa is any aa, unknown or other
  misc_feature (57)..(57): Xaa is any aa, unknown or other
  misc_feature (59)..(59): Xaa is any aa, unknown or other
  misc_feature (83)..(83): Xaa is any aa, unknown or other
MATTTVTTTAEAASAPGKRRGGGXCALAAAAASVVPVKAAGEQGQQPLPLPRLXRFXEXPDYLRDNEFIHAHYRCEWSVRDAXRSALAWHNETLNVWSHLGGFFLFLYLAVAEPTGTVAGGAGAGAAPGIVTFVLASANTSWSSWEASSNSSLTASKGLMAVFGSSDGDAHAVPRWPRTVFLAGAMACLAVSAAAHLLACHSRRFTRLFWQLDYAGIAVMIVASFFPPVYYAFLGRARTQLVYLSAVTLLGLLVVALLLAPARSSPRLRHLRAGLFVSMAFSGVLPALHALWLNWVHRECHLALALELLMGLVYAAGAGFYVTRVPERWSPGRFDCVGHSHQIFHVLVLVGALTHYAATAILIDWREAMAVAAGGASVLS

SEQ ID NO: 30411 - protein, 221 aa, Zea mays subsp. mays
  peptide (1)..(221): Ceres Seq. ID no. 12407158
  misc_feature (1)..(200): Pfam Name: Hly-III / UPF0073 Pfam Description: Uncharacterised protein family
  misc_feature (1)..(209): NCBI GI NO: 18377749 NR Description: unknown protein [Arabidopsis thaliana]
  misc_feature (1)..(209): NCBI GI NO: 30688829 NR Description: expressed protein [Arabidopsis thaliana]
  misc_feature (1)..(209): NCBI GI NO: 13272399 NR Description: hypothetical protein [Arabidopsis thaliana]
  misc_feature (1)..(209): NCBI GI NO: 18400468 NR Description: expressed protein; protein id: At2g24150
  misc_feature (16)..(209): NCBI GI NO: 25407688 NR Description: hypothetical protein AT4g30850
  misc_feature (33)..(209): NCBI GI NO: 25309925 NR Description: hypothetical protein At2g24150
  misc_feature (1)..(208): NCBI GI NO: 15241302 NR Description: putative protein; protein id: At5g20270
  misc_feature (14)..(208): NCBI GI NO: 15235657 NR Description: expressed protein; protein id: At4g37680
  misc_feature (14)..(199): NCBI GI NO: 15233813 NR Description: putative protein; protein id: At4g38320.1
  misc_feature (14)..(159): NCBI GI NO: 20330770 NR Description: Hypothetical protein
MAVFGSSDGDAHAVPRWPRTVFLAGAMACLAVSAAAHLLACHSRRFTRLFWQLDYAGIAVMIVASFFPPVYYAFLGRARTQLVYLSAVTLLGLLVVALLLAPARSSPRLRHLRAGLFVSMAFSGVLPALHALWLNWVHRECHLALALELLMGLVYAAGAGFYVTRVPERWSPGRFDCVGHSHQIFHVLVLVGALTHYAATAILIDWREAMAVAAGGASVLS

SEQ ID NO: 30412 - DNA, 1452 bp, Zea mays subsp. mays
  misc_feature (1)..(1452): Ceres Seq. ID no. 12405369
  misc_feature (579)..(579): n is a, c, t, g, unknown, or other
  misc_feature (508)..(508): n is a, c, t, g, unknown, or other
  misc_feature (509)..(509): n is a, c, t, g, unknown, or other
gttctacgcccatttggcgagcaacgacatgagccccgcgccgaggaacagggcgacgtacgccgccagctggagcttggcgttcgtctgcagcctcgggttgctgaagtccgcggcgaggagatcgaccagggacatgtacaccaggatccctgcggcggccgcgttgaagacgccctccacgaccagggcggtggcgccgtgcctgctgtagccggaagcgatggcgatgcccagcgcgatgcccgcgggagcggtgagcgagaagaaggccgccatgaccacggccgccctcgccttgaactctgcctggataggtatcgacggattgtgctcagggaaaaggacaggttgtttgtttgttttttcttcatggcatggcgtgtgttcttgtcgaggaggtgccccaagtgggcgttcggaatgctgggaaggtgctcacctgagagatcaccctgtgcctgatggacacggcgacggcggaggcatcctgaggcgaggcaccggnngtggccgtgccctccgtgggcgtgcgtgtgcgcgtgcacgtggcccgcgggctcggcggcggcgccctcntcgtccgcgggcgccgcgcggccctggcctccgtcgacggcgtcgtcgtcgacggggcgcgccttgcggatgtgcgcgcgctggtagtagcccgcggcggcggagtcgaccatcatggtggccatggcagagcacatggcgacgagtcccgcgtaggggaacccgccggccctggcgccgccgccgcaggggggcgcgagcgcgtcgaaggccgcgggcaggatgtgcaccatgccggtggcgaggatgacccccgcggcgaacgccttgacggcgaagaagacgtccccgtcggggcgcagcgccgaggcggagcggcccagcagcgggaccagcacccccgccgcgcccgacgccaggatggacgccaccgcgacgagcttcagccgcagcgccccgcgcgcgtcctcctccttgatcgccgccgcctcgccgccgccacaatcgcaccccacgcccgccgctgccgccgcgccgaccccgggcgtcacctgaacgaggagcagtagcacagcgagccacgccggcagagacgggggaagaggaacccgaactcgcgtggcgtccatggcgtgcgcgcacgtgcgcctggcgtgggagagagggccggtgcggtgagtgacggagggagggagtcggcgccgcgcgcgcgctgagctatataaagctccgcggccgcgagtgtggtgacatggtgagctcacactccggcaacgccgctttgaagcgtggtgggccctgagcagtgtgcaccgtccgatctgggtgtgtgggcacgctctccaactggcagcaagtgttggtgttgccgtggaccttttgtcgtgattgtttggaaaaaacggatcaggtttgccaaaaaaaaaaaaaaaa

SEQ ID NO: 30413 - protein, 201 aa, Zea mays subsp. mays
  peptide (1)..(201): Ceres Seq. ID no. 12405370
  misc_feature (58)..(201): NCBI GI NO: 23103422 NR Description: hypothetical protein [Azotobacter vinelandii]
  misc_feature (91)..(201): NCBI GI NO: 29247944 NR Description: GLP_26_54603_52153 [Giardia lamblia ATCC 50803]
  misc_feature (136)..(201): NCBI GI NO: 11095327 NR Description: unknown [Paracoccus pantotrophus]
  misc_feature (103)..(201): NCBI GI NO: 25143299 NR Description: pre-mRNA splicing SR protein related RSR-1 (68
  misc_feature (100)..(201): NCBI GI NO: 39592411 NR Description: Hypothetical protein CBG07956
  misc_feature (113)..(201): NCBI GI NO: 34905768 NR Description: P0401G10.10
  misc_feature (101)..(201): NCBI GI NO: 5821145 NR Description: RNA binding protein [Homo sapiens]
  misc_feature (101)..(201): NCBI GI NO: 5821143 NR Description: RNA binding protein [Homo sapiens]
  misc_feature (101)..(201): NCBI GI NO: 6649242 NR Description: splicing coactivator subunit SRm300 [Homo sapiens]
  misc_feature (101)..(201): NCBI GI NO: 19923466 NR Description: splicing coactivator subunit SRm300
  misc_feature (95)..(95): Xaa is any aa, unknown or other
  misc_feature (96)..(96): Xaa is any aa, unknown or other
  misc_feature (119)..(119): Xaa is any aa, unknown or other
MAMPSAMPAGAVSEKKAAMTTAALALNSAWIGIDGLCSGKRTGCLFVFSSWHGVCSCRGGAPSGRSECWEGAHLRDHPVPDGHGDGGGILRRGTXXGRALRGRACARARGPRARRRRPXRPRAPRGPGLRRRRRRRRGAPCGCARAGSSPRRRSRPSWWPWQSTWRRVPRRGTRRPWRRRRRGARARRRPRAGCAPCRWRG

SEQ ID NO: 30414 - protein, 199 aa, Zea mays subsp. mays
  peptide (1)..(199): Ceres Seq. ID no. 12405371
  misc_feature (56)..(199): NCBI GI NO: 23103422 NR Description: hypothetical protein [Azotobacter vinelandii]
  misc_feature (89)..(199): NCBI GI NO: 29247944 NR Description: GLP_26_54603_52153 [Giardia lamblia ATCC 50803]
  misc_feature (134)..(199): NCBI GI NO: 11095327 NR Description: unknown [Paracoccus pantotrophus]
  misc_feature (101)..(199): NCBI GI NO: 25143299 NR Description: pre-mRNA splicing SR protein related RSR-1 (68
  misc_feature (98)..(199): NCBI GI NO: 39592411 NR Description: Hypothetical protein CBG07956
  misc_feature (111)..(199): NCBI GI NO: 34905768 NR Description: P0401G10.10
  misc_feature (99)..(199): NCBI GI NO: 5821145 NR Description: RNA binding protein [Homo sapiens]
  misc_feature (99)..(199): NCBI GI NO: 5821143 NR Description: RNA binding protein [Homo sapiens]
  misc_feature (99)..(199): NCBI GI NO: 6649242 NR Description: splicing coactivator subunit SRm300 [Homo sapiens]
  misc_feature (99)..(199): NCBI GI NO: 19923466 NR Description: splicing coactivator subunit SRm300
  misc_feature (93)..(93): Xaa is any aa, unknown or other
  misc_feature (94)..(94): Xaa is any aa, unknown or other
  misc_feature (117)..(117): Xaa is any aa, unknown or other
MPSAMPAGAVSEKKAAMTTAALALNSAWIGIDGLCSGKRTGCLFVFSSWHGVCSCRGGAPSGRSECWEGAHLRDHPVPDGHGDGGGILRRGTXXGRALRGRACARARGPRARRRRPXRPRAPRGPGLRRRRRRRRGAPCGCARAGSSPRRRSRPSWWPWQSTWRRVPRRGTRRPWRRRRRGARARRRPRAGCAPCRWRG

SEQ ID NO: 30415 - protein, 195 aa, Zea mays subsp. mays
  peptide (1)..(195): Ceres Seq. ID no. 12405372
  misc_feature (52)..(195): NCBI GI NO: 23103422 NR Description: hypothetical protein [Azotobacter vinelandii]
  misc_feature (85)..(195): NCBI GI NO: 29247944 NR Description: GLP_26_54603_52153 [Giardia lamblia ATCC 50803]
  misc_feature (130)..(195): NCBI GI NO: 11095327 NR Description: unknown [Paracoccus pantotrophus]
  misc_feature (97)..(195): NCBI GI NO: 25143299 NR Description: pre-mRNA splicing SR protein related RSR-1 (68
  misc_feature (94)..(195): NCBI GI NO: 39592411 NR Description: Hypothetical protein CBG07956
  misc_feature (107)..(195): NCBI GI NO: 34905768 NR Description: P0401G10.10
  misc_feature (95)..(195): NCBI GI NO: 5821145 NR Description: RNA binding protein [Homo sapiens]
  misc_feature (95)..(195): NCBI GI NO: 5821143 NR Description: RNA binding protein [Homo sapiens]
  misc_feature (95)..(195): NCBI GI NO: 6649242 NR Description: splicing coactivator subunit SRm300 [Homo sapiens]
  misc_feature (95)..(195): NCBI GI NO: 19923466 NR Description: splicing coactivator subunit SRm300
  misc_feature (89)..(89): Xaa is any aa, unknown or other
  misc_feature (90)..(90): Xaa is any aa, unknown or other
  misc_feature (113)..(113): Xaa is any aa, unknown or other
MPAGAVSEKKAAMTTAALALNSAWIGIDGLCSGKRTGCLFVFSSWHGVCSCRGGAPSGRSECWEGAHLRDHPVPDGHGDGGGILRRGTXXGRALRGRACARARGPRARRRRPXRPRAPRGPGLRRRRRRRRGAPCGCARAGSSPRRRSRPSWWPWQSTWRRVPRRGTRRPWRRRRRGARARRRPRAGCAPCRWRG

SEQ ID NO: 30416 - DNA, 1488 bp, Zea mays subsp. mays
  misc_feature (1)..(1488): Ceres Seq. ID no. 12349268
aagatcaagccaccaccaccgccagcaagagcagagaggcgagaccgcgagagtgtacgtgccaccagcagcagcagcaatggccgccgccgccaccacctcctcatcctcccacctgctcctcctctcccgccagcaggcggcctccctacgatgccgcctctccttcctcggccagcccagaaggcccggcagggtcacggcccaggcgccggccgctaaggacgtgcggtgcatggcggccgtggacactgcggcgtccgcggcggcggcggagacgagccccaagtcgagcagcagctacgagatcgtgacgctcacgacgtggctgctgcagcaggagcggaccggcgcgatcgacaacgagatgaccatcgtgctggccagcatatccacggcgtgcaagcagatcgccgcgctggtgcagcgcgcgcccatctccaacctcacgggcgttcagggcgccgtcaacgtgcagggcgaggaccagaagaagctcgatgtcgtctccaacgaggtgttctccaactgcctcaagtcgagcgggcgcaccggcgtgatcgcctcggaggaggaggacgtgcccgtagcggtggagcagagctactccggcaactacatcgtcgtgttcgaccctctcgacggctcctccaacatcgacgccgccgtctccactggctccatcttcggcatctacaaccccaacgacgagtgcctcgccgacgtcgacgacaatgacacccttgattcggtggagcagaggtgcatcgtgaacgtgtgccagccggggagcaacctgctggccgccggctactgcatgtactcgagctccgtgatcttcgtgctcaccgtcggcaccggggtgtacgtgttcacgctggaccccatgtacggcgagttcgtgctgacgcaggagaaggtgcagatccccaaggcgggcaagatctacgccttcaacgagggcaactacgcgctctgggacgacaagctgaagctgtacatggacagcctcaaggagcccggcgactcggggaagccctactccgcgcggtacatcggcagcctcgtcggcgacttccaccgcactctgctctacggagggatctacgggtaccccagggacaagaagagcaagaacggcaagctgcggcttctctacgagtgcgcccccatgagcttcatcgtcgagcaggccggtggcaagggctctgacggccaccagagaattcttgacatcacacctacagagatccaccaaagagtgcctctgtacattgggagcgtggaggaagtggacaaggtggagaaattcctggcttgaataccagagctctctcatcagatggactcccgaagacatcaagtttagggagggaatatgcatgtactctctctttcccaccccaaataagtcttcttcatctcatatttctcatctcatatttcgataaatcaaacaatctcaattttgatctaatatatatacac

SEQ ID NO: 30417 - protein, 439 aa, Zea mays subsp. mays
  peptide (1)..(439): Ceres Seq. ID no. 12349269
  misc_feature (105)..(439): Pfam Name: Pfam Description:  Fructose-1-6-bisphosphatase
  misc_feature (27)..(439): NCBI GI NO: 119745 NR Description: FRUCTOSE-1,6-BISPHOSPHATASE, CHLOROPLAST PRECURSOR
  misc_feature (27)..(439): NCBI GI NO: 4218951 NR Description: fructose-1,6-bisphosphatase precursor
  misc_feature (27)..(439): NCBI GI NO: 585118 NR Description: FRUCTOSE-1,6-BISPHOSPHATASE, CHLOROPLAST PRECURSOR
  misc_feature (27)..(439): NCBI GI NO: 15232408 NR Description: fructose-bisphosphatase precursor
  misc_feature (27)..(439): NCBI GI NO: 99693 NR Description: fructose-bisphosphatase (EC 3
  misc_feature (26)..(439): NCBI GI NO: 4585576 NR Description: fructose-1,6-bisphosphatase precursor
  misc_feature (73)..(439): NCBI GI NO: 3915687 NR Description: Fructose-1,6-bisphosphatase, chloroplast precursor
  misc_feature (29)..(439): NCBI GI NO: 14318171 NR Description: fructose-1,6-bisphosphatase [Pisum sativum]
  misc_feature (85)..(439): NCBI GI NO: 6730296 NR Description: Chain A
  misc_feature (105)..(433): NCBI GI NO: 16519317 NR Description: fructose 1,6-bisphosphatase
RSSHHHRQQEQRGETARVYVPPAAAAMAAAATTSSSSHLLLLSRQQAASLRCRLSFLGQPRRPGRVTAQAPAAKDVRCMAAVDTAASAAAAETSPKSSSSYEIVTLTTWLLQQERTGAIDNEMTIVLASISTACKQIAALVQRAPISNLTGVQGAVNVQGEDQKKLDVVSNEVFSNCLKSSGRTGVIASEEEDVPVAVEQSYSGNYIVVFDPLDGSSNIDAAVSTGSIFGIYNPNDECLADVDDNDTLDSVEQRCIVNVCQPGSNLLAAGYCMYSSSVIFVLTVGTGVYVFTLDPMYGEFVLTQEKVQIPKAGKIYAFNEGNYALWDDKLKLYMDSLKEPGDSGKPYSARYIGSLVGDFHRTLLYGGIYGYPRDKKSKNGKLRLLYECAPMSFIVEQAGGKGSDGHQRILDITPTEIHQRVPLYIGSVEEVDKVEKFLA

SEQ ID NO: 30418 - protein, 413 aa, Zea mays subsp. mays
  peptide (1)..(413): Ceres Seq. ID no. 12349270
  misc_feature (79)..(413): Pfam Name: Pfam Description:  Fructose-1-6-bisphosphatase
  misc_feature (1)..(413): NCBI GI NO: 119745 NR Description: FRUCTOSE-1,6-BISPHOSPHATASE, CHLOROPLAST PRECURSOR
  misc_feature (1)..(413): NCBI GI NO: 4218951 NR Description: fructose-1,6-bisphosphatase precursor
  misc_feature (1)..(413): NCBI GI NO: 585118 NR Description: FRUCTOSE-1,6-BISPHOSPHATASE, CHLOROPLAST PRECURSOR
  misc_feature (1)..(413): NCBI GI NO: 15232408 NR Description: fructose-bisphosphatase precursor
  misc_feature (1)..(413): NCBI GI NO: 99693 NR Description: fructose-bisphosphatase (EC 3
  misc_feature (1)..(413): NCBI GI NO: 4585576 NR Description: fructose-1,6-bisphosphatase precursor
  misc_feature (47)..(413): NCBI GI NO: 3915687 NR Description: Fructose-1,6-bisphosphatase, chloroplast precursor
  misc_feature (3)..(413): NCBI GI NO: 14318171 NR Description: fructose-1,6-bisphosphatase [Pisum sativum]
  misc_feature (59)..(413): NCBI GI NO: 6730296 NR Description: Chain A
  misc_feature (79)..(407): NCBI GI NO: 16519317 NR Description: fructose 1,6-bisphosphatase
MAAAATTSSSSHLLLLSRQQAASLRCRLSFLGQPRRPGRVTAQAPAAKDVRCMAAVDTAASAAAAETSPKSSSSYEIVTLTTWLLQQERTGAIDNEMTIVLASISTACKQIAALVQRAPISNLTGVQGAVNVQGEDQKKLDVVSNEVFSNCLKSSGRTGVIASEEEDVPVAVEQSYSGNYIVVFDPLDGSSNIDAAVSTGSIFGIYNPNDECLADVDDNDTLDSVEQRCIVNVCQPGSNLLAAGYCMYSSSVIFVLTVGTGVYVFTLDPMYGEFVLTQEKVQIPKAGKIYAFNEGNYALWDDKLKLYMDSLKEPGDSGKPYSARYIGSLVGDFHRTLLYGGIYGYPRDKKSKNGKLRLLYECAPMSFIVEQAGGKGSDGHQRILDITPTEIHQRVPLYIGSVEEVDKVEKFLA

SEQ ID NO: 30419 - protein, 361 aa, Zea mays subsp. mays
  peptide (1)..(361): Ceres Seq. ID no. 12349271
  misc_feature (27)..(361): Pfam Name: Pfam Description:  Fructose-1-6-bisphosphatase
  misc_feature (1)..(361): NCBI GI NO: 119745 NR Description: FRUCTOSE-1,6-BISPHOSPHATASE, CHLOROPLAST PRECURSOR
  misc_feature (1)..(361): NCBI GI NO: 4218951 NR Description: fructose-1,6-bisphosphatase precursor
  misc_feature (1)..(361): NCBI GI NO: 585118 NR Description: FRUCTOSE-1,6-BISPHOSPHATASE, CHLOROPLAST PRECURSOR
  misc_feature (1)..(361): NCBI GI NO: 15232408 NR Description: fructose-bisphosphatase precursor
  misc_feature (1)..(361): NCBI GI NO: 99693 NR Description: fructose-bisphosphatase (EC 3
  misc_feature (1)..(361): NCBI GI NO: 4585576 NR Description: fructose-1,6-bisphosphatase precursor
  misc_feature (1)..(361): NCBI GI NO: 3915687 NR Description: Fructose-1,6-bisphosphatase, chloroplast precursor
  misc_feature (1)..(361): NCBI GI NO: 14318171 NR Description: fructose-1,6-bisphosphatase [Pisum sativum]
  misc_feature (7)..(361): NCBI GI NO: 6730296 NR Description: Chain A
  misc_feature (27)..(355): NCBI GI NO: 16519317 NR Description: fructose 1,6-bisphosphatase
MAAVDTAASAAAAETSPKSSSSYEIVTLTTWLLQQERTGAIDNEMTIVLASISTACKQIAALVQRAPISNLTGVQGAVNVQGEDQKKLDVVSNEVFSNCLKSSGRTGVIASEEEDVPVAVEQSYSGNYIVVFDPLDGSSNIDAAVSTGSIFGIYNPNDECLADVDDNDTLDSVEQRCIVNVCQPGSNLLAAGYCMYSSSVIFVLTVGTGVYVFTLDPMYGEFVLTQEKVQIPKAGKIYAFNEGNYALWDDKLKLYMDSLKEPGDSGKPYSARYIGSLVGDFHRTLLYGGIYGYPRDKKSKNGKLRLLYECAPMSFIVEQAGGKGSDGHQRILDITPTEIHQRVPLYIGSVEEVDKVEKFLA

SEQ ID NO: 30420 - DNA, 1142 bp, Zea mays subsp. mays
  misc_feature (1)..(1142): Ceres Seq. ID no. 12376498
gcacgagaccattacctagaacatcctaatcgaaaagccgagcagcaaaccaaccagcccacccgccggttggtcacgctcctccccgatcccgaattcccgatctccggccgacgccatggcagccccctccgcggccgtcataggggtgctcgtcctcctcgtcgtgggggcctcgggcgcgcgcctcccaggccgcggcagcaccacccggggagctgcgctgccgcgcgggggagcgccggccacggcggtgttcgcgctgggaagcttctggcggtcggaggcggcgttcgggtgcctccacggcgtgatccgcacctccgtcggctacgctggcggctccaagtccaaccccgagtaccgcaacctcgccgaccacgccgagtgcgtcaaggttgagtatgatccccggttgattcactacaggcaacttttggatgtgttctgggcaagtcatgacccacgtgaggtgtttgggcaagggccagatgttggcaaccagtatagatctgtcatcttcactaatggaaccatcgaggccagattggctggtcttagcaaagaaaaagaacaagctaaagaccgtagcagcgttgttaccacacagatccaaccattgggggtctttcatcatgctgaaccagaacatcagaaatttgaactgaagcgtaaaccgttcctcttgcaattgattgggaatttgccggaggaggagctcctgacatcaacactagctgcaaaactgaatgcatatgccgctgagctctgccctgtgaatacccaaaagagaattaactccaagattgatgaggtcacaaagaaaggatggcccattttaagggacatttaactctttctagcttttggactgaaaccgatcgatgcaatgtagacacagaagaggtgcatgattttgcaaagaagatttttaggaatatttcagctgttcgccactgccatgatgacctcaatcatccattcttcattttgctcacaaagattatatagttggtcataacatgtcgttgtgttacgatatttgtaacgcatattcatggttcgaagcttactcaacagacaactttttttcgtattgtttgtttttcatttatgaaaatatagatgttttgtttttattg

SEQ ID NO: 30421 - protein, 244 aa, Zea mays subsp. mays
  peptide (1)..(244): Ceres Seq. ID no. 12376499
  misc_feature (44)..(195): Pfam Name: Pfam Description:  Peptide methionine sulfoxide reductase
  misc_feature (44)..(244): NCBI GI NO: 15227955 NR Description: putative peptide methionine sulfoxide reductase
  misc_feature (45)..(215): NCBI GI NO: 33089114 NR Description: methionine sulfoxide reductase
  misc_feature (43)..(215): NCBI GI NO: 7937 NR Description: put. Eip 28 (aa 1-255) [Drosophila melanogaster]
  misc_feature (43)..(215): NCBI GI NO: 119251 NR Description: Ecdysone-induced protein 28/29 kDa
  misc_feature (43)..(215): NCBI GI NO: 24664627 NR Description: Ecdysone-induced protein 28/29kD CG7266-PA
  misc_feature (43)..(186): NCBI GI NO: 22968448 NR Description: hypothetical protein [Rhodospirillum rubrum]
  misc_feature (45)..(193): NCBI GI NO: 15678563 NR Description: peptide methionine sulfoxide reductase
  misc_feature (45)..(193): NCBI GI NO: 20090291 NR Description: protein-methionine-S-oxide reductase
  misc_feature (43)..(228): NCBI GI NO: 28557615 NR Description: RE51574p [Drosophila melanogaster]
  misc_feature (43)..(215): NCBI GI NO: 311724 NR Description: EIP29 [Drosophila melanogaster]
MAAPSAAVIGVLVLLVVGASGARLPGRGSTTRGAALPRGGAPATAVFALGSFWRSEAAFGCLHGVIRTSVGYAGGSKSNPEYRNLADHAECVKVEYDPRLIHYRQLLDVFWASHDPREVFGQGPDVGNQYRSVIFTNGTIEARLAGLSKEKEQAKDRSSVVTTQIQPLGVFHHAEPEHQKFELKRKPFLLQLIGNLPEEELLTSTLAAKLNAYAAELCPVNTQKRINSKIDEVTKKGWPILRDI

SEQ ID NO: 30422 - protein, 133 aa, Zea mays subsp. mays
  peptide (1)..(133): Ceres Seq. ID no. 12376500
ARDHYLEHPNRKAEQQTNQPTRRLVTLLPDPEFPISGRRHGSPLRGRHRGARPPRRGGLGRAPPRPRQHHPGSCAAARGSAGHGGVRAGKLLAVGGGVRVPPRRDPHLRRLRWRLQVQPRVPQPRRPRRVRQG

SEQ ID NO: 30423 - DNA, 1498 bp, Zea mays subsp. mays
  misc_feature (1)..(1498): Ceres Seq. ID no. 13570285
agcaaaaaggaagagtaacagggaggccggaatctttcgatcgagggcaccaccggcggcgggggtagtagcacaggaggggagccgtggagcgatccgtcgggcatctgcgcccgatgtgggcgtggggctgcgtcgagcgcgtggccgcgggcttcctcggcggccccctcgccgccggcggccgctggaacaccgccgtcgccgtcggggtcacggccgccgcgggcctcgtgctcgtcgccatcgtcgtctcttcccgcagaggcgggctcaaatctccgtggtggcggcggcggaggaaggcgccacttacggcgcaagagtggtgcgacctgttcacaccgcaggggaagcttcaggacggcggagtgaagcttctgaagaaagttcggagcggagggattgaaccgagtatcagagcgcaagtctggccgttccttctgggagtgtaagtaatctggagtgttgatcacgaaaccgttgttttcatgcttggagatgtacaattagatccacacgatactttggaacaagatatgtgcrkgctaattccttaattacttcatmcgaagagattatattgcaattataataacattaaccatggtccatgagatggatgaacctgcattttasggagacakgtactttatatcatcaagctgaacttaagaagttgtggactactaaatgggcacaacaaaattcataaattttcttgctagatgtacaaatgaacacgcaatatttgtttttttctttattttttccacagttcaaccagatttgacgtsgtgkadggccattgaaggaccacatttatttgcatctgawccatctgccgcctgaggttytcaaagaraggctccctggcatttctgaaactgctgctatttttgctggtgttgacgtcaccaaggagcccattccagttttgcctactgtgcwytacaatatgggtggtatcccaacgaactaccatggggaggtagtggatatcaagggtgataatccagatgctgttrtycctggkctaatggctgctggtgaagcagcctgtgcatctgttcatggtgcgaataggctaggcgcaaattcgcttcttgacatagttgtttttggcagagcttgtgcaaacagggtagcagatatttctaaaccaggtgagaagcagaaacctctggaaaaagatgctggagaaaagaccatagcctggttggacaagctgaggaatgcgaatgggtcattgccaacttccaagatccgtctcaacatgcagcgtgttatgcaaaataatgctgctgtattccgtacacaagaaacacttgaagaaggttgtgagctgattagcaaaacatgggaaagtttccatgatgtgaagctcagtgaccggagtctcatttggaactctgacctgatagagacccttgagctggaaaatcttttgataaatgcatgcataaccatgtwttcggcagaggctcggaaggaaagc

SEQ ID NO: 30424 - protein, 180 aa, Zea mays subsp. mays
  peptide (1)..(180): Ceres Seq. ID no. 15222583
  misc_feature (1)..(85): Pfam Name: Pfam Description:  FAD binding domain
  misc_feature (1)..(179): NCBI GI NO: 34394418 NR Description: putative succinate dehydrogenase flavoprotein alpha subunit
  misc_feature (1)..(179): NCBI GI NO: 15240075 NR Description: succinate dehydrogenase
  misc_feature (1)..(179): NCBI GI NO: 15224174 NR Description: succinate dehydrogenase
  misc_feature (1)..(179): NCBI GI NO: 21231574 NR Description: succinate dehydrogenase flavoprotein subunit
  misc_feature (1)..(179): NCBI GI NO: 37362284 NR Description: succinate dehydrogenase complex
  misc_feature (1)..(179): NCBI GI NO: 28374211 NR Description: Similar to succinate dehydrogenase complex
  misc_feature (1)..(179): NCBI GI NO: 21242816 NR Description: succinate dehydrogenase flavoprotein subunit
  misc_feature (1)..(179): NCBI GI NO: 22996847 NR Description: hypothetical protein [Xylella fastidiosa Ann-1]
  misc_feature (1)..(179): NCBI GI NO: 15837674 NR Description: succinate dehydrogenase, flavoprotein subunit
  misc_feature (1)..(179): NCBI GI NO: 28198269 NR Description: succinate dehydrogenase flavoprotein subunit
  misc_feature (24)..(24): Xaa is any aa, unknown or other
  misc_feature (26)..(26): Xaa is any aa, unknown or other
  misc_feature (172)..(172): Xaa is any aa, unknown or other
MGGIPTNYHGEVVDIKGDNPDAVXPXLMAAGEAACASVHGANRLGANSLLDIVVFGRACANRVADISKPGEKQKPLEKDAGEKTIAWLDKLRNANGSLPTSKIRLNMQRVMQNNAAVFRTQETLEEGCELISKTWESFHDVKLSDRSLIWNSDLIETLELENLLINACITMXSAEARKES

SEQ ID NO: 30425 - protein, 153 aa, Zea mays subsp. mays
  peptide (1)..(153): Ceres Seq. ID no. 15222584
  misc_feature (1)..(58): Pfam Name: Pfam Description:  FAD binding domain
  misc_feature (1)..(152): NCBI GI NO: 34394418 NR Description: putative succinate dehydrogenase flavoprotein alpha subunit
  misc_feature (1)..(152): NCBI GI NO: 15240075 NR Description: succinate dehydrogenase
  misc_feature (1)..(152): NCBI GI NO: 15224174 NR Description: succinate dehydrogenase
  misc_feature (1)..(152): NCBI GI NO: 21231574 NR Description: succinate dehydrogenase flavoprotein subunit
  misc_feature (1)..(152): NCBI GI NO: 37362284 NR Description: succinate dehydrogenase complex
  misc_feature (1)..(152): NCBI GI NO: 28374211 NR Description: Similar to succinate dehydrogenase complex
  misc_feature (1)..(152): NCBI GI NO: 21242816 NR Description: succinate dehydrogenase flavoprotein subunit
  misc_feature (1)..(152): NCBI GI NO: 22996847 NR Description: hypothetical protein [Xylella fastidiosa Ann-1]
  misc_feature (1)..(152): NCBI GI NO: 15837674 NR Description: succinate dehydrogenase, flavoprotein subunit
  misc_feature (1)..(152): NCBI GI NO: 28198269 NR Description: succinate dehydrogenase flavoprotein subunit
  misc_feature (145)..(145): Xaa is any aa, unknown or other
MAAGEAACASVHGANRLGANSLLDIVVFGRACANRVADISKPGEKQKPLEKDAGEKTIAWLDKLRNANGSLPTSKIRLNMQRVMQNNAAVFRTQETLEEGCELISKTWESFHDVKLSDRSLIWNSDLIETLELENLLINACITMXSAEARKES

SEQ ID NO: 30426 - protein, 135 aa, Zea mays subsp. mays
  peptide (1)..(135): Ceres Seq. ID no. 15222585
AKRKSNREAGIFRSRAPPAAGVVAQEGSRGAIRRASAPDVGVGLRRARGRGLPRRPPRRRRPLEHRRRRRGHGRRGPRARRHRRLFPQRRAQISVVAAAEEGATYGARVVRPVHTAGEASGRRSEASEESSERRD

SEQ ID NO: 30427 - DNA, 1649 bp, Zea mays subsp. mays
  misc_feature (1)..(1649): Ceres Seq. ID no. 12372859
tagttcatttatgatttcctgcgagcacaaagctagcgaagataccaaacaatggggagcacgagcgccacaggcaccacgtcgtcttcctcatcggctgcccacgggggcggtgccgcacacgtactgctcctgccgtacccgggcgcgcagggccatacaaacccgctgctccagttcggccgctgcctcgcctaccacggcctccgccccacgctcgtcacctcgcggtacgtgctctccaccaccccgcctcccggggagcccttcagggtggccgccatttccgatggcttcgacgacggcggggcggccgcgtgccccgacctcgacgtgtactggcgccagctcgaggccgtcggctcggagacgctggcggagctgatccgctccgaggccgccgatgggcggcctgtgcgcgtgctggtttacgacccgcacctgccgtgggcgcgacgggtggcacaggcggccgggctggcggcagcggcgttcctatcgcagccatgcgccgtcgacgtcgtctacggggaggtgtgtgcaggacggctgccactgccggtggtggacgggaaagagctgtttgcacgcgggctgctgggtgtcgagctcggtcccgacgacgttccgccgttcgcagcaaagccagactggtgccctgtgttccttcgggcatcactgcggcaatttgaggggctggaggacgccgacgacgtgctcgtcaactcattccacgagatcgaacccaaggaggcagattatatggccctaacatggcatgcaaagacaataggcccaactttgccatcattttatcttgatgatgaccgtttgcccttgaacaagacttacggtttcaacctcttcaacagcagcgagtcatgtctggcttggcttgacaaacagcttccgtgttctgttgttcttgtatcctatggtactgtctctgattatgatgaagcacagttagaggagcttggcaatggattgtacaattctggcaaaccattcatttgggttgtgaggtcaaacgaagaacacaagttgtccaatgaacttcgtgacaagtgcaaggaacgtggccttattgtttcttggtgcccccagctggaagttctagcacataaagctacaggttgtttcttcacacattgcggatggaactcgacattggaagcaattgttaatggtgtgccaatggtggcaataccacactgggcagaccagccgaccatatcaaaatatatggagagcatgtggggcttgggtgtccgagtgcgcaaggatgagaaaggcttggtaacgagggacgaggtggaaaggtgcatcaaggatgtcatggatggtgatagtaaggataagtataggaagagtgccactatgtggatgcaaaaggccaaggcagctatgcagaatggagggagctcggccaagaatattacagaattcgccgcgaagtattctttaagttaatttttcaaatatttcgtaaaaaaagttaattttcaaagatataatgatagtgttataattacttcctataccttcatggattgtatgccttcctgcatgttatatttttgtctcgggattgtgcgtattacgttttgacttgatgatgtacatgctacagcagcaacctccacgtc

SEQ ID NO: 30428 - protein, 473 aa, Zea mays subsp. mays
  peptide (1)..(473): Ceres Seq. ID no. 12372860
  misc_feature (23)..(469): Pfam Name: Pfam Description:  UDP-glucoronosyl and UDP-glucosyl transferase
  misc_feature (8)..(471): NCBI GI NO: 38345012 NR Description: OSJNBa0052O21.15
  misc_feature (5)..(471): NCBI GI NO: 38345013 NR Description: OSJNBa0052O21.16
  misc_feature (12)..(470): NCBI GI NO: 38345011 NR Description: OSJNBa0052O21.14
  misc_feature (1)..(369): NCBI GI NO: 38345000 NR Description: OSJNBa0052O21.3
  misc_feature (3)..(362): NCBI GI NO: 38344998 NR Description: OSJNBa0052O21.1
  misc_feature (23)..(469): NCBI GI NO: 7385017 NR Description: UDP-glucose:salicylic acid glucosyltransferase
  misc_feature (20)..(466): NCBI GI NO: 33114570 NR Description: glucosyltransferase 2 [Crocus sativus]
  misc_feature (23)..(470): NCBI GI NO: 15221233 NR Description: putative indole-3-acetate beta-glucosyltransferase
  misc_feature (24)..(469): NCBI GI NO: 15224368 NR Description: putative glucosyltransferase; protein id:At2g43820
  misc_feature (24)..(472): NCBI GI NO: 15224372 NR Description: putative glucosyltransferase; protein id:At2g43840
MGSTSATGTTSSSSSAAHGGGAAHVLLLPYPGAQGHTNPLLQFGRCLAYHGLRPTLVTSRYVLSTTPPPGEPFRVAAISDGFDDGGAAACPDLDVYWRQLEAVGSETLAELIRSEAADGRPVRVLVYDPHLPWARRVAQAAGLAAAAFLSQPCAVDVVYGEVCAGRLPLPVVDGKELFARGLLGVELGPDDVPPFAAKPDWCPVFLRASLRQFEGLEDADDVLVNSFHEIEPKEADYMALTWHAKTIGPTLPSFYLDDDRLPLNKTYGFNLFNSSESCLAWLDKQLPCSVVLVSYGTVSDYDEAQLEELGNGLYNSGKPFIWVVRSNEEHKLSNELRDKCKERGLIVSWCPQLEVLAHKATGCFFTHCGWNSTLEAIVNGVPMVAIPHWADQPTISKYMESMWGLGVRVRKDEKGLVTRDEVERCIKDVMDGDSKDKYRKSATMWMQKAKAAMQNGGSSAKNITEFAAKYSLS

SEQ ID NO: 30429 - protein, 236 aa, Zea mays subsp. mays
  peptide (1)..(236): Ceres Seq. ID no. 12372861
  misc_feature (1)..(232): Pfam Name: Pfam Description:  UDP-glucoronosyl and UDP-glucosyl transferase
  misc_feature (1)..(234): NCBI GI NO: 38345012 NR Description: OSJNBa0052O21.15
  misc_feature (1)..(234): NCBI GI NO: 38345013 NR Description: OSJNBa0052O21.16
  misc_feature (1)..(233): NCBI GI NO: 38345011 NR Description: OSJNBa0052O21.14
  misc_feature (1)..(132): NCBI GI NO: 38345000 NR Description: OSJNBa0052O21.3
  misc_feature (1)..(125): NCBI GI NO: 38344998 NR Description: OSJNBa0052O21.1
  misc_feature (1)..(232): NCBI GI NO: 7385017 NR Description: UDP-glucose:salicylic acid glucosyltransferase
  misc_feature (1)..(229): NCBI GI NO: 33114570 NR Description: glucosyltransferase 2 [Crocus sativus]
  misc_feature (1)..(233): NCBI GI NO: 15221233 NR Description: putative indole-3-acetate beta-glucosyltransferase
  misc_feature (1)..(232): NCBI GI NO: 15224368 NR Description: putative glucosyltransferase; protein id:At2g43820
  misc_feature (1)..(235): NCBI GI NO: 15224372 NR Description: putative glucosyltransferase; protein id:At2g43840
MALTWHAKTIGPTLPSFYLDDDRLPLNKTYGFNLFNSSESCLAWLDKQLPCSVVLVSYGTVSDYDEAQLEELGNGLYNSGKPFIWVVRSNEEHKLSNELRDKCKERGLIVSWCPQLEVLAHKATGCFFTHCGWNSTLEAIVNGVPMVAIPHWADQPTISKYMESMWGLGVRVRKDEKGLVTRDEVERCIKDVMDGDSKDKYRKSATMWMQKAKAAMQNGGSSAKNITEFAAKYSLS

SEQ ID NO: 30430 - DNA, 1205 bp, Zea mays subsp. mays
  misc_feature (1)..(1205): Ceres Seq. ID no. 12361617
ctctcgattcggaaaacctccaaccctagccgcgatccgacaacgcctccatccctagccgactgctgcaagcttcagagctcaagagtcagggcgccatggcgacagagacggagaccttcgcctttcaggctgagatcaaccagctgctctcactcatcatcaacaccttctattccaacaaggagatcttcctccgggagctcatttccaactcttccgatgcgttggacaaaatcaggttcgagagcctcactgacaagagcaagctcgatgcgcagccggagctgttcatccacattgtaccagacaaggcttcgaacacgctctccatcatcgacagcggcatcggcatgaccaagtccgaccttgtcaacaacctcggtaccatcgccaggtccgggaccaaggagttcatggaagcccttgctgctggcgctgatgtgtctatgattgggcagttcggtgtcggtttctactctgcctacctcgtcgccgagagggtcgtcgtgaccaccaagcataacgatgacgagcagtacgtgtgggaatcccaggcgggcgggtcgttcactgttactcgtgacacgtctggggagcagcttggcaggggtactaagattacacttttcctcaaggaagatcagttagaataccttgaggagcgtcgcctcaaggatttggtcaagaagcactctgagttcatcagctaccccatctccctgtggaccgaaaagacaacggagaaggagatttctgatgatgaagatgaggaagagaagaaagacgctgaggagggaaaggttgaggatgttgacgaggagaaggaagagaaagaaaaaaagaaaaagaagatcaaggaggtttctcacgagtggtcattgatcaacaagcagaagcccatctggatgaggaagccagaagagatcacaaaggaagaatatgctgccttctacaaaagcttgacaaatgactgggaggagcatctggctgtgaagcacttctctgtggagggtcagctggagttcaaggctgttctctttgttcctaagagggccccgtttgatctcttcgacacaaggaagaagcaaaacaacatcaagctctatgtgcgcagggtgtttatcatggacaactgtgaggaactgatccctgagtggctgagttttgttaagggtattgttgactctgaggaccttcccctc

SEQ ID NO: 30431 - protein, 369 aa, Zea mays subsp. mays
  peptide (1)..(369): Ceres Seq. ID no. 12361618
  misc_feature (185)..(368): Pfam Name: Pfam Description:  Hsp90 protein
  misc_feature (1)..(368): NCBI GI NO: 417154 NR Description: HEAT SHOCK PROTEIN 82
  misc_feature (1)..(368): NCBI GI NO: 5123910 NR Description: HSP80-2 [Triticum aestivum]
  misc_feature (1)..(368): NCBI GI NO: 4204859 NR Description: heat shock protein 80 [Triticum aestivum]
  misc_feature (3)..(368): NCBI GI NO: 547683 NR Description: HEAT SHOCK COGNATE PROTEIN 80
  misc_feature (4)..(368): NCBI GI NO: 15241115 NR Description: HEAT SHOCK PROTEIN 81-2
  misc_feature (4)..(368): NCBI GI NO: 23397152 NR Description: putative heat shock protein 81-2 (HSP81-2)
  misc_feature (4)..(368): NCBI GI NO: 15215642 NR Description: AT5g56010/MDA7_5 [Arabidopsis thaliana]
  misc_feature (4)..(368): NCBI GI NO: 15241113 NR Description: heat shock protein 90; protein id: At5g56010
  misc_feature (4)..(368): NCBI GI NO: 17979041 NR Description: putative heat shock protein 90
  misc_feature (4)..(368): NCBI GI NO: 15241102 NR Description: heat shock protein (emb|CAA72514
MATETETFAFQAEINQLLSLIINTFYSNKEIFLRELISNSSDALDKIRFESLTDKSKLDAQPELFIHIVPDKASNTLSIIDSGIGMTKSDLVNNLGTIARSGTKEFMEALAAGADVSMIGQFGVGFYSAYLVAERVVVTTKHNDDEQYVWESQAGGSFTVTRDTSGEQLGRGTKITLFLKEDQLEYLEERRLKDLVKKHSEFISYPISLWTEKTTEKEISDDEDEEEKKDAEEGKVEDVDEEKEEKEKKKKKIKEVSHEWSLINKQKPIWMRKPEEITKEEYAAFYKSLTNDWEEHLAVKHFSVEGQLEFKAVLFVPKRAPFDLFDTRKKQNNIKLYVRRVFIMDNCEELIPEWLSFVKGIVDSEDLPL

SEQ ID NO: 30432 - protein, 284 aa, Zea mays subsp. mays
  peptide (1)..(284): Ceres Seq. ID no. 12361619
  misc_feature (100)..(283): Pfam Name: Pfam Description:  Hsp90 protein
  misc_feature (1)..(283): NCBI GI NO: 417154 NR Description: HEAT SHOCK PROTEIN 82
  misc_feature (1)..(283): NCBI GI NO: 5123910 NR Description: HSP80-2 [Triticum aestivum]
  misc_feature (1)..(283): NCBI GI NO: 4204859 NR Description: heat shock protein 80 [Triticum aestivum]
  misc_feature (1)..(283): NCBI GI NO: 547683 NR Description: HEAT SHOCK COGNATE PROTEIN 80
  misc_feature (1)..(283): NCBI GI NO: 15241115 NR Description: HEAT SHOCK PROTEIN 81-2
  misc_feature (1)..(283): NCBI GI NO: 23397152 NR Description: putative heat shock protein 81-2 (HSP81-2)
  misc_feature (1)..(283): NCBI GI NO: 15215642 NR Description: AT5g56010/MDA7_5 [Arabidopsis thaliana]
  misc_feature (1)..(283): NCBI GI NO: 17979041 NR Description: putative heat shock protein 90
  misc_feature (1)..(283): NCBI GI NO: 15241113 NR Description: heat shock protein 90; protein id: At5g56010
  misc_feature (1)..(283): NCBI GI NO: 15241102 NR Description: heat shock protein (emb|CAA72514
MTKSDLVNNLGTIARSGTKEFMEALAAGADVSMIGQFGVGFYSAYLVAERVVVTTKHNDDEQYVWESQAGGSFTVTRDTSGEQLGRGTKITLFLKEDQLEYLEERRLKDLVKKHSEFISYPISLWTEKTTEKEISDDEDEEEKKDAEEGKVEDVDEEKEEKEKKKKKIKEVSHEWSLINKQKPIWMRKPEEITKEEYAAFYKSLTNDWEEHLAVKHFSVEGQLEFKAVLFVPKRAPFDLFDTRKKQNNIKLYVRRVFIMDNCEELIPEWLSFVKGIVDSEDLPL

SEQ ID NO: 30433 - protein, 263 aa, Zea mays subsp. mays
  peptide (1)..(263): Ceres Seq. ID no. 12361620
  misc_feature (79)..(262): Pfam Name: Pfam Description:  Hsp90 protein
  misc_feature (1)..(262): NCBI GI NO: 417154 NR Description: HEAT SHOCK PROTEIN 82
  misc_feature (1)..(262): NCBI GI NO: 5123910 NR Description: HSP80-2 [Triticum aestivum]
  misc_feature (1)..(262): NCBI GI NO: 4204859 NR Description: heat shock protein 80 [Triticum aestivum]
  misc_feature (1)..(262): NCBI GI NO: 547683 NR Description: HEAT SHOCK COGNATE PROTEIN 80
  misc_feature (1)..(262): NCBI GI NO: 15241115 NR Description: HEAT SHOCK PROTEIN 81-2
  misc_feature (1)..(262): NCBI GI NO: 23397152 NR Description: putative heat shock protein 81-2 (HSP81-2)
  misc_feature (1)..(262): NCBI GI NO: 15215642 NR Description: AT5g56010/MDA7_5 [Arabidopsis thaliana]
  misc_feature (1)..(262): NCBI GI NO: 15241113 NR Description: heat shock protein 90; protein id: At5g56010
  misc_feature (1)..(262): NCBI GI NO: 17979041 NR Description: putative heat shock protein 90
  misc_feature (1)..(262): NCBI GI NO: 15241102 NR Description: heat shock protein (emb|CAA72514
MEALAAGADVSMIGQFGVGFYSAYLVAERVVVTTKHNDDEQYVWESQAGGSFTVTRDTSGEQLGRGTKITLFLKEDQLEYLEERRLKDLVKKHSEFISYPISLWTEKTTEKEISDDEDEEEKKDAEEGKVEDVDEEKEEKEKKKKKIKEVSHEWSLINKQKPIWMRKPEEITKEEYAAFYKSLTNDWEEHLAVKHFSVEGQLEFKAVLFVPKRAPFDLFDTRKKQNNIKLYVRRVFIMDNCEELIPEWLSFVKGIVDSEDLPL

SEQ ID NO: 30434 - DNA, 732 bp, Zea mays subsp. mays
  misc_feature (1)..(732): Ceres Seq. ID no. 12401713
  misc_feature (722)..(722): n is a, c, t, g, unknown, or other
ttgatgatgaggagaggccctatttacctaagcacattctctacaggcaaaaggaacagttcagtgatggtgttgggtatagttggatcgatggattgaaggaccatgccagccaacatgtctccgattccatgatgatgaatgctggctttgtttacccagagaacacacccacaacaaaagaagggtactactacagaatgatattcgagaaattctttcccaagcctgcagcaaggtcaactgttcctggaggtcctagtgtggcctgcagcactgccaaagctgttgaatgggacgcatcctggtccaagaaccttgatccttctggccgtgctgctttgggtgttcacgatgctgcgtatgaagacactgcagggaaaactcctgcctctgctgatcctgtctcagacaagggccttcgtccagctattggcgaaagcctagggacacccgttgcttcagccacagctgtctaaccttatgtttatcacccagcaatgcttgaaacagcaaaggttgtccattgcttgtttcagtttccttccgatcatgtttttagttccatcaatcaagcaatggagacatgcttgtgcttcatacttggcagcatcgtgtttgggttttcactgggcagtactgtttaatttttatggactgaaaagactcagttttgtaaatattcgtcactgtgaccaattcctgtggtggtttatgtgatntgcagattgc

SEQ ID NO: 30435 - protein, 158 aa, Zea mays subsp. mays
  peptide (1)..(158): Ceres Seq. ID no. 12401714
  misc_feature (1)..(83): Pfam Name: Pfam Description:  Asparagine synthase
  misc_feature (1)..(158): NCBI GI NO: 3182921 NR Description: Asparagine synthetase
  misc_feature (1)..(134): NCBI GI NO: 22208544 NR Description: asparagine synthetase 2 [Striga hermonthica]
  misc_feature (1)..(137): NCBI GI NO: 30698086 NR Description: asparagine synthetase (gb|AAC72837.1)
  misc_feature (1)..(137): NCBI GI NO: 3859536 NR Description: asparagine synthetase [Arabidopsis thaliana]
  misc_feature (1)..(137): NCBI GI NO: 30698088 NR Description: asparagine synthetase (gb|AAC72837.1)
  misc_feature (1)..(123): NCBI GI NO: 6049843 NR Description: asparagine synthetase [Helianthus annuus]
  misc_feature (1)..(144): NCBI GI NO: 25293864 NR Description: asparagine synthase (glutamine-hydrolyzing) (EC6
  misc_feature (1)..(144): NCBI GI NO: 7960743 NR Description: asparagine synthetase (ASN3)(fragment)
  misc_feature (1)..(144): NCBI GI NO: 15238108 NR Description: asparagine synthetase ASN3; protein id:At5g10240
  misc_feature (1)..(123): NCBI GI NO: 5915696 NR Description: Asparagine synthetase
DDEERPYLPKHILYRQKEQFSDGVGYSWIDGLKDHASQHVSDSMMMNAGFVYPENTPTTKEGYYYRMIFEKFFPKPAARSTVPGGPSVACSTAKAVEWDASWSKNLDPSGRAALGVHDAAYEDTAGKTPASADPVSDKGLRPAIGESLGTPVASATAV

SEQ ID NO: 30436 - protein, 115 aa, Zea mays subsp. mays
  peptide (1)..(115): Ceres Seq. ID no. 12401715
  misc_feature (1)..(115): NCBI GI NO: 3182921 NR Description: Asparagine synthetase
  misc_feature (1)..(91): NCBI GI NO: 22208544 NR Description: asparagine synthetase 2 [Striga hermonthica]
  misc_feature (1)..(94): NCBI GI NO: 30698086 NR Description: asparagine synthetase (gb|AAC72837.1)
  misc_feature (1)..(94): NCBI GI NO: 3859536 NR Description: asparagine synthetase [Arabidopsis thaliana]
  misc_feature (1)..(94): NCBI GI NO: 30698088 NR Description: asparagine synthetase (gb|AAC72837.1)
  misc_feature (1)..(80): NCBI GI NO: 6049843 NR Description: asparagine synthetase [Helianthus annuus]
  misc_feature (1)..(101): NCBI GI NO: 25293864 NR Description: asparagine synthase (glutamine-hydrolyzing) (EC6
  misc_feature (1)..(101): NCBI GI NO: 7960743 NR Description: asparagine synthetase (ASN3)(fragment)
  misc_feature (1)..(101): NCBI GI NO: 15238108 NR Description: asparagine synthetase ASN3; protein id:At5g10240
  misc_feature (1)..(80): NCBI GI NO: 5915696 NR Description: Asparagine synthetase
MMMNAGFVYPENTPTTKEGYYYRMIFEKFFPKPAARSTVPGGPSVACSTAKAVEWDASWSKNLDPSGRAALGVHDAAYEDTAGKTPASADPVSDKGLRPAIGESLGTPVASATAV

SEQ ID NO: 30437 - protein, 114 aa, Zea mays subsp. mays
  peptide (1)..(114): Ceres Seq. ID no. 12401716
  misc_feature (1)..(114): NCBI GI NO: 3182921 NR Description: Asparagine synthetase
  misc_feature (1)..(90): NCBI GI NO: 22208544 NR Description: asparagine synthetase 2 [Striga hermonthica]
  misc_feature (1)..(93): NCBI GI NO: 30698086 NR Description: asparagine synthetase (gb|AAC72837.1)
  misc_feature (1)..(93): NCBI GI NO: 3859536 NR Description: asparagine synthetase [Arabidopsis thaliana]
  misc_feature (1)..(93): NCBI GI NO: 30698088 NR Description: asparagine synthetase (gb|AAC72837.1)
  misc_feature (1)..(79): NCBI GI NO: 6049843 NR Description: asparagine synthetase [Helianthus annuus]
  misc_feature (1)..(100): NCBI GI NO: 25293864 NR Description: asparagine synthase (glutamine-hydrolyzing) (EC6
  misc_feature (1)..(100): NCBI GI NO: 7960743 NR Description: asparagine synthetase (ASN3)(fragment)
  misc_feature (1)..(100): NCBI GI NO: 15238108 NR Description: asparagine synthetase ASN3; protein id:At5g10240
  misc_feature (1)..(79): NCBI GI NO: 5915696 NR Description: Asparagine synthetase
MMNAGFVYPENTPTTKEGYYYRMIFEKFFPKPAARSTVPGGPSVACSTAKAVEWDASWSKNLDPSGRAALGVHDAAYEDTAGKTPASADPVSDKGLRPAIGESLGTPVASATAV

SEQ ID NO: 30438 - DNA, 1759 bp, Zea mays subsp. mays
  misc_feature (1)..(1759): Ceres Seq. ID no. 12382113
atcatctacaccgccgaggcgccgacaaccacttggcgaccatgagcacgggcacggacgccgtcccggtcgccgtggcgccggcgaagcgcccgcccatcaacaagtacgccttcgcctgcgccctgctcgcctccatgaactccgtcctcctcggctatgacatctcggtgatgagcggcgcgcagctgttcatgaaggaggacctcaagatcacggacacgcagatcgagatcctcgccggcgtcatcaacatctactcgctcttcggctccctcgccgcgggcctcacctccgactggctcggccgccgctacaccatggtgctggcggccgccatcttcttcacgggcgcgctcctcatgggcctcgccccggactacgggttcctcatggcgggccgcttcgtggccggcatcggcgtcggcttcgcgctcatgatcgcccccgtgtacaccgccgaggtggcgcccacctccgcgcgcggcttcctcacctccttcccggaggtcttcaacaacttcggcatcctcctcggctacgtctccaacttcgccttcgcgcgcctgcccgtccacctcagctggcgcgccatgttcctggtcggcgccgtgccgcccgtcttcctcggcgtcgccgtcctcgccatgccggagtcgccgcgctggctcgtcatgcggggccgcatcgacgacgcgcgccgcgtgctgcagaagacctccgactcccccgccgaggccgaggagcgtctgctcgacatcaagaaggtggtcggcatccccgagggcgtgaccgacgccgacgacgtggccgccatcgtccgcgccagcagcaaggcatcgtcgtcgtcgtcgtcgtcgcgccacgacggggtgtggaaggagctgctcatcaacccttcccgccccgtgcgccgcatgctcgtggcggggctcggcctcatgttcatccagcaggccacgggcgtggactgcgtggtgatgtacagcccgcgggtgttcgagcgggcgggcatcaagtccaagaccaactcgctgggcgcgtccatggcggtgggcgcgtgcaagaccttcttcatacccatctccacgctgctcctggaccgcatcggccgccgcccgctgctgctggccagcggcggcgggatgaccatcttcctcttcacgctggccacgtccttgcacatgatggaccggcgccccgagggggaggccgcggcactgggcgcggtgagcatcgcggccatgctgtcgttcgtggcgtcgttcgcgtccggcctgggccccgtcgcctgggtctactgctccgagatctacccgctgcggctgcgcgcgcaggctgctgccatcggcacggggctcaaccggatcatgagcggcgccaccaccatgtccttcctctcgctctccaacgccatcaccatcgccggcagcttctacctctacgcgtgcatcgccgccgcaggctgggtgttcatgtacttcttcctgccggagaccatgggcaggagcctggaggacaccgtgaagctcttcggcaaggacgcggacgacgaggacgtcggcgacagccgtcgtcacgcgcccagtaagaagccctccacttccactgagcttgagctcagtgctcagcactgagtgatgtgccatgcaacacgtgtcctcccgagtgtgaccgaagcttatgtctaaagcttcgatgatacagtctactcctagtatcttgtgtgctcgaactgtggtgaatcttttgtagatcc

SEQ ID NO: 30439 - protein, 544 aa, Zea mays subsp. mays
  peptide (1)..(544): Ceres Seq. ID no. 12382114
  misc_feature (40)..(511): Pfam Name: and other Pfam Description: Sugar
  misc_feature (8)..(529): NCBI GI NO: 15230212 NR Description: sugar transport, putative; protein id: At3g18830.1
  misc_feature (7)..(531): NCBI GI NO: 16118827 NR Description: putative sugar transporter [Oryza sativa]
  misc_feature (15)..(512): NCBI GI NO: 15226682 NR Description: putative sugar transporter; protein id: At2g16120
  misc_feature (27)..(513): NCBI GI NO: 30025133 NR Description: putative sorbitol transporter [Prunus cerasus]
  misc_feature (14)..(512): NCBI GI NO: 12004316 NR Description: mannitol transporter [Apium graveolens var. dulce]
  misc_feature (14)..(512): NCBI GI NO: 15226696 NR Description: putative sugar transporter; protein id: At2g16130
  misc_feature (27)..(511): NCBI GI NO: 1778095 NR Description: putative sugar transporter
  misc_feature (27)..(511): NCBI GI NO: 7484647 NR Description: probable sugar transport protein 205 - beet
  misc_feature (29)..(513): NCBI GI NO: 28316433 NR Description: sorbitol transporter [Prunus cerasus]
  misc_feature (55)..(542): NCBI GI NO: 34905902 NR Description: similar to myo-inositol transporter 2
HLHRRGADNHLATMSTGTDAVPVAVAPAKRPPINKYAFACALLASMNSVLLGYDISVMSGAQLFMKEDLKITDTQIEILAGVINIYSLFGSLAAGLTSDWLGRRYTMVLAAAIFFTGALLMGLAPDYGFLMAGRFVAGIGVGFALMIAPVYTAEVAPTSARGFLTSFPEVFNNFGILLGYVSNFAFARLPVHLSWRAMFLVGAVPPVFLGVAVLAMPESPRWLVMRGRIDDARRVLQKTSDSPAEAEERLLDIKKVVGIPEGVTDADDVAAIVRASSKASSSSSSSRHDGVWKELLINPSRPVRRMLVAGLGLMFIQQATGVDCVVMYSPRVFERAGIKSKTNSLGASMAVGACKTFFIPISTLLLDRIGRRPLLLASGGGMTIFLFTLATSLHMMDRRPEGEAAALGAVSIAAMLSFVASFASGLGPVAWVYCSEIYPLRLRAQAAAIGTGLNRIMSGATTMSFLSLSNAITIAGSFYLYACIAAAGWVFMYFFLPETMGRSLEDTVKLFGKDADDEDVGDSRRHAPSKKPSTSTELELSAQH

SEQ ID NO: 30440 - protein, 531 aa, Zea mays subsp. mays
  peptide (1)..(531): Ceres Seq. ID no. 12382115
  misc_feature (27)..(498): Pfam Name: and other Pfam Description: Sugar
  misc_feature (1)..(516): NCBI GI NO: 15230212 NR Description: sugar transport, putative; protein id: At3g18830.1
  misc_feature (1)..(518): NCBI GI NO: 16118827 NR Description: putative sugar transporter [Oryza sativa]
  misc_feature (2)..(499): NCBI GI NO: 15226682 NR Description: putative sugar transporter; protein id: At2g16120
  misc_feature (14)..(500): NCBI GI NO: 30025133 NR Description: putative sorbitol transporter [Prunus cerasus]
  misc_feature (1)..(499): NCBI GI NO: 12004316 NR Description: mannitol transporter [Apium graveolens var. dulce]
  misc_feature (1)..(499): NCBI GI NO: 15226696 NR Description: putative sugar transporter; protein id: At2g16130
  misc_feature (14)..(498): NCBI GI NO: 1778095 NR Description: putative sugar transporter
  misc_feature (14)..(498): NCBI GI NO: 7484647 NR Description: probable sugar transport protein 205 - beet
  misc_feature (16)..(500): NCBI GI NO: 28316433 NR Description: sorbitol transporter [Prunus cerasus]
  misc_feature (42)..(529): NCBI GI NO: 34905902 NR Description: similar to myo-inositol transporter 2
MSTGTDAVPVAVAPAKRPPINKYAFACALLASMNSVLLGYDISVMSGAQLFMKEDLKITDTQIEILAGVINIYSLFGSLAAGLTSDWLGRRYTMVLAAAIFFTGALLMGLAPDYGFLMAGRFVAGIGVGFALMIAPVYTAEVAPTSARGFLTSFPEVFNNFGILLGYVSNFAFARLPVHLSWRAMFLVGAVPPVFLGVAVLAMPESPRWLVMRGRIDDARRVLQKTSDSPAEAEERLLDIKKVVGIPEGVTDADDVAAIVRASSKASSSSSSSRHDGVWKELLINPSRPVRRMLVAGLGLMFIQQATGVDCVVMYSPRVFERAGIKSKTNSLGASMAVGACKTFFIPISTLLLDRIGRRPLLLASGGGMTIFLFTLATSLHMMDRRPEGEAAALGAVSIAAMLSFVASFASGLGPVAWVYCSEIYPLRLRAQAAAIGTGLNRIMSGATTMSFLSLSNAITIAGSFYLYACIAAAGWVFMYFFLPETMGRSLEDTVKLFGKDADDEDVGDSRRHAPSKKPSTSTELELSAQH

SEQ ID NO: 30441 - protein, 499 aa, Zea mays subsp. mays
  peptide (1)..(499): Ceres Seq. ID no. 12382116
  misc_feature (1)..(466): Pfam Name: and other Pfam Description: Sugar
  misc_feature (1)..(484): NCBI GI NO: 15230212 NR Description: sugar transport, putative; protein id: At3g18830.1
  misc_feature (1)..(486): NCBI GI NO: 16118827 NR Description: putative sugar transporter [Oryza sativa]
  misc_feature (1)..(467): NCBI GI NO: 15226682 NR Description: putative sugar transporter; protein id: At2g16120
  misc_feature (1)..(468): NCBI GI NO: 30025133 NR Description: putative sorbitol transporter [Prunus cerasus]
  misc_feature (1)..(467): NCBI GI NO: 12004316 NR Description: mannitol transporter [Apium graveolens var. dulce]
  misc_feature (1)..(467): NCBI GI NO: 15226696 NR Description: putative sugar transporter; protein id: At2g16130
  misc_feature (1)..(466): NCBI GI NO: 1778095 NR Description: putative sugar transporter
  misc_feature (1)..(466): NCBI GI NO: 7484647 NR Description: probable sugar transport protein 205 - beet
  misc_feature (1)..(468): NCBI GI NO: 28316433 NR Description: sorbitol transporter [Prunus cerasus]
  misc_feature (10)..(497): NCBI GI NO: 34905902 NR Description: similar to myo-inositol transporter 2
MNSVLLGYDISVMSGAQLFMKEDLKITDTQIEILAGVINIYSLFGSLAAGLTSDWLGRRYTMVLAAAIFFTGALLMGLAPDYGFLMAGRFVAGIGVGFALMIAPVYTAEVAPTSARGFLTSFPEVFNNFGILLGYVSNFAFARLPVHLSWRAMFLVGAVPPVFLGVAVLAMPESPRWLVMRGRIDDARRVLQKTSDSPAEAEERLLDIKKVVGIPEGVTDADDVAAIVRASSKASSSSSSSRHDGVWKELLINPSRPVRRMLVAGLGLMFIQQATGVDCVVMYSPRVFERAGIKSKTNSLGASMAVGACKTFFIPISTLLLDRIGRRPLLLASGGGMTIFLFTLATSLHMMDRRPEGEAAALGAVSIAAMLSFVASFASGLGPVAWVYCSEIYPLRLRAQAAAIGTGLNRIMSGATTMSFLSLSNAITIAGSFYLYACIAAAGWVFMYFFLPETMGRSLEDTVKLFGKDADDEDVGDSRRHAPSKKPSTSTELELSAQH

SEQ ID NO: 30442 - DNA, 1572 bp, Zea mays subsp. mays
  misc_feature (1)..(1572): Ceres Seq. ID no. 12354017
aaccgaaacggaaccttttattttcccgtcccgcgttctcccccaccgtcccgcgtccgccgtgcctccccaccggcggccaccgctaccggcccacctatctccggcacccggcgctcctcaccctcccttctccacgcgatggcgattcgccgcggcggtagccagtcctacggcttcccgatctactgcgccgcctggctcccgctcgcccacatcctgaagcccgaccgtcccgccgccgaggcggacgcggatgccccctcaccctcccctcccccgcctccgatggttttgctcgggggcggtggtgggaagggacggaacggcgtgccgaacaagctcgtgatggcggccctcgccgccggcgaagaggccgcgccggccctctcccccgatacggtgattgaggtgaggacccaagaggaggtgccgtacaaaatggccgtacaccctcgcggcgacggcgtgttctgcgctttccccaacggctgcaagttgtatcgatgggaatcacaggaaggagaggggctacagaacttgtctttggagccagaccaggaagctttagcggagctgaaagaagatggtttgcagttggccatatccttcagtcaagaaggttcaatacttgccattggtggtgaagatgggcatttaagagtcttcaagtggccggctatggcgcctgttctcacagaaactgatactaaaacatcaattaaggatcttaccatcagttccgatgagaggtttattgccgtgaataggagcagtggcccatgcagagtgtgggatttgcattcatctgaagttgtagccagtctgccaagagaagcaggggaaatgtttggattctgcagattttgtaataaggcagacaacagtcatgtcctatttataacagcaatggaaggtgattatggaaaaatagtatcttggaatactacctcatggacaagaacagggtcaaagaaaataactcgtgaggcaatttcagcttttgcggtgtcgccccaacggtgctctccttgcaattggaacaatcgaaggaagcgtcgtcatagtcgactcaaaagacatgcggacacttgtaacagttaaaaaggcccatcttggtgttgtgactacactgtccttctctcaggattcaagaacattgctgtcaacttcctttgactctactgcaagggtgacgtacgttggttccccgaagagtaatggaacaagtatatggcccatcctactagctatcattcttgcagttttagtgtactactgtatgcagcacaaagaagacattctggcgatgttgccgcgttgagatagatttctgttgagccccaccgctcccctgactgatctactctactggacatattagtagtgttgcttcagagattggacaagttttggacttaggtcaacttcattattttctcaaggatacaacaatacagcaaaaggtgttgagccctttcatgtttgtagtagaaagggtcatgtactcaggttgtccaagttttgtaagttgatgatggccgcaagtgatagtcatctgtgtttatgttt

SEQ ID NO: 30443 - protein, 367 aa, Zea mays subsp. mays
  peptide (1)..(367): Ceres Seq. ID no. 12354018
  misc_feature (56)..(338): NCBI GI NO: 15226281 NR Description: putative protein transport protein SEC12p
  misc_feature (56)..(338): NCBI GI NO: 11358859 NR Description: St12p protein [imported] - Arabidopsis thaliana
  misc_feature (56)..(338): NCBI GI NO: 18423177 NR Description: St12p protein; protein id: At5g50550.1
  misc_feature (56)..(338): NCBI GI NO: 8777388 NR Description: protein transport protein SEC12p-like
  misc_feature (56)..(338): NCBI GI NO: 322598 NR Description: St12p protein - Arabidopsis thaliana
  misc_feature (56)..(316): NCBI GI NO: 17473926 NR Description: putative protein transport protein SEC12p
  misc_feature (143)..(338): NCBI GI NO: 34394605 NR Description: transducin / WD-40 repeat protein-like
  misc_feature (112)..(338): NCBI GI NO: 34897162 NR Description: putative membrane protein
  misc_feature (126)..(338): NCBI GI NO: 18409509 NR Description: expressed protein; protein id: At3g52190
  misc_feature (202)..(338): NCBI GI NO: 26450470 NR Description: unknown protein [Arabidopsis thaliana]
NRNGTFYFPVPRSPPPSRVRRASPPAATATGPPISGTRRSSPSLLHAMAIRRGGSQSYGFPIYCAAWLPLAHILKPDRPAAEADADAPSPSPPPPPMVLLGGGGGKGRNGVPNKLVMAALAAGEEAAPALSPDTVIEVRTQEEVPYKMAVHPRGDGVFCAFPNGCKLYRWESQEGEGLQNLSLEPDQEALAELKEDGLQLAISFSQEGSILAIGGEDGHLRVFKWPAMAPVLTETDTKTSIKDLTISSDERFIAVNRSSGPCRVWDLHSSEVVASLPREAGEMFGFCRFCNKADNSHVLFITAMEGDYGKIVSWNTTSWTRTGSKKITREAISAFAVSPQRCSPCNWNNRRKRRHSRLKRHADTCNS

SEQ ID NO: 30444 - protein, 320 aa, Zea mays subsp. mays
  peptide (1)..(320): Ceres Seq. ID no. 12354019
  misc_feature (9)..(291): NCBI GI NO: 15226281 NR Description: putative protein transport protein SEC12p
  misc_feature (9)..(291): NCBI GI NO: 11358859 NR Description: St12p protein [imported] - Arabidopsis thaliana
  misc_feature (9)..(291): NCBI GI NO: 18423177 NR Description: St12p protein; protein id: At5g50550.1
  misc_feature (9)..(291): NCBI GI NO: 8777388 NR Description: protein transport protein SEC12p-like
  misc_feature (9)..(291): NCBI GI NO: 322598 NR Description: St12p protein - Arabidopsis thaliana
  misc_feature (9)..(269): NCBI GI NO: 17473926 NR Description: putative protein transport protein SEC12p
  misc_feature (96)..(291): NCBI GI NO: 34394605 NR Description: transducin / WD-40 repeat protein-like
  misc_feature (65)..(291): NCBI GI NO: 34897162 NR Description: putative membrane protein
  misc_feature (79)..(291): NCBI GI NO: 18409509 NR Description: expressed protein; protein id: At3g52190
  misc_feature (155)..(291): NCBI GI NO: 26450470 NR Description: unknown protein [Arabidopsis thaliana]
MAIRRGGSQSYGFPIYCAAWLPLAHILKPDRPAAEADADAPSPSPPPPPMVLLGGGGGKGRNGVPNKLVMAALAAGEEAAPALSPDTVIEVRTQEEVPYKMAVHPRGDGVFCAFPNGCKLYRWESQEGEGLQNLSLEPDQEALAELKEDGLQLAISFSQEGSILAIGGEDGHLRVFKWPAMAPVLTETDTKTSIKDLTISSDERFIAVNRSSGPCRVWDLHSSEVVASLPREAGEMFGFCRFCNKADNSHVLFITAMEGDYGKIVSWNTTSWTRTGSKKITREAISAFAVSPQRCSPCNWNNRRKRRHSRLKRHADTCNS

SEQ ID NO: 30445 - protein, 271 aa, Zea mays subsp. mays
  peptide (1)..(271): Ceres Seq. ID no. 12354020
  misc_feature (1)..(242): NCBI GI NO: 15226281 NR Description: putative protein transport protein SEC12p
  misc_feature (1)..(242): NCBI GI NO: 11358859 NR Description: St12p protein [imported] - Arabidopsis thaliana
  misc_feature (1)..(242): NCBI GI NO: 18423177 NR Description: St12p protein; protein id: At5g50550.1
  misc_feature (1)..(242): NCBI GI NO: 8777388 NR Description: protein transport protein SEC12p-like
  misc_feature (1)..(242): NCBI GI NO: 322598 NR Description: St12p protein - Arabidopsis thaliana
  misc_feature (1)..(220): NCBI GI NO: 17473926 NR Description: putative protein transport protein SEC12p
  misc_feature (47)..(242): NCBI GI NO: 34394605 NR Description: transducin / WD-40 repeat protein-like
  misc_feature (16)..(242): NCBI GI NO: 34897162 NR Description: putative membrane protein
  misc_feature (30)..(242): NCBI GI NO: 18409509 NR Description: expressed protein; protein id: At3g52190
  misc_feature (106)..(242): NCBI GI NO: 26450470 NR Description: unknown protein [Arabidopsis thaliana]
MVLLGGGGGKGRNGVPNKLVMAALAAGEEAAPALSPDTVIEVRTQEEVPYKMAVHPRGDGVFCAFPNGCKLYRWESQEGEGLQNLSLEPDQEALAELKEDGLQLAISFSQEGSILAIGGEDGHLRVFKWPAMAPVLTETDTKTSIKDLTISSDERFIAVNRSSGPCRVWDLHSSEVVASLPREAGEMFGFCRFCNKADNSHVLFITAMEGDYGKIVSWNTTSWTRTGSKKITREAISAFAVSPQRCSPCNWNNRRKRRHSRLKRHADTCNS

SEQ ID NO: 30446 - DNA, 822 bp, Zea mays subsp. mays
  misc_feature (1)..(822): Ceres Seq. ID no. 12354021
attcctgtcggcaaggtgaacgcgagagccgaccgtctcagtgtgcgcgcgaagaagagaaggaggaggaggaggaggaagaagtagaagaatgtatccggccaagcccaccgtcgccaccgccagcgagccggtaaccgggatggcggcgccgccggtgaccggcatcccgatcagcagccccggccccgcagtcgcggccagccagtggtcctcgggcctctgcgcctgcttcgacgactgcggcctctgctgcatgacgtgctggtgcccgtgcgtgacgttcgggcggatcgcggagatcgtggaccgcggcgcgacgtcgtgcgcggctgcggggggccatctacacgctgctggcctgcttcacggggttccagtgccactggatctactcctgcacgtaccgctccaagatgcgcgcgcagctggggctccccgacgtcggctgctgcgactgctgcgtccacttctgctgcgagccgtgcgcgctctgccagcagtacagggagctcagggcacgcggcttggaccccgcgctcggctgggacgtcaacgcccagaaggcggccaataataacgccggcgccggcatgacgatgtacccgccgacggcgcaggggatgggccgctaattacgctaccagctccatcggtaaactcatatgtgttgtgttgtgttgtgtcagccagatcatcgcgtacgtacgggtatacttgtgatatgtaatgtcagggaccggcatgcccatgtgtttcaagatatttcacgttcgagtcctttctgtccgctcactatccgaatgaaaatcattttccttg

SEQ ID NO: 30447 - protein, 161 aa, Zea mays subsp. mays
  peptide (1)..(161): Ceres Seq. ID no. 12354022
  misc_feature (19)..(92): NCBI GI NO: 34897274 NR Description: hypothetical protein
  misc_feature (19)..(88): NCBI GI NO: 34897270 NR Description: hypothetical protein
  misc_feature (36)..(88): NCBI GI NO: 34897268 NR Description: unknown protein
  misc_feature (35)..(83): NCBI GI NO: 15221456 NR Description: hypothetical protein; protein id: At1g68610.1
  misc_feature (36)..(88): NCBI GI NO: 15223920 NR Description: unknown protein; protein id: At1g14870
  misc_feature (40)..(83): NCBI GI NO: 4105794 NR Description: PGPS/D12 [Petunia x hybrida]
  misc_feature (6)..(96): NCBI GI NO: 27414005 NR Description: fw2.2 [Lycopersicon pimpinellifolium]
  misc_feature (6)..(96): NCBI GI NO: 27414017 NR Description: fw2.2 [Lycopersicon pennellii]
  misc_feature (1)..(80): NCBI GI NO: 37530512 NR Description: unknown protein
  misc_feature (18)..(96): NCBI GI NO: 8272626 NR Description: ORFX [Lycopersicon esculentum]
MYPAKPTVATASEPVTGMAAPPVTGIPISSPGPAVAASQWSSGLCACFDDCGLCCMTCWCPCVTFGRIAEIVDRGATSCAAAGGHLHAAGLLHGVPVPLDLLLHVPLQDARAAGAPRRRLLRLLRPLLLRAVRALPAVQGAQGTRLGPRARLGRQRPEGGQ

SEQ ID NO: 30448 - protein, 144 aa, Zea mays subsp. mays
  peptide (1)..(144): Ceres Seq. ID no. 12354023
  misc_feature (2)..(75): NCBI GI NO: 34897274 NR Description: hypothetical protein
  misc_feature (2)..(71): NCBI GI NO: 34897270 NR Description: hypothetical protein
  misc_feature (19)..(71): NCBI GI NO: 34897268 NR Description: unknown protein
  misc_feature (18)..(66): NCBI GI NO: 15221456 NR Description: hypothetical protein; protein id: At1g68610.1
  misc_feature (19)..(71): NCBI GI NO: 15223920 NR Description: unknown protein; protein id: At1g14870
  misc_feature (23)..(66): NCBI GI NO: 4105794 NR Description: PGPS/D12 [Petunia x hybrida]
  misc_feature (1)..(79): NCBI GI NO: 27414005 NR Description: fw2.2 [Lycopersicon pimpinellifolium]
  misc_feature (1)..(79): NCBI GI NO: 27414017 NR Description: fw2.2 [Lycopersicon pennellii]
  misc_feature (1)..(63): NCBI GI NO: 37530512 NR Description: unknown protein
  misc_feature (1)..(79): NCBI GI NO: 8272626 NR Description: ORFX [Lycopersicon esculentum]
MAAPPVTGIPISSPGPAVAASQWSSGLCACFDDCGLCCMTCWCPCVTFGRIAEIVDRGATSCAAAGGHLHAAGLLHGVPVPLDLLLHVPLQDARAAGAPRRRLLRLLRPLLLRAVRALPAVQGAQGTRLGPRARLGRQRPEGGQ

SEQ ID NO: 30449 - protein, 106 aa, Zea mays subsp. mays
  peptide (1)..(106): Ceres Seq. ID no. 12354024
  misc_feature (1)..(37): NCBI GI NO: 34897274 NR Description: hypothetical protein
  misc_feature (1)..(33): NCBI GI NO: 34897270 NR Description: hypothetical protein
  misc_feature (1)..(33): NCBI GI NO: 34897268 NR Description: unknown protein
  misc_feature (1)..(28): NCBI GI NO: 15221456 NR Description: hypothetical protein; protein id: At1g68610.1
  misc_feature (1)..(33): NCBI GI NO: 15223920 NR Description: unknown protein; protein id: At1g14870
  misc_feature (1)..(28): NCBI GI NO: 4105794 NR Description: PGPS/D12 [Petunia x hybrida]
  misc_feature (1)..(41): NCBI GI NO: 27414005 NR Description: fw2.2 [Lycopersicon pimpinellifolium]
  misc_feature (1)..(41): NCBI GI NO: 27414017 NR Description: fw2.2 [Lycopersicon pennellii]
  misc_feature (1)..(25): NCBI GI NO: 37530512 NR Description: unknown protein
  misc_feature (1)..(41): NCBI GI NO: 8272626 NR Description: ORFX [Lycopersicon esculentum]
MTCWCPCVTFGRIAEIVDRGATSCAAAGGHLHAAGLLHGVPVPLDLLLHVPLQDARAAGAPRRRLLRLLRPLLLRAVRALPAVQGAQGTRLGPRARLGRQRPEGGQ

SEQ ID NO: 30450 - DNA, 1117 bp, Zea mays subsp. mays
  misc_feature (1)..(1117): Ceres Seq. ID no. 12355198
ccccgagccgcaaacctgcaaccaccttcccaaatcctagttctcgcttctcgtcgtctagcctcggcccgttccaaaagccccgcagctctcgcatctcatcagacgccaccaccacctccggcgaccgaaagatgatctctccggatgcagcccgcaacgtcgtaggcatcatcggcaatgtcatctccttcggcctcttcctctccccagtgctgacgttctggcggatctgcaaggccagggacgtggaggagtttaagcctgacccctacctggcgacgctgctcaactgcatgctctgggtgttctacggcatccccgtcgtccaccccaacagcatcctcgtcgtcaccatcaacggcgtcgggctcgtcatcgaggccatctacctcaccatcttcttcctttactctgatggcccgaaacgcaggaaagcgttcggaatcctggccgtggagattttgttcatggtcgccgtggtgcttggtgtgattttgggcgcccacacgcacgagaagcgctccatgatcgtcggcattctctgcgtcattttcggctcgatgatgtacgcctccccactcaccattatgagccgtgtgatcaagaccaagagcgttgagtacatgcccttcctcctctcgctggtgagcttcctcaatggctgctgctggacggcctacgcgctcatccgcttcgacctctacgttacgatccccaacgcccttggcgccttcttcggcctcatccagctaatcctctacttctgctactacaagtcgacccccaaggagaagaatgtggagctgcccaccgtctccagcaacgccggcggcggcaacgtcaccgtcagcgtcgagcgataggcgacgtagctgcagcggcagcgccgccgcccgtcgagaaagaactcgacgagacgtactttagcaatagtagttgccattcatcgctcttctaggatggtttgttttaagtgagtgctacctagttttgcccggtgcgtgtcgtgtcaaagaacagttaggggtgtttggttcacccaattaaataaagttaaagtttagtatttgctctgaatgtttgaatagtaattatgactattaaatatagtttt

SEQ ID NO: 30451 - protein, 287 aa, Zea mays subsp. mays
  peptide (1)..(287): Ceres Seq. ID no. 12355199
  misc_feature (53)..(142): Pfam Name: Pfam Description:  MtN3/saliva family
  misc_feature (45)..(287): NCBI GI NO: 34912462 NR Description: MtN3-like protein
  misc_feature (45)..(287): NCBI GI NO: 34912454 NR Description: P0681B11.31
  misc_feature (45)..(268): NCBI GI NO: 18405611 NR Description: Expressed protein; protein id: At3g28007
  misc_feature (45)..(268): NCBI GI NO: 21592355 NR Description: contains similarity to nodulin MtN3 protein
  misc_feature (52)..(263): NCBI GI NO: 18413388 NR Description: putative protein; protein id: At4g10850
  misc_feature (45)..(276): NCBI GI NO: 18421965 NR Description: putative protein; protein id: At5g40260
  misc_feature (45)..(238): NCBI GI NO: 10177463 NR Description: contains similarity to MtN3 protein~gene_id:MQB2
  misc_feature (83)..(261): NCBI GI NO: 431154 NR Description: ORF [Lilium longiflorum]
  misc_feature (52)..(261): NCBI GI NO: 15219732 NR Description: hypothetical protein; protein id: At1g66770.1
  misc_feature (83)..(268): NCBI GI NO: 11994120 NR Description: contains similarity to nodulin MtN3protein~gene_id:MMG15
PSRKPATTFPNPSSRFSSSSLGPFQKPRSSRISSDATTTSGDRKMISPDAARNVVGIIGNVISFGLFLSPVLTFWRICKARDVEEFKPDPYLATLLNCMLWVFYGIPVVHPNSILVVTINGVGLVIEAIYLTIFFLYSDGPKRRKAFGILAVEILFMVAVVLGVILGAHTHEKRSMIVGILCVIFGSMMYASPLTIMSRVIKTKSVEYMPFLLSLVSFLNGCCWTAYALIRFDLYVTIPNALGAFFGLIQLILYFCYYKSTPKEKNVELPTVSSNAGGGNVTVSVER

SEQ ID NO: 30452 - protein, 243 aa, Zea mays subsp. mays
  peptide (1)..(243): Ceres Seq. ID no. 12355200
  misc_feature (9)..(98): Pfam Name: Pfam Description:  MtN3/saliva family
  misc_feature (1)..(243): NCBI GI NO: 34912462 NR Description: MtN3-like protein
  misc_feature (1)..(243): NCBI GI NO: 34912454 NR Description: P0681B11.31
  misc_feature (1)..(224): NCBI GI NO: 18405611 NR Description: Expressed protein; protein id: At3g28007
  misc_feature (1)..(224): NCBI GI NO: 21592355 NR Description: contains similarity to nodulin MtN3 protein
  misc_feature (8)..(219): NCBI GI NO: 18413388 NR Description: putative protein; protein id: At4g10850
  misc_feature (1)..(232): NCBI GI NO: 18421965 NR Description: putative protein; protein id: At5g40260
  misc_feature (1)..(194): NCBI GI NO: 10177463 NR Description: contains similarity to MtN3 protein~gene_id:MQB2
  misc_feature (39)..(217): NCBI GI NO: 431154 NR Description: ORF [Lilium longiflorum]
  misc_feature (8)..(217): NCBI GI NO: 15219732 NR Description: hypothetical protein; protein id: At1g66770.1
  misc_feature (39)..(224): NCBI GI NO: 11994120 NR Description: contains similarity to nodulin MtN3protein~gene_id:MMG15
MISPDAARNVVGIIGNVISFGLFLSPVLTFWRICKARDVEEFKPDPYLATLLNCMLWVFYGIPVVHPNSILVVTINGVGLVIEAIYLTIFFLYSDGPKRRKAFGILAVEILFMVAVVLGVILGAHTHEKRSMIVGILCVIFGSMMYASPLTIMSRVIKTKSVEYMPFLLSLVSFLNGCCWTAYALIRFDLYVTIPNALGAFFGLIQLILYFCYYKSTPKEKNVELPTVSSNAGGGNVTVSVER

SEQ ID NO: 30453 - protein, 189 aa, Zea mays subsp. mays
  peptide (1)..(189): Ceres Seq. ID no. 12355201
  misc_feature (1)..(189): NCBI GI NO: 34912462 NR Description: MtN3-like protein
  misc_feature (1)..(189): NCBI GI NO: 34912454 NR Description: P0681B11.31
  misc_feature (1)..(170): NCBI GI NO: 18405611 NR Description: Expressed protein; protein id: At3g28007
  misc_feature (1)..(170): NCBI GI NO: 21592355 NR Description: contains similarity to nodulin MtN3 protein
  misc_feature (1)..(165): NCBI GI NO: 18413388 NR Description: putative protein; protein id: At4g10850
  misc_feature (1)..(178): NCBI GI NO: 18421965 NR Description: putative protein; protein id: At5g40260
  misc_feature (1)..(140): NCBI GI NO: 10177463 NR Description: contains similarity to MtN3 protein~gene_id:MQB2
  misc_feature (1)..(163): NCBI GI NO: 431154 NR Description: ORF [Lilium longiflorum]
  misc_feature (1)..(163): NCBI GI NO: 15219732 NR Description: hypothetical protein; protein id: At1g66770.1
  misc_feature (1)..(170): NCBI GI NO: 11994120 NR Description: contains similarity to nodulin MtN3protein~gene_id:MMG15
MLWVFYGIPVVHPNSILVVTINGVGLVIEAIYLTIFFLYSDGPKRRKAFGILAVEILFMVAVVLGVILGAHTHEKRSMIVGILCVIFGSMMYASPLTIMSRVIKTKSVEYMPFLLSLVSFLNGCCWTAYALIRFDLYVTIPNALGAFFGLIQLILYFCYYKSTPKEKNVELPTVSSNAGGGNVTVSVER

SEQ ID NO: 30454 - DNA, 1005 bp, Zea mays subsp. mays
  misc_feature (1)..(1005): Ceres Seq. ID no. 12348092
atcatcatgtatcctaaatccaaagccagcgaagaagagattccgccggtgccgtagccgctgagctaaccaccagccggttcttgtcgcgttgtctgcaactttgcaagtaagcaactcgtcaccggtcagccaccaacaaggcaccttggttatcgtcttgcacgtccaagaaatcgagaactcaggcaggcgtcgcccacttgccctcctcctcctcctcccgtcgtgaattccacgctggttcagggatgtcgatcgagctcctgacgaaattcctcacattgctgttcgggtatgccatgccagcgctggagtgcttcaaggcgatcgagcagcggcccggccgggcagatcagctccgcttctggtgcgagtattggatcatcctagtcctcctcgtcatgttcgacgaaattgctggggttctcatttctaagatcccaatgtactacgagctgaagctagccttcctcgtctacttgtggtacccaaagacaaggggaacggacatcgtgtacgagaccttcctccagccgctggtgatgcagtaccagcccaacatcgaggccaggctccagtacctgcgcgccaatgccggtgacatcctcgtcttctacctcaagaacttcaccgagagaggctacgagctcttcctccgagtgcttgactacgtccggtcgcaggcgtccagagggtcaagaacacggagtttcttctcgttccgaggtgaacgttcggagaggccaagcttcaccgatgactatgtcactggcggcgaccggagggacgggggaaggcaccgtcgaccacgcagtggctactagtagaccaagtagtcactggatgtataggatgtgcacagaaacatatacgattactggtatagtgttaggtaggagtaggatcaaatcaagcaaaccttacggacagaacttgtaggatccactggaaaaacagatagcttcttataaattttctattcatattgtcactttgtcagcc

SEQ ID NO: 30455 - protein, 191 aa, Zea mays subsp. mays
  peptide (1)..(191): Ceres Seq. ID no. 12348093
  misc_feature (6)..(98): Pfam Name: Pfam Description:  TB2/DP1, HVA22 family
  misc_feature (1)..(191): NCBI GI NO: 38344031 NR Description: OJ991214_12.7
  misc_feature (4)..(150): NCBI GI NO: 18404020 NR Description: expressed protein; protein id: At2g36020
  misc_feature (4)..(150): NCBI GI NO: 21537355 NR Description: unknown [Arabidopsis thaliana]
  misc_feature (6)..(147): NCBI GI NO: 18422223 NR Description: expressed protein; protein id: At5g42560
  misc_feature (6)..(147): NCBI GI NO: 21553813 NR Description: unknown [Arabidopsis thaliana]
  misc_feature (4)..(150): NCBI GI NO: 26451594 NR Description: unknown protein [Arabidopsis thaliana]
  misc_feature (6)..(147): NCBI GI NO: 21553483 NR Description: pathogenicity protein PATH531-like protein
  misc_feature (6)..(147): NCBI GI NO: 18394805 NR Description: expressed protein; protein id: At1g19950
  misc_feature (12)..(147): NCBI GI NO: 9759014 NR Description: gene_id:K16E1.3~unknown protein
  misc_feature (1)..(154): NCBI GI NO: 21671921 NR Description: Putative protein with HVA22 domain
MSIELLTKFLTLLFGYAMPALECFKAIEQRPGRADQLRFWCEYWIILVLLVMFDEIAGVLISKIPMYYELKLAFLVYLWYPKTRGTDIVYETFLQPLVMQYQPNIEARLQYLRANAGDILVFYLKNFTERGYELFLRVLDYVRSQASRGSRTRSFFSFRGERSERPSFTDDYVTGGDRRDGGRHRRPRSGY

SEQ ID NO: 30456 - protein, 174 aa, Zea mays subsp. mays
  peptide (1)..(174): Ceres Seq. ID no. 12348094
  misc_feature (1)..(81): Pfam Name: Pfam Description:  TB2/DP1, HVA22 family
  misc_feature (1)..(174): NCBI GI NO: 38344031 NR Description: OJ991214_12.7
  misc_feature (1)..(133): NCBI GI NO: 18404020 NR Description: expressed protein; protein id: At2g36020
  misc_feature (1)..(133): NCBI GI NO: 21537355 NR Description: unknown [Arabidopsis thaliana]
  misc_feature (1)..(130): NCBI GI NO: 18422223 NR Description: expressed protein; protein id: At5g42560
  misc_feature (1)..(130): NCBI GI NO: 21553813 NR Description: unknown [Arabidopsis thaliana]
  misc_feature (1)..(133): NCBI GI NO: 26451594 NR Description: unknown protein [Arabidopsis thaliana]
  misc_feature (1)..(130): NCBI GI NO: 21553483 NR Description: pathogenicity protein PATH531-like protein
  misc_feature (1)..(130): NCBI GI NO: 18394805 NR Description: expressed protein; protein id: At1g19950
  misc_feature (1)..(130): NCBI GI NO: 9759014 NR Description: gene_id:K16E1.3~unknown protein
  misc_feature (1)..(137): NCBI GI NO: 21671921 NR Description: Putative protein with HVA22 domain
MPALECFKAIEQRPGRADQLRFWCEYWIILVLLVMFDEIAGVLISKIPMYYELKLAFLVYLWYPKTRGTDIVYETFLQPLVMQYQPNIEARLQYLRANAGDILVFYLKNFTERGYELFLRVLDYVRSQASRGSRTRSFFSFRGERSERPSFTDDYVTGGDRRDGGRHRRPRSGY

SEQ ID NO: 30457 - protein, 140 aa, Zea mays subsp. mays
  peptide (1)..(140): Ceres Seq. ID no. 12348095
  misc_feature (1)..(140): NCBI GI NO: 38344031 NR Description: OJ991214_12.7
  misc_feature (1)..(99): NCBI GI NO: 18404020 NR Description: expressed protein; protein id: At2g36020
  misc_feature (1)..(99): NCBI GI NO: 21537355 NR Description: unknown [Arabidopsis thaliana]
  misc_feature (1)..(96): NCBI GI NO: 18422223 NR Description: expressed protein; protein id: At5g42560
  misc_feature (1)..(96): NCBI GI NO: 21553813 NR Description: unknown [Arabidopsis thaliana]
  misc_feature (1)..(99): NCBI GI NO: 26451594 NR Description: unknown protein [Arabidopsis thaliana]
  misc_feature (1)..(96): NCBI GI NO: 21553483 NR Description: pathogenicity protein PATH531-like protein
  misc_feature (1)..(96): NCBI GI NO: 18394805 NR Description: expressed protein; protein id: At1g19950
  misc_feature (1)..(96): NCBI GI NO: 9759014 NR Description: gene_id:K16E1.3~unknown protein
  misc_feature (1)..(103): NCBI GI NO: 21671921 NR Description: Putative protein with HVA22 domain
MFDEIAGVLISKIPMYYELKLAFLVYLWYPKTRGTDIVYETFLQPLVMQYQPNIEARLQYLRANAGDILVFYLKNFTERGYELFLRVLDYVRSQASRGSRTRSFFSFRGERSERPSFTDDYVTGGDRRDGGRHRRPRSGY

SEQ ID NO: 30458 - DNA, 769 bp, Zea mays subsp. mays
  misc_feature (1)..(769): Ceres Seq. ID no. 12382102
atgcgtgcatggcgtgctagctaggtaccttgcggccaagagcgaggcggaccactacaagcgggagatgagaagggagcaggaggagatcatcgccgtcccagacaccgaggccgctgagattggagagatcatgtcacggtatgggctcgagccgcaggagtacggccctgtcgtcgccgggctcaggcggaaccctcaagcttggctagacttcatgatgaggttcgagctgggactggagagaccggatcccagaagggctctgcagagcgccttcacgatcgcactgtcctacgtggtcggcgggctggtccctctcctgccctacgtgctcgtctccgccgcgcaggatgccatgctcacatccgtcggagtcacgctggccgcgctgcttttcttcggctacgtcaagggccgcttcacgggggaaccggccgttcgccagtgccgtccagaccgctgtcattggagcgctcgcttcggcggcggcgtacgggatggcgaaggctgttcaggcgaggtagttgtttgttggtgaggcggcgtcaggcgttttgggaaccagggctgcggtaaaactgaagaaagctgcatacttctgatcctttggggacttctcgttacagtgttaatcgcgggatctaatgctagtctactcttttgaataaatctagggaaggagataatcatagataaaatatatcttcgcctcactttggttaatgtaaagactctgaactacatattcaatcattattacaagcct

SEQ ID NO: 30459 - protein, 179 aa, Zea mays subsp. mays
  peptide (1)..(179): Ceres Seq. ID no. 12382103
  misc_feature (6)..(143): NCBI GI NO: 38567721 NR Description: B1358B12.19
  misc_feature (6)..(148): NCBI GI NO: 15226346 NR Description: putative membrane protein; protein id: At2g01770.1
  misc_feature (6)..(142): NCBI GI NO: 6323249 NR Description: Functions in the homeostasis of both calcium and manganese ions
  misc_feature (6)..(138): NCBI GI NO: 40740699 NR Description: hypothetical protein AN3681.2
  misc_feature (6)..(150): NCBI GI NO: 19554141 NR Description: uncharacterized membrane protein
  misc_feature (2)..(141): NCBI GI NO: 40741878 NR Description: hypothetical protein AN4990.2
  misc_feature (9)..(147): NCBI GI NO: 23136261 NR Description: hypothetical protein [Cytophaga hutchinsonii]
  misc_feature (6)..(143): NCBI GI NO: 15922654 NR Description: 247aa long conserved hypothetical protein
CVHGVLARYLAAKSEADHYKREMRREQEEIIAVPDTEAAEIGEIMSRYGLEPQEYGPVVAGLRRNPQAWLDFMMRFELGLERPDPRRALQSAFTIALSYVVGGLVPLLPYVLVSAAQDAMLTSVGVTLAALLFFGYVKGRFTGEPAVRQCRPDRCHWSARFGGGVRDGEGCSGEVVVCW

SEQ ID NO: 30460 - protein, 157 aa, Zea mays subsp. mays
  peptide (1)..(157): Ceres Seq. ID no. 12382104
  misc_feature (1)..(121): NCBI GI NO: 38567721 NR Description: B1358B12.19
  misc_feature (1)..(126): NCBI GI NO: 15226346 NR Description: putative membrane protein; protein id: At2g01770.1
  misc_feature (1)..(120): NCBI GI NO: 6323249 NR Description: Functions in the homeostasis of both calcium and manganese ions
  misc_feature (1)..(116): NCBI GI NO: 40740699 NR Description: hypothetical protein AN3681.2
  misc_feature (1)..(128): NCBI GI NO: 19554141 NR Description: uncharacterized membrane protein
  misc_feature (1)..(119): NCBI GI NO: 40741878 NR Description: hypothetical protein AN4990.2
  misc_feature (1)..(125): NCBI GI NO: 23136261 NR Description: hypothetical protein [Cytophaga hutchinsonii]
  misc_feature (1)..(121): NCBI GI NO: 15922654 NR Description: 247aa long conserved hypothetical protein
MRREQEEIIAVPDTEAAEIGEIMSRYGLEPQEYGPVVAGLRRNPQAWLDFMMRFELGLERPDPRRALQSAFTIALSYVVGGLVPLLPYVLVSAAQDAMLTSVGVTLAALLFFGYVKGRFTGEPAVRQCRPDRCHWSARFGGGVRDGEGCSGEVVVCW

SEQ ID NO: 30461 - protein, 135 aa, Zea mays subsp. mays
  peptide (1)..(135): Ceres Seq. ID no. 12382105
  misc_feature (1)..(99): NCBI GI NO: 38567721 NR Description: B1358B12.19
  misc_feature (1)..(104): NCBI GI NO: 15226346 NR Description: putative membrane protein; protein id: At2g01770.1
  misc_feature (1)..(98): NCBI GI NO: 6323249 NR Description: Functions in the homeostasis of both calcium and manganese ions
  misc_feature (1)..(94): NCBI GI NO: 40740699 NR Description: hypothetical protein AN3681.2
  misc_feature (1)..(106): NCBI GI NO: 19554141 NR Description: uncharacterized membrane protein
  misc_feature (1)..(97): NCBI GI NO: 40741878 NR Description: hypothetical protein AN4990.2
  misc_feature (1)..(103): NCBI GI NO: 23136261 NR Description: hypothetical protein [Cytophaga hutchinsonii]
  misc_feature (1)..(99): NCBI GI NO: 15922654 NR Description: 247aa long conserved hypothetical protein
MSRYGLEPQEYGPVVAGLRRNPQAWLDFMMRFELGLERPDPRRALQSAFTIALSYVVGGLVPLLPYVLVSAAQDAMLTSVGVTLAALLFFGYVKGRFTGEPAVRQCRPDRCHWSARFGGGVRDGEGCSGEVVVCW

SEQ ID NO: 30462 - DNA, 1140 bp, Zea mays subsp. mays; identical to SEQ ID NO: 26494
  misc_feature (1)..(1140): Ceres Seq. ID no. 12386869

SEQ ID NO: 30463 - protein, 274 aa, Zea mays subsp. mays; identical to SEQ ID NO: 26495
  peptide (1)..(274): Ceres Seq. ID no. 12386870
  misc_feature (92)..(270): Pfam Name: phosphoriboisomerase A Pfam Description: Ribose 5-phosphate isomerase A
  misc_feature (1)..(274): NCBI GI NO: 34393835 NR Description: putative ribose-5-phosphate isomerase
  misc_feature (31)..(274): NCBI GI NO: 34393836 NR Description: putative ribose-5-phosphate isomerase
  misc_feature (29)..(274): NCBI GI NO: 18654317 NR Description: ribose-5-phosphate isomerase [Spinacia oleracea]
  misc_feature (1)..(274): NCBI GI NO: 21594002 NR Description: putative ribose 5-phosphate isomerase
  misc_feature (1)..(274): NCBI GI NO: 15229349 NR Description: putative ribose 5-phosphate isomerase
  misc_feature (26)..(274): NCBI GI NO: 15226223 NR Description: putative ribose 5-phosphate isomerase
  misc_feature (26)..(274): NCBI GI NO: 21592672 NR Description: putative ribose 5-phosphate isomerase
  misc_feature (26)..(274): NCBI GI NO: 15223936 NR Description: putative ribose 5-phosphate isomerase
  misc_feature (26)..(274): NCBI GI NO: 13430836 NR Description: putative ribose 5-phosphate isomerase
  misc_feature (34)..(268): NCBI GI NO: 38347196 NR Description: OSJNBa0023J03.8

SEQ ID NO: 30464 - protein, 212 aa, Zea mays subsp. mays; identical to SEQ ID NO: 26496
  peptide (1)..(212): Ceres Seq. ID no. 12386871
  misc_feature (30)..(208): Pfam Name: phosphoriboisomerase A Pfam Description: Ribose 5-phosphate isomerase A
  misc_feature (1)..(212): NCBI GI NO: 34393835 NR Description: putative ribose-5-phosphate isomerase
  misc_feature (1)..(212): NCBI GI NO: 34393836 NR Description: putative ribose-5-phosphate isomerase
  misc_feature (1)..(212): NCBI GI NO: 18654317 NR Description: ribose-5-phosphate isomerase [Spinacia oleracea]
  misc_feature (1)..(212): NCBI GI NO: 21594002 NR Description: putative ribose 5-phosphate isomerase
  misc_feature (1)..(212): NCBI GI NO: 15229349 NR Description: putative ribose 5-phosphate isomerase
  misc_feature (1)..(212): NCBI GI NO: 15226223 NR Description: putative ribose 5-phosphate isomerase
  misc_feature (1)..(212): NCBI GI NO: 21592672 NR Description: putative ribose 5-phosphate isomerase
  misc_feature (1)..(212): NCBI GI NO: 15223936 NR Description: putative ribose 5-phosphate isomerase
  misc_feature (1)..(212): NCBI GI NO: 13430836 NR Description: putative ribose 5-phosphate isomerase
  misc_feature (1)..(206): NCBI GI NO: 38347196 NR Description: OSJNBa0023J03.8

SEQ ID NO: 30465 - protein, 178 aa, Zea mays subsp. mays; identical to SEQ ID NO: 26497
  peptide (1)..(178): Ceres Seq. ID no. 12386872

SEQ ID NO: 30466 - DNA, 1267 bp, Zea mays subsp. mays
  misc_feature (1)..(1267): Ceres Seq. ID no. 12373164
actctccagtctccactagcatcagtcgccgccgcctatcctcgagcaccatttccatcaacagcatccgcctctggcaagctagcgacagcaactcatggcactccgcgcgctcgacaacacgatgcccgccgccgtcgaggagcggcccaagaaggtggctaaggtgggcgtccccgccgccgccgccaaggccgccgcctccccctcccccgggagtggcggcaagaagaagaaggggaacgacgagaactcggcgccaagggccacggccgcggcggcggagcaggcggtggagtacatctcgtcggaggagctggaggcggcggccagccccaaggccaaggccgcggggctggtgcgcggacctggactccaaggactgggtcaggacctgcgaggcgctcaacgacgcgcgccgcctcgcgatccaccaccccgcgctgctgaacccgatcctggagaaggtggtgctggcggtcgtgaagacgatgaagagcccccgcagcgcggtgctcaagacgtccatcatggcctgcgccgacatcttcagttccttcggcaacctcctcgcctccgtctccgacgacaccttcgacaagctgctgctccagctcctgctgaaggcgtcccaggacaagcggttcgtgtgcgaggaggccgagaaggcgacgcgcgcgatggcggcgtcgatggcgccgctgccgctgctgaagaagctcaaggcgtacgtccaccacgccaacctcagggtcagggctaaggccgccgtcgccatctcccactgcgccgcccggatggacatcggcgcgatgaaggagttcgggatgtcggcgctgctgcagctggcggcggagctgctgaacgaccggctgccggaggcgagggaggccgcccgcggcgtggtggcgtcgacgcacgcggccttcgccaaggaggccgccgcgagcggccaggaggacgacgcggccgcgtcctgggagagcctctgcgcgctcagcctcccgcccatctccgcgcaggccgtcgccaagatcgctgccgccgccgcctcctcgcagtagccactgcacgcgtgcggacgtgcgccgctggcgttgattttgggggtcgtctggttcggttcagaagtagcgctcgtgagtcttcagacagagctcgtttgtcgccgccgccgccgagtctgtttgtttgttctttctactccatgctatctcgcatggttagtgttctgtttatggcttcgtcaagtaataacatatcaatt

SEQ ID NO: 30467 - protein, 353 aa, Zea mays subsp. mays
  peptide (1)..(353): Ceres Seq. ID no. 12373165
  misc_feature (122)..(348): NCBI GI NO: 21593517 NR Description: unknown [Arabidopsis thaliana]
  misc_feature (122)..(348): NCBI GI NO: 18414533 NR Description: expressed protein; protein id: At4g15830
  misc_feature (122)..(349): NCBI GI NO: 21537265 NR Description: unknown [Arabidopsis thaliana]
  misc_feature (122)..(349): NCBI GI NO: 18395821 NR Description: expressed protein; protein id: At3g01450
  misc_feature (155)..(348): NCBI GI NO: 7485173 NR Description: hypothetical protein - Arabidopsis thaliana
  misc_feature (121)..(345): NCBI GI NO: 15241493 NR Description: putative protein; protein id: At5g14790
  misc_feature (132)..(304): NCBI GI NO: 9294314 NR Description: gb|AAF24615
  misc_feature (139)..(267): NCBI GI NO: 15229670 NR Description: unknown protein; protein id: At3g18530.1
  misc_feature (7)..(117): NCBI GI NO: 23274133 NR Description: Similar to serine/arginine repetitive matrix 1
  misc_feature (43)..(105): NCBI GI NO: 465445 NR Description: PROBABLE NUCLEAR ANTIGEN
SPVSTSISRRRLSSSTISINSIRLWQASDSNSWHSARSTTRCPPPSRSGPRRWLRWASPPPPPRPPPPPPPGVAARRRRGTTRTRRQGPRPRRRSRRWSTSRRRSWRRRPAPRPRPRGWCADLDSKDWVRTCEALNDARRLAIHHPALLNPILEKVVLAVVKTMKSPRSAVLKTSIMACADIFSSFGNLLASVSDDTFDKLLLQLLLKASQDKRFVCEEAEKATRAMAASMAPLPLLKKLKAYVHHANLRVRAKAAVAISHCAARMDIGAMKEFGMSALLQLAAELLNDRLPEAREAARGVVASTHAAFAKEAAASGQEDDAAASWESLCALSLPPISAQAVAKIAAAAASSQ

SEQ ID NO: 30468 - protein, 221 aa, Zea mays subsp. mays
  peptide (1)..(221): Ceres Seq. ID no. 12373166
  misc_feature (173)..(221): NCBI GI NO: 9453859 NR Description: EBNA-1 [Cynomolgus Epstein-Barr Virus Si-IIA]
  misc_feature (171)..(221): NCBI GI NO: 9625624 NR Description: nuclear antigen EBNA1 [Human herpesvirus 4]
  misc_feature (170)..(221): NCBI GI NO: 9453857 NR Description: EBNA-1 [Cynomolgus Epstein-Barr Virus TsB-B6]
  misc_feature (197)..(221): NCBI GI NO: 465445 NR Description: PROBABLE NUCLEAR ANTIGEN
  misc_feature (197)..(221): NCBI GI NO: 93144 NR Description: hypothetical protein - suid herpesvirus 1
  misc_feature (27)..(221): NCBI GI NO: 13561986 NR Description: major ampullate spidroin 2 [Argiope trifasciata]
MALRALDNTMPAAVEERPKKVAKVGVPAAAAKAAASPSPGSGGKKKKGNDENSAPRATAAAAEQAVEYISSEELEAAASPKAKAAGLVRGPGLQGLGQDLRGAQRRAPPRDPPPRAAEPDPGEGGAGGREDDEEPPQRGAQDVHHGLRRHLQFLRQPPRLRLRRHLRQAAAPAPAEGVPGQAVRVRGGREGDARDGGVDGAAAAAEEAQGVRPPRQPQGQG

SEQ ID NO: 30469 - protein, 212 aa, Zea mays subsp. mays
  peptide (1)..(212): Ceres Seq. ID no. 12373167
  misc_feature (164)..(212): NCBI GI NO: 9453859 NR Description: EBNA-1 [Cynomolgus Epstein-Barr Virus Si-IIA]
  misc_feature (162)..(212): NCBI GI NO: 9625624 NR Description: nuclear antigen EBNA1 [Human herpesvirus 4]
  misc_feature (161)..(212): NCBI GI NO: 9453857 NR Description: EBNA-1 [Cynomolgus Epstein-Barr Virus TsB-B6]
  misc_feature (188)..(212): NCBI GI NO: 465445 NR Description: PROBABLE NUCLEAR ANTIGEN
  misc_feature (188)..(212): NCBI GI NO: 93144 NR Description: hypothetical protein - suid herpesvirus 1
  misc_feature (18)..(212): NCBI GI NO: 13561986 NR Description: major ampullate spidroin 2 [Argiope trifasciata]
MPAAVEERPKKVAKVGVPAAAAKAAASPSPGSGGKKKKGNDENSAPRATAAAAEQAVEYISSEELEAAASPKAKAAGLVRGPGLQGLGQDLRGAQRRAPPRDPPPRAAEPDPGEGGAGGREDDEEPPQRGAQDVHHGLRRHLQFLRQPPRLRLRRHLRQAAAPAPAEGVPGQAVRVRGGREGDARDGGVDGAAAAAEEAQGVRPPRQPQGQG

SEQ ID NO: 30470 - DNA, 1112 bp, Zea mays subsp. mays
  misc_feature (1)..(1112): Ceres Seq. ID no. 12382179
gcaggctgctccggcagactccttcaccgcgaagacttctcctctcctctctcctctctcccttccactcgcgctctcctggataccgcgcgcggcgacgagatggcgatagatcacgggacccctctcgggctgaagcggagaggcgccatgggcggaggtggcgagtgctgcgacgacggcagcgagacccggcggtggccgccgtggctgaggccgctgctgtccgcgagcttcttcgtccaatgcagggtccacgccgacgcgcacaagagcgagtgcaacatgtactgcctcgactgcatgggcgacgctctctgcgcgctctgcctcgccgcgcgccaccgcgaccaccactccatccagatacggaggtcgtcgtaccacgacgtgatccgggtgtcggagatacagaaggtgctggacatcgccggcgtgcagacgtacatcatcaacagcgcgcgcgtggtgttcctgaacgagcggccgcagccccgcccgggcaagggcgtcaccaacacctgcgaggtctgcgagcgcagcctcctcgactgcttccgcttctgctcccttgggtgcaagatagtgggcacggcccgtggctaccgtcctgggaagaagaagcacggcggcggcggcggtaacaagaagagggcggcgccggcgccggcgcttaaggacgtgcggtctgactcggaggactcgtgcaccagcaccagcggcgccagcagcgacaagagcagcgtcgtgcagagctcccctccgccgccgacctctgccagccaccgcccccccgggaacaagcgccggaagggcgtcccgcaccggtcgcccttgggcagcctcatcgtcgagctctaggactcttcgtcagcgccaaggcaaggcaaggcaacgcactctgtactgtacatgacataccccccgaagagaagggaataacaaacagtaagcctctggacgtggagggcgaagggcgacagcggtaagccgtaagatcggacaatccttagttttgcttcttctcaggttttgttttgcttttacagttactagcactctagcagtggtaccatcagtaagataaccgcgactaagttttgcagccttgt

SEQ ID NO: 30471 - protein, 286 aa, Zea mays subsp. mays
  peptide (1)..(286): Ceres Seq. ID no. 12382180
  misc_feature (66)..(273): Pfam Name: Pfam Description:  Protein of unknown function, DUF597
  misc_feature (48)..(285): NCBI GI NO: 38346725 NR Description: OSJNBa0086O06.23
  misc_feature (35)..(285): NCBI GI NO: 37537092 NR Description: unknown protein
  misc_feature (63)..(285): NCBI GI NO: 6714272 NR Description: F6N18.8 [Arabidopsis thaliana]
  misc_feature (63)..(285): NCBI GI NO: 18398555 NR Description: expressed protein; protein id: At1g32700
  misc_feature (46)..(280): NCBI GI NO: 15236696 NR Description: putative protein; protein id: At4g17900.1
  misc_feature (63)..(285): NCBI GI NO: 21554139 NR Description: unknown [Arabidopsis thaliana]
  misc_feature (68)..(223): NCBI GI NO: 18394936 NR Description: expressed protein; protein id: At1g21000
  misc_feature (68)..(223): NCBI GI NO: 25337907 NR Description: hypothetical protein F9H16
  misc_feature (68)..(223): NCBI GI NO: 21537073 NR Description: unknown [Arabidopsis thaliana]
  misc_feature (66)..(278): NCBI GI NO: 15237491 NR Description: putative protein; protein id: At5g46710
AGCSGRLLHREDFSSPLSSLPSTRALLDTARGDEMAIDHGTPLGLKRRGAMGGGGECCDDGSETRRWPPWLRPLLSASFFVQCRVHADAHKSECNMYCLDCMGDALCALCLAARHRDHHSIQIRRSSYHDVIRVSEIQKVLDIAGVQTYIINSARVVFLNERPQPRPGKGVTNTCEVCERSLLDCFRFCSLGCKIVGTARGYRPGKKKHGGGGGNKKRAAPAPALKDVRSDSEDSCTSTSGASSDKSSVVQSSPPPPTSASHRPPGNKRRKGVPHRSPLGSLIVEL

SEQ ID NO: 30472 - protein, 252 aa, Zea mays subsp. mays
  peptide (1)..(252): Ceres Seq. ID no. 12382181
  misc_feature (32)..(239): Pfam Name: Pfam Description:  Protein of unknown function, DUF597
  misc_feature (14)..(251): NCBI GI NO: 38346725 NR Description: OSJNBa0086O06.23
  misc_feature (1)..(251): NCBI GI NO: 37537092 NR Description: unknown protein
  misc_feature (29)..(251): NCBI GI NO: 6714272 NR Description: F6N18.8 [Arabidopsis thaliana]
  misc_feature (29)..(251): NCBI GI NO: 18398555 NR Description: expressed protein; protein id: At1g32700
  misc_feature (12)..(246): NCBI GI NO: 15236696 NR Description: putative protein; protein id: At4g17900.1
  misc_feature (29)..(251): NCBI GI NO: 21554139 NR Description: unknown [Arabidopsis thaliana]
  misc_feature (34)..(189): NCBI GI NO: 18394936 NR Description: expressed protein; protein id: At1g21000
  misc_feature (34)..(189): NCBI GI NO: 25337907 NR Description: hypothetical protein F9H16
  misc_feature (34)..(189): NCBI GI NO: 21537073 NR Description: unknown [Arabidopsis thaliana]
  misc_feature (32)..(244): NCBI GI NO: 15237491 NR Description: putative protein; protein id: At5g46710
MAIDHGTPLGLKRRGAMGGGGECCDDGSETRRWPPWLRPLLSASFFVQCRVHADAHKSECNMYCLDCMGDALCALCLAARHRDHHSIQIRRSSYHDVIRVSEIQKVLDIAGVQTYIINSARVVFLNERPQPRPGKGVTNTCEVCERSLLDCFRFCSLGCKIVGTARGYRPGKKKHGGGGGNKKRAAPAPALKDVRSDSEDSCTSTSGASSDKSSVVQSSPPPPTSASHRPPGNKRRKGVPHRSPLGSLIVEL

SEQ ID NO: 30473 - protein, 236 aa, Zea mays subsp. mays
  peptide (1)..(236): Ceres Seq. ID no. 12382182
  misc_feature (16)..(223): Pfam Name: Pfam Description:  Protein of unknown function, DUF597
  misc_feature (1)..(235): NCBI GI NO: 38346725 NR Description: OSJNBa0086O06.23
  misc_feature (1)..(235): NCBI GI NO: 37537092 NR Description: unknown protein
  misc_feature (13)..(235): NCBI GI NO: 6714272 NR Description: F6N18.8 [Arabidopsis thaliana]
  misc_feature (13)..(235): NCBI GI NO: 18398555 NR Description: expressed protein; protein id: At1g32700
  misc_feature (1)..(230): NCBI GI NO: 15236696 NR Description: putative protein; protein id: At4g17900.1
  misc_feature (13)..(235): NCBI GI NO: 21554139 NR Description: unknown [Arabidopsis thaliana]
  misc_feature (18)..(173): NCBI GI NO: 18394936 NR Description: expressed protein; protein id: At1g21000
  misc_feature (18)..(173): NCBI GI NO: 25337907 NR Description: hypothetical protein F9H16
  misc_feature (18)..(173): NCBI GI NO: 21537073 NR Description: unknown [Arabidopsis thaliana]
  misc_feature (16)..(228): NCBI GI NO: 15237491 NR Description: putative protein; protein id: At5g46710
MGGGGECCDDGSETRRWPPWLRPLLSASFFVQCRVHADAHKSECNMYCLDCMGDALCALCLAARHRDHHSIQIRRSSYHDVIRVSEIQKVLDIAGVQTYIINSARVVFLNERPQPRPGKGVTNTCEVCERSLLDCFRFCSLGCKIVGTARGYRPGKKKHGGGGGNKKRAAPAPALKDVRSDSEDSCTSTSGASSDKSSVVQSSPPPPTSASHRPPGNKRRKGVPHRSPLGSLIVEL

SEQ ID NO: 30474 - DNA, 1388 bp, Zea mays subsp. mays; identical to SEQ ID NO: 23458
  misc_feature (1)..(1388): Ceres Seq. ID no. 12588453

SEQ ID NO: 30475 - protein, 378 aa, Zea mays subsp. mays; identical to SEQ ID NO: 23459
  peptide (1)..(378): Ceres Seq. ID no. 12588454
  misc_feature (70)..(308): Pfam Name: Pfam Description:  Isocitrate lyase family
  misc_feature (1)..(314): NCBI GI NO: 32490267 NR Description: OSJNBb0116K07.9
  misc_feature (66)..(314): NCBI GI NO: 38347227 NR Description: OSJNBa0044M19.9
  misc_feature (1)..(314): NCBI GI NO: 30689278 NR Description: carboxyphosphonoenolpyruvate mutase -related
  misc_feature (1)..(314): NCBI GI NO: 30689282 NR Description: carboxyphosphonoenolpyruvate mutase -related
  misc_feature (1)..(314): NCBI GI NO: 25408843 NR Description: probable carboxyphosphonoenolpyruvate mutase
  misc_feature (73)..(313): NCBI GI NO: 23043034 NR Description: hypothetical protein
  misc_feature (73)..(309): NCBI GI NO: 17229355 NR Description: carboxyphosphonoenolpyruvate phosphonomutase
  misc_feature (71)..(305): NCBI GI NO: 33599708 NR Description: carboxyvinyl-carboxyphosphonate phosphorylmutase
  misc_feature (86)..(314): NCBI GI NO: 40747280 NR Description: hypothetical protein AN9369.2
  misc_feature (66)..(313): NCBI GI NO: 40739091 NR Description: hypothetical protein AN6882.2

SEQ ID NO: 30476 - protein, 300 aa, Zea mays subsp. mays; identical to SEQ ID NO: 23460
  peptide (1)..(300): Ceres Seq. ID no. 12588455
  misc_feature (1)..(230): Pfam Name: Pfam Description:  Isocitrate lyase family
  misc_feature (1)..(236): NCBI GI NO: 32490267 NR Description: OSJNBb0116K07.9
  misc_feature (1)..(236): NCBI GI NO: 38347227 NR Description: OSJNBa0044M19.9
  misc_feature (1)..(236): NCBI GI NO: 30689278 NR Description: carboxyphosphonoenolpyruvate mutase -related
  misc_feature (1)..(236): NCBI GI NO: 30689282 NR Description: carboxyphosphonoenolpyruvate mutase -related
  misc_feature (1)..(236): NCBI GI NO: 25408843 NR Description: probable carboxyphosphonoenolpyruvate mutase
  misc_feature (1)..(235): NCBI GI NO: 23043034 NR Description: hypothetical protein
  misc_feature (1)..(231): NCBI GI NO: 17229355 NR Description: carboxyphosphonoenolpyruvate phosphonomutase
  misc_feature (1)..(227): NCBI GI NO: 33599708 NR Description: carboxyvinyl-carboxyphosphonate phosphorylmutase
  misc_feature (8)..(236): NCBI GI NO: 40747280 NR Description: hypothetical protein AN9369.2
  misc_feature (1)..(235): NCBI GI NO: 40739091 NR Description: hypothetical protein AN6882.2

SEQ ID NO: 30477 - protein, 249 aa, Zea mays subsp. mays; identical to SEQ ID NO: 23461
  peptide (1)..(249): Ceres Seq. ID no. 12588456
  misc_feature (1)..(179): Pfam Name: Pfam Description:  Isocitrate lyase family
  misc_feature (1)..(185): NCBI GI NO: 32490267 NR Description: OSJNBb0116K07.9
  misc_feature (1)..(185): NCBI GI NO: 38347227 NR Description: OSJNBa0044M19.9
  misc_feature (1)..(185): NCBI GI NO: 30689278 NR Description: carboxyphosphonoenolpyruvate mutase -related
  misc_feature (1)..(185): NCBI GI NO: 30689282 NR Description: carboxyphosphonoenolpyruvate mutase -related
  misc_feature (1)..(185): NCBI GI NO: 25408843 NR Description: probable carboxyphosphonoenolpyruvate mutase
  misc_feature (1)..(184): NCBI GI NO: 23043034 NR Description: hypothetical protein
  misc_feature (1)..(180): NCBI GI NO: 17229355 NR Description: carboxyphosphonoenolpyruvate phosphonomutase
  misc_feature (1)..(176): NCBI GI NO: 33599708 NR Description: carboxyvinyl-carboxyphosphonate phosphorylmutase
  misc_feature (1)..(185): NCBI GI NO: 40747280 NR Description: hypothetical protein AN9369.2
  misc_feature (1)..(184): NCBI GI NO: 40739091 NR Description: hypothetical protein AN6882.2

SEQ ID NO: 30478 - DNA, 1186 bp, Zea mays subsp. mays
  misc_feature (1)..(1186): Ceres Seq. ID no. 12373161
acaaaacccgccttcctctcattccccaatcgccacaactctcgtcggagctccgagccctaaacaacagccttcgccggccgactcccgggcggaggaggcggccggggagatggacgacatcggcggcggcgcaccgggtgcctgccccaagaacaagaagccccggcacctgtcccgctcgctgacctaccaccaccacccgtaccaggggcgccaggtgctgccggcgccggcgcccaacccgcagcgcccgcagtcggtggtcctgtacacgacgtcgctccgcggcgtgcgccgcacgttcgcggactgctgcgcggtgcgcgccgcgctgcggggcctccgcgtcgccgtggacgagcgccacgtctccatggacgcggcgctccggcgcgagctgcaggggatcctcgcggcacggggccgcgggttctcgctcccgcagctcctggtcgggggcgcgctcgtcggcggcgccgacgaggtccgccggctgcacgagtccggcgagctccgccgcgtcctcgaaggcgcccccgggcaggaccccgccttcgtctgcggcgcctgcggcgggttccggttcgcgccctgtccggcctgcgacggctcccgcaaggtgttcgtggaggaagaggggcgagcccgccgctgcctggagtgcaacgaaaacggcttggtacgctgccccaattgctgttcttgatagcttgtttaagttgagtgtatacgagaacttaaggattgcttgattagaggtagtgggagaggaaaagagcatttcttgtgttctttggctgctgtatattgtggacgcagttgggaggataggtattgggtatgccatcagtgttttgaaaggatagcgaatgggttcttggccctcaagttatcacgtctggagtaccatcgatggtaaggtgccatctcatagtacttcatgtacatgtgtgtgtctgtgaatgtgtattgatagaccttcttcaagttggaaaagaaggcccaaagcaaagggttagagatttagaggttgtgctacatagcggcaagaaaaggtggagccttccttgattctttgggcgtgctattagcatattctgagaagggcaatatggcttctggccctatagtttgagattgtataaaatatgtatattatacattgataaccagagtgggtttg

SEQ ID NO: 30479 - protein, 235 aa, Zea mays subsp. mays
  peptide (1)..(235): Ceres Seq. ID no. 12373162
  misc_feature (41)..(235): NCBI GI NO: 34899098 NR Description: hypothetical protein~similar to Arabidopsisthaliana chromosome 5
  misc_feature (82)..(235): NCBI GI NO: 15240723 NR Description: putative protein; protein id: At5g13810
  misc_feature (73)..(234): NCBI GI NO: 15451042 NR Description: putative protein [Arabidopsis thaliana]
  misc_feature (73)..(234): NCBI GI NO: 30694571 NR Description: expressed protein [Arabidopsis thaliana]
  misc_feature (5)..(233): NCBI GI NO: 34907946 NR Description: B1088C09.21
  misc_feature (88)..(234): NCBI GI NO: 15227326 NR Description: unknown protein; protein id: At2g41330
  misc_feature (82)..(234): NCBI GI NO: 32490043 NR Description: OSJNBa0063C18.3
  misc_feature (82)..(231): NCBI GI NO: 10241626 NR Description: Contains similarity to F1N 19.7
  misc_feature (8)..(233): NCBI GI NO: 38346321 NR Description: OJ000126_13.3
  misc_feature (76)..(233): NCBI GI NO: 34899868 NR Description: OJ1714_H10.16
QNPPSSHSPIATTLVGAPSPKQQPSPADSRAEEAAGEMDDIGGGAPGACPKNKKPRHLSRSLTYHHHPYQGRQVLPAPAPNPQRPQSVVLYTTSLRGVRRTFADCCAVRAALRGLRVAVDERHVSMDAALRRELQGILAARGRGFSLPQLLVGGALVGGADEVRRLHESGELRRVLEGAPGQDPAFVCGACGGFRFAPCPACDGSRKVFVEEEGRARRCLECNENGLVRCPNCCS

SEQ ID NO: 30480 - protein, 198 aa, Zea mays subsp. mays
  peptide (1)..(198): Ceres Seq. ID no. 12373163
  misc_feature (4)..(198): NCBI GI NO: 34899098 NR Description: hypothetical protein~similar to Arabidopsisthaliana chromosome 5
  misc_feature (45)..(198): NCBI GI NO: 15240723 NR Description: putative protein; protein id: At5g13810
  misc_feature (36)..(197): NCBI GI NO: 15451042 NR Description: putative protein [Arabidopsis thaliana]
  misc_feature (36)..(197): NCBI GI NO: 30694571 NR Description: expressed protein [Arabidopsis thaliana]
  misc_feature (1)..(196): NCBI GI NO: 34907946 NR Description: B1088C09.21
  misc_feature (51)..(197): NCBI GI NO: 15227326 NR Description: unknown protein; protein id: At2g41330
  misc_feature (45)..(197): NCBI GI NO: 32490043 NR Description: OSJNBa0063C18.3
  misc_feature (45)..(194): NCBI GI NO: 10241626 NR Description: Contains similarity to F1N 19.7
  misc_feature (1)..(196): NCBI GI NO: 38346321 NR Description: OJ000126_13.3
  misc_feature (39)..(196): NCBI GI NO: 34899868 NR Description: OJ1714_H10.16
MDDIGGGAPGACPKNKKPRHLSRSLTYHHHPYQGRQVLPAPAPNPQRPQSVVLYTTSLRGVRRTFADCCAVRAALRGLRVAVDERHVSMDAALRRELQGILAARGRGFSLPQLLVGGALVGGADEVRRLHESGELRRVLEGAPGQDPAFVCGACGGFRFAPCPACDGSRKVFVEEEGRARRCLECNENGLVRCPNCCS

SEQ ID NO: 30481 - DNA, 1331 bp, Zea mays subsp. mays
  misc_feature (1)..(1331): Ceres Seq. ID no. 12365852
cttgcgacctgattcgccatgccctgcgtgtcctttcgaaaacggctgtcgacactgcccctctcgctcgctttccactcgattccagcaggcgtgcgtggcccaagtacccaacgcaccaccaggtggggcatctgctccacccccactccacttccactagcaccaacaccaacagcctcgccgccagccgcagccacgcgacacgacgcgacgcgagacgcggagcggtacaaaaggtggactgggtgggtggctggttccgtggttcaactcctaccactaccacagcaccaacgacggaccaggcagcagagaaaaagcagaccagacgagacctctcgcgttccgtcctcctcccccctgcccctgctgccgttccccttcttcctcagttctcccgcccgctgctgccctccgtccgcgtccagatcccgccaccaaccgatccggcgccctccagcatggcgggggcgggggcgaaggcggcgggagccctggctctggcgctcgtgctcgcgctcgcgggggccaactccgagggcgacgcgctctcggcgctgcgccggagcctcagggaccccggcggcgttctgcagagctgggaccccacgctcgtcaacccctgcacctggttccacgtcacctgcgaccgcgacaaccgcgtcacccgcctagatcttggtaatttgaacttatctggtcatctggtgcctgagcttgggaaactggagcatcttcagtatctggaactttataagaataacattcaaggaacagtcccttctgagcttggcaacttgaagaatctaataagcttcgacttgtacaagaacaacatttcggggacaatacctcctgcccttggaaagttgaagtcccttgtattcttgcgtctcaatggcaatcatttgactgggcccatcccaagggaactcgctggaatatctagtctcaaagttgttgatgtttcaagtaatgatttgtgcgggacgattcccacgtctggaccatttgaacatattcctctgagcaactttgagaagaacccgcgcttggaaggtccagagctacaaggcctggccatatacgacaccaactgctagaggcaccacgaagataagaactgctagaaagtaacgagcgaacaaggttacgagaaattgggcgatatagatttactaggtctggatctgtaatcctccctgcatagctcttattcgtaactcgctgcctgcacgaaagttggtgtgtgttttagcagaatgctttctgtccgtgaaagtaaacttgaactgcttattacgactgaaatgatattgtcgttcctc

SEQ ID NO: 30482 - protein, 367 aa, Zea mays subsp. mays
  peptide (1)..(367): Ceres Seq. ID no. 12365853
  misc_feature (157)..(367): NCBI GI NO: 29468120 NR Description: leucine-rich repeat protein [Oryza sativa]
  misc_feature (157)..(367): NCBI GI NO: 27497122 NR Description: floral organ regulator 1
  misc_feature (155)..(367): NCBI GI NO: 34903344 NR Description: unnamed protein product
  misc_feature (171)..(367): NCBI GI NO: 30385250 NR Description: leucine-rich repeat protein
  misc_feature (161)..(367): NCBI GI NO: 7489030 NR Description: leucine-rich repeat protein LRP - tomato
  misc_feature (163)..(367): NCBI GI NO: 15242153 NR Description: leucine-rich repeat protein; protein id:At5g21090
  misc_feature (163)..(367): NCBI GI NO: 34146800 NR Description: At3g43740 [Arabidopsis thaliana]
  misc_feature (162)..(367): NCBI GI NO: 34896972 NR Description: putative leucine-rich repeat protein
  misc_feature (157)..(309): NCBI GI NO: 34909134 NR Description: putative leucine-rich repeat protein
  misc_feature (153)..(355): NCBI GI NO: 13897310 NR Description: SERK2 protein [Zea mays]
CDLIRHALRVLSKTAVDTAPLARFPLDSSRRAWPKYPTHHQVGHLLHPHSTSTSTNTNSLAASRSHATRRDARRGAVQKVDWVGGWFRGSTPTTTTAPTTDQAAEKKQTRRDLSRSVLLPPAPAAVPLLPQFSRPLLPSVRVQIPPPTDPAPSSMAGAGAKAAGALALALVLALAGANSEGDALSALRRSLRDPGGVLQSWDPTLVNPCTWFHVTCDRDNRVTRLDLGNLNLSGHLVPELGKLEHLQYLELYKNNIQGTVPSELGNLKNLISFDLYKNNISGTIPPALGKLKSLVFLRLNGNHLTGPIPRELAGISSLKVVDVSSNDLCGTIPTSGPFEHIPLSNFEKNPRLEGPELQGLAIYDTNC

SEQ ID NO: 30483 - protein, 219 aa, Zea mays subsp. mays
  peptide (1)..(219): Ceres Seq. ID no. 12365854
MPCVSFRKRLSTLPLSLAFHSIPAGVRGPSTQRTTRWGICSTPTPLPLAPTPTASPPAAATRHDATRDAERYKRWTGWVAGSVVQLLPLPQHQRRTRQQRKSRPDETSRVPSSSPLPLLPFPFFLSSPARCCPPSASRSRHQPIRRPPAWRGRGRRRREPWLWRSCSRSRGPTPRATRSRRCAGASGTPAAFCRAGTPRSSTPAPGSTSPATATTASPA

SEQ ID NO: 30484 - protein, 213 aa, Zea mays subsp. mays; identical to SEQ ID NO: 23304
  peptide (1)..(213): Ceres Seq. ID no. 12365855
  misc_feature (3)..(213): NCBI GI NO: 29468120 NR Description: leucine-rich repeat protein [Oryza sativa]
  misc_feature (3)..(213): NCBI GI NO: 27497122 NR Description: floral organ regulator 1
  misc_feature (1)..(213): NCBI GI NO: 34903344 NR Description: unnamed protein product
  misc_feature (17)..(213): NCBI GI NO: 30385250 NR Description: leucine-rich repeat protein
  misc_feature (7)..(213): NCBI GI NO: 7489030 NR Description: leucine-rich repeat protein LRP - tomato
  misc_feature (9)..(213): NCBI GI NO: 15242153 NR Description: leucine-rich repeat protein; protein id:At5g21090
  misc_feature (9)..(213): NCBI GI NO: 34146800 NR Description: At3g43740 [Arabidopsis thaliana]
  misc_feature (8)..(213): NCBI GI NO: 34896972 NR Description: putative leucine-rich repeat protein
  misc_feature (3)..(155): NCBI GI NO: 34909134 NR Description: putative leucine-rich repeat protein
  misc_feature (1)..(201): NCBI GI NO: 13897310 NR Description: SERK2 protein [Zea mays]

SEQ ID NO: 30485 - DNA, 1175 bp, Zea mays subsp. mays
  misc_feature (1)..(1175): Ceres Seq. ID no. 12358359
aaatccacaaaggcacaaagatggaaaaggtgtattggactctttttaaagctaaaaaaacagttcaaaagattgctgcttttcgcttcagtgctgctccgattctgtttcagaagattaacaatttgaaattgtgacgatcctaattgccatcttctcgataataatgaggaaaaaaagattgacgcgcttttcgtgtcctcagaaactgcgggtttgctgaaattctcctccactttcccaagcaaagaacaaagaaccgcccttgttctctgcgactctgcccggccggtctccgaggcgggcggagggaaccagagagcaaggcgaggagcgcggaagggctgagggaaggggcggcggggcatggctcgccggccggcgtcgtgggagcagggcggcgacgagtacgactatctcttcaaggtcgtgctcatcggcgactctggcgtggggaagtccaacctgctctcccgcttcaccaagaacaccttcgccctcgactccaagtccaccatcggcgttgagttcgccacgcgcacactccaggtggagaacaagattataaaagctcaaatctgggacactgctgggcaggagaggtaccgagcaattacaagtgcttactatcgaggagctgtcggggcgttgctagtctacgatgtcactaaagtaatgacatttgagaatgtgaagaggtggttgaaggagctccgggaccatgctgactcgaacatagtcgtaatgctcattggcaacaagactgaccttaggcacctgcgctctgtcgccgttgaggatgctgcaagctttgcaggagagcgaaaggttttgttcttcatcgagacctctgcgctcgatgcgacaaacgtcgagaaggccttccacaccgttctagccgagatctaccggataatcagcaagaagcccctgtcttcggaggagtctggtttggggtccggtaacctcagagagggacagtccatccaagtgtcagccacaaattctggcgcccttacgtcgcggtgctgctcttcttagagccacgcccaccagaatcatctgaagaacaacagttcgtcaagaaggtcctctcttccgaagtcgaaatatttactcccctttgtgtgaacaataagcgtagatttaaagaatgtcagactcagacgctgact

SEQ ID NO: 30486 - protein, 224 aa, Zea mays subsp. mays
  peptide (1)..(224): Ceres Seq. ID no. 12358360
  misc_feature (20)..(182): Pfam Name: Pfam Description:  Ras family
  misc_feature (1)..(224): NCBI GI NO: 15217568 NR Description: GTP-binding protein, putative
  misc_feature (14)..(224): NCBI GI NO: 15222396 NR Description: GTP-binding protein, putative
  misc_feature (14)..(224): NCBI GI NO: 15232652 NR Description: GTP-binding protein, putative
  misc_feature (13)..(224): NCBI GI NO: 34908298 NR Description: Ras-related GTP-binding protein
  misc_feature (13)..(222): NCBI GI NO: 18376163 NR Description: probable GTP-binding protein Drab11
  misc_feature (13)..(224): NCBI GI NO: 34897394 NR Description: Ras-related GTP-binding protein
  misc_feature (13)..(224): NCBI GI NO: 3024502 NR Description: RAS-RELATED PROTEIN RAB11D
  misc_feature (14)..(224): NCBI GI NO: 3024501 NR Description: RAS-RELATED PROTEIN RAB11C
  misc_feature (14)..(224): NCBI GI NO: 15237828 NR Description: Ras-related GTP-binding protein, putative
  misc_feature (13)..(223): NCBI GI NO: 3025293 NR Description: RAS-RELATED PROTEIN YPTC6
MARRPASWEQGGDEYDYLFKVVLIGDSGVGKSNLLSRFTKNTFALDSKSTIGVEFATRTLQVENKIIKAQIWDTAGQERYRAITSAYYRGAVGALLVYDVTKVMTFENVKRWLKELRDHADSNIVVMLIGNKTDLRHLRSVAVEDAASFAGERKVLFFIETSALDATNVEKAFHTVLAEIYRIISKKPLSSEESGLGSGNLREGQSIQVSATNSGALTSRCCSS

SEQ ID NO: 30487 - protein, 121 aa, Zea mays subsp. mays
  peptide (1)..(121): Ceres Seq. ID no. 12358361
  misc_feature (1)..(79): Pfam Name: Pfam Description:  Ras family
  misc_feature (1)..(121): NCBI GI NO: 15217568 NR Description: GTP-binding protein, putative
  misc_feature (1)..(121): NCBI GI NO: 15222396 NR Description: GTP-binding protein, putative
  misc_feature (1)..(121): NCBI GI NO: 15232652 NR Description: GTP-binding protein, putative
  misc_feature (1)..(121): NCBI GI NO: 34908298 NR Description: Ras-related GTP-binding protein
  misc_feature (1)..(119): NCBI GI NO: 18376163 NR Description: probable GTP-binding protein Drab11
  misc_feature (1)..(121): NCBI GI NO: 34897394 NR Description: Ras-related GTP-binding protein
  misc_feature (1)..(121): NCBI GI NO: 3024502 NR Description: RAS-RELATED PROTEIN RAB11D
  misc_feature (1)..(121): NCBI GI NO: 3024501 NR Description: RAS-RELATED PROTEIN RAB11C
  misc_feature (1)..(121): NCBI GI NO: 15237828 NR Description: Ras-related GTP-binding protein, putative
  misc_feature (1)..(120): NCBI GI NO: 3025293 NR Description: RAS-RELATED PROTEIN YPTC6
MTFENVKRWLKELRDHADSNIVVMLIGNKTDLRHLRSVAVEDAASFAGERKVLFFIETSALDATNVEKAFHTVLAEIYRIISKKPLSSEESGLGSGNLREGQSIQVSATNSGALTSRCCSS

SEQ ID NO: 30488 - DNA, 702 bp, Zea mays subsp. mays
  misc_feature (1)..(702): Ceres Seq. ID no. 12346922
taaagatgacctgtctcaaattggatttgatgtcgaatcaattcagaaaatggttgctggattggagggaaagatcgagttacttgagaacaaacaggacgtggctaatactggtatctggtatctctgccaagtagcaggcggtttaaaagatggaataaacaccaggtttttccaggaaaccagtgagaagctgaagctctcacattcagctcaacctgaaaacaagccagtgaaggggcttgaatttttttcggaaagcaccatggaacagaaagtagctgactccaaaccaattgcggtgacagtcgacgctgagaagcctgagaaaaccgctgctgtaatgggcaccacagtgcacaggtctatcaggttctcatatcggaatgcaggccttgctttgtgatcaaatcctctccgcttgagatgcacgtggccttcctggttgctttttcttttttggcaacaaccttcctggttgctttgtgtgatggtcagaaaacatagaagaataacctgcaactggagtgacagaatttcttttccccgcagtagacaggtgtgcgttatttggttggaattatctccagtccactatcaattttttttccttggattttgattcattttatgtttcgatttgttgccttatatactgtaaagtcattggaaagaataaataaaacacgaatgttttttgtt

SEQ ID NO: 30489 - protein, 134 aa, Zea mays subsp. mays
  peptide (1)..(134): Ceres Seq. ID no. 12346923
  misc_feature (1)..(122): NCBI GI NO: 18390460 NR Description: expressed protein; protein id: At1g04960
KDDLSQIGFDVESIQKMVAGLEGKIELLENKQDVANTGIWYLCQVAGGLKDGINTRFFQETSEKLKLSHSAQPENKPVKGLEFFSESTMEQKVADSKPIAVTVDAEKPEKTAAVMGTTVHRSIRFSYRNAGLAL

SEQ ID NO: 30490 - protein, 118 aa, Zea mays subsp. mays
  peptide (1)..(118): Ceres Seq. ID no. 12346924
  misc_feature (1)..(106): NCBI GI NO: 18390460 NR Description: expressed protein; protein id: At1g04960
MVAGLEGKIELLENKQDVANTGIWYLCQVAGGLKDGINTRFFQETSEKLKLSHSAQPENKPVKGLEFFSESTMEQKVADSKPIAVTVDAEKPEKTAAVMGTTVHRSIRFSYRNAGLAL

SEQ ID NO: 30491 - DNA, 1997 bp, Zea mays subsp. mays
  misc_feature (1)..(1997): Ceres Seq. ID no. 12373157
attcgatagttccatcctcctccctcccccttcgccggcctcgcttcgtccctcccgctctcccccttttaaatcaaaccctctctcggctcctttataaatcctagtcgaagcaagggtgcgcgcacttcactacccaacctgaccccgaagatcgcgtccgcagagacagtagccgcgtcatggcgaccccgccgccgccgctcccgcccatgccgccgaggcacgtctcctgcggctcacttctacaggaactgcaggaactatggggagaaattggtcaggatgaaatgaaaagagataggatgatactgcaactggaggaggattgtctcaatgtttacaagcaaaaagtgaatcagactaggaaacagaaggcagacctgcttcaagagctgtcccttggcgaagctgatatagacaagatcctttctgctcttggagagagagaaacatttcctaggtcagagaagcttgggggcacattaatggaacaactcgctaagatagagccagtgctagaagatttgaggcgtaggagggatgagagagtaaatgagttcaaggctattcagtcaaagattgtatgtctacaagcagaaatttcaggagccattgatcatggggatcctgctgctcctgtggtagatgagaatgatttatccttgaaaagatcaggggaattgaaggagcatcttaatgatcttcagacagaaaagaatggaaggctgcaaaaaattgacatccagactaacagtattcatgaaatgtgcaacataatgtctattgatctcaaaatggcactaaaggatgttcatcccagttacgctgagctggggagaagcaaacccatgagtattagcaacagttcgcttgatagactatctgaaaaagtacatgcgttaaatcatgaaaagaaacaaaggcttcggaagcttcaagatcttggcagcacactcattgagttatggaacctcatggatacaccaactgatgaacagagattttttgaccatgtgacttctcttattaaagtctcaccaactacagcgatgccccaagggtgccttgcacacgaaataattgaaaaggtagagactgaggttaagagactgactaagttgaaagctagcaaaatgaaagagctagtcttcaagaaattgactgatcttgaggaaatctacagaagtgttcacatggatattgatagtgattctgagcggcaaaccctcaatgatctcattgattctggtagagcagatctttcagagttgctggcaagaatggatattcgaattgcggaggcaaaagaacatgcattaagtagaaaggatattttagaaaaggtggagaagtggacattggcatcagaagaggagacttggcttgatgaatacgaaagggatcaaaaccgatataatgctgtccgaggagctcacataaatctcaagcgtgcggagaaagctaggatattggtcagcaaacttccatctcttttggagaacttgactgctaaaattaaagcctgggaaaaggaaatgggtattccatttatatttaacaaggtgaggctgttggactgtttagatgaatacacctgtacaagacagcaaaaagaagaggaaaagcgccgatcaagggaattgaagaaactgcaagaacagtttgctacagagcaaggtgccaagttcggaacgaaaccaagccctatccgtcctctttcttcaaggaagcctcttgggcagagctctaatgccaatattattggtggaactccgaccagccgccgtgtttctacccccatgtcacggaagggtaggccatcttctggaagggtgcaggaagctgtcaagactgctgtggcaccagcaaactatgttgcccttcccaaggactgctcagacatttctaccctttgaagtgtaatcacctactctgaccatcgattgacttctcacttgatcgacctacatactatatagtcttgactccagtgc

SEQ ID NO: 30492 - protein, 578 aa, Zea mays subsp. mays
  peptide (1)..(578): Ceres Seq. ID no. 12373158
  misc_feature (38)..(571): Pfam Name: MAP65/ASE1 family Pfam Description: Microtubule associated protein
  misc_feature (16)..(571): NCBI GI NO: 15240485 NR Description: putative protein; protein id: At5g55230.1
  misc_feature (17)..(571): NCBI GI NO: 11558252 NR Description: microtubule-associated protein MAP65-1a
  misc_feature (16)..(571): NCBI GI NO: 18416818 NR Description: putative protein; protein id: At4g26760
  misc_feature (12)..(436): NCBI GI NO: 15224935 NR Description: hypothetical protein; protein id: At2g38720.1
  misc_feature (437)..(571): NCBI GI NO: 15224935 NR Description: hypothetical protein; protein id: At2g38720.1
  misc_feature (17)..(562): NCBI GI NO: 28200790 NR Description: 65kD microtubule associated protein
  misc_feature (17)..(571): NCBI GI NO: 11558254 NR Description: microtubule-associated protein MAP65-1b
  misc_feature (17)..(571): NCBI GI NO: 11558256 NR Description: microtubule-associated protein MAP65-1c
  misc_feature (18)..(573): NCBI GI NO: 27357984 NR Description: Unknown protein
  misc_feature (15)..(577): NCBI GI NO: 25410943 NR Description: hypothetical protein At2g01910
MATPPPPLPPMPPRHVSCGSLLQELQELWGEIGQDEMKRDRMILQLEEDCLNVYKQKVNQTRKQKADLLQELSLGEADIDKILSALGERETFPRSEKLGGTLMEQLAKIEPVLEDLRRRRDERVNEFKAIQSKIVCLQAEISGAIDHGDPAAPVVDENDLSLKRSGELKEHLNDLQTEKNGRLQKIDIQTNSIHEMCNIMSIDLKMALKDVHPSYAELGRSKPMSISNSSLDRLSEKVHALNHEKKQRLRKLQDLGSTLIELWNLMDTPTDEQRFFDHVTSLIKVSPTTAMPQGCLAHEIIEKVETEVKRLTKLKASKMKELVFKKLTDLEEIYRSVHMDIDSDSERQTLNDLIDSGRADLSELLARMDIRIAEAKEHALSRKDILEKVEKWTLASEEETWLDEYERDQNRYNAVRGAHINLKRAEKARILVSKLPSLLENLTAKIKAWEKEMGIPFIFNKVRLLDCLDEYTCTRQQKEEEKRRSRELKKLQEQFATEQGAKFGTKPSPIRPLSSRKPLGQSSNANIIGGTPTSRRVSTPMSRKGRPSSGRVQEAVKTAVAPANYVALPKDCSDISTL

SEQ ID NO: 30493 - protein, 568 aa, Zea mays subsp. mays
  peptide (1)..(568): Ceres Seq. ID no. 12373159
  misc_feature (28)..(561): Pfam Name: MAP65/ASE1 family Pfam Description: Microtubule associated protein
  misc_feature (6)..(561): NCBI GI NO: 15240485 NR Description: putative protein; protein id: At5g55230.1
  misc_feature (7)..(561): NCBI GI NO: 11558252 NR Description: microtubule-associated protein MAP65-1a
  misc_feature (6)..(561): NCBI GI NO: 18416818 NR Description: putative protein; protein id: At4g26760
  misc_feature (2)..(426): NCBI GI NO: 15224935 NR Description: hypothetical protein; protein id: At2g38720.1
  misc_feature (427)..(561): NCBI GI NO: 15224935 NR Description: hypothetical protein; protein id: At2g38720.1
  misc_feature (7)..(552): NCBI GI NO: 28200790 NR Description: 65kD microtubule associated protein
  misc_feature (7)..(561): NCBI GI NO: 11558254 NR Description: microtubule-associated protein MAP65-1b
  misc_feature (7)..(561): NCBI GI NO: 11558256 NR Description: microtubule-associated protein MAP65-1c
  misc_feature (8)..(563): NCBI GI NO: 27357984 NR Description: Unknown protein
  misc_feature (5)..(567): NCBI GI NO: 25410943 NR Description: hypothetical protein At2g01910
MPPRHVSCGSLLQELQELWGEIGQDEMKRDRMILQLEEDCLNVYKQKVNQTRKQKADLLQELSLGEADIDKILSALGERETFPRSEKLGGTLMEQLAKIEPVLEDLRRRRDERVNEFKAIQSKIVCLQAEISGAIDHGDPAAPVVDENDLSLKRSGELKEHLNDLQTEKNGRLQKIDIQTNSIHEMCNIMSIDLKMALKDVHPSYAELGRSKPMSISNSSLDRLSEKVHALNHEKKQRLRKLQDLGSTLIELWNLMDTPTDEQRFFDHVTSLIKVSPTTAMPQGCLAHEIIEKVETEVKRLTKLKASKMKELVFKKLTDLEEIYRSVHMDIDSDSERQTLNDLIDSGRADLSELLARMDIRIAEAKEHALSRKDILEKVEKWTLASEEETWLDEYERDQNRYNAVRGAHINLKRAEKARILVSKLPSLLENLTAKIKAWEKEMGIPFIFNKVRLLDCLDEYTCTRQQKEEEKRRSRELKKLQEQFATEQGAKFGTKPSPIRPLSSRKPLGQSSNANIIGGTPTSRRVSTPMSRKGRPSSGRVQEAVKTAVAPANYVALPKDCSDISTL

SEQ ID NO: 30494 - protein, 542 aa, Zea mays subsp. mays
  peptide (1)..(542): Ceres Seq. ID no. 12373160
  misc_feature (2)..(535): Pfam Name: MAP65/ASE1 family Pfam Description: Microtubule associated protein
  misc_feature (1)..(535): NCBI GI NO: 15240485 NR Description: putative protein; protein id: At5g55230.1
  misc_feature (1)..(535): NCBI GI NO: 11558252 NR Description: microtubule-associated protein MAP65-1a
  misc_feature (1)..(535): NCBI GI NO: 18416818 NR Description: putative protein; protein id: At4g26760
  misc_feature (1)..(400): NCBI GI NO: 15224935 NR Description: hypothetical protein; protein id: At2g38720.1
  misc_feature (401)..(535): NCBI GI NO: 15224935 NR Description: hypothetical protein; protein id: At2g38720.1
  misc_feature (1)..(526): NCBI GI NO: 28200790 NR Description: 65kD microtubule associated protein
  misc_feature (1)..(535): NCBI GI NO: 11558254 NR Description: microtubule-associated protein MAP65-1b
  misc_feature (1)..(535): NCBI GI NO: 11558256 NR Description: microtubule-associated protein MAP65-1c
  misc_feature (1)..(537): NCBI GI NO: 27357984 NR Description: Unknown protein
  misc_feature (1)..(541): NCBI GI NO: 25410943 NR Description: hypothetical protein At2g01910
MKRDRMILQLEEDCLNVYKQKVNQTRKQKADLLQELSLGEADIDKILSALGERETFPRSEKLGGTLMEQLAKIEPVLEDLRRRRDERVNEFKAIQSKIVCLQAEISGAIDHGDPAAPVVDENDLSLKRSGELKEHLNDLQTEKNGRLQKIDIQTNSIHEMCNIMSIDLKMALKDVHPSYAELGRSKPMSISNSSLDRLSEKVHALNHEKKQRLRKLQDLGSTLIELWNLMDTPTDEQRFFDHVTSLIKVSPTTAMPQGCLAHEIIEKVETEVKRLTKLKASKMKELVFKKLTDLEEIYRSVHMDIDSDSERQTLNDLIDSGRADLSELLARMDIRIAEAKEHALSRKDILEKVEKWTLASEEETWLDEYERDQNRYNAVRGAHINLKRAEKARILVSKLPSLLENLTAKIKAWEKEMGIPFIFNKVRLLDCLDEYTCTRQQKEEEKRRSRELKKLQEQFATEQGAKFGTKPSPIRPLSSRKPLGQSSNANIIGGTPTSRRVSTPMSRKGRPSSGRVQEAVKTAVAPANYVALPKDCSDISTL

SEQ ID NO: 30495 - DNA, 2063 bp, Zea mays subsp. mays
  misc_feature (1)..(2063): Ceres Seq. ID no. 12406630
  misc_feature (330)..(330): n is a, c, t, g, unknown, or other
  misc_feature (315)..(315): n is a, c, t, g, unknown, or other
gatctgcgaggcttttattttagacgttgtaataaactccgcttgcaaccgcaccgaactaatcgcgccagtatcagttacttctaggagcagtcctcccgttgttccagccagcgctttccccatcggccaaggatctgtgcgatctaactaagtccccttcgaatctccccacggtctaggctaactccgtctccgccgctcgccgtcggccccgccttcggttgctgcagatcgcgaccatgggaccccgcggcgtcgccctagcgctcctcgcggcggcgctcctccaggccctcgcccccgcgtcggcgncggcggcggcggcgncggcggcggggggcctggtgcgggtcgcgctgaagaagcagcccgtcgaccagaacgcccgcgtcgccgcgcgcctctccgctgaggagaggcagcgcctcctcctccgcggcgccaacgccctgggctcggccggcggcgacgacgactccgacgtcatcgcgctcaataactacatgaacgcgcagtactttggggagatcggcgtcgggacgccgccgcagaagttcaccgtcatcttcgacaccggcagctccaacctctgggtgccgtcctccaagtgctatttctcgatcgcttgctacttccactcgcgctacaagtcagggcagtcaagtacttataagaagaacggaaaacctgctgccattcaatatggaaccggtgcaattgctggttttttcagtgaggatagcgttaaattaggtgatctggatgtgaatgatcaggaatttattgaagctacaaaggagccaggccttaccttcatggttgcaaaatttgatggcattcttgggctaggctttcaggaaatatctgttgggaatgcaacacctgtgtggtataacatggtaaaacaaggtctcatcagtgaccctgttttctctttctggtttaaccgacatgctggtgaaggagaaggtggtgaaattgtgtttggtggaatggattctagtcactacaagggtgatcacacctatgtcccagtcactcagaagggatactggcagtttaatatgggtgatgtcctggttgatggaaagttccactgggttttgtgctggtggttgtgcagcaatagcagattctggaacttccttgcttgctggccccacagccattattactgaaatcaacgaaaagatcggtgctgctggtgtagtcagccaggagtgcaagactgttgtttctcaatacggacaacagatcctagatcttctgctagctgagacgcaaccagcgaagatctgttctcaggttggcctgtgcacttttgatggcactcacggtgttagcactggaattcgtagcgtagtggatgacaaagctgggaaatcaaatggtggtctcaagagtgatccaatgtgcaatgcctgtgagatggctgtggtatggatgcagaaccaactggcccagaacaagacacaggagctcatcctgacctacattaatcagctttgtgagcgtcttccttctcccatgggagaatcagccgtggactgtgccagtcttgggtccatgcccgacattgcgttcaccattggaggcaagaagttcaagctgaaaccggagcagtacattctgaaggtcggtgaaggacaagctgcccagtgcatcagtggattcacagctatggacatcccaccacctcgtggccccctctggatcctgggcgatgttttcatgggagtctaccacaccgtcttcgattacggcaagctgagggttggcttcgcggagtcggcctaaggaacgtatggtttggcgcctcctccagaggaggcaaaacgcatgcgccgagagaaaagcttcgcttgtttttaacttgtgtatttatgcggccggcggtgtgtgtatatatgctacatgtttagtgatgctttccgagacctgagacaatgcccgtctgttttaacctggcacaaggaaatttctcgatgtgtttgccaagccaatcttgtacccaattgtcaccgtgcatcctggcaacgtgtactcaaagtatttttcct

SEQ ID NO: 30496 - protein, 312 aa, Zea mays subsp. mays
  peptide (1)..(312): Ceres Seq. ID no. 12406631
  misc_feature (35)..(284): Pfam Name: Pfam Description:  Eukaryotic aspartyl protease
  misc_feature (1)..(284): NCBI GI NO: 2499819 NR Description: Aspartic proteinase oryzasin 1 precursor
  misc_feature (1)..(284): NCBI GI NO: 1168536 NR Description: Phytepsin precursor (Aspartic proteinase)
  misc_feature (36)..(284): NCBI GI NO: 5822248 NR Description: Chain A
  misc_feature (35)..(295): NCBI GI NO: 21616051 NR Description: aspartic proteinase [Theobroma cacao]
  misc_feature (34)..(284): NCBI GI NO: 21616053 NR Description: aspartic proteinase [Theobroma cacao]
  misc_feature (34)..(284): NCBI GI NO: 12231176 NR Description: aspartic proteinase 3 [Nepenthes alata]
  misc_feature (1)..(284): NCBI GI NO: 1665867 NR Description: aspartic proteinase [Centaurea calcitrapa]
  misc_feature (1)..(284): NCBI GI NO: 1076696 NR Description: cyprosin (EC 3.4.23.-) - cardoon
  misc_feature (1)..(284): NCBI GI NO: 15186732 NR Description: aspartic proteinase 1 [Glycine max]
  misc_feature (26)..(284): NCBI GI NO: 20800441 NR Description: aspartic proteinase [Vigna unguiculata]
  misc_feature (25)..(25): Xaa is any aa, unknown or other
  misc_feature (30)..(30): Xaa is any aa, unknown or other
MGPRGVALALLAAALLQALAPASAXAAAAXAAGGLVRVALKKQPVDQNARVAARLSAEERQRLLLRGANALGSAGGDDDSDVIALNNYMNAQYFGEIGVGTPPQKFTVIFDTGSSNLWVPSSKCYFSIACYFHSRYKSGQSSTYKKNGKPAAIQYGTGAIAGFFSEDSVKLGDLDVNDQEFIEATKEPGLTFMVAKFDGILGLGFQEISVGNATPVWYNMVKQGLISDPVFSFWFNRHAGEGEGGEIVFGGMDSSHYKGDHTYVPVTQKGYWQFNMGDVLVDGKFHWVLCWWLCSNSRFWNFLACWPHSHYY

SEQ ID NO: 30497 - protein, 281 aa, Zea mays subsp. mays
  peptide (1)..(281): Ceres Seq. ID no. 12406632
  misc_feature (48)..(130): Pfam Name: Pfam Description:  Eukaryotic aspartyl protease
  misc_feature (48)..(281): NCBI GI NO: 2499819 NR Description: Aspartic proteinase oryzasin 1 precursor
  misc_feature (48)..(281): NCBI GI NO: 1168536 NR Description: Phytepsin precursor (Aspartic proteinase)
  misc_feature (48)..(281): NCBI GI NO: 5822248 NR Description: Chain A
  misc_feature (48)..(281): NCBI GI NO: 21616051 NR Description: aspartic proteinase [Theobroma cacao]
  misc_feature (44)..(281): NCBI GI NO: 21616053 NR Description: aspartic proteinase [Theobroma cacao]
  misc_feature (48)..(281): NCBI GI NO: 12231176 NR Description: aspartic proteinase 3 [Nepenthes alata]
  misc_feature (46)..(281): NCBI GI NO: 1665867 NR Description: aspartic proteinase [Centaurea calcitrapa]
  misc_feature (46)..(281): NCBI GI NO: 1076696 NR Description: cyprosin (EC 3.4.23.-) - cardoon
  misc_feature (49)..(281): NCBI GI NO: 15186732 NR Description: aspartic proteinase 1 [Glycine max]
  misc_feature (49)..(281): NCBI GI NO: 20800441 NR Description: aspartic proteinase [Vigna unguiculata]
MLVKEKVVKLCLVEWILVTTRVITPMSQSLRRDTGSLIWVMSWLMESSTGFCAGGCAAIADSGTSLLAGPTAIITEINEKIGAAGVVSQECKTVVSQYGQQILDLLLAETQPAKICSQVGLCTFDGTHGVSTGIRSVVDDKAGKSNGGLKSDPMCNACEMAVVWMQNQLAQNKTQELILTYINQLCERLPSPMGESAVDCASLGSMPDIAFTIGGKKFKLKPEQYILKVGEGQAAQCISGFTAMDIPPPRGPLWILGDVFMGVYHTVFDYGKLRVGFAESA

SEQ ID NO: 30498 - protein, 256 aa, Zea mays subsp. mays
  peptide (1)..(256): Ceres Seq. ID no. 12406633
  misc_feature (23)..(105): Pfam Name: Pfam Description:  Eukaryotic aspartyl protease
  misc_feature (23)..(256): NCBI GI NO: 2499819 NR Description: Aspartic proteinase oryzasin 1 precursor
  misc_feature (23)..(256): NCBI GI NO: 1168536 NR Description: Phytepsin precursor (Aspartic proteinase)
  misc_feature (23)..(256): NCBI GI NO: 5822248 NR Description: Chain A
  misc_feature (23)..(256): NCBI GI NO: 21616051 NR Description: aspartic proteinase [Theobroma cacao]
  misc_feature (19)..(256): NCBI GI NO: 21616053 NR Description: aspartic proteinase [Theobroma cacao]
  misc_feature (23)..(256): NCBI GI NO: 12231176 NR Description: aspartic proteinase 3 [Nepenthes alata]
  misc_feature (21)..(256): NCBI GI NO: 1665867 NR Description: aspartic proteinase [Centaurea calcitrapa]
  misc_feature (21)..(256): NCBI GI NO: 1076696 NR Description: cyprosin (EC 3.4.23.-) - cardoon
  misc_feature (24)..(256): NCBI GI NO: 15186732 NR Description: aspartic proteinase 1 [Glycine max]
  misc_feature (24)..(256): NCBI GI NO: 20800441 NR Description: aspartic proteinase [Vigna unguiculata]
MSQSLRRDTGSLIWVMSWLMESSTGFCAGGCAAIADSGTSLLAGPTAIITEINEKIGAAGVVSQECKTVVSQYGQQILDLLLAETQPAKICSQVGLCTFDGTHGVSTGIRSVVDDKAGKSNGGLKSDPMCNACEMAVVWMQNQLAQNKTQELILTYINQLCERLPSPMGESAVDCASLGSMPDIAFTIGGKKFKLKPEQYILKVGEGQAAQCISGFTAMDIPPPRGPLWILGDVFMGVYHTVFDYGKLRVGFAESA

SEQ ID NO: 30499 - DNA, 948 bp, Zea mays subsp. mays
  misc_feature (1)..(948): Ceres Seq. ID no. 12348096
aaacggaaacgggggcagttggtgagttgggacttgggagccgacgctgtcggggtgatccagtcgccgccgacgccgccgaacgcgcccgcgcccgagcctccctctacgcggacgcgggaggacccttccactcccagagccgggcgtgtccgatcgtgagcccatggcggaatccatcgtctccggcgccgccgccccgccgccgggcgcgccctcgttctcctacctggccgtgttctccaactgcccgctcgtcgccgcggtgctcgccttcgccatcgcgcagtccatcaaggtcctcaccacctggtataaggagaaccggtgggacgcgaagcagctggtgggctccggcgggatgccgtcctcgcactcggccaccgtcaccgcgctcgccgtcgccgtcgggctgcaggaggggttcgccagctcgctgttcgccaccaccgccgtcttcgcctccgtggtgatgtatgatgcctttggtgttaggctacatgcagggaagcaagcagaggtcttgaaccagattgtgtacgagcttccatcagaacatccactagctgaaacaagaccgctgcgagagctgctagggcacacacctccacaggtatttgctggcggagtgcttggatttgcagtagccacatttacagcgatgatcgctgggcttggtagttgactccgcatttgaagaaatggtcaacattcgcattgaagttctggaattcaaattggacacatgtttcctagccagcttatgatagataatgcgttgtgtataggtgtatttaatatgcaaattgctgtcaatttgttgaagagaaacttgcgccattcttttgtagttaatcgacgagtgaactatatgctgtattcgttcctgtccaaagtatttggagtgattgaaagtacctcgtgataaagcattcatgagatttccgc

SEQ ID NO: 30500 - protein, 172 aa, Zea mays subsp. mays
  peptide (1)..(172): Ceres Seq. ID no. 12348097
  misc_feature (22)..(161): Pfam Name: Pfam Description:  Divergent PAP2 family
  misc_feature (9)..(161): NCBI GI NO: 21555270 NR Description: unknown [Arabidopsis thaliana]
  misc_feature (18)..(161): NCBI GI NO: 15220480 NR Description: F12A21
  misc_feature (9)..(161): NCBI GI NO: 18395459 NR Description: expressed protein; protein id: At1g24350
  misc_feature (18)..(150): NCBI GI NO: 12324675 NR Description: unknown protein [Arabidopsis thaliana]
  misc_feature (9)..(150): NCBI GI NO: 9743358 NR Description: F21J9.1 [Arabidopsis thaliana]
  misc_feature (23)..(161): NCBI GI NO: 38344227 NR Description: OJ991113_30.3
  misc_feature (9)..(161): NCBI GI NO: 7486375 NR Description: hypothetical protein F3I6
  misc_feature (9)..(150): NCBI GI NO: 26449729 NR Description: unknown protein [Arabidopsis thaliana]
  misc_feature (23)..(150): NCBI GI NO: 29150195 NR Description: putative protein
  misc_feature (21)..(163): NCBI GI NO: 18412127 NR Description: putative protein; protein id: At3g61770
MAESIVSGAAAPPPGAPSFSYLAVFSNCPLVAAVLAFAIAQSIKVLTTWYKENRWDAKQLVGSGGMPSSHSATVTALAVAVGLQEGFASSLFATTAVFASVVMYDAFGVRLHAGKQAEVLNQIVYELPSEHPLAETRPLRELLGHTPPQVFAGGVLGFAVATFTAMIAGLGS

SEQ ID NO: 30501 - protein, 156 aa, Zea mays subsp. mays
  peptide (1)..(156): Ceres Seq. ID no. 12348098
  misc_feature (44)..(155): Pfam Name: Pfam Description:  Extensin-like region
  misc_feature (45)..(154): NCBI GI NO: 2429362 NR Description: proline rich protein [Santalum album]
  misc_feature (51)..(154): NCBI GI NO: 1076211 NR Description: hypothetical protein VSP-3 - Chlamydomonasreinhardtii
  misc_feature (41)..(155): NCBI GI NO: 2429362 NR Description: proline rich protein [Santalum album]
  misc_feature (48)..(155): NCBI GI NO: 1076211 NR Description: hypothetical protein VSP-3 - Chlamydomonasreinhardtii
  misc_feature (23)..(155): NCBI GI NO: 25143299 NR Description: pre-mRNA splicing SR protein related RSR-1 (68
  misc_feature (42)..(154): NCBI GI NO: 1076205 NR Description: hypothetical protein WP6 - Chlamydomonas eugametos
  misc_feature (51)..(155): NCBI GI NO: 14253159 NR Description: VMP3 protein [Volvox carteri f. nagariensis]
  misc_feature (42)..(155): NCBI GI NO: 18138528 NR Description: hypothetical protein [Grapevine fleck virus]
  misc_feature (23)..(154): NCBI GI NO: 2429362 NR Description: proline rich protein [Santalum album]
TETGAVGELGLGSRRCRGDPVAADAAERARARASLYADAGGPFHSQSRACPIVSPWRNPSSPAPPPRRRARPRSPTWPCSPTARSSPRCSPSPSRSPSRSSPPGIRRTGGTRSSWWAPAGCRPRTRPPSPRSPSPSGCRRGSPARCSPPPPSSPPW

SEQ ID NO: 30502 - protein, 107 aa, Zea mays subsp. mays
  peptide (1)..(107): Ceres Seq. ID no. 12348099
  misc_feature (1)..(96): Pfam Name: Pfam Description:  Divergent PAP2 family
  misc_feature (1)..(96): NCBI GI NO: 21555270 NR Description: unknown [Arabidopsis thaliana]
  misc_feature (1)..(96): NCBI GI NO: 15220480 NR Description: F12A21
  misc_feature (1)..(96): NCBI GI NO: 18395459 NR Description: expressed protein; protein id: At1g24350
  misc_feature (1)..(85): NCBI GI NO: 12324675 NR Description: unknown protein [Arabidopsis thaliana]
  misc_feature (1)..(85): NCBI GI NO: 9743358 NR Description: F21J9.1 [Arabidopsis thaliana]
  misc_feature (1)..(96): NCBI GI NO: 38344227 NR Description: OJ991113_30.3
  misc_feature (1)..(96): NCBI GI NO: 7486375 NR Description: hypothetical protein F3I6
  misc_feature (1)..(85): NCBI GI NO: 26449729 NR Description: unknown protein [Arabidopsis thaliana]
  misc_feature (1)..(85): NCBI GI NO: 29150195 NR Description: putative protein
  misc_feature (1)..(98): NCBI GI NO: 18412127 NR Description: putative protein; protein id: At3g61770
MPSSHSATVTALAVAVGLQEGFASSLFATTAVFASVVMYDAFGVRLHAGKQAEVLNQIVYELPSEHPLAETRPLRELLGHTPPQVFAGGVLGFAVATFTAMIAGLGS

SEQ ID NO: 30503 - DNA, 1283 bp, Zea mays subsp. mays
  misc_feature (1)..(1283): Ceres Seq. ID no. 13494403
  misc_feature (297)..(297): n is a, c, t, g, unknown, or other
gcgctctgtgcacagacgaccttcttcccatcccttcccttccctctgctagtctgcttcgttcctcggccatggtggtcctcgccaagggtgagctcgagcagatcgccctcccggctgcagagccgcccccggccgacgtgcggtcggtggacctgtccgccccggcgggccccgcgcgcgaggccgcggcgcgcgcgctggtggcggcgtgcgaggagcacgggttcttccgggtgacgggccacggcgtgccgkgccagactcgtgcgcgccgcggaggccgcggcggccggngttcttcgcgcggccacagggcgagaaggaggaggagggccccacgctcgggtacggaagcaagcgcatcggcggcaacggcgacctcggctgggtcgagtacctcctgctcggtggcacacccgccgccgccgcgtcctcctcggcattattgccctgcgccgccgccccgtcgccgtccgcgccggccgggccgttacgggaccttctggacgagtacacggtggcggtgcggcggatggcgtgcgcggtgctggagctgatggcggaggggctgggcatcgccggggacgcgccgcagctggcgcggctggtggcgcgcgcggacagcgactgcatgctgcgggtgaaccactacccgccgcggccggcgctcaaccccagcctcacggggttcggcgagcacaccgacccgcagatcatctcggtgctccgcgccaacggcacctccggcctggagatcgcgctgcgggacggcgcctgggcctccgtcccgcccgacggggacgccttcttcgtcaacgtcggcgacaccctgcaggtgttgacgaacgggaggttcaggagcgtgaggcacagggtggtggtgaacagcgagaagtcccgggtgtccatggtcttcttcggcggcccgccgcccggcgagaggctgggcccgctgccgcagctcctgggcgacggcggccggagccggtaccgggacttcacctggagcgagttcaagaccagcgggtgcaggaccaggctcgcggaagaccgcctgtcccgcttcgagaagaagtagctagaggctacgtcatttgcatgaccggcggtaggatcgattaccatgtatgcttctctgtatatgtcagttgcattgccacagctctagctactggcgcccgtacgtgtatattagtggccatgctcgtattgtacgtgcacgtgtatgcacgcatatacatggtggcaccacacagggtatcatgcatccattgttatct

SEQ ID NO: 30504 - protein, 185 aa, Zea mays subsp. mays
  peptide (1)..(185): Ceres Seq. ID no. 15222925
  misc_feature (24)..(88): NCBI GI NO: 34909676 NR Description: putative GA 2-oxidase
  misc_feature (24)..(87): NCBI GI NO: 1666096 NR Description: dioxygenase [Marah macrocarpus]
  misc_feature (50)..(87): NCBI GI NO: 27123665 NR Description: gibberellin 2-oxidase [Cucurbita maxima]
  misc_feature (10)..(87): NCBI GI NO: 15242339 NR Description: flavonol synthase 1 (FLS1) [Arabidopsis thaliana]
  misc_feature (50)..(84): NCBI GI NO: 7108579 NR Description: 1-aminocyclopropane-1-carboxylate oxidase
  misc_feature (24)..(147): NCBI GI NO: 34903844 NR Description: unnamed protein product
  misc_feature (86)..(86): Xaa is any aa, unknown or other
  misc_feature (99)..(99): Xaa is any aa, unknown or other
ALCTDDLLPIPSLPSASLLRSSAMVVLAKGELEQIALPAAEPPPADVRSVDLSAPAGPAREAAARALVAACEEHGFFRVTGHGVPXQTRARRGGRGGRXSSRGHRARRRRRAPRSGTEASASAATATSAGSSTSCSVAHPPPPRPPRHYCPAPPPRRRPRRPGRYGTFWTSTRWRCGGWRARCWS

SEQ ID NO: 30505 - protein, 181 aa, Zea mays subsp. mays
  peptide (1)..(181): Ceres Seq. ID no. 15222926
  misc_feature (31)..(132): Pfam Name: II Pfam Description: 2OG-Fe
  misc_feature (1)..(179): NCBI GI NO: 34903844 NR Description: unnamed protein product
  misc_feature (1)..(181): NCBI GI NO: 34909676 NR Description: putative GA 2-oxidase
  misc_feature (1)..(180): NCBI GI NO: 1666096 NR Description: dioxygenase [Marah macrocarpus]
  misc_feature (1)..(180): NCBI GI NO: 27123665 NR Description: gibberellin 2-oxidase [Cucurbita maxima]
  misc_feature (1)..(180): NCBI GI NO: 4678586 NR Description: GA 2-oxidase [Phaseolus coccineus]
  misc_feature (1)..(181): NCBI GI NO: 21553670 NR Description: gibberellin 2- oxidase [Arabidopsis thaliana]
  misc_feature (1)..(180): NCBI GI NO: 9971227 NR Description: gibberellin 2-oxidase No1 [Lactuca sativa]
  misc_feature (1)..(180): NCBI GI NO: 5579094 NR Description: gibberellin 2-oxidase [Pisum sativum]
  misc_feature (1)..(180): NCBI GI NO: 6478202 NR Description: gibberellin 2 beta-hydroxylase [Pisum sativum]
  misc_feature (1)..(180): NCBI GI NO: 6446413 NR Description: gibberellin 2-beta-hydroxylase [Pisum sativum]
MACAVLELMAEGLGIAGDAPQLARLVARADSDCMLRVNHYPPRPALNPSLTGFGEHTDPQIISVLRANGTSGLEIALRDGAWASVPPDGDAFFVNVGDTLQVLTNGRFRSVRHRVVVNSEKSRVSMVFFGGPPPGERLGPLPQLLGDGGRSRYRDFTWSEFKTSGCRTRLAEDRLSRFEKK

SEQ ID NO: 30506 - protein, 173 aa, Zea mays subsp. mays
  peptide (1)..(173): Ceres Seq. ID no. 15222927
  misc_feature (23)..(124): Pfam Name: II Pfam Description: 2OG-Fe
  misc_feature (1)..(171): NCBI GI NO: 34903844 NR Description: unnamed protein product
  misc_feature (1)..(173): NCBI GI NO: 34909676 NR Description: putative GA 2-oxidase
  misc_feature (1)..(172): NCBI GI NO: 1666096 NR Description: dioxygenase [Marah macrocarpus]
  misc_feature (1)..(172): NCBI GI NO: 27123665 NR Description: gibberellin 2-oxidase [Cucurbita maxima]
  misc_feature (1)..(172): NCBI GI NO: 4678586 NR Description: GA 2-oxidase [Phaseolus coccineus]
  misc_feature (1)..(173): NCBI GI NO: 21553670 NR Description: gibberellin 2- oxidase [Arabidopsis thaliana]
  misc_feature (1)..(172): NCBI GI NO: 9971227 NR Description: gibberellin 2-oxidase No1 [Lactuca sativa]
  misc_feature (1)..(172): NCBI GI NO: 5579094 NR Description: gibberellin 2-oxidase [Pisum sativum]
  misc_feature (1)..(172): NCBI GI NO: 6478202 NR Description: gibberellin 2 beta-hydroxylase [Pisum sativum]
  misc_feature (1)..(172): NCBI GI NO: 6446413 NR Description: gibberellin 2-beta-hydroxylase [Pisum sativum]
MAEGLGIAGDAPQLARLVARADSDCMLRVNHYPPRPALNPSLTGFGEHTDPQIISVLRANGTSGLEIALRDGAWASVPPDGDAFFVNVGDTLQVLTNGRFRSVRHRVVVNSEKSRVSMVFFGGPPPGERLGPLPQLLGDGGRSRYRDFTWSEFKTSGCRTRLAEDRLSRFEKK

SEQ ID NO: 30507 - DNA, 1761 bp, Zea mays subsp. mays
  misc_feature (1)..(1761): Ceres Seq. ID no. 12349307
atctcttcttcctcccccagagcccctgccctcttccgccgacagcgagaaagcacgcggcgcacagcaacacgtccctgccgttccttttgactccggggatccctctcctccttgcctgccgaggaacccactagcttcctactacttcccctccgtcctctcgatccctctccccgttcccttgaccacccgagcatcaagtggcggggagggaacgcggcggcgcgggcgaggaccgatggagaaggggagcgcgccggcgatggccctggcgctcgccatgcttctcgcctgctccagcatcgctgccgtcacggcgcaggagaccgagcggatcgaaggaagcgctggtgatgtgttagaagataaccctgttgggaggctcaaggtctttgtctatgatctccccagcaaatacaacaagaagctgctgaagaaggatcctaggtgcctgaaccacatgtttgccgccgagatcttcatgcacaggttcctgttgtcgagtgctgtccgaacttttaatcctgaggaagcagattggttctacacgcccgtatacacgacatgcgatctcacccccaagggtcttcccttgcctttcaagtctcctcgaatgatgcgcagcgcgatccagctgattgctacgaattggccttactggaatagatcagagggcgctgatcatttctttgtcacgccccatgactttggtgcttgctttcattatcaggaagaaaaagcaatcggacggggaatccttcccttgcttcagcgtgctacgctggttcagaccttcggacagaagaaccatgtctgcctgaaggatgggtccatcaccatcccaccatacgcgcctcctcagaagatgcagactcaccttatccctgcagacacccctcgatccatcttcgtgtacttccgaggtctgttctatgacaccggcaatgaccccgagggtggttattatgcgagaggtgctcgcgcgtcggtctgggagaacttcaagaacaacccgctgtttgacatctcgaccgaccacccaccgacatactacgaagacatgcagcgctccgtgttctgcctctgcccgttgggctgggcaccgtggagtcccaggctggtggaggccgtggtcttcggctgcatcccggtgatcatcgcagacgacatcgtccttcccttcgcggacgccatcccgtgggaggagatcggcgtctttgtcgccgaggaggatgtcccgcggctggacagcatcctgacgtccattcccacggacgtcgtgctgaggaagcaacggctcctcgcgaacccgtctatgaagcaggccatgctgttcccacagcctgctcaagcaggagacgcgttccaccagattctgaacggtctcgcgcgcaagctcccgcacggtagcaatgtgttcctgaagcccggtgagagggccctgaactggacagccggaccaccaggcgacctcaagccttggtagcgtcttgtggatggatatgacctcttctctggaaaggaagtatggacaacatgattaatatacctgtgcctttgaactgccatgggtgcacatagtgctgaccacaagccaaatgtacattttttttgtatgtttttttcttctatctacaactgttacatatatatcttcatttctttttttctctttcccatttgcttgatgatataagagttccaaaccctgtcgaccatgtgtggatatatcataaatggaatttacaagattgtact

SEQ ID NO: 30508 - protein, 495 aa, Zea mays subsp. mays
  peptide (1)..(495): Ceres Seq. ID no. 12349308
  misc_feature (131)..(435): Pfam Name: Pfam Description:  Exostosin family
  misc_feature (89)..(495): NCBI GI NO: 34907048 NR Description: contains EST D24978
  misc_feature (89)..(495): NCBI GI NO: 18424516 NR Description: putative protein; protein id: At5g61840
  misc_feature (89)..(495): NCBI GI NO: 21592991 NR Description: unknown [Arabidopsis thaliana]
  misc_feature (92)..(495): NCBI GI NO: 15223522 NR Description: unknown protein; protein id: At1g27440.1
  misc_feature (89)..(495): NCBI GI NO: 18642697 NR Description: Unknown protein [Oryza sativa]
  misc_feature (155)..(495): NCBI GI NO: 23821292 NR Description: pectin-glucuronyltransferase
  misc_feature (155)..(495): NCBI GI NO: 10176877 NR Description: gb|AAC80624
  misc_feature (45)..(467): NCBI GI NO: 15237173 NR Description: putative protein; protein id: At5g22940.1
  misc_feature (129)..(475): NCBI GI NO: 25407954 NR Description: hypothetical protein At2g28110
  misc_feature (128)..(467): NCBI GI NO: 9758008 NR Description: contains similarity to limonenecyclase~gene_id:MED24
SLLPPPEPLPSSADSEKARGAQQHVPAVPFDSGDPSPPCLPRNPLASYYFPSVLSIPLPVPLTTRASSGGEGTRRRGRGPMEKGSAPAMALALAMLLACSSIAAVTAQETERIEGSAGDVLEDNPVGRLKVFVYDLPSKYNKKLLKKDPRCLNHMFAAEIFMHRFLLSSAVRTFNPEEADWFYTPVYTTCDLTPKGLPLPFKSPRMMRSAIQLIATNWPYWNRSEGADHFFVTPHDFGACFHYQEEKAIGRGILPLLQRATLVQTFGQKNHVCLKDGSITIPPYAPPQKMQTHLIPADTPRSIFVYFRGLFYDTGNDPEGGYYARGARASVWENFKNNPLFDISTDHPPTYYEDMQRSVFCLCPLGWAPWSPRLVEAVVFGCIPVIIADDIVLPFADAIPWEEIGVFVAEEDVPRLDSILTSIPTDVVLRKQRLLANPSMKQAMLFPQPAQAGDAFHQILNGLARKLPHGSNVFLKPGERALNWTAGPPGDLKPW

SEQ ID NO: 30509 - protein, 415 aa, Zea mays subsp. mays
  peptide (1)..(415): Ceres Seq. ID no. 12349309
  misc_feature (51)..(355): Pfam Name: Pfam Description:  Exostosin family
  misc_feature (9)..(415): NCBI GI NO: 34907048 NR Description: contains EST D24978
  misc_feature (9)..(415): NCBI GI NO: 18424516 NR Description: putative protein; protein id: At5g61840
  misc_feature (9)..(415): NCBI GI NO: 21592991 NR Description: unknown [Arabidopsis thaliana]
  misc_feature (12)..(415): NCBI GI NO: 15223522 NR Description: unknown protein; protein id: At1g27440.1
  misc_feature (9)..(415): NCBI GI NO: 18642697 NR Description: Unknown protein [Oryza sativa]
  misc_feature (75)..(415): NCBI GI NO: 23821292 NR Description: pectin-glucuronyltransferase
  misc_feature (75)..(415): NCBI GI NO: 10176877 NR Description: gb|AAC80624
  misc_feature (1)..(387): NCBI GI NO: 15237173 NR Description: putative protein; protein id: At5g22940.1
  misc_feature (49)..(395): NCBI GI NO: 25407954 NR Description: hypothetical protein At2g28110
  misc_feature (48)..(387): NCBI GI NO: 9758008 NR Description: contains similarity to limonenecyclase~gene_id:MED24
MEKGSAPAMALALAMLLACSSIAAVTAQETERIEGSAGDVLEDNPVGRLKVFVYDLPSKYNKKLLKKDPRCLNHMFAAEIFMHRFLLSSAVRTFNPEEADWFYTPVYTTCDLTPKGLPLPFKSPRMMRSAIQLIATNWPYWNRSEGADHFFVTPHDFGACFHYQEEKAIGRGILPLLQRATLVQTFGQKNHVCLKDGSITIPPYAPPQKMQTHLIPADTPRSIFVYFRGLFYDTGNDPEGGYYARGARASVWENFKNNPLFDISTDHPPTYYEDMQRSVFCLCPLGWAPWSPRLVEAVVFGCIPVIIADDIVLPFADAIPWEEIGVFVAEEDVPRLDSILTSIPTDVVLRKQRLLANPSMKQAMLFPQPAQAGDAFHQILNGLARKLPHGSNVFLKPGERALNWTAGPPGDLKPW

SEQ ID NO: 30510 - protein, 407 aa, Zea mays subsp. mays
  peptide (1)..(407): Ceres Seq. ID no. 12349310
  misc_feature (43)..(347): Pfam Name: Pfam Description:  Exostosin family
  misc_feature (1)..(407): NCBI GI NO: 34907048 NR Description: contains EST D24978
  misc_feature (1)..(407): NCBI GI NO: 18424516 NR Description: putative protein; protein id: At5g61840
  misc_feature (1)..(407): NCBI GI NO: 21592991 NR Description: unknown [Arabidopsis thaliana]
  misc_feature (4)..(407): NCBI GI NO: 15223522 NR Description: unknown protein; protein id: At1g27440.1
  misc_feature (1)..(407): NCBI GI NO: 18642697 NR Description: Unknown protein [Oryza sativa]
  misc_feature (67)..(407): NCBI GI NO: 23821292 NR Description: pectin-glucuronyltransferase
  misc_feature (67)..(407): NCBI GI NO: 10176877 NR Description: gb|AAC80624
  misc_feature (1)..(379): NCBI GI NO: 15237173 NR Description: putative protein; protein id: At5g22940.1
  misc_feature (41)..(387): NCBI GI NO: 25407954 NR Description: hypothetical protein At2g28110
  misc_feature (40)..(379): NCBI GI NO: 9758008 NR Description: contains similarity to limonenecyclase~gene_id:MED24
MALALAMLLACSSIAAVTAQETERIEGSAGDVLEDNPVGRLKVFVYDLPSKYNKKLLKKDPRCLNHMFAAEIFMHRFLLSSAVRTFNPEEADWFYTPVYTTCDLTPKGLPLPFKSPRMMRSAIQLIATNWPYWNRSEGADHFFVTPHDFGACFHYQEEKAIGRGILPLLQRATLVQTFGQKNHVCLKDGSITIPPYAPPQKMQTHLIPADTPRSIFVYFRGLFYDTGNDPEGGYYARGARASVWENFKNNPLFDISTDHPPTYYEDMQRSVFCLCPLGWAPWSPRLVEAVVFGCIPVIIADDIVLPFADAIPWEEIGVFVAEEDVPRLDSILTSIPTDVVLRKQRLLANPSMKQAMLFPQPAQAGDAFHQILNGLARKLPHGSNVFLKPGERALNWTAGPPGDLKPW

SEQ ID NO: 30511 - DNA, 1878 bp, Zea mays subsp. mays
  misc_feature (1)..(1878): Ceres Seq. ID no. 13498997
  misc_feature (514)..(514): n is a, c, t, g, unknown, or other
  misc_feature (517)..(517): n is a, c, t, g, unknown, or other
gcacgagaccattacctagaacatcctaatcgaaaacttctctgccttcgtgaaccaccgcgcgagagagagtcgagatccgtcgctgccgtgcggcttgagagagaagcaccgtgccgggcgaacctccaccgttgggctcaatcgattgggtcagtggggttcggcaacgctcgagagaacgggcgaagtggtgatcggagcaagtggcgatttcatgccggagtcggagctccgccgcggattccgctgcgccccgcgggcagactacttcgcagctgtcgctggccgcgaccacgtcgtcatcttccctttcatggcgaagggccacatgctcccgctgctccacttcgccacggcactctcgtgcgcaacacgggaggctccgcgtgaccctgggtcaccaccccgggcaacgtggccttcgcccggagccgtctgcccgcgtcggtgggcctcgtcgcgctcccgttcccgtcgttcccgccgctgccggagggcgtcgagtccaccnacnccctcccgtgcccatcgctgcacctgacgttcatgcaggcgacggggctcctgcgcgggccgttcgccgagttcctggcgtcgctcccgtccccgccgctcgcgctcgtctccgacttcttcctcgggttcacgcgccgcgtggcggccgacgccggcgtccgccgcatcgtgttcaatggcatgtcctgcttcgcctcggcgatctgcaaggcgctcgctgcgagcccgccgaccagcttcgagcccgggaccatgatccaggtgcccggcatgccggagcacgtggcggtcagggcggaggaggttcccgatggggtcaccaagagggccgaccccgacaacccgttcacgcgcttcttcatggacgagatcggtgattcggacgtgcgcagctggggagtcctcagcaacagcctcgacgcgctcgacgcggcctacgtgtcggccttggagtcattctacgagacgggcgcccgtgcctggctcgtgggcccgctgttcatggccgccggcgacatgccggatggcgagaagaaggagcaagaccccgagggctgtctctcgtggctcgacgagagggcggcgcatctggggtcggtggtgtacatctcgttcgggacgcaggcccacatcacggacgcgcagctggacgagctggtgcacgggctggtgcagtccggccatcccttcctctgggccgtccgatctgacacgtggtcgccgccgttggacgtggggcccaacaaccggatcgtccgtggttgggttccgcagagaagtattctggcccacaaggcagttggtgggttcgtgagccattgcgggtggaactctgtgatggagagcctcgccgccgggaagcccatgctggcgtggccgatgatcgcggagcagcacctgaacgcaaggcacgtggccaacatcttaggcgccggcgtcaggatagccctgaaggttggcgctgacgtcgtcgggagcacggaggtggaggagaaggttcgggagctgatggacgctgaaagcaaggcggcgaagcggatgcgggagagggctgcgtgggcgcagcaagcagccaagtcagcggtgagccacggtggaacctgccatggctttgctcaagcttgtggaagagctacaggagacctatgatgatggggtcgtaggcaaatgtgcgaatagtgtttagaatgatctttccagtaattctgttaagctggtgtttagaatgatcttgctagtacttctattaggcttagctacgtatgtgtcattagcgtctatggtgtcttctcaaaacacaaatcaatcgactcttagcaggtgttttgataattgatcataaataaaaatcaacgacat

SEQ ID NO: 30512 - protein, 372 aa, Zea mays subsp. mays
  peptide (1)..(372): Ceres Seq. ID no. 13498998
  misc_feature (1)..(357): NCBI GI NO: 22330612 NR Description: glycosyltransferase family [Arabidopsis thaliana]
  misc_feature (1)..(357): NCBI GI NO: 25406301 NR Description: protein glucosyltransferase F2P9.25
  misc_feature (1)..(347): NCBI GI NO: 15241515 NR Description: glycosyltransferase family [Arabidopsis thaliana]
  misc_feature (1)..(355): NCBI GI NO: 30679796 NR Description: glycosyltransferase family [Arabidopsis thaliana]
  misc_feature (1)..(359): NCBI GI NO: 25286796 NR Description: probable glucosyltransferase
  misc_feature (1)..(355): NCBI GI NO: 21553613 NR Description: putative glucosyltransferase
  misc_feature (1)..(355): NCBI GI NO: 4914344 NR Description: F14N23.30 [Arabidopsis thaliana]
  misc_feature (1)..(359): NCBI GI NO: 30725312 NR Description: At2g15490 [Arabidopsis thaliana]
  misc_feature (1)..(353): NCBI GI NO: 15242769 NR Description: glycosyltransferase family [Arabidopsis thaliana]
  misc_feature (1)..(359): NCBI GI NO: 15290056 NR Description: putative glucosyltransferase IS5a
MQATGLLRGPFAEFLASLPSPPLALVSDFFLGFTRRVAADAGVRRIVFNGMSCFASAICKALAASPPTSFEPGTMIQVPGMPEHVAVRAEEVPDGVTKRADPDNPFTRFFMDEIGDSDVRSWGVLSNSLDALDAAYVSALESFYETGARAWLVGPLFMAAGDMPDGEKKEQDPEGCLSWLDERAAHLGSVVYISFGTQAHITDAQLDELVHGLVQSGHPFLWAVRSDTWSPPLDVGPNNRIVRGWVPQRSILAHKAVGGFVSHCGWNSVMESLAAGKPMLAWPMIAEQHLNARHVANILGAGVRIALKVGADVVGSTEVEEKVRELMDAESKAAKRMRERAAWAQQAAKSAVSHGGTCHGFAQACGRATGDL

SEQ ID NO: 30513 - protein, 322 aa, Zea mays subsp. mays
  peptide (1)..(322): Ceres Seq. ID no. 13498999
  misc_feature (1)..(307): NCBI GI NO: 22330612 NR Description: glycosyltransferase family [Arabidopsis thaliana]
  misc_feature (1)..(307): NCBI GI NO: 25406301 NR Description: protein glucosyltransferase F2P9.25
  misc_feature (1)..(297): NCBI GI NO: 15241515 NR Description: glycosyltransferase family [Arabidopsis thaliana]
  misc_feature (1)..(305): NCBI GI NO: 30679796 NR Description: glycosyltransferase family [Arabidopsis thaliana]
  misc_feature (1)..(309): NCBI GI NO: 25286796 NR Description: probable glucosyltransferase
  misc_feature (1)..(305): NCBI GI NO: 21553613 NR Description: putative glucosyltransferase
  misc_feature (1)..(305): NCBI GI NO: 4914344 NR Description: F14N23.30 [Arabidopsis thaliana]
  misc_feature (1)..(309): NCBI GI NO: 30725312 NR Description: At2g15490 [Arabidopsis thaliana]
  misc_feature (1)..(303): NCBI GI NO: 15242769 NR Description: glycosyltransferase family [Arabidopsis thaliana]
  misc_feature (1)..(309): NCBI GI NO: 15290056 NR Description: putative glucosyltransferase IS5a
MSCFASAICKALAASPPTSFEPGTMIQVPGMPEHVAVRAEEVPDGVTKRADPDNPFTRFFMDEIGDSDVRSWGVLSNSLDALDAAYVSALESFYETGARAWLVGPLFMAAGDMPDGEKKEQDPEGCLSWLDERAAHLGSVVYISFGTQAHITDAQLDELVHGLVQSGHPFLWAVRSDTWSPPLDVGPNNRIVRGWVPQRSILAHKAVGGFVSHCGWNSVMESLAAGKPMLAWPMIAEQHLNARHVANILGAGVRIALKVGADVVGSTEVEEKVRELMDAESKAAKRMRERAAWAQQAAKSAVSHGGTCHGFAQACGRATGDL

SEQ ID NO: 30514 - protein, 298 aa, Zea mays subsp. mays
  peptide (1)..(298): Ceres Seq. ID no. 13499000
  misc_feature (1)..(283): NCBI GI NO: 22330612 NR Description: glycosyltransferase family [Arabidopsis thaliana]
  misc_feature (1)..(283): NCBI GI NO: 25406301 NR Description: protein glucosyltransferase F2P9.25
  misc_feature (1)..(273): NCBI GI NO: 15241515 NR Description: glycosyltransferase family [Arabidopsis thaliana]
  misc_feature (1)..(281): NCBI GI NO: 30679796 NR Description: glycosyltransferase family [Arabidopsis thaliana]
  misc_feature (1)..(285): NCBI GI NO: 25286796 NR Description: probable glucosyltransferase
  misc_feature (1)..(281): NCBI GI NO: 21553613 NR Description: putative glucosyltransferase
  misc_feature (1)..(281): NCBI GI NO: 4914344 NR Description: F14N23.30 [Arabidopsis thaliana]
  misc_feature (1)..(285): NCBI GI NO: 30725312 NR Description: At2g15490 [Arabidopsis thaliana]
  misc_feature (1)..(279): NCBI GI NO: 15242769 NR Description: glycosyltransferase family [Arabidopsis thaliana]
  misc_feature (1)..(285): NCBI GI NO: 15290056 NR Description: putative glucosyltransferase IS5a
MIQVPGMPEHVAVRAEEVPDGVTKRADPDNPFTRFFMDEIGDSDVRSWGVLSNSLDALDAAYVSALESFYETGARAWLVGPLFMAAGDMPDGEKKEQDPEGCLSWLDERAAHLGSVVYISFGTQAHITDAQLDELVHGLVQSGHPFLWAVRSDTWSPPLDVGPNNRIVRGWVPQRSILAHKAVGGFVSHCGWNSVMESLAAGKPMLAWPMIAEQHLNARHVANILGAGVRIALKVGADVVGSTEVEEKVRELMDAESKAAKRMRERAAWAQQAAKSAVSHGGTCHGFAQACGRATGDL

SEQ ID NO: 30515 - DNA, 1291 bp, Zea mays subsp. mays
  misc_feature (1)..(1291): Ceres Seq. ID no. 12401920
aaaaaaaattgcacgcaagggtccacgcggcgaacagatcgtgccgttccgcggcggcgtcggtgcggcgctggagccgaagtgaaaagtcgatcgggattgggccgttgggggtgcgatacccctcgcctcgaatgcgagctccgtaggtccgcccccccggcggatggccgagctgggccgccgccgccgcccgctgggatgaggcagcgtgaggagtcgcgctcgcggcttccctgcccccaggcctccgctctgaatatccccgacgcgacggtaaccgaacaagcctcagttagaaaggctaagatcagagcatctccgtgtctccacaacacatcctggattcgcaattattgaggtgcctccactataaaaggccaaccatcctcaaggaatgaacacagccagccagcaagcaagcagagaacaaggataacacagcaactgaaaaccttattaccaagaacaaacaactacaagaggctttgcaagttcacagaggcagctgttcactgcgaatgaacaaccagaggaagcctggagactggaactgcaagaactgccagcatctcaacttcagccgccgtgactactgccagcgttgccgtgatccacgccctgacttgcagttcggcgacggctatagcacggttggtgtgctgacctccctggacatccgcccaggtgactggtactgcagctgcggctaccacaacttcgccagccgcagcagctgcttcaagtgcggcacgatcgtcagagacttcccagcggggcaaggcgcagccggtgctgagggtgactttgctggtggacgcgacagcgccgcagtccgtgctgggtggaaagctggcgactggatctgcacgaggcctggttgcaacgtacacaactttgcgagcaggatggagtgctataggtgcaatgcaccaagggaggcagcaggcaccgggaggtaagaggcgactggggtgataccaagagcgtgagatgtgacgagctgggccgagcagtggaacctactgccgtcacacactcaccatcaggcatccaggaaggatgagtctactacgtacacgactatattgctgattgccgcgcgtagtgccgctgctgtggtttgcgtgggtggagaagtacccaagcgcaacacctgttacgtgtgttgtttgctcctttttgaggctgttgattcagtgacagctgagttgtacggcctgatgatgtactcgcattgtgtatttgtcttaaacagcatatataattatgtaataataagtgcttgctt

SEQ ID NO: 30516 - protein, 146 aa, Zea mays subsp. mays
  peptide (1)..(146): Ceres Seq. ID no. 12401921
  misc_feature (110)..(141): Pfam Name: Pfam Description:  Zn-finger in Ran binding protein and others
  misc_feature (1)..(141): NCBI GI NO: 5803246 NR Description: ESTs AU077984
  misc_feature (1)..(141): NCBI GI NO: 5679336 NR Description: putative zinc finger protein [Oryza sativa]
  misc_feature (38)..(144): NCBI GI NO: 28849863 NR Description: zinc finger transcription factor ZFP30
  misc_feature (5)..(139): NCBI GI NO: 34913970 NR Description: B1110C07.23
  misc_feature (8)..(140): NCBI GI NO: 15225776 NR Description: putative second messenger-dependent protein kinase
  misc_feature (39)..(140): NCBI GI NO: 15232662 NR Description: putative zinc finger protein; protein id:At3g15680
  misc_feature (39)..(140): NCBI GI NO: 21595771 NR Description: putative zinc finger protein
  misc_feature (5)..(120): NCBI GI NO: 28849863 NR Description: zinc finger transcription factor ZFP30
  misc_feature (6)..(94): NCBI GI NO: 15232662 NR Description: putative zinc finger protein; protein id:At3g15680
  misc_feature (6)..(94): NCBI GI NO: 21595771 NR Description: putative zinc finger protein
MNNQRKPGDWNCKNCQHLNFSRRDYCQRCRDPRPDLQFGDGYSTVGVLTSLDIRPGDWYCSCGYHNFASRSSCFKCGTIVRDFPAGQGAAGAEGDFAGGRDSAAVRAGWKAGDWICTRPGCNVHNFASRMECYRCNAPREAAGTGR

SEQ ID NO: 30517 - protein, 119 aa, Zea mays subsp. mays
  peptide (1)..(119): Ceres Seq. ID no. 12401922
KKNCTQGSTRRTDRAVPRRRRCGAGAEVKSRSGLGRWGCDTPRLECELRRSAPPADGRAGPPPPPAGMRQREESRSRLPCPQASALNIPDATVTEQASVRKAKIRASPCLHNTSWIRNY

SEQ ID NO: 30518 - DNA, 1725 bp, Zea mays subsp. mays; identical to SEQ ID NO: 29319
  misc_feature (1)..(1725): Ceres Seq. ID no. 12408676

SEQ ID NO: 30519 - protein, 498 aa, Zea mays subsp. mays; identical to SEQ ID NO: 29320
  peptide (1)..(498): Ceres Seq. ID no. 12408677
  misc_feature (82)..(115): Pfam Name: Pfam Description:  TPR Domain
  misc_feature (39)..(498): NCBI GI NO: 38175649 NR Description: tetratricopeptide repeat-containing protein-like
  misc_feature (147)..(498): NCBI GI NO: 32352192 NR Description: hypothetical protein
  misc_feature (61)..(439): NCBI GI NO: 18419996 NR Description: putative protein; protein id: At4g37210.1
  misc_feature (61)..(382): NCBI GI NO: 25407799 NR Description: hypothetical protein AT4g37210
  misc_feature (68)..(337): NCBI GI NO: 4104353 NR Description: nuclear autoantigenic sperm protein autosomalvariant
  misc_feature (66)..(143): NCBI GI NO: 18129310 NR Description: hypothetical protein [Pinus pinaster]
  misc_feature (59)..(489): NCBI GI NO: 123127 NR Description: HISTONE-BINDING PROTEIN N1/N2
  misc_feature (39)..(337): NCBI GI NO: 13435642 NR Description: Unknown (protein for MGC:5829) [Mus musculus]
  misc_feature (68)..(337): NCBI GI NO: 27262630 NR Description: nuclear autoantigenic sperm protein isoform 3
  misc_feature (68)..(337): NCBI GI NO: 30584691 NR Description: Homo sapiens nuclear autoantigenic sperm protein

SEQ ID NO: 30520 - protein, 460 aa, Zea mays subsp. mays; identical to SEQ ID NO: 24739
  peptide (1)..(460): Ceres Seq. ID no. 12408678
  misc_feature (44)..(77): Pfam Name: Pfam Description:  TPR Domain
  misc_feature (1)..(460): NCBI GI NO: 38175649 NR Description: tetratricopeptide repeat-containing protein-like
  misc_feature (109)..(460): NCBI GI NO: 32352192 NR Description: hypothetical protein
  misc_feature (23)..(401): NCBI GI NO: 18419996 NR Description: putative protein; protein id: At4g37210.1
  misc_feature (23)..(344): NCBI GI NO: 25407799 NR Description: hypothetical protein AT4g37210
  misc_feature (30)..(299): NCBI GI NO: 4104353 NR Description: nuclear autoantigenic sperm protein autosomalvariant
  misc_feature (28)..(105): NCBI GI NO: 18129310 NR Description: hypothetical protein [Pinus pinaster]
  misc_feature (21)..(451): NCBI GI NO: 123127 NR Description: HISTONE-BINDING PROTEIN N1/N2
  misc_feature (1)..(299): NCBI GI NO: 13435642 NR Description: Unknown (protein for MGC:5829) [Mus musculus]
  misc_feature (30)..(299): NCBI GI NO: 27262630 NR Description: nuclear autoantigenic sperm protein isoform 3
  misc_feature (30)..(299): NCBI GI NO: 30584691 NR Description: Homo sapiens nuclear autoantigenic sperm protein

SEQ ID NO: 30521 - protein, 280 aa, Zea mays subsp. mays; identical to SEQ ID NO: 24336
  peptide (1)..(280): Ceres Seq. ID no. 12408679
  misc_feature (1)..(280): NCBI GI NO: 38175649 NR Description: tetratricopeptide repeat-containing protein-like
  misc_feature (1)..(280): NCBI GI NO: 32352192 NR Description: hypothetical protein
  misc_feature (1)..(221): NCBI GI NO: 18419996 NR Description: putative protein; protein id: At4g37210.1
  misc_feature (1)..(164): NCBI GI NO: 25407799 NR Description: hypothetical protein AT4g37210
  misc_feature (1)..(119): NCBI GI NO: 4104353 NR Description: nuclear autoantigenic sperm protein autosomalvariant
  misc_feature (1)..(271): NCBI GI NO: 123127 NR Description: HISTONE-BINDING PROTEIN N1/N2
  misc_feature (1)..(119): NCBI GI NO: 13435642 NR Description: Unknown (protein for MGC:5829) [Mus musculus]
  misc_feature (1)..(119): NCBI GI NO: 27262630 NR Description: nuclear autoantigenic sperm protein isoform 3
  misc_feature (1)..(119): NCBI GI NO: 30584691 NR Description: Homo sapiens nuclear autoantigenic sperm protein
  misc_feature (1)..(268): NCBI GI NO: 28277791 NR Description: Unknown (protein for MGC:56007) [Danio rerio]

SEQ ID NO: 30522 - DNA, 1207 bp, Zea mays subsp. mays; identical to SEQ ID NO: 29493
  misc_feature (1)..(1207): Ceres Seq. ID no. 13492697

SEQ ID NO: 30523 - protein, 320 aa, Zea mays subsp. mays; identical to SEQ ID NO: 29494
  peptide (1)..(320): Ceres Seq. ID no. 13492698
  misc_feature (142)..(296): Pfam Name: Pfam Description:  Adenylylsulphate kinase
  misc_feature (115)..(320): NCBI GI NO: 15228666 NR Description: adenylylsulfate kinase -related
  misc_feature (64)..(320): NCBI GI NO: 34393551 NR Description: putative adenosine-5'-phosphosulfate kinase
  misc_feature (112)..(319): NCBI GI NO: 7387809 NR Description: Adenylylsulfate kinase, chloroplast precursor
  misc_feature (115)..(319): NCBI GI NO: 15225999 NR Description: adenosine phosphosulfate kinase -related
  misc_feature (115)..(319): NCBI GI NO: 21553403 NR Description: putative adenosine phosphosulfate kinase
  misc_feature (103)..(320): NCBI GI NO: 6563285 NR Description: adenosine-5'-phosphosulfate kinase [Zea mays]
  misc_feature (107)..(319): NCBI GI NO: 9757873 NR Description: adenylylsulfate kinase-like protein
  misc_feature (107)..(319): NCBI GI NO: 18425199 NR Description: adenylylsulfate kinase-related protein
  misc_feature (107)..(319): NCBI GI NO: 21537248 NR Description: adenylylsulfate kinase-like protein
  misc_feature (119)..(319): NCBI GI NO: 15236087 NR Description: adenosine-5-phosphosulfate-kinase

SEQ ID NO: 30524 - DNA, 599 bp, Zea mays subsp. mays
  misc_feature (1)..(599): Ceres Seq. ID no. 12381635
gtgattgggttggtcgcttggttcttccctgccggaagatacctttcgttcggtgtcgccaactcgccattcttgggaggtcttggtcgggaccggtgctgatggaggagaggtacgaggcgctgaaggagctgggggccggcaacttcggcgtggcgaggctggtcagggacaagcggaccaaggagctggtagccgtcaagtacatcgagaggggcaagaagattgatgagaacgtgcagagggagatcatcaatcaccagtcgctccggcaccctaacatcgtacggttcaaggaggtttgtctaacacccacacatcttgctattgtcatggaatatgctgctggtggagagctatttgagaaaatctgctcagcagggcgattcagtgaagatgagtccaggtatttcttccaacagctgatatcaggggtcagctactgccattctatggaaatttgtcaccgtgatcttaaacttgagaacaccctccttgatgggagtccaacacctcgtatgaaaatttgcgactttggttactcaaagtctgctttgctgcattccaaaccaaaatcaacagttggaactccagcatac

SEQ ID NO: 30525 - protein, 199 aa, Zea mays subsp. mays
  peptide (1)..(199): Ceres Seq. ID no. 12381636
  misc_feature (38)..(198): Pfam Name: Pfam Description:  Protein kinase domain
  misc_feature (34)..(198): NCBI GI NO: 7446429 NR Description: probable serine/threonine-specific protein kinase
  misc_feature (34)..(198): NCBI GI NO: 37536914 NR Description: protein kinase REK
  misc_feature (34)..(198): NCBI GI NO: 7446428 NR Description: probable serine/threonine-specific protein kinase
  misc_feature (34)..(198): NCBI GI NO: 1362050 NR Description: serine/threonine-specific protein kinase SPK-1
  misc_feature (34)..(198): NCBI GI NO: 3811293 NR Description: putative serine/threonine protein kinase
  misc_feature (34)..(198): NCBI GI NO: 310580 NR Description: protein kinase 2
  misc_feature (36)..(198): NCBI GI NO: 1362051 NR Description: protein kinase SPK-3 (EC 2.7.1.-) - soybean
  misc_feature (36)..(198): NCBI GI NO: 29164823 NR Description: abcisic acid-inducible protein kinanase
  misc_feature (36)..(198): NCBI GI NO: 34906840 NR Description: putative protein kinase HvPKABA1
  misc_feature (31)..(198): NCBI GI NO: 15240124 NR Description: protein kinase, 41K (EC 2
DWVGRLVLPCRKIPFVRCRQLAILGRSWSGPVLMEERYEALKELGAGNFGVARLVRDKRTKELVAVKYIERGKKIDENVQREIINHQSLRHPNIVRFKEVCLTPTHLAIVMEYAAGGELFEKICSAGRFSEDESRYFFQQLISGVSYCHSMEICHRDLKLENTLLDGSPTPRMKICDFGYSKSALLHSKPKSTVGTPAY

SEQ ID NO: 30526 - protein, 166 aa, Zea mays subsp. mays
  peptide (1)..(166): Ceres Seq. ID no. 12381637
  misc_feature (5)..(165): Pfam Name: Pfam Description:  Protein kinase domain
  misc_feature (1)..(165): NCBI GI NO: 7446429 NR Description: probable serine/threonine-specific protein kinase
  misc_feature (1)..(165): NCBI GI NO: 37536914 NR Description: protein kinase REK
  misc_feature (1)..(165): NCBI GI NO: 7446428 NR Description: probable serine/threonine-specific protein kinase
  misc_feature (1)..(165): NCBI GI NO: 1362050 NR Description: serine/threonine-specific protein kinase SPK-1
  misc_feature (1)..(165): NCBI GI NO: 3811293 NR Description: putative serine/threonine protein kinase
  misc_feature (1)..(165): NCBI GI NO: 310580 NR Description: protein kinase 2
  misc_feature (3)..(165): NCBI GI NO: 1362051 NR Description: protein kinase SPK-3 (EC 2.7.1.-) - soybean
  misc_feature (3)..(165): NCBI GI NO: 29164823 NR Description: abcisic acid-inducible protein kinanase
  misc_feature (3)..(165): NCBI GI NO: 34906840 NR Description: putative protein kinase HvPKABA1
  misc_feature (1)..(165): NCBI GI NO: 15240124 NR Description: protein kinase, 41K (EC 2
MEERYEALKELGAGNFGVARLVRDKRTKELVAVKYIERGKKIDENVQREIINHQSLRHPNIVRFKEVCLTPTHLAIVMEYAAGGELFEKICSAGRFSEDESRYFFQQLISGVSYCHSMEICHRDLKLENTLLDGSPTPRMKICDFGYSKSALLHSKPKSTVGTPAY

SEQ ID NO: 30527 - DNA, 600 bp, Zea mays subsp. mays
  misc_feature (1)..(600): Ceres Seq. ID no. 12350602
accagccggtgttggtttcagcttgtattcccactctgtcgcacagcgtcgcccgtcgccgctgagatcctaggaagaaatggagctctctcgcaagctcttcacggccgtcctcctcgtcatgctgctgctgctgtccgcagaggtcgggccggtggcggtggcggaggcgcggacgtgccagtcgcagagccacaggttccggggcccctgcctccgccggtccaactgcgccaacgtctgcaggaccgaggggttccccggcggcaggtgccgcggcttccgccgccgctgcttctgcaccacgcactgccactgattcgctcgcccagcggccggctggcgtcgccgtcgatcgcgtcgcgaccagtccatggctccatgcatgaataacaagggtgtgcgcggtttgtgatgccaaattgtatcgtcgtcgtgtgttgaagcgttcgatcgtcggtctagtagtgtgcctgtgagcagcggcgtgctgttgtacgtacgtctgcctctgttgttccatgtttcgggattttccatagcaaatgcatgcgtcgagatctactccgaaagaaattcgatagatttcgcataatttcc

SEQ ID NO: 30528 - protein, 130 aa, Zea mays subsp. mays
  peptide (1)..(130): Ceres Seq. ID no. 12350603
TSRCWFQLVFPLCRTASPVAAEILGRNGALSQALHGRPPRHAAAAVRRGRAGGGGGGADVPVAEPQVPGPLPPPVQLRQRLQDRGVPRRQVPRLPPPLLLHHALPLIRSPSGRLASPSIASRPVHGSMHE

SEQ ID NO: 30529 - protein, 79 aa, Zea mays subsp. mays
  peptide (1)..(79): Ceres Seq. ID no. 12350604
  misc_feature (32)..(78): Pfam Name: Pfam Description:  Gamma-thionins family
  misc_feature (1)..(78): NCBI GI NO: 16225423 NR Description: putative gamma-thionin [Castanea sativa]
  misc_feature (1)..(78): NCBI GI NO: 32400845 NR Description: proteinase inhibitor Rgpi9 [Triticum aestivum]
  misc_feature (1)..(78): NCBI GI NO: 7939581 NR Description: thionin like protein [Nicotiana tabacum]
  misc_feature (1)..(78): NCBI GI NO: 11387188 NR Description: Flower-specific gamma-thionin precursor
  misc_feature (1)..(78): NCBI GI NO: 7451428 NR Description: proteinase inhibitor - rice
  misc_feature (1)..(78): NCBI GI NO: 15226872 NR Description: plant defensin protein, putative (PDF2
  misc_feature (1)..(78): NCBI GI NO: 24306004 NR Description: defensin EGAD1 [Elaeis guineensis]
  misc_feature (1)..(78): NCBI GI NO: 3915102 NR Description: Gamma-thionin homolog PPT precursor
  misc_feature (1)..(78): NCBI GI NO: 7451427 NR Description: proteinase inhibitor - soybean
  misc_feature (1)..(78): NCBI GI NO: 28624546 NR Description: defensin protein 1 [Prunus persica]
MELSRKLFTAVLLVMLLLLSAEVGPVAVAEARTCQSQSHRFRGPCLRRSNCANVCRTEGFPGGRCRGFRRRCFCTTHCH

SEQ ID NO: 30530 - protein, 65 aa, Zea mays subsp. mays
  peptide (1)..(65): Ceres Seq. ID no. 12350605
  misc_feature (18)..(64): Pfam Name: Pfam Description:  Gamma-thionins family
  misc_feature (1)..(64): NCBI GI NO: 16225423 NR Description: putative gamma-thionin [Castanea sativa]
  misc_feature (1)..(64): NCBI GI NO: 32400845 NR Description: proteinase inhibitor Rgpi9 [Triticum aestivum]
  misc_feature (1)..(64): NCBI GI NO: 7939581 NR Description: thionin like protein [Nicotiana tabacum]
  misc_feature (1)..(64): NCBI GI NO: 11387188 NR Description: Flower-specific gamma-thionin precursor
  misc_feature (1)..(64): NCBI GI NO: 7451428 NR Description: proteinase inhibitor - rice
  misc_feature (1)..(64): NCBI GI NO: 15226872 NR Description: plant defensin protein, putative (PDF2
  misc_feature (1)..(64): NCBI GI NO: 24306004 NR Description: defensin EGAD1 [Elaeis guineensis]
  misc_feature (1)..(64): NCBI GI NO: 3915102 NR Description: Gamma-thionin homolog PPT precursor
  misc_feature (1)..(64): NCBI GI NO: 7451427 NR Description: proteinase inhibitor - soybean
  misc_feature (1)..(64): NCBI GI NO: 28624546 NR Description: defensin protein 1 [Prunus persica]
MLLLLSAEVGPVAVAEARTCQSQSHRFRGPCLRRSNCANVCRTEGFPGGRCRGFRRRCFCTTHCH

SEQ ID NO: 30531 - DNA, 881 bp, Zea mays subsp. mays
  misc_feature (1)..(881): Ceres Seq. ID no. 12356648
aagtttttgtattcgtccaagcccggcccatccaccatccgctgctactcttcatcacaaaccctaataaacccatctccgcctctggttcgtcctccatctcctcccaaatcgcggcaccaagcacccgaccgctttccgcatggcttcccacatcgacttccgctgcttggatgagggcctcggcggcgagcgcggcaagcgcaagcgccgcgaggatgccgaggcggcggccgcggattccatggacctcgatgccgacgcgcaccggccgtctaagctccgcgccatgccttccctctccgacccctcgaagccggcctccttcggccagcccacctacgacggcgtcatcgcagggcggttgtcgggacggcggtggaaggaggcccgcacccggcgagcgtcggccgtggcggtgtcgcggaagccgaccccgctggagcagcgcgtccgggagaagtcgctgaagcgcgcgtaccaggcccgcaaggcggagctcaaggaagagatccggcagaacaaggtggccaagcggaaggcccgcgaggagcgtgagaagcggaagcaggagaacgtgctccgcacgggcaccaaactgcaaagggtcaccaacccaaagacgatccagaagatcgccaagtccaagaagcgcaagcagctcaaggtcgtccccgacgagttcctcggcggcaagaagtcggtggccaaccggcgcatgcaggtgcctggactcgaaaattgaatctgacaggcctcgatctctctgtatctgttcggtggcggcgttgagttggcaaggttagttcgacgacgattttgtacttgtttctggttatgtagtttgaagcgtgattaaattaagcgattaaaatggcgtg

SEQ ID NO: 30532 - protein, 200 aa, Zea mays subsp. mays
  peptide (1)..(200): Ceres Seq. ID no. 12356649
  misc_feature (1)..(190): NCBI GI NO: 18402657 NR Description: expressed protein; protein id: At2g31410
MASHIDFRCLDEGLGGERGKRKRREDAEAAAADSMDLDADAHRPSKLRAMPSLSDPSKPASFGQPTYDGVIAGRLSGRRWKEARTRRASAVAVSRKPTPLEQRVREKSLKRAYQARKAELKEEIRQNKVAKRKAREEREKRKQENVLRTGTKLQRVTNPKTIQKIAKSKKRKQLKVVPDEFLGGKKSVANRRMQVPGLEN

SEQ ID NO: 30533 - protein, 166 aa, Zea mays subsp. mays
  peptide (1)..(166): Ceres Seq. ID no. 12356650
  misc_feature (1)..(156): NCBI GI NO: 18402657 NR Description: expressed protein; protein id: At2g31410
MDLDADAHRPSKLRAMPSLSDPSKPASFGQPTYDGVIAGRLSGRRWKEARTRRASAVAVSRKPTPLEQRVREKSLKRAYQARKAELKEEIRQNKVAKRKAREEREKRKQENVLRTGTKLQRVTNPKTIQKIAKSKKRKQLKVVPDEFLGGKKSVANRRMQVPGLEN

SEQ ID NO: 30534 - protein, 155 aa, Zea mays subsp. mays
  peptide (1)..(155): Ceres Seq. ID no. 12356651
  misc_feature (21)..(155): NCBI GI NO: 13592175 NR Description: ppg3 [Leishmania major]
  misc_feature (26)..(155): NCBI GI NO: 13592175 NR Description: ppg3 [Leishmania major]
  misc_feature (26)..(155): NCBI GI NO: 11359723 NR Description: proteophosphoglycan, membrane-associated
  misc_feature (26)..(155): NCBI GI NO: 13592175 NR Description: ppg3 [Leishmania major]
  misc_feature (21)..(155): NCBI GI NO: 5821145 NR Description: RNA binding protein [Homo sapiens]
  misc_feature (26)..(155): NCBI GI NO: 13592175 NR Description: ppg3 [Leishmania major]
  misc_feature (21)..(155): NCBI GI NO: 5821143 NR Description: RNA binding protein [Homo sapiens]
  misc_feature (19)..(155): NCBI GI NO: 13592175 NR Description: ppg3 [Leishmania major]
  misc_feature (18)..(155): NCBI GI NO: 32699068 NR Description: hypothetical protein FLJ35107 [Homo sapiens]
  misc_feature (21)..(155): NCBI GI NO: 6649242 NR Description: splicing coactivator subunit SRm300 [Homo sapiens]
VFVFVQARPIHHPLLLFITNPNKPISASGSSSISSQIAAPSTRPLSAWLPTSTSAAWMRASAASAASASAARMPRRRPRIPWTSMPTRTGRLSSAPCLPSPTPRSRPPSASPPTTASSQGGCRDGGGRRPAPGERRPWRCRGSRPRWSSASGRSR

SEQ ID NO: 30535 - DNA, 1643 bp, Zea mays subsp. mays
  misc_feature (1)..(1643): Ceres Seq. ID no. 12347478
gtgcgggcgtgttgtggtccgctgatctcgttcgcgggacgccggggggtggtggtggtggcagcggtggttggtggtgcgcggcgtgaaagaaagaaagaaaaaaaaaaaaggcccgccgctttgcgctgctctgcttccgtaggtgtcacgagatttggccctagcctttcgctttcctttttcatctcgctcacaagggaagggaccgagggacgagggagacgttggggaggggagcgagcgagccgtaacatccgagctgttccaatggcgacccctgccgttgctttcgtcgccagcgctttgttggggcggtggtagcgctaggagcggagcagtactaggttggtaggtggttgtagctttgcgcgtgacccgagcgcgcgctcgctcgctcctgtgcctctctacctcgcttgcgtgcgccgggaaggcagtgggtggctggtcggttctcgcaagaggttgctggtgctgttcctcctcccccggttgatgagcatggggcattgctccgagcagcggacggggttcgaggtgactaaggactggaacggcgccgaccagttcgcgatccggtccccgcggggggcgtccgttcgggtctgcctgcacggcgggcaggtcgtctcgtggaggaaccaccgcggcgaggagctcctcttcagcagcagcaaggcaatcttcaagccgccaagagcgacccgtggtggcattccgatatgcttcccacagtttggaaactgtggaacattggagcagcatggatttgcaaggaacaagatatggacaatagacgatgaggctccacctctaaattatggtgataataacagcaacaaagcttctgttgaccttctgctaaagccatctgaagatgacctgaagtgctggccacactgttttgagttacgtctcagagtctctctttcaatggatggagacctttcactgatatcacgggtcagaaatgttaatgggaagccattcagtttcgcatttgcttaccatacatacctttctgtttctgacatcagtgaagtgaggatagaaggtctggagacccttgattatcttgacaaccttagccagcgggaacgttttaccgaacagggagatgccataacatttgaatcagaggttgatcgagtctatgttggctgcccaggcgtaatagctgttcttgaccatggaaagaaacgcacattcatcgtgcggaaagaagggcttcctgatattgttgtgtggaacccctgggagaagaagtccaagacgatggcagacttcggcgacgacgagtacaagcagatgctgtgcgtggatgcagccgcggtcgagagggccatcacgctgaagcccggggaggagtggacggggaagctggagctctccgccgtggcgtcgaccaactgcagcgaccacctggatcgcccgggcaggctgtagagcgctgggtgggtgggttcgttcgcccctgacgaaaggcatgtactagttttttttcatgtacatgggggcgctaggtccggcccttgcaggctgcagtatcatctacctgtcaggtgtgtcatgtgtgagtttaaacttatgtcagatccaagtattgctgtgatcgacatgttcgatgttcctggactgcg

SEQ ID NO: 30536 - protein, 316 aa, Zea mays subsp. mays; identical to SEQ ID NO: 23183
  peptide (1)..(316): Ceres Seq. ID no. 12347479
  misc_feature (23)..(299): Pfam Name: Pfam Description:  Aldose 1-epimerase
  misc_feature (8)..(311): NCBI GI NO: 15233165 NR Description: putative protein; protein id: At3g61610.1
  misc_feature (3)..(165): NCBI GI NO: 34911992 NR Description: P0694A04.29
  misc_feature (244)..(313): NCBI GI NO: 34911992 NR Description: P0694A04.29
  misc_feature (2)..(304): NCBI GI NO: 15236591 NR Description: putative protein; protein id: At4g23730
  misc_feature (9)..(316): NCBI GI NO: 19387263 NR Description: putative apospory-associated protein C
  misc_feature (9)..(311): NCBI GI NO: 15242099 NR Description: apospory-associated protein C
  misc_feature (13)..(311): NCBI GI NO: 40253263 NR Description: putative Aldose 1-epimerase
  misc_feature (14)..(311): NCBI GI NO: 2501555 NR Description: POSSIBLE APOSPORY-ASSOCIATED PROTEIN C
  misc_feature (9)..(316): NCBI GI NO: 38344152 NR Description: OSJNBa0041A02.19
  misc_feature (18)..(311): NCBI GI NO: 18395868 NR Description: expressed protein; protein id: At3g01590

SEQ ID NO: 30537 - protein, 314 aa, Zea mays subsp. mays; identical to SEQ ID NO: 23184
  peptide (1)..(314): Ceres Seq. ID no. 12347480
  misc_feature (21)..(297): Pfam Name: Pfam Description:  Aldose 1-epimerase
  misc_feature (6)..(309): NCBI GI NO: 15233165 NR Description: putative protein; protein id: At3g61610.1
  misc_feature (1)..(163): NCBI GI NO: 34911992 NR Description: P0694A04.29
  misc_feature (242)..(311): NCBI GI NO: 34911992 NR Description: P0694A04.29
  misc_feature (1)..(302): NCBI GI NO: 15236591 NR Description: putative protein; protein id: At4g23730
  misc_feature (7)..(314): NCBI GI NO: 19387263 NR Description: putative apospory-associated protein C
  misc_feature (7)..(309): NCBI GI NO: 15242099 NR Description: apospory-associated protein C
  misc_feature (11)..(309): NCBI GI NO: 40253263 NR Description: putative Aldose 1-epimerase
  misc_feature (12)..(309): NCBI GI NO: 2501555 NR Description: POSSIBLE APOSPORY-ASSOCIATED PROTEIN C
  misc_feature (7)..(314): NCBI GI NO: 38344152 NR Description: OSJNBa0041A02.19
  misc_feature (16)..(309): NCBI GI NO: 18395868 NR Description: expressed protein; protein id: At3g01590

SEQ ID NO: 30538 - protein, 170 aa, Zea mays subsp. mays; identical to SEQ ID NO: 23185
  peptide (1)..(170): Ceres Seq. ID no. 12347481
  misc_feature (1)..(153): Pfam Name: Pfam Description:  Aldose 1-epimerase
  misc_feature (1)..(165): NCBI GI NO: 15233165 NR Description: putative protein; protein id: At3g61610.1
  misc_feature (1)..(19): NCBI GI NO: 34911992 NR Description: P0694A04.29
  misc_feature (98)..(167): NCBI GI NO: 34911992 NR Description: P0694A04.29
  misc_feature (1)..(158): NCBI GI NO: 15236591 NR Description: putative protein; protein id: At4g23730
  misc_feature (1)..(170): NCBI GI NO: 19387263 NR Description: putative apospory-associated protein C
  misc_feature (1)..(165): NCBI GI NO: 15242099 NR Description: apospory-associated protein C
  misc_feature (1)..(165): NCBI GI NO: 40253263 NR Description: putative Aldose 1-epimerase
  misc_feature (1)..(165): NCBI GI NO: 2501555 NR Description: POSSIBLE APOSPORY-ASSOCIATED PROTEIN C
  misc_feature (1)..(170): NCBI GI NO: 38344152 NR Description: OSJNBa0041A02.19
  misc_feature (1)..(165): NCBI GI NO: 18395868 NR Description: expressed protein; protein id: At3g01590

SEQ ID NO: 30539 - DNA, 1680 bp, Zea mays subsp. mays
  misc_feature (1)..(1680): Ceres Seq. ID no. 12349311
atagccaacccttttgataaagaaacgggcctacactacacgggacacctgcctcctcttctcccatctctccctcttcccctctccctctcgtggccacgactgccgctgccgccctacgccaggtgtccaggtcatctccggcccattcgccggcgacgagcaccccactagatcgaccgagatatggacggcctgtggcatctgggggacgagctccgcgggcagcccaaggtggtggaggaccgccagtggtcgctcatgacgtccaagctggcagagatcaccaggtccaggggcgagaggacgaacgacctcgactacgccaggatgaacgccgcccccgacgccaagcggtggggcaaggcggcgtcctaccagcaccatgacgagggcaggatggaccaccacgtcggcctcagcctcaagatgaacgatctcaagatgaacgaggccgccgctgccgccgtcatgaagctccccttccgcggcgtgccctacaacgtcaacccgatgtaccccaaggggagcaacgccaacgccaatgtcaacgcgttcaagatgaatgtcggggtgaacaagtactccagcagcgcgaacgggaaagacgccggcgggaaaagcagtggcggcggcagcaacaacaacagcggcggcggaggcaacggcaatgggaccgccaacggcagttccgcggtcgacaagcgcttcaagacgttgccgacgagcgagatgctgccgaagaacgaagtccttggtgggtacatctttgtctgcaacaacgataccatgcaggaggacctcaagaggcagctttttggattgccagcaagatatcgtgattcagtccgggcaattactcctggcctgccgcttttcctctataactacaccactcaccagcttcatggggtatttgaggctgccagtttcggtgggtctaatatcgatcccactgcatgggaggataagaagtgtaaaggtgaatctagattcccagcgcaggtgaggatccgcgttaggaagctctgcaagccgttggaagaggattccttcaggccagttttgcaccactatgatggtccaaagtttcgcctcgagctctccatcgcggagaccctgtccctgctagacctatgcgagaaggaaggcatctgagctgttggctgcctcgtgaggttctagtaaatatcaatcatccttgtatgttctgtagatggtggttggcaatgttgtttatttttcaagcgcaagctgctgccggtctcgttttccctgtcctggatggaagcaaagggacctggtactttgaaggccccccctcaaacataagctgtgagcctgtcagtgcacgtgtccgccgttgtcgtcaagaaccaaaccaaatcatgaaatcttgcgccgacggagagttggagcgtgtatgttttgctatctctatctacatgtctcagtagagtggatataccctggggtccccaaaagatgggggcctcaggcctgtatgtaacactacgtgtaatggttaaggtgaatgtgccgtgaggccccccaaaagttggagtgtgtatttttgttgtcaccttgaaccgactttgcgtatgctttttttagtgctgctaccttttgcgctgtgtttggcttctggttcatgtttttgtaatataaggtggcttgcgc

SEQ ID NO: 30540 - protein, 323 aa, Zea mays subsp. mays
  peptide (1)..(323): Ceres Seq. ID no. 12349312
  misc_feature (79)..(322): NCBI GI NO: 2369766 NR Description: hypothetical protein [Citrus x paradisi]
  misc_feature (79)..(322): NCBI GI NO: 15232081 NR Description: gda-1, putative; protein id: At3g27090
  misc_feature (79)..(322): NCBI GI NO: 21592623 NR Description: gda-1, putative [Arabidopsis thaliana]
  misc_feature (116)..(322): NCBI GI NO: 21665866 NR Description: GDA2 protein [Pisum sativum]
  misc_feature (119)..(320): NCBI GI NO: 584825 NR Description: B2 PROTEIN
  misc_feature (32)..(317): NCBI GI NO: 18422167 NR Description: putative protein; protein id: At5g42050
  misc_feature (71)..(311): NCBI GI NO: 34913876 NR Description: B1156H12.22
  misc_feature (125)..(317): NCBI GI NO: 9757950 NR Description: gene_id:MJC20
  misc_feature (202)..(286): NCBI GI NO: 7488804 NR Description: gda-1 protein - garden pea
  misc_feature (176)..(317): NCBI GI NO: 34896110 NR Description: P0701D05.9
MDGLWHLGDELRGQPKVVEDRQWSLMTSKLAEITRSRGERTNDLDYARMNAAPDAKRWGKAASYQHHDEGRMDHHVGLSLKMNDLKMNEAAAAAVMKLPFRGVPYNVNPMYPKGSNANANVNAFKMNVGVNKYSSSANGKDAGGKSSGGGSNNNSGGGGNGNGTANGSSAVDKRFKTLPTSEMLPKNEVLGGYIFVCNNDTMQEDLKRQLFGLPARYRDSVRAITPGLPLFLYNYTTHQLHGVFEAASFGGSNIDPTAWEDKKCKGESRFPAQVRIRVRKLCKPLEEDSFRPVLHHYDGPKFRLELSIAETLSLLDLCEKEGI

SEQ ID NO: 30541 - protein, 298 aa, Zea mays subsp. mays
  peptide (1)..(298): Ceres Seq. ID no. 12349313
  misc_feature (54)..(297): NCBI GI NO: 2369766 NR Description: hypothetical protein [Citrus x paradisi]
  misc_feature (54)..(297): NCBI GI NO: 15232081 NR Description: gda-1, putative; protein id: At3g27090
  misc_feature (54)..(297): NCBI GI NO: 21592623 NR Description: gda-1, putative [Arabidopsis thaliana]
  misc_feature (91)..(297): NCBI GI NO: 21665866 NR Description: GDA2 protein [Pisum sativum]
  misc_feature (94)..(295): NCBI GI NO: 584825 NR Description: B2 PROTEIN
  misc_feature (7)..(292): NCBI GI NO: 18422167 NR Description: putative protein; protein id: At5g42050
  misc_feature (46)..(286): NCBI GI NO: 34913876 NR Description: B1156H12.22
  misc_feature (100)..(292): NCBI GI NO: 9757950 NR Description: gene_id:MJC20
  misc_feature (177)..(261): NCBI GI NO: 7488804 NR Description: gda-1 protein - garden pea
  misc_feature (151)..(292): NCBI GI NO: 34896110 NR Description: P0701D05.9
MTSKLAEITRSRGERTNDLDYARMNAAPDAKRWGKAASYQHHDEGRMDHHVGLSLKMNDLKMNEAAAAAVMKLPFRGVPYNVNPMYPKGSNANANVNAFKMNVGVNKYSSSANGKDAGGKSSGGGSNNNSGGGGNGNGTANGSSAVDKRFKTLPTSEMLPKNEVLGGYIFVCNNDTMQEDLKRQLFGLPARYRDSVRAITPGLPLFLYNYTTHQLHGVFEAASFGGSNIDPTAWEDKKCKGESRFPAQVRIRVRKLCKPLEEDSFRPVLHHYDGPKFRLELSIAETLSLLDLCEKEGI

SEQ ID NO: 30542 - protein, 275 aa, Zea mays subsp. mays
  peptide (1)..(275): Ceres Seq. ID no. 12349314
  misc_feature (31)..(274): NCBI GI NO: 2369766 NR Description: hypothetical protein [Citrus x paradisi]
  misc_feature (31)..(274): NCBI GI NO: 15232081 NR Description: gda-1, putative; protein id: At3g27090
  misc_feature (31)..(274): NCBI GI NO: 21592623 NR Description: gda-1, putative [Arabidopsis thaliana]
  misc_feature (68)..(274): NCBI GI NO: 21665866 NR Description: GDA2 protein [Pisum sativum]
  misc_feature (71)..(272): NCBI GI NO: 584825 NR Description: B2 PROTEIN
  misc_feature (1)..(269): NCBI GI NO: 18422167 NR Description: putative protein; protein id: At5g42050
  misc_feature (23)..(263): NCBI GI NO: 34913876 NR Description: B1156H12.22
  misc_feature (77)..(269): NCBI GI NO: 9757950 NR Description: gene_id:MJC20
  misc_feature (154)..(238): NCBI GI NO: 7488804 NR Description: gda-1 protein - garden pea
  misc_feature (128)..(269): NCBI GI NO: 34896110 NR Description: P0701D05.9
MNAAPDAKRWGKAASYQHHDEGRMDHHVGLSLKMNDLKMNEAAAAAVMKLPFRGVPYNVNPMYPKGSNANANVNAFKMNVGVNKYSSSANGKDAGGKSSGGGSNNNSGGGGNGNGTANGSSAVDKRFKTLPTSEMLPKNEVLGGYIFVCNNDTMQEDLKRQLFGLPARYRDSVRAITPGLPLFLYNYTTHQLHGVFEAASFGGSNIDPTAWEDKKCKGESRFPAQVRIRVRKLCKPLEEDSFRPVLHHYDGPKFRLELSIAETLSLLDLCEKEGI

SEQ ID NO: 30543 - DNA, 1431 bp, Zea mays subsp. mays
  misc_feature (1)..(1431): Ceres Seq. ID no. 12407603
acacttcgatcagtgtcgccaacaagtagctagacgatgagcagaggagctgagaagaagaattggccgccgtctcggtcttcttcctcctcctcttcttcaccgacgtcgtcgtgggtcgccagcaggtccatggcggggttctaccgctacccgtcctccactcgcacctccggcaaggacagaacccagccgccgccagcaccagctgcaccgacacaacaacaaggcgacaagagcagcagcaagaagaagaggaggagtatcagcatcggccggagcatcacgtgcgcgggctccatctgcagtaccaaggagagctcggtcatgagccgggaccgccgcggcgcctccagcaggtcgctcagggcaccctacgtcgacgtcgacgtcaacgacgcctctgccgccgccatctccgccacgtcgtccttcaactcggagaccaccgtggcgtcgacgaccaccgtcacgtcctcgtcctcgtcctcgtcctcgtcctcgtccgtcgggacctccttcaggggcgtgcacatcaggaagctctccggctgctacgagtgccactccgtcttcgaccccaggagcttcggcgccgccgccttcccctgcgcggactgcgacgaggtgttcgccaaggcagagtcgctacagctccacagggcaaccaggcatgcagttttggagctgggccccgaggacacgagcaggaacatcgtggagatcatcttccagtccagctggccggccgggaagcagcagcaggcgccggtctgcaagatcgagcgggtactcaaggtgcagagcagcgacaggaccctggagaggttcgagcagtacaaggagagcgtcagggagagggcgagcagcgaccggggcaggaagaacaaccctcggtgcgtcgccgacggcaacgagctcctcaggttccactgcaccaccttcacctgctccctcggcctcgccggcagcaccgcgctgtgccgggcgccgtgcaagctgtgcgccatcgtcagggacggtttcagggtcgacgacgacggcaagattgcgacgatgggcaccagcgggcgcgcccacgacatggcgcaggtgctgtcggagtcggacggtgacaagagagcaatgctcgtgtgcagggtcgtcgcggggagggtgaagaagaaggccagcgatgagaagaagccttcagaggactctggctttgactctgtcagccccagcacagaaggcgtctgctccgatttggatcaactctttgtcttcaatcagagagctatactgccctgctttgtagtcatatacagtggctattagggttgtagggacctaagttataacttattagctagttttgtttcctttcactgtcacctgctcctttaatccagttcttcttttttttatgggccagaagtgcaagttttggcg

SEQ ID NO: 30544 - protein, 426 aa, Zea mays subsp. mays
  peptide (1)..(426): Ceres Seq. ID no. 12407604
  misc_feature (16)..(161): Pfam Name: Pfam Description:  Equine herpesvirus glycoprotein gp2
  misc_feature (128)..(423): NCBI GI NO: 5777616 NR Description: CAA30374.1 protein [Oryza sativa]
  misc_feature (128)..(423): NCBI GI NO: 38345520 NR Description: OSJNBa0039K24.23
  misc_feature (38)..(423): NCBI GI NO: 9802582 NR Description: T2E6.3 [Arabidopsis thaliana]
  misc_feature (38)..(426): NCBI GI NO: 15220992 NR Description: hypothetical protein; protein id: At1g47860.1
  misc_feature (215)..(423): NCBI GI NO: 38346001 NR Description: OSJNBa0073L13.11
  misc_feature (11)..(215): NCBI GI NO: 38346001 NR Description: OSJNBa0073L13.11
  misc_feature (66)..(396): NCBI GI NO: 15222333 NR Description: unknown protein; protein id: At1g75710.1
  misc_feature (190)..(424): NCBI GI NO: 18402112 NR Description: expressed protein; protein id: At2g29660
  misc_feature (94)..(422): NCBI GI NO: 18416951 NR Description: expressed protein; protein id: At4g27240
  misc_feature (183)..(422): NCBI GI NO: 34910152 NR Description: B1070A12.19
MSRGAEKKNWPPSRSSSSSSSSPTSSWVASRSMAGFYRYPSSTRTSGKDRTQPPPAPAAPTQQQGDKSSSKKKRRSISIGRSITCAGSICSTKESSVMSRDRRGASSRSLRAPYVDVDVNDASAAAISATSSFNSETTVASTTTVTSSSSSSSSSSSVGTSFRGVHIRKLSGCYECHSVFDPRSFGAAAFPCADCDEVFAKAESLQLHRATRHAVLELGPEDTSRNIVEIIFQSSWPAGKQQQAPVCKIERVLKVQSSDRTLERFEQYKESVRERASSDRGRKNNPRCVADGNELLRFHCTTFTCSLGLAGSTALCRAPCKLCAIVRDGFRVDDDGKIATMGTSGRAHDMAQVLSESDGDKRAMLVCRVVAGRVKKKASDEKKPSEDSGFDSVSPSTEGVCSDLDQLFVFNQRAILPCFVVIYSGY

SEQ ID NO: 30545 - protein, 394 aa, Zea mays subsp. mays
  peptide (1)..(394): Ceres Seq. ID no. 12407605
  misc_feature (1)..(129): Pfam Name: Pfam Description:  Equine herpesvirus glycoprotein gp2
  misc_feature (96)..(391): NCBI GI NO: 5777616 NR Description: CAA30374.1 protein [Oryza sativa]
  misc_feature (96)..(391): NCBI GI NO: 38345520 NR Description: OSJNBa0039K24.23
  misc_feature (6)..(391): NCBI GI NO: 9802582 NR Description: T2E6.3 [Arabidopsis thaliana]
  misc_feature (6)..(394): NCBI GI NO: 15220992 NR Description: hypothetical protein; protein id: At1g47860.1
  misc_feature (183)..(391): NCBI GI NO: 38346001 NR Description: OSJNBa0073L13.11
  misc_feature (1)..(183): NCBI GI NO: 38346001 NR Description: OSJNBa0073L13.11
  misc_feature (34)..(364): NCBI GI NO: 15222333 NR Description: unknown protein; protein id: At1g75710.1
  misc_feature (158)..(392): NCBI GI NO: 18402112 NR Description: expressed protein; protein id: At2g29660
  misc_feature (62)..(390): NCBI GI NO: 18416951 NR Description: expressed protein; protein id: At4g27240
  misc_feature (151)..(390): NCBI GI NO: 34910152 NR Description: B1070A12.19
MAGFYRYPSSTRTSGKDRTQPPPAPAAPTQQQGDKSSSKKKRRSISIGRSITCAGSICSTKESSVMSRDRRGASSRSLRAPYVDVDVNDASAAAISATSSFNSETTVASTTTVTSSSSSSSSSSSVGTSFRGVHIRKLSGCYECHSVFDPRSFGAAAFPCADCDEVFAKAESLQLHRATRHAVLELGPEDTSRNIVEIIFQSSWPAGKQQQAPVCKIERVLKVQSSDRTLERFEQYKESVRERASSDRGRKNNPRCVADGNELLRFHCTTFTCSLGLAGSTALCRAPCKLCAIVRDGFRVDDDGKIATMGTSGRAHDMAQVLSESDGDKRAMLVCRVVAGRVKKKASDEKKPSEDSGFDSVSPSTEGVCSDLDQLFVFNQRAILPCFVVIYSGY

SEQ ID NO: 30546 - protein, 329 aa, Zea mays subsp. mays
  peptide (1)..(329): Ceres Seq. ID no. 12407606
  misc_feature (1)..(64): Pfam Name: Pfam Description:  Equine herpesvirus glycoprotein gp2
  misc_feature (31)..(326): NCBI GI NO: 5777616 NR Description: CAA30374.1 protein [Oryza sativa]
  misc_feature (31)..(326): NCBI GI NO: 38345520 NR Description: OSJNBa0039K24.23
  misc_feature (1)..(326): NCBI GI NO: 9802582 NR Description: T2E6.3 [Arabidopsis thaliana]
  misc_feature (1)..(329): NCBI GI NO: 15220992 NR Description: hypothetical protein; protein id: At1g47860.1
  misc_feature (118)..(326): NCBI GI NO: 38346001 NR Description: OSJNBa0073L13.11
  misc_feature (1)..(118): NCBI GI NO: 38346001 NR Description: OSJNBa0073L13.11
  misc_feature (1)..(299): NCBI GI NO: 15222333 NR Description: unknown protein; protein id: At1g75710.1
  misc_feature (93)..(327): NCBI GI NO: 18402112 NR Description: expressed protein; protein id: At2g29660
  misc_feature (1)..(325): NCBI GI NO: 18416951 NR Description: expressed protein; protein id: At4g27240
  misc_feature (86)..(325): NCBI GI NO: 34910152 NR Description: B1070A12.19
MSRDRRGASSRSLRAPYVDVDVNDASAAAISATSSFNSETTVASTTTVTSSSSSSSSSSSVGTSFRGVHIRKLSGCYECHSVFDPRSFGAAAFPCADCDEVFAKAESLQLHRATRHAVLELGPEDTSRNIVEIIFQSSWPAGKQQQAPVCKIERVLKVQSSDRTLERFEQYKESVRERASSDRGRKNNPRCVADGNELLRFHCTTFTCSLGLAGSTALCRAPCKLCAIVRDGFRVDDDGKIATMGTSGRAHDMAQVLSESDGDKRAMLVCRVVAGRVKKKASDEKKPSEDSGFDSVSPSTEGVCSDLDQLFVFNQRAILPCFVVIYSGY

SEQ ID NO: 30547 - DNA, 2052 bp, Zea mays subsp. mays
  misc_feature (1)..(2052): Ceres Seq. ID no. 12354033
agactctctctcgcgtcgggcacgcagtcgcacaagtagtgaactcaaacgggatctcctgctctgcctccctcgtcttcctctgcccgtgcgcgtttcagagcacgtacggagagggcgagcagcagcttgcggccgggcaccatcatggaggacgtcgcgccgggtgcggagccgtgggaggggtacgtggactggaggaaccggccggcgaccaggtcccggcacggcggcatggccgccgcctccttcgtgctcgtggtggaggtgctggagaacctggcgttcctggcgaacgccagcaacctggtgacctacctgatggggttcatgcactactcgccgtcgcagtcggccacggcggtcaccaacttcatgggcacggccttcctgctcgcgctcctcggcggcttcctctccgacgccttcttcaccacctacaccatctacatcgccagcgccttcatcgagctcatggggctggtgatcctgacggtccaggcgcggacgcagtcgctgatgccaccgcagtgcgccaagccagcggctccgtgcgagcccgtgtcgggcgccaagaaggcgatgctgttcgcggggctgtacctcacggcgctgggcgtgggcgggatcaagggctccctcccctcccacggcgcggagcagttcgacgagcatgcggcgcgggggcgcaagggccgctccaccttcttcaactacttcgtcttctgcctctcctgcggcgccctcgtcgccgtcaccttcgccgtctgggtcgaggacaacaagggctggcagtgggggttcggcatctccaccatcgccatcctgctctccatcccgctcttcgtcgccggctccagccgctaccggaacaaggtgcccacggggagcccgctcaccaccatcgccaaggtcctcatcgccgccgcgctcgcgcgccgcggctgcgcgccgagctccagcaacggcgccgtcatcgaccgcgcgcccagccccacggggagcaccgacatgaaagagtactgcaagcccggggacatggaggagatcacggtctccggcgccgcgatcgtggcgtcgtcgcccgccgagccgtcccgcgaactcgcgttcctcaaccgcgcggtgcagtgccagccgccgcggcacggccgcctggcgtgcacggtccaggaggtggaggacgtcaagatcgtgctcatggtgctgcccatcttcttgtccaccatcatgctcaactgctgcctggcgcagctgtccaccttctcggtcgagcaagcggccaccatggacacgcgcgtgggcagcctcaccgtgccgccggcgtcgctccccgtcttccctgtcacgttcatcatcatcctcgcgcccgtctacgatcacgtcatcgtcccgttcgcgcgccgcgtcacggggaccgagatgggcatcacacacctccagcgtatcggcaccgggctggtgctgtccatcgtcgcgatggccgtggccgccgtcgtcgaggtcaagcgcaagaacgtggcgtcccacaacgggatgctggactccaccaagccgctgcccatcaccttcttctggatcgcgttccagtacctgttcctgggttccgcggacctgttcacgttggcggggctgctcgagttcttcttcagcgaggcgccggcgcggatgagatccctggcgacgtcgctgtcgtgggcgtcgctggcgctgggttattacctcagctcggtgctggtgtccatcgtcaacagcgtgacagggcgcggcgaccaccggccgtggctgcagggtgccagcctgaaccattaccacctcgagaggttctactgggtcatgtgcgtgctcagcaccatcaactacctcttcttcctgttcttggccgtcaggtacaagtacagaaacgcgggggtcatcaaaggctaatgccatcttcatatggccagtcggcgttgccattaatccccgtggtcttgagcaatgctgggtgtaactaactgtttatataggtggaaaacagagggttgaagaaaatgtaggttaattttctgc

SEQ ID NO: 30548 - protein, 664 aa, Zea mays subsp. mays
  peptide (1)..(664): Ceres Seq. ID no. 12354034
TLSRVGHAVAQVVNSNGISCSASLVFLCPCAFQSTYGEGEQQLAAGHHHGGRRAGCGAVGGVRGLEEPAGDQVPARRHGRRLLRARGGGAGEPGVPGERQQPGDLPDGVHALLAVAVGHGGHQLHGHGLPARAPRRLPLRRLLHHLHHLHRQRLHRAHGAGDPDGPGADAVADATAVRQASGSVRARVGRQEGDAVRGAVPHGAGRGRDQGLPPLPRRGAVRRACGAGAQGPLHLLQLLRLLPLLRRPRRRHLRRLGRGQQGLAVGVRHLHHRHPALHPALRRRLQPLPEQGAHGEPAHHHRQGPHRRRARAPRLRAELQQRRRHRPRAQPHGEHRHERVLQARGHGGDHGLRRRDRGVVARRAVPRTRVPQPRGAVPAAAARPPGVHGPGGGGRQDRAHGAAHLLVHHHAQLLPGAAVHLLGRASGHHGHARGQPHRAAGVAPRLPCHVHHHPRARLRSRHRPVRAPRHGDRDGHHTPPAYRHRAGAVHRRDGRGRRRRGQAQERGVPQRDAGLHQAAAHHLLLDRVPVPVPGFRGPVHVGGAARVLLQRGAGADEIPGDVAVVGVAGAGLLPQLGAGVHRQQRDRARRPPAVAAGCQPEPLPPREVLLGHVRAQHHQLPLLPVLGRQVQVQKRGGHQRLMPSSYGQSALPLIPVVLSNAGCN

SEQ ID NO: 30549 - protein, 592 aa, Zea mays subsp. mays
  peptide (1)..(592): Ceres Seq. ID no. 12354035
  misc_feature (98)..(520): Pfam Name: Pfam Description:  POT family
  misc_feature (1)..(588): NCBI GI NO: 25404844 NR Description: nitrate transporter (NTL1), 53025-56402
  misc_feature (11)..(588): NCBI GI NO: 18409382 NR Description: nitrate transporter (NTL1); protein id:At1g69850
  misc_feature (11)..(588): NCBI GI NO: 17064754 NR Description: nitrate transporter (NTL1) [Arabidopsis thaliana]
  misc_feature (11)..(588): NCBI GI NO: 11358579 NR Description: nitrate transporter NTL1
  misc_feature (312)..(590): NCBI GI NO: 22329803 NR Description: nitrate transporter, putative
  misc_feature (312)..(590): NCBI GI NO: 25403281 NR Description: protein T7N9.10 [imported] - Arabidopsis thaliana
  misc_feature (11)..(279): NCBI GI NO: 22329803 NR Description: nitrate transporter, putative
  misc_feature (11)..(279): NCBI GI NO: 25403281 NR Description: protein T7N9.10 [imported] - Arabidopsis thaliana
  misc_feature (321)..(588): NCBI GI NO: 10177451 NR Description: nitrate transporter NTL1 [Arabidopsis thaliana]
  misc_feature (321)..(588): NCBI GI NO: 15241938 NR Description: nitrate transporter NTL1 - like protein
MEDVAPGAEPWEGYVDWRNRPATRSRHGGMAAASFVLVVEVLENLAFLANASNLVTYLMGFMHYSPSQSATAVTNFMGTAFLLALLGGFLSDAFFTTYTIYIASAFIELMGLVILTVQARTQSLMPPQCAKPAAPCEPVSGAKKAMLFAGLYLTALGVGGIKGSLPSHGAEQFDEHAARGRKGRSTFFNYFVFCLSCGALVAVTFAVWVEDNKGWQWGFGISTIAILLSIPLFVAGSSRYRNKVPTGSPLTTIAKVLIAAALARRGCAPSSSNGAVIDRAPSPTGSTDMKEYCKPGDMEEITVSGAAIVASSPAEPSRELAFLNRAVQCQPPRHGRLACTVQEVEDVKIVLMVLPIFLSTIMLNCCLAQLSTFSVEQAATMDTRVGSLTVPPASLPVFPVTFIIILAPVYDHVIVPFARRVTGTEMGITHLQRIGTGLVLSIVAMAVAAVVEVKRKNVASHNGMLDSTKPLPITFFWIAFQYLFLGSADLFTLAGLLEFFFSEAPARMRSLATSLSWASLALGYYLSSVLVSIVNSVTGRGDHRPWLQGASLNHYHLERFYWVMCVLSTINYLFFLFLAVRYKYRNAGVIKG

SEQ ID NO: 30550 - protein, 563 aa, Zea mays subsp. mays
  peptide (1)..(563): Ceres Seq. ID no. 12354036
  misc_feature (69)..(491): Pfam Name: Pfam Description:  POT family
  misc_feature (1)..(559): NCBI GI NO: 25404844 NR Description: nitrate transporter (NTL1), 53025-56402
  misc_feature (1)..(559): NCBI GI NO: 18409382 NR Description: nitrate transporter (NTL1); protein id:At1g69850
  misc_feature (1)..(559): NCBI GI NO: 17064754 NR Description: nitrate transporter (NTL1) [Arabidopsis thaliana]
  misc_feature (1)..(559): NCBI GI NO: 11358579 NR Description: nitrate transporter NTL1
  misc_feature (283)..(561): NCBI GI NO: 22329803 NR Description: nitrate transporter, putative
  misc_feature (283)..(561): NCBI GI NO: 25403281 NR Description: protein T7N9.10 [imported] - Arabidopsis thaliana
  misc_feature (1)..(250): NCBI GI NO: 22329803 NR Description: nitrate transporter, putative
  misc_feature (1)..(250): NCBI GI NO: 25403281 NR Description: protein T7N9.10 [imported] - Arabidopsis thaliana
  misc_feature (292)..(559): NCBI GI NO: 10177451 NR Description: nitrate transporter NTL1 [Arabidopsis thaliana]
  misc_feature (292)..(559): NCBI GI NO: 15241938 NR Description: nitrate transporter NTL1 - like protein
MAAASFVLVVEVLENLAFLANASNLVTYLMGFMHYSPSQSATAVTNFMGTAFLLALLGGFLSDAFFTTYTIYIASAFIELMGLVILTVQARTQSLMPPQCAKPAAPCEPVSGAKKAMLFAGLYLTALGVGGIKGSLPSHGAEQFDEHAARGRKGRSTFFNYFVFCLSCGALVAVTFAVWVEDNKGWQWGFGISTIAILLSIPLFVAGSSRYRNKVPTGSPLTTIAKVLIAAALARRGCAPSSSNGAVIDRAPSPTGSTDMKEYCKPGDMEEITVSGAAIVASSPAEPSRELAFLNRAVQCQPPRHGRLACTVQEVEDVKIVLMVLPIFLSTIMLNCCLAQLSTFSVEQAATMDTRVGSLTVPPASLPVFPVTFIIILAPVYDHVIVPFARRVTGTEMGITHLQRIGTGLVLSIVAMAVAAVVEVKRKNVASHNGMLDSTKPLPITFFWIAFQYLFLGSADLFTLAGLLEFFFSEAPARMRSLATSLSWASLALGYYLSSVLVSIVNSVTGRGDHRPWLQGASLNHYHLERFYWVMCVLSTINYLFFLFLAVRYKYRNAGVIKG

SEQ ID NO: 30551 - DNA, 1838 bp, Zea mays subsp. mays
  misc_feature (1)..(1838): Ceres Seq. ID no. 12372855
accaacccgacgcaaagccgccggctttccccgatggcgacgacgatgtcagtttcggcggtgtccccgcccgccgcggctgtcacgcggccgcggacgatggtctgcgtgccggcgacggcgcgggcgccgcgggagatggcggcggagctggccgccgccgccgcgctcggcgccgacgtggcggagcttcgcctcgactgcctcgccgggttcacgccgcgcagggacctgcccgtcatcctcgccaagccccgcccgctccccgctctcgtcacctacaggcccaagtgggaaggaggcgaatacgaaggcgatgacgattcacggtttgaggctctgctattagcaatggagctgggagctgaatatgtggatgtcgagcttaaggtggctgacaaatttatgaaacttatttctgggaggaaacctgataactgtaaacttatagtttcatcccacaactatgagaccactccatcgtccgaggaacttgcaaatttggtggctcagattcaagcaacgggggctgatatcgtgaaaatagctacaaccgctactgaaattgttgatgtggcaaaaatgtttcaaatacttgttcactgccaggtgccaatcattgggctgctgatgaacgacagaggttttatttctcgggttctttgcccaaaatatggtggattccttacttttgggtcactcaagaaaggaaaagagtctgcacctgcacagccaactgctgcagacttgataaatctgtacaatattaggcagatagggccagacactaaggtctttggtataattggtaaaccagttggccatagcaaaagcccaattttgcataatgaagctttcagatcagtgggtttcaacgctgtgtatgttccatttttggtggatgacttggctaaatttcttgatacatactcttcaccagactttgctggcttcagttgcacaattccacacaaagaagctgctgttaggtgctgtgacgaggtcgatcccattgccagggacattggagctgttaacacaattgttagaagacctgatggaaagcttgttggctataatactgactatgttggtgctatatctgctattgaggatggaataaaagcatcagaatcagaaccaacagatccagacaaatcaccactggctggaaggctttttgttgttataggggctggtggtgcgggaaaagcactagcatatggggcaaaagagaaaggagcaagagttgtaattgcaaaccgtacctttgcacgagcacaagaacttgccaacttaattggtgggcctgcattgactcttgcggatttggaaaactaccatccagaggaagggatgattcttgcaaatacaacagccattggaatgcatccaaatgtgaatgaaactcctctatctaagcaagcactcagatcttatgctgttgtgtttgatgcggtctacacaccaaaagagaccagacttctccgagaagctgcagaatgtggagccacagttgttagtggtctggagatgtttatacggcaagctatgggccagtttgagcatttcacgggcatgccagtggatgattacaaattccgagcaattgcaagttcattggacaatcctaacaccatgaagcctcgtctgtgagagattcatccatgcccacaaacttccttgtttttcctttttagattcggattcagtgatcagtttgcctctcagccattgtaaattaatttgatgttccgagctgaaacattttggtgtgccttatttgtatcagcatgaacagcagtgggtttgaatcagtctcttcatatttgcgttcc

SEQ ID NO: 30552 - protein, 551 aa, Zea mays subsp. mays
  peptide (1)..(551): Ceres Seq. ID no. 12372856
  misc_feature (281)..(526): Pfam Name: Pfam Description:  Shikimate / quinate 5-dehydrogenase
  misc_feature (94)..(539): NCBI GI NO: 34914824 NR Description: putative 3-dehydroquinate dehydratase
  misc_feature (33)..(95): NCBI GI NO: 34914824 NR Description: putative 3-dehydroquinate dehydratase
  misc_feature (33)..(525): NCBI GI NO: 34914828 NR Description: putative 3-dehydroquinate dehydratase / shikimate5-dehydrogenase
  misc_feature (28)..(528): NCBI GI NO: 15230703 NR Description: dehydroquinate dehydratase/shikimate dehydrogenase
  misc_feature (96)..(540): NCBI GI NO: 7436862 NR Description: 3-dehydroquinate dehydratase (EC 4
  misc_feature (27)..(94): NCBI GI NO: 7436862 NR Description: 3-dehydroquinate dehydratase (EC 4
  misc_feature (27)..(527): NCBI GI NO: 629688 NR Description: 3-dehydroquinate dehydratase (EC 4
  misc_feature (33)..(352): NCBI GI NO: 7488788 NR Description: 3-dehydroquinate dehydratase (EC 4
  misc_feature (264)..(551): NCBI GI NO: 21402380 NR Description: Shikimate_DH, Shikimate / quinate 5-dehydrogenase
  misc_feature (264)..(526): NCBI GI NO: 30022412 NR Description: Shikimate 5-dehydrogenase
TNPTQSRRLSPMATTMSVSAVSPPAAAVTRPRTMVCVPATARAPREMAAELAAAAALGADVAELRLDCLAGFTPRRDLPVILAKPRPLPALVTYRPKWEGGEYEGDDDSRFEALLLAMELGAEYVDVELKVADKFMKLISGRKPDNCKLIVSSHNYETTPSSEELANLVAQIQATGADIVKIATTATEIVDVAKMFQILVHCQVPIIGLLMNDRGFISRVLCPKYGGFLTFGSLKKGKESAPAQPTAADLINLYNIRQIGPDTKVFGIIGKPVGHSKSPILHNEAFRSVGFNAVYVPFLVDDLAKFLDTYSSPDFAGFSCTIPHKEAAVRCCDEVDPIARDIGAVNTIVRRPDGKLVGYNTDYVGAISAIEDGIKASESEPTDPDKSPLAGRLFVVIGAGGAGKALAYGAKEKGARVVIANRTFARAQELANLIGGPALTLADLENYHPEEGMILANTTAIGMHPNVNETPLSKQALRSYAVVFDAVYTPKETRLLREAAECGATVVSGLEMFIRQAMGQFEHFTGMPVDDYKFRAIASSLDNPNTMKPRL

SEQ ID NO: 30553 - protein, 540 aa, Zea mays subsp. mays
  peptide (1)..(540): Ceres Seq. ID no. 12372857
  misc_feature (270)..(515): Pfam Name: Pfam Description:  Shikimate / quinate 5-dehydrogenase
  misc_feature (83)..(528): NCBI GI NO: 34914824 NR Description: putative 3-dehydroquinate dehydratase
  misc_feature (22)..(84): NCBI GI NO: 34914824 NR Description: putative 3-dehydroquinate dehydratase
  misc_feature (22)..(514): NCBI GI NO: 34914828 NR Description: putative 3-dehydroquinate dehydratase / shikimate5-dehydrogenase
  misc_feature (17)..(517): NCBI GI NO: 15230703 NR Description: dehydroquinate dehydratase/shikimate dehydrogenase
  misc_feature (85)..(529): NCBI GI NO: 7436862 NR Description: 3-dehydroquinate dehydratase (EC 4
  misc_feature (16)..(83): NCBI GI NO: 7436862 NR Description: 3-dehydroquinate dehydratase (EC 4
  misc_feature (16)..(516): NCBI GI NO: 629688 NR Description: 3-dehydroquinate dehydratase (EC 4
  misc_feature (22)..(341): NCBI GI NO: 7488788 NR Description: 3-dehydroquinate dehydratase (EC 4
  misc_feature (253)..(540): NCBI GI NO: 21402380 NR Description: Shikimate_DH, Shikimate / quinate 5-dehydrogenase
  misc_feature (253)..(515): NCBI GI NO: 30022412 NR Description: Shikimate 5-dehydrogenase
MATTMSVSAVSPPAAAVTRPRTMVCVPATARAPREMAAELAAAAALGADVAELRLDCLAGFTPRRDLPVILAKPRPLPALVTYRPKWEGGEYEGDDDSRFEALLLAMELGAEYVDVELKVADKFMKLISGRKPDNCKLIVSSHNYETTPSSEELANLVAQIQATGADIVKIATTATEIVDVAKMFQILVHCQVPIIGLLMNDRGFISRVLCPKYGGFLTFGSLKKGKESAPAQPTAADLINLYNIRQIGPDTKVFGIIGKPVGHSKSPILHNEAFRSVGFNAVYVPFLVDDLAKFLDTYSSPDFAGFSCTIPHKEAAVRCCDEVDPIARDIGAVNTIVRRPDGKLVGYNTDYVGAISAIEDGIKASESEPTDPDKSPLAGRLFVVIGAGGAGKALAYGAKEKGARVVIANRTFARAQELANLIGGPALTLADLENYHPEEGMILANTTAIGMHPNVNETPLSKQALRSYAVVFDAVYTPKETRLLREAAECGATVVSGLEMFIRQAMGQFEHFTGMPVDDYKFRAIASSLDNPNTMKPRL

SEQ ID NO: 30554 - protein, 536 aa, Zea mays subsp. mays
  peptide (1)..(536): Ceres Seq. ID no. 12372858
  misc_feature (266)..(511): Pfam Name: Pfam Description:  Shikimate / quinate 5-dehydrogenase
  misc_feature (79)..(524): NCBI GI NO: 34914824 NR Description: putative 3-dehydroquinate dehydratase
  misc_feature (18)..(80): NCBI GI NO: 34914824 NR Description: putative 3-dehydroquinate dehydratase
  misc_feature (18)..(510): NCBI GI NO: 34914828 NR Description: putative 3-dehydroquinate dehydratase / shikimate5-dehydrogenase
  misc_feature (13)..(513): NCBI GI NO: 15230703 NR Description: dehydroquinate dehydratase/shikimate dehydrogenase
  misc_feature (81)..(525): NCBI GI NO: 7436862 NR Description: 3-dehydroquinate dehydratase (EC 4
  misc_feature (12)..(79): NCBI GI NO: 7436862 NR Description: 3-dehydroquinate dehydratase (EC 4
  misc_feature (12)..(512): NCBI GI NO: 629688 NR Description: 3-dehydroquinate dehydratase (EC 4
  misc_feature (18)..(337): NCBI GI NO: 7488788 NR Description: 3-dehydroquinate dehydratase (EC 4
  misc_feature (249)..(536): NCBI GI NO: 21402380 NR Description: Shikimate_DH, Shikimate / quinate 5-dehydrogenase
  misc_feature (249)..(511): NCBI GI NO: 30022412 NR Description: Shikimate 5-dehydrogenase
MSVSAVSPPAAAVTRPRTMVCVPATARAPREMAAELAAAAALGADVAELRLDCLAGFTPRRDLPVILAKPRPLPALVTYRPKWEGGEYEGDDDSRFEALLLAMELGAEYVDVELKVADKFMKLISGRKPDNCKLIVSSHNYETTPSSEELANLVAQIQATGADIVKIATTATEIVDVAKMFQILVHCQVPIIGLLMNDRGFISRVLCPKYGGFLTFGSLKKGKESAPAQPTAADLINLYNIRQIGPDTKVFGIIGKPVGHSKSPILHNEAFRSVGFNAVYVPFLVDDLAKFLDTYSSPDFAGFSCTIPHKEAAVRCCDEVDPIARDIGAVNTIVRRPDGKLVGYNTDYVGAISAIEDGIKASESEPTDPDKSPLAGRLFVVIGAGGAGKALAYGAKEKGARVVIANRTFARAQELANLIGGPALTLADLENYHPEEGMILANTTAIGMHPNVNETPLSKQALRSYAVVFDAVYTPKETRLLREAAECGATVVSGLEMFIRQAMGQFEHFTGMPVDDYKFRAIASSLDNPNTMKPRL

SEQ ID NO: 30555 - DNA, 1266 bp, Zea mays subsp. mays
  misc_feature (1)..(1266): Ceres Seq. ID no. 12358430
gtcaaagcagagtctgcccctccccgcgccgttctttttggttccccactccccagtccccgccgccgccgaaacccgcagatggaggtcgtcgtcgccgcgaagcagaaggcgaagaaacacatacacctcttctactgctcagaatgcgaggagctcgcccttaagatcgccgccagctccgacgccatcgagctccaatccatcaactggcggagcttcgacgacgggttcccgaacctgttcatcaacaaggcgcacgacatccgtgggcagcacgtggcgttcctggcctccttcagctcgccgtcggtcatattcgagcagatctccgtcatcttcgcgctgcccaagctattcattgcctcattcactctcgtgctgcctttcttccccacgggctcattcgagcgcgttgaggaggagggcgatgtcgccaccgcgttcaccctcgcgcgcattctctcgatgatccccaagtcgcgcggcgggcctaccagcgtcgtcatctacgacatccacgcgctccaggagaggttctacttcggggacgacgtcctgccatgcttcgagacagggatcccgctcctgctgcagcgcctccgccagctcccggacgcagaaaatatcaccattgcctttccagatgacggtgcgtggaagcggttccacaagctgttacagcactttccaatgatagtctgtaacaaggttcgggaaggtgacaagagaatagttcgtataaaggaaggactacctgaaggccgtcatgttgttattgttgatgatttagtgcaatctgggggaactcttagagaatgccagaaagttctagctttgcatggcgctgcaaaagtcagtgcttatgtgactcatgctgtgtttcctaagcagtcatatgaacgtttcatggcgtctagttctgctgggccaggtgacagatttgcttacttctggatcacggactcatgcccacacacagtaaaagctattgggcaaagacctccatttgaggttctgagcctcgctggctcaattgcagatgctcttcagatatgagcgtacactggtagatgggcatgggcttggattgttgatgcccaccagattgaaacttgtactatgaggtggaatgctcccgcttttcctaaatgtaagagttggtttccagttcctggaaaagcaaataatgtgtagtaagttaagtacctgaaggttccataaacagccctgtggtttgtaataaaatcaggcattggatactcg

SEQ ID NO: 30556 - protein, 352 aa, Zea mays subsp. mays
  peptide (1)..(352): Ceres Seq. ID no. 12358431
  misc_feature (28)..(352): NCBI GI NO: 22671730 NR Description: phosphoribosyl pyrophosphate synthetase
  misc_feature (29)..(352): NCBI GI NO: 15228027 NR Description: putative ribose phosphate pyrophosphokinase
  misc_feature (40)..(352): NCBI GI NO: 4902879 NR Description: phosphoribosyl pyrophosphate synthase isozyme 4
  misc_feature (38)..(352): NCBI GI NO: 34910736 NR Description: putative phosphoribosyl pyrophosphate synthase
  misc_feature (20)..(352): NCBI GI NO: 4902877 NR Description: phosphoribosyl pyrophosphate synthase isozyme 3
  misc_feature (37)..(352): NCBI GI NO: 15220191 NR Description: phosphoribosyl diphosphate synthase
  misc_feature (37)..(352): NCBI GI NO: 25529012 NR Description: ribose-phosphate diphosphokinase (EC 2
  misc_feature (37)..(352): NCBI GI NO: 25402614 NR Description: hypothetical protein
  misc_feature (37)..(210): NCBI GI NO: 6573738 NR Description: F20B24.13 [Arabidopsis thaliana]
  misc_feature (210)..(303): NCBI GI NO: 6573738 NR Description: F20B24.13 [Arabidopsis thaliana]
VKAESAPPRAVLFGSPLPSPRRRRNPQMEVVVAAKQKAKKHIHLFYCSECEELALKIAASSDAIELQSINWRSFDDGFPNLFINKAHDIRGQHVAFLASFSSPSVIFEQISVIFALPKLFIASFTLVLPFFPTGSFERVEEEGDVATAFTLARILSMIPKSRGGPTSVVIYDIHALQERFYFGDDVLPCFETGIPLLLQRLRQLPDAENITIAFPDDGAWKRFHKLLQHFPMIVCNKVREGDKRIVRIKEGLPEGRHVVIVDDLVQSGGTLRECQKVLALHGAAKVSAYVTHAVFPKQSYERFMASSSAGPGDRFAYFWITDSCPHTVKAIGQRPPFEVLSLAGSIADALQI

SEQ ID NO: 30557 - protein, 325 aa, Zea mays subsp. mays
  peptide (1)..(325): Ceres Seq. ID no. 12358432
  misc_feature (1)..(325): NCBI GI NO: 22671730 NR Description: phosphoribosyl pyrophosphate synthetase
  misc_feature (2)..(325): NCBI GI NO: 15228027 NR Description: putative ribose phosphate pyrophosphokinase
  misc_feature (13)..(325): NCBI GI NO: 4902879 NR Description: phosphoribosyl pyrophosphate synthase isozyme 4
  misc_feature (11)..(325): NCBI GI NO: 34910736 NR Description: putative phosphoribosyl pyrophosphate synthase
  misc_feature (1)..(325): NCBI GI NO: 4902877 NR Description: phosphoribosyl pyrophosphate synthase isozyme 3
  misc_feature (10)..(325): NCBI GI NO: 15220191 NR Description: phosphoribosyl diphosphate synthase
  misc_feature (10)..(325): NCBI GI NO: 25529012 NR Description: ribose-phosphate diphosphokinase (EC 2
  misc_feature (10)..(325): NCBI GI NO: 25402614 NR Description: hypothetical protein
  misc_feature (10)..(183): NCBI GI NO: 6573738 NR Description: F20B24.13 [Arabidopsis thaliana]
  misc_feature (183)..(276): NCBI GI NO: 6573738 NR Description: F20B24.13 [Arabidopsis thaliana]
MEVVVAAKQKAKKHIHLFYCSECEELALKIAASSDAIELQSINWRSFDDGFPNLFINKAHDIRGQHVAFLASFSSPSVIFEQISVIFALPKLFIASFTLVLPFFPTGSFERVEEEGDVATAFTLARILSMIPKSRGGPTSVVIYDIHALQERFYFGDDVLPCFETGIPLLLQRLRQLPDAENITIAFPDDGAWKRFHKLLQHFPMIVCNKVREGDKRIVRIKEGLPEGRHVVIVDDLVQSGGTLRECQKVLALHGAAKVSAYVTHAVFPKQSYERFMASSSAGPGDRFAYFWITDSCPHTVKAIGQRPPFEVLSLAGSIADALQI

SEQ ID NO: 30558 - protein, 196 aa, Zea mays subsp. mays
  peptide (1)..(196): Ceres Seq. ID no. 12358433
  misc_feature (1)..(196): NCBI GI NO: 22671730 NR Description: phosphoribosyl pyrophosphate synthetase
  misc_feature (1)..(196): NCBI GI NO: 15228027 NR Description: putative ribose phosphate pyrophosphokinase
  misc_feature (1)..(196): NCBI GI NO: 4902879 NR Description: phosphoribosyl pyrophosphate synthase isozyme 4
  misc_feature (1)..(196): NCBI GI NO: 34910736 NR Description: putative phosphoribosyl pyrophosphate synthase
  misc_feature (1)..(196): NCBI GI NO: 4902877 NR Description: phosphoribosyl pyrophosphate synthase isozyme 3
  misc_feature (1)..(196): NCBI GI NO: 15220191 NR Description: phosphoribosyl diphosphate synthase
  misc_feature (1)..(196): NCBI GI NO: 25529012 NR Description: ribose-phosphate diphosphokinase (EC 2
  misc_feature (1)..(196): NCBI GI NO: 25402614 NR Description: hypothetical protein
  misc_feature (1)..(54): NCBI GI NO: 6573738 NR Description: F20B24.13 [Arabidopsis thaliana]
  misc_feature (54)..(147): NCBI GI NO: 6573738 NR Description: F20B24.13 [Arabidopsis thaliana]
MIPKSRGGPTSVVIYDIHALQERFYFGDDVLPCFETGIPLLLQRLRQLPDAENITIAFPDDGAWKRFHKLLQHFPMIVCNKVREGDKRIVRIKEGLPEGRHVVIVDDLVQSGGTLRECQKVLALHGAAKVSAYVTHAVFPKQSYERFMASSSAGPGDRFAYFWITDSCPHTVKAIGQRPPFEVLSLAGSIADALQI

SEQ ID NO: 30559 - DNA, 1095 bp, Zea mays subsp. mays
  misc_feature (1)..(1095): Ceres Seq. ID no. 12386489
gcactctttccccttcccttcccttcccactcccaggctcccactctcaccccttccgcctacccacgcaaacggcacacgaactaacagccacctctcacgtcccccaccctctggttcatgtcctgctgctccccatgtcgcctccactcgagctcgactacataggcctctcgccgccggcggcagccgccgccgctgaaaacgacgaactgaagggtactgagctccgcctcgggctgccagggtccgggtcgccggaccgccgtgtcgtggctgccaccgcgaccaccctggacctgctcccggccaagggcgccaagcgcgggttttctgacgaggcgcccccgccatcgcctgttgccgctgccggaaagggaaagaaggtggcagaagaggagtacgacgagaagaaggtggcagcgaccccgcagccggccgccaaagcacaagtggtgggatggccaccagtctgcaactaccgcaagaacacgatgactgccacccagctgaagggcagcaaggaggatggtgatgccaagcagggtcaggggttcctgtacgtcaaggtcagcatggatggcgcgccgtacctcaggaagatcgacctcaagacttacaagaactacaaggacctgtcgaccgcgcttgagaagatgttcagtggcttcagtactggcaaggacggctcatctgagtaccgcaaggatggtgaatatgttctgacttacgaggacaaggatggagattggatgcttgtcggcgacgtaccatgggactgccacatcgtctttcgctccaattgtaggatgttcgccggctcctgccgcaggctcaggatcatgaaaggctcagatgcgattggactcgctccaagggcagccgataagtccaagaaccgcaactagaacggtggcttcctatccttacacagtccggtacgagggaggagatgcagtgacttgtagggatctttacgaaaaccgaaaaagtctactaacagctatgacttgtgagaagaattctggcttatggtattggtctgcactagaatggcttggtacatcgtctatggacaaaacacgctattcgatt

SEQ ID NO: 30560 - protein, 301 aa, Zea mays subsp. mays
  peptide (1)..(301): Ceres Seq. ID no. 12386490
  misc_feature (70)..(293): Pfam Name: Pfam Description:  AUX/IAA family
  misc_feature (19)..(301): NCBI GI NO: 34904314 NR Description: unnamed protein product
  misc_feature (46)..(297): NCBI GI NO: 34911088 NR Description: OJ1117_G01.11
  misc_feature (145)..(301): NCBI GI NO: 20257219 NR Description: auxin-regulated protein [Zinnia elegans]
  misc_feature (51)..(138): NCBI GI NO: 20257219 NR Description: auxin-regulated protein [Zinnia elegans]
  misc_feature (136)..(301): NCBI GI NO: 15235556 NR Description: phytochrome-associated protein PAP2
  misc_feature (44)..(112): NCBI GI NO: 15235556 NR Description: phytochrome-associated protein PAP2
  misc_feature (145)..(301): NCBI GI NO: 20269051 NR Description: aux/IAA protein
  misc_feature (51)..(88): NCBI GI NO: 20269051 NR Description: aux/IAA protein
  misc_feature (73)..(301): NCBI GI NO: 30962267 NR Description: Aux/IAA protein
  misc_feature (73)..(301): NCBI GI NO: 17154533 NR Description: putative IAA1 protein
TLSPSLPFPLPGSHSHPFRLPTQTAHELTATSHVPHPLVHVLLLPMSPPLELDYIGLSPPAAAAAAENDELKGTELRLGLPGSGSPDRRVVAATATTLDLLPAKGAKRGFSDEAPPPSPVAAAGKGKKVAEEEYDEKKVAATPQPAAKAQVVGWPPVCNYRKNTMTATQLKGSKEDGDAKQGQGFLYVKVSMDGAPYLRKIDLKTYKNYKDLSTALEKMFSGFSTGKDGSSEYRKDGEYVLTYEDKDGDWMLVGDVPWDCHIVFRSNCRMFAGSCRRLRIMKGSDAIGLAPRAADKSKNRN

SEQ ID NO: 30561 - protein, 256 aa, Zea mays subsp. mays
  peptide (1)..(256): Ceres Seq. ID no. 12386491
  misc_feature (25)..(248): Pfam Name: Pfam Description:  AUX/IAA family
  misc_feature (1)..(256): NCBI GI NO: 34904314 NR Description: unnamed protein product
  misc_feature (1)..(252): NCBI GI NO: 34911088 NR Description: OJ1117_G01.11
  misc_feature (100)..(256): NCBI GI NO: 20257219 NR Description: auxin-regulated protein [Zinnia elegans]
  misc_feature (6)..(93): NCBI GI NO: 20257219 NR Description: auxin-regulated protein [Zinnia elegans]
  misc_feature (91)..(256): NCBI GI NO: 15235556 NR Description: phytochrome-associated protein PAP2
  misc_feature (1)..(67): NCBI GI NO: 15235556 NR Description: phytochrome-associated protein PAP2
  misc_feature (100)..(256): NCBI GI NO: 20269051 NR Description: aux/IAA protein
  misc_feature (6)..(43): NCBI GI NO: 20269051 NR Description: aux/IAA protein
  misc_feature (28)..(256): NCBI GI NO: 30962267 NR Description: Aux/IAA protein
  misc_feature (28)..(256): NCBI GI NO: 17154533 NR Description: putative IAA1 protein
MSPPLELDYIGLSPPAAAAAAENDELKGTELRLGLPGSGSPDRRVVAATATTLDLLPAKGAKRGFSDEAPPPSPVAAAGKGKKVAEEEYDEKKVAATPQPAAKAQVVGWPPVCNYRKNTMTATQLKGSKEDGDAKQGQGFLYVKVSMDGAPYLRKIDLKTYKNYKDLSTALEKMFSGFSTGKDGSSEYRKDGEYVLTYEDKDGDWMLVGDVPWDCHIVFRSNCRMFAGSCRRLRIMKGSDAIGLAPRAADKSKNRN

SEQ ID NO: 30562 - DNA, 1763 bp, Zea mays subsp. mays; identical to SEQ ID NO: 23952
  misc_feature (1)..(1763): Ceres Seq. ID no. 12410839

SEQ ID NO: 30563 - protein, 401 aa, Zea mays subsp. mays; identical to SEQ ID NO: 23953
  peptide (1)..(401): Ceres Seq. ID no. 12410840
  misc_feature (94)..(387): Pfam Name: DUF707 Pfam Description: Protein of unknown function
  misc_feature (1)..(401): NCBI GI NO: 14719314 NR Description: putative protein [Oryza sativa]
  misc_feature (45)..(401): NCBI GI NO: 34905994 NR Description: P0518C01.8
  misc_feature (1)..(397): NCBI GI NO: 34906848 NR Description: P0470A12.1
  misc_feature (10)..(399): NCBI GI NO: 18408876 NR Description: F12A21
  misc_feature (13)..(387): NCBI GI NO: 18390845 NR Description: storage protein, putative; protein id: At1g08040
  misc_feature (12)..(389): NCBI GI NO: 22331371 NR Description: unknown protein; protein id: At3g27470
  misc_feature (93)..(387): NCBI GI NO: 25407018 NR Description: protein T6D22.12 [imported] - Arabidopsis thaliana
  misc_feature (1)..(48): NCBI GI NO: 25407018 NR Description: protein T6D22.12 [imported] - Arabidopsis thaliana
  misc_feature (15)..(389): NCBI GI NO: 22329525 NR Description: unknown protein; protein id: At1g13000
  misc_feature (85)..(292): NCBI GI NO: 7939519 NR Description: gb|AAD31054

SEQ ID NO: 30564 - protein, 391 aa, Zea mays subsp. mays; identical to SEQ ID NO: 23954
  peptide (1)..(391): Ceres Seq. ID no. 12410841
  misc_feature (84)..(377): Pfam Name: DUF707 Pfam Description: Protein of unknown function
  misc_feature (1)..(391): NCBI GI NO: 14719314 NR Description: putative protein [Oryza sativa]
  misc_feature (35)..(391): NCBI GI NO: 34905994 NR Description: P0518C01.8
  misc_feature (1)..(387): NCBI GI NO: 34906848 NR Description: P0470A12.1
  misc_feature (1)..(389): NCBI GI NO: 18408876 NR Description: F12A21
  misc_feature (3)..(377): NCBI GI NO: 18390845 NR Description: storage protein, putative; protein id: At1g08040
  misc_feature (2)..(379): NCBI GI NO: 22331371 NR Description: unknown protein; protein id: At3g27470
  misc_feature (83)..(377): NCBI GI NO: 25407018 NR Description: protein T6D22.12 [imported] - Arabidopsis thaliana
  misc_feature (1)..(38): NCBI GI NO: 25407018 NR Description: protein T6D22.12 [imported] - Arabidopsis thaliana
  misc_feature (5)..(379): NCBI GI NO: 22329525 NR Description: unknown protein; protein id: At1g13000
  misc_feature (75)..(282): NCBI GI NO: 7939519 NR Description: gb|AAD31054

SEQ ID NO: 30565 - protein, 383 aa, Zea mays subsp. mays; identical to SEQ ID NO: 23955
  peptide (1)..(383): Ceres Seq. ID no. 12410842
  misc_feature (76)..(369): Pfam Name: DUF707 Pfam Description: Protein of unknown function
  misc_feature (1)..(383): NCBI GI NO: 14719314 NR Description: putative protein [Oryza sativa]
  misc_feature (27)..(383): NCBI GI NO: 34905994 NR Description: P0518C01.8
  misc_feature (1)..(379): NCBI GI NO: 34906848 NR Description: P0470A12.1
  misc_feature (1)..(381): NCBI GI NO: 18408876 NR Description: F12A21
  misc_feature (1)..(369): NCBI GI NO: 18390845 NR Description: storage protein, putative; protein id: At1g08040
  misc_feature (1)..(371): NCBI GI NO: 22331371 NR Description: unknown protein; protein id: At3g27470
  misc_feature (75)..(369): NCBI GI NO: 25407018 NR Description: protein T6D22.12 [imported] - Arabidopsis thaliana
  misc_feature (1)..(30): NCBI GI NO: 25407018 NR Description: protein T6D22.12 [imported] - Arabidopsis thaliana
  misc_feature (1)..(371): NCBI GI NO: 22329525 NR Description: unknown protein; protein id: At1g13000
  misc_feature (67)..(274): NCBI GI NO: 7939519 NR Description: gb|AAD31054

SEQ ID NO: 30566 - DNA, 766 bp, Zea mays subsp. mays
  misc_feature (1)..(766): Ceres Seq. ID no. 12346859
acccaacaccccagtatcctgatgcggcttagcgcaccgaggtagaccgagcgagacagccagccagcggggcaagctgaaaaacctatcttctatcaccacctcggagcccgagtggaaggggaaggcaggaatcgccccgcacgcgcccccatccgcctgccggcgacggcccacatgccgaccgcctacagcctccgcgcgccgccctccaccgcgcagcagcgcctcaggctgcccccgccaccgctgccgctttgcccggcgggtggaggggccgcccgccggaggagggttgtcggggtagcgtccgcgtccgcgtcgcccttcgacgagctgtacgcgcgggggaggcccgcacatggaccctccaagaaatccatgctctggaacttgatccaggacatagagcctctggaccttagtgtcattcagaaagatgttgctcctgaaacggtagatgcaatgaagaggactatttcgggcatgttgggtctgcttccatctgatcagttccgtgtcattgtagaagctctttggaatcccttcttcaagttattggtatcttcaattatgactgggtatactctgcgaaatgctgaatacaggctttcttttgaaagaaatcttggactgtctgaagaagttgcagaatgcccaaaaagtgatgtcattgaagataatcatcatgacatcaatttgggtacacctgtcactatttttagattagcagaagaagacatgccccaggaccctgcggcacgag

SEQ ID NO: 30567 - protein, 196 aa, Zea mays subsp. mays
  peptide (1)..(196): Ceres Seq. ID no. 12346860
  misc_feature (2)..(192): NCBI GI NO: 40538958 NR Description: expressed protein
  misc_feature (49)..(164): NCBI GI NO: 6648962 NR Description: seed maturation protein PM23 [Glycine max]
  misc_feature (3)..(154): NCBI GI NO: 15226027 NR Description: unknown protein; protein id: At2g14910
  misc_feature (18)..(169): NCBI GI NO: 15242177 NR Description: seed maturation -like protein
  misc_feature (18)..(169): NCBI GI NO: 21536629 NR Description: seed maturation-like protein
  misc_feature (68)..(155): NCBI GI NO: 23040368 NR Description: hypothetical protein
  misc_feature (1)..(158): NCBI GI NO: 6633836 NR Description: F2K11.3 [Arabidopsis thaliana]
  misc_feature (64)..(149): NCBI GI NO: 16330948 NR Description: hypothetical protein [Synechocystis sp. PCC 6803]
  misc_feature (68)..(148): NCBI GI NO: 17231303 NR Description: hypothetical protein [Nostoc sp. PCC 7120]
  misc_feature (65)..(161): NCBI GI NO: 33240506 NR Description: Uncharacterized protein
MPTAYSLRAPPSTAQQRLRLPPPPLPLCPAGGGAARRRRVVGVASASASPFDELYARGRPAHGPSKKSMLWNLIQDIEPLDLSVIQKDVAPETVDAMKRTISGMLGLLPSDQFRVIVEALWNPFFKLLVSSIMTGYTLRNAEYRLSFERNLGLSEEVAECPKSDVIEDNHHDINLGTPVTIFRLAEEDMPQDPAAR

SEQ ID NO: 30568 - protein, 128 aa, Zea mays subsp. mays
  peptide (1)..(128): Ceres Seq. ID no. 12346861
  misc_feature (1)..(124): NCBI GI NO: 40538958 NR Description: expressed protein
  misc_feature (1)..(96): NCBI GI NO: 6648962 NR Description: seed maturation protein PM23 [Glycine max]
  misc_feature (1)..(86): NCBI GI NO: 15226027 NR Description: unknown protein; protein id: At2g14910
  misc_feature (1)..(101): NCBI GI NO: 15242177 NR Description: seed maturation -like protein
  misc_feature (1)..(101): NCBI GI NO: 21536629 NR Description: seed maturation-like protein
  misc_feature (1)..(87): NCBI GI NO: 23040368 NR Description: hypothetical protein
  misc_feature (1)..(90): NCBI GI NO: 6633836 NR Description: F2K11.3 [Arabidopsis thaliana]
  misc_feature (1)..(81): NCBI GI NO: 16330948 NR Description: hypothetical protein [Synechocystis sp. PCC 6803]
  misc_feature (1)..(80): NCBI GI NO: 17231303 NR Description: hypothetical protein [Nostoc sp. PCC 7120]
  misc_feature (1)..(93): NCBI GI NO: 33240506 NR Description: Uncharacterized protein
MLWNLIQDIEPLDLSVIQKDVAPETVDAMKRTISGMLGLLPSDQFRVIVEALWNPFFKLLVSSIMTGYTLRNAEYRLSFERNLGLSEEVAECPKSDVIEDNHHDINLGTPVTIFRLAEEDMPQDPAAR

SEQ ID NO: 30569 - protein, 100 aa, Zea mays subsp. mays
  peptide (1)..(100): Ceres Seq. ID no. 12346862
  misc_feature (1)..(96): NCBI GI NO: 40538958 NR Description: expressed protein
  misc_feature (1)..(68): NCBI GI NO: 6648962 NR Description: seed maturation protein PM23 [Glycine max]
  misc_feature (1)..(58): NCBI GI NO: 15226027 NR Description: unknown protein; protein id: At2g14910
  misc_feature (1)..(73): NCBI GI NO: 15242177 NR Description: seed maturation -like protein
  misc_feature (1)..(73): NCBI GI NO: 21536629 NR Description: seed maturation-like protein
  misc_feature (1)..(59): NCBI GI NO: 23040368 NR Description: hypothetical protein
  misc_feature (1)..(62): NCBI GI NO: 6633836 NR Description: F2K11.3 [Arabidopsis thaliana]
  misc_feature (1)..(53): NCBI GI NO: 16330948 NR Description: hypothetical protein [Synechocystis sp. PCC 6803]
  misc_feature (1)..(52): NCBI GI NO: 17231303 NR Description: hypothetical protein [Nostoc sp. PCC 7120]
  misc_feature (1)..(65): NCBI GI NO: 33240506 NR Description: Uncharacterized protein
MKRTISGMLGLLPSDQFRVIVEALWNPFFKLLVSSIMTGYTLRNAEYRLSFERNLGLSEEVAECPKSDVIEDNHHDINLGTPVTIFRLAEEDMPQDPAAR

SEQ ID NO: 30570 - DNA, 751 bp, Zea mays subsp. mays
  misc_feature (1)..(751): Ceres Seq. ID no. 12403104
  misc_feature (513)..(513): n is a, c, t, g, unknown, or other
  misc_feature (501)..(501): n is a, c, t, g, unknown, or other
acagccccgactgggctatattcgttctcccggcgtgctccgtctctcctctcagcgcgacgattacggtaacgccgtcgccgccctacggctcagatcttcgtcgtcatcttctccggcaacgagcacccaaagatggtggtccttcaaccagatcggttcctgagcgagctgacgagcatgtacgagcggagcacgggagaagggctccgtctgggtcaccatgaagcgatcaactctcaagggcaaggcacagttgcggaagatggagaataaggggcaggaggtagagcacaggtgcctcgtccgcgcctccaatggcaagaagaacatctccacctcggtttctctaaaggagtacacaaagtttcaagcttcatacgcaacagttcttaaggcccatatgcatgctctgaagaaaagggagaggaaagacaagaagaagactgcagatgctgagaaggcaattgagaccgcacccaagaagcagaagaaagcatnttcaaagaaatnttcagggtccaagtcataaggcgctcacagaactcagtgtgtcttctcctttatgttgtttaccgccagactaattagagtgtcgtgaagttttacttatctggtttttattcgaattcgtgtctggaagatgaaagcctgtgaatacacctttatagagccgtgtcatcgatgctaacattttttgaagcagagttttgaggtgaatgtgaggcgctgtgctgccctgattggcatt

SEQ ID NO: 30571 - protein, 102 aa, Zea mays subsp. mays
  peptide (1)..(102): Ceres Seq. ID no. 12403105
  misc_feature (1)..(64): Pfam Name: Pfam Description:  Signal recognition particle 14kD protein
  misc_feature (1)..(102): NCBI GI NO: 6094345 NR Description: SIGNAL RECOGNITION PARTICLE 14 KD PROTEIN (SRP14)
  misc_feature (1)..(91): NCBI GI NO: 6175053 NR Description: Signal recognition particle 14 kDa protein (SRP14)
  misc_feature (1)..(91): NCBI GI NO: 15224325 NR Description: putative signal recognition particle protein 14kD
  misc_feature (1)..(86): NCBI GI NO: 1082198 NR Description: Alu RNA-binding protein - human
  misc_feature (1)..(79): NCBI GI NO: 5107800 NR Description: Signal Recognition Particle Alu Rna BindingHeterodimer
  misc_feature (1)..(79): NCBI GI NO: 6678133 NR Description: signal recognition particle
  misc_feature (1)..(75): NCBI GI NO: 11513833 NR Description: Chain B
  misc_feature (1)..(79): NCBI GI NO: 2507409 NR Description: SIGNAL RECOGNITION PARTICLE 14 KD PROTEIN (SRP14)
  misc_feature (1)..(84): NCBI GI NO: 34877748 NR Description: similar to Chain
  misc_feature (1)..(74): NCBI GI NO: 37543970 NR Description: similar to signal recognition particle 14kD
  misc_feature (93)..(93): Xaa is any aa, unknown or other
  misc_feature (97)..(97): Xaa is any aa, unknown or other
MKRSTLKGKAQLRKMENKGQEVEHRCLVRASNGKKNISTSVSLKEYTKFQASYATVLKAHMHALKKRERKDKKKTADAEKAIETAPKKQKKAXSKKXSGSKS

SEQ ID NO: 30572 - protein, 88 aa, Zea mays subsp. mays
  peptide (1)..(88): Ceres Seq. ID no. 12403106
  misc_feature (1)..(88): NCBI GI NO: 6094345 NR Description: SIGNAL RECOGNITION PARTICLE 14 KD PROTEIN (SRP14)
  misc_feature (1)..(77): NCBI GI NO: 6175053 NR Description: Signal recognition particle 14 kDa protein (SRP14)
  misc_feature (1)..(77): NCBI GI NO: 15224325 NR Description: putative signal recognition particle protein 14kD
  misc_feature (1)..(72): NCBI GI NO: 1082198 NR Description: Alu RNA-binding protein - human
  misc_feature (1)..(65): NCBI GI NO: 5107800 NR Description: Signal Recognition Particle Alu Rna BindingHeterodimer
  misc_feature (1)..(65): NCBI GI NO: 6678133 NR Description: signal recognition particle
  misc_feature (1)..(61): NCBI GI NO: 11513833 NR Description: Chain B
  misc_feature (1)..(65): NCBI GI NO: 2507409 NR Description: SIGNAL RECOGNITION PARTICLE 14 KD PROTEIN (SRP14)
  misc_feature (1)..(70): NCBI GI NO: 34877748 NR Description: similar to Chain
  misc_feature (1)..(60): NCBI GI NO: 37543970 NR Description: similar to signal recognition particle 14kD
  misc_feature (79)..(79): Xaa is any aa, unknown or other
  misc_feature (83)..(83): Xaa is any aa, unknown or other
MENKGQEVEHRCLVRASNGKKNISTSVSLKEYTKFQASYATVLKAHMHALKKRERKDKKKTADAEKAIETAPKKQKKAXSKKXSGSKS

SEQ ID NO: 30573 - protein, 74 aa, Zea mays subsp. mays
  peptide (1)..(74): Ceres Seq. ID no. 12403107
SPDWAIFVLPACSVSPLSATITVTPSPPYGSDLRRHLLRQRAPKDGGPSTRSVPERADEHVRAEHGRRAPSGSP

SEQ ID NO: 30574 - DNA, 988 bp, Zea mays subsp. mays
  misc_feature (1)..(988): Ceres Seq. ID no. 12349284
gacaagctcccccaaaatctccactctcggagtgagctccccaccaccacctccgtccccaaatgtcccgtcaccatcaccacgccgccgccatcgctgctgccgtgctcttcctcctcacagcgcctccttgcgccgccgaccctaacgacgagcgttgcctgactcacctccaccagtccctctccgattcctccggaaggctcaactggaccaaggcggcgatctcggcgccgtgcgacggcttcttctcgcacctccaaggcgtgacctgcaacaacgggcgcgtgtacaagctagccctcccggatctctcgcttgggggcaccgtcccgccggagctctccaactgcaccaacctccagtcgctggacctgtccgcgaacgcgctgtccggcgccataccgacggagctctccgcgctgctgaacctcgccgtgctcaacctctccgcgaacgcgctctctggcgccatcccgcgggagctcgctagctgcgcctacctcaacgtcatagatctccatggcaaccagctgtccggccccatccccgaggaactcggcctcctcgtccggctctcgaccttcgacgtctcctacaaccgcctctctggccccatccccgtgctcctcgccaaccgctccggcgccggcacggcagccgtcgggacggcgaggttcaacgccagctccttcgtagggaacaagggcttgtacgggtacccgctgccgccgatgcggacgcgggggctctccgtgctcgccatcgttggcatcggccttggcagcgggctgctcagccttgtgctcagcttctccgccgtgtgtctgtggctccgcgccacggaccggcggactcccaccaccactggcgaggagggcaagatctcccagctcatgccgaactactgaatccatcaaaggttgcatctttggacatataattcctcgtaattgaactaaacacgagatttttcagctgggcttgg

SEQ ID NO: 30575 - protein, 282 aa, Zea mays subsp. mays
  peptide (1)..(282): Ceres Seq. ID no. 12349285
  misc_feature (7)..(282): NCBI GI NO: 15229606 NR Description: leucine rich repeat protein family
  misc_feature (27)..(282): NCBI GI NO: 7486525 NR Description: hypothetical protein F6H11
  misc_feature (27)..(282): NCBI GI NO: 21553823 NR Description: unknown [Arabidopsis thaliana]
  misc_feature (27)..(282): NCBI GI NO: 15239162 NR Description: leucine rich repeat protein family
  misc_feature (15)..(278): NCBI GI NO: 15233004 NR Description: leucine-rich repeat transmembrane protein kinase
  misc_feature (18)..(263): NCBI GI NO: 38344230 NR Description: OJ991113_30.7
  misc_feature (15)..(228): NCBI GI NO: 34907548 NR Description: B1078G07.14
  misc_feature (29)..(249): NCBI GI NO: 15223445 NR Description: leucine-rich repeat transmembrane protein kinase
  misc_feature (8)..(188): NCBI GI NO: 34896972 NR Description: putative leucine-rich repeat protein
  misc_feature (14)..(270): NCBI GI NO: 15222519 NR Description: leucine-rich repeat transmembrane protein kinase
MSRHHHHAAAIAAAVLFLLTAPPCAADPNDERCLTHLHQSLSDSSGRLNWTKAAISAPCDGFFSHLQGVTCNNGRVYKLALPDLSLGGTVPPELSNCTNLQSLDLSANALSGAIPTELSALLNLAVLNLSANALSGAIPRELASCAYLNVIDLHGNQLSGPIPEELGLLVRLSTFDVSYNRLSGPIPVLLANRSGAGTAAVGTARFNASSFVGNKGLYGYPLPPMRTRGLSVLAIVGIGLGSGLLSLVLSFSAVCLWLRATDRRTPTTTGEEGKISQLMPNY

SEQ ID NO: 30576 - DNA, 509 bp, Zea mays subsp. mays
  misc_feature (1)..(509): Ceres Seq. ID no. 13635129
  misc_feature (370)..(370): n is a, c, t, g, unknown, or other
  misc_feature (376)..(376): n is a, c, t, g, unknown, or other
aatatccattccaccttggtccatcagcagcgagcgaacaggcaaaaaggaaaggccgagaagcgctttatccggccgtacgtagcgataagagtggtgcacccgtagcggcacggcatggcggccacggcgtactccgtggcgctcctcggcggcgcacgctgccggccgccttcctccctcgacgcagcagcgtgtgccaccaccagcttcgcctccaagacgcaccgaggctgatctccctgcaccgtgccagggccgcttccgaggacacgtcggcctccggcggcgacgagctcatcgaagacctcaaggcaaagtgggacgccgttgaggacaagcccaccgtcctcctgtacggcggcggcgntccgtncgcgctatggttgacgtccgttgtcgtcggcgccatcaacgccgtgccgctgctccccaagatcctggagctcgttggcctcggctacaccggctggttcgtctaccgctacctcctcttcaagcaaagcagg

SEQ ID NO: 30577 - protein, 169 aa, Zea mays subsp. mays
  peptide (1)..(169): Ceres Seq. ID no. 13635130
  misc_feature (79)..(168): NCBI GI NO: 18411555 NR Description: expressed protein [Arabidopsis thaliana]
  misc_feature (79)..(168): NCBI GI NO: 687677 NR Description: unknown
  misc_feature (31)..(168): NCBI GI NO: 38175474 NR Description: unknown protein
  misc_feature (85)..(168): NCBI GI NO: 7485852 NR Description: hypothetical protein F20D10
  misc_feature (85)..(168): NCBI GI NO: 18420175 NR Description: expressed protein [Arabidopsis thaliana]
  misc_feature (36)..(168): NCBI GI NO: 37536446 NR Description: hypothetical protein
  misc_feature (44)..(168): NCBI GI NO: 34393236 NR Description: unknown protein
  misc_feature (84)..(168): NCBI GI NO: 18407178 NR Description: expressed protein [Arabidopsis thaliana]
  misc_feature (84)..(168): NCBI GI NO: 21555057 NR Description: unknown [Arabidopsis thaliana]
  misc_feature (70)..(168): NCBI GI NO: 18403896 NR Description: expressed protein [Arabidopsis thaliana]
  misc_feature (123)..(123): Xaa is any aa, unknown or other
  misc_feature (125)..(125): Xaa is any aa, unknown or other
YPFHLGPSAASEQAKRKGREALYPAVRSDKSGAPVAARHGGHGVLRGAPRRRTLPAAFLPRRSSVCHHQLRLQDAPRLISLHRARAASEDTSASGGDELIEDLKAKWDAVEDKPTVLLYGGGXPXALWLTSVVVGAINAVPLLPKILELVGLGYTGWFVYRYLLFKQSR

SEQ ID NO: 30578 - DNA, 870 bp, Zea mays subsp. mays
  misc_feature (1)..(870): Ceres Seq. ID no. 12376501
atggcgaatgtctcgcacacactcccctgccgctgtgccgcacccgcacccctccagcgcgcgggggcacgagcacgagtacgaggctccatcgccggacgaccaggtagttgcactgccgccgccgtcgacgacgaccgacggcgacgatggcccggccgcagcaacggtaccgcggcgtgcggcagcgccactggggctcctgggtctccgagatccgccaccctctcctgaaggcgcggatatggctgggcaccttcgagacggcagaggacgcggcgcgcgcctacgacgaggcggcgcggatcatgtgcgggccccgcgcgcgcaccaacttccccgccgacgccaacggcccgccgccgtcgttcctctccgcggcgctcgtcgacaagctgcaccggttcaacctggcgtccgtgcaggccgcgcagcggcagagagaggctgcggcggcggcggcggcagcagcagcagcagcaacttccgcgccggcgacgccaccggccgcgcagtggggcggcggtaggtccctggaggagcagcacgtggagcagatgatcgaggaactgctggactccgacttctccatggagatttgctgctagtgctaggctagccgcgacgcgacctgcctagcgactagctagcgcccccggccggcccgtcaccgccgcgctccgctccaactctcctctgttcttgcacttgcaccatgcgtcgcgctcgcgctcttctttgtactcgtgccgacgtgcgtagtatcgctcagccgctgcagcgtgcgtaggagcctgatttgtgtacgccacgtgtatagctgtagctgtacgtataagtatatatgtaatcgagcattctcattcttgc

SEQ ID NO: 30579 - protein, 175 aa, Zea mays subsp. mays
  peptide (1)..(175): Ceres Seq. ID no. 12376502
WRMSRTHSPAAVPHPHPSSARGHEHEYEAPSPDDQVVALPPPSTTTDGDDGPAAATVPRRAAAPLGLLGLRDPPPSPEGADMAGHLRDGRGRGARLRRGGADHVRAPRAHQLPRRRQRPAAVVPLRGARRQAAPVQPGVRAGRAAAERGCGGGGGSSSSSNFRAGDATGRAVGRR

SEQ ID NO: 30580 - protein, 173 aa, Zea mays subsp. mays
  peptide (1)..(173): Ceres Seq. ID no. 12376503
MSRTHSPAAVPHPHPSSARGHEHEYEAPSPDDQVVALPPPSTTTDGDDGPAAATVPRRAAAPLGLLGLRDPPPSPEGADMAGHLRDGRGRGARLRRGGADHVRAPRAHQLPRRRQRPAAVVPLRGARRQAAPVQPGVRAGRAAAERGCGGGGGSSSSSNFRAGDATGRAVGRR

SEQ ID NO: 30581 - protein, 152 aa, Zea mays subsp. mays
  peptide (1)..(152): Ceres Seq. ID no. 12376504
  misc_feature (5)..(68): Pfam Name: Pfam Description:  AP2 domain
  misc_feature (1)..(117): NCBI GI NO: 15238727 NR Description: ethylene-responsive element - like protein
  misc_feature (1)..(107): NCBI GI NO: 18650662 NR Description: ethylene response factor 1
  misc_feature (1)..(92): NCBI GI NO: 131754 NR Description: PPLZ02 PROTEIN
  misc_feature (7)..(141): NCBI GI NO: 38343976 NR Description: OSJNBb0022F16.15
  misc_feature (6)..(68): NCBI GI NO: 15218134 NR Description: putative ethylene responsive element
  misc_feature (6)..(68): NCBI GI NO: 21553845 NR Description: putative ethylene responsive element
  misc_feature (1)..(147): NCBI GI NO: 37572971 NR Description: AP2-domain DRE binding factor DBF1
  misc_feature (6)..(79): NCBI GI NO: 15239413 NR Description: AP2 domain containing protein
  misc_feature (8)..(126): NCBI GI NO: 4099921 NR Description: EREBP-3 homolog [Stylosanthes hamata]
  misc_feature (5)..(118): NCBI GI NO: 38345793 NR Description: OSJNBa0085I10.10
MARPQQRYRGVRQRHWGSWVSEIRHPLLKARIWLGTFETAEDAARAYDEAARIMCGPRARTNFPADANGPPPSFLSAALVDKLHRFNLASVQAAQRQREAAAAAAAAAAAATSAPATPPAAQWGGGRSLEEQHVEQMIEELLDSDFSMEICC

SEQ ID NO: 30582 - DNA, 1061 bp, Zea mays subsp. mays
  misc_feature (1)..(1061): Ceres Seq. ID no. 12377591
cgcaattaaccctcactaaagggaacaaaagctggagctccaccgcggtggcggccgctctagaactagtggatcccccgggctgcaggaattcgcacgagaccattacctagaacatcctaatcgaaaagaaactcactcgccatcgccgggcatcgcgggcatcgcacacaaacgcaacctgcagccatggcacagaagctcgcgccaccgacggcggcggtcgtcgtcgtcctgctggcgctcgccttgtcggccgccgcgcagaactgcgggtgcgcgtcgggcctgtgctgcagccggttcgggtactgcgggacgggcgaggactactgcggcgccgggtgccagtcgggcccctgcgacgtgccggagaccaacaacgcgtccgtggccagcatcgtgacgccggccttcttcgacgcgctcctcgcgcaggccgccgcctcgtgcgaggccaacggcttctacacccgcgacgccttcctcgccgccgccggctactacccggcgttcggccgcaccggcaccgtcgacgactccaagcgcgagatcgccgccttcttcggcaacgccaaccacgagaccataaagttctgctacatcaacgagatcgacgggccgagcaagaactactgcgaccggaacaacacgcagtggccgtgccaggcggggaaggggtactacggccgcggcccgctgcagatctcctggaacttcaactacgggcccgcggggcagagcatcggcttcgacgggctgggcgaccccgacgcggtggcgcgcagcgccgtgctcgcgttccgctccgcgctctggtactggatgaacaacgtgcacggggccatcgtctccggccagggcttcggcgccaccatccgggccatcaacggcgcgctcgagtgcgacggcaagaaccccaactccgtcaacaaccgcgtcgcctactacaagcagttctgccaggatttcggcgtcgacccgggcaacaacctcacctgctgaatgatctctctctcattgggttgttgtcctgtacttacacatgtgttggttgatgg

SEQ ID NO: 30583 - protein, 271 aa, Zea mays subsp. mays
  peptide (1)..(271): Ceres Seq. ID no. 12377592
  misc_feature (71)..(271): Pfam Name: Pfam Description:  Chitinase class I
  misc_feature (10)..(271): NCBI GI NO: 33329392 NR Description: class IV chitinase [Vitis vinifera]
  misc_feature (10)..(271): NCBI GI NO: 2306811 NR Description: class IV endochitinase [Vitis vinifera]
  misc_feature (12)..(271): NCBI GI NO: 15232509 NR Description: glycosyl hydrolase family 19
  misc_feature (14)..(271): NCBI GI NO: 1076693 NR Description: chitinase (EC 3
  misc_feature (12)..(271): NCBI GI NO: 2597826 NR Description: class IV chitinase [Arabidopsis thaliana]
  misc_feature (10)..(271): NCBI GI NO: 2306813 NR Description: class IV endochitinase [Vitis vinifera]
  misc_feature (10)..(271): NCBI GI NO: 40557195 NR Description: class IV chitinase precursor [Medicago truncatula]
  misc_feature (13)..(271): NCBI GI NO: 30793457 NR Description: chitinase [Oryza sativa (japonica cultivar-group)]
  misc_feature (13)..(271): NCBI GI NO: 15529117 NR Description: chitinase-B [Sorghum bicolor]
  misc_feature (13)..(271): NCBI GI NO: 15213850 NR Description: chitinase-B [Sorghum arundinaceum]
MAQKLAPPTAAVVVVLLALALSAAAQNCGCASGLCCSRFGYCGTGEDYCGAGCQSGPCDVPETNNASVASIVTPAFFDALLAQAAASCEANGFYTRDAFLAAAGYYPAFGRTGTVDDSKREIAAFFGNANHETIKFCYINEIDGPSKNYCDRNNTQWPCQAGKGYYGRGPLQISWNFNYGPAGQSIGFDGLGDPDAVARSAVLAFRSALWYWMNNVHGAIVSGQGFGATIRAINGALECDGKNPNSVNNRVAYYKQFCQDFGVDPGNNLTC

SEQ ID NO: 30584 - DNA, 699 bp, Zea mays subsp. mays
  misc_feature (1)..(699): Ceres Seq. ID no. 12346268
  misc_feature (213)..(213): n is a, c, t, g, unknown, or other
  misc_feature (230)..(230): n is a, c, t, g, unknown, or other
  misc_feature (220)..(220): n is a, c, t, g, unknown, or other
  misc_feature (216)..(216): n is a, c, t, g, unknown, or other
ctcactctccctgctgcaacccaaccaagcccgcacgacacgacaccaagtcgaggagctcgagagggcaccaataatggccggcgtgaactccagcgtcgtcgggctcaagcccgccgcggcagtgccgcaggccgccgccgcctcatcgccggcgaagcgggtgcagctggccgcgcccgagggccgccgcgccgctctgctcggcctggnggncgtnttcgccgtcncggccaccaccgggtcggccaaggccacgatcttcgatgagtacctcgagaagagcaaggccaacaaggagctgaacgacaagaagaggctggccaccagtggagccaactttgcgcgcgcctacaccgtggagttcggcagctgccagttcccctacaacttcactgggtgccaggacctcgccaagcagaagaaagtccccttcatcagcgacgacctcgagattgagtgcgaggggaaggagaagttcaagtgcggctccaacgttttctggaagtggtgaagcagctagcagcagcgtctgatgggaatggaggagatcatcacctgtcttgtcgaccctagatatgtccaaactgcagggaaattaaatcttcatgtgtaattgtgctcattctgtttcaatcatctcaacatccgatcatgaacctcttgcattattaactggctcgatcgtcttctcagttc

SEQ ID NO: 30585 - protein, 170 aa, Zea mays subsp. mays
  peptide (1)..(170): Ceres Seq. ID no. 12346269
  misc_feature (33)..(170): Pfam Name: PSAN or PSI-N Pfam Description: Photosystem I reaction centre subunit N
  misc_feature (26)..(170): NCBI GI NO: 400879 NR Description: Photosystem I reaction centre subunit N
  misc_feature (79)..(170): NCBI GI NO: 3914466 NR Description: Photosystem I reaction centre subunit N
  misc_feature (29)..(170): NCBI GI NO: 28629385 NR Description: photosystem I-N subunit [Phaseolus vulgaris]
  misc_feature (29)..(170): NCBI GI NO: 15237593 NR Description: photosystem I reaction center subunit PSI-Nprecursor
  misc_feature (34)..(164): NCBI GI NO: 11134150 NR Description: Photosystem I reaction centre subunit N
  misc_feature (34)..(164): NCBI GI NO: 12744797 NR Description: PsaN precursor [Chlamydomonas reinhardtii]
  misc_feature (87)..(135): NCBI GI NO: 485082 NR Description: photosystem I 9K protein - rice
  misc_feature (71)..(71): Xaa is any aa, unknown or other
  misc_feature (72)..(72): Xaa is any aa, unknown or other
  misc_feature (73)..(73): Xaa is any aa, unknown or other
  misc_feature (77)..(77): Xaa is any aa, unknown or other
SLSLLQPNQARTTRHQVEELERAPIMAGVNSSVVGLKPAAAVPQAAAASSPAKRVQLAAPEGRRAALLGLXXXFAVXATTGSAKATIFDEYLEKSKANKELNDKKRLATSGANFARAYTVEFGSCQFPYNFTGCQDLAKQKKVPFISDDLEIECEGKEKFKCGSNVFWKW

SEQ ID NO: 30586 - protein, 145 aa, Zea mays subsp. mays
  peptide (1)..(145): Ceres Seq. ID no. 12346270
  misc_feature (8)..(145): Pfam Name: PSAN or PSI-N Pfam Description: Photosystem I reaction centre subunit N
  misc_feature (1)..(145): NCBI GI NO: 400879 NR Description: Photosystem I reaction centre subunit N
  misc_feature (54)..(145): NCBI GI NO: 3914466 NR Description: Photosystem I reaction centre subunit N
  misc_feature (4)..(145): NCBI GI NO: 28629385 NR Description: photosystem I-N subunit [Phaseolus vulgaris]
  misc_feature (4)..(145): NCBI GI NO: 15237593 NR Description: photosystem I reaction center subunit PSI-Nprecursor
  misc_feature (9)..(139): NCBI GI NO: 11134150 NR Description: Photosystem I reaction centre subunit N
  misc_feature (9)..(139): NCBI GI NO: 12744797 NR Description: PsaN precursor [Chlamydomonas reinhardtii]
  misc_feature (62)..(110): NCBI GI NO: 485082 NR Description: photosystem I 9K protein - rice
  misc_feature (46)..(46): Xaa is any aa, unknown or other
  misc_feature (47)..(47): Xaa is any aa, unknown or other
  misc_feature (48)..(48): Xaa is any aa, unknown or other
  misc_feature (52)..(52): Xaa is any aa, unknown or other
MAGVNSSVVGLKPAAAVPQAAAASSPAKRVQLAAPEGRRAALLGLXXXFAVXATTGSAKATIFDEYLEKSKANKELNDKKRLATSGANFARAYTVEFGSCQFPYNFTGCQDLAKQKKVPFISDDLEIECEGKEKFKCGSNVFWKW

SEQ ID NO: 30587 - protein, 89 aa, Zea mays subsp. mays
  peptide (1)..(89): Ceres Seq. ID no. 12346271
  misc_feature (71)..(71): Xaa is any aa, unknown or other
  misc_feature (72)..(72): Xaa is any aa, unknown or other
  misc_feature (74)..(74): Xaa is any aa, unknown or other
  misc_feature (77)..(77): Xaa is any aa, unknown or other
LTLPAATQPSPHDTTPSRGAREGTNNGRRELQRRRAQARRGSAAGRRRLIAGEAGAAGRARGPPRRSARPXXRXRRXGHHRVGQGHDLR

SEQ ID NO: 30588 - DNA, 1111 bp, Zea mays subsp. mays
  misc_feature (1)..(1111): Ceres Seq. ID no. 12401978
  misc_feature (344)..(344): n is a, c, t, g, unknown, or other
accaactccggcggccggtgcagcagctagcagtggacgtacttatacgtcttcccccagcttacctctaccttaggtagcatagtggtgcggccgcttggtttaaactagacacatggcgcctcaaagcttggatcttgggctgagtctcggcctgggcgtggcggcgttccagcccagcagcttctgccaccccggcaatgccgtcgtcgtccccgcggcggcggagcgggaggccagcccggccgcggcggaggagagggagcggaggtgctcgcccgccggcagcccggtgtcgagcggcagcggcagcgggaataagcgcgccgcggcggagaggtcgnccggcgccggcgccggtagcggcgacgaggacgacgacggtgccgcacgcaagaagctgcggctgtccaaagaccaggccgccgtgctcgaggagtgcttcaagacgcaccacacgctcactccgaagcagaaggtggcgctggccagcagcctgggcctccggccgcggcaggtggaggtgtggttccagaaccggcgcgcccggaccaagctgaagcagacggaggtggactgcgagtacctcaagcgctggtgcgagcagctcgccgaggagaaccgccgcctgggcaaggaggtcgccgagctcagggcgctcagcgccgcgccggcggccccgctcaccaccctcacgatgtgcctctcctgccggcgcgtcgcctcctcgtccccgtcgtcgtcgtcgtcgcccaggcctagcatccccggcgccgcagctgccagtggcgggagcatggcctctccggcggcggcggcgacgttgcccgcccacaggcagttcttctgcgggttcagagacgccggggcggcggccgcggcgtacgggacagcctcggcggggctcgcgaagcctgtcagggctgccagataggcttagttggcgtcgatgccatggaaatgcatgggtccgtttaagttacaactgcaaagcaagtgttgtggctgaaactgaaactgaaagctgaaagctgaaatttttttatgtatctttagagggaaaggaatgcatgcatgcaatgcaaatgtcttctttttaacaaggttaatt

SEQ ID NO: 30589 - protein, 272 aa, Zea mays subsp. mays
  peptide (1)..(272): Ceres Seq. ID no. 12401979
  misc_feature (94)..(148): Pfam Name: Pfam Description:  Homeobox domain
  misc_feature (35)..(255): NCBI GI NO: 5006849 NR Description: homeodomain leucine zipper protein [Oryza sativa]
  misc_feature (35)..(255): NCBI GI NO: 28848940 NR Description: homeodomain leucine zipper protein
  misc_feature (47)..(212): NCBI GI NO: 25457630 NR Description: homeobox protein THOM1 [imported] - tomato
  misc_feature (41)..(237): NCBI GI NO: 15232311 NR Description: homeobox-leucine zipper protein HAT3
  misc_feature (54)..(231): NCBI GI NO: 18034437 NR Description: homeodomain leucine zipper protein CPHB-3
  misc_feature (60)..(237): NCBI GI NO: 15225368 NR Description: homeobox-leucine zipper protein, Athb-4
  misc_feature (43)..(220): NCBI GI NO: 25487872 NR Description: homeobox-leucine zipper protein PHZ2
  misc_feature (43)..(218): NCBI GI NO: 6634483 NR Description: DNA-binding protein
  misc_feature (43)..(218): NCBI GI NO: 7446297 NR Description: DNA-binding homeotic protein - rice (fragment)
  misc_feature (43)..(218): NCBI GI NO: 37536862 NR Description: homeodomain leucine zipper protein hox1
  misc_feature (77)..(77): Xaa is any aa, unknown or other
MAPQSLDLGLSLGLGVAAFQPSSFCHPGNAVVVPAAAEREASPAAAEERERRCSPAGSPVSSGSGSGNKRAAAERSXGAGAGSGDEDDDGAARKKLRLSKDQAAVLEECFKTHHTLTPKQKVALASSLGLRPRQVEVWFQNRRARTKLKQTEVDCEYLKRWCEQLAEENRRLGKEVAELRALSAAPAAPLTTLTMCLSCRRVASSSPSSSSSPRPSIPGAAAASGGSMASPAAAATLPAHRQFFCGFRDAGAAAAAYGTASAGLAKPVRAAR

SEQ ID NO: 30590 - DNA, 1737 bp, Zea mays subsp. mays
  misc_feature (1)..(1737): Ceres Seq. ID no. 12365824
agtgtcggtgtcggcgttggcgagtggcgactggcgacttctctgcctcgtcctccccgttttcccctccgcgtccagcccggcgcgacgccaccacgcacctagccgcggatccgaggcgcagatccaatccagcgatggcgtccacggcggcgaggcggttgcgggagctgcaggcccagacggggaacaagacctgcgtggactgcgcgcagcggaacccgcagtgggcgagcgtctcctacggcgtgttcatgtgcctcgagtgctccggcaagcaccggggcctcggcgtgcacatcagtttcgtgcgctcggtcaccatggactcctggaccgaggcgcagctccgcaagatggaggccggcggcaacgaccgcctcaacgccttcctcacagcgcggggcgttcccaaggagacgtcccacgtcgcgaagtacaactccaacgccgcggccgcctaccgcgaccgcatcgccgcgctcgctgagggcaagccttggaccgacccgcccgtagtcaaggagacgcccggatctggcgcgcccgccccggctaggaagccacccttgcacgcctccggaggcggcggcgggtgggacgactgggacgatgattttcggtcggacatgaggcggaatcagtcggttggatcattcgccgccgcgggggcgcagtcagggaggcagccgccgaggtccaaatcaacacaggacatctacactaggcagcagctggaggcgtcggcggctaataaggatgatttcttcgccaggaggatggcggagaacgagtccaagcctgagggtatcccgccatcccagggcggcaagtacgttgggttcggatccagcccagcgccatcggctaataggaacggcggtgctgctcagggcgatgtcttgcaggtcgtctctcagggatttggacgcctttcattagttgcagcctctgctgcccagtctgctgccagtgttgtccaagtcggcacaaaagaaatccaatcaaagatgagggatgggggctatgaccagaaggtgaatgaaactgtcagtgttgttgccaataaaactgcagagattggaagcaagacctgggggatcatgagaggagttatggcaatggcctcacaaaaggtcgaggaatatgccaaggaaggaggaatgagtggctggggagaggattggcaacgcagcgagcagaacggtgagccttaccaaaggtttgagcacgcgaccaacagcaacagttggaattcctcccaaaattcttcatcgaagaacaacaattccagttcttgggacgattgggacgaccaaggcaagaagggtgaacctgcgaaaccgcaccaaagcagtgactcctgggctggctgggatgatgggaaggacgatggttttgatagtcctggttacaacaaccacaacagctctaacaaggggagcaaccacaacgggacttccggtggctcattttggagggaaggcggcttccgctgaaaccgttctcttctccatagagttatactttcagagttgttacattggcaggtaaccagggtccagtggttggtattatccgggatactgaaaccgtcgagtgaaaggggttgtgttttgtaccacatctgttattatatctactgagatatattcctatggtcaatgcccattcaaaagtgcccaaattgactaggaaatgtcgagttgaaactgtaatttacccaactttgtcgcc

SEQ ID NO: 30591 - protein, 498 aa, Zea mays subsp. mays
  peptide (1)..(498): Ceres Seq. ID no. 12365825
  misc_feature (51)..(167): Pfam Name: Pfam Description:  Putative GTPase activating protein for Arf
  misc_feature (50)..(497): NCBI GI NO: 15231865 NR Description: putative protein; protein id: At3g53710.1
  misc_feature (50)..(493): NCBI GI NO: 10441356 NR Description: ARF GAP-like zinc finger-containing protein ZIGA2
  misc_feature (194)..(498): NCBI GI NO: 29367415 NR Description: ADP ribosylation GTPase-like protein
  misc_feature (50)..(497): NCBI GI NO: 15224315 NR Description: putative ADP ribosylation factor 1 GTPaseactivating protein
  misc_feature (46)..(460): NCBI GI NO: 21489979 NR Description: ADP-ribosylation factor 1 GTPase activating
  misc_feature (213)..(362): NCBI GI NO: 6319975 NR Description: Zn-finger-containing protein that functions as ADP-ribosylation factor GTPase-activating protein and is involved inregulating vesicle transport
  misc_feature (52)..(165): NCBI GI NO: 6319975 NR Description: Zn-finger-containing protein that functions as ADP-ribosylation factor GTPase-activating protein and is involved inregulating vesicle transport
  misc_feature (46)..(280): NCBI GI NO: 26326517 NR Description: unnamed protein product [Mus musculus]
  misc_feature (46)..(331): NCBI GI NO: 8922652 NR Description: ADP-ribosylation factor GTPase activating protein 1isoform a
  misc_feature (46)..(280): NCBI GI NO: 37604182 NR Description: Unknown (protein for MGC:69580) [Mus musculus]
CRCRRWRVATGDFSASSSPFSPPRPARRDATTHLAADPRRRSNPAMASTAARRLRELQAQTGNKTCVDCAQRNPQWASVSYGVFMCLECSGKHRGLGVHISFVRSVTMDSWTEAQLRKMEAGGNDRLNAFLTARGVPKETSHVAKYNSNAAAAYRDRIAALAEGKPWTDPPVVKETPGSGAPAPARKPPLHASGGGGGWDDWDDDFRSDMRRNQSVGSFAAAGAQSGRQPPRSKSTQDIYTRQQLEASAANKDDFFARRMAENESKPEGIPPSQGGKYVGFGSSPAPSANRNGGAAQGDVLQVVSQGFGRLSLVAASAAQSAASVVQVGTKEIQSKMRDGGYDQKVNETVSVVANKTAEIGSKTWGIMRGVMAMASQKVEEYAKEGGMSGWGEDWQRSEQNGEPYQRFEHATNSNSWNSSQNSSSKNNNSSSWDDWDDQGKKGEPAKPHQSSDSWAGWDDGKDDGFDSPGYNNHNSSNKGSNHNGTSGGSFWREGGFR

SEQ ID NO: 30592 - protein, 453 aa, Zea mays subsp. mays
  peptide (1)..(453): Ceres Seq. ID no. 12365826
  misc_feature (6)..(122): Pfam Name: Pfam Description:  Putative GTPase activating protein for Arf
  misc_feature (5)..(452): NCBI GI NO: 15231865 NR Description: putative protein; protein id: At3g53710.1
  misc_feature (5)..(448): NCBI GI NO: 10441356 NR Description: ARF GAP-like zinc finger-containing protein ZIGA2
  misc_feature (149)..(453): NCBI GI NO: 29367415 NR Description: ADP ribosylation GTPase-like protein
  misc_feature (5)..(452): NCBI GI NO: 15224315 NR Description: putative ADP ribosylation factor 1 GTPaseactivating protein
  misc_feature (1)..(415): NCBI GI NO: 21489979 NR Description: ADP-ribosylation factor 1 GTPase activating
  misc_feature (168)..(317): NCBI GI NO: 6319975 NR Description: Zn-finger-containing protein that functions as ADP-ribosylation factor GTPase-activating protein and is involved inregulating vesicle transport
  misc_feature (7)..(120): NCBI GI NO: 6319975 NR Description: Zn-finger-containing protein that functions as ADP-ribosylation factor GTPase-activating protein and is involved inregulating vesicle transport
  misc_feature (1)..(235): NCBI GI NO: 26326517 NR Description: unnamed protein product [Mus musculus]
  misc_feature (1)..(286): NCBI GI NO: 8922652 NR Description: ADP-ribosylation factor GTPase activating protein 1isoform a
  misc_feature (1)..(235): NCBI GI NO: 37604182 NR Description: Unknown (protein for MGC:69580) [Mus musculus]
MASTAARRLRELQAQTGNKTCVDCAQRNPQWASVSYGVFMCLECSGKHRGLGVHISFVRSVTMDSWTEAQLRKMEAGGNDRLNAFLTARGVPKETSHVAKYNSNAAAAYRDRIAALAEGKPWTDPPVVKETPGSGAPAPARKPPLHASGGGGGWDDWDDDFRSDMRRNQSVGSFAAAGAQSGRQPPRSKSTQDIYTRQQLEASAANKDDFFARRMAENESKPEGIPPSQGGKYVGFGSSPAPSANRNGGAAQGDVLQVVSQGFGRLSLVAASAAQSAASVVQVGTKEIQSKMRDGGYDQKVNETVSVVANKTAEIGSKTWGIMRGVMAMASQKVEEYAKEGGMSGWGEDWQRSEQNGEPYQRFEHATNSNSWNSSQNSSSKNNNSSSWDDWDDQGKKGEPAKPHQSSDSWAGWDDGKDDGFDSPGYNNHNSSNKGSNHNGTSGGSFWREGGFR

SEQ ID NO: 30593 - protein, 414 aa, Zea mays subsp. mays
  peptide (1)..(414): Ceres Seq. ID no. 12365827
  misc_feature (1)..(83): Pfam Name: Pfam Description:  Putative GTPase activating protein for Arf
  misc_feature (1)..(413): NCBI GI NO: 15231865 NR Description: putative protein; protein id: At3g53710.1
  misc_feature (1)..(409): NCBI GI NO: 10441356 NR Description: ARF GAP-like zinc finger-containing protein ZIGA2
  misc_feature (110)..(414): NCBI GI NO: 29367415 NR Description: ADP ribosylation GTPase-like protein
  misc_feature (1)..(413): NCBI GI NO: 15224315 NR Description: putative ADP ribosylation factor 1 GTPaseactivating protein
  misc_feature (1)..(376): NCBI GI NO: 21489979 NR Description: ADP-ribosylation factor 1 GTPase activating
  misc_feature (129)..(278): NCBI GI NO: 6319975 NR Description: Zn-finger-containing protein that functions as ADP-ribosylation factor GTPase-activating protein and is involved inregulating vesicle transport
  misc_feature (1)..(81): NCBI GI NO: 6319975 NR Description: Zn-finger-containing protein that functions as ADP-ribosylation factor GTPase-activating protein and is involved inregulating vesicle transport
  misc_feature (1)..(196): NCBI GI NO: 26326517 NR Description: unnamed protein product [Mus musculus]
  misc_feature (1)..(247): NCBI GI NO: 8922652 NR Description: ADP-ribosylation factor GTPase activating protein 1isoform a
  misc_feature (1)..(196): NCBI GI NO: 37604182 NR Description: Unknown (protein for MGC:69580) [Mus musculus]
MCLECSGKHRGLGVHISFVRSVTMDSWTEAQLRKMEAGGNDRLNAFLTARGVPKETSHVAKYNSNAAAAYRDRIAALAEGKPWTDPPVVKETPGSGAPAPARKPPLHASGGGGGWDDWDDDFRSDMRRNQSVGSFAAAGAQSGRQPPRSKSTQDIYTRQQLEASAANKDDFFARRMAENESKPEGIPPSQGGKYVGFGSSPAPSANRNGGAAQGDVLQVVSQGFGRLSLVAASAAQSAASVVQVGTKEIQSKMRDGGYDQKVNETVSVVANKTAEIGSKTWGIMRGVMAMASQKVEEYAKEGGMSGWGEDWQRSEQNGEPYQRFEHATNSNSWNSSQNSSSKNNNSSSWDDWDDQGKKGEPAKPHQSSDSWAGWDDGKDDGFDSPGYNNHNSSNKGSNHNGTSGGSFWREGGFR

SEQ ID NO: 30594 - DNA, 495 bp, Zea mays subsp. mays
  misc_feature (1)..(495): Ceres Seq. ID no. 4611687
aaagcagagtctgcccctccccgcgccgttctttttggttccccagtccccgccgccgccgaaacccgcagatggaggtcgtcgtcgccgcgamssagaaggcgaagaaacacatacacctcttctactgctcagaatgcgaggagctcgccctcaagatcgccgccagctccgacgccatcgagctccaatccatcaactggcggassttcgacgacgggttcccgaacctattcatcgcctcattcacgctcgtgctgccattcttccccacgggctcattcgagcgcgttgaggaggagggcgatgtcgccaccgcgttcaccctcgcgcgcattctctcgatgatccccaagtcgcgcggcgggcctaccagcgtcgtcatctacgacatccacgcgctccaggagaggttttacttcggggacgatgtctgccatgcttcgagacagggatcccgctcctgctgcagcgcctccgccagctcccggacgc

SEQ ID NO: 30595 - protein, 164 aa, Zea mays subsp. mays
  peptide (1)..(164): Ceres Seq. ID no. 4611688
  misc_feature (75)..(151): NCBI GI NO: 4902877 NR Description: phosphoribosyl pyrophosphate synthase isozyme 3
  misc_feature (16)..(81): NCBI GI NO: 4902877 NR Description: phosphoribosyl pyrophosphate synthase isozyme 3
  misc_feature (75)..(151): NCBI GI NO: 15220191 NR Description: phosphoribosyl diphosphate synthase
  misc_feature (75)..(151): NCBI GI NO: 25529012 NR Description: ribose-phosphate diphosphokinase (EC 2
  misc_feature (75)..(151): NCBI GI NO: 25402614 NR Description: hypothetical protein
  misc_feature (33)..(79): NCBI GI NO: 15220191 NR Description: phosphoribosyl diphosphate synthase
  misc_feature (33)..(79): NCBI GI NO: 25529012 NR Description: ribose-phosphate diphosphokinase (EC 2
  misc_feature (33)..(79): NCBI GI NO: 25402614 NR Description: hypothetical protein
  misc_feature (75)..(151): NCBI GI NO: 34910736 NR Description: putative phosphoribosyl pyrophosphate synthase
  misc_feature (34)..(81): NCBI GI NO: 34910736 NR Description: putative phosphoribosyl pyrophosphate synthase
  misc_feature (31)..(31): Xaa is any aa, unknown or other
  misc_feature (32)..(32): Xaa is any aa, unknown or other
  misc_feature (69)..(69): Xaa is any aa, unknown or other
SRVCPSPRRSFWFPSPRRRRNPQMEVVVAAXXKAKKHIHLFYCSECEELALKIAASSDAIELQSINWRXFDDGFPNLFIASFTLVLPFFPTGSFERVEEEGDVATAFTLARILSMIPKSRGGPTSVVIYDIHALQERFYFGDDVCHASRQGSRSCCSASASSRT

SEQ ID NO: 30596 - protein, 141 aa, Zea mays subsp. mays
  peptide (1)..(141): Ceres Seq. ID no. 4611689
  misc_feature (52)..(128): NCBI GI NO: 4902877 NR Description: phosphoribosyl pyrophosphate synthase isozyme 3
  misc_feature (1)..(58): NCBI GI NO: 4902877 NR Description: phosphoribosyl pyrophosphate synthase isozyme 3
  misc_feature (52)..(128): NCBI GI NO: 15220191 NR Description: phosphoribosyl diphosphate synthase
  misc_feature (52)..(128): NCBI GI NO: 25402614 NR Description: hypothetical protein
  misc_feature (52)..(128): NCBI GI NO: 25529012 NR Description: ribose-phosphate diphosphokinase (EC 2
  misc_feature (10)..(56): NCBI GI NO: 15220191 NR Description: phosphoribosyl diphosphate synthase
  misc_feature (10)..(56): NCBI GI NO: 25402614 NR Description: hypothetical protein
  misc_feature (10)..(56): NCBI GI NO: 25529012 NR Description: ribose-phosphate diphosphokinase (EC 2
  misc_feature (52)..(128): NCBI GI NO: 34910736 NR Description: putative phosphoribosyl pyrophosphate synthase
  misc_feature (11)..(58): NCBI GI NO: 34910736 NR Description: putative phosphoribosyl pyrophosphate synthase
  misc_feature (8)..(8): Xaa is any aa, unknown or other
  misc_feature (9)..(9): Xaa is any aa, unknown or other
  misc_feature (46)..(46): Xaa is any aa, unknown or other
MEVVVAAXXKAKKHIHLFYCSECEELALKIAASSDAIELQSINWRXFDDGFPNLFIASFTLVLPFFPTGSFERVEEEGDVATAFTLARILSMIPKSRGGPTSVVIYDIHALQERFYFGDDVCHASRQGSRSCCSASASSRT

SEQ ID NO: 30597 - protein, 115 aa, Zea mays subsp. mays
  peptide (1)..(115): Ceres Seq. ID no. 4611690
  misc_feature (2)..(115): NCBI GI NO: 13592175 NR Description: ppg3 [Leishmania major]
  misc_feature (2)..(115): NCBI GI NO: 13592175 NR Description: ppg3 [Leishmania major]
  misc_feature (6)..(115): NCBI GI NO: 11360318 NR Description: probable mucin DKFZp434C196.1 - human (fragment)
  misc_feature (27)..(115): NCBI GI NO: 11359723 NR Description: proteophosphoglycan, membrane-associated
  misc_feature (20)..(115): NCBI GI NO: 9843651 NR Description: SRM102 [Arabidopsis thaliana]
  misc_feature (4)..(115): NCBI GI NO: 2911555 NR Description: E2 protein [Human papillomavirus type 76]
  misc_feature (6)..(115): NCBI GI NO: 15238868 NR Description: putative protein; protein id: At5g53870.1
  misc_feature (2)..(115): NCBI GI NO: 13592175 NR Description: ppg3 [Leishmania major]
  misc_feature (2)..(115): NCBI GI NO: 11359723 NR Description: proteophosphoglycan, membrane-associated
  misc_feature (27)..(115): NCBI GI NO: 11359723 NR Description: proteophosphoglycan, membrane-associated
  misc_feature (32)..(32): Xaa is any aa, unknown or other
  misc_feature (70)..(70): Xaa is any aa, unknown or other
KAESAPPRAVLFGSPVPAAAETRRWRSSSPRXRRRRNTYTSSTAQNARSSPSRSPPAPTPSSSNPSTGGXSTTGSRTYSSPHSRSCCHSSPRAHSSALRRRAMSPPRSPSRAFSR

SEQ ID NO: 30598 - DNA, 986 bp, Zea mays subsp. mays
  misc_feature (1)..(986): Ceres Seq. ID no. 12369222
attcgagaggaaaggaagaagaactggagaggaaaaaaagtgtaggatcgagggagatggagagcggccaagcgtggaccaacgactcctcttctccgatcctcccgcagctgcaggccgtagctagctctataaaaagctaagggagcctgcctgccatcgtcgtgcatcgtcatccaccacgatcgataaagctaattaagctgctactgctacgctagcctcgatcgatcaagcaagcagctcacagacccaccggcccacccacccacccacatggcggcgtcccgttccgctctgatcacgctgctcgtccttgtgagctccgtcgcggcggcctcggcgaccacgttcaccgtcggcgacagtagcggctggagtcgtagcgtcaactacgacaactgggccagtggcaagaccttcacggatggagatcagctagtgttcaacttcgccaccgggaaccacgacgtggtggaggtggacaagagcggatacgacggctgctccaccaccaacgccgccaacacaatccaaaacggcccggccaccgtcaacctcacctccggcacccactactacatctgcggcttcaccggccactgcagcgccgggatgaagctcgctgtcaccgtcggctccggctccggctccgggtcccccacccccggcggcggctcgcccagcacacccacaccaaccaccccgagcgcccccacccccgacactccggccagcgcgtccgtgcgcctcacggccggcccagcgctcgccgtggccgccaccgtgctcgtcgccctcttctgatctgatctgatctgatactgcatgcatgcaccgtgccaggaccaggatagaggcagtgcaggatcatagtattcttgtgtacgtacgtacatactttgttgttgagctagcgttttcattctgacgacggcggattattgtactctcgtacgtttttatttccacatgtactactgtct

SEQ ID NO: 30599 - protein, 176 aa, Zea mays subsp. mays
  peptide (1)..(176): Ceres Seq. ID no. 12369223
  misc_feature (39)..(113): Pfam Name: Pfam Description:  Plastocyanin-like domain
  misc_feature (1)..(174): NCBI GI NO: 4104058 NR Description: blue copper-binding protein homolog
  misc_feature (1)..(175): NCBI GI NO: 7670832 NR Description: dicyanin [Lycopersicon esculentum]
  misc_feature (2)..(175): NCBI GI NO: 38636763 NR Description: putative blue copper binding protein
  misc_feature (1)..(174): NCBI GI NO: 37651973 NR Description: blue copper binding protein
  misc_feature (3)..(158): NCBI GI NO: 38636760 NR Description: putative blue copper binding protein
  misc_feature (3)..(171): NCBI GI NO: 38636761 NR Description: putative blue copper binding protein
  misc_feature (11)..(154): NCBI GI NO: 14140127 NR Description: uclacyanin 3-like protein [Oryza sativa]
  misc_feature (1)..(169): NCBI GI NO: 38346158 NR Description: OSJNBa0079A21.5
  misc_feature (1)..(173): NCBI GI NO: 38636764 NR Description: putative blue copper binding protein
  misc_feature (5)..(176): NCBI GI NO: 10798754 NR Description: elicitor inducible gene Nt-SA1-1
MAASRSALITLLVLVSSVAAASATTFTVGDSSGWSRSVNYDNWASGKTFTDGDQLVFNFATGNHDVVEVDKSGYDGCSTTNAANTIQNGPATVNLTSGTHYYICGFTGHCSAGMKLAVTVGSGSGSGSPTPGGGSPSTPTPTTPSAPTPDTPASASVRLTAGPALAVAATVLVALF

SEQ ID NO: 30600 - DNA, 927 bp, Zea mays subsp. mays
  misc_feature (1)..(927): Ceres Seq. ID no. 12355214
agcagtccagcagagtttccgtctccccgactcccgagtcccgactgccggccctgacctgccctgcgccgcgcggagccgcggaccgcccgcccaccaccgaaaccctagagcaagcagggatgcacagtccggtcccgctcctcctcctcctgctcctctgcacggccgcggcggcctccgacggctcccagccccaggcgcaggcgcaggcacctggcgcggcacggcgggggatggtgccggtggcccccgcggaggcggagctcggcgccgtgaaggcgctcgccctcaacggcacgcggcgccggctcgggggcagcttccagctctgcgcgccctgcacctgctgcggcggggccagcggcgcctgcatcctcgcgccctgctgctactccatcaactgcaacatccccaaccgccccttcgggtactgctccttcacgcccaagtcctgccagtgcgtcggatgcaacctctgagctccgtggccgcgggattcattggattggattggtcagagtgtgtttgtgtgtgtgtgtgtgagagagagagagagtggggtggtaacgaatctgtataaaaaattccccacatccttagttaagtggcgattgctattacttctacctagtagtattttgctgtgatcactgctacgctcgacttagttgagggaaaaaaaagagaaaggggtctgggttgatctagaggtcactactctggggttttgcttttctgtcgccacacattggatgtctgattaggatgctacttgttcatagtggtttgttgttgatagctggaataaatatacctgtttaggtgcatggatctagtcatctagtgcattttagtggatgccatctcttccgtcctgatcagtgcctactgccctggaatgtgaatatgtgatagctctagctc

SEQ ID NO: 30601 - protein, 193 aa, Zea mays subsp. mays
  peptide (1)..(193): Ceres Seq. ID no. 12355215
  misc_feature (46)..(108): Pfam Name: Pfam Description:  TT viral ORF2
AVQQSFRLPDSRVPTAGPDLPCAARSRGPPAHHRNPRASRDAQSGPAPPPPAPLHGRGGLRRLPAPGAGAGTWRGTAGDGAGGPRGGGARRREGARPQRHAAPARGQLPALRALHLLRRGQRRLHPRALLLLHQLQHPQPPLRVLLLHAQVLPVRRMQPLSSVAAGFIGLDWSECVCVCVCEREREWGGNESV

SEQ ID NO: 30602 - protein, 159 aa, Zea mays subsp. mays
  peptide (1)..(159): Ceres Seq. ID no. 12355216
  misc_feature (47)..(159): NCBI GI NO: 34906984 NR Description: P0413C03.15
  misc_feature (35)..(159): NCBI GI NO: 18408246 NR Description: Expressed protein; protein id: At1g65295
  misc_feature (47)..(159): NCBI GI NO: 21954063 NR Description: unknown protein [Arabidopsis thaliana]
  misc_feature (35)..(159): NCBI GI NO: 21593890 NR Description: unknown [Arabidopsis thaliana]
  misc_feature (101)..(159): NCBI GI NO: 18412619 NR Description: Expressed protein; protein id: At5g01015
QSSRVSVSPTPESRLPALTCPAPRGAADRPPTTETLEQAGMHSPVPLLLLLLLCTAAAASDGSQPQAQAQAPGAARRGMVPVAPAEAELGAVKALALNGTRRRLGGSFQLCAPCTCCGGASGACILAPCCYSINCNIPNRPFGYCSFTPKSCQCVGCNL

SEQ ID NO: 30603 - protein, 119 aa, Zea mays subsp. mays
  peptide (1)..(119): Ceres Seq. ID no. 12355217
  misc_feature (7)..(119): NCBI GI NO: 34906984 NR Description: P0413C03.15
  misc_feature (1)..(119): NCBI GI NO: 18408246 NR Description: Expressed protein; protein id: At1g65295
  misc_feature (7)..(119): NCBI GI NO: 21954063 NR Description: unknown protein [Arabidopsis thaliana]
  misc_feature (1)..(119): NCBI GI NO: 21593890 NR Description: unknown [Arabidopsis thaliana]
  misc_feature (61)..(119): NCBI GI NO: 18412619 NR Description: Expressed protein; protein id: At5g01015
MHSPVPLLLLLLLCTAAAASDGSQPQAQAQAPGAARRGMVPVAPAEAELGAVKALALNGTRRRLGGSFQLCAPCTCCGGASGACILAPCCYSINCNIPNRPFGYCSFTPKSCQCVGCNL

SEQ ID NO: 30604 - DNA, 876 bp, Zea mays subsp. mays
  misc_feature (1)..(876): Ceres Seq. ID no. 12359909
aaatcgctctctgcccccgatcaccggtcgcctcccttccgctcccctgcctgcctaatccctccggccaccccgaaaccgctcgctcgctcgctcgctccccgcgcccagagacaagcccggagaccatggcggaccagctcactgacgaccaaatcgccgagttcaaggaggccttcagcctcttcgataaggacggcgacggttgcatcacaaccaaggagcttggaactgtcatgcgttcactgggtcagaacccaacggaggctgaactccaggacatgatcaatgaggtggatgccgacggcatggcacgatcgacttccccgagttcctcaacctcatggcccgcaagatgaaggacaccgactccgaggaggagctcaaggaggcgttcagggtgttcgacaaggaccagaacggcttcatctctgccgcggagctccgccacgtgatgaccaacctaggcgagaagctgaccgacgaggaggtcgacgagatgatccgcgaggccgacgttgatggcgatggccagatcaactacgaggagttcgtcaaggtcatgatggccaagtgagtaaagcctgcggtaatggtatagtaaccccgctcggaaggaggaaaccgtgcgttgcatattagtaaggcaatgcaatgcagctcttgtttccttcttcccgtgaagaaaccgtactagctgtagctgctgaacgtttgagtccctctgctgccacccttatctccattgtgccgtcgaacctccttgcttcccctgtgtgaatctgtacggattttcgtgttctgaacactgattgcagttgaatccagtttgtagttctatttgttcatcgaattcgaatctgcccgattcctttc

SEQ ID NO: 30605 - protein, 118 aa, Zea mays subsp. mays
  peptide (1)..(118): Ceres Seq. ID no. 12359910
  misc_feature (54)..(82): Pfam Name: Pfam Description:  EF hand
  misc_feature (43)..(102): NCBI GI NO: 34903134 NR Description: unnamed protein product
  misc_feature (43)..(102): NCBI GI NO: 100665 NR Description: calmodulin 2 (clone lambda DASH) - rice
  misc_feature (43)..(102): NCBI GI NO: 15229784 NR Description: calmodulin 7; protein id: At3g43810
  misc_feature (43)..(102): NCBI GI NO: 34304715 NR Description: calmodulin 4 [Daucus carota]
  misc_feature (43)..(102): NCBI GI NO: 20186 NR Description: calmodulin [Oryza sativa]
  misc_feature (43)..(102): NCBI GI NO: 1754999 NR Description: calmodulin TaCaM2-2
  misc_feature (43)..(102): NCBI GI NO: 3121848 NR Description: CALMODULIN
  misc_feature (43)..(102): NCBI GI NO: 15225840 NR Description: calmodulin; protein id: At2g27030
  misc_feature (43)..(102): NCBI GI NO: 30683369 NR Description: calmodulin [Arabidopsis thaliana]
  misc_feature (43)..(102): NCBI GI NO: 115515 NR Description: Calmodulin
IALCPRSPVASLPLPCLPNPSGHPETARSLARSPRPETSPETMADQLTDDQIAEFKEAFSLFDKDGDGCITTKELGTVMRSLGQNPTEAELQDMINEVDADGMARSTSPSSSTSWPAR

SEQ ID NO: 30606 - protein, 94 aa, Zea mays subsp. mays
  peptide (1)..(94): Ceres Seq. ID no. 12359911
KSLSAPDHRSPPFRSPACLIPPATPKPLARSLAPRAQRQARRPWRTSSLTTKSPSSRRPSASSIRTATVASQPRSLELSCVHWVRTQRRLNSRT

SEQ ID NO: 30607 - protein, 77 aa, Zea mays subsp. mays
  peptide (1)..(77): Ceres Seq. ID no. 12359912
  misc_feature (1)..(77): NCBI GI NO: 34903134 NR Description: unnamed protein product
  misc_feature (1)..(77): NCBI GI NO: 100665 NR Description: calmodulin 2 (clone lambda DASH) - rice
  misc_feature (1)..(77): NCBI GI NO: 15229784 NR Description: calmodulin 7; protein id: At3g43810
  misc_feature (1)..(77): NCBI GI NO: 34304715 NR Description: calmodulin 4 [Daucus carota]
  misc_feature (1)..(77): NCBI GI NO: 20186 NR Description: calmodulin [Oryza sativa]
  misc_feature (1)..(77): NCBI GI NO: 1754999 NR Description: calmodulin TaCaM2-2
  misc_feature (1)..(77): NCBI GI NO: 3121848 NR Description: CALMODULIN
  misc_feature (1)..(77): NCBI GI NO: 15225840 NR Description: calmodulin; protein id: At2g27030
  misc_feature (1)..(77): NCBI GI NO: 30683369 NR Description: calmodulin [Arabidopsis thaliana]
  misc_feature (1)..(77): NCBI GI NO: 115515 NR Description: Calmodulin
MARKMKDTDSEEELKEAFRVFDKDQNGFISAAELRHVMTNLGEKLTDEEVDEMIREADVDGDGQINYEEFVKVMMAK

SEQ ID NO: 30608 - protein, 76 aa, Zea mays subsp. mays
  peptide (1)..(76): Ceres Seq. ID no. 12359913
  misc_feature (12)..(40): Pfam Name: Pfam Description:  EF hand
  misc_feature (1)..(60): NCBI GI NO: 34903134 NR Description: unnamed protein product
  misc_feature (1)..(60): NCBI GI NO: 100665 NR Description: calmodulin 2 (clone lambda DASH) - rice
  misc_feature (1)..(60): NCBI GI NO: 15229784 NR Description: calmodulin 7; protein id: At3g43810
  misc_feature (1)..(60): NCBI GI NO: 34304715 NR Description: calmodulin 4 [Daucus carota]
  misc_feature (1)..(60): NCBI GI NO: 20186 NR Description: calmodulin [Oryza sativa]
  misc_feature (1)..(60): NCBI GI NO: 1754999 NR Description: calmodulin TaCaM2-2
  misc_feature (1)..(60): NCBI GI NO: 3121848 NR Description: CALMODULIN
  misc_feature (1)..(60): NCBI GI NO: 15225840 NR Description: calmodulin; protein id: At2g27030
  misc_feature (1)..(60): NCBI GI NO: 30683369 NR Description: calmodulin [Arabidopsis thaliana]
  misc_feature (1)..(60): NCBI GI NO: 115515 NR Description: Calmodulin
MADQLTDDQIAEFKEAFSLFDKDGDGCITTKELGTVMRSLGQNPTEAELQDMINEVDADGMARSTSPSSSTSWPAR

SEQ ID NO: 30609 - DNA, 1008 bp, Zea mays subsp. mays
  misc_feature (1)..(1008): Ceres Seq. ID no. 12360007
gcttgccagcccagccctcaagcaacacgacgcattgcactagctagaccttgggctcgcaaacctcacacacccttccgcttaacctgcagcccttcggtcatcatcagcactcagcagtagcataggcaccaaggtagcgacccccgacacaatgcagtacggcgcggcggcggcggagcaggcgtggtcgtacatgccggtggtggcaccgtcgtcggccgtggagacggcggcggagcgcgtggagcggctggcgtcggagagcgcggtggtggtgttcagcgtgagcacctgctgcatgtgccacgccgtgaagcgcctcttctgcggcatgggcgtgcacccgacggtgcacgagctggaccacgacccgcggggccgcgagctggagcgcgccctcgcctgcctcctcggcgcctccggagcctcggcggcgggcgcgccggtcgtgcccgtcgtgttcatcggcggcaggctggtcggcgccatggaccgcgtcatggccgcgcacatcaacggcaccctcgtgccgctgctcaaggacgccggcgcgctctggctgtgatctcatcgccggccgctagctactagccattgccgccgttgcagctgttcgatcggggggctagctgatagtaaggcaggttacttattaattaatacacccaaagtagtgagttattaatcatagagtgcgtgcgcttgtgtgtttgtgtgtgtgttagtgggtgtgagagagagaggtcggtgattctttttactgatgctgcctccgtcttgtgtgtgggagctagctagttagatcgtgcttgcatgcccacgcgcgtatgtacgagtgtgtgtgcactgctactgctactgctagctaggtttggtcggtgctagaagagatcgatcggtttagtgttcttctcttccatgcatcttattaatcagtttggcttggggttccggcccctcgtctttgtgttttcatatcagagccatgcgtgcgtgcatctgggc

SEQ ID NO: 30610 - protein, 137 aa, Zea mays subsp. mays
  peptide (1)..(137): Ceres Seq. ID no. 12360008
  misc_feature (39)..(129): Pfam Name: Pfam Description:  Glutaredoxin
  misc_feature (1)..(137): NCBI GI NO: 21740746 NR Description: OSJNBa0072K14.11
  misc_feature (25)..(137): NCBI GI NO: 15232836 NR Description: putative glutaredoxin; protein id: At3g02000.1
  misc_feature (25)..(137): NCBI GI NO: 15241297 NR Description: glutaredoxin-like protein; protein id: At5g14070
  misc_feature (34)..(135): NCBI GI NO: 1532163 NR Description: similar to glutaredoxin encoded by GenBankAccession Number Z49699
  misc_feature (34)..(137): NCBI GI NO: 21537203 NR Description: glutaredoxin-like protein [Arabidopsis thaliana]
  misc_feature (29)..(137): NCBI GI NO: 34914726 NR Description: P0560B06.28
  misc_feature (21)..(137): NCBI GI NO: 33146704 NR Description: glutaredoxin-like protein
  misc_feature (28)..(137): NCBI GI NO: 34907208 NR Description: putative glutaredoxin
  misc_feature (29)..(137): NCBI GI NO: 15234680 NR Description: glutaredoxin homolog; protein id: At4g15700.1
  misc_feature (29)..(137): NCBI GI NO: 15234673 NR Description: glutaredoxin; protein id: At4g15670.1
MQYGAAAAEQAWSYMPVVAPSSAVETAAERVERLASESAVVVFSVSTCCMCHAVKRLFCGMGVHPTVHELDHDPRGRELERALACLLGASGASAAGAPVVPVVFIGGRLVGAMDRVMAAHINGTLVPLLKDAGALWL

SEQ ID NO: 30611 - protein, 123 aa, Zea mays subsp. mays
  peptide (1)..(123): Ceres Seq. ID no. 12360009
  misc_feature (25)..(115): Pfam Name: Pfam Description:  Glutaredoxin
  misc_feature (1)..(123): NCBI GI NO: 21740746 NR Description: OSJNBa0072K14.11
  misc_feature (11)..(123): NCBI GI NO: 15232836 NR Description: putative glutaredoxin; protein id: At3g02000.1
  misc_feature (11)..(123): NCBI GI NO: 15241297 NR Description: glutaredoxin-like protein; protein id: At5g14070
  misc_feature (20)..(121): NCBI GI NO: 1532163 NR Description: similar to glutaredoxin encoded by GenBankAccession Number Z49699
  misc_feature (20)..(123): NCBI GI NO: 21537203 NR Description: glutaredoxin-like protein [Arabidopsis thaliana]
  misc_feature (15)..(123): NCBI GI NO: 34914726 NR Description: P0560B06.28
  misc_feature (7)..(123): NCBI GI NO: 33146704 NR Description: glutaredoxin-like protein
  misc_feature (14)..(123): NCBI GI NO: 34907208 NR Description: putative glutaredoxin
  misc_feature (15)..(123): NCBI GI NO: 15234680 NR Description: glutaredoxin homolog; protein id: At4g15700.1
  misc_feature (15)..(123): NCBI GI NO: 15234673 NR Description: glutaredoxin; protein id: At4g15670.1
MPVVAPSSAVETAAERVERLASESAVVVFSVSTCCMCHAVKRLFCGMGVHPTVHELDHDPRGRELERALACLLGASGASAAGAPVVPVVFIGGRLVGAMDRVMAAHINGTLVPLLKDAGALWL

SEQ ID NO: 30612 - protein, 88 aa, Zea mays subsp. mays
  peptide (1)..(88): Ceres Seq. ID no. 12360010
  misc_feature (1)..(80): Pfam Name: Pfam Description:  Glutaredoxin
  misc_feature (1)..(88): NCBI GI NO: 21740746 NR Description: OSJNBa0072K14.11
  misc_feature (1)..(88): NCBI GI NO: 15232836 NR Description: putative glutaredoxin; protein id: At3g02000.1
  misc_feature (1)..(88): NCBI GI NO: 15241297 NR Description: glutaredoxin-like protein; protein id: At5g14070
  misc_feature (1)..(86): NCBI GI NO: 1532163 NR Description: similar to glutaredoxin encoded by GenBankAccession Number Z49699
  misc_feature (1)..(88): NCBI GI NO: 21537203 NR Description: glutaredoxin-like protein [Arabidopsis thaliana]
  misc_feature (1)..(88): NCBI GI NO: 34914726 NR Description: P0560B06.28
  misc_feature (1)..(88): NCBI GI NO: 33146704 NR Description: glutaredoxin-like protein
  misc_feature (1)..(88): NCBI GI NO: 34907208 NR Description: putative glutaredoxin
  misc_feature (1)..(88): NCBI GI NO: 15234680 NR Description: glutaredoxin homolog; protein id: At4g15700.1
  misc_feature (1)..(88): NCBI GI NO: 15234673 NR Description: glutaredoxin; protein id: At4g15670.1
MCHAVKRLFCGMGVHPTVHELDHDPRGRELERALACLLGASGASAAGAPVVPVVFIGGRLVGAMDRVMAAHINGTLVPLLKDAGALWL

SEQ ID NO: 30613 - DNA, 920 bp, Zea mays subsp. mays
  misc_feature (1)..(920): Ceres Seq. ID no. 12436141
acagacaactcagatcgtttctaatcattccatctcaaagacaggagttcgtctccttgttaggcaaagaccggtagcaaaatgatcagctccaagaagctagctcagttgtccaagaagatgcagggaatgggtgcagttgggcgaagaagggtcacagtagtgagaaaggaaatcaacccatcttgcagcagcatagttgcagggaagggcaactgcatcgtctactcttctgatgggaagcggtttgagatccccctttcttacctccacacggcagtgtttgtagagctcctgaagctgtcgcaggaagagtttgggttcacaagtgatgggaggatcacactgccttgcgataaagcagtgatggagtatgtgatgtgtttgctaaggagagaagcctccgaggatgttgagaaggcgctcctcagttccatagtgatgtcttgccaccacacaaacaggatggtgcaaccaccaagtggagtgaaccaccacttcgctgtgtgcagctcctgaagatgaagatatccatggcttggagcttgtttcagcacttccctgtgtgcagctcctgaagatgaagatatccatgtcctggagcttgtttcccttctttttttcgcttccatcttttttcccagaagtaccttggagcacggtttttgtgcgatgtttttccaatggtacactgaggatgtacagatggatgcgtgattagaaaagaaggaatcaagattgccactgagacaataaagtagtgttgatttagaacctacgaaagaagataccatgatgtttgcactgtaaaaccagagctgccaaatggtctagtactgtagcgaatagcatctttcctttttccttagccctctacatgcaagggcaacagtaaattaaactatttacatggggtgctc

SEQ ID NO: 30614 - protein, 145 aa, Zea mays subsp. mays
  peptide (1)..(145): Ceres Seq. ID no. 12436142
  misc_feature (1)..(104): Pfam Name: Pfam Description:  Auxin responsive protein
  misc_feature (1)..(119): NCBI GI NO: 26452075 NR Description: putative auxin-induced protein
  misc_feature (1)..(119): NCBI GI NO: 15218924 NR Description: auxin-induced protein, putative
  misc_feature (1)..(119): NCBI GI NO: 21593671 NR Description: auxin-induced protein, putative
  misc_feature (1)..(119): NCBI GI NO: 21592571 NR Description: auxin-induced protein, putative
  misc_feature (1)..(119): NCBI GI NO: 18397123 NR Description: auxin-induced protein, putative
  misc_feature (1)..(143): NCBI GI NO: 20149052 NR Description: auxin-induced SAUR-like protein [Capsicum annuum]
  misc_feature (1)..(119): NCBI GI NO: 15241052 NR Description: putative protein; protein id: At5g27780.1
  misc_feature (1)..(119): NCBI GI NO: 18397101 NR Description: auxin-induced protein, putative
  misc_feature (1)..(119): NCBI GI NO: 38603942 NR Description: At1g29420 [Arabidopsis thaliana]
  misc_feature (1)..(119): NCBI GI NO: 26452170 NR Description: putative auxin-induced protein
MISSKKLAQLSKKMQGMGAVGRRRVTVVRKEINPSCSSIVAGKGNCIVYSSDGKRFEIPLSYLHTAVFVELLKLSQEEFGFTSDGRITLPCDKAVMEYVMCLLRREASEDVEKALLSSIVMSCHHTNRMVQPPSGVNHHFAVCSS

SEQ ID NO: 30615 - protein, 132 aa, Zea mays subsp. mays
  peptide (1)..(132): Ceres Seq. ID no. 12436143
  misc_feature (1)..(91): Pfam Name: Pfam Description:  Auxin responsive protein
  misc_feature (1)..(106): NCBI GI NO: 26452075 NR Description: putative auxin-induced protein
  misc_feature (1)..(106): NCBI GI NO: 15218924 NR Description: auxin-induced protein, putative
  misc_feature (1)..(106): NCBI GI NO: 21593671 NR Description: auxin-induced protein, putative
  misc_feature (1)..(106): NCBI GI NO: 21592571 NR Description: auxin-induced protein, putative
  misc_feature (1)..(106): NCBI GI NO: 18397123 NR Description: auxin-induced protein, putative
  misc_feature (1)..(130): NCBI GI NO: 20149052 NR Description: auxin-induced SAUR-like protein [Capsicum annuum]
  misc_feature (1)..(106): NCBI GI NO: 15241052 NR Description: putative protein; protein id: At5g27780.1
  misc_feature (1)..(106): NCBI GI NO: 18397101 NR Description: auxin-induced protein, putative
  misc_feature (1)..(106): NCBI GI NO: 38603942 NR Description: At1g29420 [Arabidopsis thaliana]
  misc_feature (1)..(106): NCBI GI NO: 26452170 NR Description: putative auxin-induced protein
MQGMGAVGRRRVTVVRKEINPSCSSIVAGKGNCIVYSSDGKRFEIPLSYLHTAVFVELLKLSQEEFGFTSDGRITLPCDKAVMEYVMCLLRREASEDVEKALLSSIVMSCHHTNRMVQPPSGVNHHFAVCSS

SEQ ID NO: 30616 - protein, 129 aa, Zea mays subsp. mays
  peptide (1)..(129): Ceres Seq. ID no. 12436144
  misc_feature (1)..(88): Pfam Name: Pfam Description:  Auxin responsive protein
  misc_feature (1)..(103): NCBI GI NO: 26452075 NR Description: putative auxin-induced protein
  misc_feature (1)..(103): NCBI GI NO: 15218924 NR Description: auxin-induced protein, putative
  misc_feature (1)..(103): NCBI GI NO: 21593671 NR Description: auxin-induced protein, putative
  misc_feature (1)..(103): NCBI GI NO: 21592571 NR Description: auxin-induced protein, putative
  misc_feature (1)..(103): NCBI GI NO: 18397123 NR Description: auxin-induced protein, putative
  misc_feature (1)..(127): NCBI GI NO: 20149052 NR Description: auxin-induced SAUR-like protein [Capsicum annuum]
  misc_feature (1)..(103): NCBI GI NO: 15241052 NR Description: putative protein; protein id: At5g27780.1
  misc_feature (1)..(103): NCBI GI NO: 18397101 NR Description: auxin-induced protein, putative
  misc_feature (1)..(103): NCBI GI NO: 38603942 NR Description: At1g29420 [Arabidopsis thaliana]
  misc_feature (1)..(103): NCBI GI NO: 26452170 NR Description: putative auxin-induced protein
MGAVGRRRVTVVRKEINPSCSSIVAGKGNCIVYSSDGKRFEIPLSYLHTAVFVELLKLSQEEFGFTSDGRITLPCDKAVMEYVMCLLRREASEDVEKALLSSIVMSCHHTNRMVQPPSGVNHHFAVCSS

SEQ ID NO: 30617 - DNA, 1162 bp, Zea mays subsp. mays
  misc_feature (1)..(1162): Ceres Seq. ID no. 12349689
accgcacccagaggaggcaaggagcccatccacatccacctggtcctgctctcaccacaccgccgcgccaatggcggctcgccggcagcaccgccgcggcttcccgctggtcccgctcctgctctccctcctggccgccgccgcgtacggccgcctcatctccgacggcggcccgtccgcgcagctcctctcggtgatccgcctctcggggtcctcgccggccgcgggggcggccgccaaggccgaggagaagtgcgagcagtcctacgggttcctcccctgcaccaccaccgtgctcgggaacctcttcctcgtgctgacgtacggctacctcatgtacaaggcggccacgtacctgtcggcggggagcgagctgctgctcgagatcatggggcccggcctcgtcggcggcctcctcctccccatcctcggcgccctccccgacgcgctcctcgtgctcgtatctggcctgtccgggagtaaagaggaggcacagagtcaggtactgatcggaatggggctgcttgctggttccaccgtcttcctcctcaccctgctttgggggacctgtgtcgttgttggcaaatgtgaccttgggccaaaccgtgaggcagttgatgtaacagacgccaagggcttcagcttgactggcactggtattacaaccgacgtgcagaccagctatgcagcgcggatcatggggctatctgttatccccttcatcatcgctcagttcccaaagatgttgaagacccaccacgagcagcgtctagctatgttgctggccctcattgtgtcattcttgctcgtgctttcctactgtctgtatcaggttttccagccttggattcagaggaggaagcttgcatacgcaaagcacaagcacgtgatctctgggatactgaggcacgcccagatgcagtcactcggccgtctgctaaacgatgatggcacgcccaatgacgacgtcatcagaaagctgttccgcaagatcgacatggaccagagcgaatccctgtcccgtgctgagctgcacgccctcatcgtcggtatcaacttcgaggaggttgactttgacaggacggatgcggtggacaaggtcatggacgacttcgacacgtcccgcaacgatgtcgttgagcaggaggagtttgtgcagggg

SEQ ID NO: 30618 - protein, 387 aa, Zea mays subsp. mays
  peptide (1)..(387): Ceres Seq. ID no. 12349690
  misc_feature (323)..(351): Pfam Name: Pfam Description:  EF hand
  misc_feature (162)..(386): NCBI GI NO: 34903912 NR Description: unnamed protein product
  misc_feature (24)..(153): NCBI GI NO: 34903912 NR Description: unnamed protein product
  misc_feature (36)..(386): NCBI GI NO: 30695448 NR Description: expressed protein [Arabidopsis thaliana]
  misc_feature (36)..(386): NCBI GI NO: 25405975 NR Description: protein F12M16.12
  misc_feature (112)..(386): NCBI GI NO: 13605639 NR Description: At1g53210/F12M16_12 [Arabidopsis thaliana]
  misc_feature (81)..(386): NCBI GI NO: 15218787 NR Description: unknown protein; protein id: At1g29020.1
  misc_feature (111)..(250): NCBI GI NO: 16930749 NR Description: drought-induced protein RDI [Retama raetam]
  misc_feature (52)..(386): NCBI GI NO: 26449859 NR Description: unknown protein [Arabidopsis thaliana]
  misc_feature (85)..(247): NCBI GI NO: 15218787 NR Description: unknown protein; protein id: At1g29020.1
  misc_feature (85)..(192): NCBI GI NO: 15226193 NR Description: unknown protein; protein id: At2g34030.1
PHPEEARSPSTSTWSCSHHTAAPMAARRQHRRGFPLVPLLLSLLAAAAYGRLISDGGPSAQLLSVIRLSGSSPAAGAAAKAEEKCEQSYGFLPCTTTVLGNLFLVLTYGYLMYKAATYLSAGSELLLEIMGPGLVGGLLLPILGALPDALLVLVSGLSGSKEEAQSQVLIGMGLLAGSTVFLLTLLWGTCVVVGKCDLGPNREAVDVTDAKGFSLTGTGITTDVQTSYAARIMGLSVIPFIIAQFPKMLKTHHEQRLAMLLALIVSFLLVLSYCLYQVFQPWIQRRKLAYAKHKHVISGILRHAQMQSLGRLLNDDGTPNDDVIRKLFRKIDMDQSESLSRAELHALIVGINFEEVDFDRTDAVDKVMDDFDTSRNDVVEQEEFVQG

SEQ ID NO: 30619 - protein, 364 aa, Zea mays subsp. mays
  peptide (1)..(364): Ceres Seq. ID no. 12349691
  misc_feature (300)..(328): Pfam Name: Pfam Description:  EF hand
  misc_feature (139)..(363): NCBI GI NO: 34903912 NR Description: unnamed protein product
  misc_feature (1)..(130): NCBI GI NO: 34903912 NR Description: unnamed protein product
  misc_feature (13)..(363): NCBI GI NO: 30695448 NR Description: expressed protein [Arabidopsis thaliana]
  misc_feature (13)..(363): NCBI GI NO: 25405975 NR Description: protein F12M16.12
  misc_feature (89)..(363): NCBI GI NO: 13605639 NR Description: At1g53210/F12M16_12 [Arabidopsis thaliana]
  misc_feature (58)..(363): NCBI GI NO: 15218787 NR Description: unknown protein; protein id: At1g29020.1
  misc_feature (88)..(227): NCBI GI NO: 16930749 NR Description: drought-induced protein RDI [Retama raetam]
  misc_feature (29)..(363): NCBI GI NO: 26449859 NR Description: unknown protein [Arabidopsis thaliana]
  misc_feature (62)..(224): NCBI GI NO: 15218787 NR Description: unknown protein; protein id: At1g29020.1
  misc_feature (62)..(169): NCBI GI NO: 15226193 NR Description: unknown protein; protein id: At2g34030.1
MAARRQHRRGFPLVPLLLSLLAAAAYGRLISDGGPSAQLLSVIRLSGSSPAAGAAAKAEEKCEQSYGFLPCTTTVLGNLFLVLTYGYLMYKAATYLSAGSELLLEIMGPGLVGGLLLPILGALPDALLVLVSGLSGSKEEAQSQVLIGMGLLAGSTVFLLTLLWGTCVVVGKCDLGPNREAVDVTDAKGFSLTGTGITTDVQTSYAARIMGLSVIPFIIAQFPKMLKTHHEQRLAMLLALIVSFLLVLSYCLYQVFQPWIQRRKLAYAKHKHVISGILRHAQMQSLGRLLNDDGTPNDDVIRKLFRKIDMDQSESLSRAELHALIVGINFEEVDFDRTDAVDKVMDDFDTSRNDVVEQEEFVQG

SEQ ID NO: 30620 - protein, 276 aa, Zea mays subsp. mays
  peptide (1)..(276): Ceres Seq. ID no. 12349692
  misc_feature (212)..(240): Pfam Name: Pfam Description:  EF hand
  misc_feature (51)..(275): NCBI GI NO: 34903912 NR Description: unnamed protein product
  misc_feature (1)..(42): NCBI GI NO: 34903912 NR Description: unnamed protein product
  misc_feature (1)..(275): NCBI GI NO: 30695448 NR Description: expressed protein [Arabidopsis thaliana]
  misc_feature (1)..(275): NCBI GI NO: 25405975 NR Description: protein F12M16.12
  misc_feature (1)..(275): NCBI GI NO: 13605639 NR Description: At1g53210/F12M16_12 [Arabidopsis thaliana]
  misc_feature (1)..(275): NCBI GI NO: 15218787 NR Description: unknown protein; protein id: At1g29020.1
  misc_feature (1)..(139): NCBI GI NO: 16930749 NR Description: drought-induced protein RDI [Retama raetam]
  misc_feature (1)..(275): NCBI GI NO: 26449859 NR Description: unknown protein [Arabidopsis thaliana]
  misc_feature (1)..(136): NCBI GI NO: 15218787 NR Description: unknown protein; protein id: At1g29020.1
  misc_feature (1)..(81): NCBI GI NO: 15226193 NR Description: unknown protein; protein id: At2g34030.1
MYKAATYLSAGSELLLEIMGPGLVGGLLLPILGALPDALLVLVSGLSGSKEEAQSQVLIGMGLLAGSTVFLLTLLWGTCVVVGKCDLGPNREAVDVTDAKGFSLTGTGITTDVQTSYAARIMGLSVIPFIIAQFPKMLKTHHEQRLAMLLALIVSFLLVLSYCLYQVFQPWIQRRKLAYAKHKHVISGILRHAQMQSLGRLLNDDGTPNDDVIRKLFRKIDMDQSESLSRAELHALIVGINFEEVDFDRTDAVDKVMDDFDTSRNDVVEQEEFVQG

SEQ ID NO: 30621 - DNA, 935 bp, Zea mays subsp. mays
  misc_feature (1)..(935): Ceres Seq. ID no. 12363238
gcacgagaccattacctagaacatcctaatcgaaaaatctatatctaaggcctatagctaactagctcggtccggcgatagaggccgccatggcgtccatcatcgtcatcgccgccgtgctcgtcctggacgtcctcgccttcgtgctcgccatcggcgccgagcgccgccggagctacgtgaactacgtgagcgtggacccggccggggggtcctactgcgtgtacagctccgacgcgtcgacggcgtacggcgtgagcgcgctgctgctgctgctcgccgcgcaggccgtggccatggtcgccacccgctgcttctgctgcggccgcgcgctctcgccgggccgctggcgggcgtggtccggcatctgcttcatcgtctgctgggtgacgttcgtgatcgcggagctgtgcctgctggccgggtcggtccggaacgcgtatcacaccaagtacttccccaagggcgacggcccgccgccgtgcgccatgctgcgcaagggcgtcttcgccgccggcgccgccttcaccttcctcaccgcgctgttcaccgagctgcactacctcttctacgccagggcgcgcgacgccgccgccgtggccccgcccatcgtcggcggcatcggcatgacccgcatgtgatgtggaggatatagctgcatgtgatagtactgtactactgtgactacagcgtgctggaactgttgggtttgtaattctgttattgttagccatcgcaacatagctgcattgttagccatcgcccatcggcattcagcagcagactggactagtttttttttccctctccctgcgcgtacattcaccacaaatcagcagaggtggatctgtcccagtccggcgcttgacgagaagcacaacgcacaaaggtgatcaaaagccagaaaatgttcagaatggtgacaacattattgc

SEQ ID NO: 30622 - protein, 183 aa, Zea mays subsp. mays
  peptide (1)..(183): Ceres Seq. ID no. 12363239
  misc_feature (1)..(183): NCBI GI NO: 38344206 NR Description: OSJNBa0064G10.22
  misc_feature (1)..(180): NCBI GI NO: 34394069 NR Description: unknown protein
  misc_feature (1)..(180): NCBI GI NO: 38016521 NR Description: fiber protein Fb34 [Gossypium barbadense]
  misc_feature (1)..(167): NCBI GI NO: 18400781 NR Description: expressed protein; protein id: At3g15480
  misc_feature (1)..(166): NCBI GI NO: 18404242 NR Description: expressed protein; protein id: At1g52910
  misc_feature (1)..(168): NCBI GI NO: 18416991 NR Description: Expressed protein; protein id: At4g27435
  misc_feature (1)..(183): NCBI GI NO: 18407003 NR Description: Expressed protein; protein id: At1g61065
  misc_feature (1)..(183): NCBI GI NO: 21554630 NR Description: unknown [Arabidopsis thaliana]
  misc_feature (6)..(176): NCBI GI NO: 22748411 NR Description: hypothetical protein
  misc_feature (1)..(99): NCBI GI NO: 38344205 NR Description: OSJNBa0064G10.21
MASIIVIAAVLVLDVLAFVLAIGAERRRSYVNYVSVDPAGGSYCVYSSDASTAYGVSALLLLLAAQAVAMVATRCFCCGRALSPGRWRAWSGICFIVCWVTFVIAELCLLAGSVRNAYHTKYFPKGDGPPPCAMLRKGVFAAGAAFTFLTALFTELHYLFYARARDAAAVAPPIVGGIGMTRM

SEQ ID NO: 30623 - protein, 114 aa, Zea mays subsp. mays
  peptide (1)..(114): Ceres Seq. ID no. 12363240
  misc_feature (1)..(114): NCBI GI NO: 38344206 NR Description: OSJNBa0064G10.22
  misc_feature (1)..(111): NCBI GI NO: 34394069 NR Description: unknown protein
  misc_feature (1)..(111): NCBI GI NO: 38016521 NR Description: fiber protein Fb34 [Gossypium barbadense]
  misc_feature (1)..(98): NCBI GI NO: 18400781 NR Description: expressed protein; protein id: At3g15480
  misc_feature (1)..(97): NCBI GI NO: 18404242 NR Description: expressed protein; protein id: At1g52910
  misc_feature (1)..(99): NCBI GI NO: 18416991 NR Description: Expressed protein; protein id: At4g27435
  misc_feature (1)..(114): NCBI GI NO: 18407003 NR Description: Expressed protein; protein id: At1g61065
  misc_feature (1)..(114): NCBI GI NO: 21554630 NR Description: unknown [Arabidopsis thaliana]
  misc_feature (1)..(107): NCBI GI NO: 22748411 NR Description: hypothetical protein
  misc_feature (1)..(30): NCBI GI NO: 38344205 NR Description: OSJNBa0064G10.21
MVATRCFCCGRALSPGRWRAWSGICFIVCWVTFVIAELCLLAGSVRNAYHTKYFPKGDGPPPCAMLRKGVFAAGAAFTFLTALFTELHYLFYARARDAAAVAPPIVGGIGMTRM

SEQ ID NO: 30624 - DNA, 1067 bp, Zea mays subsp. mays
  misc_feature (1)..(1067): Ceres Seq. ID no. 12354075
atatagatagataggagtacactgcgtaggagacagcaagagggcgaggctgtgtgtgagagagggagaggcagagaacattcggcagtgtgagaatcggaatcggagtcggagatggcttggaatggccgcttcggcaacgacgaggaggggagcggccttgagctcagccttagcctcccgggctacttctccggatcaccaacccaagctgcagcaggtttcgaggacaaagcagacggcggctctgctgctgctgctgctgctgcgcgagcaaagggaagcaatggcttcaaggccaggccggcggcagctgctccggtcgtgggatggccgccagtgcgcgcgttccggcggaacctcgcctcggcgtcctccaagccgtcccgcgatccgccaccaagccacagaggaaacgagtccgcgagcgtcggcgccggcggcaaggccgtcgagggcggcaacaagggcctgttcgtcaaggtcaacatggacggcgtgcccatcggccggaagctcgacctgggcggccacgccggctacgacacgctaaccgccgccgtcgaccacctcttccgcggcctcctctccgctcaaacgtcgggaccaggcggcgagcggcaggcggtcgcggggatcctgaacggtggcggcgagtacacgctggtgtacgaggacgacgagggagaccagatgctggtcggggacgtgccgtggcagatgttcgccgccaccgccaggcgtctgcgcgtgctgcggagctccgatctcaacccctcgtcgctaagggcagctaccaggaagagagctgcagcttagtgcttcgctggcgtaccctggagtctcaactctgaacattttgcggccttttcggagggccaccaatgtaaaattgaagcggtttttcgtggattttagttaccattaccatcatgtatgtgatcaagtagggaagcaggaatctagaggtgatgagcggtgttggtagaatcacgtaatttagtgctaggaccagcagtgtctcaacttttctgaaagtctaacaaggtgtcttggcgctggagtgt

SEQ ID NO: 30625 - protein, 234 aa, Zea mays subsp. mays
  peptide (1)..(234): Ceres Seq. ID no. 12354076
  misc_feature (17)..(219): Pfam Name: Pfam Description:  AUX/IAA family
  misc_feature (1)..(234): NCBI GI NO: 34906394 NR Description: P0710E05.9
  misc_feature (66)..(231): NCBI GI NO: 4093155 NR Description: phytochrome-associated protein 1
  misc_feature (66)..(231): NCBI GI NO: 15228226 NR Description: phytochrome-associated protein 1
  misc_feature (66)..(231): NCBI GI NO: 21593333 NR Description: phytochrome-associated protein 1 (PAP1)
  misc_feature (4)..(231): NCBI GI NO: 15218080 NR Description: auxin regulated protein IAA18, putative
  misc_feature (4)..(231): NCBI GI NO: 25296228 NR Description: auxin-induced protein IAA18
  misc_feature (4)..(231): NCBI GI NO: 21594025 NR Description: auxin regulated protein IAA18, putative
  misc_feature (49)..(229): NCBI GI NO: 34909384 NR Description: putative phytochrome-associated protein
  misc_feature (8)..(218): NCBI GI NO: 15235385 NR Description: early auxin-inducible protein 11
  misc_feature (8)..(218): NCBI GI NO: 20466408 NR Description: early auxin-inducible protein 11
MAWNGRFGNDEEGSGLELSLSLPGYFSGSPTQAAAGFEDKADGGSAAAAAAARAKGSNGFKARPAAAAPVVGWPPVRAFRRNLASASSKPSRDPPPSHRGNESASVGAGGKAVEGGNKGLFVKVNMDGVPIGRKLDLGGHAGYDTLTAAVDHLFRGLLSAQTSGPGGERQAVAGILNGGGEYTLVYEDDEGDQMLVGDVPWQMFAATARRLRVLRSSDLNPSSLRAATRKRAAA

SEQ ID NO: 30626 - protein, 174 aa, Zea mays subsp. mays
  peptide (1)..(174): Ceres Seq. ID no. 12354077
MAASARVPAEPRLGVLQAVPRSATKPQRKRVRERRRRRQGRRGRQQGPVRQGQHGRRAHRPEARPGRPRRLRHANRRRRPPLPRPPLRSNVGTRRRAAGGRGDPERWRRVHAGVRGRRGRPDAGRGRAVADVRRHRQASARAAELRSQPLVAKGSYQEESCSLVLRWRTLESQL

SEQ ID NO: 30627 - protein, 142 aa, Zea mays subsp. mays
  peptide (1)..(142): Ceres Seq. ID no. 12354078
MAASATTRRGAALSSALASRATSPDHQPKLQQVSRTKQTAALLLLLLLREQREAMASRPGRRQLLRSWDGRQCARSGGTSPRRPPSRPAIRHQATEETSPRASAPAARPSRAATRACSSRSTWTACPSAGSSTWAATPATTR

SEQ ID NO: 30628 - DNA, 711 bp, Zea mays subsp. mays
  misc_feature (1)..(711): Ceres Seq. ID no. 12346855
gaagcgacggacgagacgaggcacggaacggagcgagccagactacccacctaggcccagcggcatgaggggcagcgagatgttgaccgccgcggggggcgccggcacggccccgtccacggtctcctcgggggcggccgcggccgcggacctggttgctggagccgggggcacgggcgctatcggcgcgggcggaggacgcggcaacttccccctcgccgtcgccctcctcgccttcgccttcgcaaacttcgttaacctcgtctccatctggttaaaagagaagaggtgggatgcaaggaaatttcttacttcagctggagtcatgtcatctctttctgcaactgtggggagcttggccgttgctgtgggtcaacaagaaggcgcagatagctctgcatttgcccttgcattgatttttgctgccgttgtaatgtatgatgcatcaggaattagatggcacacaggtcgccaagctgcgttgttgaatcaaatagtctgtgatttcccaccagaacatccaatcatttcaacctttcggccactacgggaacctcttggacacagcccacttcaggtttttgcaggagcacttgttggttgtgcagctgcttatttcatgggaaaatctgtataaggaataggaatgtatagggtttggcttgtacacgaattccattgacttatttttgtaaaaaaatatcattgatc

SEQ ID NO: 30629 - protein, 211 aa, Zea mays subsp. mays
  peptide (1)..(211): Ceres Seq. ID no. 12346856
  misc_feature (69)..(210): Pfam Name: Pfam Description:  Divergent PAP2 family
  misc_feature (48)..(210): NCBI GI NO: 30686309 NR Description: expressed protein [Arabidopsis thaliana]
  misc_feature (48)..(194): NCBI GI NO: 11994397 NR Description: gb|AAB61516
  misc_feature (69)..(204): NCBI GI NO: 15220480 NR Description: F12A21
  misc_feature (69)..(204): NCBI GI NO: 21555270 NR Description: unknown [Arabidopsis thaliana]
  misc_feature (69)..(204): NCBI GI NO: 18395459 NR Description: expressed protein; protein id: At1g24350
  misc_feature (69)..(207): NCBI GI NO: 38344227 NR Description: OJ991113_30.3
  misc_feature (69)..(193): NCBI GI NO: 12324675 NR Description: unknown protein [Arabidopsis thaliana]
  misc_feature (69)..(193): NCBI GI NO: 9743358 NR Description: F21J9.1 [Arabidopsis thaliana]
  misc_feature (69)..(204): NCBI GI NO: 7486375 NR Description: hypothetical protein F3I6
  misc_feature (75)..(206): NCBI GI NO: 18412127 NR Description: putative protein; protein id: At3g61770
KRRTRRGTERSEPDYPPRPSGMRGSEMLTAAGGAGTAPSTVSSGAAAAADLVAGAGGTGAIGAGGGRGNFPLAVALLAFAFANFVNLVSIWLKEKRWDARKFLTSAGVMSSLSATVGSLAVAVGQQEGADSSAFALALIFAAVVMYDASGIRWHTGRQAALLNQIVCDFPPEHPIISTFRPLREPLGHSPLQVFAGALVGCAAAYFMGKSV

SEQ ID NO: 30630 - protein, 190 aa, Zea mays subsp. mays
  peptide (1)..(190): Ceres Seq. ID no. 12346857
  misc_feature (48)..(189): Pfam Name: Pfam Description:  Divergent PAP2 family
  misc_feature (27)..(189): NCBI GI NO: 30686309 NR Description: expressed protein [Arabidopsis thaliana]
  misc_feature (27)..(173): NCBI GI NO: 11994397 NR Description: gb|AAB61516
  misc_feature (48)..(183): NCBI GI NO: 15220480 NR Description: F12A21
  misc_feature (48)..(183): NCBI GI NO: 21555270 NR Description: unknown [Arabidopsis thaliana]
  misc_feature (48)..(183): NCBI GI NO: 18395459 NR Description: expressed protein; protein id: At1g24350
  misc_feature (48)..(186): NCBI GI NO: 38344227 NR Description: OJ991113_30.3
  misc_feature (48)..(172): NCBI GI NO: 12324675 NR Description: unknown protein [Arabidopsis thaliana]
  misc_feature (48)..(172): NCBI GI NO: 9743358 NR Description: F21J9.1 [Arabidopsis thaliana]
  misc_feature (48)..(183): NCBI GI NO: 7486375 NR Description: hypothetical protein F3I6
  misc_feature (54)..(185): NCBI GI NO: 18412127 NR Description: putative protein; protein id: At3g61770
MRGSEMLTAAGGAGTAPSTVSSGAAAAADLVAGAGGTGAIGAGGGRGNFPLAVALLAFAFANFVNLVSIWLKEKRWDARKFLTSAGVMSSLSATVGSLAVAVGQQEGADSSAFALALIFAAVVMYDASGIRWHTGRQAALLNQIVCDFPPEHPIISTFRPLREPLGHSPLQVFAGALVGCAAAYFMGKSV

SEQ ID NO: 30631 - protein, 185 aa, Zea mays subsp. mays
  peptide (1)..(185): Ceres Seq. ID no. 12346858
  misc_feature (43)..(184): Pfam Name: Pfam Description:  Divergent PAP2 family
  misc_feature (22)..(184): NCBI GI NO: 30686309 NR Description: expressed protein [Arabidopsis thaliana]
  misc_feature (22)..(168): NCBI GI NO: 11994397 NR Description: gb|AAB61516
  misc_feature (43)..(178): NCBI GI NO: 15220480 NR Description: F12A21
  misc_feature (43)..(178): NCBI GI NO: 18395459 NR Description: expressed protein; protein id: At1g24350
  misc_feature (43)..(178): NCBI GI NO: 21555270 NR Description: unknown [Arabidopsis thaliana]
  misc_feature (43)..(181): NCBI GI NO: 38344227 NR Description: OJ991113_30.3
  misc_feature (43)..(167): NCBI GI NO: 12324675 NR Description: unknown protein [Arabidopsis thaliana]
  misc_feature (43)..(167): NCBI GI NO: 9743358 NR Description: F21J9.1 [Arabidopsis thaliana]
  misc_feature (43)..(178): NCBI GI NO: 7486375 NR Description: hypothetical protein F3I6
  misc_feature (49)..(180): NCBI GI NO: 18412127 NR Description: putative protein; protein id: At3g61770
MLTAAGGAGTAPSTVSSGAAAAADLVAGAGGTGAIGAGGGRGNFPLAVALLAFAFANFVNLVSIWLKEKRWDARKFLTSAGVMSSLSATVGSLAVAVGQQEGADSSAFALALIFAAVVMYDASGIRWHTGRQAALLNQIVCDFPPEHPIISTFRPLREPLGHSPLQVFAGALVGCAAAYFMGKSV

SEQ ID NO: 30632 - DNA, 852 bp, Zea mays subsp. mays
  misc_feature (1)..(852): Ceres Seq. ID no. 12372297
atcggcccctcccttccttctctagttcccttcccttatagtattaactacgacgatggtggtggatgctggtgttggtgttggcggcggcggcggcgccgggacatgtgccgtcggaggattcgcagtctgggacgtgctgctgtggcgccggggccgcgccgacgtgagcgcctgcctgctggcgggcaccgtctcctcctggctgctcttgtacggcggctacaccttggtgtccctcgcctccaacgtgctgctcctgctcctcaccgtgctcttcctgtgggccaaagcggcgcgcctcctgaacaggccgcagcctcccgtcccggagctgcgcgttccgcagcaggccgtggacgaggcggcggcgctgctgcgctctgctctggacgccgcctcggacgccttccgggacatcgcgctgggcagggactcgctgctcttctacagagtcttcctctgcctgtggagcgtgtccatcgtcggcagcgttacagatttcccgaccgcctgctacgcaagtgtggtggctgctctgaccatcccggcgctgtaccacaggcaccaagagtgcatcgccacctacatgagcttcgcctacatgaacctccggatgtacgagatggcgtacgagaggctgtccatgaaatgcttcctcaaggtcagggactggacaatggagctactcaaggatccatgatcccttggttgtttgcgagtgagtgcttcaggtatagagttgattgattggtagatagaatagtggtggttttgattgatgctgactcttgttgtttgatcgatcagtgtgctctggtagatatagtagtggttttgattgtttggtcc

SEQ ID NO: 30633 - protein, 249 aa, Zea mays subsp. mays
  peptide (1)..(249): Ceres Seq. ID no. 12372298
IGPSLPSLVPFPYSINYDDGGGCWCWCWRRRRRRDMCRRRIRSLGRAAVAPGPRRRERLPAGGHRLLLAALVRRLHLGVPRLQRAAPAPHRALPVGQSGAPPEQAAASRPGAARSAAGRGRGGGAAALCSGRRLGRLPGHRAGQGLAALLQSLPLPVERVHRRQRYRFPDRLLRKCGGCSDHPGAVPQAPRVHRHLHELRLHEPPDVRDGVREAVHEMLPQGQGLDNGATQGSMIPWLFASECFRYRVD

SEQ ID NO: 30634 - protein, 215 aa, Zea mays subsp. mays
  peptide (1)..(215): Ceres Seq. ID no. 12372299
  misc_feature (30)..(155): NCBI GI NO: 38344513 NR Description: OSJNBa0016N04.6
  misc_feature (158)..(215): NCBI GI NO: 38344513 NR Description: OSJNBa0016N04.6
  misc_feature (20)..(181): NCBI GI NO: 15232423 NR Description: putative protein; protein id: At3g54120.1
  misc_feature (20)..(183): NCBI GI NO: 38345298 NR Description: OSJNBa0043A12.26
  misc_feature (19)..(175): NCBI GI NO: 18402246 NR Description: expressed protein; protein id: At3g19460
  misc_feature (19)..(175): NCBI GI NO: 21593206 NR Description: unknown [Arabidopsis thaliana]
  misc_feature (24)..(203): NCBI GI NO: 30679374 NR Description: expressed protein [Arabidopsis thaliana]
  misc_feature (20)..(204): NCBI GI NO: 34909318 NR Description: OSJNBb0021A09.5
  misc_feature (30)..(203): NCBI GI NO: 25411624 NR Description: hypothetical protein At2g15280
  misc_feature (20)..(199): NCBI GI NO: 18406991 NR Description: expressed protein; protein id: At2g46170
MVVDAGVGVGGGGGAGTCAVGGFAVWDVLLWRRGRADVSACLLAGTVSSWLLLYGGYTLVSLASNVLLLLLTVLFLWAKAARLLNRPQPPVPELRVPQQAVDEAAALLRSALDAASDAFRDIALGRDSLLFYRVFLCLWSVSIVGSVTDFPTACYASVVAALTIPALYHRHQECIATYMSFAYMNLRMYEMAYERLSMKCFLKVRDWTMELLKDP

SEQ ID NO: 30635 - protein, 214 aa, Zea mays subsp. mays
  peptide (1)..(214): Ceres Seq. ID no. 12372300
MCRRRIRSLGRAAVAPGPRRRERLPAGGHRLLLAALVRRLHLGVPRLQRAAPAPHRALPVGQSGAPPEQAAASRPGAARSAAGRGRGGGAAALCSGRRLGRLPGHRAGQGLAALLQSLPLPVERVHRRQRYRFPDRLLRKCGGCSDHPGAVPQAPRVHRHLHELRLHEPPDVRDGVREAVHEMLPQGQGLDNGATQGSMIPWLFASECFRYRVD

SEQ ID NO: 30636 - DNA, 1746 bp, Zea mays subsp. mays
  misc_feature (1)..(1746): Ceres Seq. ID no. 13492837
gttctcccccaaccccaattcgccttcacctcgccgcttcctccattgaccgccaccgttgacgtcgtcttccggcgaggtagctcgccggaagacctcacctggactttcccgaagcaccctccacacactctttaaccctccggaatggccgcctgcttctagctcgtcgacgccccaatctccgcttgcttcctcgacagccccatccgcctcttctcgctctcgctacggctcctctgcctgttcgccatggcgatccgcatcaccgtctcctactccggctacgtggcgcagaacctcgccgcgtcgctcggccaccgcttctcctccgcctccgcctcgggcagccgcctcctccatgacggcgcctggcgccccttctgcatcttcacctccacccgccagcccgagaagcaccgcagtagcggcagcgaccgccatgacggaggcgactacaaccacccgaagccccaggccatcgccgccggagctcactcgttgctgctcacgcgtgcgtgcttatcgtccaagtcgccgccgccgtctcttgccgtgggggctgctctcggtgctcgcgcagaggacgggaccgacgcctggaaccaccggatcggcggcatctctctcaggctcgtcgccgatttccctcggtttcaaccccacctccttcctcccgttcctgcagacagcgaggtggctcccgtgcagcgaccttgccacctcgtcgtcttcggcaccctcttcccctccccgctcgcttgcgccttcggctccccccaagaaggcgttgattggtgctgctactggttctaccggaattgcgacgagcagtggtgctggtgcagcgatgagcaggagcaactggctgtcgaggtgggtcagctcctgctccgatgacgccaagacggcgtttgcggctgtgaccgtgccacttctctacggctcgtccctggccgagccgaagtccatcccgtccaagtccatgtacccgaccttcgatgtcggtgatcggattcttgctgagaaggtctcatacatattccgggatccagaaatttcggacatcgtgatcttccgggctcccccaggacttcaggtttatggctacagctcaggtgatgtgttcatcaagagagttgttgccaagggaggagactatgtcgaagtgcgtgatggcaagctgtttgttaatggagtagttcaggatgaggattttgtgctggagccacacaactacgagatggaaccagtgcttgtgccggaaggttatgtgttcgtgctgggagacaaccgcaacaacagctttgattcccacaactggggtccacttccagtgaggaacattgtcgggagatctatcctccggtattggccgccatcgaagatcaatgatacaatttatgagcctgatgtgtcccgcctcgcggtgccgtcctcgtagtagtcgttgcagtgatgctggatatccagtgtgtgtgtacaatgaccttattacttcgtggagcctcatttgatgagctgagctccagttccaattctctcagaatattttgtctcctgagtgttccctgtaaattctctttgcctgacagatttgttttccctgccgcttggcagatgcttgttcaaagcacgggaaagtgtagtaccttgcatcttgcaatataaactaattaaaccggttacccttttttttcttttatcgagataaactctgcttttaagaaagcaataaggtttcgt

SEQ ID NO: 30637 - protein, 360 aa, Zea mays subsp. mays
  peptide (1)..(360): Ceres Seq. ID no. 13492838
  misc_feature (170)..(331): Pfam Name: Pfam Description:  Signal peptidase I
  misc_feature (61)..(354): NCBI GI NO: 15222236 NR Description: chloroplast thylakoidal processing peptidase -related
  misc_feature (61)..(354): NCBI GI NO: 21553622 NR Description: chloroplast thylakoidal processing peptidase
  misc_feature (167)..(348): NCBI GI NO: 25408074 NR Description: probable signal peptidase I
  misc_feature (167)..(348): NCBI GI NO: 30684587 NR Description: signal peptidase I -related [Arabidopsis thaliana]
  misc_feature (89)..(349): NCBI GI NO: 9294054 NR Description: contains similarity to signal peptidase
  misc_feature (89)..(349): NCBI GI NO: 30687572 NR Description: chloroplast thylakoidal processing peptidase -related
  misc_feature (89)..(349): NCBI GI NO: 25082936 NR Description: chloroplast thylakoidal processing peptidase
  misc_feature (164)..(342): NCBI GI NO: 16329254 NR Description: leader peptidase I [Synechocystis sp. PCC 6803]
  misc_feature (187)..(343): NCBI GI NO: 17230467 NR Description: signal peptidase I [Nostoc sp. PCC 7120]
  misc_feature (169)..(343): NCBI GI NO: 23042815 NR Description: hypothetical protein
MTAPGAPSASSPPPASPRSTAVAAATAMTEATTTTRSPRPSPPELTRCCSRVRAYRPSRRRRLLPWGLLSVLAQRTGPTPGTTGSAASLSGSSPISLGFNPTSFLPFLQTARWLPCSDLATSSSSAPSSPPRSLAPSAPPKKALIGAATGSTGIATSSGAGAAMSRSNWLSRWVSSCSDDAKTAFAAVTVPLLYGSSLAEPKSIPSKSMYPTFDVGDRILAEKVSYIFRDPEISDIVIFRAPPGLQVYGYSSGDVFIKRVVAKGGDYVEVRDGKLFVNGVVQDEDFVLEPHNYEMEPVLVPEGYVFVLGDNRNNSFDSHNWGPLPVRNIVGRSILRYWPPSKINDTIYEPDVSRLAVPSS

SEQ ID NO: 30638 - protein, 333 aa, Zea mays subsp. mays
  peptide (1)..(333): Ceres Seq. ID no. 13492839
  misc_feature (143)..(304): Pfam Name: Pfam Description:  Signal peptidase I
  misc_feature (34)..(327): NCBI GI NO: 15222236 NR Description: chloroplast thylakoidal processing peptidase -related
  misc_feature (34)..(327): NCBI GI NO: 21553622 NR Description: chloroplast thylakoidal processing peptidase
  misc_feature (140)..(321): NCBI GI NO: 25408074 NR Description: probable signal peptidase I
  misc_feature (140)..(321): NCBI GI NO: 30684587 NR Description: signal peptidase I -related [Arabidopsis thaliana]
  misc_feature (62)..(322): NCBI GI NO: 9294054 NR Description: contains similarity to signal peptidase
  misc_feature (62)..(322): NCBI GI NO: 30687572 NR Description: chloroplast thylakoidal processing peptidase -related
  misc_feature (62)..(322): NCBI GI NO: 25082936 NR Description: chloroplast thylakoidal processing peptidase
  misc_feature (137)..(315): NCBI GI NO: 16329254 NR Description: leader peptidase I [Synechocystis sp. PCC 6803]
  misc_feature (160)..(316): NCBI GI NO: 17230467 NR Description: signal peptidase I [Nostoc sp. PCC 7120]
  misc_feature (142)..(316): NCBI GI NO: 23042815 NR Description: hypothetical protein
MTEATTTTRSPRPSPPELTRCCSRVRAYRPSRRRRLLPWGLLSVLAQRTGPTPGTTGSAASLSGSSPISLGFNPTSFLPFLQTARWLPCSDLATSSSSAPSSPPRSLAPSAPPKKALIGAATGSTGIATSSGAGAAMSRSNWLSRWVSSCSDDAKTAFAAVTVPLLYGSSLAEPKSIPSKSMYPTFDVGDRILAEKVSYIFRDPEISDIVIFRAPPGLQVYGYSSGDVFIKRVVAKGGDYVEVRDGKLFVNGVVQDEDFVLEPHNYEMEPVLVPEGYVFVLGDNRNNSFDSHNWGPLPVRNIVGRSILRYWPPSKINDTIYEPDVSRLAVPSS

SEQ ID NO: 30639 - protein, 215 aa, Zea mays subsp. mays
  peptide (1)..(215): Ceres Seq. ID no. 13492840
MAIRITVSYSGYVAQNLAASLGHRFSSASASGSRLLHDGAWRPFCIFTSTRQPEKHRSSGSDRHDGGDYNHPKPQAIAAGAHSLLLTRACLSSKSPPPSLAVGAALGARAEDGTDAWNHRIGGISLRLVADFPRFQPHLLPPVPADSEVAPVQRPCHLVVFGTLFPSPLACAFGSPQEGVDWCCYWFYRNCDEQWCWCSDEQEQLAVEVGQLLLR

SEQ ID NO: 30640 - DNA, 968 bp, Zea mays subsp. mays; identical to SEQ ID NO: 29695
  misc_feature (1)..(968): Ceres Seq. ID no. 12380992

SEQ ID NO: 30641 - protein, 260 aa, Zea mays subsp. mays; identical to SEQ ID NO: 29696
  peptide (1)..(260): Ceres Seq. ID no. 12380993
  misc_feature (50)..(259): Pfam Name: Pfam Description:  SAM dependent carboxyl methyltransferase
  misc_feature (1)..(259): NCBI GI NO: 34911508 NR Description: putative S-adenosyl-L-methionine:salicylic acidcarboxyl methyltransferase
  misc_feature (3)..(259): NCBI GI NO: 34911486 NR Description: putative S-adenosyl-L-methionine:salicylic acidcarboxyl methyltransferase
  misc_feature (16)..(259): NCBI GI NO: 15234420 NR Description: S-adenosyl-L-methionine: carboxyl methyltransferasefamily
  misc_feature (15)..(259): NCBI GI NO: 6651395 NR Description: floral nectary-specific protein
  misc_feature (15)..(259): NCBI GI NO: 15223601 NR Description: S-adenosyl-L-methionine: jasmonic acid carboxylmethyltransferase
  misc_feature (15)..(259): NCBI GI NO: 13676829 NR Description: S-adenosyl-L-methionine: jasmonic acid carboxylmethyltransferase
  misc_feature (20)..(259): NCBI GI NO: 23957318 NR Description: S-adenosyl-L-methionine: salicylic acidmethyltransferase
  misc_feature (15)..(259): NCBI GI NO: 13235641 NR Description: S-adenosyl-L-methionine: salicylic acid carboxylmethyltransferase
  misc_feature (15)..(259): NCBI GI NO: 34809619 NR Description: Chain X
  misc_feature (20)..(259): NCBI GI NO: 18461100 NR Description: S-adenosyl-L-methionine: salicylic acid calboxylmethyltransferase-like

SEQ ID NO: 30642 - protein, 238 aa, Zea mays subsp. mays; identical to SEQ ID NO: 29697
  peptide (1)..(238): Ceres Seq. ID no. 12380994
  misc_feature (28)..(237): Pfam Name: Pfam Description:  SAM dependent carboxyl methyltransferase
  misc_feature (1)..(237): NCBI GI NO: 34911508 NR Description: putative S-adenosyl-L-methionine:salicylic acidcarboxyl methyltransferase
  misc_feature (1)..(237): NCBI GI NO: 34911486 NR Description: putative S-adenosyl-L-methionine:salicylic acidcarboxyl methyltransferase
  misc_feature (1)..(237): NCBI GI NO: 15234420 NR Description: S-adenosyl-L-methionine: carboxyl methyltransferasefamily
  misc_feature (1)..(237): NCBI GI NO: 6651395 NR Description: floral nectary-specific protein
  misc_feature (1)..(237): NCBI GI NO: 15223601 NR Description: S-adenosyl-L-methionine: jasmonic acid carboxylmethyltransferase
  misc_feature (1)..(237): NCBI GI NO: 13676829 NR Description: S-adenosyl-L-methionine: jasmonic acid carboxylmethyltransferase
  misc_feature (1)..(237): NCBI GI NO: 23957318 NR Description: S-adenosyl-L-methionine: salicylic acidmethyltransferase
  misc_feature (1)..(237): NCBI GI NO: 13235641 NR Description: S-adenosyl-L-methionine: salicylic acid carboxylmethyltransferase
  misc_feature (1)..(237): NCBI GI NO: 34809619 NR Description: Chain X
  misc_feature (1)..(237): NCBI GI NO: 18461100 NR Description: S-adenosyl-L-methionine: salicylic acid calboxylmethyltransferase-like

SEQ ID NO: 30643 - protein, 218 aa, Zea mays subsp. mays; identical to SEQ ID NO: 29698
  peptide (1)..(218): Ceres Seq. ID no. 12380995
  misc_feature (8)..(217): Pfam Name: Pfam Description:  SAM dependent carboxyl methyltransferase
  misc_feature (1)..(217): NCBI GI NO: 34911508 NR Description: putative S-adenosyl-L-methionine:salicylic acidcarboxyl methyltransferase
  misc_feature (1)..(217): NCBI GI NO: 34911486 NR Description: putative S-adenosyl-L-methionine:salicylic acidcarboxyl methyltransferase
  misc_feature (1)..(217): NCBI GI NO: 15234420 NR Description: S-adenosyl-L-methionine: carboxyl methyltransferasefamily
  misc_feature (1)..(217): NCBI GI NO: 6651395 NR Description: floral nectary-specific protein
  misc_feature (1)..(217): NCBI GI NO: 15223601 NR Description: S-adenosyl-L-methionine: jasmonic acid carboxylmethyltransferase
  misc_feature (1)..(217): NCBI GI NO: 13676829 NR Description: S-adenosyl-L-methionine: jasmonic acid carboxylmethyltransferase
  misc_feature (1)..(217): NCBI GI NO: 23957318 NR Description: S-adenosyl-L-methionine: salicylic acidmethyltransferase
  misc_feature (1)..(217): NCBI GI NO: 13235641 NR Description: S-adenosyl-L-methionine: salicylic acid carboxylmethyltransferase
  misc_feature (1)..(217): NCBI GI NO: 34809619 NR Description: Chain X
  misc_feature (1)..(217): NCBI GI NO: 18461100 NR Description: S-adenosyl-L-methionine: salicylic acid calboxylmethyltransferase-like

SEQ ID NO: 30644 - DNA, 1278 bp, Zea mays subsp. mays
  misc_feature (1)..(1278): Ceres Seq. ID no. 12413223
agttcgtggagtggagtcaccacagaatcaaagaaaagctttcccccgatcctctcgcggacaccagcgatgggttcccgctacgaggtggaggtcaccgtcggctccgcccgggacctcaagaacgtcaactggcgcaacggcgacctcaagccctacgccgtggtgtggatcgactccggcagcaagtgctcgacccgcgtcgacctcgacaacggcgagagcccggcgtgggacgagaagctgctcgtcccgctcccgcccacctcccgcctcgacgacgccgtcctctacgtcgacgtcgtccacgccaacgccgcccagggcgtcaagccgctcgtcggctccgcgcgcctcccgctccgcgacgtcctcgacgacgccggggtcgggggcaaggcctcgcgcagcctccgcctcaagcgcccctcgggccgcccccacggccgcctcgacgtccgcgtcgccgtcaaggagccgtccaggtactacgaccccaacccctacccggcccccgcggcctacgccaacacgggcggcggcacccgtgacccctacggctcgtccgctgctgctgccggcggctactacggctccggaggcggatacggttccggtggtggcgcctacggtggcggcggctacggcgccgcgcagccctacaccgcagcgcccccggcggggtacccttccacctacggcgccgcgccgccgcctcagccagcggcagcgtacggcgctcctcctgccgctgcatacggcgctcctcctgtcgccgccaccgccgcgtacggaaccggcgccgttgcttccgacgggaagaagaagaacaagatggggatggggacggggctggcagtgggcgcggcggcgggcgtgctcggagggctggcgctggccggcggggcgagctacctggaggacaagttcgaggagcgcgtgtcggagcgggtggaggacaacctggagagggaggagtcgtacggaggcggcggctacgggggtggctacgacgactatggcggcaacgacgactatggcggcgacgacgactactgatgggtcctgatcctccgatcgtttgcccggctgctacgcttgccatccaccttcaccttcgtcttgctgtcctagatgtttgctgtatcaatcgcatgttctctattcctgccttcagtttcttttctcagttgtggtttatcgaggcggggttgatgttgagatttgagatcctcacctgaggaatggaaaaatgctaaattgattaattcggttgcg

SEQ ID NO: 30645 - protein, 355 aa, Zea mays subsp. mays
  peptide (1)..(355): Ceres Seq. ID no. 12413224
  misc_feature (32)..(221): Pfam Name: Pfam Description:  Equine herpesvirus glycoprotein gp2
  misc_feature (27)..(355): NCBI GI NO: 11360494 NR Description: antifreeze glycopeptide AFGP polyprotein precursor
  misc_feature (26)..(355): NCBI GI NO: 11360494 NR Description: antifreeze glycopeptide AFGP polyprotein precursor
  misc_feature (48)..(270): NCBI GI NO: 18138528 NR Description: hypothetical protein [Grapevine fleck virus]
  misc_feature (33)..(272): NCBI GI NO: 1082604 NR Description: mucin 5AC (clone JER58) - human (fragment)
  misc_feature (28)..(355): NCBI GI NO: 22970264 NR Description: hypothetical protein [Chloroflexus aurantiacus]
  misc_feature (11)..(355): NCBI GI NO: 28574039 NR Description: Salivary gland secretion 1 CG3047-PA
  misc_feature (11)..(355): NCBI GI NO: 28574039 NR Description: Salivary gland secretion 1 CG3047-PA
  misc_feature (11)..(355): NCBI GI NO: 28574039 NR Description: Salivary gland secretion 1 CG3047-PA
  misc_feature (28)..(355): NCBI GI NO: 28574039 NR Description: Salivary gland secretion 1 CG3047-PA
  misc_feature (6)..(355): NCBI GI NO: 28574039 NR Description: Salivary gland secretion 1 CG3047-PA
VRGVESPQNQRKAFPRSSRGHQRWVPATRWRSPSAPPGTSRTSTGATATSSPTPWCGSTPAASARPASTSTTARARRGTRSCSSRSRPPPASTTPSSTSTSSTPTPPRASSRSSAPRASRSATSSTTPGSGARPRAASASSAPRAAPTAASTSASPSRSRPGTTTPTPTRPPRPTPTRAAAPVTPTARPLLLPAATTAPEADTVPVVAPTVAAATAPRSPTPQRPRRGTLPPTAPRRRLSQRQRTALLLPLHTALLLSPPPPRTEPAPLLPTGRRRTRWGWGRGWQWARRRACSEGWRWPAGRATWRTSSRSACRSGWRTTWRGRSRTEAAATGVATTTMAATTTMAATTTTDGS

SEQ ID NO: 30646 - protein, 352 aa, Zea mays subsp. mays
  peptide (1)..(352): Ceres Seq. ID no. 12413225
  misc_feature (30)..(117): Pfam Name: Pfam Description:  C2 domain
  misc_feature (29)..(195): NCBI GI NO: 10176862 NR Description: emb|CAB80929
  misc_feature (29)..(195): NCBI GI NO: 30689212 NR Description: C2 domain-containing protein
  misc_feature (15)..(287): NCBI GI NO: 34908388 NR Description: P0529E05.20
  misc_feature (29)..(181): NCBI GI NO: 18390752 NR Description: extensin-related; protein id: At1g07310
  misc_feature (221)..(329): NCBI GI NO: 34908388 NR Description: P0529E05.20
SSWSGVTTESKKSFPPILSRTPAMGSRYEVEVTVGSARDLKNVNWRNGDLKPYAVVWIDSGSKCSTRVDLDNGESPAWDEKLLVPLPPTSRLDDAVLYVDVVHANAAQGVKPLVGSARLPLRDVLDDAGVGGKASRSLRLKRPSGRPHGRLDVRVAVKEPSRYYDPNPYPAPAAYANTGGGTRDPYGSSAAAAGGYYGSGGGYGSGGGAYGGGGYGAAQPYTAAPPAGYPSTYGAAPPPQPAAAYGAPPAAAYGAPPVAATAAYGTGAVASDGKKKNKMGMGTGLAVGAAAGVLGGLALAGGASYLEDKFEERVSERVEDNLEREESYGGGGYGGGYDDYGGNDDYGGDDDY

SEQ ID NO: 30647 - protein, 329 aa, Zea mays subsp. mays
  peptide (1)..(329): Ceres Seq. ID no. 12413226
  misc_feature (7)..(94): Pfam Name: Pfam Description:  C2 domain
  misc_feature (6)..(172): NCBI GI NO: 10176862 NR Description: emb|CAB80929
  misc_feature (6)..(172): NCBI GI NO: 30689212 NR Description: C2 domain-containing protein
  misc_feature (1)..(264): NCBI GI NO: 34908388 NR Description: P0529E05.20
  misc_feature (6)..(158): NCBI GI NO: 18390752 NR Description: extensin-related; protein id: At1g07310
  misc_feature (198)..(306): NCBI GI NO: 34908388 NR Description: P0529E05.20
MGSRYEVEVTVGSARDLKNVNWRNGDLKPYAVVWIDSGSKCSTRVDLDNGESPAWDEKLLVPLPPTSRLDDAVLYVDVVHANAAQGVKPLVGSARLPLRDVLDDAGVGGKASRSLRLKRPSGRPHGRLDVRVAVKEPSRYYDPNPYPAPAAYANTGGGTRDPYGSSAAAAGGYYGSGGGYGSGGGAYGGGGYGAAQPYTAAPPAGYPSTYGAAPPPQPAAAYGAPPAAAYGAPPVAATAAYGTGAVASDGKKKNKMGMGTGLAVGAAAGVLGGLALAGGASYLEDKFEERVSERVEDNLEREESYGGGGYGGGYDDYGGNDDYGGDDDY

SEQ ID NO: 30648 - DNA, 1382 bp, Zea mays subsp. mays
  misc_feature (1)..(1382): Ceres Seq. ID no. 12365863
atcggcacgtcaatttactactagcactctatcagtagtgttcagctgctcccgagctagcgagcgaagcactgtcggcacagtaacccccccctgtgcgcgtcgcgtgccgagtgccgcagagcacgagaagctaggccgcacagcaagcttgacatcatggcagctgctgccactcgttcattgcactccttcctcgcgcttcttctcctgttggcagctgcggccgcggctgcggcgctgtcgtacgaaaccaagtccatagatcctggactcgtcgtgatgacgctgccggagccggtgtccgggccggagagtctcgccttcgacgggcgtggcggcgggccctactccggcgtctccgacggccgcgtcctccggtggcaaggtcccctccggggatggaccgagttcgcctacaactccaagcacaggagcgtggcgttgtgcgcgccggacaagaagctggtagtgccggagagcctgtgcgggcgcccgctgggcctgcagttccaccggcagtccggcgacctttacgtcgccgacgcctacctggggctgctcagggttgccgcgcgcggcgggctggcgcaggtcgtggcgacggaggccgccggggggccgttcaacttcctcaacgggctcgacgtcgaccagcggaccggcgacgtctacttcaccgatagcagcgccacgtacaggaggagcgactacctgctggtggtggccatgggcgacgagacgggccgcctgctgcgctacgagcggcggaccgggcgcgtgggcgtgctccaggcgggcctgtcgtacccgaacggcgtggcggtgagcgcggacggcacgcacgtggtggtggcgcacacggcgctttgcgagctgcggaggtactggatccgcggcgcccgggcgggcacgtccgacaccttcgccgagctgccggggtacccggacaacctgcgcgccgacggccgcggcgggtactgggtagcgctgagcagcggcgtcgcggctgatgaggcggccgccgcgcccacggtcgccgtcagggtctcccgcgacggcaacgtgacggaggcgcttgacgggttcagcttcgtgtccgtcagcgaggtggcccagcgcggcggcgcgctctgggtcggctccgtggacacgccgtacgccggccagctcaagcggcgtgccagctagtgccgtgccgttttgtcatccattgatatcatatatgcagttgtgttgcgtgtgcatgcaccgtgaacaacatttgactgtacgtaccccaatgtcgtcgtcgtcgtcgtctcgtagctagtgttcgtcgcaattgtggatgtggactccgttcgtggaatggttagtggttgtttggtctctggtgatct

SEQ ID NO: 30649 - protein, 343 aa, Zea mays subsp. mays
  peptide (1)..(343): Ceres Seq. ID no. 12365864
  misc_feature (49)..(280): Pfam Name: Pfam Description:  Strictosidine synthase
  misc_feature (13)..(339): NCBI GI NO: 40253286 NR Description: putative male fertility protein
  misc_feature (6)..(339): NCBI GI NO: 34395247 NR Description: putative strictosidine synthase
  misc_feature (6)..(330): NCBI GI NO: 34393255 NR Description: putative male fertility protein
  misc_feature (107)..(343): NCBI GI NO: 34395249 NR Description: putative strictosidine synthase
  misc_feature (107)..(339): NCBI GI NO: 34395252 NR Description: putative strictosidine synthase-related
  misc_feature (32)..(280): NCBI GI NO: 11280567 NR Description: hypothetical protein F24I3
  misc_feature (32)..(280): NCBI GI NO: 30694556 NR Description: strictosidine synthase-related
  misc_feature (15)..(280): NCBI GI NO: 8489790 NR Description: putative strictosidine synthase
  misc_feature (285)..(334): NCBI GI NO: 8489790 NR Description: putative strictosidine synthase
  misc_feature (48)..(278): NCBI GI NO: 22326950 NR Description: similar to strictosidine synthase-related
MAAAATRSLHSFLALLLLLAAAAAAAALSYETKSIDPGLVVMTLPEPVSGPESLAFDGRGGGPYSGVSDGRVLRWQGPLRGWTEFAYNSKHRSVALCAPDKKLVVPESLCGRPLGLQFHRQSGDLYVADAYLGLLRVAARGGLAQVVATEAAGGPFNFLNGLDVDQRTGDVYFTDSSATYRRSDYLLVVAMGDETGRLLRYERRTGRVGVLQAGLSYPNGVAVSADGTHVVVAHTALCELRRYWIRGARAGTSDTFAELPGYPDNLRADGRGGYWVALSSGVAADEAAAAPTVAVRVSRDGNVTEALDGFSFVSVSEVAQRGGALWVGSVDTPYAGQLKRRAS

SEQ ID NO: 30650 - protein, 302 aa, Zea mays subsp. mays
  peptide (1)..(302): Ceres Seq. ID no. 12365865
  misc_feature (8)..(239): Pfam Name: Pfam Description:  Strictosidine synthase
  misc_feature (1)..(298): NCBI GI NO: 40253286 NR Description: putative male fertility protein
  misc_feature (1)..(298): NCBI GI NO: 34395247 NR Description: putative strictosidine synthase
  misc_feature (1)..(289): NCBI GI NO: 34393255 NR Description: putative male fertility protein
  misc_feature (66)..(302): NCBI GI NO: 34395249 NR Description: putative strictosidine synthase
  misc_feature (66)..(298): NCBI GI NO: 34395252 NR Description: putative strictosidine synthase-related
  misc_feature (1)..(239): NCBI GI NO: 11280567 NR Description: hypothetical protein F24I3
  misc_feature (1)..(239): NCBI GI NO: 30694556 NR Description: strictosidine synthase-related
  misc_feature (1)..(239): NCBI GI NO: 8489790 NR Description: putative strictosidine synthase
  misc_feature (244)..(293): NCBI GI NO: 8489790 NR Description: putative strictosidine synthase
  misc_feature (7)..(237): NCBI GI NO: 22326950 NR Description: similar to strictosidine synthase-related
MTLPEPVSGPESLAFDGRGGGPYSGVSDGRVLRWQGPLRGWTEFAYNSKHRSVALCAPDKKLVVPESLCGRPLGLQFHRQSGDLYVADAYLGLLRVAARGGLAQVVATEAAGGPFNFLNGLDVDQRTGDVYFTDSSATYRRSDYLLVVAMGDETGRLLRYERRTGRVGVLQAGLSYPNGVAVSADGTHVVVAHTALCELRRYWIRGARAGTSDTFAELPGYPDNLRADGRGGYWVALSSGVAADEAAAAPTVAVRVSRDGNVTEALDGFSFVSVSEVAQRGGALWVGSVDTPYAGQLKRRAS

SEQ ID NO: 30651 - DNA, 1170 bp, Zea mays subsp. mays
  misc_feature (1)..(1170): Ceres Seq. ID no. 12356672
atctgaagcctgtaacatctccgccatccgcctgaaggctcgaagcacgacgccaatggcctcccccaacgccgacccggctcagcaccacgcctcgacgccgccgctcctcctcgccgtacgccacctgccgttccccggcgtccaccggacgcgcgcgctccccggccccgacgtcctgacccctctcgcccgccgcctcgaggagctcgcgtccgcggcgacctcccacccgctcctgaagccgctcttcgccgcccactcacacctctcttccttctcccagggcaggaggcggctggtggcggcgcggcgtgcgacggtgctgtccggggggcactgcttcgcggcggtgctagggaactcggtggccgggttggtggtgtccaacggcatcaacaacttcctcaacctctacaacacggtgctcgtcgtcaggctcgtgctcacgtggttccccaacacgccgcccgccatcgtcgcgcctctcagcacgatatgtgacccgtacctgaacatcttccggggcatcatcccgccgctcgggggaacgctggacctgtcgccgatcctcgctttcctcgtcctcaacgccttcaccagcacggcggccgcgcttccggcggagctcccgagctcggcagcggcgcagcaccaccagaggactgctgcttcatccagctcggcgactcccagtcccaaccagaggaaatggatgcggagaatgcgatcaaagacatcacagggagaagatggtggtcactaggcatgtgagcttgtggctgggttcgtcaaatgccttattgttaccagctggggatcatgcttcgcatcagacgctcgagatctgcacagcaatgtgttggacatgcatgctcctcgctctctagccatcgaatgcaaactctgtcaatgccgcatgcagagttcgcccctttggttcaccacgttgcttcagagcttcaaatggtttttgtgcgttgtaatgcgttggcgttgcggagctttcttcaaatggtttttgtgctttgtaatgctttggcggtgagggctgtgctttctgctgcatgtatgtgtagcactttcggtcagctttcttgaattccgatagtgtgatcgcgatgcgtagccaaattcagtcttgagagagtaccaatcgaactttcatcg

SEQ ID NO: 30652 - protein, 254 aa, Zea mays subsp. mays
  peptide (1)..(254): Ceres Seq. ID no. 12356673
  misc_feature (125)..(206): Pfam Name: Pfam Description:  YGGT family
  misc_feature (109)..(251): NCBI GI NO: 27436744 NR Description: Hypothetical protein
  misc_feature (70)..(243): NCBI GI NO: 22326932 NR Description: unknown protein; protein id: At5g21920.1
  misc_feature (127)..(201): NCBI GI NO: 18397948 NR Description: expressed protein; protein id: At3g07430
  misc_feature (127)..(201): NCBI GI NO: 21617923 NR Description: unknown [Arabidopsis thaliana]
  misc_feature (127)..(201): NCBI GI NO: 15234345 NR Description: putative protein; protein id: At4g27990
  misc_feature (127)..(201): NCBI GI NO: 21592772 NR Description: unknown [Arabidopsis thaliana]
  misc_feature (131)..(196): NCBI GI NO: 22298077 NR Description: ORF_ID:tsr0534~hypothetical protein
  misc_feature (127)..(206): NCBI GI NO: 33240375 NR Description: Uncharacterized YGGT family conserved membrane
  misc_feature (135)..(197): NCBI GI NO: 17229553 NR Description: hypothetical protein [Nostoc sp. PCC 7120]
SEACNISAIRLKARSTTPMASPNADPAQHHASTPPLLLAVRHLPFPGVHRTRALPGPDVLTPLARRLEELASAATSHPLLKPLFAAHSHLSSFSQGRRRLVAARRATVLSGGHCFAAVLGNSVAGLVVSNGINNFLNLYNTVLVVRLVLTWFPNTPPAIVAPLSTICDPYLNIFRGIIPPLGGTLDLSPILAFLVLNAFTSTAAALPAELPSSAAAQHHQRTAASSSSATPSPNQRKWMRRMRSKTSQGEDGGH

SEQ ID NO: 30653 - protein, 236 aa, Zea mays subsp. mays
  peptide (1)..(236): Ceres Seq. ID no. 12356674
  misc_feature (107)..(188): Pfam Name: Pfam Description:  YGGT family
  misc_feature (91)..(233): NCBI GI NO: 27436744 NR Description: Hypothetical protein
  misc_feature (52)..(225): NCBI GI NO: 22326932 NR Description: unknown protein; protein id: At5g21920.1
  misc_feature (109)..(183): NCBI GI NO: 18397948 NR Description: expressed protein; protein id: At3g07430
  misc_feature (109)..(183): NCBI GI NO: 21617923 NR Description: unknown [Arabidopsis thaliana]
  misc_feature (109)..(183): NCBI GI NO: 15234345 NR Description: putative protein; protein id: At4g27990
  misc_feature (109)..(183): NCBI GI NO: 21592772 NR Description: unknown [Arabidopsis thaliana]
  misc_feature (113)..(178): NCBI GI NO: 22298077 NR Description: ORF_ID:tsr0534~hypothetical protein
  misc_feature (109)..(188): NCBI GI NO: 33240375 NR Description: Uncharacterized YGGT family conserved membrane
  misc_feature (117)..(179): NCBI GI NO: 17229553 NR Description: hypothetical protein [Nostoc sp. PCC 7120]
MASPNADPAQHHASTPPLLLAVRHLPFPGVHRTRALPGPDVLTPLARRLEELASAATSHPLLKPLFAAHSHLSSFSQGRRRLVAARRATVLSGGHCFAAVLGNSVAGLVVSNGINNFLNLYNTVLVVRLVLTWFPNTPPAIVAPLSTICDPYLNIFRGIIPPLGGTLDLSPILAFLVLNAFTSTAAALPAELPSSAAAQHHQRTAASSSSATPSPNQRKWMRRMRSKTSQGEDGGH

SEQ ID NO: 30654 - DNA, 756 bp, Zea mays subsp. mays
  misc_feature (1)..(756): Ceres Seq. ID no. 12356686
attccgttccgagagccaaaaactccactgctttcatcaactccggcgacttggagaagacgaagttccagaatccgatcggaagtttggtgctcgcgccttgacggattgatttcggtgcgccgatggggcaggcgttccgcaagctgttcgattccttcttcggcaccagcgagatgagggttgtgatgcttggtctggatgctgccggtaaaaccaccatattgtacaagctgcatatcggggaggttttgtcgactgttcccacgattggtttcaacgtcgagaaagttcaatacaagaatgtgatgtttactgtgtgggatgttggtggccaagaaaagttgagggtgactacgtccgcaaaggagatgagtttgggtatttctcctttggagggagtacagtgatatgcgtcttcgagaaggacgccatccaatttgacgctgatctcgtggcaaacagcgaaaggtcactggagaccaagtcccggatctgcagaaagtttcgctcggatgacagacagagctgtaaactgtgtgcaggttaacagtagcgtatatttgatactagcaactgccactggtaggcaatactattatcacataatccaagactacatgtatagtcaggctagaggagtctggtttacggcggtgggcgtgggcatgggcattggcccagctgtcatcggctgagagctcactgcatggctcggtggtttttgcaatgacgatactaaccgtgcagttgctc

SEQ ID NO: 30655 - protein, 94 aa, Zea mays subsp. mays
  peptide (1)..(94): Ceres Seq. ID no. 12356687
  misc_feature (4)..(75): Pfam Name: Pfam Description:  ADP-ribosylation factor family
  misc_feature (1)..(75): NCBI GI NO: 15237901 NR Description: ADP-ribosylation factor -like protein
  misc_feature (1)..(75): NCBI GI NO: 37537196 NR Description: putative ADP-ribosylation factor
  misc_feature (1)..(75): NCBI GI NO: 15228464 NR Description: putative ADP-ribosylation factor
  misc_feature (1)..(75): NCBI GI NO: 34897926 NR Description: Similar to Drosophila melanogaster ADP-ribosylationfactor 1
  misc_feature (1)..(75): NCBI GI NO: 461532 NR Description: ADP-RIBOSYLATION FACTOR
  misc_feature (1)..(75): NCBI GI NO: 6671571 NR Description: ADP-ribosylation factor 2 [Mus musculus]
  misc_feature (1)..(75): NCBI GI NO: 26327163 NR Description: unnamed protein product [Mus musculus]
  misc_feature (1)..(75): NCBI GI NO: 3182917 NR Description: ADP-RIBOSYLATION FACTOR 1
  misc_feature (1)..(75): NCBI GI NO: 32401087 NR Description: ADP-ribosylation factor 1 [Aiptasia pulchella]
  misc_feature (1)..(75): NCBI GI NO: 14714692 NR Description: Similar to ADP-ribosylation factor 2
MGQAFRKLFDSFFGTSEMRVVMLGLDAAGKTTILYKLHIGEVLSTVPTIGFNVEKVQYKNVMFTVWDVGGQEKLRVTTSAKEMSLGISPLEGVQ

SEQ ID NO: 30656 - protein, 77 aa, Zea mays subsp. mays
  peptide (1)..(77): Ceres Seq. ID no. 12356688
  misc_feature (1)..(58): Pfam Name: Pfam Description:  ADP-ribosylation factor family
  misc_feature (1)..(58): NCBI GI NO: 15237901 NR Description: ADP-ribosylation factor -like protein
  misc_feature (1)..(58): NCBI GI NO: 37537196 NR Description: putative ADP-ribosylation factor
  misc_feature (1)..(58): NCBI GI NO: 15228464 NR Description: putative ADP-ribosylation factor
  misc_feature (1)..(58): NCBI GI NO: 34897926 NR Description: Similar to Drosophila melanogaster ADP-ribosylationfactor 1
  misc_feature (1)..(58): NCBI GI NO: 461532 NR Description: ADP-RIBOSYLATION FACTOR
  misc_feature (1)..(58): NCBI GI NO: 6671571 NR Description: ADP-ribosylation factor 2 [Mus musculus]
  misc_feature (1)..(58): NCBI GI NO: 26327163 NR Description: unnamed protein product [Mus musculus]
  misc_feature (1)..(58): NCBI GI NO: 3182917 NR Description: ADP-RIBOSYLATION FACTOR 1
  misc_feature (1)..(58): NCBI GI NO: 32401087 NR Description: ADP-ribosylation factor 1 [Aiptasia pulchella]
  misc_feature (1)..(58): NCBI GI NO: 14714692 NR Description: Similar to ADP-ribosylation factor 2
MRVVMLGLDAAGKTTILYKLHIGEVLSTVPTIGFNVEKVQYKNVMFTVWDVGGQEKLRVTTSAKEMSLGISPLEGVQ

SEQ ID NO: 30657 - protein, 73 aa, Zea mays subsp. mays
  peptide (1)..(73): Ceres Seq. ID no. 12356689
  misc_feature (1)..(54): Pfam Name: Pfam Description:  ADP-ribosylation factor family
  misc_feature (1)..(54): NCBI GI NO: 15237901 NR Description: ADP-ribosylation factor -like protein
  misc_feature (1)..(54): NCBI GI NO: 37537196 NR Description: putative ADP-ribosylation factor
  misc_feature (1)..(54): NCBI GI NO: 15228464 NR Description: putative ADP-ribosylation factor
  misc_feature (1)..(54): NCBI GI NO: 34897926 NR Description: Similar to Drosophila melanogaster ADP-ribosylationfactor 1
  misc_feature (1)..(54): NCBI GI NO: 461532 NR Description: ADP-RIBOSYLATION FACTOR
  misc_feature (1)..(54): NCBI GI NO: 6671571 NR Description: ADP-ribosylation factor 2 [Mus musculus]
  misc_feature (1)..(54): NCBI GI NO: 26327163 NR Description: unnamed protein product [Mus musculus]
  misc_feature (1)..(54): NCBI GI NO: 3182917 NR Description: ADP-RIBOSYLATION FACTOR 1
  misc_feature (1)..(54): NCBI GI NO: 32401087 NR Description: ADP-ribosylation factor 1 [Aiptasia pulchella]
  misc_feature (1)..(54): NCBI GI NO: 14714692 NR Description: Similar to ADP-ribosylation factor 2
MLGLDAAGKTTILYKLHIGEVLSTVPTIGFNVEKVQYKNVMFTVWDVGGQEKLRVTTSAKEMSLGISPLEGVQ

SEQ ID NO: 30658 - DNA, 1641 bp, Zea mays subsp. mays
  misc_feature (1)..(1641): Ceres Seq. ID no. 12382117
aaattagaaaacctgaaaacctatcctacaagatacactcttcatccaccccttacgctcagacgtcactagctagccatcatcacacaggcagcatggtgatgaaagaagcagccgaagagcacgatggccgccgcgacgtgaccgtcacggtggagccggcgctgccggtgcagcaacaccgcctgccgctgtccaacctggacctcctcctgccgccgctcgacgtcagcctcttcttctgctacctccacccggcgcccaccgcgatcgctctcaaggaggcactggccaagacgctggtggcgtactacccgttggccggggaggtggtggccaacggcgatggggagccggagctgctctgcagcggccgcggcgtggacttcacggagacggccgcggccggagtcgagctgcgggaggtccggctgggcgccgtggacgaaggcgttgagaagctggtccctgtcaagaagaccggcgtgacgatggcggtcaagctgagcaagttcacgtgcggcggcgccgtcgtcggctgcaccttcgaccaccgcgtctgcgacgcctactccttcaacatgttcctcgtcgcgtgggccgcagccgcccgtggcagctctgcgccaccaccgccggacccgtgcttccgccgctccctagtcgccccacgcgacacaccacatcggcgcgcgccgtccaccgacgccctcatcaaccgcctcttctctcctcgaagcgccgcgccaccgcctccacccgccgccgcaggctccgtcaaccggatctaccgcatagccgccgaggacatcgccgcgctgaaggcctcggcggggccggggcgcacgaagatggaggcgttcacggcgctcctgtggcagctctgcgcaagggcggcctccccgcgccagagccagtgctgcatgggcgtggtcgtggacgggcgcacccggatgttcccggacggcgccatgaaggcctacttcggaaacgtgctcaccatcccgtacggcgtcatcggctccgaagacctgcgctgcatggccctcgctgacgtggccgacgacgtgcaccggtgggtggcggaggccgccaccggcgaccatttccgcgggctcgtggactgggtggaggcgctgcggcctaagccggccgcggcgagggcgtacctgggagggaccggcggcaacgaggcgatggcgtgcatcgtgtcgtccggtatgagcttcccggtgggcaaggccgacttcgggactggcctccccgcgttcgcgtcgtaccatttcccgtggcccgccggcgccgggtacgtgatgccgatgccgagcgcgcgcgggaacggcgattgggtggtgtacgtgcacgtggcgccggaggtggcgaaggtgatggaggagtccaccgtgttccaagccctggtgaacagctatgcgtttgaatgatgatggagatgggccggcatattcgtggatgcgcgcgcgttgccgtccacgcgtgtgtctagagctagtgttgatgtgcatacggcatggagttctcactactcagcagtgctaccaatttgcctcgttggttactatgtttgccagaaaataataatagtaactccatgcatatatgtcacgtgacatatgtgtaatt

SEQ ID NO: 30659 - protein, 479 aa, Zea mays subsp. mays
  peptide (1)..(479): Ceres Seq. ID no. 12382118
  misc_feature (51)..(465): Pfam Name: Pfam Description:  Transferase family
  misc_feature (50)..(478): NCBI GI NO: 38567901 NR Description: OSJNBa0060N03.21
  misc_feature (34)..(476): NCBI GI NO: 15223333 NR Description: hypothetical protein; protein id: At1g32910.1
  misc_feature (13)..(476): NCBI GI NO: 7487911 NR Description: hypothetical protein YUP8H12R
  misc_feature (34)..(476): NCBI GI NO: 15219263 NR Description: hypothetical protein; protein id: At1g78990.1
  misc_feature (12)..(476): NCBI GI NO: 15237343 NR Description: putative protein; protein id: At5g16410.1
  misc_feature (56)..(472): NCBI GI NO: 15222365 NR Description: hypothetical protein; protein id: At1g31490.1
  misc_feature (51)..(465): NCBI GI NO: 27475616 NR Description: hydroxycinnamoyl transferase [Nicotiana tabacum]
  misc_feature (45)..(465): NCBI GI NO: 21536883 NR Description: anthranilate N-benzoyltransferase
  misc_feature (45)..(465): NCBI GI NO: 15239747 NR Description: anthranilate N-benzoyltransferase
  misc_feature (51)..(442): NCBI GI NO: 6469032 NR Description: N-hydroxycinnamoyl/benzoyltransferase
IRKPENLSYKIHSSSTPYAQTSLASHHHTGSMVMKEAAEEHDGRRDVTVTVEPALPVQQHRLPLSNLDLLLPPLDVSLFFCYLHPAPTAIALKEALAKTLVAYYPLAGEVVANGDGEPELLCSGRGVDFTETAAAGVELREVRLGAVDEGVEKLVPVKKTGVTMAVKLSKFTCGGAVVGCTFDHRVCDAYSFNMFLVAWAAAARGSSAPPPPDPCFRRSLVAPRDTPHRRAPSTDALINRLFSPRSAAPPPPPAAAGSVNRIYRIAAEDIAALKASAGPGRTKMEAFTALLWQLCARAASPRQSQCCMGVVVDGRTRMFPDGAMKAYFGNVLTIPYGVIGSEDLRCMALADVADDVHRWVAEAATGDHFRGLVDWVEALRPKPAAARAYLGGTGGNEAMACIVSSGMSFPVGKADFGTGLPAFASYHFPWPAGAGYVMPMPSARGNGDWVVYVHVAPEVAKVMEESTVFQALVNSYAFE

SEQ ID NO: 30660 - protein, 448 aa, Zea mays subsp. mays
  peptide (1)..(448): Ceres Seq. ID no. 12382119
  misc_feature (20)..(434): Pfam Name: Pfam Description:  Transferase family
  misc_feature (19)..(447): NCBI GI NO: 38567901 NR Description: OSJNBa0060N03.21
  misc_feature (3)..(445): NCBI GI NO: 15223333 NR Description: hypothetical protein; protein id: At1g32910.1
  misc_feature (1)..(445): NCBI GI NO: 7487911 NR Description: hypothetical protein YUP8H12R
  misc_feature (3)..(445): NCBI GI NO: 15219263 NR Description: hypothetical protein; protein id: At1g78990.1
  misc_feature (1)..(445): NCBI GI NO: 15237343 NR Description: putative protein; protein id: At5g16410.1
  misc_feature (25)..(441): NCBI GI NO: 15222365 NR Description: hypothetical protein; protein id: At1g31490.1
  misc_feature (20)..(434): NCBI GI NO: 27475616 NR Description: hydroxycinnamoyl transferase [Nicotiana tabacum]
  misc_feature (14)..(434): NCBI GI NO: 21536883 NR Description: anthranilate N-benzoyltransferase
  misc_feature (14)..(434): NCBI GI NO: 15239747 NR Description: anthranilate N-benzoyltransferase
  misc_feature (20)..(411): NCBI GI NO: 6469032 NR Description: N-hydroxycinnamoyl/benzoyltransferase
MVMKEAAEEHDGRRDVTVTVEPALPVQQHRLPLSNLDLLLPPLDVSLFFCYLHPAPTAIALKEALAKTLVAYYPLAGEVVANGDGEPELLCSGRGVDFTETAAAGVELREVRLGAVDEGVEKLVPVKKTGVTMAVKLSKFTCGGAVVGCTFDHRVCDAYSFNMFLVAWAAAARGSSAPPPPDPCFRRSLVAPRDTPHRRAPSTDALINRLFSPRSAAPPPPPAAAGSVNRIYRIAAEDIAALKASAGPGRTKMEAFTALLWQLCARAASPRQSQCCMGVVVDGRTRMFPDGAMKAYFGNVLTIPYGVIGSEDLRCMALADVADDVHRWVAEAATGDHFRGLVDWVEALRPKPAAARAYLGGTGGNEAMACIVSSGMSFPVGKADFGTGLPAFASYHFPWPAGAGYVMPMPSARGNGDWVVYVHVAPEVAKVMEESTVFQALVNSYAFE

SEQ ID NO: 30661 - protein, 446 aa, Zea mays subsp. mays
  peptide (1)..(446): Ceres Seq. ID no. 12382120
  misc_feature (18)..(432): Pfam Name: Pfam Description:  Transferase family
  misc_feature (17)..(445): NCBI GI NO: 38567901 NR Description: OSJNBa0060N03.21
  misc_feature (1)..(443): NCBI GI NO: 15223333 NR Description: hypothetical protein; protein id: At1g32910.1
  misc_feature (1)..(443): NCBI GI NO: 7487911 NR Description: hypothetical protein YUP8H12R
  misc_feature (1)..(443): NCBI GI NO: 15219263 NR Description: hypothetical protein; protein id: At1g78990.1
  misc_feature (1)..(443): NCBI GI NO: 15237343 NR Description: putative protein; protein id: At5g16410.1
  misc_feature (23)..(439): NCBI GI NO: 15222365 NR Description: hypothetical protein; protein id: At1g31490.1
  misc_feature (18)..(432): NCBI GI NO: 27475616 NR Description: hydroxycinnamoyl transferase [Nicotiana tabacum]
  misc_feature (12)..(432): NCBI GI NO: 21536883 NR Description: anthranilate N-benzoyltransferase
  misc_feature (12)..(432): NCBI GI NO: 15239747 NR Description: anthranilate N-benzoyltransferase
  misc_feature (18)..(409): NCBI GI NO: 6469032 NR Description: N-hydroxycinnamoyl/benzoyltransferase
MKEAAEEHDGRRDVTVTVEPALPVQQHRLPLSNLDLLLPPLDVSLFFCYLHPAPTAIALKEALAKTLVAYYPLAGEVVANGDGEPELLCSGRGVDFTETAAAGVELREVRLGAVDEGVEKLVPVKKTGVTMAVKLSKFTCGGAVVGCTFDHRVCDAYSFNMFLVAWAAAARGSSAPPPPDPCFRRSLVAPRDTPHRRAPSTDALINRLFSPRSAAPPPPPAAAGSVNRIYRIAAEDIAALKASAGPGRTKMEAFTALLWQLCARAASPRQSQCCMGVVVDGRTRMFPDGAMKAYFGNVLTIPYGVIGSEDLRCMALADVADDVHRWVAEAATGDHFRGLVDWVEALRPKPAAARAYLGGTGGNEAMACIVSSGMSFPVGKADFGTGLPAFASYHFPWPAGAGYVMPMPSARGNGDWVVYVHVAPEVAKVMEESTVFQALVNSYAFE

SEQ ID NO: 30662 - DNA, 1024 bp, Zea mays subsp. mays
  misc_feature (1)..(1024): Ceres Seq. ID no. 13492744
  misc_feature (130)..(130): n is a, c, t, g, unknown, or other
  misc_feature (129)..(129): n is a, c, t, g, unknown, or other
  misc_feature (138)..(138): n is a, c, t, g, unknown, or other
  misc_feature (137)..(137): n is a, c, t, g, unknown, or other
acttcgattcgctcccacgcacacacactcctgcctgcggttgccactcgcgtagcaccagacagcgggagcagcacgcgcgcgacgttcgcaatggcggcgcgggcaaccgtcgtcctctgcgccgcnntcctcgnnctgctctccgccaccagctccctcgcgcagtcccccgcggccgcgccggctaaggcgccgcccaagtcctcctccaaggccacgccggccgccgcgcccgcgcccaagtcctcctccaaggccagcccattggcgccggccgccgcgccaaccaccccggcacccgcggcggcgccggccacgccaaagcccaaggcccccgcgcccgcgcccgccaccaaggccgcagccccggccccggctacccctgctcccgtcgccactccccccgcggcgacgcctcccgccgccgaggcgcccgtgcccgccgcggcgccggcccccgagaccaagcccgtcgaggcccccgcccccgcccccgcgccggccaagaagaagaagccgtcgtccccctcctccaaggacaagaagaagaagaagggcgcgtccgcccctgccccggccgccgacgcccccgtcgccaagaagcccagaaccgccgacgcgcccacgtccgcagccgaggctcccggggcccagcggcgacgccgccgctgccgacaccgcgagggccgcagcgaggaggacaccggcgggcgtgatcgcgtcgtcggccgtcgcggtgctgctgggtgcggcggccctgctcgcctagataagatccccggatgccaccatcacaggatttgatgcccttttcctgcttttactttttctttcgctattttgtggaaaaaaggggttttcttctgtgtagtagagtagtaccgtagcagtagactagtagggcggatgatttcttctgcttccagagatgatacgagagagagagtggttagagtagagaggggactgcccgtgtaatgttcagatttatctacatatttatatatccctgttatagccc

SEQ ID NO: 30663 - protein, 268 aa, Zea mays subsp. mays
  peptide (1)..(268): Ceres Seq. ID no. 13492745
  misc_feature (9)..(198): Pfam Name: Pfam Description:  Glycoprotein GG/GX
  misc_feature (20)..(220): NCBI GI NO: 9629749 NR Description: 24 [Equine herpesvirus 4]
  misc_feature (12)..(204): NCBI GI NO: 9629749 NR Description: 24 [Equine herpesvirus 4]
  misc_feature (58)..(220): NCBI GI NO: 9629749 NR Description: 24 [Equine herpesvirus 4]
  misc_feature (58)..(220): NCBI GI NO: 9629749 NR Description: 24 [Equine herpesvirus 4]
  misc_feature (58)..(217): NCBI GI NO: 27375632 NR Description: blr0521 [Bradyrhizobium japonicum]
  misc_feature (45)..(216): NCBI GI NO: 12018149 NR Description: gamete-specific hydroxyproline-rich glyco protein a2
  misc_feature (12)..(184): NCBI GI NO: 9629749 NR Description: 24 [Equine herpesvirus 4]
  misc_feature (58)..(216): NCBI GI NO: 27375632 NR Description: blr0521 [Bradyrhizobium japonicum]
  misc_feature (55)..(218): NCBI GI NO: 27375632 NR Description: blr0521 [Bradyrhizobium japonicum]
  misc_feature (12)..(234): NCBI GI NO: 30984464 NR Description: very large tegument protein
  misc_feature (43)..(43): Xaa is any aa, unknown or other
  misc_feature (44)..(44): Xaa is any aa, unknown or other
  misc_feature (46)..(46): Xaa is any aa, unknown or other
TSIRSHAHTLLPAVATRVAPDSGSSTRATFAMAARATVVLCAXXLXLLSATSSLAQSPAAAPAKAPPKSSSKATPAAAPAPKSSSKASPLAPAAAPTTPAPAAAPATPKPKAPAPAPATKAAAPAPATPAPVATPPAATPPAAEAPVPAAAPAPETKPVEAPAPAPAPAKKKKPSSPSSKDKKKKKGASAPAPAADAPVAKKPRTADAPTSAAEAPGAQRRRRRCRHREGRSEEDTGGRDRVVGRRGAAGCGGPARLDKIPGCHHHRI

SEQ ID NO: 30664 - protein, 237 aa, Zea mays subsp. mays
  peptide (1)..(237): Ceres Seq. ID no. 13492746
  misc_feature (1)..(167): Pfam Name: Pfam Description:  Glycoprotein GG/GX
  misc_feature (1)..(189): NCBI GI NO: 9629749 NR Description: 24 [Equine herpesvirus 4]
  misc_feature (1)..(173): NCBI GI NO: 9629749 NR Description: 24 [Equine herpesvirus 4]
  misc_feature (27)..(189): NCBI GI NO: 9629749 NR Description: 24 [Equine herpesvirus 4]
  misc_feature (27)..(189): NCBI GI NO: 9629749 NR Description: 24 [Equine herpesvirus 4]
  misc_feature (27)..(186): NCBI GI NO: 27375632 NR Description: blr0521 [Bradyrhizobium japonicum]
  misc_feature (14)..(185): NCBI GI NO: 12018149 NR Description: gamete-specific hydroxyproline-rich glyco protein a2
  misc_feature (1)..(153): NCBI GI NO: 9629749 NR Description: 24 [Equine herpesvirus 4]
  misc_feature (27)..(185): NCBI GI NO: 27375632 NR Description: blr0521 [Bradyrhizobium japonicum]
  misc_feature (24)..(187): NCBI GI NO: 27375632 NR Description: blr0521 [Bradyrhizobium japonicum]
  misc_feature (1)..(203): NCBI GI NO: 30984464 NR Description: very large tegument protein
  misc_feature (12)..(12): Xaa is any aa, unknown or other
  misc_feature (13)..(13): Xaa is any aa, unknown or other
  misc_feature (15)..(15): Xaa is any aa, unknown or other
MAARATVVLCAXXLXLLSATSSLAQSPAAAPAKAPPKSSSKATPAAAPAPKSSSKASPLAPAAAPTTPAPAAAPATPKPKAPAPAPATKAAAPAPATPAPVATPPAATPPAAEAPVPAAAPAPETKPVEAPAPAPAPAKKKKPSSPSSKDKKKKKGASAPAPAADAPVAKKPRTADAPTSAAEAPGAQRRRRRCRHREGRSEEDTGGRDRVVGRRGAAGCGGPARLDKIPGCHHHRI

SEQ ID NO: 30665 - DNA, 1425 bp, Zea mays subsp. mays
  misc_feature (1)..(1425): Ceres Seq. ID no. 12358365
aacatctagagcttggaggaaagctagctagcgagaggaataggatcgcaatggtggaacggccgggcagatcggcaggcgtcagggaggccaataagacttccgctgccgccatggtgaagacgacgacgacgacgaccaccaataaggaggagctggagagcccgtcctacaggttagcagcgttcaagagcctcttctcgtgcaggaacagccacgcgcggccgcgggcgccggacaccggcaacaggagcaagagggggctgggctgctccgcgccgtccatctgcaagctcaaggacgacagcgtgcccgtgccgcccaaggaaaccacgggcacggcgtcggcaggcgagccctgcaagcgccgcgcgtccgtgagcgggagcagcgatcggtgcgtgaagaagccccaatgtggcgctggcagcaacaagcagctgcagcgtggcgggtcgtcgtcgtcgtcgggcgggtcgtcgttcagggccggcatgcagctgaggcggctttcggggtgctacgagtgccacatggtggtggcgggcagcgcctccatgagggccaccaccatctgcccctgcccggactgcggcgaggtgttcgtcaggcaggagagcctccagctccaccagtccatcaggcacgcagtgtccgagcttggcactgacgacacgagccgcaacatcatcgagatcatcttccagtccagctggctcaagaagcagagccccgtgtgcaaggtcgaccgcatcctcaaggtgaacaacacgcccagaacgctggcccgcttcgaggagtaccgcgacgctgtcaaggccagggcgggcgccgagcagctggcggtagcggcggccaacagcaacaggcacccgcgctgcaccgccgacggcaacgagctgctccggttccactgcgccaccctggcctgctcgctcggcctcaacggcgccacgcacctctgcgacgccgcggggacctgcgcagcgtgcggcatcatccgcgacggcttcagcagcggcggggtgctgaccatggccacgagcggccgcgcgcacgacgccgtgcccgctgcggaggctggcgccggactggatgaggaaaccactccaagggcgatgctggtgtgccgggtcatcgcgggaagggtgaagcggcccaaagaagcggtaccagaggaggaggccgtcgccgaagccgccgaggagtcggagtacgactcggttgcggggtcggccggggtgtactccaacctggaggagctgctggtgttcaaccccagggccatcctcccatgctttgtcgttgtctacaaggcttagctactggtggttacactttacaatccatgcaatgcagtccttgtattaagtaacaaacaattcatgataaacctaatgtattgactgacgaatggtcactctc

SEQ ID NO: 30666 - protein, 439 aa, Zea mays subsp. mays
  peptide (1)..(439): Ceres Seq. ID no. 12358366
  misc_feature (192)..(215): Pfam Name: Pfam Description:  Zinc finger, C2H2 type
  misc_feature (51)..(439): NCBI GI NO: 38345520 NR Description: OSJNBa0039K24.23
  misc_feature (97)..(439): NCBI GI NO: 5777616 NR Description: CAA30374.1 protein [Oryza sativa]
  misc_feature (69)..(438): NCBI GI NO: 15222333 NR Description: unknown protein; protein id: At1g75710.1
  misc_feature (24)..(438): NCBI GI NO: 9802582 NR Description: T2E6.3 [Arabidopsis thaliana]
  misc_feature (24)..(438): NCBI GI NO: 15220992 NR Description: hypothetical protein; protein id: At1g47860.1
  misc_feature (24)..(251): NCBI GI NO: 38346001 NR Description: OSJNBa0073L13.11
  misc_feature (217)..(438): NCBI GI NO: 38346001 NR Description: OSJNBa0073L13.11
  misc_feature (194)..(439): NCBI GI NO: 34910152 NR Description: B1070A12.19
  misc_feature (194)..(438): NCBI GI NO: 15239695 NR Description: putative protein; protein id: At5g54630
  misc_feature (90)..(438): NCBI GI NO: 18416951 NR Description: expressed protein; protein id: At4g27240
HLELGGKLASERNRIAMVERPGRSAGVREANKTSAAAMVKTTTTTTTNKEELESPSYRLAAFKSLFSCRNSHARPRAPDTGNRSKRGLGCSAPSICKLKDDSVPVPPKETTGTASAGEPCKRRASVSGSSDRCVKKPQCGAGSNKQLQRGGSSSSSGGSSFRAGMQLRRLSGCYECHMVVAGSASMRATTICPCPDCGEVFVRQESLQLHQSIRHAVSELGTDDTSRNIIEIIFQSSWLKKQSPVCKVDRILKVNNTPRTLARFEEYRDAVKARAGAEQLAVAAANSNRHPRCTADGNELLRFHCATLACSLGLNGATHLCDAAGTCAACGIIRDGFSSGGVLTMATSGRAHDAVPAAEAGAGLDEETTPRAMLVCRVIAGRVKRPKEAVPEEEAVAEAAEESEYDSVAGSAGVYSNLEELLVFNPRAILPCFVVVYKA

SEQ ID NO: 30667 - protein, 423 aa, Zea mays subsp. mays
  peptide (1)..(423): Ceres Seq. ID no. 12358367
  misc_feature (176)..(199): Pfam Name: Pfam Description:  Zinc finger, C2H2 type
  misc_feature (35)..(423): NCBI GI NO: 38345520 NR Description: OSJNBa0039K24.23
  misc_feature (81)..(423): NCBI GI NO: 5777616 NR Description: CAA30374.1 protein [Oryza sativa]
  misc_feature (53)..(422): NCBI GI NO: 15222333 NR Description: unknown protein; protein id: At1g75710.1
  misc_feature (8)..(422): NCBI GI NO: 9802582 NR Description: T2E6.3 [Arabidopsis thaliana]
  misc_feature (8)..(422): NCBI GI NO: 15220992 NR Description: hypothetical protein; protein id: At1g47860.1
  misc_feature (8)..(235): NCBI GI NO: 38346001 NR Description: OSJNBa0073L13.11
  misc_feature (201)..(422): NCBI GI NO: 38346001 NR Description: OSJNBa0073L13.11
  misc_feature (178)..(423): NCBI GI NO: 34910152 NR Description: B1070A12.19
  misc_feature (178)..(422): NCBI GI NO: 15239695 NR Description: putative protein; protein id: At5g54630
  misc_feature (74)..(422): NCBI GI NO: 18416951 NR Description: expressed protein; protein id: At4g27240
MVERPGRSAGVREANKTSAAAMVKTTTTTTTNKEELESPSYRLAAFKSLFSCRNSHARPRAPDTGNRSKRGLGCSAPSICKLKDDSVPVPPKETTGTASAGEPCKRRASVSGSSDRCVKKPQCGAGSNKQLQRGGSSSSSGGSSFRAGMQLRRLSGCYECHMVVAGSASMRATTICPCPDCGEVFVRQESLQLHQSIRHAVSELGTDDTSRNIIEIIFQSSWLKKQSPVCKVDRILKVNNTPRTLARFEEYRDAVKARAGAEQLAVAAANSNRHPRCTADGNELLRFHCATLACSLGLNGATHLCDAAGTCAACGIIRDGFSSGGVLTMATSGRAHDAVPAAEAGAGLDEETTPRAMLVCRVIAGRVKRPKEAVPEEEAVAEAAEESEYDSVAGSAGVYSNLEELLVFNPRAILPCFVVVYKA

SEQ ID NO: 30668 - protein, 402 aa, Zea mays subsp. mays
  peptide (1)..(402): Ceres Seq. ID no. 12358368
  misc_feature (155)..(178): Pfam Name: Pfam Description:  Zinc finger, C2H2 type
  misc_feature (14)..(402): NCBI GI NO: 38345520 NR Description: OSJNBa0039K24.23
  misc_feature (60)..(402): NCBI GI NO: 5777616 NR Description: CAA30374.1 protein [Oryza sativa]
  misc_feature (32)..(401): NCBI GI NO: 15222333 NR Description: unknown protein; protein id: At1g75710.1
  misc_feature (1)..(401): NCBI GI NO: 9802582 NR Description: T2E6.3 [Arabidopsis thaliana]
  misc_feature (1)..(401): NCBI GI NO: 15220992 NR Description: hypothetical protein; protein id: At1g47860.1
  misc_feature (1)..(214): NCBI GI NO: 38346001 NR Description: OSJNBa0073L13.11
  misc_feature (180)..(401): NCBI GI NO: 38346001 NR Description: OSJNBa0073L13.11
  misc_feature (157)..(402): NCBI GI NO: 34910152 NR Description: B1070A12.19
  misc_feature (157)..(401): NCBI GI NO: 15239695 NR Description: putative protein; protein id: At5g54630
  misc_feature (53)..(401): NCBI GI NO: 18416951 NR Description: expressed protein; protein id: At4g27240
MVKTTTTTTTNKEELESPSYRLAAFKSLFSCRNSHARPRAPDTGNRSKRGLGCSAPSICKLKDDSVPVPPKETTGTASAGEPCKRRASVSGSSDRCVKKPQCGAGSNKQLQRGGSSSSSGGSSFRAGMQLRRLSGCYECHMVVAGSASMRATTICPCPDCGEVFVRQESLQLHQSIRHAVSELGTDDTSRNIIEIIFQSSWLKKQSPVCKVDRILKVNNTPRTLARFEEYRDAVKARAGAEQLAVAAANSNRHPRCTADGNELLRFHCATLACSLGLNGATHLCDAAGTCAACGIIRDGFSSGGVLTMATSGRAHDAVPAAEAGAGLDEETTPRAMLVCRVIAGRVKRPKEAVPEEEAVAEAAEESEYDSVAGSAGVYSNLEELLVFNPRAILPCFVVVYKA

SEQ ID NO: 30669 - DNA, 1061 bp, Zea mays subsp. mays
  misc_feature (1)..(1061): Ceres Seq. ID no. 12403200
  misc_feature (411)..(411): n is a, c, t, g, unknown, or other
aacattaggtccagtccacccctccagccaacccaagtctccatccacaagagctcgagaacctggccacgagcccatgacggcaagaagcggtcatggccggtgatgaggaggaccacctagcagacgcgccgcgggtggtgggcgtcctctccgcgctcctggaacgtgtcgtggagcgcaacgacgcggttggccgatgagctcgccgccgggaccgagtccgcggcgccgccgtcggcgttccgggcgacggcgaggcccgacatctcggtgcgctcgtacatggcgcgcatcgcgcggttcgcagggtgcagcccggcttgctacgtcgtggcgtacgtctacctcgaccgcctcctgcgccgcgcccgcagcgcgcccgccgtggactcgtacaccgtgcaccgnctcctcatcaccgccgtgctcgcggccgtcaagttcatggatgacgtatgctacaacaacgcctacttcgccagggtcggcggcatcagcctgtcggagatgaactacctggaggtggacttcctcttcgccgtcgggttcgacctcaacgtgtcgccggagacgttcggccactactgcacggtcctccgggccgagatgctgtacctggagctggagggtcctcctcctccagccgccagtacaagtctgcacaggtgctgcttgtcagaagacgacgacggtagcagcagcaccagcagcagctagctgcatagagacaggtacagcggttgcttccaagcaagcaaccatgtatgaatgtgtccgtgtacactgtacagtacagacatgcttgcttgaaagcaaacacggagtacgtgacgtaggcatctgcgtgtgatcggtttgctatctggcggctggcgcttagttgtttttagctttgttattaggtaatctgttgctcttgtagtcttgtatagctgcattgctgttgttcatgtggaaatcggaaaaccgtaaggaacggtataaattgcagtcttggggcagtgtaattgttttcttgtccagcagtttatccatagtttatctaaaatattgttttt

SEQ ID NO: 30670 - protein, 144 aa, Zea mays subsp. mays
  peptide (1)..(144): Ceres Seq. ID no. 12403201
  misc_feature (1)..(92): Pfam Name: Pfam Description:  Cyclin, N-terminal domain
  misc_feature (1)..(143): NCBI GI NO: 14140116 NR Description: PREG-like protein [Oryza sativa]
  misc_feature (1)..(136): NCBI GI NO: 37536902 NR Description: hypothetical protein
  misc_feature (1)..(144): NCBI GI NO: 15240794 NR Description: putative protein; protein id: At5g07450.1
  misc_feature (1)..(113): NCBI GI NO: 15224950 NR Description: putative PREG1-like negative regulator
  misc_feature (1)..(112): NCBI GI NO: 15240306 NR Description: PREG-like - like protein; protein id: At5g61650.1
  misc_feature (1)..(110): NCBI GI NO: 25493992 NR Description: PREG-like protein
  misc_feature (1)..(109): NCBI GI NO: 15233185 NR Description: PREG-like protein, putative; protein id:At3g21870
  misc_feature (1)..(108): NCBI GI NO: 15229382 NR Description: putative protein; protein id: At3g63120
  misc_feature (1)..(108): NCBI GI NO: 21593009 NR Description: unknown [Arabidopsis thaliana]
  misc_feature (1)..(108): NCBI GI NO: 6729043 NR Description: hypothetical protein [Arabidopsis thaliana]
  misc_feature (42)..(42): Xaa is any aa, unknown or other
MARIARFAGCSPACYVVAYVYLDRLLRRARSAPAVDSYTVHXLLITAVLAAVKFMDDVCYNNAYFARVGGISLSEMNYLEVDFLFAVGFDLNVSPETFGHYCTVLRAEMLYLELEGPPPPAASTSLHRCCLSEDDDGSSSTSSS

SEQ ID NO: 30671 - protein, 104 aa, Zea mays subsp. mays
  peptide (1)..(104): Ceres Seq. ID no. 12403202
  misc_feature (2)..(104): Pfam Name: Pfam Description:  Cupin
  misc_feature (71)..(71): Xaa is any aa, unknown or other
MSSPPGPSPRRRRRRSGRRRGPTSRCARTWRASRGSQGAARLATSWRTSTSTASCAAPAARPPWTRTPCTXSSSPPCSRPSSSWMTYATTTPTSPGSAASACRR

SEQ ID NO: 30672 - protein, 90 aa, Zea mays subsp. mays
  peptide (1)..(90): Ceres Seq. ID no. 12403203
  misc_feature (1)..(89): NCBI GI NO: 14140116 NR Description: PREG-like protein [Oryza sativa]
  misc_feature (1)..(82): NCBI GI NO: 37536902 NR Description: hypothetical protein
  misc_feature (1)..(90): NCBI GI NO: 15240794 NR Description: putative protein; protein id: At5g07450.1
  misc_feature (1)..(59): NCBI GI NO: 15224950 NR Description: putative PREG1-like negative regulator
  misc_feature (1)..(58): NCBI GI NO: 15240306 NR Description: PREG-like - like protein; protein id: At5g61650.1
  misc_feature (1)..(56): NCBI GI NO: 25493992 NR Description: PREG-like protein
  misc_feature (1)..(55): NCBI GI NO: 15233185 NR Description: PREG-like protein, putative; protein id:At3g21870
  misc_feature (1)..(54): NCBI GI NO: 15229382 NR Description: putative protein; protein id: At3g63120
  misc_feature (1)..(54): NCBI GI NO: 21593009 NR Description: unknown [Arabidopsis thaliana]
  misc_feature (1)..(54): NCBI GI NO: 6729043 NR Description: hypothetical protein [Arabidopsis thaliana]
MDDVCYNNAYFARVGGISLSEMNYLEVDFLFAVGFDLNVSPETFGHYCTVLRAEMLYLELEGPPPPAASTSLHRCCLSEDDDGSSSTSSS

SEQ ID NO: 30673 - DNA, 1112 bp, Zea mays subsp. mays
  misc_feature (1)..(1112): Ceres Seq. ID no. 12402142
  misc_feature (726)..(726): n is a, c, t, g, unknown, or other
gaaaccggccaccgggccggagcgaacccttagaagcgaccttggcccgtgaggaagccaatcagccagagacagaacaatccatccaccatgaacagcctgttctcgagctcatggaagcgcgacggcggggacatcgagtccggcggcgtggagatgtctgcgccgccgggcgccgcggcgggcgcgagcctggacaggttcttcgaggacgtggagtccatcaaggacgagctccgcgacctggagcgcatccagcggtcgctccacgacgccaacgaggggggaaagtcgatgcacgacgcggcggccgtgcgcggcctccgcgcgcggatggacgcggacgtggccgcggcgatcaagaaggccaaggtggtgaagctgcgcctcgagtcgctggaccgcgccaacgccgccaaccggtccgtgcccgggtgcgggccgggctcctccaccgaccgcacccggacgtccgtcgtggccgggctgcgcaagaagctccgggactcgatggagtccttctcgtcgctgcggtcccgcgtcgcggccgagtaccgggacacggtggcgcggcggtacttcacggtcacgggggcgcagcccgacgaggcgaccctggacgcgctggcggagtccggggaaggagagcggttcctgcagcgcgccatcgcggagcagggccaggggcgcggagaggtgctgggcgtggtggcggagatccaggancggcacggcgccgtggcggggctggagcgcagcctgctggagctgcagcaggtgttcaacgacatggccgtgctggtggccgcgcagggggagcagctggacgacatcgagggcaacgtcggccgcgccaggtccttcgtcgaccgcggacgcgagcagctgcaggtggcgcggaagcaccagaagagcacccgcaagtggaccttcatcgccatcatcatcctcctcgtcatcatcctcgtcatcgtcctccccatcgtgctcaagggcgtcaataagaactaggccgcctggcctgcgtaattcgttctagtttttcttttcgtggcctttgtatcatacatacggttcgttgatacggtcgtcttgattatatttttcttctt

SEQ ID NO: 30674 - protein, 333 aa, Zea mays subsp. mays
  peptide (1)..(333): Ceres Seq. ID no. 12402143
  misc_feature (209)..(333): Pfam Name: Pfam Description:  Amidohydrolase family
  misc_feature (50)..(302): NCBI GI NO: 29829093 NR Description: putative translation initiation factor IF-2
  misc_feature (41)..(276): NCBI GI NO: 25989121 NR Description: putative PHA synthase [Streptomyces aureofaciens]
  misc_feature (41)..(298): NCBI GI NO: 25989121 NR Description: putative PHA synthase [Streptomyces aureofaciens]
  misc_feature (71)..(327): NCBI GI NO: 17542802 NR Description: Putative nuclear protein, nematode specific
  misc_feature (102)..(333): NCBI GI NO: 11024339 NR Description: PKSA putative O-methyltransferase; PKSA-ORF6
  misc_feature (29)..(318): NCBI GI NO: 22960369 NR Description: hypothetical protein [Rhodobacter sphaeroides]
  misc_feature (76)..(304): NCBI GI NO: 18025496 NR Description: EBNA-1 [cercopithicine herpesvirus 15]
  misc_feature (46)..(316): NCBI GI NO: 23105951 NR Description: hypothetical protein [Azotobacter vinelandii]
  misc_feature (65)..(274): NCBI GI NO: 13561998 NR Description: major ampullate spidroin 1
  misc_feature (58)..(283): NCBI GI NO: 465445 NR Description: PROBABLE NUCLEAR ANTIGEN
  misc_feature (242)..(242): Xaa is any aa, unknown or other
NRPPGRSEPLEATLAREEANQPETEQSIHHEQPVLELMEARRRGHRVRRRGDVCAAGRRGGREPGQVLRGRGVHQGRAPRPGAHPAVAPRRQRGGKVDARRGGRARPPRADGRGRGRGDQEGQGGEAAPRVAGPRQRRQPVRARVRAGLLHRPHPDVRRGRAAQEAPGLDGVLLVAAVPRRGRVPGHGGAAVLHGHGGAARRGDPGRAGGVRGRRAVPAARHRGAGPGARRGAGRGGGDPGXARRRGGAGAQPAGAAAGVQRHGRAGGRAGGAAGRHRGQRRPRQVLRRPRTRAAAGGAEAPEEHPQVDLHRHHHPPRHHPRHRPPHRAQGRQ

SEQ ID NO: 30675 - protein, 306 aa, Zea mays subsp. mays
  peptide (1)..(306): Ceres Seq. ID no. 12402144
  misc_feature (213)..(274): Pfam Name: Pfam Description:  SNARE domain
  misc_feature (1)..(306): NCBI GI NO: 15229865 NR Description: syntaxin SYP121; protein id: At3g11820
  misc_feature (1)..(298): NCBI GI NO: 4206787 NR Description: syntaxin-related protein Nt-syr1
  misc_feature (1)..(299): NCBI GI NO: 15220328 NR Description: syntaxin SYP125; protein id: At1g11250.1
  misc_feature (1)..(297): NCBI GI NO: 15219900 NR Description: syntaxin SYP124; protein id: At1g61290.1
  misc_feature (1)..(299): NCBI GI NO: 15236285 NR Description: syntaxin SYP123; protein id: At4g03330
  misc_feature (1)..(296): NCBI GI NO: 11358871 NR Description: syntaxin synt4 [imported] - Arabidopsis thaliana
  misc_feature (1)..(296): NCBI GI NO: 15231205 NR Description: syntaxin SYP122; protein id: At3g52400
  misc_feature (15)..(298): NCBI GI NO: 29788865 NR Description: putative cytokinesis-specific syntaxin-relatedprotein
  misc_feature (15)..(298): NCBI GI NO: 5912543 NR Description: Knolle [Capsicum annuum]
  misc_feature (15)..(298): NCBI GI NO: 28974542 NR Description: knolle [Antirrhinum majus]
  misc_feature (212)..(212): Xaa is any aa, unknown or other
MNSLFSSSWKRDGGDIESGGVEMSAPPGAAAGASLDRFFEDVESIKDELRDLERIQRSLHDANEGGKSMHDAAAVRGLRARMDADVAAAIKKAKVVKLRLESLDRANAANRSVPGCGPGSSTDRTRTSVVAGLRKKLRDSMESFSSLRSRVAAEYRDTVARRYFTVTGAQPDEATLDALAESGEGERFLQRAIAEQGQGRGEVLGVVAEIQXRHGAVAGLERSLLELQQVFNDMAVLVAAQGEQLDDIEGNVGRARSFVDRGREQLQVARKHQKSTRKWTFIAIIILLVIILVIVLPIVLKGVNKN

SEQ ID NO: 30676 - protein, 296 aa, Zea mays subsp. mays
  peptide (1)..(296): Ceres Seq. ID no. 12402145
  misc_feature (172)..(296): Pfam Name: Pfam Description:  Amidohydrolase family
  misc_feature (13)..(265): NCBI GI NO: 29829093 NR Description: putative translation initiation factor IF-2
  misc_feature (4)..(239): NCBI GI NO: 25989121 NR Description: putative PHA synthase [Streptomyces aureofaciens]
  misc_feature (4)..(261): NCBI GI NO: 25989121 NR Description: putative PHA synthase [Streptomyces aureofaciens]
  misc_feature (34)..(290): NCBI GI NO: 17542802 NR Description: Putative nuclear protein, nematode specific
  misc_feature (65)..(296): NCBI GI NO: 11024339 NR Description: PKSA putative O-methyltransferase; PKSA-ORF6
  misc_feature (1)..(281): NCBI GI NO: 22960369 NR Description: hypothetical protein [Rhodobacter sphaeroides]
  misc_feature (39)..(267): NCBI GI NO: 18025496 NR Description: EBNA-1 [cercopithicine herpesvirus 15]
  misc_feature (9)..(279): NCBI GI NO: 23105951 NR Description: hypothetical protein [Azotobacter vinelandii]
  misc_feature (28)..(237): NCBI GI NO: 13561998 NR Description: major ampullate spidroin 1
  misc_feature (21)..(246): NCBI GI NO: 465445 NR Description: PROBABLE NUCLEAR ANTIGEN
  misc_feature (205)..(205): Xaa is any aa, unknown or other
MEARRRGHRVRRRGDVCAAGRRGGREPGQVLRGRGVHQGRAPRPGAHPAVAPRRQRGGKVDARRGGRARPPRADGRGRGRGDQEGQGGEAAPRVAGPRQRRQPVRARVRAGLLHRPHPDVRRGRAAQEAPGLDGVLLVAAVPRRGRVPGHGGAAVLHGHGGAARRGDPGRAGGVRGRRAVPAARHRGAGPGARRGAGRGGGDPGXARRRGGAGAQPAGAAAGVQRHGRAGGRAGGAAGRHRGQRRPRQVLRRPRTRAAAGGAEAPEEHPQVDLHRHHHPPRHHPRHRPPHRAQGRQ

SEQ ID NO: 30677 - DNA, 936 bp, Zea mays subsp. mays
  misc_feature (1)..(936): Ceres Seq. ID no. 12346933
tcggatgacaagaaaggctcttcatcagggagtgaggggtccatctggccgaagtttgaaatcaccctgtcaaacagggaaaaggaagaggatttcctggtgttcaaaggatccaagctgcctcaaagacccaagaaaaaagctaaggtcatccagagaaccgtcaattttgtatgcccaggaacgtggctatgtgacttgactcttgaaagatatgaagtccgggagaagaaggtttccaagaagcgccccaggggattgaaagctatgcacgacatggacagtgactcggaataaataaaagaagatcactgaacatgagaagctgaatattagaaagaaggccaggacagatcctgcagatggaggccgacgagaaaacgtcctgatggaatgaatggccgtatcaacgattcgccacttctcgtgattgctactggagatcagtttgttccaaaaggacttatggagatcggaggacggccgaaatgtcaggaagctgcatggaagaacagaagagagccgcaggagctggaattcctggacattattattcagttccctctgtaaagcagcaacgctgttttgcaagcctcccatgctaatttcgcgctgccaaatattagcgtgatcgcgaagctagccagtcctggcgcgtctagtttgccgggttgtctgacaacaaaagttagtatgaatatgaaagggccttccttaatgttttttcccacttggtgctgtataaaggttcagtgtatattccattcaggagaatgagaaaaagttcaacactccagtgtgggtggattcaaaacaggcgacttttaattttgaaagtttcagtagatttgttagtttatagtttatattttgaaagtttcagtagtgtccaatggaactcgatgtgtaattcaaaacaggcagacttttaatttt

SEQ ID NO: 30678 - protein, 98 aa, Zea mays subsp. mays
  peptide (1)..(98): Ceres Seq. ID no. 12346934
  misc_feature (15)..(98): NCBI GI NO: 30695924 NR Description: expressed protein [Arabidopsis thaliana]
  misc_feature (8)..(98): NCBI GI NO: 30678969 NR Description: expressed protein [Arabidopsis thaliana]
  misc_feature (16)..(98): NCBI GI NO: 7485821 NR Description: hypothetical protein F1C12
  misc_feature (16)..(98): NCBI GI NO: 30685058 NR Description: expressed protein [Arabidopsis thaliana]
  misc_feature (17)..(98): NCBI GI NO: 30103017 NR Description: unknown protein
  misc_feature (16)..(98): NCBI GI NO: 21553974 NR Description: unknown [Arabidopsis thaliana]
  misc_feature (15)..(85): NCBI GI NO: 25405821 NR Description: unknown protein, 25817-24837
  misc_feature (8)..(55): NCBI GI NO: 6006854 NR Description: hypothetical protein [Arabidopsis thaliana]
  misc_feature (58)..(98): NCBI GI NO: 6006854 NR Description: hypothetical protein [Arabidopsis thaliana]
  misc_feature (6)..(86): NCBI GI NO: 34911178 NR Description: P0019E03.4
SDDKKGSSSGSEGSIWPKFEITLSNREKEEDFLVFKGSKLPQRPKKKAKVIQRTVNFVCPGTWLCDLTLERYEVREKKVSKKRPRGLKAMHDMDSDSE

SEQ ID NO: 30679 - protein, 66 aa, Zea mays subsp. mays
  peptide (1)..(66): Ceres Seq. ID no. 12346935
RMTRKALHQGVRGPSGRSLKSPCQTGKRKRISWCSKDPSCLKDPRKKLRSSREPSILYAQERGYVT

SEQ ID NO: 30680 - protein, 65 aa, Zea mays subsp. mays
  peptide (1)..(65): Ceres Seq. ID no. 12346936
MTRKALHQGVRGPSGRSLKSPCQTGKRKRISWCSKDPSCLKDPRKKLRSSREPSILYAQERGYVT

SEQ ID NO: 30681 - DNA, 1528 bp, Zea mays subsp. mays
  misc_feature (1)..(1528): Ceres Seq. ID no. 12360551
gcacgagaccattacctagaacatcctaatcaaaagttttctcttgatcgctttgtcacttgaatccgtgcctgctctaacagagagcggagacgaccacgacgacggcgaggccaggctctgcgatggagcaggagccgcaccggcccatggagctgcccccgggcttccgcttccacccgaccgacgaggagctcatcacgcactacctggcccgcaaggccgccgacgcccgcttcgccgcgcttgccgtcgccgaggccgacctcaacaagtgcgagccctgggacctgccatcgctggcgaggatgggggagaaggagtggtacttcttctgcctcaaggaccgcaagtacccgacggggctgaggaccaaccgggccacggaggccgggtactggaaggccacgggcaaggacagggacgtcttcaggggcaaggcgctcgtcggttccaagaagacgctcgtcttctacacggggagggcgcccaggggcgagaagtccggatgggtcatgcacgagtaccgcctccacgccaagctccacggccacggccacggccaaggcgcagccgtcgtcgtcgtccccaaggccgccgggtccaagaacgagtgggtgctgtgcagggtgttcaagaagagcctggtcgtaggtggtgcagctgcagcagcagcaccaaccgcaggcaagaggggcggcacggagacgtcgtccaactacaagacgggcgacgtagaggccatcgcccacctccctccgctgatggacgtgtccggctccggctccggcgccggcgccgccgccgcggcggcggcacacgtgacctgcttctccgacgcgctggagggccagttcttggaccagacgacgaccacgccgccgccagaagccgccaccgccgccacggacgacgacggccacctcggcgccctcggcgcctcctcctcgcccttccagctgcccggcttcgcgcactactactacggcggcgggccgccgcacctgcaccagcaccacggcgccgccagcctggtgcagctcctggagggcagcgtgccgccgtgcaataagggcggcgagcgggagcgggagcggctgagcgcgtcgcaggacacggggctcacctccgacgtcaaccccgagatctcctcctcctccggccaacgcttcgaccacgaccacgaccatgaccaccacctctgctgctggggctactgatcgtcgattcgatgagcctacgacgactaccgagcgcgcatcatgcatgcgtcgcgttattactagcgattagtgtatagcacactgctgtaaataaaacatctactagtactacatctgcgtgaggtcgacgatcggccgtgtggtggtggtggtgcgtggcatgcatgcgtcgagctgcctacgtttcattatctgctcgtgtgatttgttactgtagacgagtgtgggggtgtgtaattagcattgttgatgtattattattcacgatttggtggaataatatctccttggttaatgacgccgcc

SEQ ID NO: 30682 - protein, 364 aa, Zea mays subsp. mays
  peptide (1)..(364): Ceres Seq. ID no. 12360552
  misc_feature (11)..(137): Pfam Name: NAM Pfam Description: No apical meristem
  misc_feature (1)..(352): NCBI GI NO: 38344965 NR Description: OSJNBa0072F16.10
  misc_feature (9)..(352): NCBI GI NO: 27529810 NR Description: OsNAC2 protein [Oryza sativa]
  misc_feature (9)..(345): NCBI GI NO: 27529808 NR Description: OsNAC1 protein [Oryza sativa]
  misc_feature (154)..(354): NCBI GI NO: 22597158 NR Description: no apical meristem-like protein [Glycine max]
  misc_feature (9)..(173): NCBI GI NO: 22597158 NR Description: no apical meristem-like protein [Glycine max]
  misc_feature (3)..(178): NCBI GI NO: 15240252 NR Description: NAM, no apical meristem, - like protein
  misc_feature (11)..(237): NCBI GI NO: 1279640 NR Description: NAM [Petunia x hybrida]
  misc_feature (9)..(178): NCBI GI NO: 21537315 NR Description: NAM, no apical meristem,-like protein
  misc_feature (3)..(178): NCBI GI NO: 30682048 NR Description: NAM (no apical meristem)-related protein
  misc_feature (8)..(217): NCBI GI NO: 34902148 NR Description: Putative NAM (no apical meristem) protein
MEQEPHRPMELPPGFRFHPTDEELITHYLARKAADARFAALAVAEADLNKCEPWDLPSLARMGEKEWYFFCLKDRKYPTGLRTNRATEAGYWKATGKDRDVFRGKALVGSKKTLVFYTGRAPRGEKSGWVMHEYRLHAKLHGHGHGQGAAVVVVPKAAGSKNEWVLCRVFKKSLVVGGAAAAAAPTAGKRGGTETSSNYKTGDVEAIAHLPPLMDVSGSGSGAGAAAAAAAHVTCFSDALEGQFLDQTTTTPPPEAATAATDDDGHLGALGASSSPFQLPGFAHYYYGGGPPHLHQHHGAASLVQLLEGSVPPCNKGGERERERLSASQDTGLTSDVNPEISSSSGQRFDHDHDHDHHLCCWGY

SEQ ID NO: 30683 - protein, 356 aa, Zea mays subsp. mays
  peptide (1)..(356): Ceres Seq. ID no. 12360553
  misc_feature (3)..(129): Pfam Name: NAM Pfam Description: No apical meristem
  misc_feature (1)..(344): NCBI GI NO: 38344965 NR Description: OSJNBa0072F16.10
  misc_feature (1)..(344): NCBI GI NO: 27529810 NR Description: OsNAC2 protein [Oryza sativa]
  misc_feature (1)..(337): NCBI GI NO: 27529808 NR Description: OsNAC1 protein [Oryza sativa]
  misc_feature (146)..(346): NCBI GI NO: 22597158 NR Description: no apical meristem-like protein [Glycine max]
  misc_feature (1)..(165): NCBI GI NO: 22597158 NR Description: no apical meristem-like protein [Glycine max]
  misc_feature (1)..(170): NCBI GI NO: 15240252 NR Description: NAM, no apical meristem, - like protein
  misc_feature (3)..(229): NCBI GI NO: 1279640 NR Description: NAM [Petunia x hybrida]
  misc_feature (1)..(170): NCBI GI NO: 21537315 NR Description: NAM, no apical meristem,-like protein
  misc_feature (1)..(170): NCBI GI NO: 30682048 NR Description: NAM (no apical meristem)-related protein
  misc_feature (1)..(209): NCBI GI NO: 34902148 NR Description: Putative NAM (no apical meristem) protein
MELPPGFRFHPTDEELITHYLARKAADARFAALAVAEADLNKCEPWDLPSLARMGEKEWYFFCLKDRKYPTGLRTNRATEAGYWKATGKDRDVFRGKALVGSKKTLVFYTGRAPRGEKSGWVMHEYRLHAKLHGHGHGQGAAVVVVPKAAGSKNEWVLCRVFKKSLVVGGAAAAAAPTAGKRGGTETSSNYKTGDVEAIAHLPPLMDVSGSGSGAGAAAAAAAHVTCFSDALEGQFLDQTTTTPPPEAATAATDDDGHLGALGASSSPFQLPGFAHYYYGGGPPHLHQHHGAASLVQLLEGSVPPCNKGGERERERLSASQDTGLTSDVNPEISSSSGQRFDHDHDHDHHLCCWGY

SEQ ID NO: 30684 - protein, 303 aa, Zea mays subsp. mays
  peptide (1)..(303): Ceres Seq. ID no. 12360554
  misc_feature (1)..(76): Pfam Name: NAM Pfam Description: No apical meristem
  misc_feature (1)..(291): NCBI GI NO: 38344965 NR Description: OSJNBa0072F16.10
  misc_feature (1)..(291): NCBI GI NO: 27529810 NR Description: OsNAC2 protein [Oryza sativa]
  misc_feature (1)..(284): NCBI GI NO: 27529808 NR Description: OsNAC1 protein [Oryza sativa]
  misc_feature (93)..(293): NCBI GI NO: 22597158 NR Description: no apical meristem-like protein [Glycine max]
  misc_feature (1)..(112): NCBI GI NO: 22597158 NR Description: no apical meristem-like protein [Glycine max]
  misc_feature (1)..(117): NCBI GI NO: 15240252 NR Description: NAM, no apical meristem, - like protein
  misc_feature (1)..(176): NCBI GI NO: 1279640 NR Description: NAM [Petunia x hybrida]
  misc_feature (1)..(117): NCBI GI NO: 21537315 NR Description: NAM, no apical meristem,-like protein
  misc_feature (1)..(117): NCBI GI NO: 30682048 NR Description: NAM (no apical meristem)-related protein
  misc_feature (1)..(156): NCBI GI NO: 34902148 NR Description: Putative NAM (no apical meristem) protein
MGEKEWYFFCLKDRKYPTGLRTNRATEAGYWKATGKDRDVFRGKALVGSKKTLVFYTGRAPRGEKSGWVMHEYRLHAKLHGHGHGQGAAVVVVPKAAGSKNEWVLCRVFKKSLVVGGAAAAAAPTAGKRGGTETSSNYKTGDVEAIAHLPPLMDVSGSGSGAGAAAAAAAHVTCFSDALEGQFLDQTTTTPPPEAATAATDDDGHLGALGASSSPFQLPGFAHYYYGGGPPHLHQHHGAASLVQLLEGSVPPCNKGGERERERLSASQDTGLTSDVNPEISSSSGQRFDHDHDHDHHLCCWGY

SEQ ID NO: 30685 - DNA, 1033 bp, Zea mays subsp. mays
  misc_feature (1)..(1033): Ceres Seq. ID no. 12365844
cctgatttcctgaaacacagatcatcatcattcatggtcatggctatggcaaactcggcaacgatcctgaccgtcgttctggctctcgggctagcgttcctccgcgccgcagctccggcctccgcgcagaactgcggctgcccgccaggctactgctgcagcaagttcggttactgcggcaccagcttcgactactgcaatgccaacacgtgccagtccggcccgtgcacggccgggggcgccggtagcggcggcggcgcgaacgtgagtggcgtcgtcaccgacgcatttctcagcggcatcaagtcccaggccgggagcgggtgcgagggcagtagcttgagcttctactcgcgaagggcgttcctgagcgccgccagctcgtatcccggcttcgcccgtgcaggatcggaggccgacggcaagcgcgaggtcgccgccttcttcgcgcacgtcacgcacgagaccggccatttctgctacgtcagcgagatcaacaagaacaacagctactgcaactcgagcaacacgcagtggccgtgcgccccgggcaagaagtactacggacgcggcccgcctgcagatctcgtggaactacaactacggtcccgccgggaggagcgtcggcttcgacgggctggtgaacccggacatggtggcgcaggaccccgtggtctcgttcaagacggcgctctggttctggatgagcaacgcgcaccaggtcatgccgcgggggttcggcgccactatccgtgccatcaacggcgccctcgagtgcaacggcgagaaccccgccgccgtgaacgcgcgcgtgggctactacaaggagtactgcaagcagttcggcgtcggcccagggaacaacctcacctgctagaacctattcaagtgttgtgttgggttcatgcatatgcgggcttcaatggaaaactcagtccgctgtagtgaagctcagagtttgagagtacctgtttattatacaagaaaaatgaagcagttcctaatatacagattatatcatttaattaatggg

SEQ ID NO: 30686 - protein, 314 aa, Zea mays subsp. mays
  peptide (1)..(314): Ceres Seq. ID no. 12365845
  misc_feature (92)..(192): Pfam Name: Pfam Description:  Chitinase class I
  misc_feature (26)..(192): NCBI GI NO: 15213848 NR Description: chitinase-B [Saccharum officinarum]
  misc_feature (26)..(192): NCBI GI NO: 283037 NR Description: chitinase (EC 3.2.1.14) A - maize
  misc_feature (16)..(192): NCBI GI NO: 15529119 NR Description: chitinase-B1 [Sorghum bicolor]
  misc_feature (26)..(192): NCBI GI NO: 116329 NR Description: ENDOCHITINASE A PRECURSOR (SEED CHITINASE A)
  misc_feature (26)..(192): NCBI GI NO: 15213852 NR Description: chitinase-B [Sorghum halepense]
  misc_feature (26)..(192): NCBI GI NO: 15529117 NR Description: chitinase-B [Sorghum bicolor]
  misc_feature (26)..(192): NCBI GI NO: 15213850 NR Description: chitinase-B [Sorghum arundinaceum]
  misc_feature (26)..(192): NCBI GI NO: 15529121 NR Description: chitinase-B [Sorghum bicolor]
  misc_feature (26)..(192): NCBI GI NO: 116333 NR Description: ENDOCHITINASE B PRECURSOR (SEED CHITINASE B)
  misc_feature (26)..(192): NCBI GI NO: 482985 NR Description: chitinase (EC 3
PDFLKHRSSSFMVMAMANSATILTVVLALGLAFLRAAAPASAQNCGCPPGYCCSKFGYCGTSFDYCNANTCQSGPCTAGGAGSGGGANVSGVVTDAFLSGIKSQAGSGCEGSSLSFYSRRAFLSAASSYPGFARAGSEADGKREVAAFFAHVTHETGHFCYVSEINKNNSYCNSSNTQWPCAPGKKYYGRGPPADLVELQLRSRREERRLRRAGEPGHGGAGPRGLVQDGALVLDEQRAPGHAAGVRRHYPCHQRRPRVQRREPRRRERARGLLQGVLQAVRRRPREQPHLLEPIQVLCWVHAYAGFNGKLSPL

SEQ ID NO: 30687 - protein, 303 aa, Zea mays subsp. mays
  peptide (1)..(303): Ceres Seq. ID no. 12365846
  misc_feature (81)..(181): Pfam Name: Pfam Description:  Chitinase class I
  misc_feature (15)..(181): NCBI GI NO: 15213848 NR Description: chitinase-B [Saccharum officinarum]
  misc_feature (15)..(181): NCBI GI NO: 283037 NR Description: chitinase (EC 3.2.1.14) A - maize
  misc_feature (5)..(181): NCBI GI NO: 15529119 NR Description: chitinase-B1 [Sorghum bicolor]
  misc_feature (15)..(181): NCBI GI NO: 116329 NR Description: ENDOCHITINASE A PRECURSOR (SEED CHITINASE A)
  misc_feature (15)..(181): NCBI GI NO: 15213852 NR Description: chitinase-B [Sorghum halepense]
  misc_feature (15)..(181): NCBI GI NO: 15529117 NR Description: chitinase-B [Sorghum bicolor]
  misc_feature (15)..(181): NCBI GI NO: 15213850 NR Description: chitinase-B [Sorghum arundinaceum]
  misc_feature (15)..(181): NCBI GI NO: 15529121 NR Description: chitinase-B [Sorghum bicolor]
  misc_feature (15)..(181): NCBI GI NO: 116333 NR Description: ENDOCHITINASE B PRECURSOR (SEED CHITINASE B)
  misc_feature (15)..(181): NCBI GI NO: 482985 NR Description: chitinase (EC 3
MVMAMANSATILTVVLALGLAFLRAAAPASAQNCGCPPGYCCSKFGYCGTSFDYCNANTCQSGPCTAGGAGSGGGANVSGVVTDAFLSGIKSQAGSGCEGSSLSFYSRRAFLSAASSYPGFARAGSEADGKREVAAFFAHVTHETGHFCYVSEINKNNSYCNSSNTQWPCAPGKKYYGRGPPADLVELQLRSRREERRLRRAGEPGHGGAGPRGLVQDGALVLDEQRAPGHAAGVRRHYPCHQRRPRVQRREPRRRERARGLLQGVLQAVRRRPREQPHLLEPIQVLCWVHAYAGFNGKLSPL

SEQ ID NO: 30688 - protein, 301 aa, Zea mays subsp. mays
  peptide (1)..(301): Ceres Seq. ID no. 12365847
  misc_feature (79)..(179): Pfam Name: Pfam Description:  Chitinase class I
  misc_feature (13)..(179): NCBI GI NO: 15213848 NR Description: chitinase-B [Saccharum officinarum]
  misc_feature (13)..(179): NCBI GI NO: 283037 NR Description: chitinase (EC 3.2.1.14) A - maize
  misc_feature (3)..(179): NCBI GI NO: 15529119 NR Description: chitinase-B1 [Sorghum bicolor]
  misc_feature (13)..(179): NCBI GI NO: 116329 NR Description: ENDOCHITINASE A PRECURSOR (SEED CHITINASE A)
  misc_feature (13)..(179): NCBI GI NO: 15213852 NR Description: chitinase-B [Sorghum halepense]
  misc_feature (13)..(179): NCBI GI NO: 15529117 NR Description: chitinase-B [Sorghum bicolor]
  misc_feature (13)..(179): NCBI GI NO: 15213850 NR Description: chitinase-B [Sorghum arundinaceum]
  misc_feature (13)..(179): NCBI GI NO: 15529121 NR Description: chitinase-B [Sorghum bicolor]
  misc_feature (13)..(179): NCBI GI NO: 116333 NR Description: ENDOCHITINASE B PRECURSOR (SEED CHITINASE B)
  misc_feature (13)..(179): NCBI GI NO: 482985 NR Description: chitinase (EC 3
MAMANSATILTVVLALGLAFLRAAAPASAQNCGCPPGYCCSKFGYCGTSFDYCNANTCQSGPCTAGGAGSGGGANVSGVVTDAFLSGIKSQAGSGCEGSSLSFYSRRAFLSAASSYPGFARAGSEADGKREVAAFFAHVTHETGHFCYVSEINKNNSYCNSSNTQWPCAPGKKYYGRGPPADLVELQLRSRREERRLRRAGEPGHGGAGPRGLVQDGALVLDEQRAPGHAAGVRRHYPCHQRRPRVQRREPRRRERARGLLQGVLQAVRRRPREQPHLLEPIQVLCWVHAYAGFNGKLSPL

SEQ ID NO: 30689 - DNA, 1403 bp, Zea mays subsp. mays
  misc_feature (1)..(1403): Ceres Seq. ID no. 12350590
aacttcttgccttctcgcgctcgcctccgtttcgtgtcggctcgctctaaacgtgagatcggggaggtggtggacttggggtcgttgtggtatcggcggcgagccgcgggggcctagggtttcctgccttcctggtttggatccgcgccctggcccatgggatccggaggcttcgcggccgcggtggccgcgtgcccctccgccgccgaggccttccttaagtactatggtattgtatcaggaggtacaagtgcggagtcaagacaagcattggttgagctttcactagctatagacggaattgaaggaatgagggatgtgatatttgctgatattccaaagctcattccatttattgatctggaggatatgagcctattcagttgcttctacgattttgttttcttcatctgccgtgaaaagggtcaaaagagtgtcactattcagagagctgtagcagcatggaggattgttctaagtggaaggttccgtttgcttgatcgatggtgtaacttcgttgagaagtaccaacgccataacatatccgaggatacttggcagcagctgctagctttcagcaggtgtgtaaatgaagatctggaaggttatgacccacgaggtgcttggcctgttctgattgatgattttgttgagcaaatgcacagaatttatcactccactgactgcagcagtgcgatggaatcacagtgtaacatttccagtacccttaaaggactggatcctcaacctggatcaaagaggaaatgcccacacctcaaatccaatgaagaggatgtagagctttcggatagctttacgcgctctgtccatcttacaccaataaagcgactcaaggaaagccatgacgccagatatggagcgggggaatccgccaaaactacccatttctctaatagttcctctggtggttaccacgaggatatgaatttacacaactcaagaggttaccttcagaactccccctgtaatgttgaggatgccctgtccaaagggtttgagggttgtatttcgatgaaatgtccattttgatgtaacaaatttcgtgtcagcccagaagctatacattcccttttagcggcaaaatcatcctgtgtgtgtatctagtcattttgtgcaaaaaaaatgcagtaattgaatgcattttttttaaaatgctttaaagtgtattgatcagcatcggacctgtttttagaggcatcggtatgaagggagggctgttggttgtgtttgcttgacagcaaatccctcccattcaataccccgcactttctgaaaattgcgacttccatattcccttcccttgagctttgttaagacagtattgtattacaagatctgaatcgctgcaagcgtgcagaataatgaatgccatctttctatgc

SEQ ID NO: 30690 - protein, 297 aa, Zea mays subsp. mays
  peptide (1)..(297): Ceres Seq. ID no. 12350591
  misc_feature (1)..(297): NCBI GI NO: 33146550 NR Description: leucine zipper protein-like
  misc_feature (1)..(170): NCBI GI NO: 34913252 NR Description: P0011H09.36
  misc_feature (35)..(292): NCBI GI NO: 15228555 NR Description: unknown protein; protein id: At3g28970.1
  misc_feature (49)..(190): NCBI GI NO: 24664675 NR Description: CG7427-PA [Drosophila melanogaster]
  misc_feature (31)..(166): NCBI GI NO: 34784120 NR Description: Unknown (protein for MGC:66414) [Danio rerio]
  misc_feature (31)..(166): NCBI GI NO: 18700658 NR Description: leucine zipper protein [Homo sapiens]
  misc_feature (31)..(166): NCBI GI NO: 6166507 NR Description: RP42 [Mus musculus]
  misc_feature (35)..(166): NCBI GI NO: 26325272 NR Description: unnamed protein product [Mus musculus]
  misc_feature (31)..(166): NCBI GI NO: 34857167 NR Description: similar to RP42 homolog [Rattus norvegicus]
  misc_feature (31)..(166): NCBI GI NO: 15826860 NR Description: testis derived transcript 3 [Mus musculus]
MGSGGFAAAVAACPSAAEAFLKYYGIVSGGTSAESRQALVELSLAIDGIEGMRDVIFADIPKLIPFIDLEDMSLFSCFYDFVFFICREKGQKSVTIQRAVAAWRIVLSGRFRLLDRWCNFVEKYQRHNISEDTWQQLLAFSRCVNEDLEGYDPRGAWPVLIDDFVEQMHRIYHSTDCSSAMESQCNISSTLKGLDPQPGSKRKCPHLKSNEEDVELSDSFTRSVHLTPIKRLKESHDARYGAGESAKTTHFSNSSSGGYHEDMNLHNSRGYLQNSPCNVEDALSKGFEGCISMKCPF

SEQ ID NO: 30691 - protein, 246 aa, Zea mays subsp. mays
  peptide (1)..(246): Ceres Seq. ID no. 12350592
  misc_feature (1)..(246): NCBI GI NO: 33146550 NR Description: leucine zipper protein-like
  misc_feature (1)..(119): NCBI GI NO: 34913252 NR Description: P0011H09.36
  misc_feature (1)..(241): NCBI GI NO: 15228555 NR Description: unknown protein; protein id: At3g28970.1
  misc_feature (1)..(139): NCBI GI NO: 24664675 NR Description: CG7427-PA [Drosophila melanogaster]
  misc_feature (1)..(115): NCBI GI NO: 34784120 NR Description: Unknown (protein for MGC:66414) [Danio rerio]
  misc_feature (1)..(115): NCBI GI NO: 18700658 NR Description: leucine zipper protein [Homo sapiens]
  misc_feature (1)..(115): NCBI GI NO: 6166507 NR Description: RP42 [Mus musculus]
  misc_feature (1)..(115): NCBI GI NO: 26325272 NR Description: unnamed protein product [Mus musculus]
  misc_feature (1)..(115): NCBI GI NO: 34857167 NR Description: similar to RP42 homolog [Rattus norvegicus]
  misc_feature (1)..(115): NCBI GI NO: 15826860 NR Description: testis derived transcript 3 [Mus musculus]
MRDVIFADIPKLIPFIDLEDMSLFSCFYDFVFFICREKGQKSVTIQRAVAAWRIVLSGRFRLLDRWCNFVEKYQRHNISEDTWQQLLAFSRCVNEDLEGYDPRGAWPVLIDDFVEQMHRIYHSTDCSSAMESQCNISSTLKGLDPQPGSKRKCPHLKSNEEDVELSDSFTRSVHLTPIKRLKESHDARYGAGESAKTTHFSNSSSGGYHEDMNLHNSRGYLQNSPCNVEDALSKGFEGCISMKCPF

SEQ ID NO: 30692 - protein, 226 aa, Zea mays subsp. mays
  peptide (1)..(226): Ceres Seq. ID no. 12350593
  misc_feature (1)..(226): NCBI GI NO: 33146550 NR Description: leucine zipper protein-like
  misc_feature (1)..(99): NCBI GI NO: 34913252 NR Description: P0011H09.36
  misc_feature (1)..(221): NCBI GI NO: 15228555 NR Description: unknown protein; protein id: At3g28970.1
  misc_feature (1)..(119): NCBI GI NO: 24664675 NR Description: CG7427-PA [Drosophila melanogaster]
  misc_feature (1)..(95): NCBI GI NO: 34784120 NR Description: Unknown (protein for MGC:66414) [Danio rerio]
  misc_feature (1)..(95): NCBI GI NO: 18700658 NR Description: leucine zipper protein [Homo sapiens]
  misc_feature (1)..(95): NCBI GI NO: 6166507 NR Description: RP42 [Mus musculus]
  misc_feature (1)..(95): NCBI GI NO: 26325272 NR Description: unnamed protein product [Mus musculus]
  misc_feature (1)..(95): NCBI GI NO: 34857167 NR Description: similar to RP42 homolog [Rattus norvegicus]
  misc_feature (1)..(95): NCBI GI NO: 15826860 NR Description: testis derived transcript 3 [Mus musculus]
MSLFSCFYDFVFFICREKGQKSVTIQRAVAAWRIVLSGRFRLLDRWCNFVEKYQRHNISEDTWQQLLAFSRCVNEDLEGYDPRGAWPVLIDDFVEQMHRIYHSTDCSSAMESQCNISSTLKGLDPQPGSKRKCPHLKSNEEDVELSDSFTRSVHLTPIKRLKESHDARYGAGESAKTTHFSNSSSGGYHEDMNLHNSRGYLQNSPCNVEDALSKGFEGCISMKCPF

SEQ ID NO: 30693 - DNA, 644 bp, Zea mays subsp. mays
  misc_feature (1)..(644): Ceres Seq. ID no. 12402849
accacacccaccccacgaaaccgtaagaagcgcagagtgtgagagagagaggagcatcaaggacgacgtgggcaagatgatgcaggtgttcgtgaagacgctggcggggaagacgatcacgctggaggtggagggcagcgacgacgccgtcgagaacgtgaaggccatgatccagggcaaggaaggcatcccgccggaggagcagcgcctcgtcttcgcgggcaagcagctggacgacgacggccgcaccctggccgactacggcgtccagaaggagtcgacgctgcacctggagctgcgcctccgcggcggcagcaggggcggctaccccatggggatcccgcccagcctccgcgagctcgcgcagaagtacaacgagaacaagatggtctgccgcaagtgctatgcgcggcttccgcctagggcaaccaactgccgcaagaagaagtgtgggcacagtaacgagctgaggtcgaagaaaaggttcatgtccaagattggcgggaaatgatcggcttttgtcattgcgtgacatatatggagcatcagctgaaatttcttagacgcttaataatttttactttaacgccgtggttgtgatcttttactgaataaagttgtagtagaaacaaaaaattcgtgcc

SEQ ID NO: 30694 - protein, 169 aa, Zea mays subsp. mays
  peptide (1)..(169): Ceres Seq. ID no. 12402850
  misc_feature (27)..(102): Pfam Name: Pfam Description:  Ubiquitin family
  misc_feature (27)..(161): NCBI GI NO: 17554758 NR Description: Ubiquitin UBQ-2
  misc_feature (27)..(161): NCBI GI NO: 39588931 NR Description: Hypothetical protein CBG15773
  misc_feature (27)..(161): NCBI GI NO: 485518 NR Description: ubiquitin / ribosomal protein CEP52 - rice
  misc_feature (27)..(161): NCBI GI NO: 2558539 NR Description: ubiquitin-ribosomal protein fusion protein
  misc_feature (27)..(161): NCBI GI NO: 15187109 NR Description: ubiquitin [Branchiostoma belcheri]
  misc_feature (27)..(161): NCBI GI NO: 4507761 NR Description: ubiquitin and ribosomal protein L40 precursor
  misc_feature (27)..(161): NCBI GI NO: 11138788 NR Description: ubiquitin-like protein [Wuchereria bancrofti]
  misc_feature (27)..(161): NCBI GI NO: 13569612 NR Description: ubiquitin A-52 residue ribosomal protein fusionproduct 1
  misc_feature (27)..(161): NCBI GI NO: 6633991 NR Description: ubiquitin [Oncorhynchus mykiss]
  misc_feature (27)..(163): NCBI GI NO: 70653 NR Description: ubiquitin / ribosomal protein CEP52 - slime mold
PHPPHETVRSAECERERSIKDDVGKMMQVFVKTLAGKTITLEVEGSDDAVENVKAMIQGKEGIPPEEQRLVFAGKQLDDDGRTLADYGVQKESTLHLELRLRGGSRGGYPMGIPPSLRELAQKYNENKMVCRKCYARLPPRATNCRKKKCGHSNELRSKKRFMSKIGGK

SEQ ID NO: 30695 - protein, 144 aa, Zea mays subsp. mays
  peptide (1)..(144): Ceres Seq. ID no. 12402851
  misc_feature (2)..(77): Pfam Name: Pfam Description:  Ubiquitin family
  misc_feature (2)..(136): NCBI GI NO: 17554758 NR Description: Ubiquitin UBQ-2
  misc_feature (2)..(136): NCBI GI NO: 39588931 NR Description: Hypothetical protein CBG15773
  misc_feature (2)..(136): NCBI GI NO: 485518 NR Description: ubiquitin / ribosomal protein CEP52 - rice
  misc_feature (2)..(136): NCBI GI NO: 2558539 NR Description: ubiquitin-ribosomal protein fusion protein
  misc_feature (2)..(136): NCBI GI NO: 15187109 NR Description: ubiquitin [Branchiostoma belcheri]
  misc_feature (2)..(136): NCBI GI NO: 4507761 NR Description: ubiquitin and ribosomal protein L40 precursor
  misc_feature (2)..(136): NCBI GI NO: 13569612 NR Description: ubiquitin A-52 residue ribosomal protein fusionproduct 1
  misc_feature (2)..(136): NCBI GI NO: 11138788 NR Description: ubiquitin-like protein [Wuchereria bancrofti]
  misc_feature (2)..(136): NCBI GI NO: 6633991 NR Description: ubiquitin [Oncorhynchus mykiss]
  misc_feature (2)..(138): NCBI GI NO: 70653 NR Description: ubiquitin / ribosomal protein CEP52 - slime mold
MMQVFVKTLAGKTITLEVEGSDDAVENVKAMIQGKEGIPPEEQRLVFAGKQLDDDGRTLADYGVQKESTLHLELRLRGGSRGGYPMGIPPSLRELAQKYNENKMVCRKCYARLPPRATNCRKKKCGHSNELRSKKRFMSKIGGK

SEQ ID NO: 30696 - protein, 143 aa, Zea mays subsp. mays
  peptide (1)..(143): Ceres Seq. ID no. 12402852
  misc_feature (1)..(76): Pfam Name: Pfam Description:  Ubiquitin family
  misc_feature (1)..(135): NCBI GI NO: 17554758 NR Description: Ubiquitin UBQ-2
  misc_feature (1)..(135): NCBI GI NO: 39588931 NR Description: Hypothetical protein CBG15773
  misc_feature (1)..(135): NCBI GI NO: 485518 NR Description: ubiquitin / ribosomal protein CEP52 - rice
  misc_feature (1)..(135): NCBI GI NO: 2558539 NR Description: ubiquitin-ribosomal protein fusion protein
  misc_feature (1)..(135): NCBI GI NO: 15187109 NR Description: ubiquitin [Branchiostoma belcheri]
  misc_feature (1)..(135): NCBI GI NO: 4507761 NR Description: ubiquitin and ribosomal protein L40 precursor
  misc_feature (1)..(135): NCBI GI NO: 11138788 NR Description: ubiquitin-like protein [Wuchereria bancrofti]
  misc_feature (1)..(135): NCBI GI NO: 13569612 NR Description: ubiquitin A-52 residue ribosomal protein fusionproduct 1
  misc_feature (1)..(135): NCBI GI NO: 6633991 NR Description: ubiquitin [Oncorhynchus mykiss]
  misc_feature (1)..(137): NCBI GI NO: 70653 NR Description: ubiquitin / ribosomal protein CEP52 - slime mold
MQVFVKTLAGKTITLEVEGSDDAVENVKAMIQGKEGIPPEEQRLVFAGKQLDDDGRTLADYGVQKESTLHLELRLRGGSRGGYPMGIPPSLRELAQKYNENKMVCRKCYARLPPRATNCRKKKCGHSNELRSKKRFMSKIGGK

SEQ ID NO: 30697 - DNA, 1319 bp, Zea mays subsp. mays
  misc_feature (1)..(1319): Ceres Seq. ID no. 12407555
ctgtaactggagtacttagtacgggcagtctatagcttctccattgcccggtttgcaagcaaggaattgatgaacaagcatggggctggccggccgtctgggctttgcgggcagggcaaggacgccgccagctaccacgtgctgtccttcctcctcggcgccgctctccccactgccctcctcttctacctcgcgtccgacccggctcggcgagggcttatccagcatctcaccgagcagctgggggagcagccgaaccccgacgacccagcagctagccggcgccactgatcacactgctcctacttctcctacctcccaaggtcaagagtccgaatttgcagaactggctgagctgctacccagagtcgccaccgacgacgacaggacggtgatcctcacgtcagtgaacgaagcatttgcgaggcctgactcgttgctcggcctgttccgcgagagcttcccgggccggcgaggggaccgagcacctccttgaccatgtcctcgtcgtcgccgtggacgccatggcgttcgtccactgcaaggccgtgcacccacactgctaccgcctcgaggtggattccgccacgtacctcagctccgagagcagcttcttgagcgcggcctacgtggagctcgtctgggccaagctctcgctgcagcagcgcgtcctcgagctcggctacaacttcctcttcacggacgtggacgtcgtgtggttgcgcaacccgttccggcacatcagcgtgtacccggacatgacgacgtcgagcgacatattccacggcgacgccaacagcctcgacaactggcccaacaccggcttctactacgtcaaggcaacgaaccggacggtggagatgctgcggcggtggcgggctgcgcggaggaggttccctccgaaccacgagcaggccatcttcaaccagatcaagcacgagctcgccgccgacctcggggtgcgcatccagttcctcgacacggcgcgttcgccggcttctgccggatcttccacagtgacatgggcgcgcgtgcaccatgcacgccaactgctgcttcgggctcgctaacaagctgcacgacctcagggaagtgctcggccagtggaggaactacaccgtccttccgccgctggagaagaagagccgaaagttcatctggaaggatcccggcaagtgcggaacgccggacaaaaagaattggtcgataaatacatgagatcacgcatccctagaagcgactagggcactgggctgcctgatataattctcgtttttcaaccacaaattggtgaaacaaataaaatggtatatgttgtt

SEQ ID NO: 30698 - protein, 181 aa, Zea mays subsp. mays
  peptide (1)..(181): Ceres Seq. ID no. 12407556
  misc_feature (1)..(154): NCBI GI NO: 19386738 NR Description: P0678F11.28
  misc_feature (1)..(153): NCBI GI NO: 19386741 NR Description: P0678F11.31
  misc_feature (1)..(154): NCBI GI NO: 34897440 NR Description: putative regulatory protein
  misc_feature (1)..(153): NCBI GI NO: 34897442 NR Description: putative regulatory protein
  misc_feature (1)..(173): NCBI GI NO: 19386737 NR Description: P0678F11.26
  misc_feature (1)..(154): NCBI GI NO: 19386795 NR Description: OJ1485_B09.3
  misc_feature (1)..(153): NCBI GI NO: 34904674 NR Description: P0446G09.1
  misc_feature (1)..(154): NCBI GI NO: 19386742 NR Description: P0678F11.32
  misc_feature (1)..(153): NCBI GI NO: 15235236 NR Description: hypothetical protein common family
  misc_feature (1)..(153): NCBI GI NO: 18395292 NR Description: unknown protein; protein id: At2g02060.1
MAFVHCKAVHPHCYRLEVDSATYLSSESSFLSAAYVELVWAKLSLQQRVLELGYNFLFTDVDVVWLRNPFRHISVYPDMTTSSDIFHGDANSLDNWPNTGFYYVKATNRTVEMLRRWRAARRRFPPNHEQAIFNQIKHELAADLGVRIQFLDTARSPASAGSSTVTWARVHHARQLLLRAR

SEQ ID NO: 30699 - protein, 138 aa, Zea mays subsp. mays
  peptide (1)..(138): Ceres Seq. ID no. 12407557
  misc_feature (76)..(128): NCBI GI NO: 19386738 NR Description: P0678F11.28
  misc_feature (42)..(133): NCBI GI NO: 19386741 NR Description: P0678F11.31
  misc_feature (21)..(137): NCBI GI NO: 34897440 NR Description: putative regulatory protein
  misc_feature (74)..(128): NCBI GI NO: 34897442 NR Description: putative regulatory protein
  misc_feature (57)..(133): NCBI GI NO: 19386737 NR Description: P0678F11.26
  misc_feature (24)..(128): NCBI GI NO: 19386795 NR Description: OJ1485_B09.3
  misc_feature (41)..(134): NCBI GI NO: 34904674 NR Description: P0446G09.1
  misc_feature (24)..(128): NCBI GI NO: 19386742 NR Description: P0678F11.32
  misc_feature (71)..(128): NCBI GI NO: 15235236 NR Description: hypothetical protein common family
  misc_feature (73)..(135): NCBI GI NO: 18395292 NR Description: unknown protein; protein id: At2g02060.1
MGLAGRLGFAGRARTPPATTCCPSSSAPLSPLPSSSTSRPTRLGEGLSSISPSSWGSSRTPTTQQLAGATDHTAPTSPTSQGQESEFAELAELLPRVATDDDRTVILTSVNEAFARPDSLLGLFRESFPGRRGDRAPP

SEQ ID NO: 30700 - protein, 103 aa, Zea mays subsp. mays
  peptide (1)..(103): Ceres Seq. ID no. 12407558
  misc_feature (1)..(76): NCBI GI NO: 19386738 NR Description: P0678F11.28
  misc_feature (1)..(75): NCBI GI NO: 19386741 NR Description: P0678F11.31
  misc_feature (1)..(76): NCBI GI NO: 34897440 NR Description: putative regulatory protein
  misc_feature (1)..(75): NCBI GI NO: 34897442 NR Description: putative regulatory protein
  misc_feature (1)..(95): NCBI GI NO: 19386737 NR Description: P0678F11.26
  misc_feature (1)..(76): NCBI GI NO: 19386795 NR Description: OJ1485_B09.3
  misc_feature (1)..(75): NCBI GI NO: 34904674 NR Description: P0446G09.1
  misc_feature (1)..(76): NCBI GI NO: 19386742 NR Description: P0678F11.32
  misc_feature (1)..(75): NCBI GI NO: 15235236 NR Description: hypothetical protein common family
  misc_feature (1)..(75): NCBI GI NO: 18395292 NR Description: unknown protein; protein id: At2g02060.1
MTTSSDIFHGDANSLDNWPNTGFYYVKATNRTVEMLRRWRAARRRFPPNHEQAIFNQIKHELAADLGVRIQFLDTARSPASAGSSTVTWARVHHARQLLLRAR

SEQ ID NO: 30701 - DNA, 981 bp, Zea mays subsp. mays
  misc_feature (1)..(981): Ceres Seq. ID no. 12356692
actgccagctccggtccgcagagggagggaggaggacgccagttgccactgccgcgccgctcccgcctccctctctccatccgacgagctcgagaagccaccatgatctccgcgcgcaccgccgcagcttcccccgcctccctgtggaagcggggaggacaaagtgagggcggcggcagttgcgacggatgtcggacctacaggaacactttgcggagggccgcagcagcgaaggtgcgtgccttgccgtcgagggcggtggaggcggtcaaaatgggctccgccgcggaggtggagcaggaggaggcggaggtagccgcggccgcggacggcgtcgtcgtcgaggaccactacggcgaggacagcgccaccgaggagctgcccatcatgccctgggccttctccgtcgcaagcggttacaccctcttgagggatccacatcacaacaagggtcttgctttcacggagaaggagagggatgcacaccacttgcgtgggctgcttcctcctgcagttgttcctcaagaactccaaattaagaagatcatgcacaacctgcggcagtaccaggtccctttgcagcgctatatggccatgatggaccttcaggagaggaacgagaggcttttctacaagcttttaattgataacgtggaggagctgcttcctgtggtttatacaccaactgtaggtgaggcctgccagaagtatgggtccatctttcgacaaccacagggtctgtatgtcagcttgagggacaaagggaaggtcctagaagttctaaggaactggccacataggaacattcaagttatctgtgttactgatggtgagcgaatcttgggacttggagatttgggttctcagggaatgggaattcctgtaggcaaacttgctctatacactgctcttggaggagttcgtccatcagcttgtttgcctatcacaatcgatgttggcacaaataatgagaaactgctt

SEQ ID NO: 30702 - protein, 327 aa, Zea mays subsp. mays
  peptide (1)..(327): Ceres Seq. ID no. 12356693
  misc_feature (203)..(326): Pfam Name: Pfam Description:  Malic enzyme, N-terminal domain
  misc_feature (35)..(326): NCBI GI NO: 18460985 NR Description: NADP-dependent malic enzyme [Zea mays]
  misc_feature (35)..(326): NCBI GI NO: 37147841 NR Description: non-photosynthetic NADP-malic enzyme [Zea mays]
  misc_feature (138)..(326): NCBI GI NO: 4096786 NR Description: NADP-malic enzyme [Zea mays]
  misc_feature (35)..(167): NCBI GI NO: 4096786 NR Description: NADP-malic enzyme [Zea mays]
  misc_feature (35)..(326): NCBI GI NO: 34906372 NR Description: unnamed protein product
  misc_feature (35)..(326): NCBI GI NO: 30526303 NR Description: NADP-dependent malic enzyme [Sorghum bicolor]
  misc_feature (35)..(326): NCBI GI NO: 126737 NR Description: NADP-DEPENDENT MALIC ENZYME, CHLOROPLAST PRECURSOR
  misc_feature (35)..(326): NCBI GI NO: 1170871 NR Description: NADP-DEPENDENT MALIC ENZYME, CHLOROPLAST PRECURSOR
  misc_feature (35)..(326): NCBI GI NO: 30575690 NR Description: NADP-malic enzyme [Zea mays]
  misc_feature (58)..(326): NCBI GI NO: 126736 NR Description: NADP-dependent malic enzyme, chloroplast precursor
TASSGPQREGGGRQLPLPRRSRLPLSIRRAREATMISARTAAASPASLWKRGGQSEGGGSCDGCRTYRNTLRRAAAAKVRALPSRAVEAVKMGSAAEVEQEEAEVAAAADGVVVEDHYGEDSATEELPIMPWAFSVASGYTLLRDPHHNKGLAFTEKERDAHHLRGLLPPAVVPQELQIKKIMHNLRQYQVPLQRYMAMMDLQERNERLFYKLLIDNVEELLPVVYTPTVGEACQKYGSIFRQPQGLYVSLRDKGKVLEVLRNWPHRNIQVICVTDGERILGLGDLGSQGMGIPVGKLALYTALGGVRPSACLPITIDVGTNNEKLL

SEQ ID NO: 30703 - protein, 293 aa, Zea mays subsp. mays
  peptide (1)..(293): Ceres Seq. ID no. 12356694
  misc_feature (169)..(292): Pfam Name: Pfam Description:  Malic enzyme, N-terminal domain
  misc_feature (1)..(292): NCBI GI NO: 18460985 NR Description: NADP-dependent malic enzyme [Zea mays]
  misc_feature (1)..(292): NCBI GI NO: 37147841 NR Description: non-photosynthetic NADP-malic enzyme [Zea mays]
  misc_feature (104)..(292): NCBI GI NO: 4096786 NR Description: NADP-malic enzyme [Zea mays]
  misc_feature (1)..(133): NCBI GI NO: 4096786 NR Description: NADP-malic enzyme [Zea mays]
  misc_feature (1)..(292): NCBI GI NO: 34906372 NR Description: unnamed protein product
  misc_feature (1)..(292): NCBI GI NO: 30526303 NR Description: NADP-dependent malic enzyme [Sorghum bicolor]
  misc_feature (1)..(292): NCBI GI NO: 126737 NR Description: NADP-DEPENDENT MALIC ENZYME, CHLOROPLAST PRECURSOR
  misc_feature (1)..(292): NCBI GI NO: 1170871 NR Description: NADP-DEPENDENT MALIC ENZYME, CHLOROPLAST PRECURSOR
  misc_feature (1)..(292): NCBI GI NO: 30575690 NR Description: NADP-malic enzyme [Zea mays]
  misc_feature (24)..(292): NCBI GI NO: 126736 NR Description: NADP-dependent malic enzyme, chloroplast precursor
MISARTAAASPASLWKRGGQSEGGGSCDGCRTYRNTLRRAAAAKVRALPSRAVEAVKMGSAAEVEQEEAEVAAAADGVVVEDHYGEDSATEELPIMPWAFSVASGYTLLRDPHHNKGLAFTEKERDAHHLRGLLPPAVVPQELQIKKIMHNLRQYQVPLQRYMAMMDLQERNERLFYKLLIDNVEELLPVVYTPTVGEACQKYGSIFRQPQGLYVSLRDKGKVLEVLRNWPHRNIQVICVTDGERILGLGDLGSQGMGIPVGKLALYTALGGVRPSACLPITIDVGTNNEKLL

SEQ ID NO: 30704 - protein, 236 aa, Zea mays subsp. mays
  peptide (1)..(236): Ceres Seq. ID no. 12356695
  misc_feature (112)..(235): Pfam Name: Pfam Description:  Malic enzyme, N-terminal domain
  misc_feature (1)..(235): NCBI GI NO: 18460985 NR Description: NADP-dependent malic enzyme [Zea mays]
  misc_feature (1)..(235): NCBI GI NO: 37147841 NR Description: non-photosynthetic NADP-malic enzyme [Zea mays]
  misc_feature (47)..(235): NCBI GI NO: 4096786 NR Description: NADP-malic enzyme [Zea mays]
  misc_feature (1)..(76): NCBI GI NO: 4096786 NR Description: NADP-malic enzyme [Zea mays]
  misc_feature (1)..(235): NCBI GI NO: 34906372 NR Description: unnamed protein product
  misc_feature (1)..(235): NCBI GI NO: 30526303 NR Description: NADP-dependent malic enzyme [Sorghum bicolor]
  misc_feature (1)..(235): NCBI GI NO: 126737 NR Description: NADP-DEPENDENT MALIC ENZYME, CHLOROPLAST PRECURSOR
  misc_feature (1)..(235): NCBI GI NO: 1170871 NR Description: NADP-DEPENDENT MALIC ENZYME, CHLOROPLAST PRECURSOR
  misc_feature (1)..(235): NCBI GI NO: 30575690 NR Description: NADP-malic enzyme [Zea mays]
  misc_feature (1)..(235): NCBI GI NO: 126736 NR Description: NADP-dependent malic enzyme, chloroplast precursor
MGSAAEVEQEEAEVAAAADGVVVEDHYGEDSATEELPIMPWAFSVASGYTLLRDPHHNKGLAFTEKERDAHHLRGLLPPAVVPQELQIKKIMHNLRQYQVPLQRYMAMMDLQERNERLFYKLLIDNVEELLPVVYTPTVGEACQKYGSIFRQPQGLYVSLRDKGKVLEVLRNWPHRNIQVICVTDGERILGLGDLGSQGMGIPVGKLALYTALGGVRPSACLPITIDVGTNNEKLL

SEQ ID NO: 30705 - DNA, 1072 bp, Zea mays subsp. mays
  misc_feature (1)..(1072): Ceres Seq. ID no. 12382121
  misc_feature (407)..(407): n is a, c, t, g, unknown, or other
cccgtccacgcatcgccaccgcgccatatcggcatatccgcaagaagcacccggcacatcgcgtcgcccccaccttccccctcccaccaccgcaagcccggacacgcccagggcgcaaatccggacaagcgctgccccggtcgcggcaggcatgggtttcccggtgggctactcggagctggtgctcccgaagcagctgctccacctcctgctgctgctggggtacatccgccgcttcctcctctgggcgttcgacgccgtggggctcggcgacctgctggatctcggggacgaccaccaggcgctgctgcaggaccaccagcagcagcagcacggcgccgccgcgcaggggcgggacctgccgcagcaggcggcgatgctgcagcaccggcgcccggagttccggncggtgccggcgatggtcatcgaggaggtcctccccgtggtgcggttcgacgagctggagctggagccggagcccggagactgcgcggtgtgcctgagcggcatcggcggccgcgacgaggtgcggcggctcagcaactgccgccacgtcttccaccgggcctgcctcgaccgctggatggagcacgaccagcgcacgtgcccgctctgccgcgcgccgctcatccccgacgagatggccggcgcgctctgggccgccgccgccggcgtccccgacgcctccgacttcgacttctcctacctcggcgcgccgctggcgcccgtgccctccccgacgctgctgcggccgcacgagctgctgctcaccggcctgggcggctaccagtgagagctcaccaccgcccgccacttcccccgtggggaatgcgcgtctgcctggatccatcgacgcttgcttgcttgcttccgttccgtgggagggacggggacggacagcagccgaggcagagaagaaacccaaggctctcgaattgtacataggcaaaatgagtaaagcggccacccccccaaaaaaaggctaggagattagatccctcttgtgcataggtagattccgtcttccaagtttgtggagttgtgaatctttgcgcggattaaatttttgtcg

SEQ ID NO: 30706 - protein, 314 aa, Zea mays subsp. mays
  peptide (1)..(314): Ceres Seq. ID no. 12382122
  misc_feature (1)..(218): Pfam Name: Peptidase family S21 Pfam Description: Assemblin
  misc_feature (46)..(258): NCBI GI NO: 26347495 NR Description: unnamed protein product [Mus musculus]
  misc_feature (6)..(206): NCBI GI NO: 25453418 NR Description: proline-rich proteoglycan 2 [Rattus norvegicus]
  misc_feature (1)..(261): NCBI GI NO: 22960097 NR Description: hypothetical protein [Rhodobacter sphaeroides]
  misc_feature (1)..(309): NCBI GI NO: 29247944 NR Description: GLP_26_54603_52153 [Giardia lamblia ATCC 50803]
  misc_feature (24)..(234): NCBI GI NO: 17509327 NR Description: Cuticle collagen [Caenorhabditis elegans]
  misc_feature (1)..(211): NCBI GI NO: 22962211 NR Description: hypothetical protein [Rhodopseudomonas palustris]
  misc_feature (1)..(208): NCBI GI NO: 27375632 NR Description: blr0521 [Bradyrhizobium japonicum]
  misc_feature (5)..(220): NCBI GI NO: 18025542 NR Description: EBNA-3B [cercopithicine herpesvirus 15]
  misc_feature (46)..(219): NCBI GI NO: 2144803 NR Description: collagen alpha 1(I) chain precursor - human
  misc_feature (22)..(276): NCBI GI NO: 71400 NR Description: dermal gland protein APEG precursor
  misc_feature (136)..(136): Xaa is any aa, unknown or other
PVHASPPRHIGISARSTRHIASPPPSPSHHRKPGHAQGANPDKRCPGRGRHGFPGGLLGAGAPEAAAPPPAAAGVHPPLPPLGVRRRGARRPAGSRGRPPGAAAGPPAAAARRRRAGAGPAAAGGDAAAPAPGVPXGAGDGHRGGPPRGAVRRAGAGAGARRLRGVPERHRRPRRGAAAQQLPPRLPPGLPRPLDGARPAHVPALPRAAHPRRDGRRALGRRRRRPRRLRLRLLLPRRAAGARALPDAAAAARAAAHRPGRLPVRAHHRPPLPPWGMRVCLDPSTLACLLPFRGRDGDGQQPRQRRNPRLSNCT

SEQ ID NO: 30707 - protein, 263 aa, Zea mays subsp. mays
  peptide (1)..(263): Ceres Seq. ID no. 12382123
  misc_feature (163)..(205): Pfam Name: RING finger Pfam Description: Zinc finger, C3HC4 type
  misc_feature (130)..(227): NCBI GI NO: 15233117 NR Description: RING finger protein; protein id: At3g61460
  misc_feature (51)..(95): NCBI GI NO: 15233117 NR Description: RING finger protein; protein id: At3g61460
  misc_feature (139)..(225): NCBI GI NO: 15222553 NR Description: putative RING zinc finger protein
  misc_feature (51)..(94): NCBI GI NO: 15222553 NR Description: putative RING zinc finger protein
  misc_feature (51)..(214): NCBI GI NO: 21554155 NR Description: RING zinc finger protein-like
  misc_feature (51)..(214): NCBI GI NO: 15238072 NR Description: RING zinc finger protein-like
  misc_feature (142)..(212): NCBI GI NO: 18411282 NR Description: similar to RING finger protein
  misc_feature (142)..(211): NCBI GI NO: 34897812 NR Description: P0514G12.26
  misc_feature (139)..(213): NCBI GI NO: 11358776 NR Description: RING-H2 finger protein RHA1a
  misc_feature (139)..(213): NCBI GI NO: 11358777 NR Description: RING-H2 finger protein RHA1b
  misc_feature (136)..(136): Xaa is any aa, unknown or other
PSTHRHRAISAYPQEAPGTSRRPHLPPPTTASPDTPRAQIRTSAAPVAAGMGFPVGYSELVLPKQLLHLLLLLGYIRRFLLWAFDAVGLGDLLDLGDDHQALLQDHQQQQHGAAAQGRDLPQQAAMLQHRRPEFRXVPAMVIEEVLPVVRFDELELEPEPGDCAVCLSGIGGRDEVRRLSNCRHVFHRACLDRWMEHDQRTCPLCRAPLIPDEMAGALWAAAAGVPDASDFDFSYLGAPLAPVPSPTLLRPHELLLTGLGGYQ

SEQ ID NO: 30708 - protein, 213 aa, Zea mays subsp. mays
  peptide (1)..(213): Ceres Seq. ID no. 12382124
  misc_feature (113)..(155): Pfam Name: RING finger Pfam Description: Zinc finger, C3HC4 type
  misc_feature (80)..(177): NCBI GI NO: 15233117 NR Description: RING finger protein; protein id: At3g61460
  misc_feature (1)..(45): NCBI GI NO: 15233117 NR Description: RING finger protein; protein id: At3g61460
  misc_feature (89)..(175): NCBI GI NO: 15222553 NR Description: putative RING zinc finger protein
  misc_feature (1)..(44): NCBI GI NO: 15222553 NR Description: putative RING zinc finger protein
  misc_feature (1)..(164): NCBI GI NO: 21554155 NR Description: RING zinc finger protein-like
  misc_feature (1)..(164): NCBI GI NO: 15238072 NR Description: RING zinc finger protein-like
  misc_feature (92)..(162): NCBI GI NO: 18411282 NR Description: similar to RING finger protein
  misc_feature (92)..(161): NCBI GI NO: 34897812 NR Description: P0514G12.26
  misc_feature (89)..(163): NCBI GI NO: 11358776 NR Description: RING-H2 finger protein RHA1a
  misc_feature (89)..(163): NCBI GI NO: 15233352 NR Description: RING-H2 finger protein RHA1a -like protein
  misc_feature (86)..(86): Xaa is any aa, unknown or other
MGFPVGYSELVLPKQLLHLLLLLGYIRRFLLWAFDAVGLGDLLDLGDDHQALLQDHQQQQHGAAAQGRDLPQQAAMLQHRRPEFRXVPAMVIEEVLPVVRFDELELEPEPGDCAVCLSGIGGRDEVRRLSNCRHVFHRACLDRWMEHDQRTCPLCRAPLIPDEMAGALWAAAAGVPDASDFDFSYLGAPLAPVPSPTLLRPHELLLTGLGGYQ

SEQ ID NO: 30709 - DNA, 1357 bp, Zea mays subsp. mays
  misc_feature (1)..(1357): Ceres Seq. ID no. 12358369
gtgcgggcggatgcacttgtttgcgtcccgtgcgcgcgtgatctgatcagcgcgttcgcgtggctcggtcgccacccaactcgacaccgcccacctccacctcctcctcctccgcgtccgcttttttgtccgggcacacccccgcccgacgccgccggaaccagaccagaccacaccacaccacaggagaggagaggagctccggcccgccaaaaaaaaatagcaggggcaggggccgcaggcgccgcgacccatgggcgtcaagcaggtcctcgtccgcccccgctacggcgacgaggatgtcgtcgaccagtcgccgccgccgcccatgtcgtcctcgccctgcggccgctacgtcctccaccgcgtctgcaggttcgacacgctcgccggcgtagccatcaagtacggcgtcgaggtggcggacgtgaagcgcgccaacggcctcaccaccgacctgcagatgttcgcgcacaagacgctgcgggtcccgctccacggcaggcacgcgccgtctcctccctcctcgtccccaagccacgccgccagagaatggactaaaaatgctgcttccctggacccgctccttaaaccaccacggagcacagtttcgccatccatgagccttctactacaggggtgccatggcctgacgccggctccaaagggggacctgaacctgaccgatgaatgcgctcaaggccatcacaggaaagccggaagcttatcgagcaccttgttgccgaggagagccgggcaagggctggccctgaggccaaagtctggcggtcgggcagacacgaacggcatccaccaggacctgttggctgcgtgggtgccctcgtacggggacgggttgcgcgcggtgaagagatcgtcgagcgctccggagttccaggattcggacagcgtcagcctcgcctcggcgtggctgaagagcaagtggaacctgaaaccggattatgccttcaccctggcgctgttcgacggcatctccaagcctctcctggacagcatccccaagcctctcctcgacaacatccccaactcgatcgttgcttggagaaacaaggcggccagagattagcagcttcgtttcgtctctttacagccaaaaaaaagaaggcctcgaacggttggacacactgtgctgaaatggcgcgatggatacagtgacacattacttgcacatacatactgtgctgaatctattgtgccaaagcagcagcagcagcagattgggagctgggagatgagcctgggggtgtattcttttcatttttgtacgtacacatataggaatgaaggcaaacgcctagcagcattcccatgacctaataaagaaatagcttgttct

SEQ ID NO: 30710 - protein, 277 aa, Zea mays subsp. mays
  peptide (1)..(277): Ceres Seq. ID no. 12358370
  misc_feature (37)..(80): Pfam Name: Pfam Description:  LysM domain
  misc_feature (21)..(140): NCBI GI NO: 37535512 NR Description: unknown protein
  misc_feature (159)..(277): NCBI GI NO: 37535512 NR Description: unknown protein
  misc_feature (154)..(277): NCBI GI NO: 24431595 NR Description: Hypothetical protein
  misc_feature (21)..(135): NCBI GI NO: 22327003 NR Description: unknown protein; protein id: At5g23130
  misc_feature (21)..(138): NCBI GI NO: 11291586 NR Description: hypothetical protein T22D6
  misc_feature (21)..(138): NCBI GI NO: 30682281 NR Description: expressed protein [Arabidopsis thaliana]
  misc_feature (21)..(135): NCBI GI NO: 9759371 NR Description: gene_id:MYJ24.12~unknown protein
MGVKQVLVRPRYGDEDVVDQSPPPPMSSSPCGRYVLHRVCRFDTLAGVAIKYGVEVADVKRANGLTTDLQMFAHKTLRVPLHGRHAPSPPSSSPSHAAREWTKNAASLDPLLKPPRSTVSPSMSLLLQGCHGLTPAPKGDLNLTDECAQGHHRKAGSLSSTLLPRRAGQGLALRPKSGGRADTNGIHQDLLAAWVPSYGDGLRAVKRSSSAPEFQDSDSVSLASAWLKSKWNLKPDYAFTLALFDGISKPLLDSIPKPLLDNIPNSIVAWRNKAARD

SEQ ID NO: 30711 - protein, 252 aa, Zea mays subsp. mays
  peptide (1)..(252): Ceres Seq. ID no. 12358371
  misc_feature (12)..(55): Pfam Name: Pfam Description:  LysM domain
  misc_feature (1)..(115): NCBI GI NO: 37535512 NR Description: unknown protein
  misc_feature (134)..(252): NCBI GI NO: 37535512 NR Description: unknown protein
  misc_feature (129)..(252): NCBI GI NO: 24431595 NR Description: Hypothetical protein
  misc_feature (1)..(110): NCBI GI NO: 22327003 NR Description: unknown protein; protein id: At5g23130
  misc_feature (1)..(113): NCBI GI NO: 11291586 NR Description: hypothetical protein T22D6
  misc_feature (1)..(113): NCBI GI NO: 30682281 NR Description: expressed protein [Arabidopsis thaliana]
  misc_feature (1)..(110): NCBI GI NO: 9759371 NR Description: gene_id:MYJ24.12~unknown protein
MSSSPCGRYVLHRVCRFDTLAGVAIKYGVEVADVKRANGLTTDLQMFAHKTLRVPLHGRHAPSPPSSSPSHAAREWTKNAASLDPLLKPPRSTVSPSMSLLLQGCHGLTPAPKGDLNLTDECAQGHHRKAGSLSSTLLPRRAGQGLALRPKSGGRADTNGIHQDLLAAWVPSYGDGLRAVKRSSSAPEFQDSDSVSLASAWLKSKWNLKPDYAFTLALFDGISKPLLDSIPKPLLDNIPNSIVAWRNKAARD

SEQ ID NO: 30712 - protein, 207 aa, Zea mays subsp. mays
  peptide (1)..(207): Ceres Seq. ID no. 12358372
  misc_feature (1)..(70): NCBI GI NO: 37535512 NR Description: unknown protein
  misc_feature (89)..(207): NCBI GI NO: 37535512 NR Description: unknown protein
  misc_feature (84)..(207): NCBI GI NO: 24431595 NR Description: Hypothetical protein
  misc_feature (1)..(65): NCBI GI NO: 22327003 NR Description: unknown protein; protein id: At5g23130
  misc_feature (1)..(68): NCBI GI NO: 11291586 NR Description: hypothetical protein T22D6
  misc_feature (1)..(68): NCBI GI NO: 30682281 NR Description: expressed protein [Arabidopsis thaliana]
  misc_feature (1)..(65): NCBI GI NO: 9759371 NR Description: gene_id:MYJ24.12~unknown protein
MFAHKTLRVPLHGRHAPSPPSSSPSHAAREWTKNAASLDPLLKPPRSTVSPSMSLLLQGCHGLTPAPKGDLNLTDECAQGHHRKAGSLSSTLLPRRAGQGLALRPKSGGRADTNGIHQDLLAAWVPSYGDGLRAVKRSSSAPEFQDSDSVSLASAWLKSKWNLKPDYAFTLALFDGISKPLLDSIPKPLLDNIPNSIVAWRNKAARD

SEQ ID NO: 30713 - DNA, 936 bp, Zea mays subsp. mays; identical to SEQ ID NO: 27950
  misc_feature (1)..(936): Ceres Seq. ID no. 12361812

SEQ ID NO: 30714 - protein, 119 aa, Zea mays subsp. mays; identical to SEQ ID NO: 27951
  peptide (1)..(119): Ceres Seq. ID no. 12361813
  misc_feature (14)..(117): Pfam Name: Pfam Description:  Microtubule associated protein 1A/1B
  misc_feature (1)..(118): NCBI GI NO: 40253647 NR Description: putative microtubial binding protein
  misc_feature (1)..(119): NCBI GI NO: 38344173 NR Description: OSJNBa0053K19.12
  misc_feature (1)..(117): NCBI GI NO: 34595981 NR Description: microtubule-associated protein 1 light chain 3
  misc_feature (1)..(119): NCBI GI NO: 15220686 NR Description: symbiosis-related protein, putative
  misc_feature (1)..(117): NCBI GI NO: 33146967 NR Description: putative microtubule associated protein
  misc_feature (1)..(118): NCBI GI NO: 21592920 NR Description: putative microtubule-associated protein
  misc_feature (1)..(119): NCBI GI NO: 18415813 NR Description: symbiosis-related like protein
  misc_feature (1)..(119): NCBI GI NO: 21553487 NR Description: symbiosis-related like protein
  misc_feature (1)..(118): NCBI GI NO: 15224577 NR Description: putative microtubule-associated protein
  misc_feature (1)..(118): NCBI GI NO: 7446944 NR Description: hypothetical protein F8K4

SEQ ID NO: 30715 - protein, 107 aa, Zea mays subsp. mays; identical to SEQ ID NO: 27952
  peptide (1)..(107): Ceres Seq. ID no. 12361814

SEQ ID NO: 30716 - DNA, 681 bp, Zea mays subsp. mays
  misc_feature (1)..(681): Ceres Seq. ID no. 12357263
aagtagcagctacatacgtcctcctccattaatattggcagcaagctaggatcatcagcatctgagcttatatattactacatcgatcggttgccaaatggcggggatgacagtcggcaataagctggcgctggctgcggtgctgctgtgcgcggcggcggccatggccacggcgcagcaggcctccggcgtgcgcgccacctacaacttctacaacccgcagcagaacaactgggacctcaacgccgtgagcgcgtactgcgcgacgtgggacgccagcaagccgctgtcgtggcgcatgaagtacggctggacggccttctgcgggcccgccggccccaccggccaggccgcgtgcgggcagtgtcttctggtgaccaacacggcgacgggggcgtccatcacggtgaggatcgtggaccagtgcagcaacggcggcctggacctggactacgacacggcgttcaagcccatcgacaccaacggccagggcttccaggccggccacctcaccgtcaactaccagttcgtcaactgcggcgacaactgaactgatagattattcacctgtgcatgcacctatatgtactagcaccattattccaagagttatatggatgtgatcccacacgtaagagccaataaaacatatatgcccagtggaataaactgaattaccta

SEQ ID NO: 30717 - protein, 150 aa, Zea mays subsp. mays
  peptide (1)..(150): Ceres Seq. ID no. 12357264
  misc_feature (28)..(147): Pfam Name: Pfam Description:  Barwin family
  misc_feature (9)..(149): NCBI GI NO: 7442145 NR Description: pathogenesis-related protein 4 - barley
  misc_feature (4)..(149): NCBI GI NO: 34925032 NR Description: Wheatwin2 precursor
  misc_feature (1)..(147): NCBI GI NO: 16024932 NR Description: pathogenesis-related protein [Oryza sativa]
  misc_feature (12)..(149): NCBI GI NO: 34925030 NR Description: Wheatwin1 precursor
  misc_feature (4)..(150): NCBI GI NO: 38018635 NR Description: pathogenesis-related protein 4b
  misc_feature (15)..(149): NCBI GI NO: 3511147 NR Description: PR-4 type protein [Vitis vinifera]
  misc_feature (27)..(149): NCBI GI NO: 114832 NR Description: BARWIN
  misc_feature (6)..(149): NCBI GI NO: 100351 NR Description: pathogenesis-related protein 4A - common tobacco
  misc_feature (27)..(149): NCBI GI NO: 442693 NR Description: Barwin, Basic Barley Seed Protein
  misc_feature (6)..(149): NCBI GI NO: 130839 NR Description: Pathogenesis-related protein PR-4A precursor
MAGMTVGNKLALAAVLLCAAAAMATAQQASGVRATYNFYNPQQNNWDLNAVSAYCATWDASKPLSWRMKYGWTAFCGPAGPTGQAACGQCLLVTNTATGASITVRIVDQCSNGGLDLDYDTAFKPIDTNGQGFQAGHLTVNYQFVNCGDN

SEQ ID NO: 30718 - protein, 147 aa, Zea mays subsp. mays
  peptide (1)..(147): Ceres Seq. ID no. 12357265
  misc_feature (25)..(144): Pfam Name: Pfam Description:  Barwin family
  misc_feature (6)..(146): NCBI GI NO: 7442145 NR Description: pathogenesis-related protein 4 - barley
  misc_feature (1)..(146): NCBI GI NO: 34925032 NR Description: Wheatwin2 precursor
  misc_feature (1)..(144): NCBI GI NO: 16024932 NR Description: pathogenesis-related protein [Oryza sativa]
  misc_feature (9)..(146): NCBI GI NO: 34925030 NR Description: Wheatwin1 precursor
  misc_feature (1)..(147): NCBI GI NO: 38018635 NR Description: pathogenesis-related protein 4b
  misc_feature (12)..(146): NCBI GI NO: 3511147 NR Description: PR-4 type protein [Vitis vinifera]
  misc_feature (24)..(146): NCBI GI NO: 114832 NR Description: BARWIN
  misc_feature (3)..(146): NCBI GI NO: 100351 NR Description: pathogenesis-related protein 4A - common tobacco
  misc_feature (24)..(146): NCBI GI NO: 442693 NR Description: Barwin, Basic Barley Seed Protein
  misc_feature (3)..(146): NCBI GI NO: 130839 NR Description: Pathogenesis-related protein PR-4A precursor
MTVGNKLALAAVLLCAAAAMATAQQASGVRATYNFYNPQQNNWDLNAVSAYCATWDASKPLSWRMKYGWTAFCGPAGPTGQAACGQCLLVTNTATGASITVRIVDQCSNGGLDLDYDTAFKPIDTNGQGFQAGHLTVNYQFVNCGDN

SEQ ID NO: 30719 - protein, 128 aa, Zea mays subsp. mays
  peptide (1)..(128): Ceres Seq. ID no. 12357266
  misc_feature (6)..(125): Pfam Name: Pfam Description:  Barwin family
  misc_feature (1)..(127): NCBI GI NO: 7442145 NR Description: pathogenesis-related protein 4 - barley
  misc_feature (1)..(127): NCBI GI NO: 34925032 NR Description: Wheatwin2 precursor
  misc_feature (1)..(125): NCBI GI NO: 16024932 NR Description: pathogenesis-related protein [Oryza sativa]
  misc_feature (1)..(127): NCBI GI NO: 34925030 NR Description: Wheatwin1 precursor
  misc_feature (1)..(128): NCBI GI NO: 38018635 NR Description: pathogenesis-related protein 4b
  misc_feature (1)..(127): NCBI GI NO: 3511147 NR Description: PR-4 type protein [Vitis vinifera]
  misc_feature (5)..(127): NCBI GI NO: 114832 NR Description: BARWIN
  misc_feature (1)..(127): NCBI GI NO: 100351 NR Description: pathogenesis-related protein 4A - common tobacco
  misc_feature (5)..(127): NCBI GI NO: 442693 NR Description: Barwin, Basic Barley Seed Protein
  misc_feature (1)..(127): NCBI GI NO: 130839 NR Description: Pathogenesis-related protein PR-4A precursor
MATAQQASGVRATYNFYNPQQNNWDLNAVSAYCATWDASKPLSWRMKYGWTAFCGPAGPTGQAACGQCLLVTNTATGASITVRIVDQCSNGGLDLDYDTAFKPIDTNGQGFQAGHLTVNYQFVNCGDN

SEQ ID NO: 30720 - DNA, 741 bp, Zea mays subsp. mays
  misc_feature (1)..(741): Ceres Seq. ID no. 12402135
cattttctgggtgttcttcactccagttatggtcagtgtggctaaatctttcgatgctccaataaagcttctgtttccaactgcagacgctgaacggccattctccatgcttggccttggtgacattgtaatacctggtatattcgtcgcacttgccttgcgttttgatgtctcaagaggtaccaagaagcgttacttcaacagtgcatttttgggatacgctgtgggtatgacggtgaccatcgttgtaatgaactggtttcaagcggcgcagcctgctctactataccttgttcctggtgtgattggttttgtcgctgttccctgtctgtggtatggagaagtgaaacagctactggagtttgacgagtcaaaaactgagtcggaggaaggcagtacagaagagaagcaagatgatgatagttccaaaggcaacaaaaaggtggactagcaggatttagttccggaggtaaaaggacaggaagacagttttcgtgtaatgtcgtctggcagctaaaaaaacgggtctgatgaccctctaataccggattcgctcgccttacttaagaacttagaagaaatggttcagcatgatacaagttttattttattttttgtttcattttgcggattatttgccctgggctggagagtgggaattgaggggaacaaaatagatgctgttactcgcgatgtactccctgattcgttaaggaattcaccagaactttgacttggccg

SEQ ID NO: 30721 - protein, 149 aa, Zea mays subsp. mays
  peptide (1)..(149): Ceres Seq. ID no. 12402136
  misc_feature (1)..(123): Pfam Name: Pfam Description:  Signal peptide peptidase
  misc_feature (1)..(145): NCBI GI NO: 18395487 NR Description: expressed protein; protein id: At2g03120
  misc_feature (1)..(145): NCBI GI NO: 21593273 NR Description: unknown [Arabidopsis thaliana]
  misc_feature (1)..(149): NCBI GI NO: 18034682 NR Description: histocompatibility 13 [Mus musculus]
  misc_feature (1)..(149): NCBI GI NO: 20452374 NR Description: minor histocompatibility antigen H13 isoform 1
  misc_feature (1)..(149): NCBI GI NO: 25992191 NR Description: putative presenilin-like aspartyl protease
  misc_feature (1)..(149): NCBI GI NO: 26389558 NR Description: unnamed protein product [Mus musculus]
  misc_feature (1)..(149): NCBI GI NO: 28277155 NR Description: Similar to histocompatibility 13 [Mus musculus]
  misc_feature (1)..(149): NCBI GI NO: 34858994 NR Description: similar to histocompatibility 13
  misc_feature (1)..(147): NCBI GI NO: 11121544 NR Description: dJ324O17
  misc_feature (1)..(147): NCBI GI NO: 22761270 NR Description: unnamed protein product [Homo sapiens]
IFWVFFTPVMVSVAKSFDAPIKLLFPTADAERPFSMLGLGDIVIPGIFVALALRFDVSRGTKKRYFNSAFLGYAVGMTVTIVVMNWFQAAQPALLYLVPGVIGFVAVPCLWYGEVKQLLEFDESKTESEEGSTEEKQDDDSSKGNKKVD

SEQ ID NO: 30722 - protein, 140 aa, Zea mays subsp. mays
  peptide (1)..(140): Ceres Seq. ID no. 12402137
  misc_feature (1)..(114): Pfam Name: Pfam Description:  Signal peptide peptidase
  misc_feature (1)..(136): NCBI GI NO: 18395487 NR Description: expressed protein; protein id: At2g03120
  misc_feature (1)..(136): NCBI GI NO: 21593273 NR Description: unknown [Arabidopsis thaliana]
  misc_feature (1)..(140): NCBI GI NO: 18034682 NR Description: histocompatibility 13 [Mus musculus]
  misc_feature (1)..(140): NCBI GI NO: 20452374 NR Description: minor histocompatibility antigen H13 isoform 1
  misc_feature (1)..(140): NCBI GI NO: 28277155 NR Description: Similar to histocompatibility 13 [Mus musculus]
  misc_feature (1)..(140): NCBI GI NO: 25992191 NR Description: putative presenilin-like aspartyl protease
  misc_feature (1)..(140): NCBI GI NO: 26389558 NR Description: unnamed protein product [Mus musculus]
  misc_feature (1)..(140): NCBI GI NO: 34858994 NR Description: similar to histocompatibility 13
  misc_feature (1)..(138): NCBI GI NO: 11121544 NR Description: dJ324O17
  misc_feature (1)..(138): NCBI GI NO: 23308607 NR Description: histocompatibility
MVSVAKSFDAPIKLLFPTADAERPFSMLGLGDIVIPGIFVALALRFDVSRGTKKRYFNSAFLGYAVGMTVTIVVMNWFQAAQPALLYLVPGVIGFVAVPCLWYGEVKQLLEFDESKTESEEGSTEEKQDDDSSKGNKKVD

SEQ ID NO: 30723 - protein, 114 aa, Zea mays subsp. mays
  peptide (1)..(114): Ceres Seq. ID no. 12402138
  misc_feature (1)..(88): Pfam Name: Pfam Description:  Signal peptide peptidase
  misc_feature (1)..(110): NCBI GI NO: 18395487 NR Description: expressed protein; protein id: At2g03120
  misc_feature (1)..(110): NCBI GI NO: 21593273 NR Description: unknown [Arabidopsis thaliana]
  misc_feature (1)..(114): NCBI GI NO: 18034682 NR Description: histocompatibility 13 [Mus musculus]
  misc_feature (1)..(114): NCBI GI NO: 20452374 NR Description: minor histocompatibility antigen H13 isoform 1
  misc_feature (1)..(114): NCBI GI NO: 25992191 NR Description: putative presenilin-like aspartyl protease
  misc_feature (1)..(114): NCBI GI NO: 28277155 NR Description: Similar to histocompatibility 13 [Mus musculus]
  misc_feature (1)..(114): NCBI GI NO: 26389558 NR Description: unnamed protein product [Mus musculus]
  misc_feature (1)..(114): NCBI GI NO: 34858994 NR Description: similar to histocompatibility 13
  misc_feature (1)..(112): NCBI GI NO: 11121544 NR Description: dJ324O17
  misc_feature (1)..(112): NCBI GI NO: 22761270 NR Description: unnamed protein product [Homo sapiens]
MLGLGDIVIPGIFVALALRFDVSRGTKKRYFNSAFLGYAVGMTVTIVVMNWFQAAQPALLYLVPGVIGFVAVPCLWYGEVKQLLEFDESKTESEEGSTEEKQDDDSSKGNKKVD

SEQ ID NO: 30724 - DNA, 765 bp, Zea mays subsp. mays
  misc_feature (1)..(765): Ceres Seq. ID no. 12346311
atctacgaacgggggccgggaaaagatcggctacagacagatgaggctctgtctccggcaagcggcggccaccagctcacccctcgcagctaccctccgcggcaagacttctacgagcaccctcgccccccatggccggctcagcttcagccacaccacgtcgctgcagacggcgcccgggcaccgctggctccgagcagggtgggcggtgcgcgtgctcccgctgacggaggagaacgtggagaaggtgctggacgaggtgcggccgagcctgatggcggacggcggcaacgtggcgctgcacgagatcgacggcctcgtcgtcgtgctcaagctgcagggcgcgtgcggctcctgccccagctccaccatgacgctcaagatgggcatcgagacgcgcctccgcgacaagatccccgacatcctcgaggtcgagcagatcgtcgacaccgagaccggcctcgacctcaccgccgacaacgtcgacaaggtgcttgatgagatcagaccgtacctctccggcactggaggtggaagcctcgagcttctccagattgacggatacgtcgtcaagatccggatcggcggacctgcagccggtgtaatgacagtacgagtagccgtgacacagaaactgagggagaaaataccttccatcttggctgttcagctcacagaatagaaatgcgagagctcacttgtgcatcatcacgacgaaactctggctttcaggcgaatgtgcagtgttcatcagtcttatatttc

SEQ ID NO: 30725 - protein, 226 aa, Zea mays subsp. mays
  peptide (1)..(226): Ceres Seq. ID no. 12346312
  misc_feature (80)..(146): Pfam Name: Pfam Description:  NifU-like domain
  misc_feature (24)..(226): NCBI GI NO: 7485833 NR Description: hypothetical protein F20B18
  misc_feature (24)..(226): NCBI GI NO: 18416645 NR Description: nitrogen fixation like protein
  misc_feature (24)..(226): NCBI GI NO: 21554503 NR Description: nitrogen fixation like protein
  misc_feature (73)..(224): NCBI GI NO: 18423084 NR Description: Expressed protein; protein id: At5g49940
  misc_feature (21)..(224): NCBI GI NO: 30698492 NR Description: NifU1 [Oryza sativa (japonica cultivar-group)]
  misc_feature (73)..(204): NCBI GI NO: 8777425 NR Description: gene_id:K9P8
  misc_feature (73)..(148): NCBI GI NO: 22298836 NR Description: ORF_ID:tsl1293~similar to NifU protein
  misc_feature (69)..(147): NCBI GI NO: 24414813 NR Description: putative NifU-like protein
  misc_feature (69)..(148): NCBI GI NO: 33860975 NR Description: NifU-like protein
  misc_feature (69)..(148): NCBI GI NO: 33862527 NR Description: NifU-like protein
STNGGREKIGYRQMRLCLRQAAATSSPLAATLRGKTSTSTLAPHGRLSFSHTTSLQTAPGHRWLRAGWAVRVLPLTEENVEKVLDEVRPSLMADGGNVALHEIDGLVVVLKLQGACGSCPSSTMTLKMGIETRLRDKIPDILEVEQIVDTETGLDLTADNVDKVLDEIRPYLSGTGGGSLELLQIDGYVVKIRIGGPAAGVMTVRVAVTQKLREKIPSILAVQLTE

SEQ ID NO: 30726 - protein, 213 aa, Zea mays subsp. mays
  peptide (1)..(213): Ceres Seq. ID no. 12346313
  misc_feature (67)..(133): Pfam Name: Pfam Description:  NifU-like domain
  misc_feature (11)..(213): NCBI GI NO: 7485833 NR Description: hypothetical protein F20B18
  misc_feature (11)..(213): NCBI GI NO: 18416645 NR Description: nitrogen fixation like protein
  misc_feature (11)..(213): NCBI GI NO: 21554503 NR Description: nitrogen fixation like protein
  misc_feature (60)..(211): NCBI GI NO: 18423084 NR Description: Expressed protein; protein id: At5g49940
  misc_feature (8)..(211): NCBI GI NO: 30698492 NR Description: NifU1 [Oryza sativa (japonica cultivar-group)]
  misc_feature (60)..(191): NCBI GI NO: 8777425 NR Description: gene_id:K9P8
  misc_feature (60)..(135): NCBI GI NO: 22298836 NR Description: ORF_ID:tsl1293~similar to NifU protein
  misc_feature (56)..(134): NCBI GI NO: 24414813 NR Description: putative NifU-like protein
  misc_feature (56)..(135): NCBI GI NO: 33860975 NR Description: NifU-like protein
  misc_feature (56)..(135): NCBI GI NO: 33862527 NR Description: NifU-like protein
MRLCLRQAAATSSPLAATLRGKTSTSTLAPHGRLSFSHTTSLQTAPGHRWLRAGWAVRVLPLTEENVEKVLDEVRPSLMADGGNVALHEIDGLVVVLKLQGACGSCPSSTMTLKMGIETRLRDKIPDILEVEQIVDTETGLDLTADNVDKVLDEIRPYLSGTGGGSLELLQIDGYVVKIRIGGPAAGVMTVRVAVTQKLREKIPSILAVQLTE

SEQ ID NO: 30727 - protein, 165 aa, Zea mays subsp. mays
  peptide (1)..(165): Ceres Seq. ID no. 12346314
IYERGPGKDRLQTDEALSPASGGHQLTPRSYPPRQDFYEHPRPPWPAQLQPHHVAADGARAPLAPSRVGGARAPADGGERGEGAGRGAAEPDGGRRQRGAARDRRPRRRAQAAGRVRLLPQLHHDAQDGHRDAPPRQDPRHPRGRADRRHRDRPRPHRRQRRQGA

SEQ ID NO: 30728 - DNA, 1721 bp, Zea mays subsp. mays
  misc_feature (1)..(1721): Ceres Seq. ID no. 12362091
agggagggaggggcagataaagaacactgcaccatttgatttgtgtgctcctgcagtctacaccctcacttgctttcaaacgtgcacctcctctcttcttcttcctcccctcatctccttccaacagtgccataaccacagcctccctctcctctctctcttgttgcacgaatatgacgccatgatctcccccgtgaacgacaaggagaagcagagtgctacataggtacatgtagggtactataggataggaactatacagctaggaggtagcgcggagggaggagcacgccgccagcagtagggatgtacaagaaccagctccaagaactggcgcagaggagctgcttcagcctgccgtcgtacgtgtgcacgcgcgagggccctgaccacgcgccgcgcttccgggcggccgtcaccttcaacggtgagaccttcgagggccccagcggctgcaccacgctccgccaggccgagcacgccgctgccgaagtcgccctcgcccgcctctccctccgcggcccgttccactaccctcgccgcccgggtcctcgatgagacgggggtgtacaagaacctgctgcaggagacggcccaccgggcggggctgaagctgccggcgtacaccacggtgcgatcgggcccgggccactcgccggtgttctcctccaccgtcgagctcgccggcttgagcttcgcgggcgaccccgccaggaccaagaagcaggcggagaagaacgccgccatggccgcctggtcctcgctcaaacagatgccggaggctcgcaaggagcccggcgccggcgacgagcaggagcacgtggctgtcgccagagcgctcgcggcgctgaagccgcgagacggcggcgacggaaaggcggcgccgcctctgcagaagcacagcagcaacggctcttcttcctccgctcttccgaacccgtcgctgtacagacaccaatggcggcctcggaccagtacccctgcccagcccctgccgccgaggacgggggccctgcccctgcagccgccggccggcccaaggatcctgcccccgctgcatctgctacaacagccggcgtgcggctccagggacgccgcggcggcagagctggtgcggatgctggagcgcgccatggtgcgcgaccgggaggcaacgccgccttcgccgtgctactacgcggcgcctgccgcctcggcgtaccgccacggcagcgcgccgaggaccttcgccgcgggcgggttccacgccccggctgtgagcgtgcggtcggtgatcccggtgtgcgccgccccgccgccgcagaccccggtcaaggaggaaaggaatggcccggcgacaccctcaggcgcatgcaagagggcgtgagcgacgtggtcagcttgtgaagcgcagcccagagaagaagaaagaaagagcctggctctgttgttgcaggggagttttggatcacaactttctctgtagtctgtacagaagttgtgtacgaggtcaactactacgcatctccctcgctctctgtgtgtgtttgaccaggatctagatggtgagatcttcgtcagaaaggcagccatggccatgatgaggctgtgaagggttttaggtggacgatgaacatatatgaatatatagttgtactgttctagggcttcagtagaagccatgctaccgtgttaacaagcgcatcgtatcatcccttcggctcggcaatctgcctgcctgc

SEQ ID NO: 30729 - protein, 206 aa, Zea mays subsp. mays
  peptide (1)..(206): Ceres Seq. ID no. 12362092
  misc_feature (1)..(39): NCBI GI NO: 11994159 NR Description: gb|AAD20688
  misc_feature (168)..(196): NCBI GI NO: 11994159 NR Description: gb|AAD20688
  misc_feature (1)..(39): NCBI GI NO: 15231653 NR Description: hypothetical protein; protein id: At3g26932.1
  misc_feature (168)..(196): NCBI GI NO: 15231653 NR Description: hypothetical protein; protein id: At3g26932.1
  misc_feature (1)..(199): NCBI GI NO: 37535422 NR Description: putative extensin
  misc_feature (1)..(186): NCBI GI NO: 30693732 NR Description: expressed protein [Arabidopsis thaliana]
  misc_feature (1)..(169): NCBI GI NO: 18401724 NR Description: expressed protein; protein id: At2g28380
  misc_feature (1)..(43): NCBI GI NO: 40788412 NR Description: hypothetical protein
  misc_feature (1)..(186): NCBI GI NO: 9759153 NR Description: gb|AAD20688
  misc_feature (1)..(12): NCBI GI NO: 9229939 NR Description: dsRNA-binding protein ODB1
MAAWSSLKQMPEARKEPGAGDEQEHVAVARALAALKPRDGGDGKAAPPLQKHSSNGSSSSALPNPSLYRHQWRPRTSTPAQPLPPRTGALPLQPPAGPRILPPLHLLQQPACGSRDAAAAELVRMLERAMVRDREATPPSPCYYAAPAASAYRHGSAPRTFAAGGFHAPAVSVRSVIPVCAAPPPQTPVKEERNGPATPSGACKRA

SEQ ID NO: 30730 - protein, 197 aa, Zea mays subsp. mays
  peptide (1)..(197): Ceres Seq. ID no. 12362093
  misc_feature (1)..(30): NCBI GI NO: 11994159 NR Description: gb|AAD20688
  misc_feature (159)..(187): NCBI GI NO: 11994159 NR Description: gb|AAD20688
  misc_feature (1)..(30): NCBI GI NO: 15231653 NR Description: hypothetical protein; protein id: At3g26932.1
  misc_feature (159)..(187): NCBI GI NO: 15231653 NR Description: hypothetical protein; protein id: At3g26932.1
  misc_feature (1)..(190): NCBI GI NO: 37535422 NR Description: putative extensin
  misc_feature (1)..(177): NCBI GI NO: 30693732 NR Description: expressed protein [Arabidopsis thaliana]
  misc_feature (1)..(160): NCBI GI NO: 18401724 NR Description: expressed protein; protein id: At2g28380
  misc_feature (1)..(34): NCBI GI NO: 40788412 NR Description: hypothetical protein
  misc_feature (1)..(177): NCBI GI NO: 9759153 NR Description: gb|AAD20688
  misc_feature (1)..(13): NCBI GI NO: 15231653 NR Description: hypothetical protein; protein id: At3g26932.1
MPEARKEPGAGDEQEHVAVARALAALKPRDGGDGKAAPPLQKHSSNGSSSSALPNPSLYRHQWRPRTSTPAQPLPPRTGALPLQPPAGPRILPPLHLLQQPACGSRDAAAAELVRMLERAMVRDREATPPSPCYYAAPAASAYRHGSAPRTFAAGGFHAPAVSVRSVIPVCAAPPPQTPVKEERNGPATPSGACKRA

SEQ ID NO: 30731 - protein, 142 aa, Zea mays subsp. mays
  peptide (1)..(142): Ceres Seq. ID no. 12362094
  misc_feature (1)..(142): NCBI GI NO: 40788412 NR Description: hypothetical protein
  misc_feature (1)..(47): NCBI GI NO: 40788412 NR Description: hypothetical protein
MAASDQYPCPAPAAEDGGPAPAAAGRPKDPAPAASATTAGVRLQGRRGGRAGADAGARHGARPGGNAAFAVLLRGACRLGVPPRQRAEDLRRGRVPRPGCERAVGDPGVRRPAAADPGQGGKEWPGDTLRRMQEGVSDVVSL

SEQ ID NO: 30732 - DNA, 1478 bp, Zea mays subsp. mays
  misc_feature (1)..(1478): Ceres Seq. ID no. 12373137
ttaatcaaaaactaaacccaatcccccttccaccattcacacgtaccggcggagaaggaaggaattggtcgccgccgcctgcctctctccgatcctcctccgtcagtggcggtggccacgccgtgctaagctaagctaagcttgcgcaagtgacaagttctttggttggttggaggcagagccacatggcatcgtcgtcgcggctggatctcccgccggggttccgcttccaccccaccgacgaggaggtggtgtcgcactacctgacccacaaggcgctggacagccgcttctcctgcgtcgtcatcgccgacgccgacctgaacaagatcgagccgtgggatctcccaagcaaggctaagatgggcgagaaggagtggtacttcttctgccacaaggaccgcaagtacccgacggggatgcgcaccaaccgcgccaccgccagcgggtactggaaggccacgggcaaggacaaggagatcttccgcggcagtagtccccgccgcgtgctcgtcggcatgaagaagacgctcgtcttctacacgggccgcgcgccgcgcggaggcaagacgccgtgggtcatgcacgagtaccgcctcgagggcagcctgccgcccaacctccaccgcggggccaaggacgaatgggctgtgtgtaaggtgatcaacaaagacttggcgggcaaggctgggcagcaacaaatggcgccgccgcacgccgtgtccgtgggcatggagcgcagcgactcgctggccttcctcgacgacctggtgctcgacaacgccgacgacctgcccccgctcatcgactcgacaacgtacgccgcggcggggacgaccacgacgacgaacgacgacagcggcgggtaccaacaagccaccaaggcggagccgcagccgcatctgcccgcgccgagcaacagcccgtaccagcagcaggccatacggaggcactgcaaggcggaggcgccggcgccggcgatggttctgagcccgtcgcgcgagacgccgggcgcggacatgttccagctccagcatgtggacgagctgctccagctggacggcggcttcatggaggactactacaacatgaacatgtggaaggtctagttaggccgctcggatcgtcggttgcctggcggatgatggattgattagttggttgattggattaacctgttattagacgaagaggagtggaaaggccggccgcgccgattggcatggacgaggtctgtctgacgaagatgtgtcgagacctcgccggcggtgtggtttgtgagaattggttagttagctaatcttcattagctagctagctagctagctactgattagaacagctagcagtagtgtgtaaccgcgcgcgtgtcgttgcctctgctggtcgagaggattgaagcacgcatgtgtacataataataggtaggagtcgtcgtcgttgagtgatgagaaaaatgaatgaaacatactatatat

SEQ ID NO: 30733 - protein, 307 aa, Zea mays subsp. mays
  peptide (1)..(307): Ceres Seq. ID no. 12373138
  misc_feature (9)..(139): Pfam Name: NAM Pfam Description: No apical meristem
  misc_feature (5)..(299): NCBI GI NO: 34394523 NR Description: putative GRAB2 protein(Geminivirus Rep A-binding)
  misc_feature (6)..(252): NCBI GI NO: 4218537 NR Description: GRAB2 protein [Triticum sp.]
  misc_feature (2)..(277): NCBI GI NO: 34902148 NR Description: Putative NAM (no apical meristem) protein
  misc_feature (7)..(307): NCBI GI NO: 27529808 NR Description: OsNAC1 protein [Oryza sativa]
  misc_feature (7)..(208): NCBI GI NO: 30686737 NR Description: NAM (no apical meristem)-related protein
  misc_feature (1)..(216): NCBI GI NO: 38344965 NR Description: OSJNBa0072F16.10
  misc_feature (7)..(208): NCBI GI NO: 9758909 NR Description: NAM (no apical meristem)-like protein
  misc_feature (7)..(216): NCBI GI NO: 27529810 NR Description: OsNAC2 protein [Oryza sativa]
  misc_feature (7)..(208): NCBI GI NO: 15229219 NR Description: NAM-like protein
  misc_feature (1)..(167): NCBI GI NO: 30682048 NR Description: NAM (no apical meristem)-related protein
MASSSRLDLPPGFRFHPTDEEVVSHYLTHKALDSRFSCVVIADADLNKIEPWDLPSKAKMGEKEWYFFCHKDRKYPTGMRTNRATASGYWKATGKDKEIFRGSSPRRVLVGMKKTLVFYTGRAPRGGKTPWVMHEYRLEGSLPPNLHRGAKDEWAVCKVINKDLAGKAGQQQMAPPHAVSVGMERSDSLAFLDDLVLDNADDLPPLIDSTTYAAAGTTTTTNDDSGGYQQATKAEPQPHLPAPSNSPYQQQAIRRHCKAEAPAPAMVLSPSRETPGADMFQLQHVDELLQLDGGFMEDYYNMNMWKV

SEQ ID NO: 30734 - protein, 248 aa, Zea mays subsp. mays
  peptide (1)..(248): Ceres Seq. ID no. 12373139
  misc_feature (1)..(80): Pfam Name: NAM Pfam Description: No apical meristem
  misc_feature (1)..(240): NCBI GI NO: 34394523 NR Description: putative GRAB2 protein(Geminivirus Rep A-binding)
  misc_feature (1)..(193): NCBI GI NO: 4218537 NR Description: GRAB2 protein [Triticum sp.]
  misc_feature (1)..(218): NCBI GI NO: 34902148 NR Description: Putative NAM (no apical meristem) protein
  misc_feature (1)..(248): NCBI GI NO: 27529808 NR Description: OsNAC1 protein [Oryza sativa]
  misc_feature (1)..(149): NCBI GI NO: 30686737 NR Description: NAM (no apical meristem)-related protein
  misc_feature (1)..(157): NCBI GI NO: 38344965 NR Description: OSJNBa0072F16.10
  misc_feature (1)..(149): NCBI GI NO: 9758909 NR Description: NAM (no apical meristem)-like protein
  misc_feature (1)..(157): NCBI GI NO: 27529810 NR Description: OsNAC2 protein [Oryza sativa]
  misc_feature (1)..(149): NCBI GI NO: 15229219 NR Description: NAM-like protein
  misc_feature (1)..(108): NCBI GI NO: 30682048 NR Description: NAM (no apical meristem)-related protein
MGEKEWYFFCHKDRKYPTGMRTNRATASGYWKATGKDKEIFRGSSPRRVLVGMKKTLVFYTGRAPRGGKTPWVMHEYRLEGSLPPNLHRGAKDEWAVCKVINKDLAGKAGQQQMAPPHAVSVGMERSDSLAFLDDLVLDNADDLPPLIDSTTYAAAGTTTTTNDDSGGYQQATKAEPQPHLPAPSNSPYQQQAIRRHCKAEAPAPAMVLSPSRETPGADMFQLQHVDELLQLDGGFMEDYYNMNMWKV

SEQ ID NO: 30735 - protein, 229 aa, Zea mays subsp. mays
  peptide (1)..(229): Ceres Seq. ID no. 12373140
  misc_feature (1)..(61): Pfam Name: NAM Pfam Description: No apical meristem
  misc_feature (1)..(221): NCBI GI NO: 34394523 NR Description: putative GRAB2 protein(Geminivirus Rep A-binding)
  misc_feature (1)..(174): NCBI GI NO: 4218537 NR Description: GRAB2 protein [Triticum sp.]
  misc_feature (1)..(199): NCBI GI NO: 34902148 NR Description: Putative NAM (no apical meristem) protein
  misc_feature (1)..(229): NCBI GI NO: 27529808 NR Description: OsNAC1 protein [Oryza sativa]
  misc_feature (1)..(130): NCBI GI NO: 30686737 NR Description: NAM (no apical meristem)-related protein
  misc_feature (1)..(138): NCBI GI NO: 38344965 NR Description: OSJNBa0072F16.10
  misc_feature (1)..(130): NCBI GI NO: 9758909 NR Description: NAM (no apical meristem)-like protein
  misc_feature (1)..(138): NCBI GI NO: 27529810 NR Description: OsNAC2 protein [Oryza sativa]
  misc_feature (1)..(130): NCBI GI NO: 15229219 NR Description: NAM-like protein
  misc_feature (1)..(89): NCBI GI NO: 30682048 NR Description: NAM (no apical meristem)-related protein
MRTNRATASGYWKATGKDKEIFRGSSPRRVLVGMKKTLVFYTGRAPRGGKTPWVMHEYRLEGSLPPNLHRGAKDEWAVCKVINKDLAGKAGQQQMAPPHAVSVGMERSDSLAFLDDLVLDNADDLPPLIDSTTYAAAGTTTTTNDDSGGYQQATKAEPQPHLPAPSNSPYQQQAIRRHCKAEAPAPAMVLSPSRETPGADMFQLQHVDELLQLDGGFMEDYYNMNMWKV

SEQ ID NO: 30736 - DNA, 1518 bp, Zea mays subsp. mays
  misc_feature (1)..(1518): Ceres Seq. ID no. 12382183
gaagttcattcagagagagcgcgagagggggtgtggctgtctatggcgtacgagaggatacacgaagctcctcagatggtggccatctcgccaaccaggctcaggatgaagctgctgggctccaatcacaaggacgaccccactcgcaagacgctgcaggcgtcgaggctcgacgacgatgaccaccccaacaacagcctcctgccgcaagagctcgacgaagagtaccccaaggaccaccgctccgactcttcccggtcgcggtccgacgccagccacgacaggatcagtggcagcgacgacgacagcggcaccaactttgagttctgcaaggacgagagggcgtccctgccggcttcggcggcgcccggaccgttcttccggcagcaggtgccgtccaagtggaacgacgcggagaagtggatcgcggggcgccaccaccgccacgtcgtgcactccaaccctgtcttctccaagaagcccgcggcgggcgcgcccaccgagctgtcgtctaataggtcctcgcacaagaagccccgcttctcgccggcggccgtgtcgacgcgggacgtcgggacggagatgacgcccgccgcgagccaggagcagtcgcgcagcggcacccccgccggcgccgccacgccggcgctcagcccgctctgctcggcgccgtccagcccgcggcgcggcggctcctcgtccgtgccggagcgggagctccggctccggacgcggcgggagatcgctgcgctcggcctgcagctcggcaagatgagcatcgcgtcgtgggccagcaaggaggagggtctcctcgccgccgcgtcgccggagaaggacaagcgctacgcggccgtcgacacggtggtcaggagcaaggcgttcgaagctcgcgccgccgcgtgggaggagtccaacaagtgtaaactcgcggcaagataccagaggaaagaggcgaagatagagggatgggaaagcttgcagaaatgcaagttcgaagccaagctgaggcaggccgaggcacgggctgagcagatgaaagcccgggcgaagcaggacctggcgaagaggctgtcagcgctgagccacaaggtggaggggaagcaggcgagggtggaggcgcgccggggccggcaggcgtcccggctggcgcggcaggtggagcgcatccgcgagaccggccgtgtgccgtgccggctccggcggtgctgcgcctggttcctgtagtgtagtgtagctagcatgctcccaatcgtcggaacaagtgctgatggcagtatgtcatggcatgggctgcttgatttgtaactacatgaaaattcatcgctggttcatgttcgtcccaatgccagggcagtggttggtagctgctcgccgctgtggtttggatgccgccgcctgcctttgtgccggttgtctagcttggcctgcaccctgcagccagctgatctagtgatgtggtgcccaaattcacgcacatgtaaagctccttgcaatttcaattaactcaggttattcttg

SEQ ID NO: 30737 - protein, 407 aa, Zea mays subsp. mays
  peptide (1)..(407): Ceres Seq. ID no. 12382184
  misc_feature (295)..(399): Pfam Name: Pfam Description:  Remorin, C-terminal region
  misc_feature (174)..(406): NCBI GI NO: 15220725 NR Description: hypothetical protein; protein id: At1g30320.1
  misc_feature (86)..(197): NCBI GI NO: 15220725 NR Description: hypothetical protein; protein id: At1g30320.1
  misc_feature (170)..(402): NCBI GI NO: 18395321 NR Description: expressed protein; protein id: At2g02170
  misc_feature (185)..(404): NCBI GI NO: 38344336 NR Description: OSJNBa0058K23.18
  misc_feature (151)..(407): NCBI GI NO: 34902218 NR Description: Unknown protein
  misc_feature (173)..(402): NCBI GI NO: 15220963 NR Description: hypothetical protein; protein id: At1g53860.1
  misc_feature (128)..(153): NCBI GI NO: 15220963 NR Description: hypothetical protein; protein id: At1g53860.1
  misc_feature (275)..(396): NCBI GI NO: 28393368 NR Description: unknown protein [Arabidopsis thaliana]
  misc_feature (275)..(396): NCBI GI NO: 18408804 NR Description: expressed protein; protein id: At1g67590
  misc_feature (275)..(396): NCBI GI NO: 21536537 NR Description: unknown [Arabidopsis thaliana]
EVHSERAREGVWLSMAYERIHEAPQMVAISPTRLRMKLLGSNHKDDPTRKTLQASRLDDDDHPNNSLLPQELDEEYPKDHRSDSSRSRSDASHDRISGSDDDSGTNFEFCKDERASLPASAAPGPFFRQQVPSKWNDAEKWIAGRHHRHVVHSNPVFSKKPAAGAPTELSSNRSSHKKPRFSPAAVSTRDVGTEMTPAASQEQSRSGTPAGAATPALSPLCSAPSSPRRGGSSSVPERELRLRTRREIAALGLQLGKMSIASWASKEEGLLAAASPEKDKRYAAVDTVVRSKAFEARAAAWEESNKCKLAARYQRKEAKIEGWESLQKCKFEAKLRQAEARAEQMKARAKQDLAKRLSALSHKVEGKQARVEARRGRQASRLARQVERIRETGRVPCRLRRCCAWFL

SEQ ID NO: 30738 - protein, 393 aa, Zea mays subsp. mays
  peptide (1)..(393): Ceres Seq. ID no. 12382185
  misc_feature (281)..(385): Pfam Name: Pfam Description:  Remorin, C-terminal region
  misc_feature (160)..(392): NCBI GI NO: 15220725 NR Description: hypothetical protein; protein id: At1g30320.1
  misc_feature (72)..(183): NCBI GI NO: 15220725 NR Description: hypothetical protein; protein id: At1g30320.1
  misc_feature (156)..(388): NCBI GI NO: 18395321 NR Description: expressed protein; protein id: At2g02170
  misc_feature (171)..(390): NCBI GI NO: 38344336 NR Description: OSJNBa0058K23.18
  misc_feature (137)..(393): NCBI GI NO: 34902218 NR Description: Unknown protein
  misc_feature (159)..(388): NCBI GI NO: 15220963 NR Description: hypothetical protein; protein id: At1g53860.1
  misc_feature (114)..(139): NCBI GI NO: 15220963 NR Description: hypothetical protein; protein id: At1g53860.1
  misc_feature (261)..(382): NCBI GI NO: 28393368 NR Description: unknown protein [Arabidopsis thaliana]
  misc_feature (261)..(382): NCBI GI NO: 18408804 NR Description: expressed protein; protein id: At1g67590
  misc_feature (261)..(382): NCBI GI NO: 21536537 NR Description: unknown [Arabidopsis thaliana]
MAYERIHEAPQMVAISPTRLRMKLLGSNHKDDPTRKTLQASRLDDDDHPNNSLLPQELDEEYPKDHRSDSSRSRSDASHDRISGSDDDSGTNFEFCKDERASLPASAAPGPFFRQQVPSKWNDAEKWIAGRHHRHVVHSNPVFSKKPAAGAPTELSSNRSSHKKPRFSPAAVSTRDVGTEMTPAASQEQSRSGTPAGAATPALSPLCSAPSSPRRGGSSSVPERELRLRTRREIAALGLQLGKMSIASWASKEEGLLAAASPEKDKRYAAVDTVVRSKAFEARAAAWEESNKCKLAARYQRKEAKIEGWESLQKCKFEAKLRQAEARAEQMKARAKQDLAKRLSALSHKVEGKQARVEARRGRQASRLARQVERIRETGRVPCRLRRCCAWFL

SEQ ID NO: 30739 - protein, 382 aa, Zea mays subsp. mays
  peptide (1)..(382): Ceres Seq. ID no. 12382186
  misc_feature (270)..(374): Pfam Name: Pfam Description:  Remorin, C-terminal region
  misc_feature (149)..(381): NCBI GI NO: 15220725 NR Description: hypothetical protein; protein id: At1g30320.1
  misc_feature (61)..(172): NCBI GI NO: 15220725 NR Description: hypothetical protein; protein id: At1g30320.1
  misc_feature (145)..(377): NCBI GI NO: 18395321 NR Description: expressed protein; protein id: At2g02170
  misc_feature (160)..(379): NCBI GI NO: 38344336 NR Description: OSJNBa0058K23.18
  misc_feature (126)..(382): NCBI GI NO: 34902218 NR Description: Unknown protein
  misc_feature (148)..(377): NCBI GI NO: 15220963 NR Description: hypothetical protein; protein id: At1g53860.1
  misc_feature (103)..(128): NCBI GI NO: 15220963 NR Description: hypothetical protein; protein id: At1g53860.1
  misc_feature (250)..(371): NCBI GI NO: 28393368 NR Description: unknown protein [Arabidopsis thaliana]
  misc_feature (250)..(371): NCBI GI NO: 18408804 NR Description: expressed protein; protein id: At1g67590
  misc_feature (250)..(371): NCBI GI NO: 21536537 NR Description: unknown [Arabidopsis thaliana]
MVAISPTRLRMKLLGSNHKDDPTRKTLQASRLDDDDHPNNSLLPQELDEEYPKDHRSDSSRSRSDASHDRISGSDDDSGTNFEFCKDERASLPASAAPGPFFRQQVPSKWNDAEKWIAGRHHRHVVHSNPVFSKKPAAGAPTELSSNRSSHKKPRFSPAAVSTRDVGTEMTPAASQEQSRSGTPAGAATPALSPLCSAPSSPRRGGSSSVPERELRLRTRREIAALGLQLGKMSIASWASKEEGLLAAASPEKDKRYAAVDTVVRSKAFEARAAAWEESNKCKLAARYQRKEAKIEGWESLQKCKFEAKLRQAEARAEQMKARAKQDLAKRLSALSHKVEGKQARVEARRGRQASRLARQVERIRETGRVPCRLRRCCAWFL

SEQ ID NO: 30740 - DNA, 1296 bp, Zea mays subsp. mays
  misc_feature (1)..(1296): Ceres Seq. ID no. 12359791
ctctgcttgcttcgcctcgtctgccctacccctgccctgtccacattttcttccattccggttgctcaacaaacaaaatatatatatcctcgctttccttcccgtcgccgcctgaaaccgctgcgctctcggcttggatagcaagggtctcagtctctcagagggagcaagaagaggatctgagggtgagatggcgatcgaccacgagtcccagttcaaggagctccgcctcaagaaccgaaggatcatgggcggcggcggccctgaccctgagccggaggaggagggcgccacggcggcgtacgcggagcggtggccgcggtggctgcagccgctgctgtccgcgcgcttcttcgcgcagtgcaggacgcacagctactccaaccgcagcggcgaatgcaacatgttctgcctggactgctcggccaccggggggcacgggcgcgggcgcgctctgctcgctgtgcctggcgcagcacgggcaccgcgaccaccacaccatccagatccggcgctcctcctaccacgacgtcatccgggtctcggacatccagcgcttcatggacatcgccggcgtgcagacctacgtcatcaacagcgcccgcgtcgtcttcctcaacgagcggccgcagcagcagaagccgggtggcggcaaggccgcgtcgtcgtcgtcggcctccgccaacctctgcgaggtctgcgcccgcagcctcctcgacaacttccgcttctgctccctcggctgcaaggtcgtcggctgctcccccgacgccgccaaggccaggaactggctcctccgggccgccgacggcgacggttccaccacatcctcctcggccccgcgcaacgccgacaggaagctgagcttcacgccgcccacgccgcagccgaccctgccgacgaagcgccgcaagggcatcccgcaccgcgccccgttcggcagcctcatcgtcgagtactagaatctccttctcccccagccatcgctgtccacgtccgttgcttctgcattggcagttggcactacacgcgcgcggtagagtggaagtactcttcaaacgacggaatggaatcgcacagtgagccagtgaatccagattacaggcaagccaataggttggccaccacttgggtggcctggcccgcctttctttgccacggcacttcggttggtgggtgcttatcgagatggatgccatttgctcgctggcttcgctttccagaaaggggagggaggagaaaggaaggtggatggattggatcggacatcggaggaagaatcaaaaccagcttttc

SEQ ID NO: 30741 - protein, 368 aa, Zea mays subsp. mays
  peptide (1)..(368): Ceres Seq. ID no. 12359792
  misc_feature (1)..(79): NCBI GI NO: 37537092 NR Description: unknown protein
  misc_feature (1)..(78): NCBI GI NO: 6714272 NR Description: F6N18.8 [Arabidopsis thaliana]
  misc_feature (33)..(78): NCBI GI NO: 18398555 NR Description: expressed protein; protein id: At1g32700
  misc_feature (16)..(77): NCBI GI NO: 38346725 NR Description: OSJNBa0086O06.23
  misc_feature (33)..(76): NCBI GI NO: 21554139 NR Description: unknown [Arabidopsis thaliana]
  misc_feature (1)..(78): NCBI GI NO: 15236696 NR Description: putative protein; protein id: At4g17900.1
  misc_feature (1)..(78): NCBI GI NO: 15237491 NR Description: putative protein; protein id: At5g46710
MAIDHESQFKELRLKNRRIMGGGGPDPEPEEEGATAAYAERWPRWLQPLLSARFFAQCRTHSYSNRSGECNMFCLDCSATGGHGRGRALLAVPGAARAPRPPHHPDPALLLPRRHPGLGHPALHGHRRRADLRHQQRPRRLPQRAAAAAEAGWRQGRVVVVGLRQPLRGLRPQPPRQLPLLLPRLQGRRLLPRRRQGQELAPPGRRRRRFHHILLGPAQRRQEAELHAAHAAADPADEAPQGHPAPRPVRQPHRRVLESPSPPAIAVHVRCFCIGSWHYTRAVEWKYSSNDGMESHSEPVNPDYRQANRLATTWVAWPAFLCHGTSVGGCLSRWMPFARWLRFPERGGRRKEGGWIGSDIGGRIKTSF

SEQ ID NO: 30742 - protein, 349 aa, Zea mays subsp. mays
  peptide (1)..(349): Ceres Seq. ID no. 12359793
  misc_feature (1)..(60): NCBI GI NO: 37537092 NR Description: unknown protein
  misc_feature (1)..(59): NCBI GI NO: 6714272 NR Description: F6N18.8 [Arabidopsis thaliana]
  misc_feature (14)..(59): NCBI GI NO: 18398555 NR Description: expressed protein; protein id: At1g32700
  misc_feature (1)..(58): NCBI GI NO: 38346725 NR Description: OSJNBa0086O06.23
  misc_feature (14)..(57): NCBI GI NO: 21554139 NR Description: unknown [Arabidopsis thaliana]
  misc_feature (1)..(59): NCBI GI NO: 15236696 NR Description: putative protein; protein id: At4g17900.1
  misc_feature (1)..(59): NCBI GI NO: 15237491 NR Description: putative protein; protein id: At5g46710
MGGGGPDPEPEEEGATAAYAERWPRWLQPLLSARFFAQCRTHSYSNRSGECNMFCLDCSATGGHGRGRALLAVPGAARAPRPPHHPDPALLLPRRHPGLGHPALHGHRRRADLRHQQRPRRLPQRAAAAAEAGWRQGRVVVVGLRQPLRGLRPQPPRQLPLLLPRLQGRRLLPRRRQGQELAPPGRRRRRFHHILLGPAQRRQEAELHAAHAAADPADEAPQGHPAPRPVRQPHRRVLESPSPPAIAVHVRCFCIGSWHYTRAVEWKYSSNDGMESHSEPVNPDYRQANRLATTWVAWPAFLCHGTSVGGCLSRWMPFARWLRFPERGGRRKEGGWIGSDIGGRIKTSF

SEQ ID NO: 30743 - protein, 319 aa, Zea mays subsp. mays
  peptide (1)..(319): Ceres Seq. ID no. 12359794
  misc_feature (148)..(306): Pfam Name: Pfam Description:  Protein of unknown function, DUF597
  misc_feature (148)..(319): NCBI GI NO: 37537092 NR Description: unknown protein
  misc_feature (149)..(319): NCBI GI NO: 6714272 NR Description: F6N18.8 [Arabidopsis thaliana]
  misc_feature (149)..(319): NCBI GI NO: 18398555 NR Description: expressed protein; protein id: At1g32700
  misc_feature (149)..(319): NCBI GI NO: 38346725 NR Description: OSJNBa0086O06.23
  misc_feature (149)..(319): NCBI GI NO: 21554139 NR Description: unknown [Arabidopsis thaliana]
  misc_feature (149)..(255): NCBI GI NO: 15236696 NR Description: putative protein; protein id: At4g17900.1
  misc_feature (150)..(312): NCBI GI NO: 15237491 NR Description: putative protein; protein id: At5g46710
  misc_feature (150)..(289): NCBI GI NO: 21536890 NR Description: unknown [Arabidopsis thaliana]
  misc_feature (148)..(252): NCBI GI NO: 18394936 NR Description: expressed protein; protein id: At1g21000
  misc_feature (148)..(252): NCBI GI NO: 25337907 NR Description: hypothetical protein F9H16
LLASPRLPYPCPVHIFFHSGCSTNKIYISSLSFPSPPETAALSAWIARVSVSQREQEEDLRVRWRSTTSPSSRSSASRTEGSWAAAALTLSRRRRAPRRRTRSGGRGGCSRCCPRASSRSAGRTATPTAAANATCSAWTARPPGGTGAGALCSLCLAQHGHRDHHTIQIRRSSYHDVIRVSDIQRFMDIAGVQTYVINSARVVFLNERPQQQKPGGGKAASSSSASANLCEVCARSLLDNFRFCSLGCKVVGCSPDAAKARNWLLRAADGDGSTTSSSAPRNADRKLSFTPPTPQPTLPTKRRKGIPHRAPFGSLIVEY

SEQ ID NO: 30744 - DNA, 705 bp, Zea mays subsp. mays
  misc_feature (1)..(705): Ceres Seq. ID no. 12354101
tactttgctctgctctgctcctccatggccagcagctactactccctcatgctgctcctgctgctggcggccacggccgtagcagaagaagcagccgccgaggcgtccggaggcggcggcaacgcgaccgagacgtcgccgccgccgccgacggcgtacgagatgctggagcggtacggcttcccgcggggcatcctgccggcgggcgtgacagggtacgagctcggcgcggacggcgccttcgaggtgtacttcccgcgggcctgcgagttcctgctggcgaggacgtggctggtccgctacgaggcgcgcgtgtccgggtccgtcgccgcgggctcgctcacggcgctgcgggggatcagcgtgaaggtgctgttcctgtggctcggcgtcggcgaggtggaccgcgccggggagacgctcagcttctacatcggccccgtcgccacgtcgttcccgatcgacgacttcgccgagagcccgcgctgccgcggctatgatgccgaggcggcggcctcgtcgtgactcatgacgcagccttcagccggcggtgattattaggactgccttggtgatttagctggctatatatacacgtgtgcatcgatcgagtcggagccggcgattagctatttttcctcgtcctttaatttttgtttatttcgcggactttgagtaagctgtttgcggtgatcttgttgcccc

SEQ ID NO: 30745 - protein, 174 aa, Zea mays subsp. mays
  peptide (1)..(174): Ceres Seq. ID no. 12354102
  misc_feature (50)..(167): Pfam Name: Pfam Description:  Protein of unknown function, DUF538
  misc_feature (50)..(169): NCBI GI NO: 18379014 NR Description: Expressed protein; protein id: At1g02816
  misc_feature (43)..(169): NCBI GI NO: 18411923 NR Description: coded for by A
  misc_feature (43)..(169): NCBI GI NO: 21554037 NR Description: unknown [Arabidopsis thaliana]
  misc_feature (50)..(167): NCBI GI NO: 15235335 NR Description: putative protein; protein id: At4g02360.1
  misc_feature (51)..(174): NCBI GI NO: 18379012 NR Description: Expressed protein; protein id: At1g02813
  misc_feature (51)..(163): NCBI GI NO: 21553750 NR Description: unknown [Arabidopsis thaliana]
  misc_feature (51)..(163): NCBI GI NO: 18420052 NR Description: unknown protein; protein id: At5g19860.1
  misc_feature (18)..(172): NCBI GI NO: 28273408 NR Description: unknown protein
  misc_feature (16)..(161): NCBI GI NO: 28273412 NR Description: hypothetical protein
  misc_feature (51)..(163): NCBI GI NO: 29824472 NR Description: hypothetical protein
YFALLCSSMASSYYSLMLLLLLAATAVAEEAAAEASGGGGNATETSPPPPTAYEMLERYGFPRGILPAGVTGYELGADGAFEVYFPRACEFLLARTWLVRYEARVSGSVAAGSLTALRGISVKVLFLWLGVGEVDRAGETLSFYIGPVATSFPIDDFAESPRCRGYDAEAAASS

SEQ ID NO: 30746 - protein, 166 aa, Zea mays subsp. mays
  peptide (1)..(166): Ceres Seq. ID no. 12354103
  misc_feature (42)..(159): Pfam Name: Pfam Description:  Protein of unknown function, DUF538
  misc_feature (42)..(161): NCBI GI NO: 18379014 NR Description: Expressed protein; protein id: At1g02816
  misc_feature (35)..(161): NCBI GI NO: 18411923 NR Description: coded for by A
  misc_feature (35)..(161): NCBI GI NO: 21554037 NR Description: unknown [Arabidopsis thaliana]
  misc_feature (42)..(159): NCBI GI NO: 15235335 NR Description: putative protein; protein id: At4g02360.1
  misc_feature (43)..(166): NCBI GI NO: 18379012 NR Description: Expressed protein; protein id: At1g02813
  misc_feature (43)..(155): NCBI GI NO: 21553750 NR Description: unknown [Arabidopsis thaliana]
  misc_feature (43)..(155): NCBI GI NO: 18420052 NR Description: unknown protein; protein id: At5g19860.1
  misc_feature (10)..(164): NCBI GI NO: 28273408 NR Description: unknown protein
  misc_feature (8)..(153): NCBI GI NO: 28273412 NR Description: hypothetical protein
  misc_feature (43)..(155): NCBI GI NO: 29824472 NR Description: hypothetical protein
MASSYYSLMLLLLLAATAVAEEAAAEASGGGGNATETSPPPPTAYEMLERYGFPRGILPAGVTGYELGADGAFEVYFPRACEFLLARTWLVRYEARVSGSVAAGSLTALRGISVKVLFLWLGVGEVDRAGETLSFYIGPVATSFPIDDFAESPRCRGYDAEAAASS

SEQ ID NO: 30747 - protein, 165 aa, Zea mays subsp. mays
  peptide (1)..(165): Ceres Seq. ID no. 12354104
LCSALLLHGQQLLLPHAAPAAGGHGRSRRSSRRGVRRRRQRDRDVAAAADGVRDAGAVRLPAGHPAGGRDRVRARRGRRLRGVLPAGLRVPAGEDVAGPLRGARVRVRRRGLAHGAAGDQREGAVPVARRRRGGPRRGDAQLLHRPRRHVVPDRRLRREPALPRL

SEQ ID NO: 30748 - DNA, 882 bp, Zea mays subsp. mays
  misc_feature (1)..(882): Ceres Seq. ID no. 12402126
gaatcaattcccacagcaccaccaaaccaataggcaggcagcaaacacaagccaataggcaacacccgcggcgacgcaagagggagaagcgagcgtgcagcggtcctcctctcgatccacatggccatggcggcagcggacggcaagagccggaggttcgcgctggcctgcggggtgctgagccagtacgtcaaggccgagcagcagcagcagcagcagatggcggccccgcgcgccccggccaccacgaccctgagcctgatgcccggcgcggacgtcggcgccgacgagcagcaggaggcggccgccgctggggccgaggagatgcccgggcccgcccccgccgcggcgccgccgctcaccatcttctacggcggcagggtggtggtgttcgaggacttcccggcggagaaggcggccgaggtcatgcgcctcgcggccggcgacgacctgcccatcgcccggaaggcgtcgctgcagcggttcctggccaagcgcaaagatcgcctcgtcgagcgcgcgccctacgcccgcccgtcgtcccccgcggaggcggtcaagccggcctcgggctcggcctcggcctcctggctcgggctccgcagcacggaagccgaccgcctcaccatcgcgctgtgatttactggatcgacctcgaccagtggcgatttaattggctaatgatgggttcatgatcatgcctgcctttggggctggaatgctggatggagatgggagacagagacaggattgtagagatgttttttttttcatttcttacgagagtttcgctgctgtcgtgagatctgattcgataatagagagaagatgaagatcgaacaatttgtgcctttcgttgtgcttgtgcacgtatattctcct

SEQ ID NO: 30749 - protein, 230 aa, Zea mays subsp. mays
  peptide (1)..(230): Ceres Seq. ID no. 12402127
INSHSTTKPIGRQQTQANRQHPRRRKREKRACSGPPLDPHGHGGSGRQEPEVRAGLRGAEPVRQGRAAAAAADGGPARPGHHDPEPDARRGRRRRRAAGGGRRWGRGDARARPRRGAAAHHLLRRQGGGVRGLPGGEGGRGHAPRGRRRPAHRPEGVAAAVPGQAQRSPRRARALRPPVVPRGGGQAGLGLGLGLLARAPQHGSRPPHHRAVIYWIDLDQWRFNWLMMGS

SEQ ID NO: 30750 - protein, 172 aa, Zea mays subsp. mays
  peptide (1)..(172): Ceres Seq. ID no. 12402128
  misc_feature (73)..(107): Pfam Name: Pfam Description:  ZIM motif
  misc_feature (7)..(163): NCBI GI NO: 24960746 NR Description: Unknown protein
  misc_feature (3)..(145): NCBI GI NO: 37533948 NR Description: hypothetical protein
  misc_feature (3)..(143): NCBI GI NO: 37533958 NR Description: unknown protein
  misc_feature (1)..(107): NCBI GI NO: 29788814 NR Description: unknown protein
  misc_feature (110)..(160): NCBI GI NO: 29788814 NR Description: unknown protein
  misc_feature (3)..(162): NCBI GI NO: 24960744 NR Description: Unknown protein
  misc_feature (1)..(118): NCBI GI NO: 24960745 NR Description: Unknown protein
  misc_feature (110)..(161): NCBI GI NO: 18410737 NR Description: expressed protein; protein id: At1g74950
  misc_feature (110)..(161): NCBI GI NO: 21592605 NR Description: unknown [Arabidopsis thaliana]
  misc_feature (79)..(106): NCBI GI NO: 18410737 NR Description: expressed protein; protein id: At1g74950
MAMAAADGKSRRFALACGVLSQYVKAEQQQQQQMAAPRAPATTTLSLMPGADVGADEQQEAAAAGAEEMPGPAPAAAPPLTIFYGGRVVVFEDFPAEKAAEVMRLAAGDDLPIARKASLQRFLAKRKDRLVERAPYARPSSPAEAVKPASGSASASWLGLRSTEADRLTIAL

SEQ ID NO: 30751 - protein, 170 aa, Zea mays subsp. mays
  peptide (1)..(170): Ceres Seq. ID no. 12402129
  misc_feature (71)..(105): Pfam Name: Pfam Description:  ZIM motif
  misc_feature (5)..(161): NCBI GI NO: 24960746 NR Description: Unknown protein
  misc_feature (1)..(143): NCBI GI NO: 37533948 NR Description: hypothetical protein
  misc_feature (1)..(141): NCBI GI NO: 37533958 NR Description: unknown protein
  misc_feature (1)..(105): NCBI GI NO: 29788814 NR Description: unknown protein
  misc_feature (108)..(158): NCBI GI NO: 29788814 NR Description: unknown protein
  misc_feature (1)..(160): NCBI GI NO: 24960744 NR Description: Unknown protein
  misc_feature (1)..(116): NCBI GI NO: 24960745 NR Description: Unknown protein
  misc_feature (108)..(159): NCBI GI NO: 18410737 NR Description: expressed protein; protein id: At1g74950
  misc_feature (108)..(159): NCBI GI NO: 21592605 NR Description: unknown [Arabidopsis thaliana]
  misc_feature (77)..(104): NCBI GI NO: 18410737 NR Description: expressed protein; protein id: At1g74950
MAAADGKSRRFALACGVLSQYVKAEQQQQQQMAAPRAPATTTLSLMPGADVGADEQQEAAAAGAEEMPGPAPAAAPPLTIFYGGRVVVFEDFPAEKAAEVMRLAAGDDLPIARKASLQRFLAKRKDRLVERAPYARPSSPAEAVKPASGSASASWLGLRSTEADRLTIAL

SEQ ID NO: 30752 - DNA, 1568 bp, Zea mays subsp. mays; identical to SEQ ID NO: 27283
  misc_feature (1)..(1568): Ceres Seq. ID no. 12409445

SEQ ID NO: 30753 - protein, 357 aa, Zea mays subsp. mays; identical to SEQ ID NO: 27284
  peptide (1)..(357): Ceres Seq. ID no. 12409446
  misc_feature (1)..(356): NCBI GI NO: 15241535 NR Description: serine/threonine protein kinase
  misc_feature (1)..(356): NCBI GI NO: 21593866 NR Description: serine/threonine protein kinase
  misc_feature (77)..(356): NCBI GI NO: 30682270 NR Description: serine/threonine protein kinase, putative
  misc_feature (1)..(31): NCBI GI NO: 30682270 NR Description: serine/threonine protein kinase, putative
  misc_feature (85)..(351): NCBI GI NO: 10640971 NR Description: F5-2 [Homo sapiens]
  misc_feature (85)..(351): NCBI GI NO: 3372666 NR Description: myristilated and palmitylated serine-threoninekinase MPSK
  misc_feature (85)..(351): NCBI GI NO: 27465615 NR Description: serine/threonine kinase 16 [Rattus norvegicus]
  misc_feature (65)..(351): NCBI GI NO: 6714558 NR Description: F5-2 [Mus musculus]
  misc_feature (65)..(351): NCBI GI NO: 6729083 NR Description: F5-2 [Mus musculus]
  misc_feature (85)..(351): NCBI GI NO: 4505837 NR Description: serine/threonine kinase 16

SEQ ID NO: 30754 - protein, 197 aa, Zea mays subsp. mays; identical to SEQ ID NO: 27285
  peptide (1)..(197): Ceres Seq. ID no. 12409447
  misc_feature (1)..(196): NCBI GI NO: 15241535 NR Description: serine/threonine protein kinase
  misc_feature (1)..(196): NCBI GI NO: 21593866 NR Description: serine/threonine protein kinase
  misc_feature (1)..(196): NCBI GI NO: 30682270 NR Description: serine/threonine protein kinase, putative
  misc_feature (1)..(191): NCBI GI NO: 10640971 NR Description: F5-2 [Homo sapiens]
  misc_feature (1)..(191): NCBI GI NO: 3372666 NR Description: myristilated and palmitylated serine-threoninekinase MPSK
  misc_feature (1)..(191): NCBI GI NO: 27465615 NR Description: serine/threonine kinase 16 [Rattus norvegicus]
  misc_feature (1)..(191): NCBI GI NO: 6714558 NR Description: F5-2 [Mus musculus]
  misc_feature (1)..(191): NCBI GI NO: 6729083 NR Description: F5-2 [Mus musculus]
  misc_feature (1)..(191): NCBI GI NO: 4505837 NR Description: serine/threonine kinase 16
  misc_feature (1)..(191): NCBI GI NO: 13626604 NR Description: SERINE/THREONINE PROTEIN KINASE 16

SEQ ID NO: 30755 - DNA, 1317 bp, Zea mays subsp. mays
  misc_feature (1)..(1317): Ceres Seq. ID no. 12406590
gcacgagaccattacctagaacatcctaatcgaaaaaaaaataactcgtcggagtcagtacggtgctctctccgtctcagccgtcgccaactaatctatccccgatcacgcggcgaaccgccgcaacaccactatcaccaatcgcaatggagaaccctccaccgtcctccgccggtccgtactcggcgcccgcgccggcagcgcagcatcaggacgcggcgaaggaggatcaggacgtggcgcagctcgtgctcaacctctgcatcccggagctccgcgagaaggccatcatcatcctttccaagaagcgagaaaaatgtgaagatcttgctctactactatggcactcttttggtacaatggctgcactactccaggaaattgtgtcaatttatcgattactttcacccccacaattatcttttgaccaatcaactcgagtctgcaatgtgcttgtactccttaagtgtgtggcatcacaccctgatactaggatgccatttttaaatgcacagtttccactgtacctgtaccctttcttgaacactacctacaaaacaagagaatatgagttcttgaggattagtagcctgagcgtgatcggtgctcttgtgaagtccgatgatcatgaagtcattgtgaatttgctgtgttctgaaatagttcctttgtgtctgcgtgctattgagatgggcagtgaactttcaaaaaaggtggccacttttattctccaaaagattatgcttgacgacacagggcttgcgtacgtatgcgcttcttctgaacgtttctgcgctgttgccaatgtgctagctcagatggtcgaagcacttgctgaacagccttccccgaggacgcttaagaacacaatccgctgctacctcaggctgacagatgatcgaagggcctgccaagcgttacgtgactacctccccatcgcgttgagggacgggacattcaacggcttaatcgaggtcgatctcacagcaaggctatggctccaccagctgctgcataacgtcatgatgtcagacagtggaggcggccctcgccctgccccgggtcctgtgatggggatgtgaatgaagccggtcgccacgcctcatcatctgtgaagatccaagagcgtgcgttgtagctgtaggtagcgaagtagtaacccacagggaagggaaagcaatcgtggtggtgttcacacccttttggagggaacaaacacaaacagctgagctttgtgccgtttggatggcgaagaagcaacgataacacgcgtcttcttgatacaagtctggctggccattggtcgttgggattttg

SEQ ID NO: 30756 - protein, 311 aa, Zea mays subsp. mays
  peptide (1)..(311): Ceres Seq. ID no. 12406591
  misc_feature (33)..(295): Pfam Name: Pfam Description:  Cell differentiation family, Rcd1-like
  misc_feature (1)..(311): NCBI GI NO: 34897134 NR Description: putative cell differentiation protein
  misc_feature (1)..(300): NCBI GI NO: 15232369 NR Description: putative cell differentiation protein
  misc_feature (11)..(300): NCBI GI NO: 9294407 NR Description: RCD1 [Arabidopsis thaliana]
  misc_feature (1)..(300): NCBI GI NO: 21537250 NR Description: putative cell differentiation protein
  misc_feature (1)..(311): NCBI GI NO: 34899762 NR Description: putative cell differentiation protein
  misc_feature (1)..(292): NCBI GI NO: 15239962 NR Description: putative protein; protein id: At5g12980.1
  misc_feature (13)..(303): NCBI GI NO: 38174128 NR Description: Unknown (protein for MGC:76003)
  misc_feature (13)..(303): NCBI GI NO: 10946722 NR Description: rcd1
  misc_feature (13)..(303): NCBI GI NO: 4885579 NR Description: RCD1 required for cell differentiation1 homolog
  misc_feature (20)..(292): NCBI GI NO: 20129055 NR Description: CG14213-PB [Drosophila melanogaster]
MENPPPSSAGPYSAPAPAAQHQDAAKEDQDVAQLVLNLCIPELREKAIIILSKKREKCEDLALLLWHSFGTMAALLQEIVSIYRLLSPPQLSFDQSTRVCNVLVLLKCVASHPDTRMPFLNAQFPLYLYPFLNTTYKTREYEFLRISSLSVIGALVKSDDHEVIVNLLCSEIVPLCLRAIEMGSELSKKVATFILQKIMLDDTGLAYVCASSERFCAVANVLAQMVEALAEQPSPRTLKNTIRCYLRLTDDRRACQALRDYLPIALRDGTFNGLIEVDLTARLWLHQLLHNVMMSDSGGGPRPAPGPVMGM

SEQ ID NO: 30757 - protein, 240 aa, Zea mays subsp. mays
  peptide (1)..(240): Ceres Seq. ID no. 12406592
  misc_feature (1)..(224): Pfam Name: Pfam Description:  Cell differentiation family, Rcd1-like
  misc_feature (1)..(240): NCBI GI NO: 34897134 NR Description: putative cell differentiation protein
  misc_feature (1)..(229): NCBI GI NO: 15232369 NR Description: putative cell differentiation protein
  misc_feature (1)..(229): NCBI GI NO: 9294407 NR Description: RCD1 [Arabidopsis thaliana]
  misc_feature (1)..(229): NCBI GI NO: 21537250 NR Description: putative cell differentiation protein
  misc_feature (1)..(240): NCBI GI NO: 34899762 NR Description: putative cell differentiation protein
  misc_feature (1)..(221): NCBI GI NO: 15239962 NR Description: putative protein; protein id: At5g12980.1
  misc_feature (1)..(232): NCBI GI NO: 38174128 NR Description: Unknown (protein for MGC:76003)
  misc_feature (1)..(232): NCBI GI NO: 10946722 NR Description: rcd1
  misc_feature (1)..(232): NCBI GI NO: 4885579 NR Description: RCD1 required for cell differentiation1 homolog
  misc_feature (1)..(221): NCBI GI NO: 20129055 NR Description: CG14213-PB [Drosophila melanogaster]
MAALLQEIVSIYRLLSPPQLSFDQSTRVCNVLVLLKCVASHPDTRMPFLNAQFPLYLYPFLNTTYKTREYEFLRISSLSVIGALVKSDDHEVIVNLLCSEIVPLCLRAIEMGSELSKKVATFILQKIMLDDTGLAYVCASSERFCAVANVLAQMVEALAEQPSPRTLKNTIRCYLRLTDDRRACQALRDYLPIALRDGTFNGLIEVDLTARLWLHQLLHNVMMSDSGGGPRPAPGPVMGM

SEQ ID NO: 30758 - protein, 195 aa, Zea mays subsp. mays
  peptide (1)..(195): Ceres Seq. ID no. 12406593
  misc_feature (1)..(179): Pfam Name: Pfam Description:  Cell differentiation family, Rcd1-like
  misc_feature (1)..(195): NCBI GI NO: 34897134 NR Description: putative cell differentiation protein
  misc_feature (1)..(184): NCBI GI NO: 15232369 NR Description: putative cell differentiation protein
  misc_feature (1)..(184): NCBI GI NO: 9294407 NR Description: RCD1 [Arabidopsis thaliana]
  misc_feature (1)..(184): NCBI GI NO: 21537250 NR Description: putative cell differentiation protein
  misc_feature (1)..(195): NCBI GI NO: 34899762 NR Description: putative cell differentiation protein
  misc_feature (1)..(176): NCBI GI NO: 15239962 NR Description: putative protein; protein id: At5g12980.1
  misc_feature (1)..(187): NCBI GI NO: 38174128 NR Description: Unknown (protein for MGC:76003)
  misc_feature (1)..(187): NCBI GI NO: 10946722 NR Description: rcd1
  misc_feature (1)..(187): NCBI GI NO: 4885579 NR Description: RCD1 required for cell differentiation1 homolog
  misc_feature (1)..(176): NCBI GI NO: 20129055 NR Description: CG14213-PB [Drosophila melanogaster]
MPFLNAQFPLYLYPFLNTTYKTREYEFLRISSLSVIGALVKSDDHEVIVNLLCSEIVPLCLRAIEMGSELSKKVATFILQKIMLDDTGLAYVCASSERFCAVANVLAQMVEALAEQPSPRTLKNTIRCYLRLTDDRRACQALRDYLPIALRDGTFNGLIEVDLTARLWLHQLLHNVMMSDSGGGPRPAPGPVMGM

SEQ ID NO: 30759 - DNA, 1097 bp, Zea mays subsp. mays
  misc_feature (1)..(1097): Ceres Seq. ID no. 12363241
gcacgagaccattacctagaacatcctaatcgaaaagatcacgtactggcacgagctagcgagcagactcactcgaacacacactgaccaaccgctcctctctccttccgttccgtcattccgtgtgcagcagacgcggcgttctgcgtgtgcaagacgggcgtgcccgaccaggcgatgcaggcggcgatcgactacgcctgcgccaagggggccgactgcgcctccgcctccaagggcgcgccctgctacggcaacggcaacaaggtggccgtctgctcctacatctgcaacagctactaccagagccgcagcgccacgggcgccacctgcgacttcaacggcgtcgccacgctcaccggcaccgaccccagctccggcacctgcaagttcgcctccggccccagcagcgcaggcaccggcggtggcatgggcgctggcgcgggtaccggcggtggcatgggcgctggcgctggcaccggcgccgggacaggcgttggcaccggagcaggcacgggcatgggcactgggacggggaccagcaccggcaccggcgccggcgcaggggtcgcgacccccgggagcgccctgagcccaccgttcggcggcactggcgcgtacggcccgtcaggggcaggcagcacggactacaacgacgccgtcgccccgcgcgccgccgggctgcacgtggtggctgccctcgctctcgccgtcgccgtcgccgcacctctccaccgctaggggcggtgccatggcaactgggagctggcgggcacgacactcgcagacgggatcccgcctcggcggcccgccagcgcgggctctggtcgatgtccggcgttagtgcgtgcgcgtacctgatgaagtgatgatgggttttgatcgaccagccgtcagcgtagtgcggtcacggggtttacagtgttattcgaactgacctctctgcttcctcgtgctagtagtggtggctgccatgtgtgtgtgctgctggtagagaactagggattcttttttttttctgtcgcttccttgcttatatgtcccgtcgtgttaggctatgtttactatgcagtgtttggtggtggccgctttccatg

SEQ ID NO: 30760 - protein, 187 aa, Zea mays subsp. mays
  peptide (1)..(187): Ceres Seq. ID no. 12363242
  misc_feature (75)..(160): Pfam Name: Pfam Description:  Dehydrin
  misc_feature (1)..(130): NCBI GI NO: 22775658 NR Description: contains ESTs C91599
  misc_feature (1)..(179): NCBI GI NO: 31249724 NR Description: putative glucanase
  misc_feature (1)..(185): NCBI GI NO: 18409239 NR Description: unknown protein; protein id: At1g69295
  misc_feature (1)..(185): NCBI GI NO: 21553768 NR Description: unknown [Arabidopsis thaliana]
  misc_feature (1)..(72): NCBI GI NO: 34909796 NR Description: P0403C05.4
  misc_feature (1)..(154): NCBI GI NO: 25404810 NR Description: unknown protein, 45065-49536
  misc_feature (1)..(141): NCBI GI NO: 33146901 NR Description: beta-1,3-glucanase-like protein
  misc_feature (1)..(139): NCBI GI NO: 30697478 NR Description: glycosyl hydrolase family 17
  misc_feature (1)..(139): NCBI GI NO: 21592859 NR Description: unknown [Arabidopsis thaliana]
  misc_feature (1)..(139): NCBI GI NO: 15241485 NR Description: glycosyl hydrolase family 17; protein id:At5g08000
MQAAIDYACAKGADCASASKGAPCYGNGNKVAVCSYICNSYYQSRSATGATCDFNGVATLTGTDPSSGTCKFASGPSSAGTGGGMGAGAGTGGGMGAGAGTGAGTGVGTGAGTGMGTGTGTSTGTGAGAGVATPGSALSPPFGGTGAYGPSGAGSTDYNDAVAPRAAGLHVVAALALAVAVAAPLHR

SEQ ID NO: 30761 - protein, 103 aa, Zea mays subsp. mays
  peptide (1)..(103): Ceres Seq. ID no. 12363243
  misc_feature (1)..(76): Pfam Name: Pfam Description:  Dehydrin
  misc_feature (1)..(46): NCBI GI NO: 22775658 NR Description: contains ESTs C91599
  misc_feature (1)..(95): NCBI GI NO: 31249724 NR Description: putative glucanase
  misc_feature (1)..(101): NCBI GI NO: 18409239 NR Description: unknown protein; protein id: At1g69295
  misc_feature (1)..(101): NCBI GI NO: 21553768 NR Description: unknown [Arabidopsis thaliana]
  misc_feature (1)..(70): NCBI GI NO: 25404810 NR Description: unknown protein, 45065-49536
  misc_feature (1)..(57): NCBI GI NO: 33146901 NR Description: beta-1,3-glucanase-like protein
  misc_feature (1)..(55): NCBI GI NO: 30697478 NR Description: glycosyl hydrolase family 17
  misc_feature (1)..(55): NCBI GI NO: 21592859 NR Description: unknown [Arabidopsis thaliana]
  misc_feature (1)..(55): NCBI GI NO: 15241485 NR Description: glycosyl hydrolase family 17; protein id:At5g08000
  misc_feature (1)..(99): NCBI GI NO: 34912962 NR Description: beta-1,3 glucanase-like protein
MGAGAGTGGGMGAGAGTGAGTGVGTGAGTGMGTGTGTSTGTGAGAGVATPGSALSPPFGGTGAYGPSGAGSTDYNDAVAPRAAGLHVVAALALAVAVAAPLHR

SEQ ID NO: 30762 - protein, 93 aa, Zea mays subsp. mays
  peptide (1)..(93): Ceres Seq. ID no. 12363244
  misc_feature (1)..(66): Pfam Name: Pfam Description:  Dehydrin
  misc_feature (1)..(36): NCBI GI NO: 22775658 NR Description: contains ESTs C91599
  misc_feature (1)..(85): NCBI GI NO: 31249724 NR Description: putative glucanase
  misc_feature (1)..(91): NCBI GI NO: 18409239 NR Description: unknown protein; protein id: At1g69295
  misc_feature (1)..(91): NCBI GI NO: 21553768 NR Description: unknown [Arabidopsis thaliana]
  misc_feature (1)..(60): NCBI GI NO: 25404810 NR Description: unknown protein, 45065-49536
  misc_feature (1)..(47): NCBI GI NO: 33146901 NR Description: beta-1,3-glucanase-like protein
  misc_feature (1)..(45): NCBI GI NO: 30697478 NR Description: glycosyl hydrolase family 17
  misc_feature (1)..(45): NCBI GI NO: 21592859 NR Description: unknown [Arabidopsis thaliana]
  misc_feature (1)..(45): NCBI GI NO: 15241485 NR Description: glycosyl hydrolase family 17; protein id:At5g08000
  misc_feature (1)..(89): NCBI GI NO: 34912962 NR Description: beta-1,3 glucanase-like protein
MGAGAGTGAGTGVGTGAGTGMGTGTGTSTGTGAGAGVATPGSALSPPFGGTGAYGPSGAGSTDYNDAVAPRAAGLHVVAALALAVAVAAPLHR

SEQ ID NO: 30763 - DNA, 846 bp, Zea mays subsp. mays
  misc_feature (1)..(846): Ceres Seq. ID no. 12594975
attatccgaagttccgaacccaagccaagccccagggtccgaccgcagaaccgacccaaaatgtcgcccgcctgctccatgctcaccaccgcgtcgctctcctccccgctcccagccccgcgcctccgcgccgccgccgccttcgctccgccgcgccgcgcggcagtcacactcgtcgtgcgcgcggcgtccgcatcttccaagtcccctgccacggcggaggcggccccgaagaagaagagggcgaccggcatcacccagccgaagtccgtgtcgccggcgctgcaggcaatcgtgggcgacccggttattccccgcaccgaggtcctcaagcgcctctgggcctatatcaaggagcataacctccaggatccctctgataaaaaggtggtggtttgtgatgagaagctgaaggtcctgttcgcggggcgggagcgagtgggattccttgagatcgccaagcttctcaaccctcacttcgtgaagtgatgaggaggagccaggccacttccaggaatcgagttagcttatatggttggttggttacttgtggctggcctagagggtgcgcgtgcgttgggttttggtagcctgagttggctcgctcgactttgtagaatgctgttgttagcttttattagtagccttcagctcgtagcctggtatgcagttagcgtgtgtggtgttctgctatggtttaagtttaaccactgtccatagtcagtcaatgttagcttccttgtccttgcaatggatgttgctgtgtgaattatggtccaacatggattggttgctctgctatggtttagtcactgcccagtcagtctatatatattttttgatggt

SEQ ID NO: 30764 - protein, 162 aa, Zea mays subsp. mays
  peptide (1)..(162): Ceres Seq. ID no. 12594976
  misc_feature (24)..(162): NCBI GI NO: 14488372 NR Description: hypothetical protein
  misc_feature (30)..(161): NCBI GI NO: 15235320 NR Description: putative protein; protein id: At4g34290
  misc_feature (30)..(161): NCBI GI NO: 14423526 NR Description: putative protein [Arabidopsis thaliana]
  misc_feature (34)..(161): NCBI GI NO: 21553903 NR Description: unknown [Arabidopsis thaliana]
  misc_feature (28)..(161): NCBI GI NO: 18397658 NR Description: expressed protein; protein id: At2g14880
  misc_feature (28)..(161): NCBI GI NO: 21593713 NR Description: unknown [Arabidopsis thaliana]
  misc_feature (29)..(161): NCBI GI NO: 19698859 NR Description: unknown protein [Arabidopsis thaliana]
  misc_feature (57)..(162): NCBI GI NO: 33667910 NR Description: SWIb domain-containing protein [Solanum chacoense]
  misc_feature (21)..(162): NCBI GI NO: 21593643 NR Description: unknown [Arabidopsis thaliana]
  misc_feature (21)..(162): NCBI GI NO: 18396594 NR Description: expressed protein; protein id: At3g03590
IIRSSEPKPSPRVRPQNRPKMSPACSMLTTASLSSPLPAPRLRAAAAFAPPRRAAVTLVVRAASASSKSPATAEAAPKKKRATGITQPKSVSPALQAIVGDPVIPRTEVLKRLWAYIKEHNLQDPSDKKVVVCDEKLKVLFAGRERVGFLEIAKLLNPHFVK

SEQ ID NO: 30765 - protein, 142 aa, Zea mays subsp. mays
  peptide (1)..(142): Ceres Seq. ID no. 12594977
  misc_feature (4)..(142): NCBI GI NO: 14488372 NR Description: hypothetical protein
  misc_feature (10)..(141): NCBI GI NO: 15235320 NR Description: putative protein; protein id: At4g34290
  misc_feature (10)..(141): NCBI GI NO: 14423526 NR Description: putative protein [Arabidopsis thaliana]
  misc_feature (14)..(141): NCBI GI NO: 21553903 NR Description: unknown [Arabidopsis thaliana]
  misc_feature (8)..(141): NCBI GI NO: 18397658 NR Description: expressed protein; protein id: At2g14880
  misc_feature (8)..(141): NCBI GI NO: 21593713 NR Description: unknown [Arabidopsis thaliana]
  misc_feature (9)..(141): NCBI GI NO: 19698859 NR Description: unknown protein [Arabidopsis thaliana]
  misc_feature (37)..(142): NCBI GI NO: 33667910 NR Description: SWIb domain-containing protein [Solanum chacoense]
  misc_feature (1)..(142): NCBI GI NO: 21593643 NR Description: unknown [Arabidopsis thaliana]
  misc_feature (1)..(142): NCBI GI NO: 18396594 NR Description: expressed protein; protein id: At3g03590
MSPACSMLTTASLSSPLPAPRLRAAAAFAPPRRAAVTLVVRAASASSKSPATAEAAPKKKRATGITQPKSVSPALQAIVGDPVIPRTEVLKRLWAYIKEHNLQDPSDKKVVVCDEKLKVLFAGRERVGFLEIAKLLNPHFVK

SEQ ID NO: 30766 - protein, 136 aa, Zea mays subsp. mays
  peptide (1)..(136): Ceres Seq. ID no. 12594978
  misc_feature (1)..(136): NCBI GI NO: 14488372 NR Description: hypothetical protein
  misc_feature (4)..(135): NCBI GI NO: 15235320 NR Description: putative protein; protein id: At4g34290
  misc_feature (4)..(135): NCBI GI NO: 14423526 NR Description: putative protein [Arabidopsis thaliana]
  misc_feature (8)..(135): NCBI GI NO: 21553903 NR Description: unknown [Arabidopsis thaliana]
  misc_feature (2)..(135): NCBI GI NO: 18397658 NR Description: expressed protein; protein id: At2g14880
  misc_feature (2)..(135): NCBI GI NO: 21593713 NR Description: unknown [Arabidopsis thaliana]
  misc_feature (3)..(135): NCBI GI NO: 19698859 NR Description: unknown protein [Arabidopsis thaliana]
  misc_feature (31)..(136): NCBI GI NO: 33667910 NR Description: SWIb domain-containing protein [Solanum chacoense]
  misc_feature (1)..(136): NCBI GI NO: 21593643 NR Description: unknown [Arabidopsis thaliana]
  misc_feature (1)..(136): NCBI GI NO: 18396594 NR Description: expressed protein; protein id: At3g03590
MLTTASLSSPLPAPRLRAAAAFAPPRRAAVTLVVRAASASSKSPATAEAAPKKKRATGITQPKSVSPALQAIVGDPVIPRTEVLKRLWAYIKEHNLQDPSDKKVVVCDEKLKVLFAGRERVGFLEIAKLLNPHFVK

SEQ ID NO: 30767 - DNA, 1280 bp, Zea mays subsp. mays
  misc_feature (1)..(1280): Ceres Seq. ID no. 13492847
aaatccttctctcggctacctccaccactgctctgctcagctcgaacgaacaaaaagaactcccctcggccctctcctcttgtgcttctgcttccccaaccgagtctcctcaaccccaggcactcgccctctttcccctcgcctcggcccgcgactccgatgccgccgccgctcctcgagccgcgcgactacctcggcgccggcgccacctcgtcgtgctgctcgtcgtcctgctcctccggccgcgagggcgcggggccccacctcgcgctgcggctcgggcttccggggtccgacgactcccccggccgcggcgcggacgcggagcacgcccgcgcccacgtcgacgccgcgctcaccctcggccccgcccccgcccccgcccccgcgcctcccaggggcagcgccaagcgcgggttcgccgactccctcgaccggtccgcgaagcgggacggcgttgccgcggatgacgctgctgggggcgtcacacgggtagctgaagctgctgccggagctccgcccgctgccaaggcacaagttgttggatggccgcctgttaggagctaccggaagaataccctagctgccagtgccacaaagacaaatgggggagatgaaggtaggagtgaggcgggatgctgttatgtcaaggtcagcatggatggagccccatacctaaggaaggtggacctcaagacctattcaagctatgaggatctctcgcttggtctggagaaaatgttcagttgcttcatcactggtcaaaacagttcatgcaagacatcaagaagggataggcttactgatggttctagggctgatgcccttcaggaccaagaatatgtcctcacttacgaagataaagatgctgactggatgctcgttggtgatctgccctgggacttgttcaccacattttgccggaaacttaggatcatgagaggctctgatgctgctggcatggctcctccaagaccaccggaacagacagttcggaacaaatgagggcggacagcttacttacctggcgctgaactgaagggagagcgacgctgccttggtcaggccttctttcacttgtgcagtgggaactgcgtcctgctgtctcggacgcccattttgcccacgagctggtcgtcacgtgctgtcgctttttgtctgggaaagatagcgtactgcttgctgtatgatactttcatctgtgttcggaagtttgtagcgcttcatatcctggaagggagtaaagaaaatgtccatgctgtccggtgagaatttcttcc

SEQ ID NO: 30768 - protein, 334 aa, Zea mays subsp. mays
  peptide (1)..(334): Ceres Seq. ID no. 13492848
  misc_feature (91)..(323): Pfam Name: Pfam Description:  AUX/IAA family
  misc_feature (54)..(334): NCBI GI NO: 34911088 NR Description: OJ1117_G01.11
  misc_feature (137)..(323): NCBI GI NO: 15227275 NR Description: auxin-responsive protein IAA8
  misc_feature (173)..(333): NCBI GI NO: 20257219 NR Description: auxin-regulated protein [Zinnia elegans]
  misc_feature (168)..(323): NCBI GI NO: 25989504 NR Description: Aux/IAA protein [Solanum tuberosum]
  misc_feature (50)..(333): NCBI GI NO: 34904314 NR Description: unnamed protein product
  misc_feature (137)..(321): NCBI GI NO: 30681782 NR Description: auxin-responsive protein IAA8
  misc_feature (161)..(323): NCBI GI NO: 7442237 NR Description: GH1 protein - soybean (fragment)
  misc_feature (126)..(323): NCBI GI NO: 20269051 NR Description: aux/IAA protein
  misc_feature (170)..(323): NCBI GI NO: 16610193 NR Description: IAA9 protein [Nicotiana tabacum]
  misc_feature (170)..(323): NCBI GI NO: 30698145 NR Description: auxin-responsive protein IAA9
KSFSRLPPPLLCSARTNKKNSPRPSPLVLLLPQPSLLNPRHSPSFPSPRPATPMPPPLLEPRDYLGAGATSSCCSSSCSSGREGAGPHLALRLGLPGSDDSPGRGADAEHARAHVDAALTLGPAPAPAPAPPRGSAKRGFADSLDRSAKRDGVAADDAAGGVTRVAEAAAGAPPAAKAQVVGWPPVRSYRKNTLAASATKTNGGDEGRSEAGCCYVKVSMDGAPYLRKVDLKTYSSYEDLSLGLEKMFSCFITGQNSSCKTSRRDRLTDGSRADALQDQEYVLTYEDKDADWMLVGDLPWDLFTTFCRKLRIMRGSDAAGMAPPRPPEQTVRNK

SEQ ID NO: 30769 - protein, 281 aa, Zea mays subsp. mays
  peptide (1)..(281): Ceres Seq. ID no. 13492849
  misc_feature (38)..(270): Pfam Name: Pfam Description:  AUX/IAA family
  misc_feature (1)..(281): NCBI GI NO: 34911088 NR Description: OJ1117_G01.11
  misc_feature (84)..(270): NCBI GI NO: 15227275 NR Description: auxin-responsive protein IAA8
  misc_feature (120)..(280): NCBI GI NO: 20257219 NR Description: auxin-regulated protein [Zinnia elegans]
  misc_feature (115)..(270): NCBI GI NO: 25989504 NR Description: Aux/IAA protein [Solanum tuberosum]
  misc_feature (1)..(280): NCBI GI NO: 34904314 NR Description: unnamed protein product
  misc_feature (84)..(268): NCBI GI NO: 30681782 NR Description: auxin-responsive protein IAA8
  misc_feature (108)..(270): NCBI GI NO: 7442237 NR Description: GH1 protein - soybean (fragment)
  misc_feature (73)..(270): NCBI GI NO: 20269051 NR Description: aux/IAA protein
  misc_feature (117)..(270): NCBI GI NO: 16610193 NR Description: IAA9 protein [Nicotiana tabacum]
  misc_feature (117)..(270): NCBI GI NO: 30698145 NR Description: auxin-responsive protein IAA9
MPPPLLEPRDYLGAGATSSCCSSSCSSGREGAGPHLALRLGLPGSDDSPGRGADAEHARAHVDAALTLGPAPAPAPAPPRGSAKRGFADSLDRSAKRDGVAADDAAGGVTRVAEAAAGAPPAAKAQVVGWPPVRSYRKNTLAASATKTNGGDEGRSEAGCCYVKVSMDGAPYLRKVDLKTYSSYEDLSLGLEKMFSCFITGQNSSCKTSRRDRLTDGSRADALQDQEYVLTYEDKDADWMLVGDLPWDLFTTFCRKLRIMRGSDAAGMAPPRPPEQTVRNK

SEQ ID NO: 30770 - DNA, 1466 bp, Zea mays subsp. mays
  misc_feature (1)..(1466): Ceres Seq. ID no. 12578918
gcacgagaccattacctagaacatcctaatcaaaagcattgtggctcctcacttccgcgccgccacccccttcaggtaaggaagaggaggagggcaggatgtcgcaccgtaagttcgagcacccgaggcacggctccctcggcttccttcccaggaagcgctcctcccgccaccgcggcaaggtgaagtcattccccagggatgaccccaagaagccttgccatctcactgccttccttggctacaaggctggcatgactcacattgtccgtgaggttgagaagccaggatccaaactccataagaaggaaacttgtgaggctgttaccatcattgaaacccctcctcttgtcattgttgggctcgtggcatatgtgaagactcctcgtggcctccgcacactcaactctgtttgggcccaacatcttagcgaagaagtgaggagaaggttttacaagaactggtgcaagagcaagaagaaggctttcacaaagtatgctctcaaatatgaaaatgatgctggcaagaaggaaattcagctgcagcttgagaagatgaagaaatatgcttctgttatccgtgtcattgctcatacccagattaggaagatgaagggtttgaagcagaagaaggctcacctgatggagattcaggtcaatggtggtaccattgctgacaaggtggactacggctacaaattttttgagaaagaggtccctgttgatgctgtcttccagaaggatgagatgattgacatcattggtgtgaccaaaggtaaaggttatgagggcgtggtcactcgttggggtgtcacccgccttccccgcaaaacccacaggggtctccgcaaggttgcttgtatcggtgcatggcatcctgctagggtctcctatacagttgcccgtgctggtcagaacgggtaccaccaccgcaccgagatgaacaagaaggtttacaagatcggcaaggctggacaagagacccacgatgcctccacagagtttgacaggaccgagaaggacatcactcccatgggtggcttcccccactatggtatcgtgaagggtgactacctgatgatcaagggatgctgtgtgggtccaaagaagagggtggtgaccctccgccagtccctcctgaagcagacttcccggctggcgctggaggagatcaagctcaagttcatcgacacatcgtccaaatttgggcatggtcgcttccagactaccgatgagaagcagaggttctttggtaagctcaaggcgtaaggtgctgcggtgcagcgacaagtcccatttgtcaaaatcatcaaactgtgaaacttttgtttgttaccttgctgtaccaagttttatagcaggatgatttgggagcatgttctggtcttctatggattgttctacgcttcagaactgcatcgactatgttttgttctattttggttgttttaatgccctaatcattgc

SEQ ID NO: 30771 - protein, 389 aa, Zea mays subsp. mays; identical to SEQ ID NO: 24118
  peptide (1)..(389): Ceres Seq. ID no. 12578919
  misc_feature (50)..(343): Pfam Name: Pfam Description:  Ribosomal protein L3
  misc_feature (1)..(389): NCBI GI NO: 548770 NR Description: 60S RIBOSOMAL PROTEIN L3
  misc_feature (1)..(381): NCBI GI NO: 6688812 NR Description: L3 Ribosomal protein
  misc_feature (1)..(389): NCBI GI NO: 15220533 NR Description: ribosomal protein; protein id: At1g61580.1
  misc_feature (1)..(389): NCBI GI NO: 81658 NR Description: ribosomal protein L3
  misc_feature (1)..(387): NCBI GI NO: 15218306 NR Description: ribosomal protein; protein id: At1g43170
  misc_feature (1)..(387): NCBI GI NO: 23397228 NR Description: putative ribosomal protein [Arabidopsis thaliana]
  misc_feature (1)..(387): NCBI GI NO: 81657 NR Description: ribosomal protein L3
  misc_feature (1)..(388): NCBI GI NO: 7305441 NR Description: ribosomal protein L3; ribosomal protein L3 homolog
  misc_feature (1)..(388): NCBI GI NO: 4506649 NR Description: ribosomal protein L3
  misc_feature (1)..(388): NCBI GI NO: 22203712 NR Description: ribosomal protein L3 [Chlamys farreri]

SEQ ID NO: 30772 - protein, 337 aa, Zea mays subsp. mays; identical to SEQ ID NO: 24119
  peptide (1)..(337): Ceres Seq. ID no. 12578920
  misc_feature (1)..(291): Pfam Name: Pfam Description:  Ribosomal protein L3
  misc_feature (1)..(337): NCBI GI NO: 548770 NR Description: 60S RIBOSOMAL PROTEIN L3
  misc_feature (1)..(329): NCBI GI NO: 6688812 NR Description: L3 Ribosomal protein
  misc_feature (1)..(337): NCBI GI NO: 15220533 NR Description: ribosomal protein; protein id: At1g61580.1
  misc_feature (1)..(337): NCBI GI NO: 81658 NR Description: ribosomal protein L3
  misc_feature (1)..(335): NCBI GI NO: 15218306 NR Description: ribosomal protein; protein id: At1g43170
  misc_feature (1)..(335): NCBI GI NO: 23397228 NR Description: putative ribosomal protein [Arabidopsis thaliana]
  misc_feature (1)..(335): NCBI GI NO: 81657 NR Description: ribosomal protein L3
  misc_feature (1)..(336): NCBI GI NO: 7305441 NR Description: ribosomal protein L3; ribosomal protein L3 homolog
  misc_feature (1)..(336): NCBI GI NO: 4506649 NR Description: ribosomal protein L3
  misc_feature (1)..(336): NCBI GI NO: 22203712 NR Description: ribosomal protein L3 [Chlamys farreri]

SEQ ID NO: 30773 - protein, 237 aa, Zea mays subsp. mays; identical to SEQ ID NO: 24120
  peptide (1)..(237): Ceres Seq. ID no. 12578921
  misc_feature (1)..(191): Pfam Name: Pfam Description:  Ribosomal protein L3
  misc_feature (1)..(237): NCBI GI NO: 548770 NR Description: 60S RIBOSOMAL PROTEIN L3
  misc_feature (1)..(229): NCBI GI NO: 6688812 NR Description: L3 Ribosomal protein
  misc_feature (1)..(237): NCBI GI NO: 15220533 NR Description: ribosomal protein; protein id: At1g61580.1
  misc_feature (1)..(237): NCBI GI NO: 81658 NR Description: ribosomal protein L3
  misc_feature (1)..(235): NCBI GI NO: 15218306 NR Description: ribosomal protein; protein id: At1g43170
  misc_feature (1)..(235): NCBI GI NO: 23397228 NR Description: putative ribosomal protein [Arabidopsis thaliana]
  misc_feature (1)..(235): NCBI GI NO: 81657 NR Description: ribosomal protein L3
  misc_feature (1)..(236): NCBI GI NO: 7305441 NR Description: ribosomal protein L3; ribosomal protein L3 homolog
  misc_feature (1)..(236): NCBI GI NO: 4506649 NR Description: ribosomal protein L3
  misc_feature (1)..(236): NCBI GI NO: 22203712 NR Description: ribosomal protein L3 [Chlamys farreri]

SEQ ID NO: 30774 - DNA, 1013 bp, Zea mays subsp. mays
  misc_feature (1)..(1013): Ceres Seq. ID no. 12356700
aattcgcttctctgtcaacttcacttcctcgtcgacgcctccggcccaccaaccatgccggcggctgcggcggcgcagaggctcctcgcggcgagcacgaaaatcatcggcgttgggcgcaactacatagcccactccaaggagctcggcaatccggtccccaaggagcccgtcctgttcctgaagccgacctcgtcgtttctccacgctgggtggcgtcctcctacctaggggtggtgtcgccggggtagcggccaacggatggagtggtagcggcccagggctccgcttggctcgaaggctctgcacctacgacgagagagatgacagggcactagaggaagaagttgagaagaaatttggatggatattgaagataatcttcctaggaactgctggcctagttggttaccaattctttccatacatgggtgataacctgcttcaacaatctatctcgcttttgcgtgtcaaggatcccttgttcaagcggatgggagcttctcgtttagctcgttttgcagtggatgaccaaagaagaatgaaggtggtagagatagggggagctcaggaactgcttaatgtattggaaggtgctaaagatgataaaacacgaaaagaaactctaaaagctcttgctgcgctttcaaaatctgaagaagctgcaggatttttggacaaggtcggcgcctacgctatagtcagttccactcccgactctcaagaatatgctgagatccaaacttacaagaccagtcttctgacggcatttgatcaactgaagtcatgatgtccaaatgccaatgggtatattaagcaacattttaactctgcactttgccgtggcggttaatgttctagtttcttgaatcgactcaatttatctctagaacatgctggacctcctttgttgaccaagtgggttgctgatggaaatgcatgtctggttcatttgtttcaaacaggacagtacattctttccttctgtgggccaataacaagagctttaattt

SEQ ID NO: 30775 - protein, 120 aa, Zea mays subsp. mays
  peptide (1)..(120): Ceres Seq. ID no. 12356701
  misc_feature (1)..(120): NCBI GI NO: 40538927 NR Description: expressed protein
  misc_feature (1)..(112): NCBI GI NO: 30694398 NR Description: expressed protein [Arabidopsis thaliana]
  misc_feature (23)..(112): NCBI GI NO: 11281187 NR Description: hypothetical protein F18O21
MGDNLLQQSISLLRVKDPLFKRMGASRLARFAVDDQRRMKVVEIGGAQELLNVLEGAKDDKTRKETLKALAALSKSEEAAGFLDKVGAYAIVSSTPDSQEYAEIQTYKTSLLTAFDQLKS

SEQ ID NO: 30776 - protein, 98 aa, Zea mays subsp. mays
  peptide (1)..(98): Ceres Seq. ID no. 12356702
  misc_feature (1)..(98): NCBI GI NO: 40538927 NR Description: expressed protein
  misc_feature (1)..(90): NCBI GI NO: 30694398 NR Description: expressed protein [Arabidopsis thaliana]
  misc_feature (1)..(90): NCBI GI NO: 11281187 NR Description: hypothetical protein F18O21
MGASRLARFAVDDQRRMKVVEIGGAQELLNVLEGAKDDKTRKETLKALAALSKSEEAAGFLDKVGAYAIVSSTPDSQEYAEIQTYKTSLLTAFDQLKS

SEQ ID NO: 30777 - protein, 82 aa, Zea mays subsp. mays
  peptide (1)..(82): Ceres Seq. ID no. 12356703
FASLSTSLPRRRLRPTNHAGGCGGAEAPRGEHENHRRWAQLHSPLQGARQSGPQGARPVPEADLVVSPRWVASSYLGVVSPG

SEQ ID NO: 30778 - DNA, 746 bp, Zea mays subsp. mays
  misc_feature (1)..(746): Ceres Seq. ID no. 12578762
cacaacgatctcaatctccctagcagcagatcctcgtgcaacgcaaagcgctagccttcctactgtcccgatggcccgcacgaagcagacggcgaggaagtccactggcggcaaggcgccaaggaagcagctggccaccaaggcggcgcgcaagtctgccccggcgaccggcggagtgaagaagccccaccgtttccgccccggcaccgtcgcgctccgggagatccgcaagtaccagaagagcacggagctgctgatccgcaagctgccgttccagcgcctggtgcgtgagatcgcccaggacttcaagaccgaccttcgcttccagagctccgccgtcgccgcgctgcaggaggcgtccgaggcctacctcgtcggtctcttcgaggacaccaacctctgcgccattcacgccaagcgcgtcaccatcatgcccaaggacatccagctcgcccgccgtatccgtgtggagagggcctaggcgtcgtggcggtggaggtcgaagtagtagtcgcagtttctgtcatcaccgtctggctagaaggtgtagagatgtgcccgggttctggagtttgggttatcggtcgaatcatgatgtagttggttcttcacagctgtaatttaactatgacgatgccatggcaatgaagttctcagctatgagttcccgtaaaaaaaaaaaaaaaaaatcgggtggacccggtcaacttcaagctcctaagccactgcctgctggtgagcccatc

SEQ ID NO: 30779 - protein, 159 aa, Zea mays subsp. mays
  peptide (1)..(159): Ceres Seq. ID no. 12578763
  misc_feature (40)..(158): Pfam Name: Pfam Description:  Core histone H2A/H2B/H3/H4
  misc_feature (12)..(159): NCBI GI NO: 31210957 NR Description: ENSANGP00000016056 [Anopheles gambiae]
  misc_feature (24)..(159): NCBI GI NO: 15232146 NR Description: histone H3, putative; protein id: At3g27360
  misc_feature (5)..(159): NCBI GI NO: 31239843 NR Description: ENSANGP00000014183 [Anopheles gambiae]
  misc_feature (5)..(159): NCBI GI NO: 31210959 NR Description: ENSANGP00000016066 [Anopheles gambiae]
  misc_feature (24)..(159): NCBI GI NO: 122087 NR Description: Histone H3
  misc_feature (3)..(159): NCBI GI NO: 34858254 NR Description: similar to histone protein Hist2h3c1
  misc_feature (18)..(159): NCBI GI NO: 34876364 NR Description: similar to CG31613-PA [Rattus norvegicus]
  misc_feature (24)..(159): NCBI GI NO: 1362108 NR Description: histone H3 homolog - common tobacco
  misc_feature (24)..(159): NCBI GI NO: 166384 NR Description: histone H3 (H3-1.1)
  misc_feature (2)..(159): NCBI GI NO: 37546835 NR Description: similar to histone protein Hist2h3c1
TTISISLAADPRATQSASLPTVPMARTKQTARKSTGGKAPRKQLATKAARKSAPATGGVKKPHRFRPGTVALREIRKYQKSTELLIRKLPFQRLVREIAQDFKTDLRFQSSAVAALQEASEAYLVGLFEDTNLCAIHAKRVTIMPKDIQLARRIRVERA

SEQ ID NO: 30780 - protein, 136 aa, Zea mays subsp. mays
  peptide (1)..(136): Ceres Seq. ID no. 12578764
  misc_feature (17)..(135): Pfam Name: Pfam Description:  Core histone H2A/H2B/H3/H4
  misc_feature (1)..(136): NCBI GI NO: 31210957 NR Description: ENSANGP00000016056 [Anopheles gambiae]
  misc_feature (1)..(136): NCBI GI NO: 15232146 NR Description: histone H3, putative; protein id: At3g27360
  misc_feature (1)..(136): NCBI GI NO: 31239843 NR Description: ENSANGP00000014183 [Anopheles gambiae]
  misc_feature (1)..(136): NCBI GI NO: 31210959 NR Description: ENSANGP00000016066 [Anopheles gambiae]
  misc_feature (1)..(136): NCBI GI NO: 122087 NR Description: Histone H3
  misc_feature (1)..(136): NCBI GI NO: 34858254 NR Description: similar to histone protein Hist2h3c1
  misc_feature (1)..(136): NCBI GI NO: 34876364 NR Description: similar to CG31613-PA [Rattus norvegicus]
  misc_feature (1)..(136): NCBI GI NO: 1362108 NR Description: histone H3 homolog - common tobacco
  misc_feature (1)..(136): NCBI GI NO: 166384 NR Description: histone H3 (H3-1.1)
  misc_feature (1)..(136): NCBI GI NO: 37546835 NR Description: similar to histone protein Hist2h3c1
MARTKQTARKSTGGKAPRKQLATKAARKSAPATGGVKKPHRFRPGTVALREIRKYQKSTELLIRKLPFQRLVREIAQDFKTDLRFQSSAVAALQEASEAYLVGLFEDTNLCAIHAKRVTIMPKDIQLARRIRVERA

SEQ ID NO: 30781 - DNA, 1476 bp, Zea mays subsp. mays
  misc_feature (1)..(1476): Ceres Seq. ID no. 12349426
gacaaatcctctcttggacaagccgaaccttcgctcgggtgcctcgggttcagccaacctcgcacatggcgcgctgctccgtcgcgaaaccgctctgcgccaccaccgcgactccccgccttacccgtcgctgccggcagctctccgcgaacgccaccaccccggccatggccaccagtaaagcacggttgccggccctaaacaaaccggccaaaccgccgccgcctctcctctcgcgtccgaagctccccgtgcccaccaacaccgccactgacaccactagcggcaaggattgcaccaagaaaccaccgccggaagctacggactcacatccgccctcgtccggcgccggcgacgtgctccgcctgatggacgcgctgggcatccctcccgacgaggacatctacatatccctcctcagggagtgcgccgacgcagcagaggtggcctccgtgcacgcgcacataaccgctcgtcgcgcctccgatggactcccgtcgccggtcgccaaccggctcctgctttcttacccgcgtgtggggacatcgaagctgcccgccgggtgttcgacggaatgcccaccaccaacggcatggcttgggcgaccatggtgtccgcctactcggatggctgcctccaccatgaagcgatgcgtctgttcgcccacatgtgccatagaacgccggtcctggacggcgattgctactcccatgccatcgtggccgtgctgcggtcatgtacccgtgcaggcgagctacgtctcggtgagcaggtacacgctctcgtcgtcaagaaaggcaggatccacggtgacattggcagctcgctagtgcagctgtactgcgatggaggcggttttcacagaagcgcgcggcgagttctcgcgacgacgatgcagcaccactgtcaggaaccagtccctgaggcggcctggacgagcctgatcacatcctgccaccgtgaaagcctactgagcgaggctgtggatgtcttcagggacatggcgtcctcgggcgttccaaggagcagcttctccctgtcgagcatcctcgcggtgttcgcagagtcacaggacccagggtgctgctgcgggcagcaggtgcacgccgacgccatcaagcgcggcgtggacacgaaccagttcgttggctccgggctcatacacatgtacgcgaagcaagggcggctggcggacgccgccagggcgttcgagacgatcggtggcaagcctgacgccgcgtgcttgagtgccctggccatggcctatgctcgcggcggacggtacagagaggccaccagaatcatgtaccagatgaaagctgccgggatgaatccttctaaggagatggccgatgcggttaggttggcttgtttcagatgatcctgaactagtagtcgagtaggagtgccaaagagtgagttactttgattgtacaattgtgttaagcagacgccagtgcactggtgtctgattcc

SEQ ID NO: 30782 - protein, 275 aa, Zea mays subsp. mays
  peptide (1)..(275): Ceres Seq. ID no. 12349427
  misc_feature (22)..(180): NCBI GI NO: 34900752 NR Description: OJ1341_A08.34
  misc_feature (104)..(180): NCBI GI NO: 15222460 NR Description: hypothetical protein; protein id: At1g31790.1
QILSWTSRTFARVPRVQPTSHMARCSVAKPLCATTATPRLTRRCRQLSANATTPAMATSKARLPALNKPAKPPPPLLSRPKLPVPTNTATDTTSGKDCTKKPPPEATDSHPPSSGAGDVLRLMDALGIPPDEDIYISLLRECADAAEVASVHAHITARRASDGLPSPVANRLLLSYPRVGTSKLPAGCSTECPPPTAWLGRPWCPPTRMAASTMKRCVCSPTCAIERRSWTAIATPMPSWPCCGHVPVQASYVSVSRYTLSSSRKAGSTVTLAAR

SEQ ID NO: 30783 - protein, 268 aa, Zea mays subsp. mays
  peptide (1)..(268): Ceres Seq. ID no. 12349428
  misc_feature (223)..(256): Pfam Name: Pfam Description:  PPR repeat
  misc_feature (1)..(268): NCBI GI NO: 34900752 NR Description: OJ1341_A08.34
  misc_feature (1)..(264): NCBI GI NO: 15222460 NR Description: hypothetical protein; protein id: At1g31790.1
  misc_feature (1)..(266): NCBI GI NO: 15221304 NR Description: hypothetical protein; protein id: At1g74600.1
  misc_feature (1)..(266): NCBI GI NO: 15240591 NR Description: putative protein; protein id: At5g13270.1
  misc_feature (66)..(251): NCBI GI NO: 30684439 NR Description: pentatricopeptide (PPR) repeat-containing protein
  misc_feature (1)..(35): NCBI GI NO: 30684439 NR Description: pentatricopeptide (PPR) repeat-containing protein
  misc_feature (1)..(266): NCBI GI NO: 34914806 NR Description: B1045D11.13
  misc_feature (1)..(248): NCBI GI NO: 7486295 NR Description: hypothetical protein F28J12
  misc_feature (1)..(248): NCBI GI NO: 30684439 NR Description: pentatricopeptide (PPR) repeat-containing protein
  misc_feature (119)..(266): NCBI GI NO: 34896896 NR Description: hypothetical protein
MPTTNGMAWATMVSAYSDGCLHHEAMRLFAHMCHRTPVLDGDCYSHAIVAVLRSCTRAGELRLGEQVHALVVKKGRIHGDIGSSLVQLYCDGGGFHRSARRVLATTMQHHCQEPVPEAAWTSLITSCHRESLLSEAVDVFRDMASSGVPRSSFSLSSILAVFAESQDPGCCCGQQVHADAIKRGVDTNQFVGSGLIHMYAKQGRLADAARAFETIGGKPDAACLSALAMAYARGGRYREATRIMYQMKAAGMNPSKEMADAVRLACFR

SEQ ID NO: 30784 - protein, 262 aa, Zea mays subsp. mays
  peptide (1)..(262): Ceres Seq. ID no. 12349429
  misc_feature (217)..(250): Pfam Name: Pfam Description:  PPR repeat
  misc_feature (1)..(262): NCBI GI NO: 34900752 NR Description: OJ1341_A08.34
  misc_feature (1)..(258): NCBI GI NO: 15222460 NR Description: hypothetical protein; protein id: At1g31790.1
  misc_feature (1)..(260): NCBI GI NO: 15221304 NR Description: hypothetical protein; protein id: At1g74600.1
  misc_feature (1)..(260): NCBI GI NO: 15240591 NR Description: putative protein; protein id: At5g13270.1
  misc_feature (60)..(245): NCBI GI NO: 30684439 NR Description: pentatricopeptide (PPR) repeat-containing protein
  misc_feature (1)..(29): NCBI GI NO: 30684439 NR Description: pentatricopeptide (PPR) repeat-containing protein
  misc_feature (1)..(260): NCBI GI NO: 34914806 NR Description: B1045D11.13
  misc_feature (1)..(242): NCBI GI NO: 7486295 NR Description: hypothetical protein F28J12
  misc_feature (1)..(242): NCBI GI NO: 30684439 NR Description: pentatricopeptide (PPR) repeat-containing protein
  misc_feature (113)..(260): NCBI GI NO: 34896896 NR Description: hypothetical protein
MAWATMVSAYSDGCLHHEAMRLFAHMCHRTPVLDGDCYSHAIVAVLRSCTRAGELRLGEQVHALVVKKGRIHGDIGSSLVQLYCDGGGFHRSARRVLATTMQHHCQEPVPEAAWTSLITSCHRESLLSEAVDVFRDMASSGVPRSSFSLSSILAVFAESQDPGCCCGQQVHADAIKRGVDTNQFVGSGLIHMYAKQGRLADAARAFETIGGKPDAACLSALAMAYARGGRYREATRIMYQMKAAGMNPSKEMADAVRLACFR

SEQ ID NO: 30785 - DNA, 1222 bp, Zea mays subsp. mays
  misc_feature (1)..(1222): Ceres Seq. ID no. 12405362
  misc_feature (370)..(370): n is a, c, t, g, unknown, or other
aaaagtctgtcccgttctgttcgtgaacgtgggcctcctcaaccctttcccaccaaaaaatgcggtggcacacacatactgtactgtagcatcggccatggtcgcggccgccgccaccaccacctccaactcggactgacctctccccggtcccagctcccgaacaaaaccctagctaaccctatccgccgatggcgttcgcgacgccgcgcctcctcccgctgccccctcctccggcggcggcatccacgcgggccgtctccgcgcgcaaccacggggggcgcacggcgcccgagctctcgggcccgaccccgcgcgtggtggtcgtcacctccggcaagggcggcgtcggaaagacgaccaccaccgncaacttcgccgcctctctcgcgcgcctcggcctcccagccgtcgccgtcgacgccgatgctggcctccgcaacctcgacctcctgctcggcctcgagaaccgcgtccacctcaccgccgccgacgtcctcgcgggagactgccgactcgaccaggcgctcgtccgccaccgcgcgctccacgacctccacctcctctgcctctccaagccccgctccaagctgcccctcgcgttcggatccaagaccctcacctgggtcgcggacgcgctacgacgctcgaccagcccacccgcattcatcctcatcgactgccccgcaggtgttgatgctgggtttgtcactgccattgcacccgcagaagaggcggtgctcgttaccactcccgacattacggctctccgcgatgctgaccgtgtcgcgggactgctggagtgcgatggcatcaaagacatcaagatcgttgtcaaccgagtgcggccagacctggtgaagggggaggacatgatgtcagcgctggacgtgcaggaaatgctcgggttgcctttactaggcgtggtgccagaggacacggaggtgatccggagtacgaataggggcgtgccgctggtgctgaatgacccgcccacgcctgctggccttgctctggagcaggctacttggagattggtggaaagagatgcgatgacggcggtcatggtcgaagagcaggagaggcccgagaagaaaggaggcggaggcggcttcttctcgttcttcggcggcaggtgatgagtcaagtcagtctttaggctgtagatggtgtacaggctcggagtttatgaatgctttctaggctagtgcccgattcattc

SEQ ID NO: 30786 - protein, 315 aa, Zea mays subsp. mays
  peptide (1)..(315): Ceres Seq. ID no. 12405363
  misc_feature (42)..(76): Pfam Name: Pfam Description:  4Fe-4S iron sulfur cluster binding proteins
  misc_feature (1)..(314): NCBI GI NO: 34897748 NR Description: Similar to Chlorella vulgaris C-27 chloroplast DNA
  misc_feature (34)..(314): NCBI GI NO: 15237874 NR Description: septum site-determining MinD (dbj|BAA90261
  misc_feature (74)..(314): NCBI GI NO: 9971822 NR Description: minD [Tagetes erecta]
  misc_feature (42)..(285): NCBI GI NO: 11466429 NR Description: septum-site determining protein
  misc_feature (42)..(283): NCBI GI NO: 7524873 NR Description: septum site-determining protein
  misc_feature (1)..(170): NCBI GI NO: 6002788 NR Description: cell division inhibitor MinD homolog
  misc_feature (35)..(283): NCBI GI NO: 11467859 NR Description: septum-site determining protein
  misc_feature (42)..(283): NCBI GI NO: 23452400 NR Description: cell division inhibitor MinD
  misc_feature (41)..(286): NCBI GI NO: 5748667 NR Description: cell division inhibitor MinD
  misc_feature (42)..(282): NCBI GI NO: 11467635 NR Description: septum-site determining protein [Guillardia theta]
  misc_feature (60)..(60): Xaa is any aa, unknown or other
MAFATPRLLPLPPPPAAASTRAVSARNHGGRTAPELSGPTPRVVVVTSGKGGVGKTTTTXNFAASLARLGLPAVAVDADAGLRNLDLLLGLENRVHLTAADVLAGDCRLDQALVRHRALHDLHLLCLSKPRSKLPLAFGSKTLTWVADALRRSTSPPAFILIDCPAGVDAGFVTAIAPAEEAVLVTTPDITALRDADRVAGLLECDGIKDIKIVVNRVRPDLVKGEDMMSALDVQEMLGLPLLGVVPEDTEVIRSTNRGVPLVLNDPPTPAGLALEQATWRLVERDAMTAVMVEEQERPEKKGGGGGFFSFFGGR

SEQ ID NO: 30787 - protein, 286 aa, Zea mays subsp. mays
  peptide (1)..(286): Ceres Seq. ID no. 12405364
  misc_feature (76)..(251): Pfam Name: Pfam Description:  Formin Homology 2 Domain
  misc_feature (51)..(229): NCBI GI NO: 11359723 NR Description: proteophosphoglycan, membrane-associated
  misc_feature (51)..(229): NCBI GI NO: 5420387 NR Description: proteophosphoglycan [Leishmania major]
  misc_feature (81)..(252): NCBI GI NO: 18138528 NR Description: hypothetical protein [Grapevine fleck virus]
  misc_feature (71)..(280): NCBI GI NO: 13592175 NR Description: ppg3 [Leishmania major]
  misc_feature (87)..(229): NCBI GI NO: 11359723 NR Description: proteophosphoglycan, membrane-associated
  misc_feature (71)..(280): NCBI GI NO: 5420387 NR Description: proteophosphoglycan [Leishmania major]
  misc_feature (87)..(229): NCBI GI NO: 13592175 NR Description: ppg3 [Leishmania major]
  misc_feature (87)..(229): NCBI GI NO: 11359723 NR Description: proteophosphoglycan, membrane-associated
  misc_feature (47)..(285): NCBI GI NO: 2136504 NR Description: gastric mucin (clone PGM-2A) - pig (fragment)
  misc_feature (83)..(243): NCBI GI NO: 23017082 NR Description: hypothetical protein [Thermobifida fusca]
  misc_feature (124)..(124): Xaa is any aa, unknown or other
KSLSRSVRERGPPQPFPTKKCGGTHILYCSIGHGRGRRHHHLQLGLTSPRSQLPNKTLANPIRRWRSRRRASSRCPLLRRRHPRGPSPRATTGGARRPSSRARPRAWWSSPPARAASERRPPPXTSPPLSRASASQPSPSTPMLASATSTSCSASRTASTSPPPTSSRETADSTRRSSATARSTTSTSSASPSPAPSCPSRSDPRPSPGSRTRYDARPAHPHSSSSTAPQVLMLGLSLPLHPQKRRCSLPLPTLRLSAMLTVSRDCWSAMASKTSRSLSTECGQTW

SEQ ID NO: 30788 - DNA, 1122 bp, Zea mays subsp. mays
  misc_feature (1)..(1122): Ceres Seq. ID no. 12360011
atcccccgcaccgcacgtctcagcccacctcctcctaccaccctcgccgcggccgcgccacacaaaagcgtcacgccgtctgacagcggggaaaaaaaaggaggccatggaggagaacattcctcacccgagggaggcacaagggcccaccgtcgcccaaccggccccggcggtcgtcacgccccgcgacgacgctctagctcccgtagcccagctgctgtcgtcctcgggcgacgatgagtcgtccgacgacgagggggagctcgagctggaggtcgagttcgagttcccgttcgtctgcagggactcccccgcgggcacggccgccccggccgacgagctcttcgcggacggccggatcagggccttctacccggtgttcggccgcggcacggccgggtgcgtcccccgtggcggcggcggcggcggcagcggcagctgctgcacggcgctgccggccgctccgccgcgggtgaggggccagctgggacgcctgttccaggaggagacacgggagcgcagcacctccgccagctttacggcgtcgttcgggcccgccacggacgaggacggcggcctggatggcgcggcgccggggagctactgcgtgtggcgcccgggtccgtccgcgtccgcgtcgccctccccgccgccgcccaggaagagtgggtccacggggtccatggcgcggtggcgccgcatcagcgacctcgtcgtgggccgcagccacagcgacggcagggacaagttcctcttcctcgccgccgcgcccaggagggggcccaaggacaaggagcctgccgccactgccccgcccgcggtcgccgcccaccagatggcggcgtacctcgccaggggcgtcccaccgcggcgcacgttcctgccgtaccgcgaggagctcgtgggcttcttcgccaacgtgaacggcatcagtcggagccaccaccgtccgccgttctgacgtcttgtcagtggcctatgccatcggttaattaccctgattaattattcggtaatgtgattagcacttttcttagcagtagtggataagtaggcggtttgtataggtaatgattttgggtggatcacgcgacgcgatgaatggagaggcgttttctgtcg

SEQ ID NO: 30789 - protein, 319 aa, Zea mays subsp. mays
  peptide (1)..(319): Ceres Seq. ID no. 12360012
  misc_feature (91)..(275): NCBI GI NO: 34911600 NR Description: P0004A09.25
  misc_feature (158)..(319): NCBI GI NO: 34912066 NR Description: P0445H04.35
  misc_feature (78)..(317): NCBI GI NO: 15241966 NR Description: putative protein; protein id: At5g62770.1
SPAPHVSAHLLLPPSPRPRHTKASRRLTAGKKKEAMEENIPHPREAQGPTVAQPAPAVVTPRDDALAPVAQLLSSSGDDESSDDEGELELEVEFEFPFVCRDSPAGTAAPADELFADGRIRAFYPVFGRGTAGCVPRGGGGGGSGSCCTALPAAPPRVRGQLGRLFQEETRERSTSASFTASFGPATDEDGGLDGAAPGSYCVWRPGPSASASPSPPPPRKSGSTGSMARWRRISDLVVGRSHSDGRDKFLFLAAAPRRGPKDKEPAATAPPAVAAHQMAAYLARGVPPRRTFLPYREELVGFFANVNGISRSHHRPPF

SEQ ID NO: 30790 - protein, 284 aa, Zea mays subsp. mays
  peptide (1)..(284): Ceres Seq. ID no. 12360013
  misc_feature (56)..(240): NCBI GI NO: 34911600 NR Description: P0004A09.25
  misc_feature (123)..(284): NCBI GI NO: 34912066 NR Description: P0445H04.35
  misc_feature (43)..(282): NCBI GI NO: 15241966 NR Description: putative protein; protein id: At5g62770.1
MEENIPHPREAQGPTVAQPAPAVVTPRDDALAPVAQLLSSSGDDESSDDEGELELEVEFEFPFVCRDSPAGTAAPADELFADGRIRAFYPVFGRGTAGCVPRGGGGGGSGSCCTALPAAPPRVRGQLGRLFQEETRERSTSASFTASFGPATDEDGGLDGAAPGSYCVWRPGPSASASPSPPPPRKSGSTGSMARWRRISDLVVGRSHSDGRDKFLFLAAAPRRGPKDKEPAATAPPAVAAHQMAAYLARGVPPRRTFLPYREELVGFFANVNGISRSHHRPPF

SEQ ID NO: 30791 - DNA, 444 bp, Zea mays subsp. mays
  misc_feature (1)..(444): Ceres Seq. ID no. 12545648
aaaaccactcggtccgctcccagcgtcccttcgcccacagccagcggcgaactcgatcgagcaggatggggtttatcggcgcgcacggcgtggagacgctgaagcggtataggtacagcggagaggaccgctcggtggtggccaagtacgtgctgcagcccttctggagccgatgcgtcactctcttcccgctctggatgccaccaaacatgatcacacttacaggattttcgtttctagtactatcagcgctgcttggctatatatgttcgcctcaccttgacactgctccccctaggtgggtccatcttgcccatggattacttctcttcttgtaccagacttttgatgctgttgatggtaaacaagcaaggcgtactagctcatcgagtcctcttggagaactttttgatcatggatgtgatgcacttgcgtgtgcttttg

SEQ ID NO: 30792 - protein, 147 aa, Zea mays subsp. mays
  peptide (1)..(147): Ceres Seq. ID no. 13565141
  misc_feature (22)..(146): NCBI GI NO: 18390098 NR Description: aminoalcoholphosphotransferase [Sorghum bicolor]
  misc_feature (22)..(146): NCBI GI NO: 7488701 NR Description: probable ethanolaminephosphotransferase (EC2
  misc_feature (22)..(146): NCBI GI NO: 7488522 NR Description: ethanolaminephosphotransferase homolog - turnip
  misc_feature (22)..(146): NCBI GI NO: 15222885 NR Description: aminoalcoholphosphotransferase
  misc_feature (22)..(146): NCBI GI NO: 3927806 NR Description: aminoalcoholphosphotransferase
  misc_feature (22)..(146): NCBI GI NO: 30313359 NR Description: aminoalcoholphosphotransferase
  misc_feature (22)..(146): NCBI GI NO: 15229490 NR Description: hypothetical protein; protein id: At3g25585
  misc_feature (22)..(146): NCBI GI NO: 5917787 NR Description: aminoalcoholphosphotransferase [Brassica rapa]
  misc_feature (22)..(143): NCBI GI NO: 6321915 NR Description: sn-1
  misc_feature (22)..(146): NCBI GI NO: 27762264 NR Description: aminoalcoholphosphotransferase [Brassica napus]
NHSVRSQRPFAHSQRRTRSSRMGFIGAHGVETLKRYRYSGEDRSVVAKYVLQPFWSRCVTLFPLWMPPNMITLTGFSFLVLSALLGYICSPHLDTAPPRWVHLAHGLLLFLYQTFDAVDGKQARRTSSSSPLGELFDHGCDALACAF

SEQ ID NO: 30793 - protein, 126 aa, Zea mays subsp. mays
  peptide (1)..(126): Ceres Seq. ID no. 13565142
  misc_feature (1)..(125): NCBI GI NO: 18390098 NR Description: aminoalcoholphosphotransferase [Sorghum bicolor]
  misc_feature (1)..(125): NCBI GI NO: 7488701 NR Description: probable ethanolaminephosphotransferase (EC2
  misc_feature (1)..(125): NCBI GI NO: 7488522 NR Description: ethanolaminephosphotransferase homolog - turnip
  misc_feature (1)..(125): NCBI GI NO: 15222885 NR Description: aminoalcoholphosphotransferase
  misc_feature (1)..(125): NCBI GI NO: 3927806 NR Description: aminoalcoholphosphotransferase
  misc_feature (1)..(125): NCBI GI NO: 30313359 NR Description: aminoalcoholphosphotransferase
  misc_feature (1)..(125): NCBI GI NO: 15229490 NR Description: hypothetical protein; protein id: At3g25585
  misc_feature (1)..(125): NCBI GI NO: 5917787 NR Description: aminoalcoholphosphotransferase [Brassica rapa]
  misc_feature (1)..(122): NCBI GI NO: 6321915 NR Description: sn-1
  misc_feature (1)..(125): NCBI GI NO: 27762264 NR Description: aminoalcoholphosphotransferase [Brassica napus]
MGFIGAHGVETLKRYRYSGEDRSVVAKYVLQPFWSRCVTLFPLWMPPNMITLTGFSFLVLSALLGYICSPHLDTAPPRWVHLAHGLLLFLYQTFDAVDGKQARRTSSSSPLGELFDHGCDALACAF

SEQ ID NO: 30794 - protein, 82 aa, Zea mays subsp. mays
  peptide (1)..(82): Ceres Seq. ID no. 13565143
  misc_feature (1)..(81): NCBI GI NO: 18390098 NR Description: aminoalcoholphosphotransferase [Sorghum bicolor]
  misc_feature (1)..(81): NCBI GI NO: 7488701 NR Description: probable ethanolaminephosphotransferase (EC2
  misc_feature (1)..(81): NCBI GI NO: 7488522 NR Description: ethanolaminephosphotransferase homolog - turnip
  misc_feature (1)..(81): NCBI GI NO: 15222885 NR Description: aminoalcoholphosphotransferase
  misc_feature (1)..(81): NCBI GI NO: 3927806 NR Description: aminoalcoholphosphotransferase
  misc_feature (1)..(81): NCBI GI NO: 30313359 NR Description: aminoalcoholphosphotransferase
  misc_feature (1)..(81): NCBI GI NO: 15229490 NR Description: hypothetical protein; protein id: At3g25585
  misc_feature (1)..(81): NCBI GI NO: 5917787 NR Description: aminoalcoholphosphotransferase [Brassica rapa]
  misc_feature (1)..(78): NCBI GI NO: 6321915 NR Description: sn-1
  misc_feature (1)..(81): NCBI GI NO: 27762264 NR Description: aminoalcoholphosphotransferase [Brassica napus]
MPPNMITLTGFSFLVLSALLGYICSPHLDTAPPRWVHLAHGLLLFLYQTFDAVDGKQARRTSSSSPLGELFDHGCDALACAF

SEQ ID NO: 30795 - DNA, 1850 bp, Zea mays subsp. mays
  misc_feature (1)..(1850): Ceres Seq. ID no. 12386893
aaggagcagctgggaaacggagcgccacaagcccacaactctcgcgcaggcttctctcccatctccgcccttcccgaagcagcacggtgcaggccgcggacccgcggtttctccacagaatcccgctccacgcacgtcgcccccgtcgccggcgaggcggctgtgctgctgcgtactcccctggttccaactctgaaccggccaccctctcctgctccgcgacctcgagtaactttttgagtaccagtgatgcaaagggacacaagctctagcgatgtttctgcttctcatgtaggacgtgtaagacgtcgcaaacatccaactgaggctaccacagatgggaatagagctaatggacagccattgcttgtcaatgatcagaacaaatataaatcaatgcttacccgtacgtattctacagtatggatgattggaggctttgcctttattatttatatgggtcatctatatatctgggctatggtggttgtgattcaaatatacatggcaagagaacttttcaatttactcagaaaatccagtgaagagaaacaactgccagggttcagggtcctgaattggcacttctttttcacggcaatgctgtacacttatgggcgctttcttagtcgtcagctggtgaatacagtgacttcagatcacttgctttataaggtcgtcagtggcctaattaagtatcagatgtttatctgctatttcctttatattgcagggtttgtatggtttattttgactctcaagaaaaagacatacaagtatcagttcaaacagtatgcctggacacacatgatacttttaacagtttttgcacagtctgctttcactgtggcaaacatatttgaagggatattctggtttcttttgcctgcttcacttattgtgatcaacgatatttttgcttatttatttgggttctttcttgggagaacaccattaatcaagttgtctccaaagaaaacttgggaaggttttattggtgcatcagtgacaactatcatctctgcgtttctgttagcaaatgtaatgggccattcgcaatggttgacatgcccaagaaaggatctgttgactgggtggctttattgtgatcctggtccaatgtttaagccagagcattactcattgggagagtgggtgccgcattggttcccatggaaagaactagctattatgcctgtgcagtggcatgctttagccctaggtttatttgcatcaataatagcaccatttggaggattttttgcgagtggcttcaagagggcttttaaaattaaggattttggtgacagcatacctgggcatggtggaattactgacagaatggattgtcaaatggttatggcagtgtttgcatacatataccaccaatcattcattgcacctcagaacttctctgttgagataatcttggatcagattataagaaacctaacctatgaggagcaaaaatatgtatatgaacaacttggggaaatgttccgtgagaggcaattggctcattggctgaaagctgagagttagcgtgcttatgaaatgcatgatatgttgtgcatttagttcatgtatggcagcatgccagcatgttatgaatgtatacggagcccttgcccaaaccattgtatagaatggtagaatggagagaatgaatgggttgtaggtgctttattcactctctagtctccactgacgctgcctataattcactccccctgtcatcgtttctgcagtctgtgtaaaagggaacctggaaagttttattctttccacttcgtggtgctgggctcagatcaaatattcgaggattcacaatatatccccgatgttttacc

SEQ ID NO: 30796 - protein, 430 aa, Zea mays subsp. mays
  peptide (1)..(430): Ceres Seq. ID no. 12386894
  misc_feature (4)..(416): NCBI GI NO: 20303635 NR Description: putative CDP-diacylglycerol synthetase
  misc_feature (1)..(420): NCBI GI NO: 3121837 NR Description: Phosphatidate cytidylyltransferase
  misc_feature (1)..(420): NCBI GI NO: 30696710 NR Description: phosphatidate cytidylyltransferase (CDS)
  misc_feature (1)..(420): NCBI GI NO: 15235611 NR Description: CDP-diacylglycerol synthetase-like protein
  misc_feature (1)..(420): NCBI GI NO: 7484839 NR Description: CDP-diacylglycerol synthetase homolog F24O1
  misc_feature (1)..(420): NCBI GI NO: 15236874 NR Description: putative CDP-diacylglycerol synthetase
  misc_feature (4)..(133): NCBI GI NO: 37532798 NR Description: putative phosphatidate cytidylyltransferase
  misc_feature (278)..(368): NCBI GI NO: 37532798 NR Description: putative phosphatidate cytidylyltransferase
  misc_feature (386)..(416): NCBI GI NO: 37532798 NR Description: putative phosphatidate cytidylyltransferase
  misc_feature (3)..(412): NCBI GI NO: 40743157 NR Description: hypothetical protein AN5166.2
MQRDTSSSDVSASHVGRVRRRKHPTEATTDGNRANGQPLLVNDQNKYKSMLTRTYSTVWMIGGFAFIIYMGHLYIWAMVVVIQIYMARELFNLLRKSSEEKQLPGFRVLNWHFFFTAMLYTYGRFLSRQLVNTVTSDHLLYKVVSGLIKYQMFICYFLYIAGFVWFILTLKKKTYKYQFKQYAWTHMILLTVFAQSAFTVANIFEGIFWFLLPASLIVINDIFAYLFGFFLGRTPLIKLSPKKTWEGFIGASVTTIISAFLLANVMGHSQWLTCPRKDLLTGWLYCDPGPMFKPEHYSLGEWVPHWFPWKELAIMPVQWHALALGLFASIIAPFGGFFASGFKRAFKIKDFGDSIPGHGGITDRMDCQMVMAVFAYIYHQSFIAPQNFSVEIILDQIIRNLTYEEQKYVYEQLGEMFRERQLAHWLKAES

SEQ ID NO: 30797 - protein, 381 aa, Zea mays subsp. mays
  peptide (1)..(381): Ceres Seq. ID no. 12386895
  misc_feature (1)..(367): NCBI GI NO: 20303635 NR Description: putative CDP-diacylglycerol synthetase
  misc_feature (1)..(371): NCBI GI NO: 3121837 NR Description: Phosphatidate cytidylyltransferase
  misc_feature (1)..(371): NCBI GI NO: 30696710 NR Description: phosphatidate cytidylyltransferase (CDS)
  misc_feature (1)..(371): NCBI GI NO: 15235611 NR Description: CDP-diacylglycerol synthetase-like protein
  misc_feature (1)..(371): NCBI GI NO: 7484839 NR Description: CDP-diacylglycerol synthetase homolog F24O1
  misc_feature (1)..(371): NCBI GI NO: 15236874 NR Description: putative CDP-diacylglycerol synthetase
  misc_feature (1)..(84): NCBI GI NO: 37532798 NR Description: putative phosphatidate cytidylyltransferase
  misc_feature (229)..(319): NCBI GI NO: 37532798 NR Description: putative phosphatidate cytidylyltransferase
  misc_feature (337)..(367): NCBI GI NO: 37532798 NR Description: putative phosphatidate cytidylyltransferase
  misc_feature (1)..(363): NCBI GI NO: 40743157 NR Description: hypothetical protein AN5166.2
MLTRTYSTVWMIGGFAFIIYMGHLYIWAMVVVIQIYMARELFNLLRKSSEEKQLPGFRVLNWHFFFTAMLYTYGRFLSRQLVNTVTSDHLLYKVVSGLIKYQMFICYFLYIAGFVWFILTLKKKTYKYQFKQYAWTHMILLTVFAQSAFTVANIFEGIFWFLLPASLIVINDIFAYLFGFFLGRTPLIKLSPKKTWEGFIGASVTTIISAFLLANVMGHSQWLTCPRKDLLTGWLYCDPGPMFKPEHYSLGEWVPHWFPWKELAIMPVQWHALALGLFASIIAPFGGFFASGFKRAFKIKDFGDSIPGHGGITDRMDCQMVMAVFAYIYHQSFIAPQNFSVEIILDQIIRNLTYEEQKYVYEQLGEMFRERQLAHWLKAES

SEQ ID NO: 30798 - protein, 371 aa, Zea mays subsp. mays
  peptide (1)..(371): Ceres Seq. ID no. 12386896
  misc_feature (1)..(357): NCBI GI NO: 20303635 NR Description: putative CDP-diacylglycerol synthetase
  misc_feature (1)..(361): NCBI GI NO: 3121837 NR Description: Phosphatidate cytidylyltransferase
  misc_feature (1)..(361): NCBI GI NO: 30696710 NR Description: phosphatidate cytidylyltransferase (CDS)
  misc_feature (1)..(361): NCBI GI NO: 15235611 NR Description: CDP-diacylglycerol synthetase-like protein
  misc_feature (1)..(361): NCBI GI NO: 7484839 NR Description: CDP-diacylglycerol synthetase homolog F24O1
  misc_feature (1)..(361): NCBI GI NO: 15236874 NR Description: putative CDP-diacylglycerol synthetase
  misc_feature (1)..(74): NCBI GI NO: 37532798 NR Description: putative phosphatidate cytidylyltransferase
  misc_feature (219)..(309): NCBI GI NO: 37532798 NR Description: putative phosphatidate cytidylyltransferase
  misc_feature (327)..(357): NCBI GI NO: 37532798 NR Description: putative phosphatidate cytidylyltransferase
  misc_feature (1)..(353): NCBI GI NO: 40743157 NR Description: hypothetical protein AN5166.2
MIGGFAFIIYMGHLYIWAMVVVIQIYMARELFNLLRKSSEEKQLPGFRVLNWHFFFTAMLYTYGRFLSRQLVNTVTSDHLLYKVVSGLIKYQMFICYFLYIAGFVWFILTLKKKTYKYQFKQYAWTHMILLTVFAQSAFTVANIFEGIFWFLLPASLIVINDIFAYLFGFFLGRTPLIKLSPKKTWEGFIGASVTTIISAFLLANVMGHSQWLTCPRKDLLTGWLYCDPGPMFKPEHYSLGEWVPHWFPWKELAIMPVQWHALALGLFASIIAPFGGFFASGFKRAFKIKDFGDSIPGHGGITDRMDCQMVMAVFAYIYHQSFIAPQNFSVEIILDQIIRNLTYEEQKYVYEQLGEMFRERQLAHWLKAES

SEQ ID NO: 30799 - DNA, 943 bp, Zea mays subsp. mays
  misc_feature (1)..(943): Ceres Seq. ID no. 12348152
agctcgcctctcctctcattctctcgtgctctccacccgtttcccgcaaaaccctagctctgcgacatgcaccgcggcggcgatcgctccggcggcccctcgagcggcggagaccgctctggagcccggttccagcggggtccctcccgctggtctggcagcagcggcggcggattagggggtagcccgcccaatcgctactcctcccgcggcgcggcagatggaggtggtggagggggcggtggcgggaggttccacccttaccgtggttcttccgactattctagcggcggtggagggtacagaggcggtagtggcgttggtaacgacttcggcgaccagaggcaacgttacggcggcggcactagaggcggaggccgtggggatttccaagatcatgatagtagaagtaactatgtcaaactttttgtcggatctgttccgaggacagcgactgaagaagacgttcgtcctttatttgaggaacatggagatgttcttgaagttgctctaattaaggataggaagaccggtgaacaacaaggtatgctatgtctttgtttttcttgtattatcacaattgagtatctcttttgttttcaggtttctgagaggttataggagcaacaaggttgcatcttctctcagttagattggcggttgttgattttcatttcctgcgcttccattctgtccgtctcctgtggattcagtagaagactagaatggacgcgactaactgcccgccgattactggaacctaactagccacaacttcactgctacacaaggcagcaaatttggtaccaacagctgtgtttagatgatattgaccttctggatgtcctgtagttctagagcaatgagcttgtagtttcacctttgcatctgtgtgccttgattttgttgcaagaacttatataatcttataatgaattaatac

SEQ ID NO: 30800 - protein, 184 aa, Zea mays subsp. mays
  peptide (1)..(184): Ceres Seq. ID no. 12348153
  misc_feature (6)..(106): Pfam Name: Pfam Description:  Dehydrin
  misc_feature (1)..(173): NCBI GI NO: 33390912 NR Description: gamma flowering time control protein
  misc_feature (1)..(173): NCBI GI NO: 34555648 NR Description: flowering time control protein isoform rFCA-2
  misc_feature (102)..(173): NCBI GI NO: 34555650 NR Description: flowering time control protein isoform rFCA-4
  misc_feature (102)..(173): NCBI GI NO: 34555646 NR Description: flowering time control protein isoform rFCA-3
  misc_feature (56)..(173): NCBI GI NO: 11045077 NR Description: putative FCA orthologue [Brassica napus]
  misc_feature (93)..(184): NCBI GI NO: 25407543 NR Description: FCA alpha and beta protein
  misc_feature (38)..(173): NCBI GI NO: 18150431 NR Description: FCA gamma [Brassica napus]
  misc_feature (93)..(166): NCBI GI NO: 2204091 NR Description: FCA delta [Arabidopsis thaliana]
  misc_feature (93)..(166): NCBI GI NO: 30683603 NR Description: Flowering time control protein (FCA)
  misc_feature (93)..(166): NCBI GI NO: 2204089 NR Description: FCA gamma [Arabidopsis thaliana]
MHRGGDRSGGPSSGGDRSGARFQRGPSRWSGSSGGGLGGSPPNRYSSRGAADGGGGGGGGGRFHPYRGSSDYSSGGGGYRGGSGVGNDFGDQRQRYGGGTRGGGRGDFQDHDSRSNYVKLFVGSVPRTATEEDVRPLFEEHGDVLEVALIKDRKTGEQQGMLCLCFSCIITIEYLFCFQVSERL

SEQ ID NO: 30801 - protein, 97 aa, Zea mays subsp. mays
  peptide (1)..(97): Ceres Seq. ID no. 12348154
MEVVEGAVAGGSTLTVVLPTILAAVEGTEAVVALVTTSATRGNVTAAALEAEAVGISKIMIVEVTMSNFLSDLFRGQRLKKTFVLYLRNMEMFLKLL

SEQ ID NO: 30802 - DNA, 1286 bp, Zea mays subsp. mays
  misc_feature (1)..(1286): Ceres Seq. ID no. 12413176
gcacgagaccattacctagaacatcctaatcgaaaaccaccgttccacgcgtccacggtccacccacacgcaaggtcgcaggtcgcaacccgcgggcggaggggcaggcacaggaccgttgcgttgctgccgccgccggcacgagatcgaggagggatcccccgctctcacgccgctccaggtcgagggccgagcgagatggtgaacaccttcttcctcttctgcgggtgcgtggaccaggccagcgtggcggtggtggagaagtggggccgcttcctccgcctcgccgacccgggcctccacttcttcaaccccctcgccggggagtgcgtcgcgggctccctcaccacacgcgtccagtccctcgacgtccgcgtcgagaccaagaccaaggataatgtcttcgtccaactgatctgcacaatccagtaccgtgttgtcaaggaaaatgcagatgatgctttctatgagttgcagaatccccagcagcaaatccaggcctacgtctttgatgttgttcgggccatagtgccgagaatgaatctggacgatctctttgagcagaagaacgatgtggccaaagctgtattggaggagcttgaaaaggtgatggcagattatggttacagcattgagcacattctcatggttgatatcatccctgacgctgctgttcgtaaggcaatgaacgacataaatgcagcccaaaggcttcaactggcaagtgtttacaagggagaagcagagaagatccttatggtgaagaaagcggaggcagaagcagaggcgaaatatctttctggtgtcggtatcgctaaacagcggcaggcgataaccgacggccttagagagaacatcctgaacttctcacactcggtgtcgggcaccagcgcgaaggaggtcatggacctgatcatggtcacgcagtacttcgacaccatcaaggagctcggggacggctccaagaacaccacgatcttcataccccacggaccaggccacgtgaaggacatcagcgagcagatccgcgacggcatgatgcaggcctcaagcagcaacgtgtaaatcaccgactctctgcacgattggagacggctcggctcaggatgaggcctggagtaccatgttcatagtgttaggttgttgttagtggtaaataatgagtgctggggcttttggcgagtcttgagttacatgcggttgtacaactagtgtggtttgttttatatataaaaatgtatatttacatggttctgctcctggaattttgactttttatggtttgg

SEQ ID NO: 30803 - protein, 354 aa, Zea mays subsp. mays
  peptide (1)..(354): Ceres Seq. ID no. 12413177
  misc_feature (75)..(250): Pfam Name: Pfam Description:  SPFH domain / Band 7 family
  misc_feature (67)..(354): NCBI GI NO: 23345038 NR Description: hypersensitive-induced reaction protein 4
  misc_feature (67)..(352): NCBI GI NO: 15242123 NR Description: putative protein; protein id: At5g51570.1
  misc_feature (73)..(354): NCBI GI NO: 15241939 NR Description: putative protein; protein id: At5g62740
  misc_feature (76)..(354): NCBI GI NO: 3928150 NR Description: hypothetical protein [Cicer arietinum]
  misc_feature (78)..(349): NCBI GI NO: 14150732 NR Description: hypersensitive-induced response protein
  misc_feature (78)..(350): NCBI GI NO: 7716466 NR Description: hypersensitive-induced response protein [Zea mays]
  misc_feature (78)..(350): NCBI GI NO: 7716468 NR Description: hypersensitive-induced response protein [Zea mays]
  misc_feature (78)..(348): NCBI GI NO: 23345042 NR Description: hypersensitive-induced reaction protein 1
  misc_feature (73)..(353): NCBI GI NO: 18395770 NR Description: expressed protein; protein id: At3g01290
  misc_feature (75)..(351): NCBI GI NO: 7716470 NR Description: hypersensitive-induced response protein [Zea mays]
ARDHYLEHPNRKPPFHASTVHPHARSQVATRGRRGRHRTVALLPPPARDRGGIPRSHAAPGRGPSEMVNTFFLFCGCVDQASVAVVEKWGRFLRLADPGLHFFNPLAGECVAGSLTTRVQSLDVRVETKTKDNVFVQLICTIQYRVVKENADDAFYELQNPQQQIQAYVFDVVRAIVPRMNLDDLFEQKNDVAKAVLEELEKVMADYGYSIEHILMVDIIPDAAVRKAMNDINAAQRLQLASVYKGEAEKILMVKKAEAEAEAKYLSGVGIAKQRQAITDGLRENILNFSHSVSGTSAKEVMDLIMVTQYFDTIKELGDGSKNTTIFIPHGPGHVKDISEQIRDGMMQASSSNV

SEQ ID NO: 30804 - protein, 288 aa, Zea mays subsp. mays
  peptide (1)..(288): Ceres Seq. ID no. 12413178
  misc_feature (9)..(184): Pfam Name: Pfam Description:  SPFH domain / Band 7 family
  misc_feature (1)..(288): NCBI GI NO: 23345038 NR Description: hypersensitive-induced reaction protein 4
  misc_feature (1)..(286): NCBI GI NO: 15242123 NR Description: putative protein; protein id: At5g51570.1
  misc_feature (7)..(288): NCBI GI NO: 15241939 NR Description: putative protein; protein id: At5g62740
  misc_feature (10)..(288): NCBI GI NO: 3928150 NR Description: hypothetical protein [Cicer arietinum]
  misc_feature (12)..(283): NCBI GI NO: 14150732 NR Description: hypersensitive-induced response protein
  misc_feature (12)..(284): NCBI GI NO: 7716466 NR Description: hypersensitive-induced response protein [Zea mays]
  misc_feature (12)..(284): NCBI GI NO: 7716468 NR Description: hypersensitive-induced response protein [Zea mays]
  misc_feature (12)..(282): NCBI GI NO: 23345042 NR Description: hypersensitive-induced reaction protein 1
  misc_feature (7)..(287): NCBI GI NO: 18395770 NR Description: expressed protein; protein id: At3g01290
  misc_feature (9)..(285): NCBI GI NO: 7716470 NR Description: hypersensitive-induced response protein [Zea mays]
MVNTFFLFCGCVDQASVAVVEKWGRFLRLADPGLHFFNPLAGECVAGSLTTRVQSLDVRVETKTKDNVFVQLICTIQYRVVKENADDAFYELQNPQQQIQAYVFDVVRAIVPRMNLDDLFEQKNDVAKAVLEELEKVMADYGYSIEHILMVDIIPDAAVRKAMNDINAAQRLQLASVYKGEAEKILMVKKAEAEAEAKYLSGVGIAKQRQAITDGLRENILNFSHSVSGTSAKEVMDLIMVTQYFDTIKELGDGSKNTTIFIPHGPGHVKDISEQIRDGMMQASSSNV

SEQ ID NO: 30805 - DNA, 852 bp, Zea mays subsp. mays
  misc_feature (1)..(852): Ceres Seq. ID no. 12383140
agactccagactccagagagatagagcctagagcacagctagccccgccagccatggccgccgcggcgcgcgcgatcatctgcgagctggcgccgcagaaggtgtcgtcgacagcgccgaagaaacgtgacgccgggacgaaggtggtgctccagccccggctctgcacgctgcggtcgtacggcgccggcagcggcgttgtgacgcggaggattctggccggggaggaggacgggagcggggccgccgactcgggcggctcctcggcgtcaccgttcttcgcctcgctcgccaactacatcgagagctcccgcaagagccaggacttcgagaccatctccggccgcctcgccatggtggcgttcgcggcggcagtggccgtggagacgacgacgggcagctcgctgttcaagaagctggacacggtggagatcgaggaggccgcgggggtgtgtgtggcggtggtcgcctgcgccgcggcgttcgcgtgggcgtccagagcgcgcaacaggatcggccagatgttcacgctggggtgcaacgccttcgtcgactccctcatcgacaacatcgtcgaggcgctcttctccgagggcgagctgcaggactggtccgatgacatataaacaaatatgcacatatgtatacgcatatagagaataatagtatttgtagatagagagcacgtatatacagtgtatatatagtaagtagatgaaactgtcaagtgaggtccaagctgtcaagtatatatagcaagtagatgaagctgtcaagtatttatagtaactagttgaagataaagagaaggaatctcatagaatcaatactagaaattacaagtaacccttt

SEQ ID NO: 30806 - protein, 207 aa, Zea mays subsp. mays
  peptide (1)..(207): Ceres Seq. ID no. 12383141
  misc_feature (18)..(65): NCBI GI NO: 38345615 NR Description: OSJNBb0003B01.7
  misc_feature (10)..(207): NCBI GI NO: 18399845 NR Description: expressed protein; protein id: At2g21970
  misc_feature (47)..(207): NCBI GI NO: 14423380 NR Description: Unknown protein [Arabidopsis thaliana]
TPDSREIEPRAQLAPPAMAAAARAIICELAPQKVSSTAPKKRDAGTKVVLQPRLCTLRSYGAGSGVVTRRILAGEEDGSGAADSGGSSASPFFASLANYIESSRKSQDFETISGRLAMVAFAAAVAVETTTGSSLFKKLDTVEIEEAAGVCVAVVACAAAFAWASRARNRIGQMFTLGCNAFVDSLIDNIVEALFSEGELQDWSDDI

SEQ ID NO: 30807 - protein, 190 aa, Zea mays subsp. mays
  peptide (1)..(190): Ceres Seq. ID no. 12383142
  misc_feature (1)..(48): NCBI GI NO: 38345615 NR Description: OSJNBb0003B01.7
  misc_feature (1)..(190): NCBI GI NO: 18399845 NR Description: expressed protein; protein id: At2g21970
  misc_feature (30)..(190): NCBI GI NO: 14423380 NR Description: Unknown protein [Arabidopsis thaliana]
MAAAARAIICELAPQKVSSTAPKKRDAGTKVVLQPRLCTLRSYGAGSGVVTRRILAGEEDGSGAADSGGSSASPFFASLANYIESSRKSQDFETISGRLAMVAFAAAVAVETTTGSSLFKKLDTVEIEEAAGVCVAVVACAAAFAWASRARNRIGQMFTLGCNAFVDSLIDNIVEALFSEGELQDWSDDI

SEQ ID NO: 30808 - DNA, 984 bp, Zea mays subsp. mays
  misc_feature (1)..(984): Ceres Seq. ID no. 12368845
gcacgagaccattacctagaacatcctaatcgaaaaatgatcggtgcaaggcgagacgttggcgacataggaacaggaggcgaagaggcgacggtgcatagctccaatggtgaccctccccgtcgccttctcactatacttctggttgccccttcggtgagggttgccattttatccattactttcttagtggctaccaggccgtttaaaaatgaccaacctcctggaagtatgatgatggatgggtcacctacacccgtcgtgaagactcgcttgtgcaacaagtacaacactgcaaagggatgcaaatgggggacaaatgctactttgcacatggtgaaagggagcttggcaagtctatgatggacaactatatgccaccccaatcgaaccaagacccactggttattttgcgcctccacctatggcctaccctggcttggccactctaactagatttggcgcttctgccacaaccaagatcggtgttgatacgtcctttgcaggtagcatcattgggagggggtggagctaacacaaagcaaatatctttcgtcataggagccaagctggccatctgagaccatgaatcatacaccagcttgaaaacattgaacttgagggcacctttgatcagatcaggaacgctagcgctatggtcagtgagttgattgtcagtgttagtggcattgctcccccacaggtcaagaacccaactgatagaactcatcatggtggaggcataggaagcaacttcaagaccaaaatgtgtgagaacttgtcggtaaatgccactttgcacacagtgagagtgagctgcgcatgcctactgctgcttgagatccatgccttgtttcatacctcgtagtcattagtcaatgtaactctaaacttggccaccgatgatggatttgctggcttctttaggcctacgctactgaattggtgtcttcagtcctactattgaatttactgacttctttc

SEQ ID NO: 30809 - protein, 120 aa, Zea mays subsp. mays
  peptide (1)..(120): Ceres Seq. ID no. 12368846
  misc_feature (88)..(115): Pfam Name: and similar Pfam Description: Zinc finger C-x8-C-x5-C-x3-H type
  misc_feature (23)..(115): NCBI GI NO: 5441893 NR Description: ESTs C99174
ARDHYLEHPNRKMIGARRDVGDIGTGGEEATVHSSNGDPPRRLLTILLVAPSVRVAILSITFLVATRPFKNDQPPGSMMMDGSPTPVVKTRLCNKYNTAKGCKWGTNATLHMVKGSLASL

SEQ ID NO: 30810 - protein, 108 aa, Zea mays subsp. mays
  peptide (1)..(108): Ceres Seq. ID no. 12368847
  misc_feature (76)..(103): Pfam Name: and similar Pfam Description: Zinc finger C-x8-C-x5-C-x3-H type
  misc_feature (11)..(103): NCBI GI NO: 5441893 NR Description: ESTs C99174
MIGARRDVGDIGTGGEEATVHSSNGDPPRRLLTILLVAPSVRVAILSITFLVATRPFKNDQPPGSMMMDGSPTPVVKTRLCNKYNTAKGCKWGTNATLHMVKGSLASL

SEQ ID NO: 30811 - protein, 70 aa, Zea mays subsp. mays
  peptide (1)..(70): Ceres Seq. ID no. 12368848
  misc_feature (1)..(43): NCBI GI NO: 5441893 NR Description: ESTs C99174
  misc_feature (1)..(43): NCBI GI NO: 15240145 NR Description: KH domain/zinc finger protein
  misc_feature (1)..(43): NCBI GI NO: 21555233 NR Description: unknown [Arabidopsis thaliana]
  misc_feature (1)..(43): NCBI GI NO: 9294110 NR Description: contains similarity to unknownprotein~dbj|BAA82391
  misc_feature (1)..(43): NCBI GI NO: 18399496 NR Description: KH domain/zinc finger protein
MVSELIVSVSGIAPPQVKNPTDRTHHGGGIGSNFKTKMCENLSVNATLHTVRVSCACLLLLEIHALFHTS

SEQ ID NO: 30812 - DNA, 1317 bp, Zea mays subsp. mays
  misc_feature (1)..(1317): Ceres Seq. ID no. 12462269
atatatggccccttcgatccattggccgcatcacactcgccaaccccgtcatcgatctcgtttcaaatccatccatcctcgtttcctccgtcccgcagcatctcaaccccatggccaagatcaagatcgggatcaatgggttcggcaggatcggaaggctggtggccagggtggccctgcagagtgacgatgtcgagctcgtcgccgtgaacgaccccttcatcagcaccgactacatgacctacatgttcaagtacgacactgtgcacggacagtggaagcaccatgaagtcaaggtgaaggactccaaaacccttctctttggtgagaaggaggttgctgtgtttggctgcaggaaccctgaggagatcccgtggggttcggttggtgctgaatatgttgttgagtctactggtgttttcactgaccaagagaaggctgcagctcacttgaagggtggtgccaagaaggttgtcatttctgctcctagcaaggatgcccccatgttcgttgttggtgtcaacgagaaggagtacaagtctgacatcaacattgtctctaatgctagctgcacaaccaactgccttgctccgcttgctaaggtcatcaatgacaagttcggtattgttgagggtctgatgaccactgttcatgccatcactgctacccagaagactgttgatgggccctcatctaaggactggaggggtggaagggctgctagtttcaacatcattcccagcagcactggagctgctaaggctgttggcaaagtgcttcctgtcctcaatggaaagttgactggaatgtctttccgtgtcccaactgtcgatgtttctgttgttgatctaactgttaggcttgagaagtctgccacctatgatgagatcaaggctgcggtcaaggccgaggcagagggtagcctcaagggcattctgggttatgtcgaggaggaccttgtttccaccgatttccagggtgacagcaggtctagcatctttgatgcgaaggctggcattgccttgaacggcaactttgtgaagcttgtgtcctggtacgacaacgagtggggatacagcacccgagtggtcgacctgatccgccacatgaacagcaccaagtaaatgaacaaactgatgaaagcatgcaaagagtgatgaaagcatgcaaagagagttgtgtttcttccccggaagtgcttccgagaataaatttttcttatctgattgtctaaaacctataacgggtgtatcgtagtggttgttatcgttaaacttttaacggtcattctatttcaaaagttttgcattttgactc

SEQ ID NO: 30813 - protein, 373 aa, Zea mays subsp. mays
  peptide (1)..(373): Ceres Seq. ID no. 12462270
  misc_feature (191)..(352): Pfam Name: Pfam Description:  Glyceraldehyde 3-phosphate dehydrogenase
  misc_feature (37)..(373): NCBI GI NO: 6166167 NR Description: Glyceraldehyde 3-phosphate dehydrogenase
  misc_feature (37)..(372): NCBI GI NO: 7431535 NR Description: glyceraldehyde-3-phosphate dehydrogenase
  misc_feature (79)..(373): NCBI GI NO: 29150193 NR Description: putative glyceraldehydes 3-phosphate dehydrogenase
  misc_feature (37)..(83): NCBI GI NO: 29150193 NR Description: putative glyceraldehydes 3-phosphate dehydrogenase
  misc_feature (37)..(373): NCBI GI NO: 462141 NR Description: Glyceraldehyde 3-phosphate dehydrogenase (GAPDH)
  misc_feature (37)..(373): NCBI GI NO: 4539543 NR Description: glyceraldehyde-3-phosphate dehydrogenase
  misc_feature (39)..(373): NCBI GI NO: 462140 NR Description: Glyceraldehyde 3-phosphate dehydrogenase
  misc_feature (37)..(373): NCBI GI NO: 120666 NR Description: Glyceraldehyde 3-phosphate dehydrogenase
  misc_feature (37)..(373): NCBI GI NO: 120680 NR Description: Glyceraldehyde 3-phosphate dehydrogenase
  misc_feature (37)..(373): NCBI GI NO: 6016075 NR Description: Glyceraldehyde 3-phosphate dehydrogenase
IWPLRSIGRITLANPVIDLVSNPSILVSSVPQHLNPMAKIKIGINGFGRIGRLVARVALQSDDVELVAVNDPFISTDYMTYMFKYDTVHGQWKHHEVKVKDSKTLLFGEKEVAVFGCRNPEEIPWGSVGAEYVVESTGVFTDQEKAAAHLKGGAKKVVISAPSKDAPMFVVGVNEKEYKSDINIVSNASCTTNCLAPLAKVINDKFGIVEGLMTTVHAITATQKTVDGPSSKDWRGGRAASFNIIPSSTGAAKAVGKVLPVLNGKLTGMSFRVPTVDVSVVDLTVRLEKSATYDEIKAAVKAEAEGSLKGILGYVEEDLVSTDFQGDSRSSIFDAKAGIALNGNFVKLVSWYDNEWGYSTRVVDLIRHMNSTK

SEQ ID NO: 30814 - protein, 337 aa, Zea mays subsp. mays
  peptide (1)..(337): Ceres Seq. ID no. 12462271
  misc_feature (155)..(316): Pfam Name: Pfam Description:  Glyceraldehyde 3-phosphate dehydrogenase
  misc_feature (1)..(337): NCBI GI NO: 6166167 NR Description: Glyceraldehyde 3-phosphate dehydrogenase
  misc_feature (1)..(336): NCBI GI NO: 7431535 NR Description: glyceraldehyde-3-phosphate dehydrogenase
  misc_feature (43)..(337): NCBI GI NO: 29150193 NR Description: putative glyceraldehydes 3-phosphate dehydrogenase
  misc_feature (1)..(47): NCBI GI NO: 29150193 NR Description: putative glyceraldehydes 3-phosphate dehydrogenase
  misc_feature (1)..(337): NCBI GI NO: 462141 NR Description: Glyceraldehyde 3-phosphate dehydrogenase (GAPDH)
  misc_feature (1)..(337): NCBI GI NO: 4539543 NR Description: glyceraldehyde-3-phosphate dehydrogenase
  misc_feature (3)..(337): NCBI GI NO: 462140 NR Description: Glyceraldehyde 3-phosphate dehydrogenase
  misc_feature (1)..(337): NCBI GI NO: 120666 NR Description: Glyceraldehyde 3-phosphate dehydrogenase
  misc_feature (1)..(337): NCBI GI NO: 120680 NR Description: Glyceraldehyde 3-phosphate dehydrogenase
  misc_feature (1)..(337): NCBI GI NO: 6016075 NR Description: Glyceraldehyde 3-phosphate dehydrogenase
MAKIKIGINGFGRIGRLVARVALQSDDVELVAVNDPFISTDYMTYMFKYDTVHGQWKHHEVKVKDSKTLLFGEKEVAVFGCRNPEEIPWGSVGAEYVVESTGVFTDQEKAAAHLKGGAKKVVISAPSKDAPMFVVGVNEKEYKSDINIVSNASCTTNCLAPLAKVINDKFGIVEGLMTTVHAITATQKTVDGPSSKDWRGGRAASFNIIPSSTGAAKAVGKVLPVLNGKLTGMSFRVPTVDVSVVDLTVRLEKSATYDEIKAAVKAEAEGSLKGILGYVEEDLVSTDFQGDSRSSIFDAKAGIALNGNFVKLVSWYDNEWGYSTRVVDLIRHMNSTK

SEQ ID NO: 30815 - protein, 295 aa, Zea mays subsp. mays
  peptide (1)..(295): Ceres Seq. ID no. 12462272
  misc_feature (113)..(274): Pfam Name: Pfam Description:  Glyceraldehyde 3-phosphate dehydrogenase
  misc_feature (1)..(295): NCBI GI NO: 6166167 NR Description: Glyceraldehyde 3-phosphate dehydrogenase
  misc_feature (1)..(294): NCBI GI NO: 7431535 NR Description: glyceraldehyde-3-phosphate dehydrogenase
  misc_feature (1)..(295): NCBI GI NO: 29150193 NR Description: putative glyceraldehydes 3-phosphate dehydrogenase
  misc_feature (1)..(295): NCBI GI NO: 462141 NR Description: Glyceraldehyde 3-phosphate dehydrogenase (GAPDH)
  misc_feature (1)..(295): NCBI GI NO: 4539543 NR Description: glyceraldehyde-3-phosphate dehydrogenase
  misc_feature (1)..(295): NCBI GI NO: 462140 NR Description: Glyceraldehyde 3-phosphate dehydrogenase
  misc_feature (1)..(295): NCBI GI NO: 120666 NR Description: Glyceraldehyde 3-phosphate dehydrogenase
  misc_feature (1)..(295): NCBI GI NO: 120680 NR Description: Glyceraldehyde 3-phosphate dehydrogenase
  misc_feature (1)..(295): NCBI GI NO: 6016075 NR Description: Glyceraldehyde 3-phosphate dehydrogenase
  misc_feature (1)..(294): NCBI GI NO: 3023812 NR Description: Glyceraldehyde 3-phosphate dehydrogenase
MTYMFKYDTVHGQWKHHEVKVKDSKTLLFGEKEVAVFGCRNPEEIPWGSVGAEYVVESTGVFTDQEKAAAHLKGGAKKVVISAPSKDAPMFVVGVNEKEYKSDINIVSNASCTTNCLAPLAKVINDKFGIVEGLMTTVHAITATQKTVDGPSSKDWRGGRAASFNIIPSSTGAAKAVGKVLPVLNGKLTGMSFRVPTVDVSVVDLTVRLEKSATYDEIKAAVKAEAEGSLKGILGYVEEDLVSTDFQGDSRSSIFDAKAGIALNGNFVKLVSWYDNEWGYSTRVVDLIRHMNSTK

SEQ ID NO: 30816 - DNA, 1600 bp, Zea mays subsp. mays
  misc_feature (1)..(1600): Ceres Seq. ID no. 12352722
atcctcaacctcatccgcccccgcccgcaccccgcaggcaccatcaccaaaaaggtccccgccttcttcttcttcttcttcttctcctctgcccctgcttgtcgtttgctcgtgctcccccaccccctttctgattcagcaagggttccttccgcggcgcggcgcgtcgccatgggcaactgctggggcgccaagatcagctccgacagcccgtcccgcggcgcctcatccccgtcagggacggcgtccaagttggcgagcaggaacggggcggcggcagccctgagcgggtgcagcagccacgcgtcgtccgcgtccatgctgccgacgccccgcagcgaggacgagatcctggagtcggccaacgtcagggccttcagcttcaacgagctgaggaccgccaccaggaacttcaggccggacagcgtgctgggcgagggcgggttcggatccgtcttcaagggctgggtcgacgagaagacgctcgccccggctaggcccggcacggggatggtcattgccgtcaagaagctcaaccaggatggataccagggccacaaggagtggctgactgaagtgaactaccttggaacgctgtcgcacccctaccttgtgaagctcgttggctactgcctcgaggacgaacagcgcctcctcgtctacgagttcatgccacgcgggagtctggagaaccatctgttcaggaggagctcctatttccagcctctgtcctggaacctacggatgaagattgcgctcggagcagctaaaggcctcgcgtatctccacagcgacgaggctaaagtcatctaccgtgacttcaagacatctaatgtccttctagatgcgaacttcaatgcaaagctctctgatttcgggctggcgaaggatggtccgaccggcgacaagagccatgtctccactagggtgatggggactcacgggtatgcagctccagaataccttgcgacaggtcatctgaccaccaagagcgacgtgtacagctttggggtggtgctcctagagatgctgtcagggcggcgggcgctggacaagaaccgcccgaacggggagcacaacctggtggagtgggctaggccatacctgagaagcaagcggcgcatatttcgcatcctggacccacggctgggcgggcagtactcccttgccagggcgcagaaggctgcggcgctcgccctgcaatgcctctcggtggagtccaggcacaggcccagcatggacgaggtggtcacagcgttagagcagctccaggacaccaaagaaggaggtaaccatcacctacagaagaggccaggcagccggagcttggataacaatggcggcaaagcggcagggaaggggaagcctgctcctcatgtaaaaccagtttgagtgattggattttatatgccagagtatctctctttttttttcccatccatttgtaggtgtaggtaatatagtagggttcttagagggatttgtaaagaggcaggcagagttctggatgttttctgtctattatgtagttttttttacatcttcaagtctctgtaaagtacgctatgtaaatacataatgacatccagttcggagtgcg

SEQ ID NO: 30817 - protein, 463 aa, Zea mays subsp. mays
  peptide (1)..(463): Ceres Seq. ID no. 12352723
  misc_feature (58)..(457): NCBI GI NO: 14719339 NR Description: putative protein kinase [Oryza sativa]
  misc_feature (57)..(462): NCBI GI NO: 34906046 NR Description: putative serine/threonine-specific protein kinase
  misc_feature (58)..(458): NCBI GI NO: 34897424 NR Description: putative protein kinase
  misc_feature (58)..(454): NCBI GI NO: 15222437 NR Description: protein kinase APK1A; protein id: At1g07570.1
  misc_feature (58)..(325): NCBI GI NO: 8778537 NR Description: F22G5.5 [Arabidopsis thaliana]
  misc_feature (325)..(454): NCBI GI NO: 8778537 NR Description: F22G5.5 [Arabidopsis thaliana]
  misc_feature (58)..(442): NCBI GI NO: 15227001 NR Description: putative protein kinase; protein id: At2g28930.1
  misc_feature (58)..(445): NCBI GI NO: 15241749 NR Description: serine/threonine-specific protein kinase NAK
  misc_feature (58)..(445): NCBI GI NO: 166809 NR Description: protein kinase
  misc_feature (58)..(462): NCBI GI NO: 15227042 NR Description: putative protein kinase; protein id: At2g02800
ILNLIRPRPHPAGTITKKVPAFFFFFFFSSAPACRLLVLPHPLSDSARVPSAARRVAMGNCWGAKISSDSPSRGASSPSGTASKLASRNGAAAALSGCSSHASSASMLPTPRSEDEILESANVRAFSFNELRTATRNFRPDSVLGEGGFGSVFKGWVDEKTLAPARPGTGMVIAVKKLNQDGYQGHKEWLTEVNYLGTLSHPYLVKLVGYCLEDEQRLLVYEFMPRGSLENHLFRRSSYFQPLSWNLRMKIALGAAKGLAYLHSDEAKVIYRDFKTSNVLLDANFNAKLSDFGLAKDGPTGDKSHVSTRVMGTHGYAAPEYLATGHLTTKSDVYSFGVVLLEMLSGRRALDKNRPNGEHNLVEWARPYLRSKRRIFRILDPRLGGQYSLARAQKAAALALQCLSVESRHRPSMDEVVTALEQLQDTKEGGNHHLQKRPGSRSLDNNGGKAAGKGKPAPHVKPV

SEQ ID NO: 30818 - protein, 406 aa, Zea mays subsp. mays
  peptide (1)..(406): Ceres Seq. ID no. 12352724
  misc_feature (1)..(400): NCBI GI NO: 14719339 NR Description: putative protein kinase [Oryza sativa]
  misc_feature (1)..(405): NCBI GI NO: 34906046 NR Description: putative serine/threonine-specific protein kinase
  misc_feature (1)..(401): NCBI GI NO: 34897424 NR Description: putative protein kinase
  misc_feature (1)..(397): NCBI GI NO: 15222437 NR Description: protein kinase APK1A; protein id: At1g07570.1
  misc_feature (1)..(268): NCBI GI NO: 8778537 NR Description: F22G5.5 [Arabidopsis thaliana]
  misc_feature (268)..(397): NCBI GI NO: 8778537 NR Description: F22G5.5 [Arabidopsis thaliana]
  misc_feature (1)..(385): NCBI GI NO: 15227001 NR Description: putative protein kinase; protein id: At2g28930.1
  misc_feature (1)..(388): NCBI GI NO: 15241749 NR Description: serine/threonine-specific protein kinase NAK
  misc_feature (1)..(388): NCBI GI NO: 166809 NR Description: protein kinase
  misc_feature (1)..(405): NCBI GI NO: 15227042 NR Description: putative protein kinase; protein id: At2g02800
MGNCWGAKISSDSPSRGASSPSGTASKLASRNGAAAALSGCSSHASSASMLPTPRSEDEILESANVRAFSFNELRTATRNFRPDSVLGEGGFGSVFKGWVDEKTLAPARPGTGMVIAVKKLNQDGYQGHKEWLTEVNYLGTLSHPYLVKLVGYCLEDEQRLLVYEFMPRGSLENHLFRRSSYFQPLSWNLRMKIALGAAKGLAYLHSDEAKVIYRDFKTSNVLLDANFNAKLSDFGLAKDGPTGDKSHVSTRVMGTHGYAAPEYLATGHLTTKSDVYSFGVVLLEMLSGRRALDKNRPNGEHNLVEWARPYLRSKRRIFRILDPRLGGQYSLARAQKAAALALQCLSVESRHRPSMDEVVTALEQLQDTKEGGNHHLQKRPGSRSLDNNGGKAAGKGKPAPHVKPV

SEQ ID NO: 30819 - protein, 357 aa, Zea mays subsp. mays
  peptide (1)..(357): Ceres Seq. ID no. 12352725
  misc_feature (1)..(351): NCBI GI NO: 14719339 NR Description: putative protein kinase [Oryza sativa]
  misc_feature (1)..(356): NCBI GI NO: 34906046 NR Description: putative serine/threonine-specific protein kinase
  misc_feature (1)..(352): NCBI GI NO: 34897424 NR Description: putative protein kinase
  misc_feature (1)..(348): NCBI GI NO: 15222437 NR Description: protein kinase APK1A; protein id: At1g07570.1
  misc_feature (1)..(219): NCBI GI NO: 8778537 NR Description: F22G5.5 [Arabidopsis thaliana]
  misc_feature (219)..(348): NCBI GI NO: 8778537 NR Description: F22G5.5 [Arabidopsis thaliana]
  misc_feature (1)..(336): NCBI GI NO: 15227001 NR Description: putative protein kinase; protein id: At2g28930.1
  misc_feature (1)..(339): NCBI GI NO: 15241749 NR Description: serine/threonine-specific protein kinase NAK
  misc_feature (1)..(339): NCBI GI NO: 166809 NR Description: protein kinase
  misc_feature (1)..(356): NCBI GI NO: 15227042 NR Description: putative protein kinase; protein id: At2g02800
MLPTPRSEDEILESANVRAFSFNELRTATRNFRPDSVLGEGGFGSVFKGWVDEKTLAPARPGTGMVIAVKKLNQDGYQGHKEWLTEVNYLGTLSHPYLVKLVGYCLEDEQRLLVYEFMPRGSLENHLFRRSSYFQPLSWNLRMKIALGAAKGLAYLHSDEAKVIYRDFKTSNVLLDANFNAKLSDFGLAKDGPTGDKSHVSTRVMGTHGYAAPEYLATGHLTTKSDVYSFGVVLLEMLSGRRALDKNRPNGEHNLVEWARPYLRSKRRIFRILDPRLGGQYSLARAQKAAALALQCLSVESRHRPSMDEVVTALEQLQDTKEGGNHHLQKRPGSRSLDNNGGKAAGKGKPAPHVKPV

SEQ ID NO: 30820 - DNA, 1580 bp, Zea mays subsp. mays
  misc_feature (1)..(1580): Ceres Seq. ID no. 12379450
agttgtatcctctcctcctccttggacctcccatcttccttcctcttcgttcgtttctccaaccgaagcttaccggcattcgctcctggttttccggccaagaaccgatttttttccggttccggcgtagcagcaggcagctagcttgccaccagctgattcattgcctctactagtgtttttcctgagctcggtggggtgatcggtcgatcggccgccgctcgagacacgtacgtacgtacgtacccgatcgagggtcgctccaagatgatgatgagcgggaaccggaagcagagggtggcattgtcgccggtgaaggaggccgccgcggtgcccaaggaggaggtgtgggaggtccggcccggcgggatgctggtgcagaagcggagccccgacgcggacccgccgcctgtgcccaccatccgcgtcaaggtcaagttcaacggcgtctaccacgagatctacatcaattcccaggcatccttcggcgagctgaagaagctggtgtcggagaagacgggcctgcacccggacgaccagaaggtggtgtacaaggacaaggagagggactccaaggcgttcctggacatggccggcgtcaaggaccggtccaagatggtgatgctggaggaccccgccgccaaggccaagcgcctcctggaggagcgccggaccagcaaggccgagcgcgccgccaaggccatcgcccgcgtcgccctcgacgtcgacaagctcgccaccaaggtgtcggcgctggagacggtcgcgagcaagggcggcgaggtcgtggacgcggacgtggcgacgctgacggaggcgctgatgcgcgagctggtggagctggactccatcgccgccgacggggacgccaaggcgcagcggcgggcgcaggagaggcgtgtgcagaggcacgtggagacgctggacgccatccgcgccaagaacaaggcggcggcgcccagcagcaacaggacacggcggccagcgcacctcccgccgcgcccgcagaaccagcagcggcggcagttccagccgccggcgcccaccacggcgacggcgccggcgccgcagacccagacggcggcgagctgggactcgttcgacctcctgtcgtcggtgccgccgtcgacgtcggcggcggccccagtgacgagcaccaccacgccgtccccgcggttggagtgggagctcttctagagggctccaggcgccagcctgcctgtctgggccgtgggcccctggccccctctcctcccgccacatgtgtgcttgtccatcggctcggctcggctgggccggtaccttggccatggtgtgcatgtttgtcaatcgccattctttgctttcccgtcccttttgttctttcgttctttcttttttttcctcatgtcctttttattaagtatattgtgcatgatctccatgcatccactaaaaaaggggcaacaactgcagtagctagctagtagtagtgaacacaacagaagcgtgcgtccatggtgtctgtcgtcgtctgcaaataagtggtgtggccttgttgcaaccgtaccgatgatgatgaaggatttttttttttggcc

SEQ ID NO: 30821 - protein, 309 aa, Zea mays subsp. mays
  peptide (1)..(309): Ceres Seq. ID no. 12379451
  misc_feature (50)..(123): Pfam Name: Pfam Description:  Ubiquitin family
  misc_feature (22)..(309): NCBI GI NO: 25553557 NR Description: OSJNBa0038F22.4
  misc_feature (22)..(309): NCBI GI NO: 34898024 NR Description: ESTs AU082174
  misc_feature (29)..(265): NCBI GI NO: 15242267 NR Description: putative protein; protein id: At5g52060.1
  misc_feature (28)..(309): NCBI GI NO: 21537107 NR Description: unknown [Arabidopsis thaliana]
  misc_feature (8)..(309): NCBI GI NO: 15240726 NR Description: putative protein; protein id: At5g07220
  misc_feature (29)..(309): NCBI GI NO: 30697630 NR Description: BAG domain containing protein
  misc_feature (29)..(309): NCBI GI NO: 21553443 NR Description: unknown [Arabidopsis thaliana]
  misc_feature (29)..(309): NCBI GI NO: 30697627 NR Description: BAG domain containing protein
  misc_feature (29)..(309): NCBI GI NO: 10176928 NR Description: contains similarity to unknownprotein~emb|CAB87278
  misc_feature (14)..(226): NCBI GI NO: 38344334 NR Description: OSJNBa0058K23.16
MMMSGNRKQRVALSPVKEAAAVPKEEVWEVRPGGMLVQKRSPDADPPPVPTIRVKVKFNGVYHEIYINSQASFGELKKLVSEKTGLHPDDQKVVYKDKERDSKAFLDMAGVKDRSKMVMLEDPAAKAKRLLEERRTSKAERAAKAIARVALDVDKLATKVSALETVASKGGEVVDADVATLTEALMRELVELDSIAADGDAKAQRRAQERRVQRHVETLDAIRAKNKAAAPSSNRTRRPAHLPPRPQNQQRRQFQPPAPTTATAPAPQTQTAASWDSFDLLSSVPPSTSAAAPVTSTTTPSPRLEWELF

SEQ ID NO: 30822 - protein, 308 aa, Zea mays subsp. mays
  peptide (1)..(308): Ceres Seq. ID no. 12379452
  misc_feature (49)..(122): Pfam Name: Pfam Description:  Ubiquitin family
  misc_feature (21)..(308): NCBI GI NO: 25553557 NR Description: OSJNBa0038F22.4
  misc_feature (21)..(308): NCBI GI NO: 34898024 NR Description: ESTs AU082174
  misc_feature (28)..(264): NCBI GI NO: 15242267 NR Description: putative protein; protein id: At5g52060.1
  misc_feature (27)..(308): NCBI GI NO: 21537107 NR Description: unknown [Arabidopsis thaliana]
  misc_feature (7)..(308): NCBI GI NO: 15240726 NR Description: putative protein; protein id: At5g07220
  misc_feature (28)..(308): NCBI GI NO: 30697630 NR Description: BAG domain containing protein
  misc_feature (28)..(308): NCBI GI NO: 21553443 NR Description: unknown [Arabidopsis thaliana]
  misc_feature (28)..(308): NCBI GI NO: 30697627 NR Description: BAG domain containing protein
  misc_feature (28)..(308): NCBI GI NO: 10176928 NR Description: contains similarity to unknownprotein~emb|CAB87278
  misc_feature (13)..(225): NCBI GI NO: 38344334 NR Description: OSJNBa0058K23.16
MMSGNRKQRVALSPVKEAAAVPKEEVWEVRPGGMLVQKRSPDADPPPVPTIRVKVKFNGVYHEIYINSQASFGELKKLVSEKTGLHPDDQKVVYKDKERDSKAFLDMAGVKDRSKMVMLEDPAAKAKRLLEERRTSKAERAAKAIARVALDVDKLATKVSALETVASKGGEVVDADVATLTEALMRELVELDSIAADGDAKAQRRAQERRVQRHVETLDAIRAKNKAAAPSSNRTRRPAHLPPRPQNQQRRQFQPPAPTTATAPAPQTQTAASWDSFDLLSSVPPSTSAAAPVTSTTTPSPRLEWELF

SEQ ID NO: 30823 - protein, 307 aa, Zea mays subsp. mays
  peptide (1)..(307): Ceres Seq. ID no. 12379453
  misc_feature (48)..(121): Pfam Name: Pfam Description:  Ubiquitin family
  misc_feature (20)..(307): NCBI GI NO: 25553557 NR Description: OSJNBa0038F22.4
  misc_feature (20)..(307): NCBI GI NO: 34898024 NR Description: ESTs AU082174
  misc_feature (27)..(263): NCBI GI NO: 15242267 NR Description: putative protein; protein id: At5g52060.1
  misc_feature (26)..(307): NCBI GI NO: 21537107 NR Description: unknown [Arabidopsis thaliana]
  misc_feature (6)..(307): NCBI GI NO: 15240726 NR Description: putative protein; protein id: At5g07220
  misc_feature (27)..(307): NCBI GI NO: 30697630 NR Description: BAG domain containing protein
  misc_feature (27)..(307): NCBI GI NO: 21553443 NR Description: unknown [Arabidopsis thaliana]
  misc_feature (27)..(307): NCBI GI NO: 30697627 NR Description: BAG domain containing protein
  misc_feature (27)..(307): NCBI GI NO: 10176928 NR Description: contains similarity to unknownprotein~emb|CAB87278
  misc_feature (12)..(224): NCBI GI NO: 38344334 NR Description: OSJNBa0058K23.16
MSGNRKQRVALSPVKEAAAVPKEEVWEVRPGGMLVQKRSPDADPPPVPTIRVKVKFNGVYHEIYINSQASFGELKKLVSEKTGLHPDDQKVVYKDKERDSKAFLDMAGVKDRSKMVMLEDPAAKAKRLLEERRTSKAERAAKAIARVALDVDKLATKVSALETVASKGGEVVDADVATLTEALMRELVELDSIAADGDAKAQRRAQERRVQRHVETLDAIRAKNKAAAPSSNRTRRPAHLPPRPQNQQRRQFQPPAPTTATAPAPQTQTAASWDSFDLLSSVPPSTSAAAPVTSTTTPSPRLEWELF

SEQ ID NO: 30824 - DNA, 756 bp, Zea mays subsp. mays
  misc_feature (1)..(756): Ceres Seq. ID no. 12406829
cgccgaggccgcggcgcgcgcctacgacgccgccgcgctccacttccgcgggcccaaggccaagaccaacttccccgtcgcgttcgccgcgcttccgccgccgccgccgcccaagaagccggccgccgtgaccgtgagccccagcagcagcagcaccgtggagtcctcctcctcctcctcctcccgggactcgcccgccacgccgcccagggccgcgtctccgtgccagcaggccccgtcgctcgacctcagcctaggcggcacaccggccatggtggccgcccagccgttcctcttcctggacccgaggctcgcggtgaccgtggccgtgccggcgcccgtgccctaccggccgaccgcggtcgccgccggtgccaacaagcgtgacgcggcatcctgccgtgaagaggagcagagcgacaccgggtcgtcgtcatccgtggtggacgcctccccagcggtcggcgtggggttcgacctcaacatgccgccgccggccgaggtggcgtaggtggaccgaccggtgacacgagacgagacggctccgagaggtcgcgtagatgattagaaaaaagctgtattagtatgaggttgggtacttgatcgttcaatttgccgcgatgggttactgctagccaggtgtacatagacctttttgcatcggcacctaatagctatttgccgatgttacaaaaaaaaagaacgaatcgttttgtagttcgttgtaatatgtaacatattaaccgctaattaaat

SEQ ID NO: 30825 - protein, 169 aa, Zea mays subsp. mays
  peptide (1)..(169): Ceres Seq. ID no. 12406830
  misc_feature (1)..(169): NCBI GI NO: 38345793 NR Description: OSJNBa0085I10.10
  misc_feature (1)..(169): NCBI GI NO: 15232526 NR Description: ethylene responsive element binding factor 4
  misc_feature (1)..(169): NCBI GI NO: 4099914 NR Description: ethylene-responsive element binding protein homolog
  misc_feature (1)..(46): NCBI GI NO: 15240610 NR Description: putative protein; protein id: At5g50080.1
  misc_feature (1)..(46): NCBI GI NO: 34221731 NR Description: putative AP2 domain transcription factor
AEAAARAYDAAALHFRGPKAKTNFPVAFAALPPPPPPKKPAAVTVSPSSSSTVESSSSSSSRDSPATPPRAASPCQQAPSLDLSLGGTPAMVAAQPFLFLDPRLAVTVAVPAPVPYRPTAVAAGANKRDAASCREEEQSDTGSSSSVVDASPAVGVGFDLNMPPPAEVA

SEQ ID NO: 30826 - protein, 128 aa, Zea mays subsp. mays
  peptide (1)..(128): Ceres Seq. ID no. 12406831
RRGRGARLRRRRAPLPRAQGQDQLPRRVRRASAAAAAQEAGRRDREPQQQQHRGVLLLLLLPGLARHAAQGRVSVPAGPVARPQPRRHTGHGGRPAVPLPGPEARGDRGRAGARALPADRGRRRCQQA

SEQ ID NO: 30827 - DNA, 657 bp, Zea mays subsp. mays
  misc_feature (1)..(657): Ceres Seq. ID no. 12356849
acaatatcgttgaatacatcgagatcatatcaaaagttctcaaggatggtggggtctggattaatttgggtccccttctgtatcactttgctgattcatatgggccagatgatgatatgtctattgaattaagtttggaagatgtgaaaaaggttgcttaccattatggatttacaatggaggtgagggtttctgcattaaatctattttttttaaagagttgttgtgatagcatacttcgatatgtgatttgcaggtggagaaaatgatcgagactacttacactgcaaacatgaaagcaatgatgcagaatcggtaccgtgcagcattctggacaatgaggaaagatgcatctcggtcaaaagcttgtaagcctctttgaagtgaagatcatccatggcggacgatcaatttgtgccatcattattcactgttgtattcaaactccacacaggccgtgccagactaagttagatagatatatcagatgagctgcctgattcacagaatataattggcttaacataggaaaggaggtactgagccacgctagctagctcatccttttctcctatattacagatattcaaactgtactatggactctgtaagaatgagcaataaactaagcagacagaagttaaaaatagaagtaac

SEQ ID NO: 30828 - protein, 88 aa, Zea mays subsp. mays
  peptide (1)..(88): Ceres Seq. ID no. 12356850
  misc_feature (1)..(60): NCBI GI NO: 25408215 NR Description: hypothetical protein At2g32170
  misc_feature (1)..(60): NCBI GI NO: 30685202 NR Description: expressed protein [Arabidopsis thaliana]
  misc_feature (1)..(60): NCBI GI NO: 25349707 NR Description: hypothetical protein At2g32160
  misc_feature (1)..(60): NCBI GI NO: 30685200 NR Description: expressed protein [Arabidopsis thaliana]
  misc_feature (1)..(60): NCBI GI NO: 30685195 NR Description: expressed protein [Arabidopsis thaliana]
  misc_feature (1)..(81): NCBI GI NO: 21758737 NR Description: unnamed protein product [Homo sapiens]
  misc_feature (1)..(81): NCBI GI NO: 22748889 NR Description: hypothetical protein FLJ25795 [Homo sapiens]
  misc_feature (1)..(81): NCBI GI NO: 20886869 NR Description: RIKEN cDNA 2410127L17 [Mus musculus]
  misc_feature (1)..(81): NCBI GI NO: 34861686 NR Description: similar to RIKEN cDNA 2410127L17
  misc_feature (1)..(81): NCBI GI NO: 38074728 NR Description: similar to RIKEN cDNA 2410127L17 [Mus musculus]
NIVEYIEIISKVLKDGGVWINLGPLLYHFADSYGPDDDMSIELSLEDVKKVAYHYGFTMEVRVSALNLFFLKSCCDSILRYVICRWRK

SEQ ID NO: 30829 - protein, 50 aa, Zea mays subsp. mays
  peptide (1)..(50): Ceres Seq. ID no. 12356851
  misc_feature (1)..(22): NCBI GI NO: 25408215 NR Description: hypothetical protein At2g32170
  misc_feature (1)..(22): NCBI GI NO: 30685202 NR Description: expressed protein [Arabidopsis thaliana]
  misc_feature (1)..(22): NCBI GI NO: 25349707 NR Description: hypothetical protein At2g32160
  misc_feature (1)..(22): NCBI GI NO: 30685200 NR Description: expressed protein [Arabidopsis thaliana]
  misc_feature (1)..(22): NCBI GI NO: 30685195 NR Description: expressed protein [Arabidopsis thaliana]
  misc_feature (1)..(43): NCBI GI NO: 21758737 NR Description: unnamed protein product [Homo sapiens]
  misc_feature (1)..(43): NCBI GI NO: 22748889 NR Description: hypothetical protein FLJ25795 [Homo sapiens]
  misc_feature (1)..(43): NCBI GI NO: 20886869 NR Description: RIKEN cDNA 2410127L17 [Mus musculus]
  misc_feature (1)..(43): NCBI GI NO: 34861686 NR Description: similar to RIKEN cDNA 2410127L17
  misc_feature (1)..(43): NCBI GI NO: 38074728 NR Description: similar to RIKEN cDNA 2410127L17 [Mus musculus]
MSIELSLEDVKKVAYHYGFTMEVRVSALNLFFLKSCCDSILRYVICRWRK

SEQ ID NO: 30830 - protein, 47 aa, Zea mays subsp. mays
  peptide (1)..(47): Ceres Seq. ID no. 12356852
MHLGQKLVSLFEVKIIHGGRSICAIIIHCCIQTPHRPCQTKLDRYIR

SEQ ID NO: 30831 - DNA, 1848 bp, Zea mays subsp. mays
  misc_feature (1)..(1848): Ceres Seq. ID no. 12566326
gcacgagaccattacctagaacatcctaatcgaaaaacaatctttcttgtatcactaagctagtggccacaactcgttggcaacgaggaagcagcaataagccgagaagctatgccgccgccatatatggcacaggctgccggcaccgccgatgccactgatgaggctccactgctgctggcctcgtcggcggcggggtcgacgccgtcgccgccagctgcagcaccgcgccggaacaggttcgccttcgtctgcgccacgctcgcctccgtcaccaccatgctacatggctacaacctgacgctgatgagcggcgcggagctgttcatgcgggaggacgtggggctcaccgacggcgaggtcgaggtgctggcggggtccatgaacgtgttcatgctcgcgtccatcctcgccgccggctgagtggccgaccacctgggacgccgccgcaccctcgtgctcgccaacgccttcctcatggccggcgcgctcgccatgtcgctcggcaccagcttcgccgcgctcatggcggcgcgcttcgtcaccagcgtcggctccgggttcgcgcgcgtcgtcgcccccgtctacaacgccgagatatcgcaggcggctacgcgtggcgtcctctcatccatgctcgatatattcatcaacgtcggcatcctgctcagctacgtgtccaactacgcgttcgcgggcctcccggtgcacatcgggtggcgtctcatgtacgccgtcggcgtcatcccgcccgtgctcatcgccgccggggtgctcgtcatcatgccagagtcaccgcggtggctcgcgatgcagggccgccacgccgacgcgcgcgcggtgctgctgcgcacgtcggacagcccggcagacgccgacttccggctcggggagatcaagcgagccgccgacgcgccgtcgcccgctgctgcggcgcgccacggtggcggcggtgtctggagggagctcttcgtccggccatccaccacaaccacgagcgtgcggcgcatcctcggctgcgtcctcggcctgcagttcttcgtgcaggcgtccggcgtcgacgccatcctcctctacagcccgctggtcttcaaggcggtcggcgtggcgtccacctccgccgtgctcggcgccaccgtgtccatcggagccgtcaagacgtgcttcatcctcgtcgccatgctcttcaccgaccgcctcggccggcgcccgctcctcctcgccagcaccgccggcgtcgccgtgaccgtgaccgccctcgccgtgacgctgtgcgtgggcacggcgtcgccggcgacggccgcggcgtgcctggcgtccgtgctggccttcgtggccgcgtactccatcggctacgggtccgtggtgtcgacgtacagcgcggaggtcttgccgctacggctgcgcgcgcagggctccagcctgggcgtggccgtgaacaggctcacgtgcggggtggtcagcatgacgttcatctcgctcgccgacgccatcaccatgcccgggtgcttcttcctctacgctgcggtgacggcggctgcgtttgtgttcgtgtacacgcggctgccggagaccaagggccggagcctagaagacatggaagtgctcttccgcaagtgagggtggccggtggccacgtatagttgccattagcacaaggtcgcgtttggcagagttagtagaaattatccacaattaccagcagatttggaactccggtaccgcgcgctcgtcggtcgcaccgtcgcagtcgcagctacccccacggtcccacctagagatctcaacatcagatttaaacaccatatactacccatacctatgaagttatatctatctctatctccg

SEQ ID NO: 30832 - protein, 380 aa, Zea mays subsp. mays
  peptide (1)..(380): Ceres Seq. ID no. 12566327
  misc_feature (1)..(378): Pfam Name: and other Pfam Description: Sugar
  misc_feature (1)..(380): NCBI GI NO: 30025133 NR Description: putative sorbitol transporter [Prunus cerasus]
  misc_feature (1)..(380): NCBI GI NO: 28316433 NR Description: sorbitol transporter [Prunus cerasus]
  misc_feature (1)..(380): NCBI GI NO: 15230212 NR Description: sugar transport, putative; protein id: At3g18830.1
  misc_feature (1)..(378): NCBI GI NO: 16118827 NR Description: putative sugar transporter [Oryza sativa]
  misc_feature (1)..(378): NCBI GI NO: 34393630 NR Description: putative sorbitol transporter
  misc_feature (1)..(380): NCBI GI NO: 1778095 NR Description: putative sugar transporter
  misc_feature (1)..(380): NCBI GI NO: 7484647 NR Description: probable sugar transport protein 205 - beet
  misc_feature (1)..(378): NCBI GI NO: 34393631 NR Description: putative sorbitol transporter
  misc_feature (1)..(378): NCBI GI NO: 15226682 NR Description: putative sugar transporter; protein id: At2g16120
  misc_feature (1)..(378): NCBI GI NO: 33636088 NR Description: sorbitol-like transporter [Glycine max]
MAGALAMSLGTSFAALMAARFVTSVGSGFARVVAPVYNAEISQAATRGVLSSMLDIFINVGILLSYVSNYAFAGLPVHIGWRLMYAVGVIPPVLIAAGVLVIMPESPRWLAMQGRHADARAVLLRTSDSPADADFRLGEIKRAADAPSPAAAARHGGGGVWRELFVRPSTTTTSVRRILGCVLGLQFFVQASGVDAILLYSPLVFKAVGVASTSAVLGATVSIGAVKTCFILVAMLFTDRLGRRPLLLASTAGVAVTVTALAVTLCVGTASPATAAACLASVLAFVAAYSIGYGSVVSTYSAEVLPLRLRAQGSSLGVAVNRLTCGVVSMTFISLADAITMPGCFFLYAAVTAAAFVFVYTRLPETKGRSLEDMEVLFRK

SEQ ID NO: 30833 - protein, 374 aa, Zea mays subsp. mays
  peptide (1)..(374): Ceres Seq. ID no. 12566328
  misc_feature (1)..(372): Pfam Name: and other Pfam Description: Sugar
  misc_feature (1)..(374): NCBI GI NO: 30025133 NR Description: putative sorbitol transporter [Prunus cerasus]
  misc_feature (1)..(374): NCBI GI NO: 28316433 NR Description: sorbitol transporter [Prunus cerasus]
  misc_feature (1)..(374): NCBI GI NO: 15230212 NR Description: sugar transport, putative; protein id: At3g18830.1
  misc_feature (1)..(372): NCBI GI NO: 16118827 NR Description: putative sugar transporter [Oryza sativa]
  misc_feature (1)..(372): NCBI GI NO: 34393630 NR Description: putative sorbitol transporter
  misc_feature (1)..(374): NCBI GI NO: 1778095 NR Description: putative sugar transporter
  misc_feature (1)..(374): NCBI GI NO: 7484647 NR Description: probable sugar transport protein 205 - beet
  misc_feature (1)..(372): NCBI GI NO: 34393631 NR Description: putative sorbitol transporter
  misc_feature (1)..(372): NCBI GI NO: 15226682 NR Description: putative sugar transporter; protein id: At2g16120
  misc_feature (1)..(372): NCBI GI NO: 33636088 NR Description: sorbitol-like transporter [Glycine max]
MSLGTSFAALMAARFVTSVGSGFARVVAPVYNAEISQAATRGVLSSMLDIFINVGILLSYVSNYAFAGLPVHIGWRLMYAVGVIPPVLIAAGVLVIMPESPRWLAMQGRHADARAVLLRTSDSPADADFRLGEIKRAADAPSPAAAARHGGGGVWRELFVRPSTTTTSVRRILGCVLGLQFFVQASGVDAILLYSPLVFKAVGVASTSAVLGATVSIGAVKTCFILVAMLFTDRLGRRPLLLASTAGVAVTVTALAVTLCVGTASPATAAACLASVLAFVAAYSIGYGSVVSTYSAEVLPLRLRAQGSSLGVAVNRLTCGVVSMTFISLADAITMPGCFFLYAAVTAAAFVFVYTRLPETKGRSLEDMEVLFRK

SEQ ID NO: 30834 - protein, 364 aa, Zea mays subsp. mays
  peptide (1)..(364): Ceres Seq. ID no. 12566329
  misc_feature (1)..(362): Pfam Name: and other Pfam Description: Sugar
  misc_feature (1)..(364): NCBI GI NO: 30025133 NR Description: putative sorbitol transporter [Prunus cerasus]
  misc_feature (1)..(364): NCBI GI NO: 28316433 NR Description: sorbitol transporter [Prunus cerasus]
  misc_feature (1)..(364): NCBI GI NO: 15230212 NR Description: sugar transport, putative; protein id: At3g18830.1
  misc_feature (1)..(362): NCBI GI NO: 16118827 NR Description: putative sugar transporter [Oryza sativa]
  misc_feature (1)..(362): NCBI GI NO: 34393630 NR Description: putative sorbitol transporter
  misc_feature (1)..(364): NCBI GI NO: 1778095 NR Description: putative sugar transporter
  misc_feature (1)..(364): NCBI GI NO: 7484647 NR Description: probable sugar transport protein 205 - beet
  misc_feature (1)..(362): NCBI GI NO: 34393631 NR Description: putative sorbitol transporter
  misc_feature (1)..(362): NCBI GI NO: 15226682 NR Description: putative sugar transporter; protein id: At2g16120
  misc_feature (1)..(362): NCBI GI NO: 33636088 NR Description: sorbitol-like transporter [Glycine max]
MAARFVTSVGSGFARVVAPVYNAEISQAATRGVLSSMLDIFINVGILLSYVSNYAFAGLPVHIGWRLMYAVGVIPPVLIAAGVLVIMPESPRWLAMQGRHADARAVLLRTSDSPADADFRLGEIKRAADAPSPAAAARHGGGGVWRELFVRPSTTTTSVRRILGCVLGLQFFVQASGVDAILLYSPLVFKAVGVASTSAVLGATVSIGAVKTCFILVAMLFTDRLGRRPLLLASTAGVAVTVTALAVTLCVGTASPATAAACLASVLAFVAAYSIGYGSVVSTYSAEVLPLRLRAQGSSLGVAVNRLTCGVVSMTFISLADAITMPGCFFLYAAVTAAAFVFVYTRLPETKGRSLEDMEVLFRK

SEQ ID NO: 30835 - DNA, 1315 bp, Zea mays subsp. mays
  misc_feature (1)..(1315): Ceres Seq. ID no. 12412494
actttataccgcccgcccaccactcccctccccgtttctctctgcttcatccttcgctttcccctgcgccaggcccgccccgcccttccagaacgacatcctccttccccgccccctccgatggggaacccgccggagctgtaccacaagatcctcaacatccccaaggacacctcgccgcacgaaatccgcgccgcgtacaagaacctcgtcaagaagtggcaccccgacaagcacccgccgtcgtccaggccggaggccgaggcgcgcttcaaggccatcagcgaggcctacgaggcgctcctggatcagcaggagaacaggggtgtgttcgagctgtgcaacgacggccgggcgggtgagaggacgcgcggcgccttcggcgacggcggcggtggcggcggcggcggaggaggaggcctcggcgccggcgtcggggcccgcatggaggacgcgcagcgacgggttctgcacgaggagcgcgcccggcacgccggcgagggagttcaagaaggtgtacagctccggcgaccccggcgggcgccgcgccttcgccgagttctccagctccatcgtgcgcaaggcgccaccgctggagcgcaagctcgagtgcaccctcgaggagctctgccgcggctgcaagaaggaggtcagcttcacccgcgacgtcgtcaccaagaacgggtcaaccgtgaagaaggaggtgacacagacggtggtggtgaagccagggtggaggaaagggaagcaggtggtgctggaaggcatgggggacgagcgggcggggtgcctgcccggcgacgccatcctcacggtgtccgagaagaggcacccggcgttcaagcgggtgggcgacgacctggtgctcaaggcggaggtgccgctggtgggcgcgctcacgggctggtccttctcgttccgcctcctcggcggcaggaaggtgagctgctcgttccaggacgaggtcgtccgccccggctacgagaaggtgatcgccggcgagggcatgccggtccccgggcagaagggcgcgcgcggcgacctgagggtcaagttggacgtcgtcttccccaaggagctcaccgcagagcagcgcgccggcctcgccgagatcctcagagggtcctgctgatccatcggccccagttccaagcgtatcaggttttcttggccgtgtccgtgtgttaagttttaatatgtatactcatagcgcgtgtgatgagtatataagtacataaagagagagggggcgtcgttgtacatacaggtcgtttatattatatatatataaggataaaaagaaatatgaaacgtg

SEQ ID NO: 30836 - protein, 395 aa, Zea mays subsp. mays
  peptide (1)..(395): Ceres Seq. ID no. 12412495
  misc_feature (47)..(105): Pfam Name: Pfam Description:  DnaJ domain
  misc_feature (41)..(149): NCBI GI NO: 34907316 NR Description: putative heat shock protein
  misc_feature (48)..(139): NCBI GI NO: 15231987 NR Description: putative heat shock protein; protein id:At3g08910
  misc_feature (48)..(139): NCBI GI NO: 21618097 NR Description: putative heat shock protein [Arabidopsis thaliana]
  misc_feature (48)..(151): NCBI GI NO: 15240968 NR Description: heat shock protein 40-like; protein id:At5g01390
  misc_feature (48)..(146): NCBI GI NO: 6179940 NR Description: DnaJ-like protein [Nicotiana tabacum]
  misc_feature (48)..(146): NCBI GI NO: 11863723 NR Description: DnaJ like protein [Lycopersicon esculentum]
  misc_feature (48)..(132): NCBI GI NO: 15225377 NR Description: putative heat shock protein; protein id:At2g20560
  misc_feature (48)..(138): NCBI GI NO: 34905276 NR Description: putative heat shock protein
  misc_feature (48)..(112): NCBI GI NO: 15235310 NR Description: heat-shock protein; protein id: At4g28480
  misc_feature (48)..(135): NCBI GI NO: 15239455 NR Description: heat-shock protein - like; protein id: At5g25530.1
TLYRPPTTPLPVSLCFILRFPLRQARPALPERHPPSPPPPMGNPPELYHKILNIPKDTSPHEIRAAYKNLVKKWHPDKHPPSSRPEAEARFKAISEAYEALLDQQENRGVFELCNDGRAGERTRGAFGDGGGGGGGGGGGLGAGVGARMEDAQRRVLHEERARHAGEGVQEGVQLRRPRRAPRLRRVLQLHRAQGATAGAQARVHPRGALPRLQEGGQLHPRRRHQERVNREEGGDTDGGGEARVEEREAGGAGRHGGRAGGVPARRRHPHGVREEAPGVQAGGRRPGAQGGGAAGGRAHGLVLLVPPPRRQEGELLVPGRGRPPRLREGDRRRGHAGPRAEGRARRPEGQVGRRLPQGAHRRAARRPRRDPQRVLLIHRPQFQAYQVFLAVSVC

SEQ ID NO: 30837 - protein, 376 aa, Zea mays subsp. mays
  peptide (1)..(376): Ceres Seq. ID no. 12412496
  misc_feature (250)..(372): Pfam Name: Pfam Description:  DnaJ C terminal region
  misc_feature (150)..(374): NCBI GI NO: 34907316 NR Description: putative heat shock protein
  misc_feature (167)..(375): NCBI GI NO: 15231987 NR Description: putative heat shock protein; protein id:At3g08910
  misc_feature (167)..(375): NCBI GI NO: 21618097 NR Description: putative heat shock protein [Arabidopsis thaliana]
  misc_feature (193)..(372): NCBI GI NO: 15240968 NR Description: heat shock protein 40-like; protein id:At5g01390
  misc_feature (172)..(375): NCBI GI NO: 6179940 NR Description: DnaJ-like protein [Nicotiana tabacum]
  misc_feature (174)..(375): NCBI GI NO: 11863723 NR Description: DnaJ like protein [Lycopersicon esculentum]
  misc_feature (172)..(372): NCBI GI NO: 15225377 NR Description: putative heat shock protein; protein id:At2g20560
  misc_feature (140)..(374): NCBI GI NO: 34905276 NR Description: putative heat shock protein
  misc_feature (193)..(372): NCBI GI NO: 15235310 NR Description: heat-shock protein; protein id: At4g28480
  misc_feature (182)..(374): NCBI GI NO: 15239455 NR Description: heat-shock protein - like; protein id: At5g25530.1
LYTARPPLPSPFLSASSFAFPCARPAPPFQNDILLPRPLRWGTRRSCTTRSSTSPRTPRRTKSAPRTRTSSRSGTPTSTRRRPGRRPRRASRPSARPTRRSWISRRTGVCSSCATTAGRVRGRAAPSATAAVAAAAEEEASAPASGPAWRTRSDGFCTRSAPGTPAREFKKVYSSGDPGGRRAFAEFSSSIVRKAPPLERKLECTLEELCRGCKKEVSFTRDVVTKNGSTVKKEVTQTVVVKPGWRKGKQVVLEGMGDERAGCLPGDAILTVSEKRHPAFKRVGDDLVLKAEVPLVGALTGWSFSFRLLGGRKVSCSFQDEVVRPGYEKVIAGEGMPVPGQKGARGDLRVKLDVVFPKELTAEQRAGLAEILRGSC

SEQ ID NO: 30838 - protein, 355 aa, Zea mays subsp. mays
  peptide (1)..(355): Ceres Seq. ID no. 12412497
  misc_feature (7)..(65): Pfam Name: Pfam Description:  DnaJ domain
  misc_feature (1)..(109): NCBI GI NO: 34907316 NR Description: putative heat shock protein
  misc_feature (8)..(99): NCBI GI NO: 15231987 NR Description: putative heat shock protein; protein id:At3g08910
  misc_feature (8)..(99): NCBI GI NO: 21618097 NR Description: putative heat shock protein [Arabidopsis thaliana]
  misc_feature (8)..(111): NCBI GI NO: 15240968 NR Description: heat shock protein 40-like; protein id:At5g01390
  misc_feature (8)..(106): NCBI GI NO: 6179940 NR Description: DnaJ-like protein [Nicotiana tabacum]
  misc_feature (8)..(106): NCBI GI NO: 11863723 NR Description: DnaJ like protein [Lycopersicon esculentum]
  misc_feature (8)..(92): NCBI GI NO: 15225377 NR Description: putative heat shock protein; protein id:At2g20560
  misc_feature (8)..(98): NCBI GI NO: 34905276 NR Description: putative heat shock protein
  misc_feature (8)..(72): NCBI GI NO: 15235310 NR Description: heat-shock protein; protein id: At4g28480
  misc_feature (8)..(95): NCBI GI NO: 15239455 NR Description: heat-shock protein - like; protein id: At5g25530.1
MGNPPELYHKILNIPKDTSPHEIRAAYKNLVKKWHPDKHPPSSRPEAEARFKAISEAYEALLDQQENRGVFELCNDGRAGERTRGAFGDGGGGGGGGGGGLGAGVGARMEDAQRRVLHEERARHAGEGVQEGVQLRRPRRAPRLRRVLQLHRAQGATAGAQARVHPRGALPRLQEGGQLHPRRRHQERVNREEGGDTDGGGEARVEEREAGGAGRHGGRAGGVPARRRHPHGVREEAPGVQAGGRRPGAQGGGAAGGRAHGLVLLVPPPRRQEGELLVPGRGRPPRLREGDRRRGHAGPRAEGRARRPEGQVGRRLPQGAHRRAARRPRRDPQRVLLIHRPQFQAYQVFLAVSVC

SEQ ID NO: 30839 - DNA, 1097 bp, Zea mays subsp. mays
  misc_feature (1)..(1097): Ceres Seq. ID no. 12355286
tcttgaagtgtggaggtgtggtgttaggaacagctatccaccacgccgccacagacgtttcaagcgcgttccacttttttcagacatggtcggcgttctgcaagcatggtgacagtgctgccgtggagctcccgtgccacgaccgcaccctactccgcgcacggtccccgcccacagtccaccccgacgcgctctccacattgcagcctcggctcgtcctcactgaacccgaggggcctcttgccatcgaaatctttaccatttccagggatcatgtcgcctccctgaagcagctctgcggtggcacgagcaccttttgcgccgtcagcgctctcatctggcagtgcgcgtgcgttgcacgacggatcccaccggactctcaggtgcgcgtgatgttcccggccgacgtccgccgccggatgaggccgcccctcccgacccactacttcggcaacgcagtgatcaggctatacgccgctggcccggcaggggacattggcacggcggcgttggcatccgtcgctgcccgcatcaagggcgccgtcgagcggatggatgacgagctggtgcggtccgcgattgactactacgagatggccgagacgaacaagagacggactgggacaggcatcttaccaccgacggacctgaatattaccagctggttgggtaggccacagcacgacgcagattttggctggggaaagccgcaatccatgtcgcgggcggagtctgtccgcggcggctctatgcacttgatgaacgacgacggtggtaccggcaacgtccgcgtgctcgtgtgcttggaggctgaaaatataaaggagctaggacggctgctttatgcaaagctctagcaagctgctagtgctatgcactaaaaataatattaataataataaggtttgttactttgcttaaggggaaccatactttttccctcgcgatttattattattaattatggcagtttgaataatgaaaaccatttgtaattcctgtgacaattagtttatgcgtccacactagaaataaaaacttgtttgtaataaactacagtttttttttgttatggcagtttcaataatgaaatccgt

SEQ ID NO: 30840 - protein, 284 aa, Zea mays subsp. mays
  peptide (1)..(284): Ceres Seq. ID no. 12355287
  misc_feature (2)..(281): Pfam Name: Pfam Description:  Transferase family
  misc_feature (1)..(205): NCBI GI NO: 40253398 NR Description: putative hydroxyanthranilatehydroxycinnamoyltransferase 2
  misc_feature (2)..(281): NCBI GI NO: 32400293 NR Description: hydroxyanthranilate hydroxycinnamoyltransferase 2
  misc_feature (2)..(281): NCBI GI NO: 32400295 NR Description: hydroxyanthranilate hydroxycinnamoyltransferase 3
  misc_feature (2)..(281): NCBI GI NO: 32400291 NR Description: hydroxyanthranilate hydroxycinnamoyltransferase 1
  misc_feature (2)..(281): NCBI GI NO: 38345030 NR Description: OSJNBa0029H02.14
  misc_feature (2)..(281): NCBI GI NO: 6469032 NR Description: N-hydroxycinnamoyl/benzoyltransferase
  misc_feature (2)..(281): NCBI GI NO: 40644899 NR Description: hydroxycinnamoyl CoA quinate transferase
  misc_feature (2)..(281): NCBI GI NO: 27475616 NR Description: hydroxycinnamoyl transferase [Nicotiana tabacum]
  misc_feature (2)..(281): NCBI GI NO: 40644084 NR Description: hydroxycinnamoyl CoA quinate transferase
  misc_feature (2)..(280): NCBI GI NO: 32400297 NR Description: hydroxyanthranilate hydroxycinnamoyltransferase 4
LKCGGVVLGTAIHHAATDVSSAFHFFQTWSAFCKHGDSAAVELPCHDRTLLRARSPPTVHPDALSTLQPRLVLTEPEGPLAIEIFTISRDHVASLKQLCGGTSTFCAVSALIWQCACVARRIPPDSQVRVMFPADVRRRMRPPLPTHYFGNAVIRLYAAGPAGDIGTAALASVAARIKGAVERMDDELVRSAIDYYEMAETNKRRTGTGILPPTDLNITSWLGRPQHDADFGWGKPQSMSRAESVRGGSMHLMNDDGGTGNVRVLVCLEAENIKELGRLLYAKL

SEQ ID NO: 30841 - protein, 154 aa, Zea mays subsp. mays
  peptide (1)..(154): Ceres Seq. ID no. 12355288
  misc_feature (1)..(151): Pfam Name: Pfam Description:  Transferase family
  misc_feature (1)..(75): NCBI GI NO: 40253398 NR Description: putative hydroxyanthranilatehydroxycinnamoyltransferase 2
  misc_feature (1)..(151): NCBI GI NO: 32400293 NR Description: hydroxyanthranilate hydroxycinnamoyltransferase 2
  misc_feature (1)..(151): NCBI GI NO: 32400295 NR Description: hydroxyanthranilate hydroxycinnamoyltransferase 3
  misc_feature (1)..(151): NCBI GI NO: 32400291 NR Description: hydroxyanthranilate hydroxycinnamoyltransferase 1
  misc_feature (1)..(151): NCBI GI NO: 38345030 NR Description: OSJNBa0029H02.14
  misc_feature (1)..(151): NCBI GI NO: 6469032 NR Description: N-hydroxycinnamoyl/benzoyltransferase
  misc_feature (1)..(151): NCBI GI NO: 40644899 NR Description: hydroxycinnamoyl CoA quinate transferase
  misc_feature (1)..(151): NCBI GI NO: 27475616 NR Description: hydroxycinnamoyl transferase [Nicotiana tabacum]
  misc_feature (1)..(151): NCBI GI NO: 40644084 NR Description: hydroxycinnamoyl CoA quinate transferase
  misc_feature (1)..(150): NCBI GI NO: 32400297 NR Description: hydroxyanthranilate hydroxycinnamoyltransferase 4
MFPADVRRRMRPPLPTHYFGNAVIRLYAAGPAGDIGTAALASVAARIKGAVERMDDELVRSAIDYYEMAETNKRRTGTGILPPTDLNITSWLGRPQHDADFGWGKPQSMSRAESVRGGSMHLMNDDGGTGNVRVLVCLEAENIKELGRLLYAKL

SEQ ID NO: 30842 - protein, 145 aa, Zea mays subsp. mays
  peptide (1)..(145): Ceres Seq. ID no. 12355289
  misc_feature (1)..(142): Pfam Name: Pfam Description:  Transferase family
  misc_feature (1)..(66): NCBI GI NO: 40253398 NR Description: putative hydroxyanthranilatehydroxycinnamoyltransferase 2
  misc_feature (1)..(142): NCBI GI NO: 32400293 NR Description: hydroxyanthranilate hydroxycinnamoyltransferase 2
  misc_feature (1)..(142): NCBI GI NO: 32400295 NR Description: hydroxyanthranilate hydroxycinnamoyltransferase 3
  misc_feature (1)..(142): NCBI GI NO: 32400291 NR Description: hydroxyanthranilate hydroxycinnamoyltransferase 1
  misc_feature (1)..(142): NCBI GI NO: 38345030 NR Description: OSJNBa0029H02.14
  misc_feature (1)..(142): NCBI GI NO: 6469032 NR Description: N-hydroxycinnamoyl/benzoyltransferase
  misc_feature (1)..(142): NCBI GI NO: 40644899 NR Description: hydroxycinnamoyl CoA quinate transferase
  misc_feature (1)..(142): NCBI GI NO: 27475616 NR Description: hydroxycinnamoyl transferase [Nicotiana tabacum]
  misc_feature (1)..(142): NCBI GI NO: 40644084 NR Description: hydroxycinnamoyl CoA quinate transferase
  misc_feature (1)..(141): NCBI GI NO: 32400297 NR Description: hydroxyanthranilate hydroxycinnamoyltransferase 4
MRPPLPTHYFGNAVIRLYAAGPAGDIGTAALASVAARIKGAVERMDDELVRSAIDYYEMAETNKRRTGTGILPPTDLNITSWLGRPQHDADFGWGKPQSMSRAESVRGGSMHLMNDDGGTGNVRVLVCLEAENIKELGRLLYAKL

SEQ ID NO: 30843 - DNA, 847 bp, Zea mays subsp. mays
  misc_feature (1)..(847): Ceres Seq. ID no. 12346394
agtctggggataataatccacactccacaagcagccatggcgccacccatcacgtccctgtcgtctctcatggcgtcggcgggcaggagggggctgctggcgctgggcgccgggttcctggcctcggccgcgctgctgtccccggcgggcgacgccggcgccacgcgcatcgagtactacgcgacggtcggggacaagatgtgcgacctgagcctcgtcaagtccggcctcgcgtactgcgacgtcgaggtcggcaccggcgtccagcccctcgcgcggcgagctcatcaatgtgcactacaccgcgagatttcccgacggtacgctgttcgacagcagctacaagcgcgggaggccactgacgatgcgcataggcgcaggcaagatcctccgagggcttgaacaggggatcagtggcggcggccggtgtgccgcccatgcttgttggtggaaagcgcaagctgatgatacctgcgtcactggcgtacgggcctgaaccggcaggctgcttctcaggagactgcaacatccccggaaactccacacttctatatgaccttttcctcgtcgggatctacaagtgagccctcgatgacagggaatgttcagaacctaagtgtgtcacacatggagggtttcaggaggaattcttggcggtgaaagcacctgcagaggcagagccacttgcagaagcttctgtactccagagagctacctggattgaataaaatgatgatatataaaccatccttgttacataataacgccattgtggaactttgtaaagaccaatcatattgttgacttatatagcagtttgatacagccaaagcgagcaagttatcgc

SEQ ID NO: 30844 - protein, 133 aa, Zea mays subsp. mays
  peptide (1)..(133): Ceres Seq. ID no. 12346395
  misc_feature (29)..(87): NCBI GI NO: 18420509 NR Description: FKBP-type peptidyl-prolyl cis-trans isomerase
  misc_feature (29)..(87): NCBI GI NO: 7487207 NR Description: hypothetical protein T19P19
SLGIIIHTPQAAMAPPITSLSSLMASAGRRGLLALGAGFLASAALLSPAGDAGATRIEYYATVGDKMCDLSLVKSGLAYCDVEVGTGVQPLARRAHQCALHREISRRYAVRQQLQAREATDDAHRRRQDPPRA

SEQ ID NO: 30845 - protein, 121 aa, Zea mays subsp. mays
  peptide (1)..(121): Ceres Seq. ID no. 12346396
  misc_feature (17)..(75): NCBI GI NO: 18420509 NR Description: FKBP-type peptidyl-prolyl cis-trans isomerase
  misc_feature (17)..(75): NCBI GI NO: 7487207 NR Description: hypothetical protein T19P19
MAPPITSLSSLMASAGRRGLLALGAGFLASAALLSPAGDAGATRIEYYATVGDKMCDLSLVKSGLAYCDVEVGTGVQPLARRAHQCALHREISRRYAVRQQLQAREATDDAHRRRQDPPRA

SEQ ID NO: 30846 - protein, 119 aa, Zea mays subsp. mays
  peptide (1)..(119): Ceres Seq. ID no. 12346397
SGDNNPHSTSSHGATHHVPVVSHGVGGQEGAAGAGRRVPGLGRAAVPGGRRRRHAHRVLRDGRGQDVRPEPRQVRPRVLRRRGRHRRPAPRAASSSMCTTPRDFPTVRCSTAATSAGGH

SEQ ID NO: 30847 - DNA, 1443 bp, Zea mays subsp. mays
  misc_feature (1)..(1443): Ceres Seq. ID no. 12351752
  misc_feature (1217)..(1217): n is a, c, t, g, unknown, or other
atctctagttctctacacaccgacacgcatgcagatcggttgccggggcacgatgaggaccgcgtggccgctgctcctcgtggcgacggcgctgctttcgacttcggcagcaagggccaggaggacctgcaggttccctgccgtcttcaacttcggcgactccaactccgacaccggcggcttctgggcggccttcccggcgcagcagggcccgttcggcatgacgtacttcggcaggccggccggccgcgcctccgacggccgcctcgtcatcgacttcatagcgcaagcgatggggctgccgctgctgagcccctacctgcagtccatagggtcggactaccggcacggcgccaacttcgcgacgctggcgtcgacggcgctgctgcccaacacgtcggtgttcgtcaccgggaccagccccttctccctcggcatccagctcaaccagatgaaggagttcaggaacagagtgctcgcctccaaaggaaacaacggccaactccctggcccggaaatcttgggcgacgctctgtacacaatcgacatcgggcagaacgacttcacctcgaaccttggatccctcggggtcgaaagcgtcaagcgaagcctaccttcagtcgtcagccagatctcctggacgatacagcatcggagctcgcaacttcatggtgttcaacatggcgcccgtaggatgctacccggcattcctcgcggggcttcctcgtgacagcaaggacctggacgagttcgggtgcgtgaaaagctacaacggcggggtcacgtactacaaccagctgctgaacgacagcctagccgagatgaggaagacgctgcaggacgcgtcggtcgtgtacgtcgacaagcatgctgtgacgctcgaactgttccagcacccaaccgctcacgggctgaagcacggggctagagcttgctgcgggtacggcggtggaacctacaatttcgatcgagatgtttattgtggtgacagcaaggtagtgaatggagaagctgcgacggcgggggcttgtgcagacccgcaaaactatgtcagctgggacgggatacatgccactgaagctgcaaatagtaggatagcgtatgctgtgatcagcggctcctattcgtacccacctttcgatctttcaaagctatgtagcccttaggcatcatcagtcgtgaaagggagtacagcatcaccatacaccgcatttctntgaaacaagcagccacatttctttcattgacagcatcaacacacaggacaaaagctacgaactcaagaacgacgcacgcctacaacgagtcacgacgagaacagaggctaaagacctactccctctgccctagaaatgaagtcgtttgacttttttaagacaagtttgactggtttgttttattcaaaatatttatgaaaatatagaaaaaaaacatttgatagtc

SEQ ID NO: 30848 - protein, 242 aa, Zea mays subsp. mays
  peptide (1)..(242): Ceres Seq. ID no. 12351753
  misc_feature (48)..(233): Pfam Name: Pfam Description:  GDSL-like Lipase/Acylhydrolase
  misc_feature (19)..(233): NCBI GI NO: 34898314 NR Description: ESTs AU075322
  misc_feature (19)..(233): NCBI GI NO: 15234074 NR Description: putative acetyltransferase; protein id: At4g01130
  misc_feature (19)..(216): NCBI GI NO: 7485222 NR Description: hypothetical protein A_IG002N01
  misc_feature (7)..(216): NCBI GI NO: 33147015 NR Description: putative early nodulin 8 precursor
  misc_feature (7)..(216): NCBI GI NO: 34901120 NR Description: contains ESTsAU172828
  misc_feature (31)..(217): NCBI GI NO: 33147016 NR Description: putative early nodulin 8 precursor
  misc_feature (23)..(216): NCBI GI NO: 30909057 NR Description: ENSP-like protein [Hevea brasiliensis]
  misc_feature (24)..(216): NCBI GI NO: 15231558 NR Description: nodulin, putative; protein id: At3g26430
  misc_feature (23)..(224): NCBI GI NO: 18390045 NR Description: Enod8.1 [Medicago truncatula]
  misc_feature (23)..(224): NCBI GI NO: 25457244 NR Description: early nodule-specific protein ENOD8
SLVLYTPTRMQIGCRGTMRTAWPLLLVATALLSTSAARARRTCRFPAVFNFGDSNSDTGGFWAAFPAQQGPFGMTYFGRPAGRASDGRLVIDFIAQAMGLPLLSPYLQSIGSDYRHGANFATLASTALLPNTSVFVTGTSPFSLGIQLNQMKEFRNRVLASKGNNGQLPGPEILGDALYTIDIGQNDFTSNLGSLGVESVKRSLPSVVSQISWTIQHRSSQLHGVQHGARRMLPGIPRGASS

SEQ ID NO: 30849 - protein, 233 aa, Zea mays subsp. mays
  peptide (1)..(233): Ceres Seq. ID no. 12351754
  misc_feature (39)..(224): Pfam Name: Pfam Description:  GDSL-like Lipase/Acylhydrolase
  misc_feature (10)..(224): NCBI GI NO: 34898314 NR Description: ESTs AU075322
  misc_feature (10)..(224): NCBI GI NO: 15234074 NR Description: putative acetyltransferase; protein id: At4g01130
  misc_feature (10)..(207): NCBI GI NO: 7485222 NR Description: hypothetical protein A_IG002N01
  misc_feature (1)..(207): NCBI GI NO: 33147015 NR Description: putative early nodulin 8 precursor
  misc_feature (1)..(207): NCBI GI NO: 34901120 NR Description: contains ESTsAU172828
  misc_feature (22)..(208): NCBI GI NO: 33147016 NR Description: putative early nodulin 8 precursor
  misc_feature (14)..(207): NCBI GI NO: 30909057 NR Description: ENSP-like protein [Hevea brasiliensis]
  misc_feature (15)..(207): NCBI GI NO: 15231558 NR Description: nodulin, putative; protein id: At3g26430
  misc_feature (14)..(215): NCBI GI NO: 18390045 NR Description: Enod8.1 [Medicago truncatula]
  misc_feature (14)..(215): NCBI GI NO: 25457244 NR Description: early nodule-specific protein ENOD8
MQIGCRGTMRTAWPLLLVATALLSTSAARARRTCRFPAVFNFGDSNSDTGGFWAAFPAQQGPFGMTYFGRPAGRASDGRLVIDFIAQAMGLPLLSPYLQSIGSDYRHGANFATLASTALLPNTSVFVTGTSPFSLGIQLNQMKEFRNRVLASKGNNGQLPGPEILGDALYTIDIGQNDFTSNLGSLGVESVKRSLPSVVSQISWTIQHRSSQLHGVQHGARRMLPGIPRGASS

SEQ ID NO: 30850 - protein, 230 aa, Zea mays subsp. mays
  peptide (1)..(230): Ceres Seq. ID no. 12351755
ISSSLHTDTHADRLPGHDEDRVAAAPRGDGAAFDFGSKGQEDLQVPCRLQLRRLQLRHRRLLGGLPGAAGPVRHDVLRQAGRPRLRRPPRHRLHSASDGAAAAEPLPAVHRVGLPARRQLRDAGVDGAAAQHVGVRHRDQPLLPRHPAQPDEGVQEQSARLQRKQRPTPWPGNLGRRSVHNRHRAERLHLEPWIPRGRKRQAKPTFSRQPDLLDDTASELATSWCSTWRP

SEQ ID NO: 30851 - DNA, 1958 bp, Zea mays subsp. mays
  misc_feature (1)..(1958): Ceres Seq. ID no. 12360014
accccttcgccccgtatcgttcccttcctcctctcttttccccaccgccccctttcttggcgtctacccggcgcgaccaggaccgaatcctaaggccgccggccgccgccgccgccgcctgctcccgttggacacggtaaaacctcctccctcctcgtccgtgtcgccggggtccggggtccaagcggctgcgcgcgcggtctcgccgccggcgccgatctgggcgccgccggcgttgaccctgtccgattcgccccgggctgcgagacctctgcctccctgaccggttactcggaacttctactcgcctgtgggatcctccagcggatcagatgagcacatcgacttgagcaccacgctttttggttggaaggcgaatcgtagagctttcctgggtttctctgagggctcttctcagatgtggcgtcctccagagtctaccacatactgtttgaggagtcctggttcttttcggaatccggactaaccaagggctcctactgtgcacgactgcttgacaggatatttcggattattattatgtgcgtgcgagcgcgcgtgtgcgccttctagagagtttggagtaaagaaaccaaccctgcatctgtattctgtctgtctgtgctgcttcgaataagccttgcatctcgctgacttgggatataactatgccgaaggacaggagctcccgcgtttcctcttatgagagccgccgggctggtgcctccccatacttctcatcgtctcatggacagagcagttcttgtcgccggtccgaggagtcttgtggggcagcagcggcggcagcagcaaagcaagctgcagagtgggaggatgttcggtgcccggtgtgcatggaccacccgcacaacgccgtcctgctggtctgctcctcacacgagaagggctgccgccccttcatgtgcgacaccagctcgcggcactcgaactgctatgaccagtaccggaaggcctccaaggattcaaggacagagtgcagcgagtgccagcagcaggttcagctctcgtgcccactgtgccgtgggccggtcagcgattgcatcaaggactacagcgcgcggaggttcatgaacaccaaggtccggtcgtgcaccacggagtcgtgcgagttcaggggcgcctaccaggagctgaggaagcatgctagggtggagcatccaacaggaaggccaatggaggtagaccctgagcggcagcgggactggcgccggatggagcagcaacgggaccttggagacttgatgagcatgctgcgttcagggttcaacagcaatattgaggacgacagtggcgggcttggagacaccgaagaagggggagaggaagctgaaatgactccggcctccataaccatggtcttcatcatgccatctagaggctcaatcatgcagtacctatcggaacgcagcagaacgatcattctggtcagtcggaggcgagcaagcagcagcagcggtggcgacgctgaagccactgctccagacagcgaggaaggtgatgaccctatgccatcggcagaggcatctgctggttcacagcattcttccgaacaagaggaggctgacggtgaccctgcccaatgacgtaagtcagctggcaagaggtgtgccatggcatcttcttagcctgaagatcccgaccaacatggcaacatggtatgtggcgaagaaaaacatggatgcaggtgccaccaaggcgtagccaggacaatctgtctacgcaggaaaatcgaggggaatcagcatcgcgcgaaggcttcagaaacgtggtggcctctagtaccaattctaatgtttccgcggggttctgtggcaatggagagagagaaacaattgggtggtagctatcttgtctgaatggatttcattttccttgcattgtaattctctaatatatattatcatatgaaatagattcggccgtatttgcactgcgtg

SEQ ID NO: 30852 - protein, 311 aa, Zea mays subsp. mays
  peptide (1)..(311): Ceres Seq. ID no. 12360015
  misc_feature (1)..(310): NCBI GI NO: 34912600 NR Description: P0046B10.17
  misc_feature (109)..(308): NCBI GI NO: 18404727 NR Description: expressed protein; protein id: At3g25910
  misc_feature (34)..(105): NCBI GI NO: 18404727 NR Description: expressed protein; protein id: At3g25910
  misc_feature (98)..(239): NCBI GI NO: 38346521 NR Description: OSJNBa0027H09.16
  misc_feature (43)..(112): NCBI GI NO: 38346521 NR Description: OSJNBa0027H09.16
  misc_feature (1)..(240): NCBI GI NO: 15221290 NR Description: unknown protein; protein id: At1g68140
  misc_feature (112)..(245): NCBI GI NO: 15230170 NR Description: unknown protein; protein id: At3g24740
  misc_feature (53)..(109): NCBI GI NO: 15230170 NR Description: unknown protein; protein id: At3g24740
  misc_feature (1)..(200): NCBI GI NO: 18394245 NR Description: expressed protein; protein id: At1g15430
  misc_feature (32)..(200): NCBI GI NO: 5103842 NR Description: F9L1.39 [Arabidopsis thaliana]
MPKDRSSRVSSYESRRAGASPYFSSSHGQSSSCRRSEESCGAAAAAAAKQAAEWEDVRCPVCMDHPHNAVLLVCSSHEKGCRPFMCDTSSRHSNCYDQYRKASKDSRTECSECQQQVQLSCPLCRGPVSDCIKDYSARRFMNTKVRSCTTESCEFRGAYQELRKHARVEHPTGRPMEVDPERQRDWRRMEQQRDLGDLMSMLRSGFNSNIEDDSGGLGDTEEGGEEAEMTPASITMVFIMPSRGSIMQYLSERSRTIILVSRRRASSSSGGDAEATAPDSEEGDDPMPSAEASAGSQHSSEQEEADGDPAQ

SEQ ID NO: 30853 - protein, 249 aa, Zea mays subsp. mays
  peptide (1)..(249): Ceres Seq. ID no. 12360016
  misc_feature (1)..(248): NCBI GI NO: 34912600 NR Description: P0046B10.17
  misc_feature (47)..(246): NCBI GI NO: 18404727 NR Description: expressed protein; protein id: At3g25910
  misc_feature (1)..(43): NCBI GI NO: 18404727 NR Description: expressed protein; protein id: At3g25910
  misc_feature (36)..(177): NCBI GI NO: 38346521 NR Description: OSJNBa0027H09.16
  misc_feature (1)..(50): NCBI GI NO: 38346521 NR Description: OSJNBa0027H09.16
  misc_feature (1)..(178): NCBI GI NO: 15221290 NR Description: unknown protein; protein id: At1g68140
  misc_feature (50)..(183): NCBI GI NO: 15230170 NR Description: unknown protein; protein id: At3g24740
  misc_feature (1)..(47): NCBI GI NO: 15230170 NR Description: unknown protein; protein id: At3g24740
  misc_feature (1)..(138): NCBI GI NO: 18394245 NR Description: expressed protein; protein id: At1g15430
  misc_feature (1)..(138): NCBI GI NO: 5103842 NR Description: F9L1.39 [Arabidopsis thaliana]
MDHPHNAVLLVCSSHEKGCRPFMCDTSSRHSNCYDQYRKASKDSRTECSECQQQVQLSCPLCRGPVSDCIKDYSARRFMNTKVRSCTTESCEFRGAYQELRKHARVEHPTGRPMEVDPERQRDWRRMEQQRDLGDLMSMLRSGFNSNIEDDSGGLGDTEEGGEEAEMTPASITMVFIMPSRGSIMQYLSERSRTIILVSRRRASSSSGGDAEATAPDSEEGDDPMPSAEASAGSQHSSEQEEADGDPAQ

SEQ ID NO: 30854 - protein, 227 aa, Zea mays subsp. mays
  peptide (1)..(227): Ceres Seq. ID no. 12360017
  misc_feature (1)..(226): NCBI GI NO: 34912600 NR Description: P0046B10.17
  misc_feature (25)..(224): NCBI GI NO: 18404727 NR Description: expressed protein; protein id: At3g25910
  misc_feature (1)..(21): NCBI GI NO: 18404727 NR Description: expressed protein; protein id: At3g25910
  misc_feature (14)..(155): NCBI GI NO: 38346521 NR Description: OSJNBa0027H09.16
  misc_feature (1)..(28): NCBI GI NO: 38346521 NR Description: OSJNBa0027H09.16
  misc_feature (1)..(156): NCBI GI NO: 15221290 NR Description: unknown protein; protein id: At1g68140
  misc_feature (28)..(161): NCBI GI NO: 15230170 NR Description: unknown protein; protein id: At3g24740
  misc_feature (1)..(25): NCBI GI NO: 15230170 NR Description: unknown protein; protein id: At3g24740
  misc_feature (1)..(116): NCBI GI NO: 18394245 NR Description: expressed protein; protein id: At1g15430
  misc_feature (1)..(116): NCBI GI NO: 5103842 NR Description: F9L1.39 [Arabidopsis thaliana]
MCDTSSRHSNCYDQYRKASKDSRTECSECQQQVQLSCPLCRGPVSDCIKDYSARRFMNTKVRSCTTESCEFRGAYQELRKHARVEHPTGRPMEVDPERQRDWRRMEQQRDLGDLMSMLRSGFNSNIEDDSGGLGDTEEGGEEAEMTPASITMVFIMPSRGSIMQYLSERSRTIILVSRRRASSSSGGDAEATAPDSEEGDDPMPSAEASAGSQHSSEQEEADGDPAQ

SEQ ID NO: 30855 - DNA, 500 bp, Zea mays subsp. mays
  misc_feature (1)..(500): Ceres Seq. ID no. 1548123
gagtcaggcccaggcctaacctcagttcatccgagcagccgaacacgcccgccgccattctacgccctgctgcccaggtcggacggaccctttgccggagacgagcacacgccacagcagagcagcgcgaagcgagagatccaatggcggcggcggaggggcagtgggtgctcatggcaacggggcggacgccgactaacattgcggtgatcaagtactgggggaagcgggacgaggcgctcatcctccccatcaacgacagcatcagcgtaacgctcgaccctgaccatctctccgccaccaccactgtcgccgtcagcccctcattcccttccgaccgcatgtggctcaatggcaaggagatctcgctattaggaggaaggtttcagagctgcctcagagaaatcagaaagcgtgctcgtgactttgaggacaaggagaagggcgtcaagatcaagaaagaggactgggacaagttgcatgttcacatagcctcgtac

SEQ ID NO: 30856 - protein, 166 aa, Zea mays subsp. mays
  peptide (1)..(166): Ceres Seq. ID no. 1548124
  misc_feature (51)..(165): NCBI GI NO: 15224931 NR Description: mevalonate diphosphate decarboxylase
  misc_feature (55)..(165): NCBI GI NO: 16417950 NR Description: mevalonate disphosphate decarboxylase
  misc_feature (51)..(165): NCBI GI NO: 11281655 NR Description: diphosphomevalonate decarboxylase (EC 4
  misc_feature (51)..(165): NCBI GI NO: 18410026 NR Description: DIPHOSPHOMEVALONATE DECARBOXYLASE - like protein
  misc_feature (58)..(165): NCBI GI NO: 21593039 NR Description: mevalonate diphosphate decarboxylase
  misc_feature (51)..(165): NCBI GI NO: 21593243 NR Description: diphosphomevalonate decarboxylase-like protein
  misc_feature (50)..(161): NCBI GI NO: 20149736 NR Description: mevalonate
  misc_feature (50)..(161): NCBI GI NO: 23814095 NR Description: Diphosphomevalonate decarboxylase
  misc_feature (50)..(161): NCBI GI NO: 26354448 NR Description: unnamed protein product [Mus musculus]
  misc_feature (50)..(161): NCBI GI NO: 13592005 NR Description: mevalonate pyrophosphate decarboxylase
VRPRPNLSSSEQPNTPAAILRPAAQVGRTLCRRRAHATAEQREARDPMAAAEGQWVLMATGRTPTNIAVIKYWGKRDEALILPINDSISVTLDPDHLSATTTVAVSPSFPSDRMWLNGKEISLLGGRFQSCLREIRKRARDFEDKEKGVKIKKEDWDKLHVHIASY

SEQ ID NO: 30857 - protein, 119 aa, Zea mays subsp. mays
  peptide (1)..(119): Ceres Seq. ID no. 1548125
  misc_feature (4)..(118): NCBI GI NO: 15224931 NR Description: mevalonate diphosphate decarboxylase
  misc_feature (8)..(118): NCBI GI NO: 16417950 NR Description: mevalonate disphosphate decarboxylase
  misc_feature (4)..(118): NCBI GI NO: 11281655 NR Description: diphosphomevalonate decarboxylase (EC 4
  misc_feature (4)..(118): NCBI GI NO: 18410026 NR Description: DIPHOSPHOMEVALONATE DECARBOXYLASE - like protein
  misc_feature (11)..(118): NCBI GI NO: 21593039 NR Description: mevalonate diphosphate decarboxylase
  misc_feature (4)..(118): NCBI GI NO: 21593243 NR Description: diphosphomevalonate decarboxylase-like protein
  misc_feature (3)..(114): NCBI GI NO: 20149736 NR Description: mevalonate
  misc_feature (3)..(114): NCBI GI NO: 26354448 NR Description: unnamed protein product [Mus musculus]
  misc_feature (3)..(114): NCBI GI NO: 23814095 NR Description: Diphosphomevalonate decarboxylase
  misc_feature (3)..(114): NCBI GI NO: 13592005 NR Description: mevalonate pyrophosphate decarboxylase
MAAAEGQWVLMATGRTPTNIAVIKYWGKRDEALILPINDSISVTLDPDHLSATTTVAVSPSFPSDRMWLNGKEISLLGGRFQSCLREIRKRARDFEDKEKGVKIKKEDWDKLHVHIASY

SEQ ID NO: 30858 - protein, 109 aa, Zea mays subsp. mays
  peptide (1)..(109): Ceres Seq. ID no. 1548126
  misc_feature (1)..(108): NCBI GI NO: 15224931 NR Description: mevalonate diphosphate decarboxylase
  misc_feature (1)..(108): NCBI GI NO: 16417950 NR Description: mevalonate disphosphate decarboxylase
  misc_feature (1)..(108): NCBI GI NO: 11281655 NR Description: diphosphomevalonate decarboxylase (EC 4
  misc_feature (1)..(108): NCBI GI NO: 18410026 NR Description: DIPHOSPHOMEVALONATE DECARBOXYLASE - like protein
  misc_feature (1)..(108): NCBI GI NO: 21593039 NR Description: mevalonate diphosphate decarboxylase
  misc_feature (1)..(108): NCBI GI NO: 21593243 NR Description: diphosphomevalonate decarboxylase-like protein
  misc_feature (1)..(104): NCBI GI NO: 20149736 NR Description: mevalonate
  misc_feature (1)..(104): NCBI GI NO: 23814095 NR Description: Diphosphomevalonate decarboxylase
  misc_feature (1)..(104): NCBI GI NO: 26354448 NR Description: unnamed protein product [Mus musculus]
  misc_feature (1)..(104): NCBI GI NO: 13592005 NR Description: mevalonate pyrophosphate decarboxylase
MATGRTPTNIAVIKYWGKRDEALILPINDSISVTLDPDHLSATTTVAVSPSFPSDRMWLNGKEISLLGGRFQSCLREIRKRARDFEDKEKGVKIKKEDWDKLHVHIASY

SEQ ID NO: 30859 - DNA, 1149 bp, Zea mays subsp. mays; identical to SEQ ID NO: 23827
  misc_feature (1)..(1149): Ceres Seq. ID no. 12406482

SEQ ID NO: 30860 - protein, 226 aa, Zea mays subsp. mays; identical to SEQ ID NO: 23828
  peptide (1)..(226): Ceres Seq. ID no. 12406483
  misc_feature (1)..(225): Pfam Name: eIF-3 p25 Pfam Description: Eukaryotic translation initiation factor 3 subunit 11
  misc_feature (1)..(225): NCBI GI NO: 23396617 NR Description: Eukaryotic translation initiation factor 3 subunit11
  misc_feature (5)..(226): NCBI GI NO: 15234123 NR Description: putative protein; protein id: At4g33250
  misc_feature (15)..(221): NCBI GI NO: 21312044 NR Description: RIKEN cDNA 1200009C21 [Mus musculus]
  misc_feature (15)..(221): NCBI GI NO: 27730981 NR Description: similar to RIKEN cDNA 1200009C21
  misc_feature (15)..(221): NCBI GI NO: 10801345 NR Description: muscle specific gene [Homo sapiens]
  misc_feature (15)..(221): NCBI GI NO: 5114051 NR Description: HSPC029 [Homo sapiens]
  misc_feature (8)..(218): NCBI GI NO: 19922704 NR Description: CG10306-PA [Drosophila melanogaster]
  misc_feature (8)..(182): NCBI GI NO: 38047673 NR Description: similar to Drosophila melanogaster CG10306
  misc_feature (54)..(221): NCBI GI NO: 20380678 NR Description: Similar to RIKEN cDNA 1200009C21 gene
  misc_feature (164)..(226): NCBI GI NO: 20453126 NR Description: AT4g33250/F17M5_10 [Arabidopsis thaliana]

SEQ ID NO: 30861 - protein, 166 aa, Zea mays subsp. mays; identical to SEQ ID NO: 23829
  peptide (1)..(166): Ceres Seq. ID no. 12406484
  misc_feature (1)..(165): Pfam Name: eIF-3 p25 Pfam Description: Eukaryotic translation initiation factor 3 subunit 11
  misc_feature (1)..(165): NCBI GI NO: 23396617 NR Description: Eukaryotic translation initiation factor 3 subunit11
  misc_feature (1)..(166): NCBI GI NO: 15234123 NR Description: putative protein; protein id: At4g33250
  misc_feature (1)..(161): NCBI GI NO: 21312044 NR Description: RIKEN cDNA 1200009C21 [Mus musculus]
  misc_feature (1)..(161): NCBI GI NO: 27730981 NR Description: similar to RIKEN cDNA 1200009C21
  misc_feature (1)..(161): NCBI GI NO: 10801345 NR Description: muscle specific gene [Homo sapiens]
  misc_feature (1)..(161): NCBI GI NO: 5114051 NR Description: HSPC029 [Homo sapiens]
  misc_feature (1)..(158): NCBI GI NO: 19922704 NR Description: CG10306-PA [Drosophila melanogaster]
  misc_feature (1)..(122): NCBI GI NO: 38047673 NR Description: similar to Drosophila melanogaster CG10306
  misc_feature (1)..(161): NCBI GI NO: 20380678 NR Description: Similar to RIKEN cDNA 1200009C21 gene
  misc_feature (104)..(166): NCBI GI NO: 20453126 NR Description: AT4g33250/F17M5_10 [Arabidopsis thaliana]

SEQ ID NO: 30862 - protein, 152 aa, Zea mays subsp. mays; identical to SEQ ID NO: 23830
  peptide (1)..(152): Ceres Seq. ID no. 12406485
  misc_feature (1)..(151): Pfam Name: eIF-3 p25 Pfam Description: Eukaryotic translation initiation factor 3 subunit 11
  misc_feature (1)..(151): NCBI GI NO: 23396617 NR Description: Eukaryotic translation initiation factor 3 subunit11
  misc_feature (1)..(152): NCBI GI NO: 15234123 NR Description: putative protein; protein id: At4g33250
  misc_feature (1)..(147): NCBI GI NO: 21312044 NR Description: RIKEN cDNA 1200009C21 [Mus musculus]
  misc_feature (1)..(147): NCBI GI NO: 27730981 NR Description: similar to RIKEN cDNA 1200009C21
  misc_feature (1)..(147): NCBI GI NO: 10801345 NR Description: muscle specific gene [Homo sapiens]
  misc_feature (1)..(147): NCBI GI NO: 5114051 NR Description: HSPC029 [Homo sapiens]
  misc_feature (1)..(144): NCBI GI NO: 19922704 NR Description: CG10306-PA [Drosophila melanogaster]
  misc_feature (1)..(108): NCBI GI NO: 38047673 NR Description: similar to Drosophila melanogaster CG10306
  misc_feature (1)..(147): NCBI GI NO: 20380678 NR Description: Similar to RIKEN cDNA 1200009C21 gene
  misc_feature (90)..(152): NCBI GI NO: 20453126 NR Description: AT4g33250/F17M5_10 [Arabidopsis thaliana]

SEQ ID NO: 30863 - DNA, 1706 bp, Zea mays subsp. mays
  misc_feature (1)..(1706): Ceres Seq. ID no. 12372627
gcacgagaccattacctagaacatcctaatcgaaaatcgactaacgtctacttctgtgatttcccccggcggcgttgggcgctggtttaggagacgaaaaggcggcgcgcggcggaaaaccctagcttagctcctctccggcgtcaagtgctctccggtttgagggcgcgatgagggtgaaggtgatttcgcgttccaccgacgactacacgcgcgagcgcagccaggacctgcagaaagtattccgcaactatgatccagcgcttcgtagtcaagagaaagctgttgagtatactcgggcactcaatgctgccaagttagagaagatatttgctaagccatttatcggagctatggatgggcatattgacgcggtatcgtgcatggccaaaaaccccaatcatttgaaagcaatattttctggttcaatggatggagatgttcgcctttgggatattgctgcgaggaagacagtttgtcagttccccgggcaccagggtgctgtaagaggtttaacaacatccacagatggtgatcttcttgtatcatgtggcgttgactgcactgttcgactccggaaagttccgatgcttaaaatggtggatactagtgagcgtgctggagataattcccagccatcagcagtttacacctggaagcatgcattctggggtgctgatcaccagtgggacggcaatcttttcgcaactgttggtgctcaagttgatatatgggatcctgacaggtcagagccaataaatagcttcgaatggggtaaagatacggttctttctgtgcgatttgatcctggagactctaatattttgattacgtcgggcagtgatcggagtctgacactctatgacttgcgtatgtcatctccagctagaaagctgataatgaagacaaggtgcaattcagtatgctggaaccctagagagcctatgaacttcactgctgcaaatgaagacacaaactgttactcctttgatgctagaaaattagatgaagcaaaaattgttcacaaaggccatgtttcagcagtgatggatattgactactcaccaacagggcgtgaatttgtcactggttcatatgatagaacagtaaggatttttaattatcttggagaccacagcagagagatttaccacaccaagaggatgcaaagggtgttttgtgtgaagtacaccctatgatgggacctatttagtctctggcagtgatgatacaaatcttcgtctgtggaagtccaaagcttcagaacaacttggagttcttcttccacgggagcgcaaaaagcaagagtaccaggatgctttgaaggagcggtacaagcatctcccagaagtcaagcggattgtaaggcatagacatctaccgaagccaatctacaaggcagccaacctacggcgtacgatgatcgaagctgaaagccgtaaagaggaaaggaggcgaaagcacagtgctcccgggagcatgcctgtgcagcccttcaggaagcggagaatcatcagagaagttgagtagacatgcggtttgcattgcatggtcgtggtacacgtttgtgtttctgaggcgatggagttgagagaatacatgatgtttcctttgggagttgagctccagttttgcctttcgtactacatatatgtgttccatcaatcagtttgtttgactagttattattgtgtatttgaaatacc

SEQ ID NO: 30864 - protein, 342 aa, Zea mays subsp. mays
  peptide (1)..(342): Ceres Seq. ID no. 12372628
  misc_feature (1)..(341): NCBI GI NO: 34904476 NR Description: putative DKFZP564O0463 protein
  misc_feature (1)..(341): NCBI GI NO: 13937179 NR Description: AT4g28450/F20O9_130 [Arabidopsis thaliana]
  misc_feature (1)..(341): NCBI GI NO: 17065094 NR Description: SOF1 protein-like protein [Arabidopsis thaliana]
  misc_feature (24)..(341): NCBI GI NO: 30687972 NR Description: transducin / WD-40 repeat protein family
  misc_feature (1)..(341): NCBI GI NO: 38348458 NR Description: Unknown (protein for MGC:65348) [Mus musculus]
  misc_feature (1)..(341): NCBI GI NO: 22760354 NR Description: unnamed protein product [Homo sapiens]
  misc_feature (1)..(341): NCBI GI NO: 19913460 NR Description: DKFZP564O0463 protein [Homo sapiens]
  misc_feature (1)..(341): NCBI GI NO: 27769416 NR Description: Similar to DKFZP564O0463 protein [Xenopus laevis]
  misc_feature (2)..(341): NCBI GI NO: 40740135 NR Description: hypothetical protein AN4226.2
  misc_feature (1)..(341): NCBI GI NO: 39595100 NR Description: Hypothetical protein CBG03683
MRVKVISRSTDDYTRERSQDLQKVFRNYDPALRSQEKAVEYTRALNAAKLEKIFAKPFIGAMDGHIDAVSCMAKNPNHLKAIFSGSMDGDVRLWDIAARKTVCQFPGHQGAVRGLTTSTDGDLLVSCGVDCTVRLRKVPMLKMVDTSERAGDNSQPSAVYTWKHAFWGADHQWDGNLFATVGAQVDIWDPDRSEPINSFEWGKDTVLSVRFDPGDSNILITSGSDRSLTLYDLRMSSPARKLIMKTRCNSVCWNPREPMNFTAANEDTNCYSFDARKLDEAKIVHKGHVSAVMDIDYSPTGREFVTGSYDRTVRIFNYLGDHSREIYHTKRMQRVFCVKYTL

SEQ ID NO: 30865 - protein, 281 aa, Zea mays subsp. mays
  peptide (1)..(281): Ceres Seq. ID no. 12372629
  misc_feature (1)..(280): NCBI GI NO: 34904476 NR Description: putative DKFZP564O0463 protein
  misc_feature (1)..(280): NCBI GI NO: 13937179 NR Description: AT4g28450/F20O9_130 [Arabidopsis thaliana]
  misc_feature (1)..(280): NCBI GI NO: 17065094 NR Description: SOF1 protein-like protein [Arabidopsis thaliana]
  misc_feature (1)..(280): NCBI GI NO: 30687972 NR Description: transducin / WD-40 repeat protein family
  misc_feature (1)..(280): NCBI GI NO: 38348458 NR Description: Unknown (protein for MGC:65348) [Mus musculus]
  misc_feature (1)..(280): NCBI GI NO: 22760354 NR Description: unnamed protein product [Homo sapiens]
  misc_feature (1)..(280): NCBI GI NO: 19913460 NR Description: DKFZP564O0463 protein [Homo sapiens]
  misc_feature (1)..(280): NCBI GI NO: 27769416 NR Description: Similar to DKFZP564O0463 protein [Xenopus laevis]
  misc_feature (1)..(280): NCBI GI NO: 40740135 NR Description: hypothetical protein AN4226.2
  misc_feature (1)..(280): NCBI GI NO: 39595100 NR Description: Hypothetical protein CBG03683
MDGHIDAVSCMAKNPNHLKAIFSGSMDGDVRLWDIAARKTVCQFPGHQGAVRGLTTSTDGDLLVSCGVDCTVRLRKVPMLKMVDTSERAGDNSQPSAVYTWKHAFWGADHQWDGNLFATVGAQVDIWDPDRSEPINSFEWGKDTVLSVRFDPGDSNILITSGSDRSLTLYDLRMSSPARKLIMKTRCNSVCWNPREPMNFTAANEDTNCYSFDARKLDEAKIVHKGHVSAVMDIDYSPTGREFVTGSYDRTVRIFNYLGDHSREIYHTKRMQRVFCVKYTL

SEQ ID NO: 30866 - protein, 271 aa, Zea mays subsp. mays
  peptide (1)..(271): Ceres Seq. ID no. 12372630
  misc_feature (1)..(270): NCBI GI NO: 34904476 NR Description: putative DKFZP564O0463 protein
  misc_feature (1)..(270): NCBI GI NO: 13937179 NR Description: AT4g28450/F20O9_130 [Arabidopsis thaliana]
  misc_feature (1)..(270): NCBI GI NO: 17065094 NR Description: SOF1 protein-like protein [Arabidopsis thaliana]
  misc_feature (1)..(270): NCBI GI NO: 30687972 NR Description: transducin / WD-40 repeat protein family
  misc_feature (1)..(270): NCBI GI NO: 38348458 NR Description: Unknown (protein for MGC:65348) [Mus musculus]
  misc_feature (1)..(270): NCBI GI NO: 22760354 NR Description: unnamed protein product [Homo sapiens]
  misc_feature (1)..(270): NCBI GI NO: 19913460 NR Description: DKFZP564O0463 protein [Homo sapiens]
  misc_feature (1)..(270): NCBI GI NO: 27769416 NR Description: Similar to DKFZP564O0463 protein [Xenopus laevis]
  misc_feature (1)..(270): NCBI GI NO: 40740135 NR Description: hypothetical protein AN4226.2
  misc_feature (1)..(270): NCBI GI NO: 39595100 NR Description: Hypothetical protein CBG03683
MAKNPNHLKAIFSGSMDGDVRLWDIAARKTVCQFPGHQGAVRGLTTSTDGDLLVSCGVDCTVRLRKVPMLKMVDTSERAGDNSQPSAVYTWKHAFWGADHQWDGNLFATVGAQVDIWDPDRSEPINSFEWGKDTVLSVRFDPGDSNILITSGSDRSLTLYDLRMSSPARKLIMKTRCNSVCWNPREPMNFTAANEDTNCYSFDARKLDEAKIVHKGHVSAVMDIDYSPTGREFVTGSYDRTVRIFNYLGDHSREIYHTKRMQRVFCVKYTL

SEQ ID NO: 30867 - DNA, 849 bp, Zea mays subsp. mays
  misc_feature (1)..(849): Ceres Seq. ID no. 12346977
aagcccactttccccagtactctactcacccacccactcacggactcatctactgagcagcgcggtgggcatccgagcgagagggcgagcgcggaaggatcggaattccgaaggttgggcatggaggcgagcggcgagaaggctgcggtggtgcgacggctgatggaggcgaaggaggtgtccgggaagaccttctcgggaatcgccgccgagacgggtctcaccaacgtctacgtggcgcagctgctgcggcgccaggcgcagctcaaggccgacacggtgcccgcgctgagggcggccctgcccacgctcacggacgacctcatcgaactcatgatgcagccgcccttccggtcctaccaccccaacatcgtccacgagcccgccatttacagattgaatgaaggctgttatgcattttggagagagcatcaaggaaatcatcaatgaggagtttggtgatggaatcatgtcagccatagacttctattgttcagttgacaaggttgaaggggccgacggaaaagatcgtgtggtggtcacatttgatgggaagtatctaccttacactgaacagaaatctgaacatatgatgtctaggccaacccgcaagacatcttgatgtggctggtgaggaggagaaacatgatcgtagtggttggtatcgggctcagcaaggatcgagcatgccattttctttgtgtagtccaaatcatcaacacaataaacagacctatattgatgataactgtcaaaaggaacattaaagtcaatgttctacctggcatgattgctggactgtattggatgatgctgagataaaaagagagaaaaagtgaaacaaactgg

SEQ ID NO: 30868 - protein, 149 aa, Zea mays subsp. mays
  peptide (1)..(149): Ceres Seq. ID no. 12346978
  misc_feature (41)..(140): NCBI GI NO: 20137963 NR Description: Cyanate hydratase
  misc_feature (12)..(131): NCBI GI NO: 37535282 NR Description: putative cyanase
  misc_feature (41)..(140): NCBI GI NO: 15229458 NR Description: cyanate lyase (CYN); protein id: At3g23490
  misc_feature (41)..(140): NCBI GI NO: 21554171 NR Description: cyanate lyase (CYN) [Arabidopsis thaliana]
  misc_feature (43)..(135): NCBI GI NO: 28869134 NR Description: cyanate lyase
KPTFPSTLLTHPLTDSSTEQRGGHPSERASAEGSEFRRLGMEASGEKAAVVRRLMEAKEVSGKTFSGIAAETGLTNVYVAQLLRRQAQLKADTVPALRAALPTLTDDLIELMMQPPFRSYHPNIVHEPAIYRLNEGCYAFWREHQGNHQ

SEQ ID NO: 30869 - protein, 109 aa, Zea mays subsp. mays
  peptide (1)..(109): Ceres Seq. ID no. 12346979
  misc_feature (1)..(100): NCBI GI NO: 20137963 NR Description: Cyanate hydratase
  misc_feature (1)..(91): NCBI GI NO: 37535282 NR Description: putative cyanase
  misc_feature (1)..(100): NCBI GI NO: 15229458 NR Description: cyanate lyase (CYN); protein id: At3g23490
  misc_feature (1)..(100): NCBI GI NO: 21554171 NR Description: cyanate lyase (CYN) [Arabidopsis thaliana]
  misc_feature (3)..(95): NCBI GI NO: 28869134 NR Description: cyanate lyase
MEASGEKAAVVRRLMEAKEVSGKTFSGIAAETGLTNVYVAQLLRRQAQLKADTVPALRAALPTLTDDLIELMMQPPFRSYHPNIVHEPAIYRLNEGCYAFWREHQGNHQ

SEQ ID NO: 30870 - protein, 95 aa, Zea mays subsp. mays
  peptide (1)..(95): Ceres Seq. ID no. 12346980
  misc_feature (1)..(86): NCBI GI NO: 20137963 NR Description: Cyanate hydratase
  misc_feature (1)..(77): NCBI GI NO: 37535282 NR Description: putative cyanase
  misc_feature (1)..(86): NCBI GI NO: 15229458 NR Description: cyanate lyase (CYN); protein id: At3g23490
  misc_feature (1)..(86): NCBI GI NO: 21554171 NR Description: cyanate lyase (CYN) [Arabidopsis thaliana]
  misc_feature (1)..(81): NCBI GI NO: 28869134 NR Description: cyanate lyase
MEAKEVSGKTFSGIAAETGLTNVYVAQLLRRQAQLKADTVPALRAALPTLTDDLIELMMQPPFRSYHPNIVHEPAIYRLNEGCYAFWREHQGNHQ

SEQ ID NO: 30871 - DNA, 1583 bp, Zea mays subsp. mays
  misc_feature (1)..(1583): Ceres Seq. ID no. 12369718
aaatcggcattcacgactcacgagcttcaatcagttaccagtctctagctctcctcgtgctgcttgcttctggaccatcgatggaggcctacgcggcaacggcatcgccacccacgacgacagccatgtgtgtggacaagctcagccaccagctcttctccctgctcgagagcaggctcctcggcgggtggtgcccgtccgtccccgggacgccggcgcgggcgctcctcgacggcggccgcgtgcgggtgctcgccatcgacggctgcggcgcgggcgcagaggacgcgctcctggccgccgcggcgctcgcgaggctcgaggccaagctgcgcgaccgcacgggggaccccgacgcgcgcgtcgcggacttcttcgacgtggccgccggcgccggcgcgggaggcgtcctcgccgcgatgctgctcctgaggggcgccgacggccggccgcggtactccggcgcaggaggcgctggcgttcttcgccgggagcgtcgggaccaaaggttggtgcggccggcgcgggcggtgggcgaagctcttccgccgcggttcccgaggcggcgaccgcacgctccgccgcgtgttcggggacgccacgctcagggacaccgtcgcgccgctgctcgtgccgtgctacgacctcgccacggccgcgcccttcgtgttctcgcgcgccgacgccgtcgagagcgacaccttcgacttccgcctgcgcgacgtctgcgccgccgcctgcgccgcgggcggcgcggtcgcgccagtcaggtcggtggacggcctcacggccgtcgccgcggcgtccgggggcgtggcggccatgtgcaacccggccggggccgccatcacgcacgcgctccacaacaagcaggagttccccctcgccaccggcgtcgacgacctcctcgtgctctccatcggcgccggcgcctccgtcgccaacggttcgagcacgccgatgcccgcacgctctccgtcgccgcgggagctggcgcgcgtaaccgccgagggcgtcgcggacatggtggacgaatcattgggcatggcgttcgggcgcgcgcgcggaagcaactacgtgcgcatccaggccggtaaggcgctggtcccgatccgcgccgacgaagcggccgtggccgccgaagcgatgctagcgcagcggaacgtggagtcggtgctgttccgcgagcggaggctgtcggagtggacgaacgccgagaaggtggacgcgctggccgcggagctggtcaaggagcaggagcggcggaggcgcagcccgcttccgaacgtggctatcaaacaggtcggcacaccgccgcggctgtcgtccgcgaccactgcttcgtcgggcactgggacggccaggacggcgtcgacgatgccgtcgccggcgtcatgggagtcacgcaggtagtagttgtgttgattttaggcggtaattgacgtgtgtacatgcatatatgaaatgcaaagctaggagtggggtgtgttgtttttcttctttgaacggacgctcaatcctgcgtgcaactcttcacgtttctagcaaaacgcataaaaaagcgctggctgtcatcctacctt

SEQ ID NO: 30872 - protein, 364 aa, Zea mays subsp. mays
  peptide (1)..(364): Ceres Seq. ID no. 12369719
  misc_feature (84)..(166): Pfam Name: Pfam Description:  Patatin-like phospholipase
  misc_feature (27)..(166): NCBI GI NO: 34897124 NR Description: putative lipid acyl hydrolase [Oryza sativa]
  misc_feature (45)..(166): NCBI GI NO: 34899642 NR Description: contains ESTsAU172959
  misc_feature (45)..(150): NCBI GI NO: 15233136 NR Description: patatin-related; protein id: At3g54950.1
  misc_feature (67)..(150): NCBI GI NO: 30688454 NR Description: patatin-related [Arabidopsis thaliana]
  misc_feature (67)..(150): NCBI GI NO: 15225054 NR Description: patatin family; protein id: At2g39220
  misc_feature (67)..(150): NCBI GI NO: 7486230 NR Description: hypothetical protein F27B13
  misc_feature (80)..(153): NCBI GI NO: 11357489 NR Description: hypothetical protein F16M2
  misc_feature (80)..(153): NCBI GI NO: 18412659 NR Description: putative protein; protein id: At3g63200
  misc_feature (68)..(153): NCBI GI NO: 27260979 NR Description: putative patatin-like protein 1
  misc_feature (70)..(152): NCBI GI NO: 7442023 NR Description: patatin-like latex allergen 2 - Para rubber tree
IGIHDSRASISYQSLALLVLLASGPSMEAYAATASPPTTTAMCVDKLSHQLFSLLESRLLGGWCPSVPGTPARALLDGGRVRVLAIDGCGAGAEDALLAAAALARLEAKLRDRTGDPDARVADFFDVAAGAGAGGVLAAMLLLRGADGRPRYSGAGGAGVLRRERRDQRLVRPARAVGEALPPRFPRRRPHAPPRVRGRHAQGHRRAAARAVLRPRHGRALRVLARRRRRERHLRLPPARRLRRRLRRGRRGRASQVGGRPHGRRRGVRGRGGHVQPGRGRHHARAPQQAGVPPRHRRRRPPRALHRRRRLRRQRFEHADARTLSVAAGAGARNRRGRRGHGGRIIGHGVRARARKQLRAHPGR

SEQ ID NO: 30873 - protein, 338 aa, Zea mays subsp. mays
  peptide (1)..(338): Ceres Seq. ID no. 12369720
  misc_feature (58)..(140): Pfam Name: Pfam Description:  Patatin-like phospholipase
  misc_feature (1)..(140): NCBI GI NO: 34897124 NR Description: putative lipid acyl hydrolase [Oryza sativa]
  misc_feature (19)..(140): NCBI GI NO: 34899642 NR Description: contains ESTsAU172959
  misc_feature (19)..(124): NCBI GI NO: 15233136 NR Description: patatin-related; protein id: At3g54950.1
  misc_feature (41)..(124): NCBI GI NO: 30688454 NR Description: patatin-related [Arabidopsis thaliana]
  misc_feature (41)..(124): NCBI GI NO: 15225054 NR Description: patatin family; protein id: At2g39220
  misc_feature (41)..(124): NCBI GI NO: 7486230 NR Description: hypothetical protein F27B13
  misc_feature (54)..(127): NCBI GI NO: 11357489 NR Description: hypothetical protein F16M2
  misc_feature (54)..(127): NCBI GI NO: 18412659 NR Description: putative protein; protein id: At3g63200
  misc_feature (42)..(127): NCBI GI NO: 27260979 NR Description: putative patatin-like protein 1
  misc_feature (44)..(126): NCBI GI NO: 7442023 NR Description: patatin-like latex allergen 2 - Para rubber tree
MEAYAATASPPTTTAMCVDKLSHQLFSLLESRLLGGWCPSVPGTPARALLDGGRVRVLAIDGCGAGAEDALLAAAALARLEAKLRDRTGDPDARVADFFDVAAGAGAGGVLAAMLLLRGADGRPRYSGAGGAGVLRRERRDQRLVRPARAVGEALPPRFPRRRPHAPPRVRGRHAQGHRRAAARAVLRPRHGRALRVLARRRRRERHLRLPPARRLRRRLRRGRRGRASQVGGRPHGRRRGVRGRGGHVQPGRGRHHARAPQQAGVPPRHRRRRPPRALHRRRRLRRQRFEHADARTLSVAAGAGARNRRGRRGHGGRIIGHGVRARARKQLRAHPGR

SEQ ID NO: 30874 - protein, 333 aa, Zea mays subsp. mays
  peptide (1)..(333): Ceres Seq. ID no. 12369721
  misc_feature (199)..(314): Pfam Name: Pfam Description:  Extensin-like region
  misc_feature (33)..(333): NCBI GI NO: 25143299 NR Description: pre-mRNA splicing SR protein related RSR-1 (68
  misc_feature (129)..(333): NCBI GI NO: 6649242 NR Description: splicing coactivator subunit SRm300 [Homo sapiens]
  misc_feature (129)..(333): NCBI GI NO: 19923466 NR Description: splicing coactivator subunit SRm300
  misc_feature (95)..(333): NCBI GI NO: 23103422 NR Description: hypothetical protein [Azotobacter vinelandii]
  misc_feature (45)..(333): NCBI GI NO: 29247944 NR Description: GLP_26_54603_52153 [Giardia lamblia ATCC 50803]
  misc_feature (162)..(333): NCBI GI NO: 13592175 NR Description: ppg3 [Leishmania major]
  misc_feature (28)..(333): NCBI GI NO: 23018055 NR Description: hypothetical protein [Thermobifida fusca]
  misc_feature (161)..(318): NCBI GI NO: 13592175 NR Description: ppg3 [Leishmania major]
  misc_feature (161)..(324): NCBI GI NO: 13592175 NR Description: ppg3 [Leishmania major]
  misc_feature (161)..(318): NCBI GI NO: 13592175 NR Description: ppg3 [Leishmania major]
NRHSRLTSFNQLPVSSSPRAACFWTIDGGLRGNGIATHDDSHVCGQAQPPALLPAREQAPRRVVPVRPRDAGAGAPRRRPRAGARHRRLRRGRRGRAPGRRGAREARGQAARPHGGPRRARRGLLRRGRRRRRGRRPRRDAAPEGRRRPAAVLRRRRRWRSSPGASGPKVGAAGAGGGRSSSAAVPEAATARSAACSGTPRSGTPSRRCSCRATTSPRPRPSCSRAPTPSRATPSTSACATSAPPPAPRAARSRQSGRWTASRPSPRRPGAWRPCATRPGPPSRTRSTTSRSSPSPPASTTSSCSPSAPAPPSPTVRARRCPHALRRRGSWRA

SEQ ID NO: 30875 - DNA, 1115 bp, Zea mays subsp. mays
  misc_feature (1)..(1115): Ceres Seq. ID no. 12353071
acacacgcgcaccaaagccaagcgcccaagcccagcactcgacaccaccacagcgcgcagccacgctcacgcacaccgagctgcgggagtggagtagtggaccgatggggagcagcgggggcagcagcgagcacttcctgcggcagctgagttcgagcgacggcggcagcgcgccgcaccatctgctgcagcgagagtgggagtgcggcggcgtcaccggcagcggcagcaggcgcgggtcgcggaagaagaccggggcgcggggacaccgccgccgcggcggcgggttctgcagggcggaggaggctgcgccggggcggaagcgggtaatggtggtggtggaccagagctccggcgccaagcacgccatgttgtgggcgctcacccacgtggccaacaagggcgacttcctcaccctgctccacgtcctgccgccggagagcggccacagcagccgcggtgctgcggaggacgcctccgcgctcgccaactccctcggcgcgctttgcaaggcctgcaagcctgaggtcgaggtggaggcgcctgtgatccaggggcccaagctgccgaccatcctcagccaggtgaagaagctggaggcgtccgtgctggtgctgagccaacgcagcccctcgcctttctgctgcttcccgcggagcagcagcgaggagctcgtggaggagtgcatcgaccgggcggagtgcctgacgctggcagtgcggcgggcaaagcaagggcgtcggcggctacctcgtcagcacccggtggcagaagaacttctggctcctcgcgtgatccacaaccatattcccccccttctttggaaggcgtttggtttgagtctgaaagcatgggatggaacggaacgggctgggaaatggcgtttggttcagggacaagagggttgggaattgggatcgcctacaggtcggagggacgggatagtcctctatatatgaaagtcgtttcttccgtcatcagtcttcttcctcgcgtccgtgtgtcctgttcttcttcctcgccagttgtctctcatcctgtttctctcaacgttgcctgatgcccctaatatgctctccagaacgctggaagcaaacgaacttgatttgatgtcg

SEQ ID NO: 30876 - protein, 318 aa, Zea mays subsp. mays
  peptide (1)..(318): Ceres Seq. ID no. 12353072
  misc_feature (105)..(240): Pfam Name: Pfam Description:  Universal stress protein family
  misc_feature (35)..(245): NCBI GI NO: 34907308 NR Description: hypothetical protein~similar to Arabidopsisthaliana chromosome 1
  misc_feature (41)..(245): NCBI GI NO: 15219439 NR Description: hypothetical protein; protein id: At1g44760
  misc_feature (85)..(240): NCBI GI NO: 15237955 NR Description: putative protein; protein id: At5g17390.1
  misc_feature (21)..(240): NCBI GI NO: 15228516 NR Description: hypothetical protein; protein id: At3g03290.1
  misc_feature (110)..(241): NCBI GI NO: 15227695 NR Description: unknown protein; protein id: At2g03720.1
  misc_feature (107)..(208): NCBI GI NO: 18409190 NR Description: expressed protein; protein id: At1g69080
  misc_feature (107)..(208): NCBI GI NO: 21592322 NR Description: unknown [Arabidopsis thaliana]
  misc_feature (107)..(292): NCBI GI NO: 34894192 NR Description: P0439B06.17
TRAPKPSAQAQHSTPPQRAATLTHTELREWSSGPMGSSGGSSEHFLRQLSSSDGGSAPHHLLQREWECGGVTGSGSRRGSRKKTGARGHRRRGGGFCRAEEAAPGRKRVMVVVDQSSGAKHAMLWALTHVANKGDFLTLLHVLPPESGHSSRGAAEDASALANSLGALCKACKPEVEVEAPVIQGPKLPTILSQVKKLEASVLVLSQRSPSPFCCFPRSSSEELVEECIDRAECLTLAVRRAKQGRRRLPRQHPVAEELLAPRVIHNHIPPLLWKAFGLSLKAWDGTERAGKWRLVQGQEGWELGSPTGRRDGIVLYI

SEQ ID NO: 30877 - protein, 284 aa, Zea mays subsp. mays
  peptide (1)..(284): Ceres Seq. ID no. 12353073
  misc_feature (71)..(206): Pfam Name: Pfam Description:  Universal stress protein family
  misc_feature (1)..(211): NCBI GI NO: 34907308 NR Description: hypothetical protein~similar to Arabidopsisthaliana chromosome 1
  misc_feature (7)..(211): NCBI GI NO: 15219439 NR Description: hypothetical protein; protein id: At1g44760
  misc_feature (51)..(206): NCBI GI NO: 15237955 NR Description: putative protein; protein id: At5g17390.1
  misc_feature (1)..(206): NCBI GI NO: 15228516 NR Description: hypothetical protein; protein id: At3g03290.1
  misc_feature (76)..(207): NCBI GI NO: 15227695 NR Description: unknown protein; protein id: At2g03720.1
  misc_feature (73)..(174): NCBI GI NO: 18409190 NR Description: expressed protein; protein id: At1g69080
  misc_feature (73)..(174): NCBI GI NO: 21592322 NR Description: unknown [Arabidopsis thaliana]
  misc_feature (73)..(258): NCBI GI NO: 34894192 NR Description: P0439B06.17
MGSSGGSSEHFLRQLSSSDGGSAPHHLLQREWECGGVTGSGSRRGSRKKTGARGHRRRGGGFCRAEEAAPGRKRVMVVVDQSSGAKHAMLWALTHVANKGDFLTLLHVLPPESGHSSRGAAEDASALANSLGALCKACKPEVEVEAPVIQGPKLPTILSQVKKLEASVLVLSQRSPSPFCCFPRSSSEELVEECIDRAECLTLAVRRAKQGRRRLPRQHPVAEELLAPRVIHNHIPPLLWKAFGLSLKAWDGTERAGKWRLVQGQEGWELGSPTGRRDGIVLYI

SEQ ID NO: 30878 - protein, 209 aa, Zea mays subsp. mays
  peptide (1)..(209): Ceres Seq. ID no. 12353074
  misc_feature (1)..(131): Pfam Name: Pfam Description:  Universal stress protein family
  misc_feature (1)..(136): NCBI GI NO: 34907308 NR Description: hypothetical protein~similar to Arabidopsisthaliana chromosome 1
  misc_feature (1)..(136): NCBI GI NO: 15219439 NR Description: hypothetical protein; protein id: At1g44760
  misc_feature (1)..(131): NCBI GI NO: 15237955 NR Description: putative protein; protein id: At5g17390.1
  misc_feature (1)..(131): NCBI GI NO: 15228516 NR Description: hypothetical protein; protein id: At3g03290.1
  misc_feature (1)..(132): NCBI GI NO: 15227695 NR Description: unknown protein; protein id: At2g03720.1
  misc_feature (1)..(99): NCBI GI NO: 18409190 NR Description: expressed protein; protein id: At1g69080
  misc_feature (1)..(99): NCBI GI NO: 21592322 NR Description: unknown [Arabidopsis thaliana]
  misc_feature (1)..(183): NCBI GI NO: 34894192 NR Description: P0439B06.17
MVVVDQSSGAKHAMLWALTHVANKGDFLTLLHVLPPESGHSSRGAAEDASALANSLGALCKACKPEVEVEAPVIQGPKLPTILSQVKKLEASVLVLSQRSPSPFCCFPRSSSEELVEECIDRAECLTLAVRRAKQGRRRLPRQHPVAEELLAPRVIHNHIPPLLWKAFGLSLKAWDGTERAGKWRLVQGQEGWELGSPTGRRDGIVLYI

SEQ ID NO: 30879 - DNA, 1876 bp, Zea mays subsp. mays
  misc_feature (1)..(1876): Ceres Seq. ID no. 12407639
agcaaatcccgtgtgccgcactggccgagcccacattcgaaccaaagtccccccgggcccccccaaggaaaaccatgtgccgcgcccgccacgttcccacgcgccactaaatcagcagcgcccggccgcccggagctgccagtagcggcaacagcaaaacaagaagcagccagctaccggagcactagtaaacagtaagcagcagagagcatggcgagatcagggcgggaagcggagcccggagaggaggaacggaagctggtgctgggcaagtacgagctgggccgcctgctggggcagggcaccttcgccaaggtttactacgcgagggacctgagcgccggcgccggcacgggccacagctgcagcgtagccatcaaggtgatcgacaaggcgcggctgcggcgcacggaggggatggtggagcagctgcgccgggagatctccatcatgcggatggtgcggcaccccaacgtggtgggcatccgggaggtgctcgccagccgctcccgcgtcttcgtcgtcatggagtacgcgcgcggcggggagctcttcgccaaggtggcccggggccgcctcgacgaggaccacgcgcgccgctacttccagcagctggtcgccgccgtcggcttctgccaccgccgcggcgtcgcgcaccgggacctcaagcccgagaacctgctgctggacgaggcggggcggctcaaggtcaccgacttcgggctggccgcgctgcccgagcagctgcgccacgacggcctgctccacacgcagtgcggcacccccgcgtacgtcgcgcccgaggtgctcaggaagcgcggctacgacggcgcccgcgccgacctctggtcctgcggcgtcgtgctctacgtcctcctctgcggcttcctcccgttccagcacgacaactacgtcaagttgtaccagaagatcttcaaggccgactaccaggtgccgccctgggtctccggcgacgcgcgccgcctcatcgcgcgcctgctcgtcgtcgaccccgccaagcgcgcctccatcgccgagatcatgtgcacgccgtggttcaggaagggcttcgtgccgcccgtcctttcgcccccggtgacgcccaagaaacagcagctggacgaaggcgctgccctcttcgacaacgacgacgacgacaacagcaacagcaaccactctggcgccacctcccctcggtcgtgcaacgcgttccagctcatctcgtccatgtcctccgggttcgacctgtcggggctgttcgagagcgagcagaagaccgcgaccgtgttcacggcccgcgcgccggcggccaccgtggtggagaagctggagtccgtggcgcgcgccctaggattcgaggtcaccagggggaaaggctggaaggtgaggatggaggccaaggccgagggcacgaacggacggctcgcggccaccgccgaggtgctcgaggtggccgtggacgtgaccgtggtcgagttcgtgcacgacgccggggacgcgctggactttaacaagttctgcgccgtcgacgtccgcccggggctcacggagatcgtctgggcgtggcagggcgacagccccgccgccgccgtcggcaccgcgtgaacaagcgtccccgtctgtcacgtggaagttgtagcaactttgcgtaggagttaaacacggctgcactggcaccagctttttatagcatgtaaagtttcaagttctcgtcgttgcttcgagactgccatggtggctagttcgttgtgtgccatatgctgtacaggaaggaaagagtcgaatcgagccggggagttttcgatcgacttgccaatttttgtacgatcataacctgtattttctggagatgtgtgcatacaaaattttgcccgtg

SEQ ID NO: 30880 - protein, 464 aa, Zea mays subsp. mays
  peptide (1)..(464): Ceres Seq. ID no. 12407640
  misc_feature (22)..(283): Pfam Name: Pfam Description:  Protein kinase domain
  misc_feature (12)..(456): NCBI GI NO: 30683398 NR Description: CBL-interacting protein kinase 5
  misc_feature (12)..(451): NCBI GI NO: 24899813 NR Description: serine/threonine protein kinase-like protein
  misc_feature (1)..(456): NCBI GI NO: 15215664 NR Description: AT5g25110/T11H3_120 [Arabidopsis thaliana]
  misc_feature (1)..(456): NCBI GI NO: 18420882 NR Description: serine/threonine protein kinase-like protein
  misc_feature (9)..(463): NCBI GI NO: 15224679 NR Description: putative protein kinase; protein id: At2g25090
  misc_feature (12)..(460): NCBI GI NO: 34903780 NR Description: unnamed protein product
  misc_feature (17)..(460): NCBI GI NO: 21954717 NR Description: SOS2-like protein kinase [Glycine max]
  misc_feature (17)..(456): NCBI GI NO: 15242509 NR Description: serine threonine protein kinase
  misc_feature (2)..(450): NCBI GI NO: 15235768 NR Description:
  misc_feature (1)..(289): NCBI GI NO: 34909718 NR Description: OsPK7 [Oryza sativa (japonica cultivar-group)]
MARSGREAEPGEEERKLVLGKYELGRLLGQGTFAKVYYARDLSAGAGTGHSCSVAIKVIDKARLRRTEGMVEQLRREISIMRMVRHPNVVGIREVLASRSRVFVVMEYARGGELFAKVARGRLDEDHARRYFQQLVAAVGFCHRRGVAHRDLKPENLLLDEAGRLKVTDFGLAALPEQLRHDGLLHTQCGTPAYVAPEVLRKRGYDGARADLWSCGVVLYVLLCGFLPFQHDNYVKLYQKIFKADYQVPPWVSGDARRLIARLLVVDPAKRASIAEIMCTPWFRKGFVPPVLSPPVTPKKQQLDEGAALFDNDDDDNSNSNHSGATSPRSCNAFQLISSMSSGFDLSGLFESEQKTATVFTARAPAATVVEKLESVARALGFEVTRGKGWKVRMEAKAEGTNGRLAATAEVLEVAVDVTVVEFVHDAGDALDFNKFCAVDVRPGLTEIVWAWQGDSPAAAVGTA

SEQ ID NO: 30881 - protein, 395 aa, Zea mays subsp. mays
  peptide (1)..(395): Ceres Seq. ID no. 12407641
  misc_feature (1)..(214): Pfam Name: Pfam Description:  Protein kinase domain
  misc_feature (1)..(387): NCBI GI NO: 30683398 NR Description: CBL-interacting protein kinase 5
  misc_feature (1)..(382): NCBI GI NO: 24899813 NR Description: serine/threonine protein kinase-like protein
  misc_feature (1)..(387): NCBI GI NO: 15215664 NR Description: AT5g25110/T11H3_120 [Arabidopsis thaliana]
  misc_feature (1)..(387): NCBI GI NO: 18420882 NR Description: serine/threonine protein kinase-like protein
  misc_feature (1)..(394): NCBI GI NO: 15224679 NR Description: putative protein kinase; protein id: At2g25090
  misc_feature (1)..(391): NCBI GI NO: 34903780 NR Description: unnamed protein product
  misc_feature (1)..(391): NCBI GI NO: 21954717 NR Description: SOS2-like protein kinase [Glycine max]
  misc_feature (1)..(387): NCBI GI NO: 15242509 NR Description: serine threonine protein kinase
  misc_feature (1)..(381): NCBI GI NO: 15235768 NR Description:
  misc_feature (1)..(220): NCBI GI NO: 34909718 NR Description: OsPK7 [Oryza sativa (japonica cultivar-group)]
MVEQLRREISIMRMVRHPNVVGIREVLASRSRVFVVMEYARGGELFAKVARGRLDEDHARRYFQQLVAAVGFCHRRGVAHRDLKPENLLLDEAGRLKVTDFGLAALPEQLRHDGLLHTQCGTPAYVAPEVLRKRGYDGARADLWSCGVVLYVLLCGFLPFQHDNYVKLYQKIFKADYQVPPWVSGDARRLIARLLVVDPAKRASIAEIMCTPWFRKGFVPPVLSPPVTPKKQQLDEGAALFDNDDDDNSNSNHSGATSPRSCNAFQLISSMSSGFDLSGLFESEQKTATVFTARAPAATVVEKLESVARALGFEVTRGKGWKVRMEAKAEGTNGRLAATAEVLEVAVDVTVVEFVHDAGDALDFNKFCAVDVRPGLTEIVWAWQGDSPAAAVGTA

SEQ ID NO: 30882 - protein, 384 aa, Zea mays subsp. mays
  peptide (1)..(384): Ceres Seq. ID no. 12407642
  misc_feature (1)..(203): Pfam Name: Pfam Description:  Protein kinase domain
  misc_feature (1)..(376): NCBI GI NO: 30683398 NR Description: CBL-interacting protein kinase 5
  misc_feature (1)..(371): NCBI GI NO: 24899813 NR Description: serine/threonine protein kinase-like protein
  misc_feature (1)..(376): NCBI GI NO: 15215664 NR Description: AT5g25110/T11H3_120 [Arabidopsis thaliana]
  misc_feature (1)..(376): NCBI GI NO: 18420882 NR Description: serine/threonine protein kinase-like protein
  misc_feature (1)..(383): NCBI GI NO: 15224679 NR Description: putative protein kinase; protein id: At2g25090
  misc_feature (1)..(380): NCBI GI NO: 34903780 NR Description: unnamed protein product
  misc_feature (1)..(380): NCBI GI NO: 21954717 NR Description: SOS2-like protein kinase [Glycine max]
  misc_feature (1)..(376): NCBI GI NO: 15242509 NR Description: serine threonine protein kinase
  misc_feature (1)..(370): NCBI GI NO: 15235768 NR Description:
  misc_feature (1)..(209): NCBI GI NO: 34909718 NR Description: OsPK7 [Oryza sativa (japonica cultivar-group)]
MRMVRHPNVVGIREVLASRSRVFVVMEYARGGELFAKVARGRLDEDHARRYFQQLVAAVGFCHRRGVAHRDLKPENLLLDEAGRLKVTDFGLAALPEQLRHDGLLHTQCGTPAYVAPEVLRKRGYDGARADLWSCGVVLYVLLCGFLPFQHDNYVKLYQKIFKADYQVPPWVSGDARRLIARLLVVDPAKRASIAEIMCTPWFRKGFVPPVLSPPVTPKKQQLDEGAALFDNDDDDNSNSNHSGATSPRSCNAFQLISSMSSGFDLSGLFESEQKTATVFTARAPAATVVEKLESVARALGFEVTRGKGWKVRMEAKAEGTNGRLAATAEVLEVAVDVTVVEFVHDAGDALDFNKFCAVDVRPGLTEIVWAWQGDSPAAAVGTA

SEQ ID NO: 30883 - DNA, 1234 bp, Zea mays subsp. mays
  misc_feature (1)..(1234): Ceres Seq. ID no. 12356857
aaagtgttgtagagcagacgaagctagctaacaattaagcagctcgatcgagcacacacacacttgatcactactagacagtaaacacattgcgcaaaggccgccatggcttaccgcgcctttgctacgctgcttgcagtgctagcatttgtgggcttcgcttcagttccccgtggtctggcaactgacccgacccagctccaggacttctgcgttgctgataacaagaaccctgtgctggtgaacggggtggtgtgcaagaacccgaacatggtgaaggcaaccgacttcttctccacgatagtgccggtggcgccaaacgggcagggctccgctgtgacgccggtggcggtgaacgagatcccggggctgaacacgctgggcatctcgctggcgcgcatcgacttcgtccccggcgggcagaacccgccgcacacgcacccgcgcgggtccgagatcctgacggtcatccagggcacgctcctcgtcggcttcgtcacctccaaccagctgctcaacaacactctcttcaccatgcagctgaacatgggcgacgtcttcgtgttcccgcaggggctcatccacttccagctcaacaacggcaagacccccgccgtggccatcgccgcgctcagcagccagaaccccggcaccgtcaccatcgccaacgccgtgttcggggccaagccgcccatcctggacgacatcctcgccagggcgttcatgctcgagaaggccaccgtcgactgggtccagcaggcgttcggcgcggcaccagtggccggcggcggcggtggcctgcccggaggaggtggctatcccggcagcggtggtggcctgcccggaggaggtggctatcccggcagcggctttccgggctaccccggccgtagctgatcggtacggtggtggctccacggcggcgccgcctagctagcatgctgcacaagtgcagccgcgcgcgcggatcaggccgtcatacacaaagtatacttatatatagtacctcaaagtcctcaagcattaagccacgtgaagtgaaggctatacgtattaagttcggttgtaatggtcaggtgtaccaaacacccaccaacacctagctagtgagcaggcgcaatgcggcgtctgtgttgatcgagccgtagctctagctctagctcgatcgggttgaataatttgcggcaaaacttatagatatatatggaataaaatcgaaaagtttcatcgtttc

SEQ ID NO: 30884 - protein, 263 aa, Zea mays subsp. mays
  peptide (1)..(263): Ceres Seq. ID no. 12356858
  misc_feature (72)..(214): Pfam Name: Pfam Description:  Cupin
  misc_feature (1)..(249): NCBI GI NO: 21741995 NR Description: OSJNBa0058K23.2
  misc_feature (1)..(249): NCBI GI NO: 5852087 NR Description: zwh0010.1 [Oryza sativa (indica cultivar-group)]
  misc_feature (1)..(220): NCBI GI NO: 40253800 NR Description: putative germin A
  misc_feature (5)..(220): NCBI GI NO: 7447336 NR Description: germin-like protein 6 - rice
  misc_feature (1)..(220): NCBI GI NO: 40253804 NR Description: putative germin A
  misc_feature (1)..(220): NCBI GI NO: 5499730 NR Description: germin-like protein 1 precursor [Oryza sativa]
  misc_feature (1)..(220): NCBI GI NO: 5499732 NR Description: germin-like protein 2 precursor [Oryza sativa]
  misc_feature (1)..(220): NCBI GI NO: 40253802 NR Description: putative germin A
  misc_feature (9)..(220): NCBI GI NO: 40253797 NR Description: putative germin A
  misc_feature (5)..(220): NCBI GI NO: 5869975 NR Description: germin-like protein [Triticum aestivum]
MAYRAFATLLAVLAFVGFASVPRGLATDPTQLQDFCVADNKNPVLVNGVVCKNPNMVKATDFFSTIVPVAPNGQGSAVTPVAVNEIPGLNTLGISLARIDFVPGGQNPPHTHPRGSEILTVIQGTLLVGFVTSNQLLNNTLFTMQLNMGDVFVFPQGLIHFQLNNGKTPAVAIAALSSQNPGTVTIANAVFGAKPPILDDILARAFMLEKATVDWVQQAFGAAPVAGGGGGLPGGGGYPGSGGGLPGGGGYPGSGFPGYPGRS

SEQ ID NO: 30885 - protein, 208 aa, Zea mays subsp. mays
  peptide (1)..(208): Ceres Seq. ID no. 12356859
  misc_feature (17)..(159): Pfam Name: Pfam Description:  Cupin
  misc_feature (1)..(194): NCBI GI NO: 21741995 NR Description: OSJNBa0058K23.2
  misc_feature (1)..(194): NCBI GI NO: 5852087 NR Description: zwh0010.1 [Oryza sativa (indica cultivar-group)]
  misc_feature (1)..(165): NCBI GI NO: 40253800 NR Description: putative germin A
  misc_feature (1)..(165): NCBI GI NO: 7447336 NR Description: germin-like protein 6 - rice
  misc_feature (1)..(165): NCBI GI NO: 40253804 NR Description: putative germin A
  misc_feature (1)..(165): NCBI GI NO: 5499730 NR Description: germin-like protein 1 precursor [Oryza sativa]
  misc_feature (1)..(165): NCBI GI NO: 5499732 NR Description: germin-like protein 2 precursor [Oryza sativa]
  misc_feature (1)..(165): NCBI GI NO: 40253802 NR Description: putative germin A
  misc_feature (1)..(165): NCBI GI NO: 40253797 NR Description: putative germin A
  misc_feature (1)..(165): NCBI GI NO: 5869975 NR Description: germin-like protein [Triticum aestivum]
MVKATDFFSTIVPVAPNGQGSAVTPVAVNEIPGLNTLGISLARIDFVPGGQNPPHTHPRGSEILTVIQGTLLVGFVTSNQLLNNTLFTMQLNMGDVFVFPQGLIHFQLNNGKTPAVAIAALSSQNPGTVTIANAVFGAKPPILDDILARAFMLEKATVDWVQQAFGAAPVAGGGGGLPGGGGYPGSGGGLPGGGGYPGSGFPGYPGRS

SEQ ID NO: 30886 - DNA, 1793 bp, Zea mays subsp. mays
  misc_feature (1)..(1793): Ceres Seq. ID no. 13492648
  misc_feature (979)..(979): n is a, c, t, g, unknown, or other
  misc_feature (822)..(822): n is a, c, t, g, unknown, or other
  misc_feature (945)..(945): n is a, c, t, g, unknown, or other
tttccttcgacagatcgaatcgtgcttaccgagctttataccatcgtcatctcccgccagctgccgtgccgtctgctcgtccgattgttcgtgttcctcgcgtgcgcggatcggatcggttcctctggattggcgcgcacgctcagcaagtagtagcaggtctttcgccgtcgcatgttactgcagcaggccaccggaagagcgcgccgtcatcagctagctgcctcctcctcctcgtcgtctcgaccaccggcggtggatgggcggcgtgctcggcgcgctgctgcaccggcggtccgggggcaggccgccaccggcgcgggccacgaggcgccgggcgctcacccgccagccgtcggcctatgacgccggcggcgggcaccggagggcgatgctgtccaagaagtactcgtacataccggacacctacacgtcgcttgacgaggtggcggcggcgctgcgcgagcaggggctggagtcgtcgaacctcatcctgggcatagacttcaccaagagcaacgagtggacagggaggcagtcgttcggcgggcagagcctgcacagggtcggcgacacgcccaacccctacgagcaggccatcagcatcatcggcaagacgctggctcccttcgacgaggacaacctcatcccctgcttcggcttcggagacggtgactgacgactgacgacggccttcctccgatcctgctgttgatgcatccatccatcttctcgcgtgtcgatcgcttgtccttctccttaatctatctaacctctcttcttgcattatattggttgcgtcgggactcgcgcctgcactgngcagccaccacccatgactacaacgtgtttcagcttccacccggacaactcgccgtgccacggcttcgaggaggtcctcgcctgctaccgcaagatcgtgccgcacctcaagctttccgggcngacgtcgttcgcgcccatcgtggaggcggccgtngacatcgtggaccggagcggggggcagtaccacgtgctcgtcgtggtcgcggacgggcaggtgaccaggagcgtcgacaccggtgacggcgacctcagcccgcaggagaagagaacggtagagtccattgtcacggcaagctcctacccgctgtccatcgttctggttggggtcggggacggcccctgggacgacatgcgcagattcgacgacaagctccccgcgcgcgacttcgacaacttccagttcgtcaacttcaccgccatcatggcccgcgccgcgacggcacagcagaaggagtcggcgttcgcgctcgccgcgctcatggaggtccccatccagtacaaggccaccatggagctcggcatcctgggacggtccacggggaacgccaagcgagtcgcccccgcgccgccgccactgccgcacgcgcagcggcaggcgtcgtcgctgaggaggggcgccagcaacgtcggcggcgccgccgcggcgccgagagatgaccaggtgtgcccgatctgcctgaccaatgccaaggatctggcgttcggctgtgggcatatgtgctgcagggagtgcggggaaagcctcaccagatgcccgatatgccggcagccgatacggtcgaagctgaggctatattcaggatgaagtggctatgctacaacagaggccacgaagaggaaaaaggatatatagcttactcgccgttaaaatgtacatgtgaatctgtcaaaacgtgtaagaaggaaccaccggtcgaggtcagtcctgttcgtctccaaatttggatgaaccgatgttccattttgtc

SEQ ID NO: 30887 - protein, 264 aa, Zea mays subsp. mays
  peptide (1)..(264): Ceres Seq. ID no. 13492649
  misc_feature (6)..(236): NCBI GI NO: 18481708 NR Description: hypothetical protein [Sorghum bicolor]
  misc_feature (6)..(263): NCBI GI NO: 18412353 NR Description: copine-related [Arabidopsis thaliana]
  misc_feature (6)..(189): NCBI GI NO: 15241400 NR Description: copine-related [Arabidopsis thaliana]
  misc_feature (173)..(262): NCBI GI NO: 15241400 NR Description: copine-related [Arabidopsis thaliana]
  misc_feature (6)..(262): NCBI GI NO: 18408863 NR Description: copine-related [Arabidopsis thaliana]
  misc_feature (6)..(262): NCBI GI NO: 30697566 NR Description: copine-related [Arabidopsis thaliana]
  misc_feature (6)..(223): NCBI GI NO: 34905794 NR Description: P0401G10.23
  misc_feature (217)..(263): NCBI GI NO: 34905794 NR Description: P0401G10.23
  misc_feature (6)..(262): NCBI GI NO: 15232157 NR Description: copine-related [Arabidopsis thaliana]
  misc_feature (6)..(263): NCBI GI NO: 22328041 NR Description: copine-related [Arabidopsis thaliana]
  misc_feature (37)..(37): Xaa is any aa, unknown or other
  misc_feature (48)..(48): Xaa is any aa, unknown or other
MTTTCFSFHPDNSPCHGFEEVLACYRKIVPHLKLSGXTSFAPIVEAAXDIVDRSGGQYHVLVVVADGQVTRSVDTGDGDLSPQEKRTVESIVTASSYPLSIVLVGVGDGPWDDMRRFDDKLPARDFDNFQFVNFTAIMARAATAQQKESAFALAALMEVPIQYKATMELGILGRSTGNAKRVAPAPPPLPHAQRQASSLRRGASNVGGAAAAPRDDQVCPICLTNAKDLAFGCGHMCCRECGESLTRCPICRQPIRSKLRLYSG

SEQ ID NO: 30888 - protein, 166 aa, Zea mays subsp. mays
  peptide (1)..(166): Ceres Seq. ID no. 13492650
  misc_feature (114)..(166): Pfam Name: Pfam Description:  Equine herpesvirus glycoprotein gp2
  misc_feature (55)..(166): NCBI GI NO: 13592175 NR Description: ppg3 [Leishmania major]
  misc_feature (131)..(166): NCBI GI NO: 17384256 NR Description: mucin 5 [Homo sapiens]
  misc_feature (55)..(166): NCBI GI NO: 13592175 NR Description: ppg3 [Leishmania major]
  misc_feature (52)..(166): NCBI GI NO: 15901602 NR Description: cell wall surface anchor family protein
  misc_feature (52)..(166): NCBI GI NO: 15901602 NR Description: cell wall surface anchor family protein
  misc_feature (52)..(166): NCBI GI NO: 15901602 NR Description: cell wall surface anchor family protein
  misc_feature (55)..(166): NCBI GI NO: 15901602 NR Description: cell wall surface anchor family protein
  misc_feature (52)..(166): NCBI GI NO: 15901602 NR Description: cell wall surface anchor family protein
  misc_feature (52)..(166): NCBI GI NO: 15901602 NR Description: cell wall surface anchor family protein
  misc_feature (52)..(166): NCBI GI NO: 15901602 NR Description: cell wall surface anchor family protein
SFDRSNRAYRALYHRHLPPAAVPSARPIVRVPRVRGSDRFLWIGAHAQQVVAGLSPSHVTAAGHRKSAPSSASCLLLLVVSTTGGGWAACSARCCTGGPGAGRHRRGPRGAGRSPASRRPMTPAAGTGGRCCPRSTRTYRTPTRRLTRWRRRCASRGWSRRTSSWA

SEQ ID NO: 30889 - protein, 151 aa, Zea mays subsp. mays
  peptide (1)..(151): Ceres Seq. ID no. 13492651
  misc_feature (1)..(123): NCBI GI NO: 18481708 NR Description: hypothetical protein [Sorghum bicolor]
  misc_feature (1)..(150): NCBI GI NO: 18412353 NR Description: copine-related [Arabidopsis thaliana]
  misc_feature (1)..(76): NCBI GI NO: 15241400 NR Description: copine-related [Arabidopsis thaliana]
  misc_feature (60)..(149): NCBI GI NO: 15241400 NR Description: copine-related [Arabidopsis thaliana]
  misc_feature (1)..(149): NCBI GI NO: 18408863 NR Description: copine-related [Arabidopsis thaliana]
  misc_feature (1)..(149): NCBI GI NO: 30697566 NR Description: copine-related [Arabidopsis thaliana]
  misc_feature (1)..(110): NCBI GI NO: 34905794 NR Description: P0401G10.23
  misc_feature (104)..(150): NCBI GI NO: 34905794 NR Description: P0401G10.23
  misc_feature (1)..(149): NCBI GI NO: 15232157 NR Description: copine-related [Arabidopsis thaliana]
  misc_feature (1)..(150): NCBI GI NO: 22328041 NR Description: copine-related [Arabidopsis thaliana]
MRRFDDKLPARDFDNFQFVNFTAIMARAATAQQKESAFALAALMEVPIQYKATMELGILGRSTGNAKRVAPAPPPLPHAQRQASSLRRGASNVGGAAAAPRDDQVCPICLTNAKDLAFGCGHMCCRECGESLTRCPICRQPIRSKLRLYSG

SEQ ID NO: 30890 - DNA, 1235 bp, Zea mays subsp. mays
  misc_feature (1)..(1235): Ceres Seq. ID no. 12407635
gctcccaccccacctcaccatctccactccaaacaaggggaaggcgagcgacagacaaacccaccccatcgcccctcctctgtctcctctcttgcccacgcccgccccaatgtcgccgcccctcgagccccacgactacatcggcctctccgccgcggccgcggccgcgccgccgaccccgacctcctcctcctcttcctcctcctcgccggccccccgcctcacccttcgcctcggcctgccgggctccgagtcccccgaccgcgaccgggactgctgcgaggacttcgccgccacgctctccctcggcccgctgccggcggcagccgccgtctccgccaagcgcgccttcccggaccccgcccagcgccccggcgcttccaaggctagcgacgccaagcagcaggcttcccccgccgcgccgccggccgccaaagcgcaggtggttggatggccgcccgtgcgcaactaccggaagaataccctcgccgccgcgaccgcctccaggagcaaggcgccggcggaggaggccgcgtccggagctgggcccatgtacgtaaaggtgagcatggatggcgcgccctacctcaggaaggtggacatcaagatgtactccagctacgaggacctctccctggcgctcgagaagatgttcagctgcttcatcgctggtcaaagtggtctgcataaatcatcgagcaaagacaggctgaccaatggctcaaaggtggatgccctcaaagatcaggagtatgtccttacatatgaggataaggatgcagactggatgcttgtcggtgatcttccctgggattattttacctctatctgccggaagctcaaaatcatgaggggctctgatgctgttggaatagctccacgaaccgtcgagcagacaggtcagaacaaataagctttggcctttgcctgcatccaaggaagacatctgagctagctgggagactatgttgaaggctgaagcctgaaatagttgccgggaatcgtcaaaacccgtcaaatgtttagtgtagttttcacgtgtccttgagacatgtgcatttgtatgtctgtgacgtgatccgttagatcgtgcaatcgtaggttgctgttcttgtgccctttaaaggccagacagatcagggagctctctgcttccttagtgcacttgctttgcagcattccttgttattctactctgaaatcatacatcatgccacaagaaccgatggttcgcg

SEQ ID NO: 30891 - protein, 303 aa, Zea mays subsp. mays
  peptide (1)..(303): Ceres Seq. ID no. 12407636
  misc_feature (76)..(295): Pfam Name: Pfam Description:  AUX/IAA family
  misc_feature (37)..(303): NCBI GI NO: 34911088 NR Description: OJ1117_G01.11
  misc_feature (29)..(299): NCBI GI NO: 34904314 NR Description: unnamed protein product
  misc_feature (142)..(303): NCBI GI NO: 15227275 NR Description: auxin-regulated protein
  misc_feature (38)..(91): NCBI GI NO: 15227275 NR Description: auxin-regulated protein
  misc_feature (142)..(303): NCBI GI NO: 30681782 NR Description: auxin-responsive protein IAA8
  misc_feature (38)..(91): NCBI GI NO: 30681782 NR Description: auxin-responsive protein IAA8
  misc_feature (31)..(299): NCBI GI NO: 7442237 NR Description: GH1 protein - soybean (fragment)
  misc_feature (122)..(298): NCBI GI NO: 25989504 NR Description: Aux/IAA protein [Solanum tuberosum]
  misc_feature (31)..(298): NCBI GI NO: 6136832 NR Description: CS-IAA2 [Cucumis sativus]
  misc_feature (129)..(298): NCBI GI NO: 15235556 NR Description: phytochrome-associated protein PAP2
LPPHLTISTPNKGKASDRQTHPIAPPLSPLLPTPAPMSPPLEPHDYIGLSAAAAAAPPTPTSSSSSSSSPAPRLTLRLGLPGSESPDRDRDCCEDFAATLSLGPLPAAAAVSAKRAFPDPAQRPGASKASDAKQQASPAAPPAAKAQVVGWPPVRNYRKNTLAAATASRSKAPAEEAASGAGPMYVKVSMDGAPYLRKVDIKMYSSYEDLSLALEKMFSCFIAGQSGLHKSSSKDRLTNGSKVDALKDQEYVLTYEDKDADWMLVGDLPWDYFTSICRKLKIMRGSDAVGIAPRTVEQTGQNK

SEQ ID NO: 30892 - protein, 267 aa, Zea mays subsp. mays
  peptide (1)..(267): Ceres Seq. ID no. 12407637
  misc_feature (40)..(259): Pfam Name: Pfam Description:  AUX/IAA family
  misc_feature (1)..(267): NCBI GI NO: 34911088 NR Description: OJ1117_G01.11
  misc_feature (1)..(263): NCBI GI NO: 34904314 NR Description: unnamed protein product
  misc_feature (106)..(267): NCBI GI NO: 15227275 NR Description: auxin-regulated protein
  misc_feature (2)..(55): NCBI GI NO: 15227275 NR Description: auxin-regulated protein
  misc_feature (106)..(267): NCBI GI NO: 30681782 NR Description: auxin-responsive protein IAA8
  misc_feature (2)..(55): NCBI GI NO: 30681782 NR Description: auxin-responsive protein IAA8
  misc_feature (1)..(263): NCBI GI NO: 7442237 NR Description: GH1 protein - soybean (fragment)
  misc_feature (86)..(262): NCBI GI NO: 25989504 NR Description: Aux/IAA protein [Solanum tuberosum]
  misc_feature (1)..(262): NCBI GI NO: 6136832 NR Description: CS-IAA2 [Cucumis sativus]
  misc_feature (93)..(262): NCBI GI NO: 15235556 NR Description: phytochrome-associated protein PAP2
MSPPLEPHDYIGLSAAAAAAPPTPTSSSSSSSSPAPRLTLRLGLPGSESPDRDRDCCEDFAATLSLGPLPAAAAVSAKRAFPDPAQRPGASKASDAKQQASPAAPPAAKAQVVGWPPVRNYRKNTLAAATASRSKAPAEEAASGAGPMYVKVSMDGAPYLRKVDIKMYSSYEDLSLALEKMFSCFIAGQSGLHKSSSKDRLTNGSKVDALKDQEYVLTYEDKDADWMLVGDLPWDYFTSICRKLKIMRGSDAVGIAPRTVEQTGQNK

SEQ ID NO: 30893 - protein, 185 aa, Zea mays subsp. mays
  peptide (1)..(185): Ceres Seq. ID no. 12407638
  misc_feature (3)..(182): Pfam Name: Pfam Description:  Formin Homology 2 Domain
  misc_feature (1)..(183): NCBI GI NO: 6523547 NR Description: hydroxyproline-rich glycoprotein DZ-HRGP
  misc_feature (1)..(185): NCBI GI NO: 6523547 NR Description: hydroxyproline-rich glycoprotein DZ-HRGP
  misc_feature (3)..(183): NCBI GI NO: 6523547 NR Description: hydroxyproline-rich glycoprotein DZ-HRGP
  misc_feature (3)..(183): NCBI GI NO: 6523547 NR Description: hydroxyproline-rich glycoprotein DZ-HRGP
  misc_feature (3)..(170): NCBI GI NO: 6523547 NR Description: hydroxyproline-rich glycoprotein DZ-HRGP
  misc_feature (3)..(183): NCBI GI NO: 14253159 NR Description: VMP3 protein [Volvox carteri f. nagariensis]
  misc_feature (20)..(183): NCBI GI NO: 6523547 NR Description: hydroxyproline-rich glycoprotein DZ-HRGP
  misc_feature (3)..(179): NCBI GI NO: 15222649 NR Description: Pto kinase interactor, putative
  misc_feature (1)..(183): NCBI GI NO: 6523547 NR Description: hydroxyproline-rich glycoprotein DZ-HRGP
  misc_feature (2)..(183): NCBI GI NO: 6523547 NR Description: hydroxyproline-rich glycoprotein DZ-HRGP
SHPTSPSPLQTRGRRATDKPTPSPLLCLLSCPRPPQCRRPSSPTTTSASPPRPRPRRRPRPPPPLPPPRRPPASPFASACRAPSPPTATGTAARTSPPRSPSARCRRQPPSPPSAPSRTPPSAPALPRLATPSSRLPPPRRRPPKRRWLDGRPCATTGRIPSPPRPPPGARRRRRRPRPELGPCT

SEQ ID NO: 30894 - DNA, 1648 bp, Zea mays subsp. mays
  misc_feature (1)..(1648): Ceres Seq. ID no. 12362215
aagaagcgaagcaaccaacccccgaaatcttcaacggcgccatcgccactgcgtcatgcccgtcccgcacctcctctcgccactccccctgccctcgccgccgccgcccctccaccgcaatggagcgccatggcggcgcccgacgcaactacgtgccgcactacgggtcccgcctccgcttcacctggggctcgccgcggcccgtggcgatggcgtgaggcggttcgtcgggacgctgggctcgaagagagcgcgagcggtcggtgcaattagggtttctgcgatctctggagacggcggtggcggtgctggtggtacgggaattgcggcggcagcggccgccactgtggtctttgctgtgatgaaccgggtgctctacaagctggcgctcgtgccaatgaagaattaccctttcttcctcgcccagttcgccacatttgggtatgtcctagtgtatttctcaattctcttcataagatttcgcgctgggattgtcactagagaaatgttagcgcttccgaagccacagttcatgctaattggtttactggaagcgctaggtgctgcttcaggcatggctgctgctgctatgttgcccgggccatctattccagtgttgtcacagtcctttctggtttggcaacttatcttatctgccctcatcttgggaaggaaatatagagcaaatcagatccttggctgcttgcttgttacagctggagtaattctagcagtggccggtggagccagtaatggtccgattctctttgaagtcaaattcttttggccagcagtaatgatgatttcagctgcatttcaagctgctgcttccattatcaaggagtttgttttcattgatggtgcaaaacgccttgagggaaagaagcctgatatatttgtagtcaactcttttggttctggtttccaggcactttttattttcctactccttccatttctctctaacttgaaagggattccttttgctgaactccctgcatacctaacccgtggtgctgcatgctttctgaatgtgggagggaatctgaaggattgccatggagctcctttgctaccacttctctacataactctgaacatggccttcaacatttctgtccttaatcttgtgaagatgtctacagcagtggttgcttcgctgacatcaactttagcagtacctctttccatctatatactgtcactgcctctaccatatctacccgaaggaacaaatttgagcgcatcttttttgattggtgttgctaccttagtgctcggattgcttctatacaatcttcctcaagaatcaaccaatcaagtaaaggaagattaatctaaacccatatcagatataaggttaacaggaagctattggtgctccactaagaaaatagccgcattttgttgacagtggcttcacagtttggtacataactcatgaagagcagtgttcttctgccacaaacatttgcggtgcaaacatttgaggcaccagctgacttcaaagtttagaaacagcaagttcttgtttcatctgttaacaaaatcctaatggattatgcagctatatataagctctacctgagcggatgtaactactaactactttcagatgagtaagggctttacaaattcattggttgtg

SEQ ID NO: 30895 - protein, 444 aa, Zea mays subsp. mays
  peptide (1)..(444): Ceres Seq. ID no. 12362216
  misc_feature (108)..(440): NCBI GI NO: 30686536 NR Description: expressed protein [Arabidopsis thaliana]
  misc_feature (94)..(439): NCBI GI NO: 18419900 NR Description: putative protein; protein id: At5g19380
  misc_feature (94)..(439): NCBI GI NO: 21553716 NR Description: unknown [Arabidopsis thaliana]
  misc_feature (112)..(444): NCBI GI NO: 20260240 NR Description: unknown protein [Arabidopsis thaliana]
  misc_feature (112)..(444): NCBI GI NO: 21536591 NR Description: unknown [Arabidopsis thaliana]
  misc_feature (223)..(394): NCBI GI NO: 7487326 NR Description: hypothetical protein T22A6
  misc_feature (108)..(195): NCBI GI NO: 7487326 NR Description: hypothetical protein T22A6
  misc_feature (169)..(444): NCBI GI NO: 15239887 NR Description: putative protein; protein id: At5g12170.1
  misc_feature (108)..(246): NCBI GI NO: 28973717 NR Description: unknown protein [Arabidopsis thaliana]
  misc_feature (52)..(196): NCBI GI NO: 20161872 NR Description: B1139B11.13
RSEATNPRNLQRRHRHCVMPVPHLLSPLPLPSPPPPLHRNGAPWRRPTQLRAALRVPPPLHLGLAAARGDGVRRFVGTLGSKRARAVGAIRVSAISGDGGGGAGGTGIAAAAAATVVFAVMNRVLYKLALVPMKNYPFFLAQFATFGYVLVYFSILFIRFRAGIVTREMLALPKPQFMLIGLLEALGAASGMAAAAMLPGPSIPVLSQSFLVWQLILSALILGRKYRANQILGCLLVTAGVILAVAGGASNGPILFEVKFFWPAVMMISAAFQAAASIIKEFVFIDGAKRLEGKKPDIFVVNSFGSGFQALFIFLLLPFLSNLKGIPFAELPAYLTRGAACFLNVGGNLKDCHGAPLLPLLYITLNMAFNISVLNLVKMSTAVVASLTSTLAVPLSIYILSLPLPYLPEGTNLSASFLIGVATLVLGLLLYNLPQESTNQVKED

SEQ ID NO: 30896 - protein, 426 aa, Zea mays subsp. mays
  peptide (1)..(426): Ceres Seq. ID no. 12362217
  misc_feature (90)..(422): NCBI GI NO: 30686536 NR Description: expressed protein [Arabidopsis thaliana]
  misc_feature (76)..(421): NCBI GI NO: 18419900 NR Description: putative protein; protein id: At5g19380
  misc_feature (76)..(421): NCBI GI NO: 21553716 NR Description: unknown [Arabidopsis thaliana]
  misc_feature (94)..(426): NCBI GI NO: 20260240 NR Description: unknown protein [Arabidopsis thaliana]
  misc_feature (94)..(426): NCBI GI NO: 21536591 NR Description: unknown [Arabidopsis thaliana]
  misc_feature (205)..(376): NCBI GI NO: 7487326 NR Description: hypothetical protein T22A6
  misc_feature (90)..(177): NCBI GI NO: 7487326 NR Description: hypothetical protein T22A6
  misc_feature (151)..(426): NCBI GI NO: 15239887 NR Description: putative protein; protein id: At5g12170.1
  misc_feature (90)..(228): NCBI GI NO: 28973717 NR Description: unknown protein [Arabidopsis thaliana]
  misc_feature (34)..(178): NCBI GI NO: 20161872 NR Description: B1139B11.13
MPVPHLLSPLPLPSPPPPLHRNGAPWRRPTQLRAALRVPPPLHLGLAAARGDGVRRFVGTLGSKRARAVGAIRVSAISGDGGGGAGGTGIAAAAAATVVFAVMNRVLYKLALVPMKNYPFFLAQFATFGYVLVYFSILFIRFRAGIVTREMLALPKPQFMLIGLLEALGAASGMAAAAMLPGPSIPVLSQSFLVWQLILSALILGRKYRANQILGCLLVTAGVILAVAGGASNGPILFEVKFFWPAVMMISAAFQAAASIIKEFVFIDGAKRLEGKKPDIFVVNSFGSGFQALFIFLLLPFLSNLKGIPFAELPAYLTRGAACFLNVGGNLKDCHGAPLLPLLYITLNMAFNISVLNLVKMSTAVVASLTSTLAVPLSIYILSLPLPYLPEGTNLSASFLIGVATLVLGLLLYNLPQESTNQVKED

SEQ ID NO: 30897 - protein, 324 aa, Zea mays subsp. mays
  peptide (1)..(324): Ceres Seq. ID no. 12362218
  misc_feature (1)..(320): NCBI GI NO: 30686536 NR Description: expressed protein [Arabidopsis thaliana]
  misc_feature (1)..(319): NCBI GI NO: 18419900 NR Description: putative protein; protein id: At5g19380
  misc_feature (1)..(319): NCBI GI NO: 21553716 NR Description: unknown [Arabidopsis thaliana]
  misc_feature (1)..(324): NCBI GI NO: 20260240 NR Description: unknown protein [Arabidopsis thaliana]
  misc_feature (1)..(324): NCBI GI NO: 21536591 NR Description: unknown [Arabidopsis thaliana]
  misc_feature (103)..(274): NCBI GI NO: 7487326 NR Description: hypothetical protein T22A6
  misc_feature (1)..(75): NCBI GI NO: 7487326 NR Description: hypothetical protein T22A6
  misc_feature (49)..(324): NCBI GI NO: 15239887 NR Description: putative protein; protein id: At5g12170.1
  misc_feature (1)..(126): NCBI GI NO: 28973717 NR Description: unknown protein [Arabidopsis thaliana]
  misc_feature (1)..(76): NCBI GI NO: 20161872 NR Description: B1139B11.13
MNRVLYKLALVPMKNYPFFLAQFATFGYVLVYFSILFIRFRAGIVTREMLALPKPQFMLIGLLEALGAASGMAAAAMLPGPSIPVLSQSFLVWQLILSALILGRKYRANQILGCLLVTAGVILAVAGGASNGPILFEVKFFWPAVMMISAAFQAAASIIKEFVFIDGAKRLEGKKPDIFVVNSFGSGFQALFIFLLLPFLSNLKGIPFAELPAYLTRGAACFLNVGGNLKDCHGAPLLPLLYITLNMAFNISVLNLVKMSTAVVASLTSTLAVPLSIYILSLPLPYLPEGTNLSASFLIGVATLVLGLLLYNLPQESTNQVKED

SEQ ID NO: 30898 - DNA, 1319 bp, Zea mays subsp. mays
  misc_feature (1)..(1319): Ceres Seq. ID no. 12366624
ctcaaagctagctcagaccaataatcagctcttctcctcctagcttgatctctccaatcaagctctctctctctctctctctctcaacacataccaaacttccactcctcctagatagctagctactagctagacagaaatcccccatgtaattggagagagaacttatgtgttctatgatagattagatatgatgcttctctagctcatcagatcaaattagtactcgaccgataccaagttaattaagaagaagttctctcagcgaagaggcgcgtcaagctggcgaaccggtggtggagcgtgcccggtcacttgggcctgccggagcagccgtccggcggccccaaccccaagacggagcccccggccatgaaggatccggagcccagcagcccggcagtcggcgcgccgggcgaccacggagccgatgagaccaacgagtccggtggcgccgtggtggcggcgcccagccggcggcctcgcggacgcccgccggggtccaagaacaagcccaagccgcccatcttcgtcacgcgcgacagccccaacgcgctgcgcagccacgtcatggaggtggcgggcggcgccgatgtggcggacgccatcgcgcagttctcgcgccgccgccagcgcggtgtctgcgtgctcagcggcgccgggaccgtcgccaacgtggcgctgcggcaaccgtccgcgcccacggccgtggtcgcgctccgcggccgcttcgagatcctctcgcttaccggcaccttcctgcccggccccgcgccgccggggtccacggggctcaccgtgtacctggccgggggccaggggcaggtggttggcggcagcgttgtaggcaccctcatcgccgccggcccggtcatggtgatcgcgtccacgttcgccaacgcaacctacgagcgccttccgctcgaagaggaggatgaagggccagctccaccgatggcgtccggcggcggcgccgatccgctcatgggtggaggcctcggcatcgccgacccgtcagcgctgcccatgttcaacttgccgccgagcaacgggcagcttggaggcggcgacggcttcccgtcatgggcgcacccgcggccaccgtactgatgatcctgatgcgcccaaggtcgagcacagttgctagaatgcaatggcgaatgctgtgcgtgcactgcatggtcgttactgttccattggagacgacgacggccggatcggagtggcgcgccattagtaggttagtacatatgatgaagtgtggccgtcgtccctagtgctactttgttgccgtgcaataatcagatgtcgttggtctc

SEQ ID NO: 30899 - protein, 245 aa, Zea mays subsp. mays
  peptide (1)..(245): Ceres Seq. ID no. 12366625
  misc_feature (1)..(245): NCBI GI NO: 18414224 NR Description: Expressed protein; protein id: At4g14465
  misc_feature (1)..(245): NCBI GI NO: 21593180 NR Description: putative DNA-binding protein
  misc_feature (16)..(232): NCBI GI NO: 18396925 NR Description: expressed protein; protein id: At3g04570
  misc_feature (1)..(245): NCBI GI NO: 38346718 NR Description: OSJNBa0086O06.16
  misc_feature (12)..(244): NCBI GI NO: 34902080 NR Description: unknown protein
  misc_feature (12)..(245): NCBI GI NO: 15236657 NR Description: hypothetical protein; protein id: At4g17800
  misc_feature (3)..(245): NCBI GI NO: 34905212 NR Description: P0672D01.8
  misc_feature (17)..(236): NCBI GI NO: 15234404 NR Description: putative DNA-binding protein; protein id:At4g12050
  misc_feature (17)..(245): NCBI GI NO: 15235815 NR Description: putative DNA binding protein; protein id:At4g22810
  misc_feature (26)..(230): NCBI GI NO: 15226945 NR Description: putative AT-hook DNA-binding protein
MKDPEPSSPAVGAPGDHGADETNESGGAVVAAPSRRPRGRPPGSKNKPKPPIFVTRDSPNALRSHVMEVAGGADVADAIAQFSRRRQRGVCVLSGAGTVANVALRQPSAPTAVVALRGRFEILSLTGTFLPGPAPPGSTGLTVYLAGGQGQVVGGSVVGTLIAAGPVMVIASTFANATYERLPLEEEDEGPAPPMASGGGADPLMGGGLGIADPSALPMFNLPPSNGQLGGGDGFPSWAHPRPPY

SEQ ID NO: 30900 - protein, 179 aa, Zea mays subsp. mays
  peptide (1)..(179): Ceres Seq. ID no. 12366626
  misc_feature (1)..(179): NCBI GI NO: 18414224 NR Description: Expressed protein; protein id: At4g14465
  misc_feature (1)..(179): NCBI GI NO: 21593180 NR Description: putative DNA-binding protein
  misc_feature (1)..(166): NCBI GI NO: 18396925 NR Description: expressed protein; protein id: At3g04570
  misc_feature (1)..(179): NCBI GI NO: 38346718 NR Description: OSJNBa0086O06.16
  misc_feature (1)..(178): NCBI GI NO: 34902080 NR Description: unknown protein
  misc_feature (1)..(179): NCBI GI NO: 15236657 NR Description: hypothetical protein; protein id: At4g17800
  misc_feature (1)..(179): NCBI GI NO: 34905212 NR Description: P0672D01.8
  misc_feature (1)..(170): NCBI GI NO: 15234404 NR Description: putative DNA-binding protein; protein id:At4g12050
  misc_feature (1)..(179): NCBI GI NO: 15235815 NR Description: putative DNA binding protein; protein id:At4g22810
  misc_feature (1)..(164): NCBI GI NO: 15226945 NR Description: putative AT-hook DNA-binding protein
MEVAGGADVADAIAQFSRRRQRGVCVLSGAGTVANVALRQPSAPTAVVALRGRFEILSLTGTFLPGPAPPGSTGLTVYLAGGQGQVVGGSVVGTLIAAGPVMVIASTFANATYERLPLEEEDEGPAPPMASGGGADPLMGGGLGIADPSALPMFNLPPSNGQLGGGDGFPSWAHPRPPY

SEQ ID NO: 30901 - protein, 138 aa, Zea mays subsp. mays
  peptide (1)..(138): Ceres Seq. ID no. 12366627
  misc_feature (1)..(133): NCBI GI NO: 15807127 NR Description: conserved hypothetical protein
  misc_feature (1)..(138): NCBI GI NO: 3044086 NR Description: unknown [Myxococcus xanthus]
  misc_feature (1)..(131): NCBI GI NO: 21222110 NR Description: putative oxidoreductase
MRPTSPVAPWWRRPAGGLADARRGPRTSPSRPSSSRATAPTRCAATSWRWRAAPMWRTPSRSSRAAASAVSACSAAPGPSPTWRCGNRPRPRPWSRSAAASRSSRLPAPSCPAPRRRGPRGSPCTWPGARGRWLAAAL

SEQ ID NO: 30902 - DNA, 949 bp, Zea mays subsp. mays
  misc_feature (1)..(949): Ceres Seq. ID no. 13589371
aacatcctaatcaaaaaagaaacggaagaagaacggcaggcgaagcatcgccagattggtatatcgatcgattgatcggtggcggagggaggggaggagggcggcagatggcggcgtgccggggcttcttcgagtgcctgctcaggctgctcaacttcatcctcaccgtcgccggcctcgccatggtcggctacgggatctacctgctcgtcgagtggatgaagatatctgaggacggcagcagcggggggttgacggcggaggtgctggtctccggccggccgttgttgggggctgtcgctctcggtgacagcttcctcgacatgctacccaaagcatggtttatttatttgttcattggtgttggtgctactgttttcctcgtgtctctgtttggctgcattggagcagggacaagaaacacctgctgtttgtgtttctatgccttcttggtcatattgttgatccttgctgaagctggagctgctgcattcattttctttgaccatagctggaaagatgtaattccagtggacaagacacataactttgatgttatgtatggctttctgaagaaaaactgggagattgcaagatgggttgctcttggcgttgttgtttttgaggcagtgctctttctattagctctggttgtcagggcaatgaacaaacctgcggagtatgacagtgatgatgaaattattgcaattggccgaagccctaccatgcggcagccattgatccatgcccaaaatgtgccggccaccggtgttcctgtcccaacactcgatcagcgttcaagtagaaatgatgcctggagccaaaggatgcgagagaagtatggtctggacacgagccagttcacgtacaacccctcagacccaagcaggtaccagcagaatggcgctccacaggctgaagaaaggagtcaatgcactataatgtgaag

SEQ ID NO: 30903 - protein, 314 aa, Zea mays subsp. mays
  peptide (1)..(314): Ceres Seq. ID no. 13589372
  misc_feature (44)..(208): Pfam Name: Pfam Description:  Tetraspanin family
  misc_feature (38)..(314): NCBI GI NO: 18398417 NR Description: senescence-associated protein family
  misc_feature (147)..(314): NCBI GI NO: 25518327 NR Description: hypothetical protein F5D14
  misc_feature (38)..(134): NCBI GI NO: 25518327 NR Description: hypothetical protein F5D14
  misc_feature (135)..(314): NCBI GI NO: 34905192 NR Description: P0498E12.14
  misc_feature (90)..(292): NCBI GI NO: 15235419 NR Description: expressed protein [Arabidopsis thaliana]
  misc_feature (208)..(314): NCBI GI NO: 4097569 NR Description: GMFP4 [Glycine max]
  misc_feature (106)..(291): NCBI GI NO: 18399283 NR Description: expressed protein [Arabidopsis thaliana]
  misc_feature (106)..(291): NCBI GI NO: 25360978 NR Description: hypothetical protein At2g20230
  misc_feature (110)..(256): NCBI GI NO: 30681117 NR Description: expressed protein [Arabidopsis thaliana]
  misc_feature (38)..(136): NCBI GI NO: 34905192 NR Description: P0498E12.14
HPNQKRNGRRTAGEASPDWYIDRLIGGGGRGGGRQMAACRGFFECLLRLLNFILTVAGLAMVGYGIYLLVEWMKISEDGSSGGLTAEVLVSGRPLLGAVALGDSFLDMLPKAWFIYLFIGVGATVFLVSLFGCIGAGTRNTCCLCFYAFLVILLILAEAGAAAFIFFDHSWKDVIPVDKTHNFDVMYGFLKKNWEIARWVALGVVVFEAVLFLLALVVRAMNKPAEYDSDDEIIAIGRSPTMRQPLIHAQNVPATGVPVPTLDQRSSRNDAWSQRMREKYGLDTSQFTYNPSDPSRYQQNGAPQAEERSQCTIM

SEQ ID NO: 30904 - protein, 279 aa, Zea mays subsp. mays
  peptide (1)..(279): Ceres Seq. ID no. 13589373
  misc_feature (9)..(173): Pfam Name: Pfam Description:  Tetraspanin family
  misc_feature (3)..(279): NCBI GI NO: 18398417 NR Description: senescence-associated protein family
  misc_feature (112)..(279): NCBI GI NO: 25518327 NR Description: hypothetical protein F5D14
  misc_feature (3)..(99): NCBI GI NO: 25518327 NR Description: hypothetical protein F5D14
  misc_feature (100)..(279): NCBI GI NO: 34905192 NR Description: P0498E12.14
  misc_feature (55)..(257): NCBI GI NO: 15235419 NR Description: expressed protein [Arabidopsis thaliana]
  misc_feature (173)..(279): NCBI GI NO: 4097569 NR Description: GMFP4 [Glycine max]
  misc_feature (71)..(256): NCBI GI NO: 18399283 NR Description: expressed protein [Arabidopsis thaliana]
  misc_feature (71)..(256): NCBI GI NO: 25360978 NR Description: hypothetical protein At2g20230
  misc_feature (75)..(221): NCBI GI NO: 30681117 NR Description: expressed protein [Arabidopsis thaliana]
  misc_feature (3)..(101): NCBI GI NO: 34905192 NR Description: P0498E12.14
MAACRGFFECLLRLLNFILTVAGLAMVGYGIYLLVEWMKISEDGSSGGLTAEVLVSGRPLLGAVALGDSFLDMLPKAWFIYLFIGVGATVFLVSLFGCIGAGTRNTCCLCFYAFLVILLILAEAGAAAFIFFDHSWKDVIPVDKTHNFDVMYGFLKKNWEIARWVALGVVVFEAVLFLLALVVRAMNKPAEYDSDDEIIAIGRSPTMRQPLIHAQNVPATGVPVPTLDQRSSRNDAWSQRMREKYGLDTSQFTYNPSDPSRYQQNGAPQAEERSQCTIM

SEQ ID NO: 30905 - protein, 254 aa, Zea mays subsp. mays
  peptide (1)..(254): Ceres Seq. ID no. 13589374
  misc_feature (1)..(148): Pfam Name: Pfam Description:  Tetraspanin family
  misc_feature (1)..(254): NCBI GI NO: 18398417 NR Description: senescence-associated protein family
  misc_feature (87)..(254): NCBI GI NO: 25518327 NR Description: hypothetical protein F5D14
  misc_feature (1)..(74): NCBI GI NO: 25518327 NR Description: hypothetical protein F5D14
  misc_feature (75)..(254): NCBI GI NO: 34905192 NR Description: P0498E12.14
  misc_feature (30)..(232): NCBI GI NO: 15235419 NR Description: expressed protein [Arabidopsis thaliana]
  misc_feature (148)..(254): NCBI GI NO: 4097569 NR Description: GMFP4 [Glycine max]
  misc_feature (46)..(231): NCBI GI NO: 18399283 NR Description: expressed protein [Arabidopsis thaliana]
  misc_feature (46)..(231): NCBI GI NO: 25360978 NR Description: hypothetical protein At2g20230
  misc_feature (50)..(196): NCBI GI NO: 30681117 NR Description: expressed protein [Arabidopsis thaliana]
  misc_feature (1)..(76): NCBI GI NO: 34905192 NR Description: P0498E12.14
MVGYGIYLLVEWMKISEDGSSGGLTAEVLVSGRPLLGAVALGDSFLDMLPKAWFIYLFIGVGATVFLVSLFGCIGAGTRNTCCLCFYAFLVILLILAEAGAAAFIFFDHSWKDVIPVDKTHNFDVMYGFLKKNWEIARWVALGVVVFEAVLFLLALVVRAMNKPAEYDSDDEIIAIGRSPTMRQPLIHAQNVPATGVPVPTLDQRSSRNDAWSQRMREKYGLDTSQFTYNPSDPSRYQQNGAPQAEERSQCTIM

SEQ ID NO: 30906 - DNA, 401 bp, Zea mays subsp. mays
  misc_feature (1)..(401): Ceres Seq. ID no. 3238333
  misc_feature (323)..(323): n is a, c, t, g, unknown, or other
acagcatgtgctcactcttctcgaattcatcctcccgcaggacttcctgaacatgttcttcagggatcagtacaggccgatccccaacgtgtacaacctcgtgctggccatgctctggaggcaccccgagaacgtgcagctggagaaggtgaaggtcgtgcactactgcgcggcggggtccaagccgtggaggttcacgggcaaggaggcgaacatggacagggaggacatcaacgccctggtgaagaagtggtgggacatctacaacgacgagacgctggacttgaagggcctgccctcgctctcgcccgacgacgacgacnaggtggaggcggtggccaagaagccgcttcgcgcggcctggcggaggcggcacggtcaagtacgtcaccgcgccctcg

SEQ ID NO: 30907 - protein, 133 aa, Zea mays subsp. mays
  peptide (1)..(133): Ceres Seq. ID no. 3238334
  misc_feature (13)..(120): NCBI GI NO: 32330230 NR Description: galactinol synthase 3 [Zea mays]
  misc_feature (13)..(120): NCBI GI NO: 34898096 NR Description: WSI76 protein induced by water stress
  misc_feature (13)..(94): NCBI GI NO: 32345694 NR Description: galactinol synthase [Glycine max]
  misc_feature (13)..(105): NCBI GI NO: 5608497 NR Description: galactinol synthase, isoform GolS-1
  misc_feature (13)..(120): NCBI GI NO: 15219093 NR Description: galactinol synthase, putative
  misc_feature (1)..(98): NCBI GI NO: 20340247 NR Description: galactinol synthase-like protein
  misc_feature (13)..(96): NCBI GI NO: 30089660 NR Description: galactinol synthase [Medicago sativa]
  misc_feature (13)..(98): NCBI GI NO: 15223567 NR Description: water stress-induced protein, putative
  misc_feature (13)..(98): NCBI GI NO: 15724308 NR Description: At1g56600/F25P12_16 [Arabidopsis thaliana]
  misc_feature (13)..(120): NCBI GI NO: 15226522 NR Description: putative galactinol synthase; protein id:At2g47180
  misc_feature (108)..(108): Xaa is any aa, unknown or other
QHVLTLLEFILPQDFLNMFFRDQYRPIPNVYNLVLAMLWRHPENVQLEKVKVVHYCAAGSKPWRFTGKEANMDREDINALVKKWWDIYNDETLDLKGLPSLSPDDDDXVEAVAKKPLRAAWRRRHGQVRHRAL

SEQ ID NO: 30908 - protein, 133 aa, Zea mays subsp. mays
  peptide (1)..(133): Ceres Seq. ID no. 3238335
  misc_feature (108)..(108): Xaa is any aa, unknown or other
TACAHSSRIHPPAGLPEHVLQGSVQADPQRVQPRAGHALEAPRERAAGEGEGRALLRGGVQAVEVHGQGGEHGQGGHQRPGEEVVGHLQRRDAGLEGPALALARRRRXGGGGGQEAASRGLAEAARSSTSPRP

SEQ ID NO: 30909 - protein, 116 aa, Zea mays subsp. mays
  peptide (1)..(116): Ceres Seq. ID no. 3238336
  misc_feature (1)..(103): NCBI GI NO: 32330230 NR Description: galactinol synthase 3 [Zea mays]
  misc_feature (1)..(103): NCBI GI NO: 34898096 NR Description: WSI76 protein induced by water stress
  misc_feature (1)..(77): NCBI GI NO: 32345694 NR Description: galactinol synthase [Glycine max]
  misc_feature (1)..(88): NCBI GI NO: 5608497 NR Description: galactinol synthase, isoform GolS-1
  misc_feature (1)..(103): NCBI GI NO: 15219093 NR Description: galactinol synthase, putative
  misc_feature (1)..(81): NCBI GI NO: 20340247 NR Description: galactinol synthase-like protein
  misc_feature (1)..(79): NCBI GI NO: 30089660 NR Description: galactinol synthase [Medicago sativa]
  misc_feature (1)..(81): NCBI GI NO: 15223567 NR Description: water stress-induced protein, putative
  misc_feature (1)..(81): NCBI GI NO: 15724308 NR Description: At1g56600/F25P12_16 [Arabidopsis thaliana]
  misc_feature (1)..(103): NCBI GI NO: 15226522 NR Description: putative galactinol synthase; protein id:At2g47180
  misc_feature (91)..(91): Xaa is any aa, unknown or other
MFFRDQYRPIPNVYNLVLAMLWRHPENVQLEKVKVVHYCAAGSKPWRFTGKEANMDREDINALVKKWWDIYNDETLDLKGLPSLSPDDDDXVEAVAKKPLRAAWRRRHGQVRHRAL

SEQ ID NO: 30910 - DNA, 700 bp, Zea mays subsp. mays
  misc_feature (1)..(700): Ceres Seq. ID no. 12406208
atccatccatccatctcgtgagcgccggccaccgtcaatcgattcgatttgatcgttccccttccccgcgcctcctcgttcccctgaccagtcgccccgattttttttctgttccaggtcgcttctctctgttccgcgtgcgatcgagtagatcaaaaggaggaggaggatggcgaggagttcgttcaagttggagcaccccttcgaaaggaggcaagctgaggctaaccgcatcagggagaaataccctgacagaatccctgtcattattgagaaggccgagaggagtgacatcccagacattgacaagaaaaagtaccttgttcctgccgacctcacagtcggacagtttgtgtatgtggtacggaagcggatcaagctcagcgctgagaaggcaatcttcatcttcgtaaagaacaccctcccaccaacagctgctctgatgtccgccatctacgaggagaacaaggacgaggacggcttcctctacatgacgtacagcggcgagaacaccttcgggctgttctgagtgggagccgctatggatccacattgggcaatgcctcctgtaaatactaaacatgcatcacaagaatctgtgtccatagcataatctggtctgtctgtcattacgcaacttgacgtgcaatgctaaacacatttaagtaataatatatactactctgctttgggatgcttc

SEQ ID NO: 30911 - protein, 136 aa, Zea mays subsp. mays
  peptide (1)..(136): Ceres Seq. ID no. 12406209
PSIHLVSAGHRQSIRFDRSPSPRLLVPLTSRPDFFSVPGRFSLFRVRSSRSKGGGGWRGVRSSWSTPSKGGKLRLTASGRNTLTESLSLLRRPRGVTSQTLTRKSTLFLPTSQSDSLCMWYGSGSSSALRRQSSSS

SEQ ID NO: 30912 - protein, 119 aa, Zea mays subsp. mays
  peptide (1)..(119): Ceres Seq. ID no. 12406210
  misc_feature (14)..(117): Pfam Name: Pfam Description:  Microtubule associated protein 1A/1B
  misc_feature (1)..(119): NCBI GI NO: 40253647 NR Description: putative microtubial binding protein
  misc_feature (1)..(117): NCBI GI NO: 34595981 NR Description: microtubule-associated protein 1 light chain 3
  misc_feature (1)..(118): NCBI GI NO: 38344173 NR Description: OSJNBa0053K19.12
  misc_feature (1)..(118): NCBI GI NO: 15220686 NR Description: symbiosis-related protein, putative
  misc_feature (1)..(117): NCBI GI NO: 33146967 NR Description: putative microtubule associated protein
  misc_feature (1)..(119): NCBI GI NO: 21592920 NR Description: putative microtubule-associated protein
  misc_feature (1)..(119): NCBI GI NO: 15224577 NR Description: putative microtubule-associated protein
  misc_feature (1)..(119): NCBI GI NO: 7446944 NR Description: hypothetical protein F8K4
  misc_feature (1)..(117): NCBI GI NO: 18415813 NR Description: symbiosis-related like protein
  misc_feature (1)..(117): NCBI GI NO: 21553487 NR Description: symbiosis-related like protein
MARSSFKLEHPFERRQAEANRIREKYPDRIPVIIEKAERSDIPDIDKKKYLVPADLTVGQFVYVVRKRIKLSAEKAIFIFVKNTLPPTAALMSAIYEENKDEDGFLYMTYSGENTFGLF

SEQ ID NO: 30913 - DNA, 2048 bp, Zea mays subsp. mays
  misc_feature (1)..(2048): Ceres Seq. ID no. 12358846
tttcaagcaaaagagaagaggagttccattgcaactacagttgcaaatgtagcatctccttcagttacatgttcttcaggacagtctaatgattctgaaactggtatcggaatgatggaatctgctttatttgaaacacggtcaaaattctttcaagcaaaagagaagaggagttccattgcaactacagttgcaaatgtagcatctccttcagttacatgttattcaggacagtctaatgattctgatactggggagaattgtaacatggatgctgaaaaggcaagtcgagttgtccaatctctttttggagcattgtcttcacgatatgaaaatagtaaaggtggcaagctgatgagtaacgcagcaccagaaaaaatgcctactgagaatgagcaaatagtcaatgagatactacatgatatacatggttcttttgctgacatctctgatggtgctggtaccgttgaaggtgacttcaaggtaaaagtcaaggaaacaatggagaaggctttctgggatgtggttgctgattcaatgagaggagacatgccagactactgttatctggtcagcctggtaaaggaaatcagggaagcactggaagagttatctcctacagggtggaaagaagaaatcagtgacaatattaaccttgaaatattgacccagttacttgaatcaggttcccaggacagacaataccttggacaaattttgcagtactctctggataagctgcgaaaactgtcttctcctgtgaaggaacacgagatgaagaagagtcatgatacattgttgggagaattggtcgaagactctaaatccaattataaagatccaaattcatttgttctttgcgttatcaagggtttgcgcttcactatggaggaattacaggctctaaaaacagaagttactagagcacgcatccaactattggaaccattgattaagggatcaggtggagtggagtacctgcagaagtcttttgctggtcgctgtggttccccttctgatgcgttagcttctctcccttcaactgcccggtggattttctctttgaaagatgtcgtggaagaacaatggaatgaacatgtcagctcgttatcaattctgccagaagcagaccatgttcagacacttgttgccaccctccgaactggccatgcagttgcaggtgtacaatctgtgatacctgcagcagacaatacaggattaccagagtgtaggggagaaatacttggcaagctaataaggattgggctattacagctcatcagcagcatggagggtgtagaaagggaatcggttcctgagacctttatgttgaattggttgaggctgcggtctgttcagagtaagtttcaacaagtgattgtgatagcgacaagcatgcttgttttgcatcaggtgttagcgagtgagaacccaaagatcacttcttctgagctggagaatgccacttcggaactgttcaacgtcctcacaaggctgctagacaactttccagatgttggcactgagaaaatcattgaggccatgatgtactcgtcaacctcaaggagcttgtcagatcatgaaaggatgaacgccagaaaagagatattgactagggtcttccttagaagcctccagaccgatgacaccgtcttcaagaaggtctctcagtccgtatactgtgcattccgtgcagtcaccctgggcggcagtggggagaagggccggatgctcgccgatgcatccctgaggcgcgtcggggcaacaaaactcactgcgcggctggtgaaggcagctgaagtgcttatcaaagcagcaatggtgtcagagcaggtccatggcccatggtacacgcagttattgtgaatggctctgctaccgcgatatatatatatatatagctctgctcatgccccgttgttacaactgaatgaatggtttgtgggagtgccgtgatgtctgaattccaataagcataggcgacctgaatgcatgtatatgtaaatatacacgaaacgtaatacgactccgaaatgctcctttctcct

SEQ ID NO: 30914 - protein, 621 aa, Zea mays subsp. mays
  peptide (1)..(621): Ceres Seq. ID no. 12358847
  misc_feature (137)..(621): Pfam Name: Pfam Description:  T-complex protein 11
  misc_feature (28)..(620): NCBI GI NO: 39545651 NR Description: OJ000114_01.6
  misc_feature (95)..(620): NCBI GI NO: 39545653 NR Description: OJ000114_01.8
  misc_feature (33)..(79): NCBI GI NO: 39545653 NR Description: OJ000114_01.8
  misc_feature (101)..(621): NCBI GI NO: 15233756 NR Description: putative protein; protein id: At4g09150.1
  misc_feature (35)..(621): NCBI GI NO: 15219971 NR Description: unknown protein; protein id: At1g22930.1
  misc_feature (68)..(315): NCBI GI NO: 38648893 NR Description: Unknown (protein for MGC:73347) [Danio rerio]
FQAKEKRSSIATTVANVASPSVTCSSGQSNDSETGIGMMESALFETRSKFFQAKEKRSSIATTVANVASPSVTCYSGQSNDSDTGENCNMDAEKASRVVQSLFGALSSRYENSKGGKLMSNAAPEKMPTENEQIVNEILHDIHGSFADISDGAGTVEGDFKVKVKETMEKAFWDVVADSMRGDMPDYCYLVSLVKEIREALEELSPTGWKEEISDNINLEILTQLLESGSQDRQYLGQILQYSLDKLRKLSSPVKEHEMKKSHDTLLGELVEDSKSNYKDPNSFVLCVIKGLRFTMEELQALKTEVTRARIQLLEPLIKGSGGVEYLQKSFAGRCGSPSDALASLPSTARWIFSLKDVVEEQWNEHVSSLSILPEADHVQTLVATLRTGHAVAGVQSVIPAADNTGLPECRGEILGKLIRIGLLQLISSMEGVERESVPETFMLNWLRLRSVQSKFQQVIVIATSMLVLHQVLASENPKITSSELENATSELFNVLTRLLDNFPDVGTEKIIEAMMYSSTSRSLSDHERMNARKEILTRVFLRSLQTDDTVFKKVSQSVYCAFRAVTLGGSGEKGRMLADASLRRVGATKLTARLVKAAEVLIKAAMVSEQVHGPWYTQLL

SEQ ID NO: 30915 - protein, 584 aa, Zea mays subsp. mays
  peptide (1)..(584): Ceres Seq. ID no. 12358848
  misc_feature (100)..(584): Pfam Name: Pfam Description:  T-complex protein 11
  misc_feature (1)..(583): NCBI GI NO: 39545651 NR Description: OJ000114_01.6
  misc_feature (58)..(583): NCBI GI NO: 39545653 NR Description: OJ000114_01.8
  misc_feature (1)..(42): NCBI GI NO: 39545653 NR Description: OJ000114_01.8
  misc_feature (64)..(584): NCBI GI NO: 15233756 NR Description: putative protein; protein id: At4g09150.1
  misc_feature (1)..(584): NCBI GI NO: 15219971 NR Description: unknown protein; protein id: At1g22930.1
  misc_feature (31)..(278): NCBI GI NO: 38648893 NR Description: Unknown (protein for MGC:73347) [Danio rerio]
MMESALFETRSKFFQAKEKRSSIATTVANVASPSVTCYSGQSNDSDTGENCNMDAEKASRVVQSLFGALSSRYENSKGGKLMSNAAPEKMPTENEQIVNEILHDIHGSFADISDGAGTVEGDFKVKVKETMEKAFWDVVADSMRGDMPDYCYLVSLVKEIREALEELSPTGWKEEISDNINLEILTQLLESGSQDRQYLGQILQYSLDKLRKLSSPVKEHEMKKSHDTLLGELVEDSKSNYKDPNSFVLCVIKGLRFTMEELQALKTEVTRARIQLLEPLIKGSGGVEYLQKSFAGRCGSPSDALASLPSTARWIFSLKDVVEEQWNEHVSSLSILPEADHVQTLVATLRTGHAVAGVQSVIPAADNTGLPECRGEILGKLIRIGLLQLISSMEGVERESVPETFMLNWLRLRSVQSKFQQVIVIATSMLVLHQVLASENPKITSSELENATSELFNVLTRLLDNFPDVGTEKIIEAMMYSSTSRSLSDHERMNARKEILTRVFLRSLQTDDTVFKKVSQSVYCAFRAVTLGGSGEKGRMLADASLRRVGATKLTARLVKAAEVLIKAAMVSEQVHGPWYTQLL

SEQ ID NO: 30916 - protein, 583 aa, Zea mays subsp. mays
  peptide (1)..(583): Ceres Seq. ID no. 12358849
  misc_feature (99)..(583): Pfam Name: Pfam Description:  T-complex protein 11
  misc_feature (1)..(582): NCBI GI NO: 39545651 NR Description: OJ000114_01.6
  misc_feature (57)..(582): NCBI GI NO: 39545653 NR Description: OJ000114_01.8
  misc_feature (1)..(41): NCBI GI NO: 39545653 NR Description: OJ000114_01.8
  misc_feature (63)..(583): NCBI GI NO: 15233756 NR Description: putative protein; protein id: At4g09150.1
  misc_feature (1)..(583): NCBI GI NO: 15219971 NR Description: unknown protein; protein id: At1g22930.1
  misc_feature (30)..(277): NCBI GI NO: 38648893 NR Description: Unknown (protein for MGC:73347) [Danio rerio]
MESALFETRSKFFQAKEKRSSIATTVANVASPSVTCYSGQSNDSDTGENCNMDAEKASRVVQSLFGALSSRYENSKGGKLMSNAAPEKMPTENEQIVNEILHDIHGSFADISDGAGTVEGDFKVKVKETMEKAFWDVVADSMRGDMPDYCYLVSLVKEIREALEELSPTGWKEEISDNINLEILTQLLESGSQDRQYLGQILQYSLDKLRKLSSPVKEHEMKKSHDTLLGELVEDSKSNYKDPNSFVLCVIKGLRFTMEELQALKTEVTRARIQLLEPLIKGSGGVEYLQKSFAGRCGSPSDALASLPSTARWIFSLKDVVEEQWNEHVSSLSILPEADHVQTLVATLRTGHAVAGVQSVIPAADNTGLPECRGEILGKLIRIGLLQLISSMEGVERESVPETFMLNWLRLRSVQSKFQQVIVIATSMLVLHQVLASENPKITSSELENATSELFNVLTRLLDNFPDVGTEKIIEAMMYSSTSRSLSDHERMNARKEILTRVFLRSLQTDDTVFKKVSQSVYCAFRAVTLGGSGEKGRMLADASLRRVGATKLTARLVKAAEVLIKAAMVSEQVHGPWYTQLL

SEQ ID NO: 30917 - DNA, 2084 bp, Zea mays subsp. mays
  misc_feature (1)..(2084): Ceres Seq. ID no. 12372847
actcgcacggacgagcgaggcagccccgcaggtcgcagccacaacccaagcgcagcgatctgcctccgctccggctcagctcccgccctgcctccgccttccattccgccgcgcggcgctgccgagtgccgacgtcgtccccgccggagtttctggtttctgggttggatctctcggagtcggagcgagcgaggatgggcggcggcaacggtgaaaccacccagctgggggagccactgctggcgaagaaggcgaaggcgtaccgccctaggtgccccggctgccgggtggaccgcctcaacgcggagcgggagggggtcttccctctcaaggacctcttcctcatctggctcgtcaccatcacctgcaccctgccgatccagtctctgttccccttcttgtatttcatgataagggatctgcatattgctaaacaaacacaagacattggattttatgctggttttgttggcgcttcatatatgtgtgggagggcagtctcctcaacagtatggggaatcgtggctgataagtatggaaggaaaccagttatcgtactgacccttattgcaatagttatcttcaatactatgtttggactaagctcaaactattggatggcattaatcacacgatgcctgcttggaatcatgtgtggttatctcgggccaattaaggcttatgctacagaagtgtgccgaaaagaatacaatcatctggctttggcagttgtttcttcctcacgaggcattggtctcattattggtccagctcttggtggttatcttgcgcagcctgcagataaatatccaagtatattctctcagacgtccatatttgggaggtttccatactttcttccgtgcctgtgtatatcaatccttgcagttattgctctaattgcctgcatctggtttccggaaactttgcataaacacaatggggatgccgttgataattccgttgaaacagtagaagaatctcttgctggcaccgacactgaagaaaatggaggtggcggatgtctaaaattatttacaaactggccgttgatgtcagctattactttatattgtatcttctctcttcaggatgtggcttatgcagagacattctctctttgggctgtcagtgacagatcgtttggtggattaagctttactaccacagatgtgggcaatgtccttgcgatgtcaggtctcttcctttttctatatcaaatgttgatctatccgttccttgccaaaacggtagaccacatcacattagtccgtgcagtggcgttattgactctaccggttcttgctagctacccattctttccttcgttgtccgggttcgggctcatggtggtagtaaattgtgcatcttttctgaagaatacattctcggtaactaccattaccgtgttcaacattttgatgaatgaagctgtgactcaggatgtaagagccgcagccaatgggatagctgtaacactaatgtccatctctaaagcggttgctccagctgttgcaggaatcatattttcgtgggcccagaggcgtcaaacagctgcatttcttccaggcgaccacttggtgttcttcatactgaacatcttcacgttcatcggtttcgtcttcaccttcagaccgtttttcgttcgaggcagtgccaagcactgaaacatggatgaagcggacgacgacccatgggtatcctatccaggggcaatcgaatatagattttcttgtggcgtggccaagggcggtgccgagcctgtaccagtacgacgactcaggccagaacacacggcgtatggtatggtacacagcaaggccgtgttgttgctgtaagttttgtaatttctgtttccttcttctcggcttcgcagcatgcagttgctgtatatgatggaagaacactctgttactgggcatgttgcgcggtttccacgcgtgtaagtaatgtagaagtcgctatggtaggtatttccataccgtcattagtggatcattgaatttttttgtaagaaggttattgcaatgccctttttccgggcatgaataagaaaaaggaaatatgcttatatgcatggtatt

SEQ ID NO: 30918 - protein, 554 aa, Zea mays subsp. mays
  peptide (1)..(554): Ceres Seq. ID no. 12372848
  misc_feature (115)..(547): Pfam Name: and other Pfam Description: Sugar
  misc_feature (161)..(554): NCBI GI NO: 34903136 NR Description: unnamed protein product
  misc_feature (67)..(547): NCBI GI NO: 23452821 NR Description: major facilitator superfamily antiporter
  misc_feature (85)..(546): NCBI GI NO: 23452823 NR Description: major facilitator superfamily antiporter
  misc_feature (77)..(546): NCBI GI NO: 22326785 NR Description: transporter-like protein; protein id: At5g13740
  misc_feature (85)..(546): NCBI GI NO: 30684565 NR Description: transporter-related protein [Arabidopsis thaliana]
  misc_feature (91)..(546): NCBI GI NO: 15229781 NR Description: transporter-like protein; protein id: At3g43790.1
  misc_feature (103)..(546): NCBI GI NO: 20260160 NR Description: transporter-like protein [Arabidopsis thaliana]
  misc_feature (103)..(524): NCBI GI NO: 10177340 NR Description: transporter-like protein [Arabidopsis thaliana]
  misc_feature (161)..(546): NCBI GI NO: 23452819 NR Description: major facilitator superfamily antiporter
  misc_feature (161)..(546): NCBI GI NO: 30684567 NR Description: transporter-related protein [Arabidopsis thaliana]
SHGRARQPRRSQPQPKRSDLPPLRLSSRPASAFHSAARRCRVPTSSPPEFLVSGLDLSESERARMGGGNGETTQLGEPLLAKKAKAYRPRCPGCRVDRLNAEREGVFPLKDLFLIWLVTITCTLPIQSLFPFLYFMIRDLHIAKQTQDIGFYAGFVGASYMCGRAVSSTVWGIVADKYGRKPVIVLTLIAIVIFNTMFGLSSNYWMALITRCLLGIMCGYLGPIKAYATEVCRKEYNHLALAVVSSSRGIGLIIGPALGGYLAQPADKYPSIFSQTSIFGRFPYFLPCLCISILAVIALIACIWFPETLHKHNGDAVDNSVETVEESLAGTDTEENGGGGCLKLFTNWPLMSAITLYCIFSLQDVAYAETFSLWAVSDRSFGGLSFTTTDVGNVLAMSGLFLFLYQMLIYPFLAKTVDHITLVRAVALLTLPVLASYPFFPSLSGFGLMVVVNCASFLKNTFSVTTITVFNILMNEAVTQDVRAAANGIAVTLMSISKAVAPAVAGIIFSWAQRRQTAAFLPGDHLVFFILNIFTFIGFVFTFRPFFVRGSAKH

SEQ ID NO: 30919 - protein, 490 aa, Zea mays subsp. mays
  peptide (1)..(490): Ceres Seq. ID no. 12372849
  misc_feature (51)..(483): Pfam Name: and other Pfam Description: Sugar
  misc_feature (97)..(490): NCBI GI NO: 34903136 NR Description: unnamed protein product
  misc_feature (3)..(483): NCBI GI NO: 23452821 NR Description: major facilitator superfamily antiporter
  misc_feature (21)..(482): NCBI GI NO: 23452823 NR Description: major facilitator superfamily antiporter
  misc_feature (13)..(482): NCBI GI NO: 22326785 NR Description: transporter-like protein; protein id: At5g13740
  misc_feature (21)..(482): NCBI GI NO: 30684565 NR Description: transporter-related protein [Arabidopsis thaliana]
  misc_feature (27)..(482): NCBI GI NO: 15229781 NR Description: transporter-like protein; protein id: At3g43790.1
  misc_feature (39)..(482): NCBI GI NO: 20260160 NR Description: transporter-like protein [Arabidopsis thaliana]
  misc_feature (39)..(460): NCBI GI NO: 10177340 NR Description: transporter-like protein [Arabidopsis thaliana]
  misc_feature (97)..(482): NCBI GI NO: 23452819 NR Description: major facilitator superfamily antiporter
  misc_feature (97)..(482): NCBI GI NO: 30684567 NR Description: transporter-related protein [Arabidopsis thaliana]
MGGGNGETTQLGEPLLAKKAKAYRPRCPGCRVDRLNAEREGVFPLKDLFLIWLVTITCTLPIQSLFPFLYFMIRDLHIAKQTQDIGFYAGFVGASYMCGRAVSSTVWGIVADKYGRKPVIVLTLIAIVIFNTMFGLSSNYWMALITRCLLGIMCGYLGPIKAYATEVCRKEYNHLALAVVSSSRGIGLIIGPALGGYLAQPADKYPSIFSQTSIFGRFPYFLPCLCISILAVIALIACIWFPETLHKHNGDAVDNSVETVEESLAGTDTEENGGGGCLKLFTNWPLMSAITLYCIFSLQDVAYAETFSLWAVSDRSFGGLSFTTTDVGNVLAMSGLFLFLYQMLIYPFLAKTVDHITLVRAVALLTLPVLASYPFFPSLSGFGLMVVVNCASFLKNTFSVTTITVFNILMNEAVTQDVRAAANGIAVTLMSISKAVAPAVAGIIFSWAQRRQTAAFLPGDHLVFFILNIFTFIGFVFTFRPFFVRGSAKH

SEQ ID NO: 30920 - protein, 419 aa, Zea mays subsp. mays
  peptide (1)..(419): Ceres Seq. ID no. 12372850
  misc_feature (1)..(412): Pfam Name: and other Pfam Description: Sugar
  misc_feature (26)..(419): NCBI GI NO: 34903136 NR Description: unnamed protein product
  misc_feature (1)..(412): NCBI GI NO: 23452821 NR Description: major facilitator superfamily antiporter
  misc_feature (1)..(411): NCBI GI NO: 23452823 NR Description: major facilitator superfamily antiporter
  misc_feature (1)..(411): NCBI GI NO: 22326785 NR Description: transporter-like protein; protein id: At5g13740
  misc_feature (1)..(411): NCBI GI NO: 30684565 NR Description: transporter-related protein [Arabidopsis thaliana]
  misc_feature (1)..(411): NCBI GI NO: 15229781 NR Description: transporter-like protein; protein id: At3g43790.1
  misc_feature (1)..(411): NCBI GI NO: 20260160 NR Description: transporter-like protein [Arabidopsis thaliana]
  misc_feature (1)..(389): NCBI GI NO: 10177340 NR Description: transporter-like protein [Arabidopsis thaliana]
  misc_feature (26)..(411): NCBI GI NO: 23452819 NR Description: major facilitator superfamily antiporter
  misc_feature (26)..(411): NCBI GI NO: 30684567 NR Description: transporter-related protein [Arabidopsis thaliana]
MIRDLHIAKQTQDIGFYAGFVGASYMCGRAVSSTVWGIVADKYGRKPVIVLTLIAIVIFNTMFGLSSNYWMALITRCLLGIMCGYLGPIKAYATEVCRKEYNHLALAVVSSSRGIGLIIGPALGGYLAQPADKYPSIFSQTSIFGRFPYFLPCLCISILAVIALIACIWFPETLHKHNGDAVDNSVETVEESLAGTDTEENGGGGCLKLFTNWPLMSAITLYCIFSLQDVAYAETFSLWAVSDRSFGGLSFTTTDVGNVLAMSGLFLFLYQMLIYPFLAKTVDHITLVRAVALLTLPVLASYPFFPSLSGFGLMVVVNCASFLKNTFSVTTITVFNILMNEAVTQDVRAAANGIAVTLMSISKAVAPAVAGIIFSWAQRRQTAAFLPGDHLVFFILNIFTFIGFVFTFRPFFVRGSAKH

SEQ ID NO: 30921 - DNA, 1684 bp, Zea mays subsp. mays
  misc_feature (1)..(1684): Ceres Seq. ID no. 12358384
tcccgtatcctgtgccagctgactcgccttctcaagttctgaaacgcagcggagcgcgccggaggagagcaaagcggacagcggaggatagagagagcagaacaccagatcagatcagatggcgcctccgtctccccagccgccgctagtgcgcgtgctcgaccgcatccgcgtctcgcccgccgccggctgattctgagcaagagcccgcgctccctctcactttcttcgacgttgcctggctcttcaccggccccgtcgagcgcctcttcttcttccgccacccggagccggcctccactctcccgctcctgcgctcctcgctctccctcgcgctccgccgcttctacccactcgccggcaccatcaggccccacgcgcctttcctctgctcctacacccatggtaccgatgccctcaccatggtcgtcgccgagtcgaacagccccgacgatttcgacagcctcgtagccaggtcgcccagcgacctggacgggatccgccccctcgttccgcagttgccgccgccgggggaagacggagcgttcgcgctcgccgccgtgcaggccactgtcttcccaggccgtggcctctgcctcggcgtctccgtccaccacgctgcctgcgacgatgcctccaccatgcatttcgtccgcacctgggccgctacctgccgcctaggactcgagaacgacgacggatccgaggacgccgtgctatcgccacgtccggtgctggaccgctccgtcgtcgccgaccccgacgacctgcgcgggaagacgctcgccgggatggcgcgcctcgcccctcctccttctccgccgccgcagcagcaggaggagaagacgccgatggtgatggcgtcgttcctgctggggcgcgagcagatcgaccggatcaaggagggcgcggcagcaaaggcatcgtctttcgtggcggcgtcggccttggcgtgggtgtgcctcctcaagtgcggttccgttggcgtcgcgggcgcccggcgcagccacatgctcttctccgccgagtgccggtccaggctgacgccaccgctgccggccgaatacttcggcaactgcctgcgcccctgcttcgtggaagccgccacggcggaccttctctctggggaaactgaggacggcgtggctgcggcggcgtcggcgatcgggagcgcgatccaggagatggagcagggcgtgctggaaggcgcggaggggtggttgggcagggtgctgtcggtgcttcccgagcggcccatgtccgtgggcgggtcccccaggcacggcgtgtacgaaaccacggacttcgggtggggccggccggcgagggtggagatggtgtcggtggagaagacgcccgggacggtagcgctggcagacagcccggagggagacggaggcatcgagctcggggtggtgttgccgccggacgccatggatgcatttgcttcgtgctttgcgcatgccgtcggcgccaacgtctgattggcattccgatccgaggtgcagctgctgccttcaacaacacaggaccaaaagattcgattgaagcagcgtattatttgtgcttgattaattggtttactttactgtcttgagagtgagctcgttcttgctgctgatgtgcgaagtcaaggaataaacaaccggattgttccgaaatcaatcaagcgtcactatgattt

SEQ ID NO: 30922 - protein, 353 aa, Zea mays subsp. mays
  peptide (1)..(353): Ceres Seq. ID no. 12358385
  misc_feature (1)..(345): Pfam Name: Pfam Description:  Transferase family
  misc_feature (1)..(349): NCBI GI NO: 38346544 NR Description: OSJNBa0035M09.5
  misc_feature (1)..(353): NCBI GI NO: 17980234 NR Description: malonyl CoA: anthocyanin 5-O-glucoside-6'''-O-malonyltransferase
  misc_feature (1)..(341): NCBI GI NO: 34394044 NR Description: anthocyanin 5-aromatic acyltransferase-like
  misc_feature (1)..(341): NCBI GI NO: 34903412 NR Description: anthocyanin 5-aromatic acyltransferase-like protein~contains EST AU063315
  misc_feature (1)..(343): NCBI GI NO: 25406735 NR Description: protein F21B7.12 [imported] - Arabidopsis thaliana
  misc_feature (1)..(346): NCBI GI NO: 17980232 NR Description: malonyl CoA: anthocyanin 5-O-glucoside-6'''-O-malonyltransferase
  misc_feature (1)..(349): NCBI GI NO: 15219594 NR Description: hypothetical protein; protein id: At1g03940.1
  misc_feature (1)..(351): NCBI GI NO: 7415597 NR Description: acyltransferase homolog [Gentiana triflora]
  misc_feature (1)..(345): NCBI GI NO: 38679123 NR Description: putative acyltransferase [Salvia splendens]
  misc_feature (1)..(352): NCBI GI NO: 7415646 NR Description: anthocyanin acyltransferase [Perilla frutescens]
MVVAESNSPDDFDSLVARSPSDLDGIRPLVPQLPPPGEDGAFALAAVQATVFPGRGLCLGVSVHHAACDDASTMHFVRTWAATCRLGLENDDGSEDAVLSPRPVLDRSVVADPDDLRGKTLAGMARLAPPPSPPPQQQEEKTPMVMASFLLGREQIDRIKEGAAAKASSFVAASALAWVCLLKCGSVGVAGARRSHMLFSAECRSRLTPPLPAEYFGNCLRPCFVEAATADLLSGETEDGVAAAASAIGSAIQEMEQGVLEGAEGWLGRVLSVLPERPMSVGGSPRHGVYETTDFGWGRPARVEMVSVEKTPGTVALADSPEGDGGIELGVVLPPDAMDAFASCFAHAVGANV

SEQ ID NO: 30923 - protein, 280 aa, Zea mays subsp. mays
  peptide (1)..(280): Ceres Seq. ID no. 12358386
  misc_feature (1)..(272): Pfam Name: Pfam Description:  Transferase family
  misc_feature (1)..(276): NCBI GI NO: 38346544 NR Description: OSJNBa0035M09.5
  misc_feature (1)..(280): NCBI GI NO: 17980234 NR Description: malonyl CoA: anthocyanin 5-O-glucoside-6'''-O-malonyltransferase
  misc_feature (1)..(268): NCBI GI NO: 34394044 NR Description: anthocyanin 5-aromatic acyltransferase-like
  misc_feature (1)..(268): NCBI GI NO: 34903412 NR Description: anthocyanin 5-aromatic acyltransferase-like protein~contains EST AU063315
  misc_feature (1)..(270): NCBI GI NO: 25406735 NR Description: protein F21B7.12 [imported] - Arabidopsis thaliana
  misc_feature (1)..(273): NCBI GI NO: 17980232 NR Description: malonyl CoA: anthocyanin 5-O-glucoside-6'''-O-malonyltransferase
  misc_feature (1)..(276): NCBI GI NO: 15219594 NR Description: hypothetical protein; protein id: At1g03940.1
  misc_feature (1)..(278): NCBI GI NO: 7415597 NR Description: acyltransferase homolog [Gentiana triflora]
  misc_feature (1)..(272): NCBI GI NO: 38679123 NR Description: putative acyltransferase [Salvia splendens]
  misc_feature (1)..(279): NCBI GI NO: 7415646 NR Description: anthocyanin acyltransferase [Perilla frutescens]
MHFVRTWAATCRLGLENDDGSEDAVLSPRPVLDRSVVADPDDLRGKTLAGMARLAPPPSPPPQQQEEKTPMVMASFLLGREQIDRIKEGAAAKASSFVAASALAWVCLLKCGSVGVAGARRSHMLFSAECRSRLTPPLPAEYFGNCLRPCFVEAATADLLSGETEDGVAAAASAIGSAIQEMEQGVLEGAEGWLGRVLSVLPERPMSVGGSPRHGVYETTDFGWGRPARVEMVSVEKTPGTVALADSPEGDGGIELGVVLPPDAMDAFASCFAHAVGANV

SEQ ID NO: 30924 - protein, 230 aa, Zea mays subsp. mays
  peptide (1)..(230): Ceres Seq. ID no. 12358387
  misc_feature (1)..(222): Pfam Name: Pfam Description:  Transferase family
  misc_feature (1)..(226): NCBI GI NO: 38346544 NR Description: OSJNBa0035M09.5
  misc_feature (1)..(230): NCBI GI NO: 17980234 NR Description: malonyl CoA: anthocyanin 5-O-glucoside-6'''-O-malonyltransferase
  misc_feature (1)..(218): NCBI GI NO: 34394044 NR Description: anthocyanin 5-aromatic acyltransferase-like
  misc_feature (1)..(218): NCBI GI NO: 34903412 NR Description: anthocyanin 5-aromatic acyltransferase-like protein~contains EST AU063315
  misc_feature (1)..(220): NCBI GI NO: 25406735 NR Description: protein F21B7.12 [imported] - Arabidopsis thaliana
  misc_feature (1)..(223): NCBI GI NO: 17980232 NR Description: malonyl CoA: anthocyanin 5-O-glucoside-6'''-O-malonyltransferase
  misc_feature (1)..(226): NCBI GI NO: 15219594 NR Description: hypothetical protein; protein id: At1g03940.1
  misc_feature (1)..(228): NCBI GI NO: 7415597 NR Description: acyltransferase homolog [Gentiana triflora]
  misc_feature (1)..(222): NCBI GI NO: 38679123 NR Description: putative acyltransferase [Salvia splendens]
  misc_feature (1)..(229): NCBI GI NO: 7415646 NR Description: anthocyanin acyltransferase [Perilla frutescens]
MARLAPPPSPPPQQQEEKTPMVMASFLLGREQIDRIKEGAAAKASSFVAASALAWVCLLKCGSVGVAGARRSHMLFSAECRSRLTPPLPAEYFGNCLRPCFVEAATADLLSGETEDGVAAAASAIGSAIQEMEQGVLEGAEGWLGRVLSVLPERPMSVGGSPRHGVYETTDFGWGRPARVEMVSVEKTPGTVALADSPEGDGGIELGVVLPPDAMDAFASCFAHAVGANV

SEQ ID NO: 30925 - DNA, 1641 bp, Zea mays subsp. mays
  misc_feature (1)..(1641): Ceres Seq. ID no. 12349347
aaaaacccttgagccgtcaccaatggcggacctcgaaaccctagccacgcccgcccctgcctctgcctccaccaagaagaagaagaaacactccaagaagcacaaggccgccagtgacgcccccaccaatgtcaccgtcgacgcatcccttatgggcggttcctcctacgtcgcggccgcccccgtggtcggctacttcccctccgggtacgacccactcactaccgctgccggggcggagtctgcccccggcacccagctcttccggcacgagaagcatcccacctgggtggacctcgtggtccggagccccggcggcggacacgacttcgttggccggagctatgccggtgaggccgccgtgccgcaggtctgcgactacgcgcttggcgtccttgacaaggcctccggcactctcaggatcgtgcccatcgctggcaaaaagattctgaggctagagccacatcttgaagtgcagcatccagcgcattcgcagcactctgaggtggcatcagaagcggcttcagctgcaggaaatgatgaattgaaggttcaggatctgacaatgatgtatggagccaagacggacagggacaaggacaataagtggagatcgttaaaggaacaaaggaatgatccttccgcttatgaggacattgatcttggaatatcagagaccaatgtcaacgccaatgataggcaggaacctgtacttgttcggaacattccaccttatgatcctaccgcagatacatcagaaaatgcatatcttttggacgagattattccaaagagtatgcgggagcattttttggaaattgtccgtcattttgaatcaggagaaatctcctcaaaaggctatgggagttttgtctcaaaacgtgtgcacaagttaaaggagcttcagggtgaagataaaaagaggtttgcttggatactttcctacatccaacatctcctatctctattggcgcgtaatggctccatgtccaatcgcaaatggaaaggcagaaatgaaaaccagataagccatggaccagcaaccccgcaggctgtatatcgcaggctgctgttcatgtttacagaaccggggtccagtgtcatgccaacagagaaaaaagagcttctgaccaactacatattggtcctaacactttttgccgatgacttcagatccaaccccagcgacatatgtgaggaccttaaaatgacccgccaaaatcttaaaccatactatgaccagttgggatgcaaatctgtgacagaaggtgcttttaagtctactttcatgacgctcccagcccctctcaagttcccaaaggaagttacgagaaagcggcgacggcagtagggcttttatccaaaggagacaaggagagaaaccaatggctatttatctcagaaatggcttgcattacttgaatggatggctggattggaaatactccctatcgaaggcaagaagtaaaggcatcgatgctaggggcccgattttaatagtgtactggaaatgaaaagttgtcctgtgtttcatctcgttttgtttttagttgctcatcgacattttcttgttaaggaaacatgtcatctatgtattgataaatgtttgtctatctgtatgagtgaatgtattgaaatgtt

SEQ ID NO: 30926 - protein, 449 aa, Zea mays subsp. mays
  peptide (1)..(449): Ceres Seq. ID no. 12349348
  misc_feature (12)..(447): NCBI GI NO: 15231416 NR Description: unknown protein; protein id: At3g13940
KTLEPSPMADLETLATPAPASASTKKKKKHSKKHKAASDAPTNVTVDASLMGGSSYVAAAPVVGYFPSGYDPLTTAAGAESAPGTQLFRHEKHPTWVDLVVRSPGGGHDFVGRSYAGEAAVPQVCDYALGVLDKASGTLRIVPIAGKKILRLEPHLEVQHPAHSQHSEVASEAASAAGNDELKVQDLTMMYGAKTDRDKDNKWRSLKEQRNDPSAYEDIDLGISETNVNANDRQEPVLVRNIPPYDPTADTSENAYLLDEIIPKSMREHFLEIVRHFESGEISSKGYGSFVSKRVHKLKELQGEDKKRFAWILSYIQHLLSLLARNGSMSNRKWKGRNENQISHGPATPQAVYRRLLFMFTEPGSSVMPTEKKELLTNYILVLTLFADDFRSNPSDICEDLKMTRQNLKPYYDQLGCKSVTEGAFKSTFMTLPAPLKFPKEVTRKRRRQ

SEQ ID NO: 30927 - protein, 442 aa, Zea mays subsp. mays
  peptide (1)..(442): Ceres Seq. ID no. 12349349
  misc_feature (5)..(440): NCBI GI NO: 15231416 NR Description: unknown protein; protein id: At3g13940
MADLETLATPAPASASTKKKKKHSKKHKAASDAPTNVTVDASLMGGSSYVAAAPVVGYFPSGYDPLTTAAGAESAPGTQLFRHEKHPTWVDLVVRSPGGGHDFVGRSYAGEAAVPQVCDYALGVLDKASGTLRIVPIAGKKILRLEPHLEVQHPAHSQHSEVASEAASAAGNDELKVQDLTMMYGAKTDRDKDNKWRSLKEQRNDPSAYEDIDLGISETNVNANDRQEPVLVRNIPPYDPTADTSENAYLLDEIIPKSMREHFLEIVRHFESGEISSKGYGSFVSKRVHKLKELQGEDKKRFAWILSYIQHLLSLLARNGSMSNRKWKGRNENQISHGPATPQAVYRRLLFMFTEPGSSVMPTEKKELLTNYILVLTLFADDFRSNPSDICEDLKMTRQNLKPYYDQLGCKSVTEGAFKSTFMTLPAPLKFPKEVTRKRRRQ

SEQ ID NO: 30928 - protein, 399 aa, Zea mays subsp. mays
  peptide (1)..(399): Ceres Seq. ID no. 12349350
  misc_feature (1)..(397): NCBI GI NO: 15231416 NR Description: unknown protein; protein id: At3g13940
MGGSSYVAAAPVVGYFPSGYDPLTTAAGAESAPGTQLFRHEKHPTWVDLVVRSPGGGHDFVGRSYAGEAAVPQVCDYALGVLDKASGTLRIVPIAGKKILRLEPHLEVQHPAHSQHSEVASEAASAAGNDELKVQDLTMMYGAKTDRDKDNKWRSLKEQRNDPSAYEDIDLGISETNVNANDRQEPVLVRNIPPYDPTADTSENAYLLDEIIPKSMREHFLEIVRHFESGEISSKGYGSFVSKRVHKLKELQGEDKKRFAWILSYIQHLLSLLARNGSMSNRKWKGRNENQISHGPATPQAVYRRLLFMFTEPGSSVMPTEKKELLTNYILVLTLFADDFRSNPSDICEDLKMTRQNLKPYYDQLGCKSVTEGAFKSTFMTLPAPLKFPKEVTRKRRRQ

SEQ ID NO: 30929 - DNA, 1315 bp, Zea mays subsp. mays
  misc_feature (1)..(1315): Ceres Seq. ID no. 15180636
catcctcgccgacttcctcggccgcgggatcttcaacgtggacggggacgcctggctgttccagcgcaagctcgcggcggccgagctggtgtcgccggcgctgcgcgccttcgcggtgcgcgtggtggcgtccgagctgcggggccggctcatccccctgctccgctctgctgcctgtgcctccggccgcgagggtggaggaggaggaggaggaggaggcagggtcctggacctgcaggacgtgttccgccgcttcgccttcgactgcatctgcaagatctccttcggcctcgaccctggctgcctgcagctgtcgatgccggtgtcgtcgttcgaggacgccttcgacacggcctccacgctctccgccaggcgcgccaccgcgcccatgcacgtcgtctggaagctgaagcgcctgctcaacttgggggacgagaggaggctccgggacgcggtgcacctcgtggacgcgctcgccgcggaggtgatccggcagcggcgcaagctcgggggcgccgccagctcgggcagcgacctcctgtcgcgcttcatggggtccatcgacgacgactagtacctccgcgacatcggggtcagcttcatgctggacggccgcgacaccgtggcctcggcgctgaccgccttcttcctgctcctctccgaccacccggaggtcgcggccgccatccgggacgaggccgcccgcgtcgccggcgacgacgacgacgacgacgggcggctcacggcctccgccttcggcaagctcaagggcatgcagtacgtgcacgcggcgctgtacgagagcatgcggctgttcccgccggtgcagttcgactccaagttcgcggcgggcgacgacacgctcccggacggcacggcggtggcgaagggcacgcgggtgacctaccacgcctacgccatggggcggatggagtccgtgtggggccccgactgcggcgagttccggcccgagcggtggctccgggacgggcgcttcgtgcccgagagcccgtacaggtaccccgtgttccaggccggcgcgcgcgtgtgcgtgggcaaggagctggccctgatggagatgaaggccgtgatcgtggccgtggtccggggcttcgacatcgaggcggtcggacggagctcccgccggcccaggttcgcgccggggctgaccgccacgttcgcgggcggcctgccggtgcgggtgcgccggcgagcacgtgcgagcgggcacaagcgcacaacccgccaatgtgatgaaacggaataaaaagaagaaaaaaaatactgctgctggtgtcatccaggattcgtcctc

SEQ ID NO: 30930 - protein, 417 aa, Zea mays subsp. mays
  peptide (1)..(417): Ceres Seq. ID no. 15180637
HPRRLPRPRDLQRGRGRLAVPAQARGGRAGVAGAARLRGARGGVRAAGPAHPPAPLCCLCLRPRGWRRRRRRRQGPGPAGRVPPLRLRLHLQDLLRPRPWLPAAVDAGVVVRGRLRHGLHALRQARHRAHARRLEAEAPAQLGGREEAPGRGAPRGRARRGGDPAAAQARGRRQLGQRPPVALHGVHRRRLVPPRHRGQLHAGRPRHRGLGADRLLPAPLRPPGGRGRHPGRGRPRRRRRRRRRRAAHGLRLRQAQGHAVRARGAVREHAAVPAGAVRLQVRGGRRHAPGRHGGGEGHAGDLPRLRHGADGVRVGPRLRRVPARAVAPGRALRAREPVQVPRVPGRRARVRGQGAGPDGDEGRDRGRGPGLRHRGGRTELPPAQVRAGADRHVRGRPAGAGAPASTCERAQAHNPPM

SEQ ID NO: 30931 - protein, 221 aa, Zea mays subsp. mays
  peptide (1)..(221): Ceres Seq. ID no. 15180638
  misc_feature (1)..(210): NCBI GI NO: 34908446 NR Description: putative cytochrome P450
  misc_feature (1)..(205): NCBI GI NO: 15226228 NR Description: cytochrome P450, putative [Arabidopsis thaliana]
  misc_feature (1)..(205): NCBI GI NO: 15228396 NR Description: cytochrome P450 family [Arabidopsis thaliana]
  misc_feature (1)..(204): NCBI GI NO: 34902476 NR Description: Putative cytochrome P450
  misc_feature (1)..(204): NCBI GI NO: 15242759 NR Description: cytochrome P450, putative [Arabidopsis thaliana]
  misc_feature (1)..(204): NCBI GI NO: 26452145 NR Description: putative cytochrome P450 [Arabidopsis thaliana]
  misc_feature (1)..(204): NCBI GI NO: 21536522 NR Description: cytochrome P450-like protein
  misc_feature (1)..(204): NCBI GI NO: 34909022 NR Description: cytochrome P450-like protein
  misc_feature (1)..(205): NCBI GI NO: 15228981 NR Description: cytochrome P450, putative [Arabidopsis thaliana]
  misc_feature (1)..(204): NCBI GI NO: 34909030 NR Description: cytochrome P450-like protein
MLDGRDTVASALTAFFLLLSDHPEVAAAIRDEAARVAGDDDDDDGRLTASAFGKLKGMQYVHAALYESMRLFPPVQFDSKFAAGDDTLPDGTAVAKGTRVTYHAYAMGRMESVWGPDCGEFRPERWLRDGRFVPESPYRYPVFQAGARVCVGKELALMEMKAVIVAVVRGFDIEAVGRSSRRPRFAPGLTATFAGGLPVRVRRRARASGHKRTTRQCDETE

SEQ ID NO: 30932 - DNA, 1627 bp, Zea mays subsp. mays
  misc_feature (1)..(1627): Ceres Seq. ID no. 12386885
aatcctccgaccgagacgaggcagaaaccttcctcgatctccccttccccttccctcgctgtaattccatctccgtctccatctcgttcccaccacgccgctccctgtcgcggtgtcgccattgccccggcttccaagcaaaatcccgcttgcctcgccccaagcattcctgctttcacccggccgccactcttccccagtccccgccactcaaggaaggcggaggattttatctagtcttgcagcgcggccgtctccgtcccgccttctgcgcctcctgtggcgtttggagcatcttccaattttaagctgacactacttgaacttaatgcggctctacgcacctgcgctctgtctgctgcgatcaagcacacatccccaccctaatcagttccgtgcaggattcacgcagagcatggcctcctggaagtgctcgcactcgccgtcaagcccgtaccttgcgaagtcgggtttagtcgattcttctcttaacaggaatgtaaagtcttctcagccacaaagtataaaatactttgtcagcttaatgggccagcagttccgttgcggattgtcaaccagggagggtagcctaagtgtaaagcttgacattccttcacacgaaaaatcaaggataggctggaactggaaaaacatgcatcaaaagataggaggtgtagctggtggactctgctttggtttctcggttactggagtagcaagtgccgaggttcctatcattagagtcaaagacaatgccgagacttcgtcatcatctaccagttcaactcatggaaaggaagtgtacacagattattctgtcacaggtattcctggagatggaaggtgtttattccgctccgtggtgcatggtgcatgcattagatcagggagaccaatacctaatgaagatcttcagagaaaactagctgatgaattgagagcaacggtcgcagatgaatttgtcaagaggcggaaagagaccgaatggttcgttgagggggattttgatacatatgtatcccatattagggagccacatgtgtggggaggcgagccagaattgttcatggcgtcccatgttcttcagatgccaataacggtttacatgcgcgacgaggatgctggcggtctgatagcaatcgcagagtatggccagcagtatggtaaagaagacccaatccaagtcctgtatcatggttttggccattacgacgctctacagatcccagcaaaggttggatcgaagaggaaactgtagacgctgcgcgccgcgagcttgagagaaaattcggaaacaataagctgcatgcatgcatgcattgagatgtgtacctgtacaaaatgtcaatccaagcttcggatgctgaatctgtacaccatgccctgaaaaccgcacttgtgtagtttgtgtgactggtacagtagaagatagaaggggcgccggggacccatttaccatactctgatgactgcaagtacgttcatttagagtgaagtaagctacacagctcaccagttggtccagacgtccagtgagcgtacatgttttgaatgaggggcatgtggagagcacatagacagttgagtccggcactctcctggatcggaattgaattttatttgcagc

SEQ ID NO: 30933 - protein, 309 aa, Zea mays subsp. mays
  peptide (1)..(309): Ceres Seq. ID no. 12386886
  misc_feature (168)..(294): Pfam Name: Pfam Description:  OTU-like cysteine protease
  misc_feature (100)..(309): NCBI GI NO: 18410816 NR Description: auxin-regulated protein; protein id: At3g57810
  misc_feature (100)..(309): NCBI GI NO: 11280708 NR Description: hypothetical protein T10K17
  misc_feature (162)..(281): NCBI GI NO: 34902010 NR Description: unknown protein
  misc_feature (143)..(278): NCBI GI NO: 30687357 NR Description: auxin-regulated protein -related
MRLYAPALCLLRSSTHPHPNQFRAGFTQSMASWKCSHSPSSPYLAKSGLVDSSLNRNVKSSQPQSIKYFVSLMGQQFRCGLSTREGSLSVKLDIPSHEKSRIGWNWKNMHQKIGGVAGGLCFGFSVTGVASAEVPIIRVKDNAETSSSSTSSTHGKEVYTDYSVTGIPGDGRCLFRSVVHGACIRSGRPIPNEDLQRKLADELRATVADEFVKRRKETEWFVEGDFDTYVSHIREPHVWGGEPELFMASHVLQMPITVYMRDEDAGGLIAIAEYGQQYGKEDPIQVLYHGFGHYDALQIPAKVGSKRKL

SEQ ID NO: 30934 - protein, 280 aa, Zea mays subsp. mays
  peptide (1)..(280): Ceres Seq. ID no. 12386887
  misc_feature (139)..(265): Pfam Name: Pfam Description:  OTU-like cysteine protease
  misc_feature (71)..(280): NCBI GI NO: 18410816 NR Description: auxin-regulated protein; protein id: At3g57810
  misc_feature (71)..(280): NCBI GI NO: 11280708 NR Description: hypothetical protein T10K17
  misc_feature (133)..(252): NCBI GI NO: 34902010 NR Description: unknown protein
  misc_feature (114)..(249): NCBI GI NO: 30687357 NR Description: auxin-regulated protein -related
MASWKCSHSPSSPYLAKSGLVDSSLNRNVKSSQPQSIKYFVSLMGQQFRCGLSTREGSLSVKLDIPSHEKSRIGWNWKNMHQKIGGVAGGLCFGFSVTGVASAEVPIIRVKDNAETSSSSTSSTHGKEVYTDYSVTGIPGDGRCLFRSVVHGACIRSGRPIPNEDLQRKLADELRATVADEFVKRRKETEWFVEGDFDTYVSHIREPHVWGGEPELFMASHVLQMPITVYMRDEDAGGLIAIAEYGQQYGKEDPIQVLYHGFGHYDALQIPAKVGSKRKL

SEQ ID NO: 30935 - protein, 237 aa, Zea mays subsp. mays
  peptide (1)..(237): Ceres Seq. ID no. 12386888
  misc_feature (96)..(222): Pfam Name: Pfam Description:  OTU-like cysteine protease
  misc_feature (28)..(237): NCBI GI NO: 18410816 NR Description: auxin-regulated protein; protein id: At3g57810
  misc_feature (28)..(237): NCBI GI NO: 11280708 NR Description: hypothetical protein T10K17
  misc_feature (90)..(209): NCBI GI NO: 34902010 NR Description: unknown protein
  misc_feature (71)..(206): NCBI GI NO: 30687357 NR Description: auxin-regulated protein -related
MGQQFRCGLSTREGSLSVKLDIPSHEKSRIGWNWKNMHQKIGGVAGGLCFGFSVTGVASAEVPIIRVKDNAETSSSSTSSTHGKEVYTDYSVTGIPGDGRCLFRSVVHGACIRSGRPIPNEDLQRKLADELRATVADEFVKRRKETEWFVEGDFDTYVSHIREPHVWGGEPELFMASHVLQMPITVYMRDEDAGGLIAIAEYGQQYGKEDPIQVLYHGFGHYDALQIPAKVGSKRKL

SEQ ID NO: 30936 - DNA, 768 bp, Zea mays subsp. mays
  misc_feature (1)..(768): Ceres Seq. ID no. 12412369
agtaccaccaacaaacttctttctcgccttgcatcggccgccggccctccatccaccgcaccagctagcaacgacgacacgctagccaggtagcgtagccgaccagcctccgcgcgcgcgggcactcagttcgccatggcgcgcctgctccgcgccgccgccggcctcgcgctcctcctggccgtccttgccccggcggcgtcggcgggcggcgacctggcccagctgggcgccgccgtcgtgacgcggcgcggcggcgagcggacgacgtgccgcggaggcacggtgggcgagtgcatggagtacctggacgtggacgcggagggcgaggccgacgtggcgggcatggccaccggcggcggcaagcgccgggtgctgcagggcggctccggctacatcggctacgacgcgctgcgcagggacaacgtgccgtgctcgcagcgcggcgcgtcctactacaactgccagcccggcgccgaggccaacccctactcgcgcggctgcagcgccatcacccagtgcaggggctgatgcctgcctgatgatttccgttccgtttcgtccccagctattagtcgggtcttcaatttaaagaagaagacatgcatggagcgatgtcgtcgtctttgctgtgcgcgctatagcctttctcgtccgcctgaggcacgcatgactcgtccgtcgattattgtgctgcagtggacatgtgtatgtgctcctgtttctagcatatccccttgctttcaggaagaaagtgaaagtaattat

SEQ ID NO: 30937 - protein, 131 aa, Zea mays subsp. mays
  peptide (1)..(131): Ceres Seq. ID no. 12412370
  misc_feature (63)..(131): Pfam Name: RALF Pfam Description: Rapid ALkalinization Factor
  misc_feature (7)..(131): NCBI GI NO: 34902918 NR Description: unnamed protein product
  misc_feature (1)..(131): NCBI GI NO: 34915066 NR Description: P0025H06.17
  misc_feature (1)..(131): NCBI GI NO: 34915062 NR Description: P0025H06.15
  misc_feature (21)..(131): NCBI GI NO: 34907152 NR Description: P0506E04.27
  misc_feature (60)..(131): NCBI GI NO: 37532832 NR Description: hypothetical protein
  misc_feature (11)..(130): NCBI GI NO: 16566316 NR Description: RALF precursor [Nicotiana tabacum]
  misc_feature (1)..(131): NCBI GI NO: 28628205 NR Description: rapid alkalinization factor 2 precursor
  misc_feature (6)..(130): NCBI GI NO: 18397246 NR Description: expressed protein; protein id: At3g05490
  misc_feature (8)..(130): NCBI GI NO: 28628203 NR Description: rapid alkalinization factor 1 precursor
  misc_feature (31)..(130): NCBI GI NO: 18414528 NR Description: Expressed protein; protein id: At4g15800
MARLLRAAAGLALLLAVLAPAASAGGDLAQLGAAVVTRRGGERTTCRGGTVGECMEYLDVDAEGEADVAGMATGGGKRRVLQGGSGYIGYDALRRDNVPCSQRGASYYNCQPGAEANPYSRGCSAITQCRG

SEQ ID NO: 30938 - protein, 77 aa, Zea mays subsp. mays
  peptide (1)..(77): Ceres Seq. ID no. 12412371
  misc_feature (9)..(77): Pfam Name: RALF Pfam Description: Rapid ALkalinization Factor
  misc_feature (1)..(77): NCBI GI NO: 34902918 NR Description: unnamed protein product
  misc_feature (1)..(77): NCBI GI NO: 34915066 NR Description: P0025H06.17
  misc_feature (1)..(77): NCBI GI NO: 34915062 NR Description: P0025H06.15
  misc_feature (1)..(77): NCBI GI NO: 34907152 NR Description: P0506E04.27
  misc_feature (6)..(77): NCBI GI NO: 37532832 NR Description: hypothetical protein
  misc_feature (1)..(76): NCBI GI NO: 16566316 NR Description: RALF precursor [Nicotiana tabacum]
  misc_feature (1)..(77): NCBI GI NO: 28628205 NR Description: rapid alkalinization factor 2 precursor
  misc_feature (1)..(76): NCBI GI NO: 18397246 NR Description: expressed protein; protein id: At3g05490
  misc_feature (1)..(76): NCBI GI NO: 28628203 NR Description: rapid alkalinization factor 1 precursor
  misc_feature (1)..(76): NCBI GI NO: 18414528 NR Description: Expressed protein; protein id: At4g15800
MEYLDVDAEGEADVAGMATGGGKRRVLQGGSGYIGYDALRRDNVPCSQRGASYYNCQPGAEANPYSRGCSAITQCRG

SEQ ID NO: 30939 - DNA, 1769 bp, Zea mays subsp. mays
  misc_feature (1)..(1769): Ceres Seq. ID no. 12484003
aggataactcccataagaaaaatcgccaaatacgccattcatcttctccgcccgggtttcagaacgtgcggcagtttagccaggatggtggcgatcgagaaccagaaccagagccaggccgcggtggcggtggcggcggaggcggtgccggcgccggcgtcgcggatccccagggaggcgcggcgcctgctgcacgagctggcggcggcgtgggcggacgtggccgactgccgcgcgctggaggtcgtgccgctcaagggggccatgaccaacgaggtctaccaggcgcgctggctcactgcaggccctgccggccagaaggaggagcccagggcggagagggaggtgaggaaggtgctcgtgcggatttacggcgacggcgtcgacctcttcttcgaccgcgaggacgaggtgcgcaccttcgagtgcatgtcacgccatggccagggtccccgcctcctcggccgcttcccgaacggccgcgtcgaggagttcatccacgcaaggacattgtcagctgccgaccttcgcgatcctgaaatttcagctctggtggcttccaagctgagggagttccacaaccttgacatgcctggtcccaaatctgtgctcatttgggacagacttaggaactggctcagaactgccaagagcttgtgtccacctgaagaagccaaggaatttcggttggacagtctggagaaccagattactgcattggagaacgagtgttcaggtgattaccagtggattggtttctgtcacaatgatcttcagtatggcaatatcatgattgatgaagagaccaacgtgctgaccatcattgattatgagtatgcaagcttcaacccagttgcatatgacattgctaaccatttctgtgagatggcagcagactatcattcatcaaagcctcatatactggactacagcagatatccagatgttgatgagcagaagcgttttgttaagacctacctgaacatttctggtgaggaacctgatgcggaagttgtggagaacctgctccaaagcattgagaagcacacgctcgccagccatctagtatggggcctctggggaataatttcggaccatgttaacgacattgacttcgactacaaggagtatgcgaggcagagattcgagcagtactggcacaagtctgcgatcttaacatcttgaacatgtgtataaacacccgtacgtggtctcaggaactccctgagggcctgtggctgcacacacgaaattgtgcagtgccactgacacatagataagctgtgaaagaagaaatactgacgacgacgacgaataatcccgttttgggctcgggaggttatttctccgcaactcgatgagcttcaggcttcagcttcaggaaggaaggaaggagctatggggatttggctgcccgcttatgctgtaccaatgcaattaaaagataaagatccggtccggtgttgcgtgtgctatgtttagttttggctagcaccgccgagagccgtggtcctgttgtggtgtttctagtttctgtatgcttgatgttgttagtgtgctggataatttggttttgtgcttggggagtccttagctttgggacaacgcatacattgtatactgggtagatgtataaacataaaacagctatgggaatttggttctctacctttatttctctctcgaacaggctgtatttcgttaagaaggttaaatttgggtttgtatttgttattatcagcttgttatacatgtgtcagatcaaatcc

SEQ ID NO: 30940 - protein, 394 aa, Zea mays subsp. mays
  peptide (1)..(394): Ceres Seq. ID no. 12484004
  misc_feature (115)..(376): Pfam Name: Pfam Description:  Choline/ethanolamine kinase
  misc_feature (29)..(394): NCBI GI NO: 33149685 NR Description: choline kinase
  misc_feature (29)..(376): NCBI GI NO: 34910612 NR Description: putative choline kinase
  misc_feature (53)..(392): NCBI GI NO: 7488654 NR Description: choline kinase (EC 2
  misc_feature (55)..(386): NCBI GI NO: 22330627 NR Description: putative choline kinase; protein id: At1g74320
  misc_feature (55)..(386): NCBI GI NO: 25348157 NR Description: protein choline kinase F1O17.1
  misc_feature (59)..(394): NCBI GI NO: 7488653 NR Description: choline kinase (EC 2.7.1.32) CK2 - soybean
  misc_feature (42)..(392): NCBI GI NO: 15217543 NR Description: choline kinase, putative; protein id: At1g71697.1
  misc_feature (59)..(392): NCBI GI NO: 12311795 NR Description: choline kinase [Pisum sativum]
  misc_feature (52)..(394): NCBI GI NO: 15234032 NR Description: choline kinase GmCK2p -like protein
  misc_feature (52)..(394): NCBI GI NO: 21537276 NR Description: choline kinase GmCK2p-like protein
RITPIRKIAKYAIHLLRPGFRTCGSLARMVAIENQNQSQAAVAVAAEAVPAPASRIPREARRLLHELAAAWADVADCRALEVVPLKGAMTNEVYQARWLTAGPAGQKEEPRAEREVRKVLVRIYGDGVDLFFDREDEVRTFECMSRHGQGPRLLGRFPNGRVEEFIHARTLSAADLRDPEISALVASKLREFHNLDMPGPKSVLIWDRLRNWLRTAKSLCPPEEAKEFRLDSLENQITALENECSGDYQWIGFCHNDLQYGNIMIDEETNVLTIIDYEYASFNPVAYDIANHFCEMAADYHSSKPHILDYSRYPDVDEQKRFVKTYLNISGEEPDAEVVENLLQSIEKHTLASHLVWGLWGIISDHVNDIDFDYKEYARQRFEQYWHKSAILTS

SEQ ID NO: 30941 - protein, 366 aa, Zea mays subsp. mays
  peptide (1)..(366): Ceres Seq. ID no. 12484005
  misc_feature (87)..(348): Pfam Name: Pfam Description:  Choline/ethanolamine kinase
  misc_feature (1)..(366): NCBI GI NO: 33149685 NR Description: choline kinase
  misc_feature (1)..(348): NCBI GI NO: 34910612 NR Description: putative choline kinase
  misc_feature (25)..(364): NCBI GI NO: 7488654 NR Description: choline kinase (EC 2
  misc_feature (27)..(358): NCBI GI NO: 22330627 NR Description: putative choline kinase; protein id: At1g74320
  misc_feature (27)..(358): NCBI GI NO: 25348157 NR Description: protein choline kinase F1O17.1
  misc_feature (31)..(366): NCBI GI NO: 7488653 NR Description: choline kinase (EC 2.7.1.32) CK2 - soybean
  misc_feature (14)..(364): NCBI GI NO: 15217543 NR Description: choline kinase, putative; protein id: At1g71697.1
  misc_feature (31)..(364): NCBI GI NO: 12311795 NR Description: choline kinase [Pisum sativum]
  misc_feature (24)..(366): NCBI GI NO: 15234032 NR Description: choline kinase GmCK2p -like protein
  misc_feature (24)..(366): NCBI GI NO: 21537276 NR Description: choline kinase GmCK2p-like protein
MVAIENQNQSQAAVAVAAEAVPAPASRIPREARRLLHELAAAWADVADCRALEVVPLKGAMTNEVYQARWLTAGPAGQKEEPRAEREVRKVLVRIYGDGVDLFFDREDEVRTFECMSRHGQGPRLLGRFPNGRVEEFIHARTLSAADLRDPEISALVASKLREFHNLDMPGPKSVLIWDRLRNWLRTAKSLCPPEEAKEFRLDSLENQITALENECSGDYQWIGFCHNDLQYGNIMIDEETNVLTIIDYEYASFNPVAYDIANHFCEMAADYHSSKPHILDYSRYPDVDEQKRFVKTYLNISGEEPDAEVVENLLQSIEKHTLASHLVWGLWGIISDHVNDIDFDYKEYARQRFEQYWHKSAILTS

SEQ ID NO: 30942 - protein, 306 aa, Zea mays subsp. mays
  peptide (1)..(306): Ceres Seq. ID no. 12484006
  misc_feature (27)..(288): Pfam Name: Pfam Description:  Choline/ethanolamine kinase
  misc_feature (1)..(306): NCBI GI NO: 33149685 NR Description: choline kinase
  misc_feature (1)..(288): NCBI GI NO: 34910612 NR Description: putative choline kinase
  misc_feature (1)..(304): NCBI GI NO: 7488654 NR Description: choline kinase (EC 2
  misc_feature (1)..(298): NCBI GI NO: 22330627 NR Description: putative choline kinase; protein id: At1g74320
  misc_feature (1)..(298): NCBI GI NO: 25348157 NR Description: protein choline kinase F1O17.1
  misc_feature (1)..(306): NCBI GI NO: 7488653 NR Description: choline kinase (EC 2.7.1.32) CK2 - soybean
  misc_feature (1)..(304): NCBI GI NO: 15217543 NR Description: choline kinase, putative; protein id: At1g71697.1
  misc_feature (1)..(304): NCBI GI NO: 12311795 NR Description: choline kinase [Pisum sativum]
  misc_feature (1)..(306): NCBI GI NO: 15234032 NR Description: choline kinase GmCK2p -like protein
  misc_feature (1)..(306): NCBI GI NO: 21537276 NR Description: choline kinase GmCK2p-like protein
MTNEVYQARWLTAGPAGQKEEPRAEREVRKVLVRIYGDGVDLFFDREDEVRTFECMSRHGQGPRLLGRFPNGRVEEFIHARTLSAADLRDPEISALVASKLREFHNLDMPGPKSVLIWDRLRNWLRTAKSLCPPEEAKEFRLDSLENQITALENECSGDYQWIGFCHNDLQYGNIMIDEETNVLTIIDYEYASFNPVAYDIANHFCEMAADYHSSKPHILDYSRYPDVDEQKRFVKTYLNISGEEPDAEVVENLLQSIEKHTLASHLVWGLWGIISDHVNDIDFDYKEYARQRFEQYWHKSAILTS

SEQ ID NO: 30943 - DNA, 1349 bp, Zea mays subsp. mays
  misc_feature (1)..(1349): Ceres Seq. ID no. 12356860
accagcgaaaccccagaatgttcgtcctccgcaaaaccctcctccatgcgccgccggccgccgccgcggcggtcccctctcggatctcttccctcctccgcctcatcccctctgcatctttttctgaggtaagcggaggtggggaagaatggggcgcctcctcacccggaggcggcggcggcaggggtgggggtgggaacgaatggagctccacctggtctaccggcctcaccaaggaccatttcgacggatcctcgccctccgtcggccgttctgtcccttccgagtcagcgcccgtctctcgtgagcgggcggccattcgcgctatggatgagtgggacgagagggtccgggaactggagcgtaacaatgtcgaggcgaaggcgtatgtggattcatgggacgaccggatgcgggagacctgtgcgctgctgaagcaggtgcgggagccgggcgctccggggctcgtatctcaaggactcggagaagcaggagatgtaccggctgcacaaggaggaccccgcgacttacaccgtggagcggctcgccaaggacttccgtgtcatgcgacagcgcgtgcacgccatcctctggctcaaggagatggaagaggaagaggagaggaagaggggccagccgctcgacgactccatcgaaatcctgctcgacagctgcccagagttcttcaattctcatgacagggaatttcatgtagcatctcttccatataaacctgacttcaaagtaatgcctgaggactgggatggcacaacacgagatcctgatgaggttctatatgaaatttcaattaaggaagataaaatgttgtatgaggaattcgttcaacgcttggaattcaacaagaagaaggtggcaggagaagttaagtgccacaagtacagccggcgcaagccagacaatggatggagctacatggtcgaaaagcttggttctcagggaaagcgtggtgtaggagggggctggaagttcatcagcttgcctgatggatcaagccgtgcactaaatgatatggagaagatgtatgttaagcgggagactccaaaacggcggcggaggataattgcaccatacaagtgacatggacaacttcagtttgctgaaatgcaaattttctcaactgtcttttgacattgtccagcgaggctgaagcaagaaactgtgaagtagtttggaaccgccagaacagctcctgtttttttcacagcacagtagatggtttgatgtgttttgtaacaaggattatttccccacattttggcagccgaataattatcttttaaacttttcggtgttcctcccgtctctatgcactgccgagcaacaattcc

SEQ ID NO: 30944 - protein, 231 aa, Zea mays subsp. mays
  peptide (1)..(231): Ceres Seq. ID no. 12356861
  misc_feature (6)..(154): NCBI GI NO: 34908962 NR Description: P0003D09.18
  misc_feature (29)..(154): NCBI GI NO: 8809640 NR Description: gb|AAC32909
  misc_feature (29)..(154): NCBI GI NO: 15241764 NR Description: putative protein; protein id: At5g62270.1
QRNPRMFVLRKTLLHAPPAAAAAVPSRISSLLRLIPSASFSEVSGGGEEWGASSPGGGGGRGGGGNEWSSTWSTGLTKDHFDGSSPSVGRSVPSESAPVSRERAAIRAMDEWDERVRELERNNVEAKAYVDSWDDRMRETCALLKQVREPGAPGLVSQGLGEAGDVPAAQGGPRDLHRGAARQGLPCHATARARHPLAQGDGRGRGEEEGPAARRLHRNPARQLPRVLQFS

SEQ ID NO: 30945 - protein, 226 aa, Zea mays subsp. mays
  peptide (1)..(226): Ceres Seq. ID no. 12356862
  misc_feature (1)..(149): NCBI GI NO: 34908962 NR Description: P0003D09.18
  misc_feature (24)..(149): NCBI GI NO: 8809640 NR Description: gb|AAC32909
  misc_feature (24)..(149): NCBI GI NO: 15241764 NR Description: putative protein; protein id: At5g62270.1
MFVLRKTLLHAPPAAAAAVPSRISSLLRLIPSASFSEVSGGGEEWGASSPGGGGGRGGGGNEWSSTWSTGLTKDHFDGSSPSVGRSVPSESAPVSRERAAIRAMDEWDERVRELERNNVEAKAYVDSWDDRMRETCALLKQVREPGAPGLVSQGLGEAGDVPAAQGGPRDLHRGAARQGLPCHATARARHPLAQGDGRGRGEEEGPAARRLHRNPARQLPRVLQFS

SEQ ID NO: 30946 - protein, 200 aa, Zea mays subsp. mays
  peptide (1)..(200): Ceres Seq. ID no. 12356863
  misc_feature (1)..(200): NCBI GI NO: 34908962 NR Description: P0003D09.18
  misc_feature (1)..(197): NCBI GI NO: 8809640 NR Description: gb|AAC32909
  misc_feature (1)..(184): NCBI GI NO: 15241764 NR Description: putative protein; protein id: At5g62270.1
  misc_feature (18)..(194): NCBI GI NO: 18071389 NR Description: putative mucin [Oryza sativa]
  misc_feature (1)..(178): NCBI GI NO: 15227059 NR Description: predicted by genscan; protein id: At2g02880.1
MYRLHKEDPATYTVERLAKDFRVMRQRVHAILWLKEMEEEEERKRGQPLDDSIEILLDSCPEFFNSHDREFHVASLPYKPDFKVMPEDWDGTTRDPDEVLYEISIKEDKMLYEEFVQRLEFNKKKVAGEVKCHKYSRRKPDNGWSYMVEKLGSQGKRGVGGGWKFISLPDGSSRALNDMEKMYVKRETPKRRRRIIAPYK

SEQ ID NO: 30947 - DNA, 1466 bp, Zea mays subsp. mays
  misc_feature (1)..(1466): Ceres Seq. ID no. 12423837
  misc_feature (1041)..(1041): n is a, c, t, g, unknown, or other
  misc_feature (1098)..(1098): n is a, c, t, g, unknown, or other
  misc_feature (1063)..(1063): n is a, c, t, g, unknown, or other
  misc_feature (1150)..(1150): n is a, c, t, g, unknown, or other
  misc_feature (1228)..(1228): n is a, c, t, g, unknown, or other
  misc_feature (983)..(983): n is a, c, t, g, unknown, or other
  misc_feature (1018)..(1018): n is a, c, t, g, unknown, or other
  misc_feature (1068)..(1068): n is a, c, t, g, unknown, or other
  misc_feature (979)..(979): n is a, c, t, g, unknown, or other
  misc_feature (1149)..(1149): n is a, c, t, g, unknown, or other
  misc_feature (1229)..(1229): n is a, c, t, g, unknown, or other
  misc_feature (418)..(418): n is a, c, t, g, unknown, or other
  misc_feature (1075)..(1075): n is a, c, t, g, unknown, or other
  misc_feature (1027)..(1027): n is a, c, t, g, unknown, or other
  misc_feature (1227)..(1227): n is a, c, t, g, unknown, or other
  misc_feature (1062)..(1062): n is a, c, t, g, unknown, or other
  misc_feature (1179)..(1179): n is a, c, t, g, unknown, or other
ataacagatacaggcaccccctcctctcctctcctctcctctctctccctctcatcaccaaagaactgcaactaggaacggttcgccacaaaaaaagaacgtacggctatgaagacgaggcgcggtgcctgccacgcggcggcggcggccacggcgccgggcgaggggccggaggcgcaacgccggaagcggcgcaggacggcggcggccgaggggtcgccagcggcggccggcactccaggtgtccgcccggtgggcagagacatgttcgagagagctgcctgacgatctcgtcgtctccatactacgggacgtcgccgcgtccgccagttcgccggccgatctcgccggcgccatgctcacgtgcaagaggttcagggagctcgggcagagcaaggtggtgctggcgcgggcgtcnccgcagtgcctggcggtgcgcgccaaggcctggtcggaggaggcgcaccggttcctgcagcgctgcgccgacgcgggcagcctggaagcgtgctacctccttggcatgattcggttctactgcctggggatccgcggctcgggcgcggcgctgatggcggcggcggcggtgggcgggcaccgcgaggcgctctactcgctggccgtggtccagttcaacggcagcggcgggggcaaggacgaccgcgacctccgcgccggagccgcgctgtgcgcgcgcgcggcgtcgctgggccacgtgggcgcgctccgcgagctggggcactgcctccaggacggctacggcgtgcggcggtccgtgctggacgggcggcgcctcctgatccaggcgaacgcgcgcgagctcgccgccgccgccgcctcgccgccgcaagccgcagccgctcggcaaggcggcgccccacccgactcggcgtcactcgtgcctcctgagcgacttcgggtgccgcgccgcggccggggagccgcacgcggccaaccggttcctggcggactggttcgngtcncggccgctcggtacggcggcggcggcggcagcggncggcgggancggctcctcgcccnaggaggacggcgccggcgcgnngcggntgtgctngcaggcgctgtgcgggcggcccnagacgcggcggcacgagttcaggcggtgctccgtgtggcggcctggtgaannactgctaccgcgcgtgccaggcgctgcantggaagatggcgcacaaggcggagtgcacgcccatggaccggtggctnnnacgtggtcggcgtcggcggcggcgcggcgccgcagccccacgctaatgccgacggcgccgcggcggccccggcgccgtgacgcgctggcggtcgtccgtttcttgtcacttgtcagttagcgtccgcaacgtcagtttttactccttttttttttctgtccgtttctcgccctccatttgtcctctgtactacggcacctgtggttatagttggcaattggcatggcatgctgaggt

SEQ ID NO: 30948 - protein, 263 aa, Zea mays subsp. mays
  peptide (1)..(263): Ceres Seq. ID no. 12423838
  misc_feature (1)..(166): NCBI GI NO: 18408746 NR Description: F-box protein family; protein id: At1g67340
  misc_feature (1)..(174): NCBI GI NO: 19386803 NR Description: OJ1485_B09.11
  misc_feature (1)..(192): NCBI GI NO: 15240674 NR Description: putative protein; protein id: At5g50450
  misc_feature (21)..(21): Xaa is any aa, unknown or other
  misc_feature (208)..(208): Xaa is any aa, unknown or other
  misc_feature (210)..(210): Xaa is any aa, unknown or other
  misc_feature (221)..(221): Xaa is any aa, unknown or other
  misc_feature (224)..(224): Xaa is any aa, unknown or other
  misc_feature (229)..(229): Xaa is any aa, unknown or other
  misc_feature (236)..(236): Xaa is any aa, unknown or other
  misc_feature (238)..(238): Xaa is any aa, unknown or other
  misc_feature (240)..(240): Xaa is any aa, unknown or other
  misc_feature (248)..(248): Xaa is any aa, unknown or other
MLTCKRFRELGQSKVVLARAXPQCLAVRAKAWSEEAHRFLQRCADAGSLEACYLLGMIRFYCLGIRGSGAALMAAAAVGGHREALYSLAVVQFNGSGGGKDDRDLRAGAALCARAASLGHVGALRELGHCLQDGYGVRRSVLDGRRLLIQANARELAAAAASPPQAAAARQGGAPPDSASLVPPERLRVPRRGRGAARGQPVPGGLVXVXAARYGGGGGSXRRXRLLAXGGRRRRXAXVXAGAVRAAXDAAARVQAVLRVAAW

SEQ ID NO: 30949 - protein, 207 aa, Zea mays subsp. mays
  peptide (1)..(207): Ceres Seq. ID no. 12423839
  misc_feature (1)..(110): NCBI GI NO: 18408746 NR Description: F-box protein family; protein id: At1g67340
  misc_feature (1)..(118): NCBI GI NO: 19386803 NR Description: OJ1485_B09.11
  misc_feature (1)..(136): NCBI GI NO: 15240674 NR Description: putative protein; protein id: At5g50450
  misc_feature (152)..(152): Xaa is any aa, unknown or other
  misc_feature (154)..(154): Xaa is any aa, unknown or other
  misc_feature (165)..(165): Xaa is any aa, unknown or other
  misc_feature (168)..(168): Xaa is any aa, unknown or other
  misc_feature (173)..(173): Xaa is any aa, unknown or other
  misc_feature (180)..(180): Xaa is any aa, unknown or other
  misc_feature (182)..(182): Xaa is any aa, unknown or other
  misc_feature (184)..(184): Xaa is any aa, unknown or other
  misc_feature (192)..(192): Xaa is any aa, unknown or other
MIRFYCLGIRGSGAALMAAAAVGGHREALYSLAVVQFNGSGGGKDDRDLRAGAALCARAASLGHVGALRELGHCLQDGYGVRRSVLDGRRLLIQANARELAAAAASPPQAAAARQGGAPPDSASLVPPERLRVPRRGRGAARGQPVPGGLVXVXAARYGGGGGSXRRXRLLAXGGRRRRXAXVXAGAVRAAXDAAARVQAVLRVAAW

SEQ ID NO: 30950 - protein, 191 aa, Zea mays subsp. mays
  peptide (1)..(191): Ceres Seq. ID no. 12423840
  misc_feature (1)..(94): NCBI GI NO: 18408746 NR Description: F-box protein family; protein id: At1g67340
  misc_feature (1)..(102): NCBI GI NO: 19386803 NR Description: OJ1485_B09.11
  misc_feature (1)..(120): NCBI GI NO: 15240674 NR Description: putative protein; protein id: At5g50450
  misc_feature (136)..(136): Xaa is any aa, unknown or other
  misc_feature (138)..(138): Xaa is any aa, unknown or other
  misc_feature (149)..(149): Xaa is any aa, unknown or other
  misc_feature (152)..(152): Xaa is any aa, unknown or other
  misc_feature (157)..(157): Xaa is any aa, unknown or other
  misc_feature (164)..(164): Xaa is any aa, unknown or other
  misc_feature (166)..(166): Xaa is any aa, unknown or other
  misc_feature (168)..(168): Xaa is any aa, unknown or other
  misc_feature (176)..(176): Xaa is any aa, unknown or other
MAAAAVGGHREALYSLAVVQFNGSGGGKDDRDLRAGAALCARAASLGHVGALRELGHCLQDGYGVRRSVLDGRRLLIQANARELAAAAASPPQAAAARQGGAPPDSASLVPPERLRVPRRGRGAARGQPVPGGLVXVXAARYGGGGGSXRRXRLLAXGGRRRRXAXVXAGAVRAAXDAAARVQAVLRVAAW

SEQ ID NO: 30951 - DNA, 1234 bp, Zea mays subsp. mays
  misc_feature (1)..(1234): Ceres Seq. ID no. 12354115
acccaaaaccagaattaattatctgacggtgcatgccatgcccatgacacccctcgagtgcgacatggcccctgcagcttctcgccagtcgtggcctcttcctcgctgcggcctgctggtcttggcccttgcactggcgacgaccgccgcggtgggcagcgcgcagctgtcgtcggagagctactacgacgcgtcctgccccgccgcccttctcaccatcaggaccgccgtctcgacggccgtgctgctggagccccgcatgggggcctcccttctccgcctccacttccacgactgtttcgtgcagggttgcgacgcgtcggtgctgctagacgacacggcgagcttcaccggcgagaagggggcggggccgaacgcggggtcgctccggggcttcgacgtgatcgacaacatcaagatgctgctggagctgctgtgccccgcagaccgtctcctgcgccgacatcctcgccgtcgccgcccgcgactcggttgcacaactgggaggaccatcgtgggcggttccgctgggcaggagggacgcgaccacggcgagcgcgtccctggccaacagtgacctccctgggcctaccagcagcctcaacggcctgctcaacgctttctccaacaagggtttgagcagcaccgacatggttgccctctcaggtgcccacaccgtcggccgggcgcagtgcaagaactgccgggcccggatctacaacgacaccgacatcgacgcctccttcgcggcgtcgctgcgggccagctgtcccgcgcaggccggcgccggcgacggcgcgctcgagccgctcgacggctccacgccggacgccttcgacaacgcctacttcggcaacctgctctcccagcgcggcctgctccactccgaccaggcgctcttcggcggcggcggcggcggcgcgactgacggcctggtcagcgcctacgcgtccaacgccggccagtggggggccgacttcgcggcggccatggtcaagatgggcagcatcagcccgctcaccggcacggacggcgagatcagggtcaactgccggagagtgaattaattatttattacagccacgttgattgcatttgctcttggggtagtggactagcgtgcatattttgcaaagaggcagagaagaattgaaatggagcctaagctcatatgtatacaaatgttgtttattattccatattatttcttgcatatataatatatatagcatac

SEQ ID NO: 30952 - protein, 191 aa, Zea mays subsp. mays
  peptide (1)..(191): Ceres Seq. ID no. 12354116
  misc_feature (73)..(146): Pfam Name: Pfam Description:  Peroxidase
  misc_feature (36)..(146): NCBI GI NO: 34393249 NR Description: putative peroxidase precursor
  misc_feature (43)..(146): NCBI GI NO: 2117619 NR Description: peroxidase (EC 1.11.1.7) 4 precursor - wheat
  misc_feature (40)..(146): NCBI GI NO: 585662 NR Description: Peroxidase 2 precursor
  misc_feature (40)..(146): NCBI GI NO: 2429292 NR Description: peroxidase [Oryza sativa]
  misc_feature (41)..(146): NCBI GI NO: 34393250 NR Description: peroxidase
  misc_feature (38)..(146): NCBI GI NO: 34393251 NR Description: peroxidase
  misc_feature (38)..(146): NCBI GI NO: 100694 NR Description: peroxidase (EC 1.11.1.7) precursor - rice
  misc_feature (38)..(146): NCBI GI NO: 2429286 NR Description: peroxidase [Oryza sativa]
  misc_feature (32)..(147): NCBI GI NO: 577503 NR Description: cationic peroxidase
  misc_feature (41)..(146): NCBI GI NO: 2429288 NR Description: peroxidase [Oryza sativa]
PKTRINYLTVHAMPMTPLECDMAPAASRQSWPLPRCGLLVLALALATTAAVGSAQLSSESYYDASCPAALLTIRTAVSTAVLLEPRMGASLLRLHFHDCFVQGCDASVLLDDTASFTGEKGAGPNAGSLRGFDVIDNIKMLLELLCPADRLLRRHPRRRRPRLGCTTGRTIVGGSAGQEGRDHGERVPGQQ

SEQ ID NO: 30953 - protein, 179 aa, Zea mays subsp. mays
  peptide (1)..(179): Ceres Seq. ID no. 12354117
  misc_feature (61)..(134): Pfam Name: Pfam Description:  Peroxidase
  misc_feature (24)..(134): NCBI GI NO: 34393249 NR Description: putative peroxidase precursor
  misc_feature (31)..(134): NCBI GI NO: 2117619 NR Description: peroxidase (EC 1.11.1.7) 4 precursor - wheat
  misc_feature (28)..(134): NCBI GI NO: 585662 NR Description: Peroxidase 2 precursor
  misc_feature (28)..(134): NCBI GI NO: 2429292 NR Description: peroxidase [Oryza sativa]
  misc_feature (29)..(134): NCBI GI NO: 34393250 NR Description: peroxidase
  misc_feature (26)..(134): NCBI GI NO: 34393251 NR Description: peroxidase
  misc_feature (26)..(134): NCBI GI NO: 100694 NR Description: peroxidase (EC 1.11.1.7) precursor - rice
  misc_feature (26)..(134): NCBI GI NO: 2429286 NR Description: peroxidase [Oryza sativa]
  misc_feature (20)..(135): NCBI GI NO: 577503 NR Description: cationic peroxidase
  misc_feature (29)..(134): NCBI GI NO: 2429288 NR Description: peroxidase [Oryza sativa]
MPMTPLECDMAPAASRQSWPLPRCGLLVLALALATTAAVGSAQLSSESYYDASCPAALLTIRTAVSTAVLLEPRMGASLLRLHFHDCFVQGCDASVLLDDTASFTGEKGAGPNAGSLRGFDVIDNIKMLLELLCPADRLLRRHPRRRRPRLGCTTGRTIVGGSAGQEGRDHGERVPGQQ

SEQ ID NO: 30954 - protein, 177 aa, Zea mays subsp. mays
  peptide (1)..(177): Ceres Seq. ID no. 12354118
  misc_feature (59)..(132): Pfam Name: Pfam Description:  Peroxidase
  misc_feature (22)..(132): NCBI GI NO: 34393249 NR Description: putative peroxidase precursor
  misc_feature (29)..(132): NCBI GI NO: 2117619 NR Description: peroxidase (EC 1.11.1.7) 4 precursor - wheat
  misc_feature (26)..(132): NCBI GI NO: 585662 NR Description: Peroxidase 2 precursor
  misc_feature (26)..(132): NCBI GI NO: 2429292 NR Description: peroxidase [Oryza sativa]
  misc_feature (27)..(132): NCBI GI NO: 34393250 NR Description: peroxidase
  misc_feature (24)..(132): NCBI GI NO: 34393251 NR Description: peroxidase
  misc_feature (24)..(132): NCBI GI NO: 100694 NR Description: peroxidase (EC 1.11.1.7) precursor - rice
  misc_feature (24)..(132): NCBI GI NO: 2429286 NR Description: peroxidase [Oryza sativa]
  misc_feature (18)..(133): NCBI GI NO: 577503 NR Description: cationic peroxidase
  misc_feature (27)..(132): NCBI GI NO: 2429288 NR Description: peroxidase [Oryza sativa]
MTPLECDMAPAASRQSWPLPRCGLLVLALALATTAAVGSAQLSSESYYDASCPAALLTIRTAVSTAVLLEPRMGASLLRLHFHDCFVQGCDASVLLDDTASFTGEKGAGPNAGSLRGFDVIDNIKMLLELLCPADRLLRRHPRRRRPRLGCTTGRTIVGGSAGQEGRDHGERVPGQQ

SEQ ID NO: 30955 - DNA, 1256 bp, Zea mays subsp. mays
  misc_feature (1)..(1256): Ceres Seq. ID no. 12362320
gcacgagaccattacctagaacatcctaatcgaaaaactcggcctcggccacggccaccctctcaaaccaaacagaacccacacgcgtgcacggacacggagcacgcgtgcgcgccccacgagcgatgtctccccttcgccgcgcgcgctctaccctgctcctcctccactacgtggccgcctcccacttcctgctgtgcgcgccgatccagcgcaccgccgcggccacattgccggaccccgcgccactcgacccggcactgatcctcccctcggcgacctcggtgcagcccaccgccactaccattcccgggggcacgatcccggcgttccccgagcagtcggactcgctagcggggtcctcgtccgcgtgcccgctcgccccttccccggtgctcctcccggccgtgcggtcctcctgcgccaccgacgacggcgcgctgccgccgaggctgcgctgctgccccgcgctggccgcgtggctgttcgccgcctacgcgcccaccgcgctagcggagcggcccccggccgcggccgcggctaccgtggacatgccgctgccgcccgacgactccgagacgtgcgcgggcgccgtggaccgcgcgctgcgtgcggcgggagcggcgctgccccgcccccctggcgctggcggcaacgggacgtgcgacgtggcgttctgctactgcggggtgaggctgaggcggctggcctgcgggtccccgccggctgagggcgggatgtggtcgccagctgacgccgcggcgagggagctggagaaggactgcgcgcagccgggcgtccctggctgttccaaatgcctccttgctcttaccacgataaaggccacgaatcccgggtgtggtgctggcgtggaggcagcaggcaagaagaagcagcagatctaccgatggaccgcgagtgaccgtgactgcgagctcatggggctcatgtggctgctgcagcgcaatgccacacggtacggagcggcggccacggccgtgatccgggccctaatggccgtggacgaggcgttcaccgcaggggtcgcggtggcggcagatacgggggcagccgtggcgtgctcgctgcccgtggacgacgacatgcccctcccggccgagtacgcgcaggtcagcagggccagcgacgcgcctcgtctctgctgcttcctgctcgtgctgctctccattctaagcttctgttttgtgtactcgttgtaatactttgcgatttaattgaagttcgttgtatggtcc

SEQ ID NO: 30956 - protein, 364 aa, Zea mays subsp. mays
  peptide (1)..(364): Ceres Seq. ID no. 12362321
  misc_feature (45)..(340): NCBI GI NO: 34394002 NR Description: unknown protein
  misc_feature (47)..(333): NCBI GI NO: 18401752 NR Description: expressed protein; protein id: At3g18050
  misc_feature (65)..(297): NCBI GI NO: 18417127 NR Description: expressed protein; protein id: At4g28100
  misc_feature (65)..(297): NCBI GI NO: 21593735 NR Description: unknown [Arabidopsis thaliana]
MSPLRRARSTLLLLHYVAASHFLLCAPIQRTAAATLPDPAPLDPALILPSATSVQPTATTIPGGTIPAFPEQSDSLAGSSSACPLAPSPVLLPAVRSSCATDDGALPPRLRCCPALAAWLFAAYAPTALAERPPAAAAATVDMPLPPDDSETCAGAVDRALRAAGAALPRPPGAGGNGTCDVAFCYCGVRLRRLACGSPPAEGGMWSPADAAARELEKDCAQPGVPGCSKCLLALTTIKATNPGCGAGVEAAGKKKQQIYRWTASDRDCELMGLMWLLQRNATRYGAAATAVIRALMAVDEAFTAGVAVAADTGAAVACSLPVDDDMPLPAEYAQVSRASDAPRLCCFLLVLLSILSFCFVYSL

SEQ ID NO: 30957 - protein, 222 aa, Zea mays subsp. mays
  peptide (1)..(222): Ceres Seq. ID no. 12362322
  misc_feature (1)..(198): NCBI GI NO: 34394002 NR Description: unknown protein
  misc_feature (1)..(191): NCBI GI NO: 18401752 NR Description: expressed protein; protein id: At3g18050
  misc_feature (1)..(155): NCBI GI NO: 18417127 NR Description: expressed protein; protein id: At4g28100
  misc_feature (1)..(155): NCBI GI NO: 21593735 NR Description: unknown [Arabidopsis thaliana]
MPLPPDDSETCAGAVDRALRAAGAALPRPPGAGGNGTCDVAFCYCGVRLRRLACGSPPAEGGMWSPADAAARELEKDCAQPGVPGCSKCLLALTTIKATNPGCGAGVEAAGKKKQQIYRWTASDRDCELMGLMWLLQRNATRYGAAATAVIRALMAVDEAFTAGVAVAADTGAAVACSLPVDDDMPLPAEYAQVSRASDAPRLCCFLLVLLSILSFCFVYSL

SEQ ID NO: 30958 - DNA, 1772 bp, Zea mays subsp. mays
  misc_feature (1)..(1772): Ceres Seq. ID no. 12406393
gcacgagaccattacctagaacatcctaatcaaaaaccccaccagtctctggcaggttctcccccccacccctctccgtctccgatcccgtccgcattgcttcgcgccggaccaaggaggaagggtcggcgtcgcaggcattgcggtctgctagccacgagggccatggacccgtgcccgttcgtgcgggtgctggtcggcaacctggcgctgaagatgccggcatcggcgccccccgccgccgccgcggcgtccggctccggcgtgcacccggccacgccgccctgctactactgccgcatccgcctcaacaagctgccctaccagacggcgcccgcgccgctgctgccggccaccgaggagggctcggcgccggcgccggcgccggcgtcgtgcgcggccgccttccacgcctccaaggccgacctggaccgggccgccgccaggcccgcgctcttcctcggcggccgcctccgcaccgcgcgcctcaaggtggccgtgtacgccggccgcgggggcggtgaaggcggcgggaggctgctcggcaagctcgtcttccggttcgacctcaggcgcgccgtggccgagcccttcgtcttcctcagcggctggttcgacatcggcaagcgcggcgccgggaagccggcggcggccaacgccgcgcgcgcgcagctcaacctcaccgtcctcggcgagcctgacccgaggttcgtcttcgagttcgacggcgagcccgagtgcagcccgcaggtgctccaggttaaggggagcatgaagcagcccatgttcacgtgcaagttctcctgccgcagcaacagcgacctgcgctcgcggtccgtgcagtccgactcgggcgccgtcggcccgcgcaactggctggcgaagctgtggtccgagcgcgagcgcgagcgcgcggggaaggagcgcaaggggtggtcggtgacggtgcacgacctgtcggggtcgccggtggcgctggcgtcgatggtgacgccgttcgtggcgtccccggggacggaccgcgtgggccgctccaacccgggcggctggctcatcctgcgccgccgcgtggacgggacctggacgccgtggggccgcctcgagtgctggcgcgatcgcggcggcagcgccggggacgcccagctgggctaccgcttcgagctggtgcccgaccacaacagcaacgtcacgggcacgggcgtgtgcgtggccgagtccggcgtcccggcggcccgcggcgggcggttcgccatcgacctgaccacggccggatcccccgggcggggcagcggcgagttgagccgccacgcgctctggcccccgggcggcttcgtgatgtcggccgccgtgcagggggagggccggcgcggcaggccctccgtggagatcggcgtggcgcacgtcgggtgcgccgaggacgccgccgcgttcgtcgctctggcggccgccgtcgacctcagcatggacgcgtgccggctcttctcctgcaagctgcgccgggagctgtcggcgtgaacggcgaggggggagggagattggatggtgatcggacgaacttgttttcgttgtttgtctgtaatcccgctgagttctggtgtgatgttcgtcttctaggtgccttttgtagcttagaagaagccataaaactgggctctggggtgagcgaggcgaggtgtgtgttgttggatgtttttttttggattcccagcctctccgcatcgtgctgctaccgaagtggtagagatcaaattttcaaagctgtttgtgctgtc

SEQ ID NO: 30959 - protein, 504 aa, Zea mays subsp. mays
  peptide (1)..(504): Ceres Seq. ID no. 12406394
  misc_feature (329)..(435): Pfam Name: DUF1005 Pfam Description: Protein of unknown function
  misc_feature (56)..(435): NCBI GI NO: 15218372 NR Description: unknown protein; protein id: At1g10020.1
  misc_feature (423)..(502): NCBI GI NO: 15218372 NR Description: unknown protein; protein id: At1g10020.1
  misc_feature (82)..(503): NCBI GI NO: 36104436 NR Description: unknown protein
  misc_feature (114)..(503): NCBI GI NO: 34896878 NR Description: unknown protein
  misc_feature (51)..(502): NCBI GI NO: 34909364 NR Description: P0638D12.14
  misc_feature (99)..(502): NCBI GI NO: 15233530 NR Description: putative protein; protein id: At4g29310
  misc_feature (56)..(485): NCBI GI NO: 18176372 NR Description: unknown protein [Arabidopsis thaliana]
  misc_feature (56)..(485): NCBI GI NO: 15230917 NR Description: unknown protein; protein id: At3g19680
  misc_feature (56)..(306): NCBI GI NO: 36104436 NR Description: unknown protein
  misc_feature (56)..(434): NCBI GI NO: 15222861 NR Description: hypothetical protein; protein id: At1g50040
ARDHYLEHPNQKPHQSLAGSPPHPSPSPIPSALLRAGPRRKGRRRRHCGLLATRAMDPCPFVRVLVGNLALKMPASAPPAAAAASGSGVHPATPPCYYCRIRLNKLPYQTAPAPLLPATEEGSAPAPAPASCAAAFHASKADLDRAAARPALFLGGRLRTARLKVAVYAGRGGGEGGGRLLGKLVFRFDLRRAVAEPFVFLSGWFDIGKRGAGKPAAANAARAQLNLTVLGEPDPRFVFEFDGEPECSPQVLQVKGSMKQPMFTCKFSCRSNSDLRSRSVQSDSGAVGPRNWLAKLWSERERERAGKERKGWSVTVHDLSGSPVALASMVTPFVASPGTDRVGRSNPGGWLILRRRVDGTWTPWGRLECWRDRGGSAGDAQLGYRFELVPDHNSNVTGTGVCVAESGVPAARGGRFAIDLTTAGSPGRGSGELSRHALWPPGGFVMSAAVQGEGRRGRPSVEIGVAHVGCAEDAAAFVALAAAVDLSMDACRLFSCKLRRELSA

SEQ ID NO: 30960 - protein, 449 aa, Zea mays subsp. mays
  peptide (1)..(449): Ceres Seq. ID no. 12406395
  misc_feature (274)..(380): Pfam Name: DUF1005 Pfam Description: Protein of unknown function
  misc_feature (1)..(380): NCBI GI NO: 15218372 NR Description: unknown protein; protein id: At1g10020.1
  misc_feature (368)..(447): NCBI GI NO: 15218372 NR Description: unknown protein; protein id: At1g10020.1
  misc_feature (27)..(448): NCBI GI NO: 36104436 NR Description: unknown protein
  misc_feature (59)..(448): NCBI GI NO: 34896878 NR Description: unknown protein
  misc_feature (1)..(447): NCBI GI NO: 34909364 NR Description: P0638D12.14
  misc_feature (44)..(447): NCBI GI NO: 15233530 NR Description: putative protein; protein id: At4g29310
  misc_feature (1)..(430): NCBI GI NO: 18176372 NR Description: unknown protein [Arabidopsis thaliana]
  misc_feature (1)..(430): NCBI GI NO: 15230917 NR Description: unknown protein; protein id: At3g19680
  misc_feature (1)..(251): NCBI GI NO: 36104436 NR Description: unknown protein
  misc_feature (1)..(379): NCBI GI NO: 15222861 NR Description: hypothetical protein; protein id: At1g50040
MDPCPFVRVLVGNLALKMPASAPPAAAAASGSGVHPATPPCYYCRIRLNKLPYQTAPAPLLPATEEGSAPAPAPASCAAAFHASKADLDRAAARPALFLGGRLRTARLKVAVYAGRGGGEGGGRLLGKLVFRFDLRRAVAEPFVFLSGWFDIGKRGAGKPAAANAARAQLNLTVLGEPDPRFVFEFDGEPECSPQVLQVKGSMKQPMFTCKFSCRSNSDLRSRSVQSDSGAVGPRNWLAKLWSERERERAGKERKGWSVTVHDLSGSPVALASMVTPFVASPGTDRVGRSNPGGWLILRRRVDGTWTPWGRLECWRDRGGSAGDAQLGYRFELVPDHNSNVTGTGVCVAESGVPAARGGRFAIDLTTAGSPGRGSGELSRHALWPPGGFVMSAAVQGEGRRGRPSVEIGVAHVGCAEDAAAFVALAAAVDLSMDACRLFSCKLRRELSA

SEQ ID NO: 30961 - protein, 432 aa, Zea mays subsp. mays
  peptide (1)..(432): Ceres Seq. ID no. 12406396
  misc_feature (257)..(363): Pfam Name: DUF1005 Pfam Description: Protein of unknown function
  misc_feature (1)..(363): NCBI GI NO: 15218372 NR Description: unknown protein; protein id: At1g10020.1
  misc_feature (351)..(430): NCBI GI NO: 15218372 NR Description: unknown protein; protein id: At1g10020.1
  misc_feature (10)..(431): NCBI GI NO: 36104436 NR Description: unknown protein
  misc_feature (42)..(431): NCBI GI NO: 34896878 NR Description: unknown protein
  misc_feature (1)..(430): NCBI GI NO: 34909364 NR Description: P0638D12.14
  misc_feature (27)..(430): NCBI GI NO: 15233530 NR Description: putative protein; protein id: At4g29310
  misc_feature (1)..(413): NCBI GI NO: 18176372 NR Description: unknown protein [Arabidopsis thaliana]
  misc_feature (1)..(413): NCBI GI NO: 15230917 NR Description: unknown protein; protein id: At3g19680
  misc_feature (1)..(234): NCBI GI NO: 36104436 NR Description: unknown protein
  misc_feature (1)..(362): NCBI GI NO: 15222861 NR Description: hypothetical protein; protein id: At1g50040
MPASAPPAAAAASGSGVHPATPPCYYCRIRLNKLPYQTAPAPLLPATEEGSAPAPAPASCAAAFHASKADLDRAAARPALFLGGRLRTARLKVAVYAGRGGGEGGGRLLGKLVFRFDLRRAVAEPFVFLSGWFDIGKRGAGKPAAANAARAQLNLTVLGEPDPRFVFEFDGEPECSPQVLQVKGSMKQPMFTCKFSCRSNSDLRSRSVQSDSGAVGPRNWLAKLWSERERERAGKERKGWSVTVHDLSGSPVALASMVTPFVASPGTDRVGRSNPGGWLILRRRVDGTWTPWGRLECWRDRGGSAGDAQLGYRFELVPDHNSNVTGTGVCVAESGVPAARGGRFAIDLTTAGSPGRGSGELSRHALWPPGGFVMSAAVQGEGRRGRPSVEIGVAHVGCAEDAAAFVALAAAVDLSMDACRLFSCKLRRELSA

SEQ ID NO: 30962 - DNA, 1506 bp, Zea mays subsp. mays
  misc_feature (1)..(1506): Ceres Seq. ID no. 12349452
atgggcgctgctggggacacggatgccgcgctccacgctcttcttcccgctctacctcatgtccatcgggcaaggcgggtaccagccttcgctgcaagcgttcggcgccgaccagctgagcatcggggacgatgacgacgacgacggtgacaccgagcccggcgcgtcgtcgacgccggaggagaagtccaaggtgaagagcatgttcttccggtggtggtacttcggcatgtgcagcggcagcctgctggggaactccaccatgtcgtacgtccaagacaacctcggctggggcctcggtttcgccatcccctgcgccgtcatggccttgtccgtcgcggccttcttctgctgcacccctctgtacaagcgcaaggtgcaggtacagcagccgaagggcgccggtattaggccgtctccgagtagcgtcttcaagtcggtgctcggcgctagccgaaagatcagtctgccgccgtcgaggtcatcagacgacaatggcgacgccatttctgagcttgagttgcaagagaagccactgaaaactgatgaagcatcagagtcctcctctgacgaggctgccgctgctcccggcgtggccaaggtcatactcggcctcctgccgatctgggcgatcctgctcgtcttcgcggtgatcttccagcagccgatgaccttcttcaccaagcaaggcatgctgatgaaccacacgatcggcgtcggcgtcggctccggctccctggtgatcccgccggcgatgctgcagagctccatcaccgtctccatcatcctgctcgtgcccatgtacgaccggatgatcgtcccgctgaccaacgccgtcacggggggcagcgacggcatcacggtgctccagcggatcggcgtcggcatggtcctctccgtggtggccatggtcgccgcggcgctcgtcgagtcgcggcggctccgcgcggagcccgccctgctgagcatcttctggctcctgccgcagtacgtcctgctgggggtctccgacgtgttcaccgtggtggggatgcaggagttcttctactcgcaggtgccggcctccatgaggaccaccggcatcgggctctacctcagcgtcttcggcgtcggcggattcctcggcgcgtccctcatcaccctgctcgagatggccacggcgaggcccggcaacgcccgcggatggttctctgacgacccgcgggaggcgcggatagataacttctactggttcttggctctcctctgcttcgtcagctttgtcgtcttcacgcacttgtgcaagtactacaacgacagatctgcgtcagggaggtaggatcgacccgagtaattaagctgggggtggacgagaggatcttcgatcttgattttgcttgacagcttgagtgagaatttattacttgtattttcagggcgattctattctagctagagatagttcggctgtgtaatgttttcagaaagacatgtaattcaggactccagacgtaatggttctgttcc

SEQ ID NO: 30963 - protein, 438 aa, Zea mays subsp. mays
  peptide (1)..(438): Ceres Seq. ID no. 12349453
  misc_feature (2)..(368): Pfam Name: Pfam Description:  POT family
  misc_feature (2)..(434): NCBI GI NO: 15242171 NR Description: oligopeptide transporter -like protein
  misc_feature (180)..(430): NCBI GI NO: 34908690 NR Description: P0039A07.26
  misc_feature (11)..(168): NCBI GI NO: 34908690 NR Description: P0039A07.26
  misc_feature (180)..(430): NCBI GI NO: 34908688 NR Description: P0039A07.25
  misc_feature (14)..(172): NCBI GI NO: 34908688 NR Description: P0039A07.25
  misc_feature (3)..(430): NCBI GI NO: 25402970 NR Description: Similar to peptide transporter
  misc_feature (3)..(430): NCBI GI NO: 30687920 NR Description: oligopeptide transporter -related
  misc_feature (14)..(430): NCBI GI NO: 15218352 NR Description: oligopeptide transporter, putative
  misc_feature (199)..(430): NCBI GI NO: 15218381 NR Description: peptide transporter PTR2-B, putative
  misc_feature (13)..(123): NCBI GI NO: 15218381 NR Description: peptide transporter PTR2-B, putative
WALLGTRMPRSTLFFPLYLMSIGQGGYQPSLQAFGADQLSIGDDDDDDGDTEPGASSTPEEKSKVKSMFFRWWYFGMCSGSLLGNSTMSYVQDNLGWGLGFAIPCAVMALSVAAFFCCTPLYKRKVQVQQPKGAGIRPSPSSVFKSVLGASRKISLPPSRSSDDNGDAISELELQEKPLKTDEASESSSDEAAAAPGVAKVILGLLPIWAILLVFAVIFQQPMTFFTKQGMLMNHTIGVGVGSGSLVIPPAMLQSSITVSIILLVPMYDRMIVPLTNAVTGGSDGITVLQRIGVGMVLSVVAMVAAALVESRRLRAEPALLSIFWLLPQYVLLGVSDVFTVVGMQEFFYSQVPASMRTTGIGLYLSVFGVGGFLGASLITLLEMATARPGNARGWFSDDPREARIDNFYWFLALLCFVSFVVFTHLCKYYNDRSASGR

SEQ ID NO: 30964 - protein, 431 aa, Zea mays subsp. mays
  peptide (1)..(431): Ceres Seq. ID no. 12349454
  misc_feature (1)..(361): Pfam Name: Pfam Description:  POT family
  misc_feature (1)..(427): NCBI GI NO: 15242171 NR Description: oligopeptide transporter -like protein
  misc_feature (173)..(423): NCBI GI NO: 34908690 NR Description: P0039A07.26
  misc_feature (4)..(161): NCBI GI NO: 34908690 NR Description: P0039A07.26
  misc_feature (173)..(423): NCBI GI NO: 34908688 NR Description: P0039A07.25
  misc_feature (7)..(165): NCBI GI NO: 34908688 NR Description: P0039A07.25
  misc_feature (1)..(423): NCBI GI NO: 25402970 NR Description: Similar to peptide transporter
  misc_feature (1)..(423): NCBI GI NO: 30687920 NR Description: oligopeptide transporter -related
  misc_feature (7)..(423): NCBI GI NO: 15218352 NR Description: oligopeptide transporter, putative
  misc_feature (192)..(423): NCBI GI NO: 15218381 NR Description: peptide transporter PTR2-B, putative
  misc_feature (6)..(116): NCBI GI NO: 15218381 NR Description: peptide transporter PTR2-B, putative
MPRSTLFFPLYLMSIGQGGYQPSLQAFGADQLSIGDDDDDDGDTEPGASSTPEEKSKVKSMFFRWWYFGMCSGSLLGNSTMSYVQDNLGWGLGFAIPCAVMALSVAAFFCCTPLYKRKVQVQQPKGAGIRPSPSSVFKSVLGASRKISLPPSRSSDDNGDAISELELQEKPLKTDEASESSSDEAAAAPGVAKVILGLLPIWAILLVFAVIFQQPMTFFTKQGMLMNHTIGVGVGSGSLVIPPAMLQSSITVSIILLVPMYDRMIVPLTNAVTGGSDGITVLQRIGVGMVLSVVAMVAAALVESRRLRAEPALLSIFWLLPQYVLLGVSDVFTVVGMQEFFYSQVPASMRTTGIGLYLSVFGVGGFLGASLITLLEMATARPGNARGWFSDDPREARIDNFYWFLALLCFVSFVVFTHLCKYYNDRSASGR

SEQ ID NO: 30965 - protein, 419 aa, Zea mays subsp. mays
  peptide (1)..(419): Ceres Seq. ID no. 12349455
  misc_feature (1)..(349): Pfam Name: Pfam Description:  POT family
  misc_feature (1)..(415): NCBI GI NO: 15242171 NR Description: oligopeptide transporter -like protein
  misc_feature (161)..(411): NCBI GI NO: 34908690 NR Description: P0039A07.26
  misc_feature (1)..(149): NCBI GI NO: 34908690 NR Description: P0039A07.26
  misc_feature (161)..(411): NCBI GI NO: 34908688 NR Description: P0039A07.25
  misc_feature (1)..(153): NCBI GI NO: 34908688 NR Description: P0039A07.25
  misc_feature (1)..(411): NCBI GI NO: 25402970 NR Description: Similar to peptide transporter
  misc_feature (1)..(411): NCBI GI NO: 30687920 NR Description: oligopeptide transporter -related
  misc_feature (1)..(411): NCBI GI NO: 15218352 NR Description: oligopeptide transporter, putative
  misc_feature (180)..(411): NCBI GI NO: 15218381 NR Description: peptide transporter PTR2-B, putative
  misc_feature (1)..(104): NCBI GI NO: 15218381 NR Description: peptide transporter PTR2-B, putative
MSIGQGGYQPSLQAFGADQLSIGDDDDDDGDTEPGASSTPEEKSKVKSMFFRWWYFGMCSGSLLGNSTMSYVQDNLGWGLGFAIPCAVMALSVAAFFCCTPLYKRKVQVQQPKGAGIRPSPSSVFKSVLGASRKISLPPSRSSDDNGDAISELELQEKPLKTDEASESSSDEAAAAPGVAKVILGLLPIWAILLVFAVIFQQPMTFFTKQGMLMNHTIGVGVGSGSLVIPPAMLQSSITVSIILLVPMYDRMIVPLTNAVTGGSDGITVLQRIGVGMVLSVVAMVAAALVESRRLRAEPALLSIFWLLPQYVLLGVSDVFTVVGMQEFFYSQVPASMRTTGIGLYLSVFGVGGFLGASLITLLEMATARPGNARGWFSDDPREARIDNFYWFLALLCFVSFVVFTHLCKYYNDRSASGR

SEQ ID NO: 30966 - DNA, 834 bp, Zea mays subsp. mays
  misc_feature (1)..(834): Ceres Seq. ID no. 12404684
gaaccaagaaagaatcacacaacagcagctcaaaaacctaacacacctcaacaagcagagcaaagacccgggattcgccggcgcggtagcgagagcgagagatggacgggaggatgttcggtctcgagacccccctgatggtggcgctgcagcaccttctggacgtgcccgacggcgacgccggcgcgggcggcgacaaggcgagtggtgccgcggcgggcggcgggcccacgcgcacctacgtccgcgacgcgcgcgccatggcggccaccccggccgacgtcaaggagctcccgggcgcgtacgcgttcgtggtggacatgccggggctgggcacgggcgacatcaaggtgcaggtggaggacgagcgggtgctggtgatcagcggcgagcggcgccgggcaggagcgcgaggacgccaagtacctgcgcatggagcggcggatgggcaagttcatgcgcaagttcgtgctgccggacaacgccgacatggacaagatctcggcggtgtgcagggacggcgtgctcaccgtgaccgtcgagaagctgcccccgcccgagcccaagaaacccaagaccatcgaggtcaaggtcgcctgaggtgggactaggtcgaccgatcgtggctctgaagatgtgggagcagtgccagcgagttgtgaggacctctacctgtgtggaatgtggcgaggaataatcgtagtctgtagtgggggtgcttctggtgtgcgtgtttgcgttccttcggtctcggtgtctgtctaccaattcctatctgatgtatcggcttcggtttcgtatgaaccatgccggatgctttcagtatgttcatcg

SEQ ID NO: 30967 - protein, 177 aa, Zea mays subsp. mays
  peptide (1)..(177): Ceres Seq. ID no. 12404685
NQERITQQQLKNLTHLNKQSKDPGFAGAVARARDGREDVRSRDPPDGGAAAPSGRARRRRRRGRRQGEWCRGGRRAHAHLRPRRARHGGHPGRRQGAPGRVRVRGGHAGAGHGRHQGAGGGRAGAGDQRRAAPGRSARTPSTCAWSGGWASSCASSCCRTTPTWTRSRRCAGTACSP

SEQ ID NO: 30968 - protein, 169 aa, Zea mays subsp. mays
  peptide (1)..(169): Ceres Seq. ID no. 12404686
  misc_feature (1)..(100): NCBI GI NO: 123549 NR Description: 17.5 KD CLASS II HEAT SHOCK PROTEIN
  misc_feature (1)..(100): NCBI GI NO: 123553 NR Description: 17.8 KD CLASS II HEAT SHOCK PROTEIN
  misc_feature (1)..(102): NCBI GI NO: 34906270 NR Description: putative heat shock protein, 18K - maize
  misc_feature (1)..(100): NCBI GI NO: 14009833 NR Description: small heat shock protein HSP17.8
  misc_feature (1)..(100): NCBI GI NO: 729762 NR Description: 17.0 KD CLASS II HEAT SHOCK PROTEIN (HSP 18)
  misc_feature (1)..(100): NCBI GI NO: 100790 NR Description: heat shock protein 17.3 - wheat
  misc_feature (1)..(100): NCBI GI NO: 5257560 NR Description: cytosolic class II low molecular weight heat shock
  misc_feature (1)..(100): NCBI GI NO: 123580 NR Description: 17.9 KD CLASS II HEAT SHOCK PROTEIN
  misc_feature (1)..(100): NCBI GI NO: 7441328 NR Description: heat shock protein 17.6 - tomato
  misc_feature (1)..(100): NCBI GI NO: 3336894 NR Description: Hsp20.2 protein [Lycopersicon peruvianum]
MDGRMFGLETPLMVALQHLLDVPDGDAGAGGDKASGAAAGGGPTRTYVRDARAMAATPADVKELPGAYAFVVDMPGLGTGDIKVQVEDERVLVISGERRRAGARGRQVPAHGAADGQVHAQVRAAGQRRHGQDLGGVQGRRAHRDRREAAPARAQETQDHRGQGRLRWD

SEQ ID NO: 30969 - protein, 165 aa, Zea mays subsp. mays
  peptide (1)..(165): Ceres Seq. ID no. 12404687
  misc_feature (1)..(96): NCBI GI NO: 123549 NR Description: 17.5 KD CLASS II HEAT SHOCK PROTEIN
  misc_feature (1)..(96): NCBI GI NO: 123553 NR Description: 17.8 KD CLASS II HEAT SHOCK PROTEIN
  misc_feature (1)..(98): NCBI GI NO: 34906270 NR Description: putative heat shock protein, 18K - maize
  misc_feature (1)..(96): NCBI GI NO: 14009833 NR Description: small heat shock protein HSP17.8
  misc_feature (1)..(96): NCBI GI NO: 729762 NR Description: 17.0 KD CLASS II HEAT SHOCK PROTEIN (HSP 18)
  misc_feature (1)..(96): NCBI GI NO: 100790 NR Description: heat shock protein 17.3 - wheat
  misc_feature (1)..(96): NCBI GI NO: 5257560 NR Description: cytosolic class II low molecular weight heat shock
  misc_feature (1)..(96): NCBI GI NO: 123580 NR Description: 17.9 KD CLASS II HEAT SHOCK PROTEIN
  misc_feature (1)..(96): NCBI GI NO: 7441328 NR Description: heat shock protein 17.6 - tomato
  misc_feature (1)..(96): NCBI GI NO: 3336894 NR Description: Hsp20.2 protein [Lycopersicon peruvianum]
MFGLETPLMVALQHLLDVPDGDAGAGGDKASGAAAGGGPTRTYVRDARAMAATPADVKELPGAYAFVVDMPGLGTGDIKVQVEDERVLVISGERRRAGARGRQVPAHGAADGQVHAQVRAAGQRRHGQDLGGVQGRRAHRDRREAAPARAQETQDHRGQGRLRWD

SEQ ID NO: 30970 - DNA, 1421 bp, Zea mays subsp. mays
  misc_feature (1)..(1421): Ceres Seq. ID no. 12407029
  misc_feature (800)..(800): n is a, c, t, g, unknown, or other
  misc_feature (781)..(781): n is a, c, t, g, unknown, or other
accaccaccctccctctctgcctcaccacctactccgcctgcgcctgcgagctgtgctgtgctgcgcaacggggagatccaatccacagaacaggatgcagtccaagcaccgggtcttcgcggaggacctgctcctggcggcggcggcggagggcgaggaccacttcgaccgggtgcccgactccctggtgctcctcatcttcaacaagctggccgacgcgcggtcgctggggcgctgctccgcggtgtcgcgccgcttcagcgcgctggtcccgctcgtggacgacgcctgcctgcgcatcgaccgcgtcatccccgccgacgccgccgacgcgggggcgccgcgcccgcgcgccgcgctctcgcacctcctcaagtccgtgctgctcgccgtgctcaagcccttcgcgcactgcgacgccaagtccgcgtcgccgcaaaagcacgcgcaccagcagcagcagcaccactcgcccgcccaggtgctcaggaacttcagcagcatccgcagcctccggatggagctcccggtctccgacgtgggcaccgacgacggcgtcgtgctcaggtggaaggccgtcttcggcagcacgctgcagagctgcgtcatcctcggcggcaccagggtggaccgcgcgggaccgccgcacgccccctcctccggctccgctccccccgcggtcgacgacgacggcggcagcatcccggagtccctgtacaccaacggcggcctcaagctgcgcgtcgtctggaccatcagctccctcatcgccgcggccancaggcactacctcctccgngagatcgtcaaggagcaccccaccctcgagcgggtggcgctgacggacgccggcgggcagggcacgctcagcatgggggcgcgaccagcctcagggagttcagggacaggccgctcgccgccgcgcccgccgccgccgccaaccgcacgcaggtgcccgcctgcaacatgaagctgcgctacgcgccgctgctggagctctcggacggcaccaggatccacggcgccacgctcgtggtcattcaagcccgtcggcgacgccggcgggaaggacctcgacgagctcggcgccggcgccttcgacgggcccctgagggaggccgtggccgcgctcggcaagcgccgcgcatacctgctcgagatgaacggcttctagtctgcgcgcctctctgctccattgcaatgggcattgttaattggccaatgggcaacggcaactagctagctagattgctcctccgctcgcttcacctcagctgtcagtcagctcctgtcctgacgatatccttgtgaaaaaaaaacagtagtatagaatggagtgggcagcgccagccagccggccagcttcacagtgcattctgatgctatcatgaacggaaatgaagcagtcagtcacatttcg

SEQ ID NO: 30971 - protein, 412 aa, Zea mays subsp. mays
  peptide (1)..(412): Ceres Seq. ID no. 12407030
  misc_feature (35)..(382): NCBI GI NO: 23106243 NR Description: hypothetical protein [Azotobacter vinelandii]
  misc_feature (44)..(386): NCBI GI NO: 23018055 NR Description: hypothetical protein [Thermobifida fusca]
  misc_feature (37)..(294): NCBI GI NO: 23104350 NR Description: hypothetical protein [Azotobacter vinelandii]
  misc_feature (13)..(326): NCBI GI NO: 29247944 NR Description: GLP_26_54603_52153 [Giardia lamblia ATCC 50803]
  misc_feature (1)..(382): NCBI GI NO: 11362193 NR Description: hypothetical protein
  misc_feature (36)..(386): NCBI GI NO: 23018055 NR Description: hypothetical protein [Thermobifida fusca]
  misc_feature (65)..(317): NCBI GI NO: 23018055 NR Description: hypothetical protein [Thermobifida fusca]
  misc_feature (260)..(260): Xaa is any aa, unknown or other
  misc_feature (267)..(267): Xaa is any aa, unknown or other
PPPSLSASPPTPPAPASCAVLRNGEIQSTEQDAVQAPGLRGGPAPGGGGGGRGPLRPGARLPGAPHLQQAGRRAVAGALLRGVAPLQRAGPARGRRLPAHRPRHPRRRRRRGGAAPARRALAPPQVRAARRAQALRALRRQVRVAAKARAPAAAAPLARPGAQELQQHPQPPDGAPGLRRGHRRRRRAQVEGRLRQHAAELRHPRRHQGGPRGTAARPLLRLRSPRGRRRRRQHPGVPVHQRRPQAARRLDHQLPHRRGXQALPPPXDRQGAPHPRAGGADGRRRAGHAQHGGATSLREFRDRPLAAAPAAAANRTQVPACNMKLRYAPLLELSDGTRIHGATLVVIQARRRRRREGPRRARRRRLRRAPEGGRGRARQAPRIPARDERLLVCAPLCSIAMGIVNWPMGNGN

SEQ ID NO: 30972 - protein, 322 aa, Zea mays subsp. mays
  peptide (1)..(322): Ceres Seq. ID no. 12407031
  misc_feature (53)..(322): NCBI GI NO: 34909194 NR Description: P0425G02.20
  misc_feature (155)..(322): NCBI GI NO: 15236865 NR Description: hypothetical protein; protein id: At4g18380.1
  misc_feature (53)..(134): NCBI GI NO: 15236865 NR Description: hypothetical protein; protein id: At4g18380.1
  misc_feature (155)..(322): NCBI GI NO: 15237391 NR Description: putative protein; protein id: At5g46170
  misc_feature (53)..(134): NCBI GI NO: 15237391 NR Description: putative protein; protein id: At5g46170
  misc_feature (112)..(322): NCBI GI NO: 34909910 NR Description: P0665A11.15
  misc_feature (53)..(134): NCBI GI NO: 34909910 NR Description: P0665A11.15
  misc_feature (155)..(322): NCBI GI NO: 18397400 NR Description: expressed protein; protein id: At1g30200
  misc_feature (53)..(121): NCBI GI NO: 18397400 NR Description: expressed protein; protein id: At1g30200
  misc_feature (53)..(322): NCBI GI NO: 18411823 NR Description: expressed protein; protein id: At1g78100
  misc_feature (260)..(260): Xaa is any aa, unknown or other
  misc_feature (266)..(266): Xaa is any aa, unknown or other
HHPPSLPHHLLRLRLRAVLCCATGRSNPQNRMQSKHRVFAEDLLLAAAAEGEDHFDRVPDSLVLLIFNKLADARSLGRCSAVSRRFSALVPLVDDACLRIDRVIPADAADAGAPRPRAALSHLLKSVLLAVLKPFAHCDAKSASPQKHAHQQQQHHSPAQVLRNFSSIRSLRMELPVSDVGTDDGVVLRWKAVFGSTLQSCVILGGTRVDRAGPPHAPSSGSAPPAVDDDGGSIPESLYTNGGLKLRVVWTISSLIAAAXRHYLLXEIVKEHPTLERVALTDAGGQGTLSMGARPASGSSGTGRSPPRPPPPPTARRCPPAT

SEQ ID NO: 30973 - protein, 291 aa, Zea mays subsp. mays
  peptide (1)..(291): Ceres Seq. ID no. 12407032
  misc_feature (22)..(291): NCBI GI NO: 34909194 NR Description: P0425G02.20
  misc_feature (124)..(291): NCBI GI NO: 15236865 NR Description: hypothetical protein; protein id: At4g18380.1
  misc_feature (22)..(103): NCBI GI NO: 15236865 NR Description: hypothetical protein; protein id: At4g18380.1
  misc_feature (124)..(291): NCBI GI NO: 15237391 NR Description: putative protein; protein id: At5g46170
  misc_feature (22)..(103): NCBI GI NO: 15237391 NR Description: putative protein; protein id: At5g46170
  misc_feature (81)..(291): NCBI GI NO: 34909910 NR Description: P0665A11.15
  misc_feature (22)..(103): NCBI GI NO: 34909910 NR Description: P0665A11.15
  misc_feature (124)..(291): NCBI GI NO: 18397400 NR Description: expressed protein; protein id: At1g30200
  misc_feature (22)..(90): NCBI GI NO: 18397400 NR Description: expressed protein; protein id: At1g30200
  misc_feature (22)..(291): NCBI GI NO: 18411823 NR Description: expressed protein; protein id: At1g78100
  misc_feature (229)..(229): Xaa is any aa, unknown or other
  misc_feature (235)..(235): Xaa is any aa, unknown or other
MQSKHRVFAEDLLLAAAAEGEDHFDRVPDSLVLLIFNKLADARSLGRCSAVSRRFSALVPLVDDACLRIDRVIPADAADAGAPRPRAALSHLLKSVLLAVLKPFAHCDAKSASPQKHAHQQQQHHSPAQVLRNFSSIRSLRMELPVSDVGTDDGVVLRWKAVFGSTLQSCVILGGTRVDRAGPPHAPSSGSAPPAVDDDGGSIPESLYTNGGLKLRVVWTISSLIAAAXRHYLLXEIVKEHPTLERVALTDAGGQGTLSMGARPASGSSGTGRSPPRPPPPPTARRCPPAT

SEQ ID NO: 30974 - DNA, 1575 bp, Zea mays subsp. mays
  misc_feature (1)..(1575): Ceres Seq. ID no. 13493270
gcacgagaccattacctagaacatcctaatcgaaaacagtcaccaccacggccaccctcctcttgtatagtcaaaccggccctctccttgtaaccttgggcaagaggagcagaaaggtcccagctttccgtgttcttctgcttctttccccgcctcgccttcgttccccccgtcaccagatctcgaggcagcggagtccggggacgccgttctttccgttgtgcttcctttgcctcttgctgccggcggccggtgattttcccgaggtctgtttgggcggcaggtagaggctattttcttggcggctggtgggatggatagccacgccgccgggtcgagctccggcgggtccggggatggcggcgcgcagcccaggaggagctccaggaagcccaagtattccaagtttactcagcaggagcttccagcttgcaagccgattcttactccaaaatgggttatttcagtattcgttcttgttggcgtgatttttgtcccgattggtattgtttcgctgcaagcttcacgacaggttgtcgagatcgttgatcggtatgatgatgcatgtgtccctgctggtgtgactgacaagcttgcttacatccggaatgatagtataccaaaaagctgcacaaggaatctgacgattacaaaggatatgaagcagccgatttttgtgtattatcagctggatgacttttaccagaatcataggaggtatgtcaagagtcgtaatgatgcacagctaagagataaaagtaaagcgactgactttaccaattgtgatcctgaggccaaaacggtagatggaaaaccaattgtgccttgtggtcttattgcatggagcctgttcaatgatacatataaactcattcacaacaatgtaaccttgagagtggagaagaaggacatctcttggaagagtgacagagaccacaaatttgggagtgatgtcttcccaacgaactttcagaaaggacctcttaaaggtggaaaaacacttgatccaagtatcccgttgagtaagcaagaggacctcattgtttggatgcggactgcagcacttccgacattcagaaagctgtatggaaggatatatgttgatctcaaggaaaacgatacaatcacagtccagttggacaacaactacaacacctatagctttggtggcaagaagaagctggtgctttctaccgcaacctggctcgggggaaagaacgattttctgggccttgcgtacctcaccgtcggcggactctgcttcttcttggcattcgcgttcaccttgctatacttgataaagccaaggaaaatgggagataacagctacctgtcatggaacagacccccttcaggtcgctgatgatgtgctttggaagttaaatgcgatacacaggcagcaccaaacagattcagattatggtcggaatgtatcttgtaccacagagaaattttatccgtgctcgtcggtgtagaatatatacggcacccttgcacatattgtacattacatcgaaacacatagctttgttttctacaaaattgtatactcaaaattgtatactcaaaagtttc

SEQ ID NO: 30975 - protein, 349 aa, Zea mays subsp. mays
  peptide (1)..(349): Ceres Seq. ID no. 13493271
  misc_feature (67)..(338): Pfam Name: ligand-effect modulator 3 Pfam Description: LEM3
  misc_feature (1)..(349): NCBI GI NO: 18404877 NR Description: membrane protein common family
  misc_feature (5)..(349): NCBI GI NO: 18399730 NR Description: membrane protein common family
  misc_feature (1)..(348): NCBI GI NO: 18412377 NR Description: membrane protein common family
  misc_feature (30)..(348): NCBI GI NO: 25347303 NR Description: protein F3O9.16 [imported] - Arabidopsis thaliana
  misc_feature (32)..(348): NCBI GI NO: 25347301 NR Description: T8K14.13 [imported] - Arabidopsis thaliana
  misc_feature (44)..(348): NCBI GI NO: 15219220 NR Description: membrane protein common family
  misc_feature (22)..(344): NCBI GI NO: 18422638 NR Description: membrane protein common family
  misc_feature (22)..(344): NCBI GI NO: 21554054 NR Description: unknown [Arabidopsis thaliana]
  misc_feature (22)..(332): NCBI GI NO: 9757735 NR Description: gb|AAD25612
  misc_feature (23)..(341): NCBI GI NO: 19570056 NR Description: similar to membrane protein common family
MDSHAAGSSSGGSGDGGAQPRRSSRKPKYSKFTQQELPACKPILTPKWVISVFVLVGVIFVPIGIVSLQASRQVVEIVDRYDDACVPAGVTDKLAYIRNDSIPKSCTRNLTITKDMKQPIFVYYQLDDFYQNHRRYVKSRNDAQLRDKSKATDFTNCDPEAKTVDGKPIVPCGLIAWSLFNDTYKLIHNNVTLRVEKKDISWKSDRDHKFGSDVFPTNFQKGPLKGGKTLDPSIPLSKQEDLIVWMRTAALPTFRKLYGRIYVDLKENDTITVQLDNNYNTYSFGGKKKLVLSTATWLGGKNDFLGLAYLTVGGLCFFLAFAFTLLYLIKPRKMGDNSYLSWNRPPSGR

SEQ ID NO: 30976 - protein, 234 aa, Zea mays subsp. mays
  peptide (1)..(234): Ceres Seq. ID no. 13493272
  misc_feature (1)..(223): Pfam Name: ligand-effect modulator 3 Pfam Description: LEM3
  misc_feature (1)..(234): NCBI GI NO: 18404877 NR Description: membrane protein common family
  misc_feature (1)..(234): NCBI GI NO: 18399730 NR Description: membrane protein common family
  misc_feature (1)..(233): NCBI GI NO: 18412377 NR Description: membrane protein common family
  misc_feature (1)..(233): NCBI GI NO: 25347303 NR Description: protein F3O9.16 [imported] - Arabidopsis thaliana
  misc_feature (1)..(233): NCBI GI NO: 25347301 NR Description: T8K14.13 [imported] - Arabidopsis thaliana
  misc_feature (1)..(233): NCBI GI NO: 15219220 NR Description: membrane protein common family
  misc_feature (1)..(229): NCBI GI NO: 18422638 NR Description: membrane protein common family
  misc_feature (1)..(229): NCBI GI NO: 21554054 NR Description: unknown [Arabidopsis thaliana]
  misc_feature (1)..(217): NCBI GI NO: 9757735 NR Description: gb|AAD25612
  misc_feature (1)..(226): NCBI GI NO: 19570056 NR Description: similar to membrane protein common family
MKQPIFVYYQLDDFYQNHRRYVKSRNDAQLRDKSKATDFTNCDPEAKTVDGKPIVPCGLIAWSLFNDTYKLIHNNVTLRVEKKDISWKSDRDHKFGSDVFPTNFQKGPLKGGKTLDPSIPLSKQEDLIVWMRTAALPTFRKLYGRIYVDLKENDTITVQLDNNYNTYSFGGKKKLVLSTATWLGGKNDFLGLAYLTVGGLCFFLAFAFTLLYLIKPRKMGDNSYLSWNRPPSGR

SEQ ID NO: 30977 - DNA, 1578 bp, Zea mays subsp. mays; identical to SEQ ID NO: 26358
  misc_feature (1)..(1578): Ceres Seq. ID no. 13492685

SEQ ID NO: 30978 - protein, 436 aa, Zea mays subsp. mays; identical to SEQ ID NO: 26359
  peptide (1)..(436): Ceres Seq. ID no. 13492686
  misc_feature (37)..(436): Pfam Name: Pfam Description:  Phosphoglycerate kinase
  misc_feature (35)..(436): NCBI GI NO: 129916 NR Description: Phosphoglycerate kinase, cytosolic
  misc_feature (35)..(436): NCBI GI NO: 21536853 NR Description: phosphoglycerate kinase, putative
  misc_feature (35)..(436): NCBI GI NO: 15219412 NR Description: phosphoglycerate kinase -related
  misc_feature (35)..(436): NCBI GI NO: 3738257 NR Description: cytosolic phosphoglycerate kinase 1
  misc_feature (35)..(436): NCBI GI NO: 2499498 NR Description: Phosphoglycerate kinase, cytosolic
  misc_feature (35)..(436): NCBI GI NO: 9230771 NR Description: cytosolic phosphoglycerate kinase [Pisum sativum]
  misc_feature (35)..(436): NCBI GI NO: 29124969 NR Description: 3-phosphoglycerate kinase [Populus tremuloides]
  misc_feature (35)..(436): NCBI GI NO: 3738259 NR Description: cytosolic phosphoglycerate kinase 1
  misc_feature (28)..(436): NCBI GI NO: 7434544 NR Description: phosphoglycerate kinase (EC 2
  misc_feature (24)..(435): NCBI GI NO: 3738261 NR Description: chloroplast phosphoglycerate kinase

SEQ ID NO: 30979 - protein, 402 aa, Zea mays subsp. mays; identical to SEQ ID NO: 26360
  peptide (1)..(402): Ceres Seq. ID no. 13492687
  misc_feature (3)..(402): Pfam Name: Pfam Description:  Phosphoglycerate kinase
  misc_feature (1)..(402): NCBI GI NO: 129916 NR Description: Phosphoglycerate kinase, cytosolic
  misc_feature (1)..(402): NCBI GI NO: 21536853 NR Description: phosphoglycerate kinase, putative
  misc_feature (1)..(402): NCBI GI NO: 15219412 NR Description: phosphoglycerate kinase -related
  misc_feature (1)..(402): NCBI GI NO: 3738257 NR Description: cytosolic phosphoglycerate kinase 1
  misc_feature (1)..(402): NCBI GI NO: 2499498 NR Description: Phosphoglycerate kinase, cytosolic
  misc_feature (1)..(402): NCBI GI NO: 9230771 NR Description: cytosolic phosphoglycerate kinase [Pisum sativum]
  misc_feature (1)..(402): NCBI GI NO: 29124969 NR Description: 3-phosphoglycerate kinase [Populus tremuloides]
  misc_feature (1)..(402): NCBI GI NO: 3738259 NR Description: cytosolic phosphoglycerate kinase 1
  misc_feature (1)..(402): NCBI GI NO: 7434544 NR Description: phosphoglycerate kinase (EC 2
  misc_feature (1)..(401): NCBI GI NO: 3738261 NR Description: chloroplast phosphoglycerate kinase

SEQ ID NO: 30980 - protein, 309 aa, Zea mays subsp. mays; identical to SEQ ID NO: 26361
  peptide (1)..(309): Ceres Seq. ID no. 13492688
  misc_feature (1)..(309): Pfam Name: Pfam Description:  Phosphoglycerate kinase
  misc_feature (1)..(309): NCBI GI NO: 129916 NR Description: Phosphoglycerate kinase, cytosolic
  misc_feature (1)..(309): NCBI GI NO: 21536853 NR Description: phosphoglycerate kinase, putative
  misc_feature (1)..(309): NCBI GI NO: 15219412 NR Description: phosphoglycerate kinase -related
  misc_feature (1)..(309): NCBI GI NO: 3738257 NR Description: cytosolic phosphoglycerate kinase 1
  misc_feature (1)..(309): NCBI GI NO: 2499498 NR Description: Phosphoglycerate kinase, cytosolic
  misc_feature (1)..(309): NCBI GI NO: 9230771 NR Description: cytosolic phosphoglycerate kinase [Pisum sativum]
  misc_feature (1)..(309): NCBI GI NO: 29124969 NR Description: 3-phosphoglycerate kinase [Populus tremuloides]
  misc_feature (1)..(309): NCBI GI NO: 3738259 NR Description: cytosolic phosphoglycerate kinase 1
  misc_feature (1)..(309): NCBI GI NO: 7434544 NR Description: phosphoglycerate kinase (EC 2
  misc_feature (1)..(308): NCBI GI NO: 3738261 NR Description: chloroplast phosphoglycerate kinase

SEQ ID NO: 30981 - DNA, 1504 bp, Zea mays subsp. mays
  misc_feature (1)..(1504): Ceres Seq. ID no. 12365889
gatgagctagctagcaagcctccgatggcgccgcctcgttggccttggccggcaccggctcaacattgccggcagaggccgcccctgcccgggtccgcgccttctctgcctcggccgcccagtccatgcgcacgatgaccgtcaccagcaccgccaagctgacggcggcgcccaccaggaagccggccaggaggccctccagcccgaggccggccttgaagccgagcgcgacgcccaccggcagcgccaccacgtagaagccgcccacgacggcgtacatgcccagcagcggccgcgccgtgcccccgcacgatgccgccgcacacgttgagcgggaagttgaccacctccagcagcgccatcaccttcatggcccgccccacgccgtcccgcacctccgggctgcgcgtgtatatgcgcgcccacggccggcgcgccgccagcatgagcaggcctccggcgaggcccgccaccgcgccgcccgccaccgacaccctggcggcgcggcgcgccgtggcggcgtccccggcgcccagctcgttggacacgcgcaccgacgcgctgacggacagcgacagcatggccgcgaacagcaggtagtcgaagttgagcgtgacggcgaccacgcccaccgtgcggcgcgcgtcggggaggcgccccgtgaggagcaccaggatctcgtaggaccaccactcgaggcaggtgttgaggcagcaggggacggccaggcggaggagcagcagccacgccccggacgcccatcctggcggagagcgagacggtgagcgggatgtggagcgccagcgccagggcagcggcgaacagagtgggcagcgtggcctcctgcgcgctgaggtacgccttgagcgggttgagcacggaggtgacggcgaggtccgggaggaggcagagcacgtaggtcctggccgtggccgcgatgtcgggctgctggccgaagcgcagcagcacggcgtcgacgcgcgtccagaggagcgcgatggggacggaggcggccaggagcatgagggtggccctgagcagcgtcccgcgcaggagggcgacgtttccggcgccgtgcgcctggccgcagatgggctccatggcgccgcagaggccgctgaggacggcgaagccggtgacgttggcgaagctgtagccgagcgtgccggcggccagctccaggtcgccgaggcggccgaggaaggccgtggtcacggcctgcttggcgaaccaggtgaggttcatgccgatgagagggagcgcgatgccgcgctgcgcgcgcacctcggacgcaacagcggccaggccatgctgctgccttggcggtggtgtcgtcatggtcatggctgctgcgtgagcgagcgagcagatggagatggagtttggtttgctttggtttgttggggttacaggcagcacatatccacatactagtatacatactttacttaggctgcctgctttatttctgctttcttccatgaatggatcgtaacggttctgc

SEQ ID NO: 30982 - protein, 168 aa, Zea mays subsp. mays
  peptide (1)..(168): Ceres Seq. ID no. 12365890
MPSSGRAVPPHDAAAHVEREVDHLQQRHHLHGPPHAVPHLRAARVYARPRPARRQHEQASGEARHRAARHRHPGGAARRGGVPGAQLVGHAHRRADGQRQHGREQQVVEVERDGDHAHRAARVGEAPREEHQDLVGPPLEAGVEAAGDGQAEEQQPRPGRPSWRRARR

SEQ ID NO: 30983 - protein, 95 aa, Zea mays subsp. mays
  peptide (1)..(95): Ceres Seq. ID no. 12365891
  misc_feature (1)..(13): NCBI GI NO: 14253159 NR Description: VMP3 protein [Volvox carteri f. nagariensis]
  misc_feature (1)..(76): NCBI GI NO: 20138131 NR Description: Vegetative cell wall protein gp1 precursor
  misc_feature (1)..(72): NCBI GI NO: 22962211 NR Description: hypothetical protein [Rhodopseudomonas palustris]
  misc_feature (1)..(76): NCBI GI NO: 27375632 NR Description: blr0521 [Bradyrhizobium japonicum]
  misc_feature (1)..(76): NCBI GI NO: 22962211 NR Description: hypothetical protein [Rhodopseudomonas palustris]
  misc_feature (1)..(81): NCBI GI NO: 27375632 NR Description: blr0521 [Bradyrhizobium japonicum]
  misc_feature (1)..(18): NCBI GI NO: 38345019 NR Description: OSJNBa0029H02.3
  misc_feature (1)..(76): NCBI GI NO: 20138131 NR Description: Vegetative cell wall protein gp1 precursor
  misc_feature (1)..(92): NCBI GI NO: 15419013 NR Description: subtilisin-like protein [Toxoplasma gondii]
  misc_feature (1)..(74): NCBI GI NO: 6523547 NR Description: hydroxyproline-rich glycoprotein DZ-HRGP
MPPHTLSGKLTTSSSAITFMARPTPSRTSGLRVYMRAHGRRAASMSRPPARPATAPPATDTLAARRAVAASPAPSSLDTRTDALTDSDSMAANSR

SEQ ID NO: 30984 - DNA, 1529 bp, Zea mays subsp. mays
  misc_feature (1)..(1529): Ceres Seq. ID no. 12373122
agtaagccacacacagacagtcagacacaggcacacagcgagggagtcctctcctcccccagaaaaggaaaagacgcattccgcacacgcgcggctgggtgtcgaggccgggagacgcggtgaagctagctgctagcgtagccgcgcgcggcgggcgggctcgagctgcgctgtcgctccatgtcggccaccgccgagagcggtggggatctgtcggcggcgcgccgccggtgggatctcaccaacaagggggccgagagcaccccaattttgaaagatgctgtggaaatatctacagatgaagaatcagatggtgttgttacatgccatccgaatggtaacactgatggatgcgaagaaactattagtggcagtcacgatgatgatagcccagaaggccaggaaactagttccattaaggaacctgatgtagaaggtgacacacaggaagacaaacgtgtaaatcaagattcactcaagttgattgatgaagagtctgctcctcccaagtccccagcaaaatccgcgactgcaagttctagatcggagaggcctaaacgtgttgttccccgaccattttctctttctaatcaaagaagtttgtttggagtaaatggtggtgtggccaatccattggccaataaggataaatctggtgataaaagtagcatctctccagcaagcatgacaaagaagagtacgcagatggcacttaggaagactttgcagcctgagaaggtatttcatcctctggaagaggactcttgttctgtgacatcctctacaacatcaacaagagctggcagaactaagatgactgttcccgtcgctccttcatttgtgtgtgctaaccgtgctgacaagaggaaggagttctacacaaaattagaggagaaacataaagctttggaagcagagaaggacgaggctgaggccaggaaaaaggatgagcaagacgttgctttaaaacaactaaggaagtcattggtgattagagcgaaacccatgccgagcttctatcaagaagggcccccaccaaaggctgaactgaagaaggtgcctcctacccgtgccaaatcgccaaagtttacaagttcaaggagaaggagctgcagtgatacaccattgacacctggcggggaaaataccaacgcaacatctacccggccacatcgtcacagcatcgggagtcctagagacgctaacagagtacaacaatgctcgccaaagagcggtgtggcaaccaaaacaagatctgtcaaggctgagctgaaggccctctgaagagcatggagcagccgagtgatgtgtttctctgtacaaaccgaattgtctaaccgtttccatttccatgcatttttgcttctattttatacccaacatctccagcaaaagaaggctgtagggccaatgacgttgttcagcgccgctggaccttatccattttcttacattcgccttgtactcgtaagaactcttggtggcaccatgtgacattccatgtaaattacttgaggatccttgtaggt

SEQ ID NO: 30985 - protein, 367 aa, Zea mays subsp. mays
  peptide (1)..(367): Ceres Seq. ID no. 12373123
  misc_feature (1)..(361): NCBI GI NO: 34897180 NR Description: unknown protein
  misc_feature (201)..(367): NCBI GI NO: 34393229 NR Description: putative seed specific protein
  misc_feature (46)..(361): NCBI GI NO: 21553401 NR Description: unknown [Arabidopsis thaliana]
  misc_feature (46)..(361): NCBI GI NO: 18404945 NR Description: expressed protein; protein id: At1g54460
  misc_feature (15)..(302): NCBI GI NO: 9294199 NR Description: gb|AAF04893
  misc_feature (35)..(302): NCBI GI NO: 15228950 NR Description: unknown protein; protein id: At3g23090.1
  misc_feature (145)..(337): NCBI GI NO: 6175167 NR Description: unknown protein [Arabidopsis thaliana]
  misc_feature (145)..(337): NCBI GI NO: 18396961 NR Description: expressed protein; protein id: At3g04630
  misc_feature (145)..(337): NCBI GI NO: 21618286 NR Description: unknown [Arabidopsis thaliana]
  misc_feature (167)..(337): NCBI GI NO: 30679219 NR Description: expressed protein [Arabidopsis thaliana]
MSATAESGGDLSAARRRWDLTNKGAESTPILKDAVEISTDEESDGVVTCHPNGNTDGCEETISGSHDDDSPEGQETSSIKEPDVEGDTQEDKRVNQDSLKLIDEESAPPKSPAKSATASSRSERPKRVVPRPFSLSNQRSLFGVNGGVANPLANKDKSGDKSSISPASMTKKSTQMALRKTLQPEKVFHPLEEDSCSVTSSTTSTRAGRTKMTVPVAPSFVCANRADKRKEFYTKLEEKHKALEAEKDEAEARKKDEQDVALKQLRKSLVIRAKPMPSFYQEGPPPKAELKKVPPTRAKSPKFTSSRRRSCSDTPLTPGGENTNATSTRPHRHSIGSPRDANRVQQCSPKSGVATKTRSVKAELKAL

SEQ ID NO: 30986 - protein, 199 aa, Zea mays subsp. mays
  peptide (1)..(199): Ceres Seq. ID no. 12373124
  misc_feature (1)..(193): NCBI GI NO: 34897180 NR Description: unknown protein
  misc_feature (33)..(199): NCBI GI NO: 34393229 NR Description: putative seed specific protein
  misc_feature (1)..(193): NCBI GI NO: 21553401 NR Description: unknown [Arabidopsis thaliana]
  misc_feature (1)..(193): NCBI GI NO: 18404945 NR Description: expressed protein; protein id: At1g54460
  misc_feature (1)..(134): NCBI GI NO: 9294199 NR Description: gb|AAF04893
  misc_feature (1)..(134): NCBI GI NO: 15228950 NR Description: unknown protein; protein id: At3g23090.1
  misc_feature (1)..(169): NCBI GI NO: 6175167 NR Description: unknown protein [Arabidopsis thaliana]
  misc_feature (1)..(169): NCBI GI NO: 21618286 NR Description: unknown [Arabidopsis thaliana]
  misc_feature (1)..(169): NCBI GI NO: 18396961 NR Description: expressed protein; protein id: At3g04630
  misc_feature (1)..(169): NCBI GI NO: 30679219 NR Description: expressed protein [Arabidopsis thaliana]
MTKKSTQMALRKTLQPEKVFHPLEEDSCSVTSSTTSTRAGRTKMTVPVAPSFVCANRADKRKEFYTKLEEKHKALEAEKDEAEARKKDEQDVALKQLRKSLVIRAKPMPSFYQEGPPPKAELKKVPPTRAKSPKFTSSRRRSCSDTPLTPGGENTNATSTRPHRHSIGSPRDANRVQQCSPKSGVATKTRSVKAELKAL

SEQ ID NO: 30987 - protein, 192 aa, Zea mays subsp. mays
  peptide (1)..(192): Ceres Seq. ID no. 12373125
  misc_feature (1)..(186): NCBI GI NO: 34897180 NR Description: unknown protein
  misc_feature (26)..(192): NCBI GI NO: 34393229 NR Description: putative seed specific protein
  misc_feature (1)..(186): NCBI GI NO: 21553401 NR Description: unknown [Arabidopsis thaliana]
  misc_feature (1)..(186): NCBI GI NO: 18404945 NR Description: expressed protein; protein id: At1g54460
  misc_feature (1)..(127): NCBI GI NO: 9294199 NR Description: gb|AAF04893
  misc_feature (1)..(127): NCBI GI NO: 15228950 NR Description: unknown protein; protein id: At3g23090.1
  misc_feature (1)..(162): NCBI GI NO: 6175167 NR Description: unknown protein [Arabidopsis thaliana]
  misc_feature (1)..(162): NCBI GI NO: 18396961 NR Description: expressed protein; protein id: At3g04630
  misc_feature (1)..(162): NCBI GI NO: 21618286 NR Description: unknown [Arabidopsis thaliana]
  misc_feature (1)..(162): NCBI GI NO: 30679219 NR Description: expressed protein [Arabidopsis thaliana]
MALRKTLQPEKVFHPLEEDSCSVTSSTTSTRAGRTKMTVPVAPSFVCANRADKRKEFYTKLEEKHKALEAEKDEAEARKKDEQDVALKQLRKSLVIRAKPMPSFYQEGPPPKAELKKVPPTRAKSPKFTSSRRRSCSDTPLTPGGENTNATSTRPHRHSIGSPRDANRVQQCSPKSGVATKTRSVKAELKAL

SEQ ID NO: 30988 - DNA, 1400 bp, Zea mays subsp. mays
  misc_feature (1)..(1400): Ceres Seq. ID no. 12359514
  misc_feature (407)..(407): n is a, c, t, g, unknown, or other
  misc_feature (413)..(413): n is a, c, t, g, unknown, or other
  misc_feature (410)..(410): n is a, c, t, g, unknown, or other
  misc_feature (194)..(194): n is a, c, t, g, unknown, or other
  misc_feature (421)..(421): n is a, c, t, g, unknown, or other
  misc_feature (408)..(408): n is a, c, t, g, unknown, or other
  misc_feature (414)..(414): n is a, c, t, g, unknown, or other
  misc_feature (409)..(409): n is a, c, t, g, unknown, or other
gtagccttccaaccaaaccaacccacgccatcatcttccgtcaatccatccatccgcttgtccctaccacctccaccaaccaaaacccccaaccgccgaggtcaccggcgactccgtcctcgccgcgccgcgccgcgccgtgaggatgtcgttccactaccacgaccacgggctgtccatggacgccgcggcgncggcggccgccgccgccgcgtcgtcgccgaaccctagcggcttctcccccggcatcggcggggagagggagaaggcggccatcgcggcgcacccgctgtacgagcgcctcctggaggcgcacgtcgcctgcctacgcgtcgccacccccgtcgaccagctcccccgcatcgacgcgcagatcgccgcgcgccccccgccgctcgccgcggccnnnnggnncgcggcngccggggccgcggccgcgggaggcccgtccggcggggaggagctcgacctcttcatgacgcactatgtattgctcctttgctcattcaaggaacagctgcagcagcatgtacgtgttcatgcaatggaagcagtgatgggttgctgggagcttgaacaatccttacaaagcctaacaggggcatctccgggtgaaggcactggaggaaccatgtctgacgatgaagataaccaggtggatagtgaagccaacatgttcgatggaaatgatggatcagacggtatgggctttggccccctgatactaacagagggtgaacggtccttagttgagcgtgtacggaaggagctgaagaacgagcttaagcagggttacaaggaaaagcttgtcgatatcagggaagagatcatgcgcaaacgcagggctgggaagcttcctggagataccgcatctgtactgaaagcttggtggcaagctcattccaagtggccgtacccaactgaagacgacaaggccagactggtgcaggaaacggggttgcagctaaagcaaatcaacaactggttcattaaccaacgcaagcggaactggcacagcaacccaacatcctcggctgaaaagaccaagaagaaaaggtgatgatggcccagagcaatcttggcaaaaagctagagatgtccactatactttattatggcgaagtacattctccctcacttcgtaggcaagagggaaaggtatcttgggtgacttgagtggccacctaatgcgcaagtttgacgacgtggtggggctggagttggtagtgacctcagcagtatagcattcgctaacgtgatgtgggtgaatcacgtgttgcagtagaaccggcgagcgggaggggggtaatttatgttgtattgtaattgtgttttttattaccttgtaatgatattttagggagaatcccaagattcatattcgcatgttttgtcgtccg

SEQ ID NO: 30989 - protein, 304 aa, Zea mays subsp. mays
  peptide (1)..(304): Ceres Seq. ID no. 12359515
  misc_feature (97)..(152): Pfam Name: Pfam Description:  KNOX2 domain
  misc_feature (1)..(304): NCBI GI NO: 14149139 NR Description: KNOX family class 2 homeodomain protein
  misc_feature (3)..(304): NCBI GI NO: 33333542 NR Description: knotted 7 [Hordeum vulgare]
  misc_feature (9)..(304): NCBI GI NO: 7446253 NR Description: probable homeobox protein OSH45, splice form OSH44
  misc_feature (9)..(303): NCBI GI NO: 7446252 NR Description: probable homeobox protein OSH45, splice form OSH45
  misc_feature (39)..(303): NCBI GI NO: 15238743 NR Description: KNAT3 homeodomain protein; protein id: At5g25220
  misc_feature (39)..(303): NCBI GI NO: 21554222 NR Description: KNAT3 homeodomain protein [Arabidopsis thaliana]
  misc_feature (39)..(303): NCBI GI NO: 21539535 NR Description: KNAT3 homeodomain protein [Arabidopsis thaliana]
  misc_feature (9)..(304): NCBI GI NO: 3023961 NR Description: Homeobox protein knotted-1 like 3 (KNAP3)
  misc_feature (39)..(304): NCBI GI NO: 20141566 NR Description: Homeobox protein knotted-1 like 4 (KNAT4)
  misc_feature (39)..(304): NCBI GI NO: 1045044 NR Description: KNAT4 homeobox protein [Arabidopsis thaliana]
  misc_feature (17)..(17): Xaa is any aa, unknown or other
  misc_feature (88)..(88): Xaa is any aa, unknown or other
  misc_feature (89)..(89): Xaa is any aa, unknown or other
  misc_feature (90)..(90): Xaa is any aa, unknown or other
  misc_feature (92)..(92): Xaa is any aa, unknown or other
MSFHYHDHGLSMDAAAXAAAAAASSPNPSGFSPGIGGEREKAAIAAHPLYERLLEAHVACLRVATPVDQLPRIDAQIAARPPPLAAAXXXAXAGAAAAGGPSGGEELDLFMTHYVLLLCSFKEQLQQHVRVHAMEAVMGCWELEQSLQSLTGASPGEGTGGTMSDDEDNQVDSEANMFDGNDGSDGMGFGPLILTEGERSLVERVRKELKNELKQGYKEKLVDIREEIMRKRRAGKLPGDTASVLKAWWQAHSKWPYPTEDDKARLVQETGLQLKQINNWFINQRKRNWHSNPTSSAEKTKKKR

SEQ ID NO: 30990 - protein, 293 aa, Zea mays subsp. mays
  peptide (1)..(293): Ceres Seq. ID no. 12359516
  misc_feature (86)..(141): Pfam Name: Pfam Description:  KNOX2 domain
  misc_feature (1)..(293): NCBI GI NO: 14149139 NR Description: KNOX family class 2 homeodomain protein
  misc_feature (1)..(293): NCBI GI NO: 33333542 NR Description: knotted 7 [Hordeum vulgare]
  misc_feature (1)..(293): NCBI GI NO: 7446253 NR Description: probable homeobox protein OSH45, splice form OSH44
  misc_feature (1)..(292): NCBI GI NO: 7446252 NR Description: probable homeobox protein OSH45, splice form OSH45
  misc_feature (28)..(292): NCBI GI NO: 15238743 NR Description: KNAT3 homeodomain protein; protein id: At5g25220
  misc_feature (28)..(292): NCBI GI NO: 21539535 NR Description: KNAT3 homeodomain protein [Arabidopsis thaliana]
  misc_feature (28)..(292): NCBI GI NO: 21554222 NR Description: KNAT3 homeodomain protein [Arabidopsis thaliana]
  misc_feature (1)..(293): NCBI GI NO: 3023961 NR Description: Homeobox protein knotted-1 like 3 (KNAP3)
  misc_feature (28)..(293): NCBI GI NO: 20141566 NR Description: Homeobox protein knotted-1 like 4 (KNAT4)
  misc_feature (28)..(293): NCBI GI NO: 1045044 NR Description: KNAT4 homeobox protein [Arabidopsis thaliana]
  misc_feature (6)..(6): Xaa is any aa, unknown or other
  misc_feature (77)..(77): Xaa is any aa, unknown or other
  misc_feature (78)..(78): Xaa is any aa, unknown or other
  misc_feature (79)..(79): Xaa is any aa, unknown or other
  misc_feature (81)..(81): Xaa is any aa, unknown or other
MDAAAXAAAAAASSPNPSGFSPGIGGEREKAAIAAHPLYERLLEAHVACLRVATPVDQLPRIDAQIAARPPPLAAAXXXAXAGAAAAGGPSGGEELDLFMTHYVLLLCSFKEQLQQHVRVHAMEAVMGCWELEQSLQSLTGASPGEGTGGTMSDDEDNQVDSEANMFDGNDGSDGMGFGPLILTEGERSLVERVRKELKNELKQGYKEKLVDIREEIMRKRRAGKLPGDTASVLKAWWQAHSKWPYPTEDDKARLVQETGLQLKQINNWFINQRKRNWHSNPTSSAEKTKKKR

SEQ ID NO: 30991 - protein, 194 aa, Zea mays subsp. mays
  peptide (1)..(194): Ceres Seq. ID no. 12359517
  misc_feature (1)..(42): Pfam Name: Pfam Description:  KNOX2 domain
  misc_feature (1)..(194): NCBI GI NO: 14149139 NR Description: KNOX family class 2 homeodomain protein
  misc_feature (1)..(194): NCBI GI NO: 33333542 NR Description: knotted 7 [Hordeum vulgare]
  misc_feature (1)..(194): NCBI GI NO: 7446253 NR Description: probable homeobox protein OSH45, splice form OSH44
  misc_feature (1)..(193): NCBI GI NO: 7446252 NR Description: probable homeobox protein OSH45, splice form OSH45
  misc_feature (1)..(193): NCBI GI NO: 15238743 NR Description: KNAT3 homeodomain protein; protein id: At5g25220
  misc_feature (1)..(193): NCBI GI NO: 21554222 NR Description: KNAT3 homeodomain protein [Arabidopsis thaliana]
  misc_feature (1)..(193): NCBI GI NO: 21539535 NR Description: KNAT3 homeodomain protein [Arabidopsis thaliana]
  misc_feature (1)..(194): NCBI GI NO: 3023961 NR Description: Homeobox protein knotted-1 like 3 (KNAP3)
  misc_feature (1)..(194): NCBI GI NO: 20141566 NR Description: Homeobox protein knotted-1 like 4 (KNAT4)
  misc_feature (1)..(194): NCBI GI NO: 1045044 NR Description: KNAT4 homeobox protein [Arabidopsis thaliana]
MTHYVLLLCSFKEQLQQHVRVHAMEAVMGCWELEQSLQSLTGASPGEGTGGTMSDDEDNQVDSEANMFDGNDGSDGMGFGPLILTEGERSLVERVRKELKNELKQGYKEKLVDIREEIMRKRRAGKLPGDTASVLKAWWQAHSKWPYPTEDDKARLVQETGLQLKQINNWFINQRKRNWHSNPTSSAEKTKKKR

SEQ ID NO: 30992 - DNA, 1611 bp, Zea mays subsp. mays
  misc_feature (1)..(1611): Ceres Seq. ID no. 12372832
agcgtccgtttcctcgaggctcgaccagtcgagcttgagaaaaatcaaagctcccacctacctcgagacccaggacgcgtggagagcggtgccaaaccaccatggcgatcctgctcctcttgctcttcgttttgtcctcagcttcagctgatgagtacggggaagagctgctgcagcgcgcgtggggggagcgggagtggatggtgagcgtgcggcggcgcatccacgcgcatccggagctcgcgttccgggagcaccgcaccgcagccctcgtccgcgaggagctcgagcacctcggccttcccgcccgcgccgtcgccggaacgggcgtcgtcgctgatgtaggttccggggcgccccccttcgtggcgctccgcgccgacatggacgcgctcccgctccaggaattagtggagtgggagcataagagcaaggtggacggagtgatgcacgcctgcgggcacgatgtccacacagcgatgcttctgggagcagcaaagttactcagccagcgtaaggatcagctcaagggaacagtgagactcctttttcaacctgccgaggaaagtggtgcaggtgcatctcatatgataagagaaggggttctggacggtgttgaagccatatttgcaatgcatgttgactatcgtataccaactggtgtaatagcagctcacccaggacctacacaagcggctgtatgtttcttcgaagcaaaaattgaaggtaaaactgggatggctgaaaccccacacttaaatgtggaccctgttgtcgtcacatcattggccatcctgtccctgcagcagcttatttccagagaagatgatcctcttcacagccaagtggtctcggttacctatgtgaaagctggaaaagcccttgatgctacccctaaccttgttgaatttggaggtactttgaggagcctcaccactgaaggcctttactgtctgcaaagaagggttaaagaggtggtagaagggcaggcggctgtgcataggtgcaagggagctgtcgaaataaaggttgaggactacccggtgtaccctgccgttgtgaacgacgagaagctgcatcgacatgtagaggatgtcggcagaggcttgcttggcccgggcaaggtgagaccaggggaaaagatcatggccggcgaagacttcgctttctaccagcagcttgttcccggcgttatgtttggcatcggcattagaaacgaggaagctggttctgttcactcggctcacaacccctatttcttcgtcgatgaggacgtcattcctgttggggctgctttgcatgctgccattgcagaactgtacttcactgacggccccctctttcgacaaagaagactagtggtttctcgttcgtgcgtattttgtctggatcagtccgaacagatggcttcagctggccaatcagatctgaacatctggtccaccatgctgatcagccgcgctccgcggccagtatcaacctccaactatttttccctctgtaaccagaaacactacacatgtttctcaaccctacagtggtctagctattttattctctctttaaacagaaacactgcaaggttcctaaccttatagtgggatttagaac

SEQ ID NO: 30993 - protein, 498 aa, Zea mays subsp. mays
  peptide (1)..(498): Ceres Seq. ID no. 12372833
  misc_feature (31)..(407): Pfam Name: Pfam Description:  Peptidase family M20/M25/M40
  misc_feature (3)..(410): NCBI GI NO: 15239551 NR Description: IAA-amino acid hydrolase homolog ILL3(gb|AAC31939
  misc_feature (3)..(409): NCBI GI NO: 34900784 NR Description: IAA amidohydrolase-like protein~contains ESTsAU057861
  misc_feature (11)..(407): NCBI GI NO: 28376718 NR Description: putative  IAA amidohydrolase
  misc_feature (20)..(407): NCBI GI NO: 34900780 NR Description: putative IAA amidohydrolase
  misc_feature (12)..(407): NCBI GI NO: 34900782 NR Description: putative IAA amidohydrolase
  misc_feature (20)..(407): NCBI GI NO: 28376716 NR Description: putative  IAA amidohydrolase
  misc_feature (1)..(410): NCBI GI NO: 34910396 NR Description: putative IAA-Ala hydrolase
  misc_feature (1)..(410): NCBI GI NO: 27948556 NR Description: IAA-amino acid hydrolase
  misc_feature (1)..(410): NCBI GI NO: 34914096 NR Description: putative IAA-Ala hydrolase
  misc_feature (32)..(410): NCBI GI NO: 18129692 NR Description: IAA amidohydrolase [Arabidopsis suecica]
MAILLLLLFVLSSASADEYGEELLQRAWGEREWMVSVRRRIHAHPELAFREHRTAALVREELEHLGLPARAVAGTGVVADVGSGAPPFVALRADMDALPLQELVEWEHKSKVDGVMHACGHDVHTAMLLGAAKLLSQRKDQLKGTVRLLFQPAEESGAGASHMIREGVLDGVEAIFAMHVDYRIPTGVIAAHPGPTQAAVCFFEAKIEGKTGMAETPHLNVDPVVVTSLAILSLQQLISREDDPLHSQVVSVTYVKAGKALDATPNLVEFGGTLRSLTTEGLYCLQRRVKEVVEGQAAVHRCKGAVEIKVEDYPVYPAVVNDEKLHRHVEDVGRGLLGPGKVRPGEKIMAGEDFAFYQQLVPGVMFGIGIRNEEAGSVHSAHNPYFFVDEDVIPVGAALHAAIAELYFTDGPLFRQRRLVVSRSCVFCLDQSEQMASAGQSDLNIWSTMLISRAPRPVSTSNYFSLCNQKHYTCFSTLQWSSYFILSLNRNTARFLTL

SEQ ID NO: 30994 - protein, 465 aa, Zea mays subsp. mays
  peptide (1)..(465): Ceres Seq. ID no. 12372834
  misc_feature (1)..(374): Pfam Name: Pfam Description:  Peptidase family M20/M25/M40
  misc_feature (1)..(377): NCBI GI NO: 15239551 NR Description: IAA-amino acid hydrolase homolog ILL3(gb|AAC31939
  misc_feature (1)..(376): NCBI GI NO: 34900784 NR Description: IAA amidohydrolase-like protein~contains ESTsAU057861
  misc_feature (1)..(374): NCBI GI NO: 28376718 NR Description: putative  IAA amidohydrolase
  misc_feature (1)..(374): NCBI GI NO: 34900780 NR Description: putative IAA amidohydrolase
  misc_feature (1)..(374): NCBI GI NO: 34900782 NR Description: putative IAA amidohydrolase
  misc_feature (1)..(374): NCBI GI NO: 28376716 NR Description: putative  IAA amidohydrolase
  misc_feature (1)..(377): NCBI GI NO: 34910396 NR Description: putative IAA-Ala hydrolase
  misc_feature (1)..(377): NCBI GI NO: 27948556 NR Description: IAA-amino acid hydrolase
  misc_feature (1)..(377): NCBI GI NO: 34914096 NR Description: putative IAA-Ala hydrolase
  misc_feature (1)..(377): NCBI GI NO: 18129692 NR Description: IAA amidohydrolase [Arabidopsis suecica]
MVSVRRRIHAHPELAFREHRTAALVREELEHLGLPARAVAGTGVVADVGSGAPPFVALRADMDALPLQELVEWEHKSKVDGVMHACGHDVHTAMLLGAAKLLSQRKDQLKGTVRLLFQPAEESGAGASHMIREGVLDGVEAIFAMHVDYRIPTGVIAAHPGPTQAAVCFFEAKIEGKTGMAETPHLNVDPVVVTSLAILSLQQLISREDDPLHSQVVSVTYVKAGKALDATPNLVEFGGTLRSLTTEGLYCLQRRVKEVVEGQAAVHRCKGAVEIKVEDYPVYPAVVNDEKLHRHVEDVGRGLLGPGKVRPGEKIMAGEDFAFYQQLVPGVMFGIGIRNEEAGSVHSAHNPYFFVDEDVIPVGAALHAAIAELYFTDGPLFRQRRLVVSRSCVFCLDQSEQMASAGQSDLNIWSTMLISRAPRPVSTSNYFSLCNQKHYTCFSTLQWSSYFILSLNRNTARFLTL

SEQ ID NO: 30995 - protein, 404 aa, Zea mays subsp. mays
  peptide (1)..(404): Ceres Seq. ID no. 12372835
  misc_feature (1)..(313): Pfam Name: Pfam Description:  Peptidase family M20/M25/M40
  misc_feature (1)..(316): NCBI GI NO: 15239551 NR Description: IAA-amino acid hydrolase homolog ILL3(gb|AAC31939
  misc_feature (1)..(315): NCBI GI NO: 34900784 NR Description: IAA amidohydrolase-like protein~contains ESTsAU057861
  misc_feature (1)..(313): NCBI GI NO: 28376718 NR Description: putative  IAA amidohydrolase
  misc_feature (1)..(313): NCBI GI NO: 34900780 NR Description: putative IAA amidohydrolase
  misc_feature (1)..(313): NCBI GI NO: 34900782 NR Description: putative IAA amidohydrolase
  misc_feature (1)..(313): NCBI GI NO: 28376716 NR Description: putative  IAA amidohydrolase
  misc_feature (1)..(316): NCBI GI NO: 34910396 NR Description: putative IAA-Ala hydrolase
  misc_feature (1)..(316): NCBI GI NO: 27948556 NR Description: IAA-amino acid hydrolase
  misc_feature (1)..(316): NCBI GI NO: 34914096 NR Description: putative IAA-Ala hydrolase
  misc_feature (1)..(316): NCBI GI NO: 18129692 NR Description: IAA amidohydrolase [Arabidopsis suecica]
MDALPLQELVEWEHKSKVDGVMHACGHDVHTAMLLGAAKLLSQRKDQLKGTVRLLFQPAEESGAGASHMIREGVLDGVEAIFAMHVDYRIPTGVIAAHPGPTQAAVCFFEAKIEGKTGMAETPHLNVDPVVVTSLAILSLQQLISREDDPLHSQVVSVTYVKAGKALDATPNLVEFGGTLRSLTTEGLYCLQRRVKEVVEGQAAVHRCKGAVEIKVEDYPVYPAVVNDEKLHRHVEDVGRGLLGPGKVRPGEKIMAGEDFAFYQQLVPGVMFGIGIRNEEAGSVHSAHNPYFFVDEDVIPVGAALHAAIAELYFTDGPLFRQRRLVVSRSCVFCLDQSEQMASAGQSDLNIWSTMLISRAPRPVSTSNYFSLCNQKHYTCFSTLQWSSYFILSLNRNTARFLTL

SEQ ID NO: 30996 - DNA, 1283 bp, Zea mays subsp. mays
  misc_feature (1)..(1283): Ceres Seq. ID no. 12407025
acaggaggcgcggagcaggaggagacacatggcagatgaaggcgaggaggcggtgccgccggccgcgatggtgggggaggcgccaacagaggactttgggctgcccgctgagctgatggccgtgctaccatcggacccgttcgctcagctggacgtggcgcgcaagatcacctccatcgcgctctcgcaccgcctcggccgcctcgaggccgaggcggcgcgcctgcgctcgcagctcgccgagcgtgacgccgaggccgaggagctccgcgagcgcgtcgagcagctcgactccgcgctcgccgtcgccaccgggccgcctccgccgcgctgaggaggaaaaggagacactgctgcgggacaactctgcgctgtccaacaccgttaggaagctgaacagagatgtcgccaagttggaagttttcaaaaagacacttgtgcagtcgctccaggaagatgacagcagtgataatactgctcccagggcaagcgttgcagcaacttcaaacttctctgcgccatcagatgaagattctgcatttccaacttccaaatcatcacagatttcagaaactgcgagttcagtctcagaggaaaatagccaagttgaaccagatgcacctaggccaccaccccgtccacatgtatttttgccgtcatacaacagcacaccaaggagaactcccccagactcacctccaaggcgttatgcatcggtatcaccgccgaggcgacattcaatctccgttacgtcgatgaatatgtttaatgacaggtcctcaggcttttctagtcagcatagctctccatttgaccctccaagtcaaacaggacgaacaagagttgatggaaaggagttctttcgtcatgtcagaaatcggttgtcgtatgagcagtttggtgcattcctggctaatgtgaaggagctgaacgcacacaggcagaccagagaggataccttaagaaaggctgatgagatctttggtcctgaaaacaaggacctgtacaccgtttttgagagcctaataactcgcaacattcgctaatctcctcaagggttgaagcattaccaatgattactagtgattcatgttttaccggtatattttggttacaatgttcaacactttttttgtatttgaagtctgtagtctgttgtggattcttggtatatagtctatagttctttcttttttttttcatgctaatgtccatgtagagtcctctgtttctatgtaagctacaacttatattctaatacaaatgttgtctgatatttcttg

SEQ ID NO: 30997 - protein, 118 aa, Zea mays subsp. mays
  peptide (1)..(118): Ceres Seq. ID no. 12407026
MSPSWKFSKRHLCSRSRKMTAVIILLPGQALQQLQTSLRHQMKILHFQLPNHHRFQKLRVQSQRKIAKLNQMHLGHHPVHMYFCRHTTAHQGELPQTHLQGVMHRYHRRGDIQSPLRR

SEQ ID NO: 30998 - protein, 110 aa, Zea mays subsp. mays
  peptide (1)..(110): Ceres Seq. ID no. 12407027
  misc_feature (12)..(103): NCBI GI NO: 18414476 NR Description: Expressed protein; protein id: At4g15545
  misc_feature (29)..(103): NCBI GI NO: 7485048 NR Description: hypothetical protein - Arabidopsis thaliana
  misc_feature (31)..(97): NCBI GI NO: 30684901 NR Description: expressed protein [Arabidopsis thaliana]
  misc_feature (31)..(97): NCBI GI NO: 15222835 NR Description: hypothetical protein; protein id: At1g56080.1
  misc_feature (42)..(104): NCBI GI NO: 23613663 NR Description: hypothetical protein, conserved
  misc_feature (42)..(104): NCBI GI NO: 23489944 NR Description: hypothetical protein [Plasmodium yoelii yoelii]
  misc_feature (31)..(103): NCBI GI NO: 38344261 NR Description: OSJNBa0008M17.14
  misc_feature (17)..(100): NCBI GI NO: 34909876 NR Description: B1143G03.2
  misc_feature (31)..(97): NCBI GI NO: 25404089 NR Description: hypothetical protein T6H22.12
QEARSRRRHMADEGEEAVPPAAMVGEAPTEDFGLPAELMAVLPSDPFAQLDVARKITSIALSHRLGRLEAEAARLRSQLAERDAEAEELRERVEQLDSALAVATGPPPPR

SEQ ID NO: 30999 - protein, 101 aa, Zea mays subsp. mays
  peptide (1)..(101): Ceres Seq. ID no. 12407028
  misc_feature (3)..(94): NCBI GI NO: 18414476 NR Description: Expressed protein; protein id: At4g15545
  misc_feature (20)..(94): NCBI GI NO: 7485048 NR Description: hypothetical protein - Arabidopsis thaliana
  misc_feature (22)..(88): NCBI GI NO: 30684901 NR Description: expressed protein [Arabidopsis thaliana]
  misc_feature (22)..(88): NCBI GI NO: 15222835 NR Description: hypothetical protein; protein id: At1g56080.1
  misc_feature (33)..(95): NCBI GI NO: 23613663 NR Description: hypothetical protein, conserved
  misc_feature (33)..(95): NCBI GI NO: 23489944 NR Description: hypothetical protein [Plasmodium yoelii yoelii]
  misc_feature (22)..(94): NCBI GI NO: 38344261 NR Description: OSJNBa0008M17.14
  misc_feature (8)..(91): NCBI GI NO: 34909876 NR Description: B1143G03.2
  misc_feature (22)..(88): NCBI GI NO: 25404089 NR Description: hypothetical protein T6H22.12
MADEGEEAVPPAAMVGEAPTEDFGLPAELMAVLPSDPFAQLDVARKITSIALSHRLGRLEAEAARLRSQLAERDAEAEELRERVEQLDSALAVATGPPPPR

SEQ ID NO: 31000 - DNA, 1355 bp, Zea mays subsp. mays
  misc_feature (1)..(1355): Ceres Seq. ID no. 13500460
  misc_feature (1056)..(1056): n is a, c, t, g, unknown, or other
aaaatcaggcagatcgcagtcgcagcaccgaagatggtgagcaggcgcactctcctcgtcatgatggcgacggtagtggttctgcatcggagtcggactctctgcgctgctgcctcggcggctgcagcgccgccggcgacgacgaagcaggcgcggaccccggccctgttcgtgttcggggactccatcgtggacccgggcaacaacaacgccctcaccaccacggtgcgctgcaacttcccgccctacggccaggacttccccggccacaacgccaccggcaggttcagcaacggcagggtgcccagcgacatcgtcgccagccggctgggcatcaaggagcacctgccggcgtacctcggcacggagctcagcgacttcgacctcctcaccggcgtcagcttcgcgtccggcggctgcggcttcgaccccctcaccgccgagctcgtgtccgtgctcaccatggacaaccagctggacctgttcaaggagtacaaggagaagctggagcgcgtcgccagcggcgcccaccgggccgccgacatcgtgtccaggagcctgtacatggtggtcacgggcaccgacgacctcgccaacacctacttcaccacgccgttccgccgcgactacgacctcgagtcctacatcgagttcgtcgtgcagtgcgcctccgacttcatcaagaagctgtacggtctgggcgcgcggcgcatcaacatcgccggcgcgccgcccatcgggtgcgtgccgtcgcagcggaccaacgccggcgggctggagcgggagtgcgtgccgctgtacaaccaggcggccgtcgtgttcaacgcggcgctggagaaggagatcaagcggctcaacggcagcgacgcgctcccggcctccgtgctccagtacatcgacctctacacgccgctgctcgacatgattcagcgccctgacgcctacggattcaacgtcacgaaccgggggtgctgcggcacgggggtgttcgaggtgacgctgacgtgcaaccggtacacggcggaaccctgcagggaccccagcaagttcctcttntgggacacctaccacctcacggagaggggctacgacctcctcatggcgcagatcataaaccgatacggggtctgagatggatgccatgacagcgcagcgctggagatctcggcgctatgacagcgcggtccatgctttcagaggcttttgctgaacttgatcttgtagctgaactacagctccagaaatcaccggtccaatatcatatcccagtttgtgatgggtacatgtcagcggggcacaattgcttgcttgtattgcataaatgaaaactgaatcaggacaggcagtgacagttg

SEQ ID NO: 31001 - protein, 376 aa, Zea mays subsp. mays
  peptide (1)..(376): Ceres Seq. ID no. 13500461
  misc_feature (56)..(368): Pfam Name: Pfam Description:  GDSL-like Lipase/Acylhydrolase
  misc_feature (12)..(375): NCBI GI NO: 37534726 NR Description: putative anter-specific proline-rich protein
  misc_feature (54)..(374): NCBI GI NO: 15222901 NR Description: family II extracellular lipase 3 (EXL3)
  misc_feature (54)..(374): NCBI GI NO: 26449364 NR Description: putative family II lipase EXL3
  misc_feature (54)..(376): NCBI GI NO: 25404994 NR Description: protein T4O12.13 [imported] - Arabidopsis thaliana
  misc_feature (34)..(374): NCBI GI NO: 28393626 NR Description: putative family II extracellular lipase 1 (EXL1)
  misc_feature (34)..(374): NCBI GI NO: 18410954 NR Description: family II extracellular lipase 1 (EXL1)
  misc_feature (11)..(374): NCBI GI NO: 30102970 NR Description: putative lipase/acylhydrolase
  misc_feature (45)..(371): NCBI GI NO: 18394825 NR Description: lipase, putative [Arabidopsis thaliana]
  misc_feature (45)..(371): NCBI GI NO: 21592372 NR Description: anter-specific proline-rich protein APG precursor
  misc_feature (49)..(374): NCBI GI NO: 18406327 NR Description: lipase, putative [Arabidopsis thaliana]
  misc_feature (352)..(352): Xaa is any aa, unknown or other
KIRQIAVAAPKMVSRRTLLVMMATVVVLHRSRTLCAAASAAAAPPATTKQARTPALFVFGDSIVDPGNNNALTTTVRCNFPPYGQDFPGHNATGRFSNGRVPSDIVASRLGIKEHLPAYLGTELSDFDLLTGVSFASGGCGFDPLTAELVSVLTMDNQLDLFKEYKEKLERVASGAHRAADIVSRSLYMVVTGTDDLANTYFTTPFRRDYDLESYIEFVVQCASDFIKKLYGLGARRINIAGAPPIGCVPSQRTNAGGLERECVPLYNQAAVVFNAALEKEIKRLNGSDALPASVLQYIDLYTPLLDMIQRPDAYGFNVTNRGCCGTGVFEVTLTCNRYTAEPCRDPSKFLXWDTYHLTERGYDLLMAQIINRYGV

SEQ ID NO: 31002 - protein, 365 aa, Zea mays subsp. mays
  peptide (1)..(365): Ceres Seq. ID no. 13500462
  misc_feature (45)..(357): Pfam Name: Pfam Description:  GDSL-like Lipase/Acylhydrolase
  misc_feature (1)..(364): NCBI GI NO: 37534726 NR Description: putative anter-specific proline-rich protein
  misc_feature (43)..(363): NCBI GI NO: 15222901 NR Description: family II extracellular lipase 3 (EXL3)
  misc_feature (43)..(363): NCBI GI NO: 26449364 NR Description: putative family II lipase EXL3
  misc_feature (43)..(365): NCBI GI NO: 25404994 NR Description: protein T4O12.13 [imported] - Arabidopsis thaliana
  misc_feature (23)..(363): NCBI GI NO: 28393626 NR Description: putative family II extracellular lipase 1 (EXL1)
  misc_feature (23)..(363): NCBI GI NO: 18410954 NR Description: family II extracellular lipase 1 (EXL1)
  misc_feature (1)..(363): NCBI GI NO: 30102970 NR Description: putative lipase/acylhydrolase
  misc_feature (34)..(360): NCBI GI NO: 18394825 NR Description: lipase, putative [Arabidopsis thaliana]
  misc_feature (34)..(360): NCBI GI NO: 21592372 NR Description: anter-specific proline-rich protein APG precursor
  misc_feature (38)..(363): NCBI GI NO: 18406327 NR Description: lipase, putative [Arabidopsis thaliana]
  misc_feature (341)..(341): Xaa is any aa, unknown or other
MVSRRTLLVMMATVVVLHRSRTLCAAASAAAAPPATTKQARTPALFVFGDSIVDPGNNNALTTTVRCNFPPYGQDFPGHNATGRFSNGRVPSDIVASRLGIKEHLPAYLGTELSDFDLLTGVSFASGGCGFDPLTAELVSVLTMDNQLDLFKEYKEKLERVASGAHRAADIVSRSLYMVVTGTDDLANTYFTTPFRRDYDLESYIEFVVQCASDFIKKLYGLGARRINIAGAPPIGCVPSQRTNAGGLERECVPLYNQAAVVFNAALEKEIKRLNGSDALPASVLQYIDLYTPLLDMIQRPDAYGFNVTNRGCCGTGVFEVTLTCNRYTAEPCRDPSKFLXWDTYHLTERGYDLLMAQIINRYGV

SEQ ID NO: 31003 - protein, 356 aa, Zea mays subsp. mays
  peptide (1)..(356): Ceres Seq. ID no. 13500463
  misc_feature (36)..(348): Pfam Name: Pfam Description:  GDSL-like Lipase/Acylhydrolase
  misc_feature (1)..(355): NCBI GI NO: 37534726 NR Description: putative anter-specific proline-rich protein
  misc_feature (34)..(354): NCBI GI NO: 15222901 NR Description: family II extracellular lipase 3 (EXL3)
  misc_feature (34)..(354): NCBI GI NO: 26449364 NR Description: putative family II lipase EXL3
  misc_feature (34)..(356): NCBI GI NO: 25404994 NR Description: protein T4O12.13 [imported] - Arabidopsis thaliana
  misc_feature (14)..(354): NCBI GI NO: 28393626 NR Description: putative family II extracellular lipase 1 (EXL1)
  misc_feature (14)..(354): NCBI GI NO: 18410954 NR Description: family II extracellular lipase 1 (EXL1)
  misc_feature (1)..(354): NCBI GI NO: 30102970 NR Description: putative lipase/acylhydrolase
  misc_feature (25)..(351): NCBI GI NO: 18394825 NR Description: lipase, putative [Arabidopsis thaliana]
  misc_feature (25)..(351): NCBI GI NO: 21592372 NR Description: anter-specific proline-rich protein APG precursor
  misc_feature (29)..(354): NCBI GI NO: 18406327 NR Description: lipase, putative [Arabidopsis thaliana]
  misc_feature (332)..(332): Xaa is any aa, unknown or other
MMATVVVLHRSRTLCAAASAAAAPPATTKQARTPALFVFGDSIVDPGNNNALTTTVRCNFPPYGQDFPGHNATGRFSNGRVPSDIVASRLGIKEHLPAYLGTELSDFDLLTGVSFASGGCGFDPLTAELVSVLTMDNQLDLFKEYKEKLERVASGAHRAADIVSRSLYMVVTGTDDLANTYFTTPFRRDYDLESYIEFVVQCASDFIKKLYGLGARRINIAGAPPIGCVPSQRTNAGGLERECVPLYNQAAVVFNAALEKEIKRLNGSDALPASVLQYIDLYTPLLDMIQRPDAYGFNVTNRGCCGTGVFEVTLTCNRYTAEPCRDPSKFLXWDTYHLTERGYDLLMAQIINRYGV

SEQ ID NO: 31004 - DNA, 1261 bp, Zea mays subsp. mays
  misc_feature (1)..(1261): Ceres Seq. ID no. 12355390
gacgccactcccacctctcttcttctctttcccttcgcattaatggccgctctctccctatcccctttcgtctcgctctcggagtaggacactcgcccgcttccggcttaaccttcaagattctccctcctcctcctacttcttcccgcttgggcgggcgcggcaccttccggttctgggcctcctatatatatacgcgcgcgaccgtcccccttccatactccctagcatgctcggctcgcaccccggattgatcgagctcgcccgtcgccgcgatggattcggtgccttccccctcctcttctacccgggccaccgctgctcccggtccctgctgccgctttgacgcgctgcggagggcgtgcgccaggcacgccgccgccgccgcgcgggccgccgggtgggcgctcggcgcgctgctcacctgcgtcttcgccgtcgtgggctcactcgtcggaatcttcattggtgccttcatggggatgtctacagaaagcggcatgttccgcggggctggtgtcggagcagtctcgggagcagtcttctccattgaggctgttgagtcctgcatcgagatttggaggtccagccattcgggaaaatacagcattctctatgtgctggacatcatctctagcctcttcagcggaagaattgtgtgggagaaagtcagtccagcgctacagcgtgcagtgcaaagccagatgagtctaatgagcacaccgttcatcgacaacaatgaccttttcgaaactggcagtacaggaggcatgtcaagggctctgattgataggatcccaaagatgaggttcagtgctgcaagcaattgtgacaaggaaactgatagcagctgctgctcagtctgcctgcaggattttggagcacagcaatttgtgagggccctgcctcagtgccaacacatattccatgtgcggtgcatcgacaactggctccttcggcacgcatcctgcccactatgccgggccggcgttcatattgaccatatacatatgtaaataaactcgcagggtggcacctggtgtattttcatagtgaatacccgtgctcctgttggatatcacaagtatagctggctgtatacataggttttctcctttttttttttgttacttctccggtcttatgtggggctatgctttcagctgcacgtttttgtcgaagtaatacctggattggctggatatgtacatcttgagaacggattgactaacaagctccctgaattatggtcctgtgtgct

SEQ ID NO: 31005 - protein, 246 aa, Zea mays subsp. mays
  peptide (1)..(246): Ceres Seq. ID no. 12355391
  misc_feature (1)..(246): NCBI GI NO: 33146606 NR Description: putative NEP1-interacting protein 2
  misc_feature (46)..(239): NCBI GI NO: 34901682 NR Description: P0434A03.5
  misc_feature (1)..(64): NCBI GI NO: 34901682 NR Description: P0434A03.5
  misc_feature (68)..(246): NCBI GI NO: 33146607 NR Description: putative NEP1-interacting protein 2
  misc_feature (70)..(246): NCBI GI NO: 29367571 NR Description: unknown [Oryza sativa (japonica cultivar-group)]
  misc_feature (1)..(239): NCBI GI NO: 37536572 NR Description: hypothetical protein
  misc_feature (24)..(239): NCBI GI NO: 30680091 NR Description: expressed protein [Arabidopsis thaliana]
  misc_feature (24)..(239): NCBI GI NO: 26452210 NR Description: unknown protein [Arabidopsis thaliana]
  misc_feature (24)..(234): NCBI GI NO: 25411815 NR Description: hypothetical protein At2g17730
  misc_feature (24)..(236): NCBI GI NO: 26451101 NR Description: unknown protein [Arabidopsis thaliana]
MDSVPSPSSSTRATAAPGPCCRFDALRRACARHAAAAARAAGWALGALLTCVFAVVGSLVGIFIGAFMGMSTESGMFRGAGVGAVSGAVFSIEAVESCIEIWRSSHSGKYSILYVLDIISSLFSGRIVWEKVSPALQRAVQSQMSLMSTPFIDNNDLFETGSTGGMSRALIDRIPKMRFSAASNCDKETDSSCCSVCLQDFGAQQFVRALPQCQHIFHVRCIDNWLLRHASCPLCRAGVHIDHIHM

SEQ ID NO: 31006 - protein, 179 aa, Zea mays subsp. mays
  peptide (1)..(179): Ceres Seq. ID no. 12355392
  misc_feature (1)..(179): NCBI GI NO: 33146606 NR Description: putative NEP1-interacting protein 2
  misc_feature (1)..(172): NCBI GI NO: 34901682 NR Description: P0434A03.5
  misc_feature (1)..(179): NCBI GI NO: 33146607 NR Description: putative NEP1-interacting protein 2
  misc_feature (3)..(179): NCBI GI NO: 29367571 NR Description: unknown [Oryza sativa (japonica cultivar-group)]
  misc_feature (1)..(172): NCBI GI NO: 37536572 NR Description: hypothetical protein
  misc_feature (1)..(172): NCBI GI NO: 30680091 NR Description: expressed protein [Arabidopsis thaliana]
  misc_feature (1)..(172): NCBI GI NO: 26452210 NR Description: unknown protein [Arabidopsis thaliana]
  misc_feature (1)..(167): NCBI GI NO: 25411815 NR Description: hypothetical protein At2g17730
  misc_feature (1)..(169): NCBI GI NO: 26451101 NR Description: unknown protein [Arabidopsis thaliana]
  misc_feature (1)..(169): NCBI GI NO: 18855037 NR Description: putative zinc finger protein [Oryza sativa]
MGMSTESGMFRGAGVGAVSGAVFSIEAVESCIEIWRSSHSGKYSILYVLDIISSLFSGRIVWEKVSPALQRAVQSQMSLMSTPFIDNNDLFETGSTGGMSRALIDRIPKMRFSAASNCDKETDSSCCSVCLQDFGAQQFVRALPQCQHIFHVRCIDNWLLRHASCPLCRAGVHIDHIHM

SEQ ID NO: 31007 - protein, 177 aa, Zea mays subsp. mays
  peptide (1)..(177): Ceres Seq. ID no. 12355393
  misc_feature (1)..(177): NCBI GI NO: 33146606 NR Description: putative NEP1-interacting protein 2
  misc_feature (1)..(170): NCBI GI NO: 34901682 NR Description: P0434A03.5
  misc_feature (1)..(177): NCBI GI NO: 33146607 NR Description: putative NEP1-interacting protein 2
  misc_feature (1)..(177): NCBI GI NO: 29367571 NR Description: unknown [Oryza sativa (japonica cultivar-group)]
  misc_feature (1)..(170): NCBI GI NO: 37536572 NR Description: hypothetical protein
  misc_feature (1)..(170): NCBI GI NO: 30680091 NR Description: expressed protein [Arabidopsis thaliana]
  misc_feature (1)..(170): NCBI GI NO: 26452210 NR Description: unknown protein [Arabidopsis thaliana]
  misc_feature (1)..(165): NCBI GI NO: 25411815 NR Description: hypothetical protein At2g17730
  misc_feature (1)..(167): NCBI GI NO: 26451101 NR Description: unknown protein [Arabidopsis thaliana]
  misc_feature (1)..(167): NCBI GI NO: 18855037 NR Description: putative zinc finger protein [Oryza sativa]
MSTESGMFRGAGVGAVSGAVFSIEAVESCIEIWRSSHSGKYSILYVLDIISSLFSGRIVWEKVSPALQRAVQSQMSLMSTPFIDNNDLFETGSTGGMSRALIDRIPKMRFSAASNCDKETDSSCCSVCLQDFGAQQFVRALPQCQHIFHVRCIDNWLLRHASCPLCRAGVHIDHIHM

SEQ ID NO: 31008 - DNA, 1085 bp, Zea mays subsp. mays
  misc_feature (1)..(1085): Ceres Seq. ID no. 12346342
  misc_feature (744)..(744): n is a, c, t, g, unknown, or other
acacatcctcctccccccttcgtctctctctccctctctctctctgcctgcgcgcctgagagctgccaccgccaaggcgaaacggccgtcgccgcatgctgcggctgagctagagacgagaggcgagatggcggccgaggcgctggggttcatggcgcggggagccaccggcgggagggcggcggagctcgtcaccagggacttcctcggcgggtgcgccgccgccgaagacgacgccagggacgcgtccgccaggaatgacgccgtgcccgcgagggtgcaccagcagaagcacgcgtgcccggcggcgccgagggacctgaacctgttcccggtagccgccaccacgaagccctgcgccgcgacggcggcagcggcagcggcaccagcggtcgcgggcggcgccacggctacgtaccacagcgtgtgcacgatcgagaaggtgaagacggccctggagcggttcgagcgcggcaggcagcaccagtccccgcacccgcaccagcagcagcagcacagcggcgcgggcgcgtccccgtcgtcgtcttccgtgaccacgtcctccgtgaagcgccgcggcggcggcggcggcggcggcggcggcgtggagcagggcgacggctgcgactcgccctccggcggcgggatggtggccgcggcgtgccccaggtgcttcctgtacgtgctaatctcccggagcgacccgcggtgcccgcgctgcgagtcccacgtcccggccccgcngcgccagcgccggccgcgagcaagaagccgcggatcgacctcaacgtcggctacctgggcacatagcttgtggtttaggcatatggggcgatggcgtagcctcctagatggagcggctgccgtctcctaccgtaccgtacgtgacgccataaattttgcttaggctcgtgtaatgtgatgacccacggaccgagtcgggtacgtaggagtacgtagacaggggaggggggcgccgttttttgaactgaaacagaaatgcatgccctcccctgtcaggaaatttatggccgatcagacaccgcatacaagaacatgaatgaatggtgacactgctttctgtt

SEQ ID NO: 31009 - protein, 301 aa, Zea mays subsp. mays
  peptide (1)..(301): Ceres Seq. ID no. 12346343
  misc_feature (54)..(260): NCBI GI NO: 38345608 NR Description: OSJNBa0093O08.10
  misc_feature (130)..(260): NCBI GI NO: 5852085 NR Description: zwh0008.1 [Oryza sativa (indica cultivar-group)]
  misc_feature (173)..(256): NCBI GI NO: 34908532 NR Description: P0423B08.15
  misc_feature (209)..(266): NCBI GI NO: 32479729 NR Description: OJ991214_12.5
  misc_feature (129)..(241): NCBI GI NO: 38605781 NR Description: OSJNBa0044K18.24
  misc_feature (248)..(248): Xaa is any aa, unknown or other
HILLPPSSLSPSLSLPARLRAATAKAKRPSPHAAAELETRGEMAAEALGFMARGATGGRAAELVTRDFLGGCAAAEDDARDASARNDAVPARVHQQKHACPAAPRDLNLFPVAATTKPCAATAAAAAAPAVAGGATATYHSVCTIEKVKTALERFERGRQHQSPHPHQQQQHSGAGASPSSSSVTTSSVKRRGGGGGGGGGVEQGDGCDSPSGGGMVAAACPRCFLYVLISRSDPRCPRCESHVPAPXRQRRPRARSRGSTSTSATWAHSLWFRHMGRWRSLLDGAAAVSYRTVRDAINFA

SEQ ID NO: 31010 - protein, 259 aa, Zea mays subsp. mays
  peptide (1)..(259): Ceres Seq. ID no. 12346344
  misc_feature (12)..(218): NCBI GI NO: 38345608 NR Description: OSJNBa0093O08.10
  misc_feature (88)..(218): NCBI GI NO: 5852085 NR Description: zwh0008.1 [Oryza sativa (indica cultivar-group)]
  misc_feature (131)..(214): NCBI GI NO: 34908532 NR Description: P0423B08.15
  misc_feature (167)..(224): NCBI GI NO: 32479729 NR Description: OJ991214_12.5
  misc_feature (87)..(199): NCBI GI NO: 38605781 NR Description: OSJNBa0044K18.24
  misc_feature (206)..(206): Xaa is any aa, unknown or other
MAAEALGFMARGATGGRAAELVTRDFLGGCAAAEDDARDASARNDAVPARVHQQKHACPAAPRDLNLFPVAATTKPCAATAAAAAAPAVAGGATATYHSVCTIEKVKTALERFERGRQHQSPHPHQQQQHSGAGASPSSSSVTTSSVKRRGGGGGGGGGVEQGDGCDSPSGGGMVAAACPRCFLYVLISRSDPRCPRCESHVPAPXRQRRPRARSRGSTSTSATWAHSLWFRHMGRWRSLLDGAAAVSYRTVRDAINFA

SEQ ID NO: 31011 - protein, 251 aa, Zea mays subsp. mays
  peptide (1)..(251): Ceres Seq. ID no. 12346345
  misc_feature (4)..(210): NCBI GI NO: 38345608 NR Description: OSJNBa0093O08.10
  misc_feature (80)..(210): NCBI GI NO: 5852085 NR Description: zwh0008.1 [Oryza sativa (indica cultivar-group)]
  misc_feature (123)..(206): NCBI GI NO: 34908532 NR Description: P0423B08.15
  misc_feature (159)..(216): NCBI GI NO: 32479729 NR Description: OJ991214_12.5
  misc_feature (79)..(191): NCBI GI NO: 38605781 NR Description: OSJNBa0044K18.24
  misc_feature (198)..(198): Xaa is any aa, unknown or other
MARGATGGRAAELVTRDFLGGCAAAEDDARDASARNDAVPARVHQQKHACPAAPRDLNLFPVAATTKPCAATAAAAAAPAVAGGATATYHSVCTIEKVKTALERFERGRQHQSPHPHQQQQHSGAGASPSSSSVTTSSVKRRGGGGGGGGGVEQGDGCDSPSGGGMVAAACPRCFLYVLISRSDPRCPRCESHVPAPXRQRRPRARSRGSTSTSATWAHSLWFRHMGRWRSLLDGAAAVSYRTVRDAINFA

SEQ ID NO: 31012 - DNA, 1174 bp, Zea mays subsp. mays
  misc_feature (1)..(1174): Ceres Seq. ID no. 12355225
aaaggatagcctttcttcctgtgcagccactccagtgcacgccgccgcagcttgctacacgtgccgggcaagggcaatggattccagcagcagagtgatcgccttcgattgcagctccttcaaactctacatggacggccaagtcgagcgtgcggcccaacgcatgggaaaccgtgcccgccggcttcgacgcggacacgggcgtggcatccaaagacgtcgtcatcgacgtcgccaccggcgccaccgtgcggctctacctaccaccagtccagggagccacgacgaagctcccagtcgtcgtcttcttccatggcggctacttcatcgtcggctcagcccgcgagcctatgtaccatcgctatgtcaactcgctggtcgccagagcacgcgtcgtcgctgtctccgccgactaccgcctcgcgccagagcacccgctcccggcagcctacgacgactcctgggccgcgctcaagtgggcggtctccggcgcggaccagtggctgtccgaccacggcgacctcggccgcgtcttcctggtcggcatcagcgccggcggtaacattgcccacaacatggccatctctgtgggcgtgagcggcttgccggccgctgaaccaccgcgcatagaaggcgtgatcctgctccacccttccttttccggcgaacagaagatggatgtagaagaagaggagttctggcgatctaacaatagcaggtgggcggtcatcttcccgggcgcgaccggcggggcggacgatccaaggattaacccgatggcggacggcgcgccgagcctggagaagctagtgggtgaaaggctgctcgtctgcacggcgtctttggacccgagggcgccgagggggcccggatactgcgaggccgtacgggccagcgggtggcgcgggaaggtggagtggttcgagacggaaggtgaggaccacggtttcttcgtcctcaaccccggcagccacaaggcggttgaggtcatggatcgagtggttgctttccttgcggaccagtgatgacctcctcagggcacagcaaggtctagcagctcgccgcaaaaccggacgtcctagctacggcgcagccgttctcaggcgattgtttactgtctgtactcccaagagtgtcctagatgagttattggaataaacactacagtcaattc

SEQ ID NO: 31013 - protein, 224 aa, Zea mays subsp. mays
  peptide (1)..(224): Ceres Seq. ID no. 12355226
  misc_feature (1)..(222): NCBI GI NO: 38344841 NR Description: OSJNBa0064H22.22
  misc_feature (1)..(221): NCBI GI NO: 18086341 NR Description: AT3g48690/T8P19_200 [Arabidopsis thaliana]
  misc_feature (1)..(224): NCBI GI NO: 21536771 NR Description: unknown [Arabidopsis thaliana]
  misc_feature (1)..(222): NCBI GI NO: 34393323 NR Description: putative cell death associated protein
  misc_feature (1)..(221): NCBI GI NO: 15228425 NR Description: putative protein; protein id: At3g48690
  misc_feature (1)..(224): NCBI GI NO: 18401743 NR Description: expressed protein; protein id: At1g47480
  misc_feature (1)..(221): NCBI GI NO: 21537287 NR Description: putative esterase [Arabidopsis thaliana]
  misc_feature (1)..(221): NCBI GI NO: 18402731 NR Description: expressed protein; protein id: At1g49650
  misc_feature (1)..(221): NCBI GI NO: 15228426 NR Description: putative protein; protein id: At3g48700.1
  misc_feature (1)..(221): NCBI GI NO: 15222791 NR Description: hypothetical protein; protein id: At1g49640.1
MYHRYVNSLVARARVVAVSADYRLAPEHPLPAAYDDSWAALKWAVSGADQWLSDHGDLGRVFLVGISAGGNIAHNMAISVGVSGLPAAEPPRIEGVILLHPSFSGEQKMDVEEEEFWRSNNSRWAVIFPGATGGADDPRINPMADGAPSLEKLVGERLLVCTASLDPRAPRGPGYCEAVRASGWRGKVEWFETEGEDHGFFVLNPGSHKAVEVMDRVVAFLADQ

SEQ ID NO: 31014 - protein, 186 aa, Zea mays subsp. mays
  peptide (1)..(186): Ceres Seq. ID no. 12355227
KDSLSSCAATPVHAAAACYTCRARAMDSSSRVIAFDCSSFKLYMDGQVERAAQRMGNRARRLRRGHGRGIQRRRHRRRHRRHRAALPTTSPGSHDEAPSRRLLPWRLLHRRLSPRAYVPSLCQLAGRQSTRRRCLRRLPPRARAPAPGSLRRLLGRAQVGGLRRGPVAVRPRRPRPRLPGRHQRRR

SEQ ID NO: 31015 - protein, 161 aa, Zea mays subsp. mays
  peptide (1)..(161): Ceres Seq. ID no. 12355228
MDSSSRVIAFDCSSFKLYMDGQVERAAQRMGNRARRLRRGHGRGIQRRRHRRRHRRHRAALPTTSPGSHDEAPSRRLLPWRLLHRRLSPRAYVPSLCQLAGRQSTRRRCLRRLPPRARAPAPGSLRRLLGRAQVGGLRRGPVAVRPRRPRPRLPGRHQRRR

SEQ ID NO: 31016 - DNA, 1663 bp, Zea mays subsp. mays
  misc_feature (1)..(1663): Ceres Seq. ID no. 12361889
attagaataaagaagcacccagccccgcctgtgactgtgagaggccggcgcggagggagtttcatcagatcgtgccgtgcgtgccctctgtgtgtctgattacgcgtgcgtgcgagggtcagagaggagggagggaggggctctggagatgacggggagaagggagcttctgctgcttgcgctcttgggagtccttcagctagctcttcgtctaccttccgcagcgtcgcagtccttcatcggcatcaactacggcgaagtggccgacaacctcccgccgccgtcgtccaccgcgcgcctcgtccagtccacgaccatcaccaaggtgcgcctctacgggaccgacccggccatcatctccgccttctccggcacgggcgtctccctcctcctgggcgccaccaacggcgacatcgccaacctcgcgtcctcgcccgcggccgcggcggcctgggtcgccgcgcacctcccggcctcgtcgccggccgtctccaccgtctccgtcggcaacgaggtcctctttgccgacgcctcgctcgcgtcgcagctcgtcccggccatgcagaacctgcacgacgcgctgccgcccaactccagcgtcaaggtgtccaccgtgaacgccatggacgtgctggcgagctccgacccgccctcctccggcgcgttcaagccggagctcgcggcggcgctcgacccgctgctggcgttcctgagcaagaccggctcgccgttcctcgtcaacccgtacccctacttcgcgtacctcagcgacccgcggcccgagacgctggccttctgcctgttccagcccaacgccggccgcccggacgccgggtccggcctcacgtacaccaacatgttcgacgcgcaggtcgacgccgtgcgcgccgcgctggacgccaaggggtacaaggacgtggacatcgtggtggccgagaccggctggccgcacaagggtgaccccgacgaggccggcgccacggtggagaacgcgcgcgccttcgtgtcgggcctcgtgtcccacctccgctccctgtccggcacgccgcgcgcgcccggcaagtcggtggagacgtacatcttcgccatgtacgacgaggacctcaagcccggcaaggcgtcggagcggtacttcgggctgttccagaccagcctcgccgagacgtacccgacggggttgctcaggaacggcacggccggacggataccagccacggcgccggctccggcgccaaccacgtccgccgcgacgctgaagccaacgccagggcagcagacacaggtgactccagcgcagcagggctcgacggcggcagctgggccttccggcatctgcaggccggggccagggacggctacgtcgagagggaccactaccgcttgcgcccaacctagtgctgctgaatcgtctcgcgcttcctcgatgctccctatcattgccggttttccggtcatagctttgctgatgtttacatgacctttttttttctttatgcttttttctgcctaatgtattgcgccacctctcgtattctagtacgtgtttcacgatccaagcacagcgtcgagatttaaagtacgataacagcatttgccattgtcactttgttaaaggaatctgaaaagagactcgaaaaaagcaagcgtccaaatgaatacaaat

SEQ ID NO: 31017 - protein, 442 aa, Zea mays subsp. mays
  peptide (1)..(442): Ceres Seq. ID no. 12361890
  misc_feature (31)..(344): Pfam Name: Pfam Description:  Glycosyl hydrolases family 17
  misc_feature (26)..(440): NCBI GI NO: 34902328 NR Description: Putative glycosyl hydrolase
  misc_feature (1)..(359): NCBI GI NO: 31126737 NR Description: putative beta 1,3-glucanase
  misc_feature (8)..(353): NCBI GI NO: 30690053 NR Description: glycosyl hydrolase family 17
  misc_feature (27)..(393): NCBI GI NO: 22327528 NR Description: glycosyl hydrolase family 17; protein id:At5g42720
  misc_feature (27)..(353): NCBI GI NO: 7447982 NR Description: hypothetical protein T4L20
  misc_feature (11)..(403): NCBI GI NO: 14279169 NR Description: beta-1,3-glucanase-like protein [Olea europaea]
  misc_feature (27)..(348): NCBI GI NO: 10177275 NR Description: beta-1,3-glucanase-like protein
  misc_feature (7)..(396): NCBI GI NO: 15226720 NR Description: glycosyl hydrolase family 17; protein id:At2g16230
  misc_feature (15)..(344): NCBI GI NO: 6006371 NR Description: Similar to hypothetical protein - potato (S31196)
  misc_feature (11)..(421): NCBI GI NO: 34395169 NR Description: putative glucan endo-1
MTGRRELLLLALLGVLQLALRLPSAASQSFIGINYGEVADNLPPPSSTARLVQSTTITKVRLYGTDPAIISAFSGTGVSLLLGATNGDIANLASSPAAAAAWVAAHLPASSPAVSTVSVGNEVLFADASLASQLVPAMQNLHDALPPNSSVKVSTVNAMDVLASSDPPSSGAFKPELAAALDPLLAFLSKTGSPFLVNPYPYFAYLSDPRPETLAFCLFQPNAGRPDAGSGLTYTNMFDAQVDAVRAALDAKGYKDVDIVVAETGWPHKGDPDEAGATVENARAFVSGLVSHLRSLSGTPRAPGKSVETYIFAMYDEDLKPGKASERYFGLFQTSLAETYPTGLLRNGTAGRIPATAPAPAPTTSAATLKPTPGQQTQVTPAQQGSTAAAGPSGICRPGPGTATSRGTTTACAQPSAAESSRASSMLPIIAGFPVIALLMFT

SEQ ID NO: 31018 - protein, 305 aa, Zea mays subsp. mays
  peptide (1)..(305): Ceres Seq. ID no. 12361891
  misc_feature (1)..(207): Pfam Name: Pfam Description:  Glycosyl hydrolases family 17
  misc_feature (1)..(303): NCBI GI NO: 34902328 NR Description: Putative glycosyl hydrolase
  misc_feature (1)..(222): NCBI GI NO: 31126737 NR Description: putative beta 1,3-glucanase
  misc_feature (1)..(216): NCBI GI NO: 30690053 NR Description: glycosyl hydrolase family 17
  misc_feature (1)..(256): NCBI GI NO: 22327528 NR Description: glycosyl hydrolase family 17; protein id:At5g42720
  misc_feature (1)..(216): NCBI GI NO: 7447982 NR Description: hypothetical protein T4L20
  misc_feature (1)..(266): NCBI GI NO: 14279169 NR Description: beta-1,3-glucanase-like protein [Olea europaea]
  misc_feature (1)..(211): NCBI GI NO: 10177275 NR Description: beta-1,3-glucanase-like protein
  misc_feature (1)..(259): NCBI GI NO: 15226720 NR Description: glycosyl hydrolase family 17; protein id:At2g16230
  misc_feature (1)..(207): NCBI GI NO: 6006371 NR Description: Similar to hypothetical protein - potato (S31196)
  misc_feature (1)..(284): NCBI GI NO: 34395169 NR Description: putative glucan endo-1
MQNLHDALPPNSSVKVSTVNAMDVLASSDPPSSGAFKPELAAALDPLLAFLSKTGSPFLVNPYPYFAYLSDPRPETLAFCLFQPNAGRPDAGSGLTYTNMFDAQVDAVRAALDAKGYKDVDIVVAETGWPHKGDPDEAGATVENARAFVSGLVSHLRSLSGTPRAPGKSVETYIFAMYDEDLKPGKASERYFGLFQTSLAETYPTGLLRNGTAGRIPATAPAPAPTTSAATLKPTPGQQTQVTPAQQGSTAAAGPSGICRPGPGTATSRGTTTACAQPSAAESSRASSMLPIIAGFPVIALLMFT

SEQ ID NO: 31019 - protein, 284 aa, Zea mays subsp. mays
  peptide (1)..(284): Ceres Seq. ID no. 12361892
  misc_feature (1)..(186): Pfam Name: Pfam Description:  Glycosyl hydrolases family 17
  misc_feature (1)..(282): NCBI GI NO: 34902328 NR Description: Putative glycosyl hydrolase
  misc_feature (1)..(201): NCBI GI NO: 31126737 NR Description: putative beta 1,3-glucanase
  misc_feature (1)..(195): NCBI GI NO: 30690053 NR Description: glycosyl hydrolase family 17
  misc_feature (1)..(235): NCBI GI NO: 22327528 NR Description: glycosyl hydrolase family 17; protein id:At5g42720
  misc_feature (1)..(195): NCBI GI NO: 7447982 NR Description: hypothetical protein T4L20
  misc_feature (1)..(245): NCBI GI NO: 14279169 NR Description: beta-1,3-glucanase-like protein [Olea europaea]
  misc_feature (1)..(190): NCBI GI NO: 10177275 NR Description: beta-1,3-glucanase-like protein
  misc_feature (1)..(238): NCBI GI NO: 15226720 NR Description: glycosyl hydrolase family 17; protein id:At2g16230
  misc_feature (1)..(186): NCBI GI NO: 6006371 NR Description: Similar to hypothetical protein - potato (S31196)
  misc_feature (1)..(263): NCBI GI NO: 34395169 NR Description: putative glucan endo-1
MDVLASSDPPSSGAFKPELAAALDPLLAFLSKTGSPFLVNPYPYFAYLSDPRPETLAFCLFQPNAGRPDAGSGLTYTNMFDAQVDAVRAALDAKGYKDVDIVVAETGWPHKGDPDEAGATVENARAFVSGLVSHLRSLSGTPRAPGKSVETYIFAMYDEDLKPGKASERYFGLFQTSLAETYPTGLLRNGTAGRIPATAPAPAPTTSAATLKPTPGQQTQVTPAQQGSTAAAGPSGICRPGPGTATSRGTTTACAQPSAAESSRASSMLPIIAGFPVIALLMFT

SEQ ID NO: 31020 - DNA, 1726 bp, Zea mays subsp. mays
  misc_feature (1)..(1726): Ceres Seq. ID no. 12406596
atggtatggcagatcatcgcgacggcgatcgcgctgggcatctgcctgcacgcggggaaccacctggcgtgcgacttcccgcggctgatcgcgtcggcgcccgaggagtaccgtctggtggcgcgcttcttcgggcgggacaggcccagctaccgcgggctcctggcgggcgcggagggcgtgacggggatcgtcatggtcacgctcatggccgtctccttcaccctggccacgcggccgttccggaagcgggaggaggccagcagggacaagaagaaggcggcggcctgcaggggcgtcccgctcgccggcttcaacgccttctggtactcgcaccacctgctcatcgtcgtctacctcctgctcctcgtccacggctggttcatgttcctcgtcgacaagtggtaccagaggacgacgtggatgtacatttctgtgccgctggcgctttacgtcggggaacggacgctacgggccttccgatccaaggcctacgcagtcaagattctcaaggtgtgcctcctgccggggaacgtcctgaccgtaaccatgtcgaagccctacgggttccgctacaggagcgggcagtacatattcctgcagtgtccaacaatctccccgttcgagtggcaccctttctccatcacctcagctcccggagacgactgcgtcagcgtccacgtccagaccaggggcgactggacacaggagctcaagcgcatcttcgtcgacaactacttcacgccgtgcgtgcccagacgggctgccttcggggacctaggcgcggtggaccacaagaccaagagcccgccgaggttgctggtcgacggcccctacggcgcccccgcgcaggacttcaggaactacgacgtgctgctcctcgtcggcctcgggatcggcgccacgcccttcatcagcatcctcagagacctcctcaacaacatcaagctggccgacgaactgatggacctggcaatggagaccggccgggccgaggacagcgccagcaacctgagcgcgtcgacggcgagcggcggcaacaagaggagggcgtaccgaacgacctgcgcccacttctactgggtcacgagggagcctgggtcgttcgagtggttcaagggggtcatgaacgaggtcgccgagatggacaagaagggtgtcattgagctgcacaactacctgacaagcgtgtacgaggagcgagacgcgaggacgactctgctgtccatggtgcaggccctcaaccacgccaagcatggcgtcgacattgtgtcagggacaagggtcaggacacattttgcaaggcctaactggaaagaagtatttacgaggatagcgtccaagcacccaaattctacagtcggggtattttactgtgggagacctacacttgccaaagaactgaagaaactgtcacttgacatgagccacagaacgggaacccgatttgatttccacaaggagtacttctgatggaaaatacaagtgcccctgatttcttttagtactagaagatacagataaaaaaaattcacaaatttttgcgtagaagcgaactgatcctctttcacagtatgtaaatgtacatggtataaagcagagagtagttagaaacgttttttctttctttcttaaccaaatgggagggtgaaaatatgtcctgcgctttcagacagccattggtaactgcagatataaatgtaatagatcatatcattgtatgctg

SEQ ID NO: 31021 - protein, 490 aa, Zea mays subsp. mays
  peptide (1)..(490): Ceres Seq. ID no. 12406597
  misc_feature (9)..(489): Pfam Name: Pfam Description:  Ferric reductase like transmembrane component
  misc_feature (4)..(490): NCBI GI NO: 15221979 NR Description: respiratory burst oxidase protein, putative
  misc_feature (9)..(490): NCBI GI NO: 3242787 NR Description: respiratory burst oxidase protein E
  misc_feature (6)..(490): NCBI GI NO: 17384016 NR Description: NADPH oxidase [Nicotiana tabacum]
  misc_feature (6)..(490): NCBI GI NO: 28268678 NR Description: respiratory burst oxidase homolog
  misc_feature (6)..(490): NCBI GI NO: 4585142 NR Description: NADPH oxidase; gp91; phox homolog
  misc_feature (6)..(490): NCBI GI NO: 16549087 NR Description: respiratory burst oxidase homolog
  misc_feature (6)..(490): NCBI GI NO: 7489460 NR Description: cytochrome b245 beta chain homolog rbohA - rice
  misc_feature (6)..(490): NCBI GI NO: 7489461 NR Description: cytochrome b245 beta chain homolog rbohA - rice
  misc_feature (6)..(490): NCBI GI NO: 18407959 NR Description: cytochrome b245 beta chain homolog RbohAp108
  misc_feature (6)..(490): NCBI GI NO: 3242456 NR Description: Atrboh F [Arabidopsis thaliana]
MVWQIIATAIALGICLHAGNHLACDFPRLIASAPEEYRLVARFFGRDRPSYRGLLAGAEGVTGIVMVTLMAVSFTLATRPFRKREEASRDKKKAAACRGVPLAGFNAFWYSHHLLIVVYLLLLVHGWFMFLVDKWYQRTTWMYISVPLALYVGERTLRAFRSKAYAVKILKVCLLPGNVLTVTMSKPYGFRYRSGQYIFLQCPTISPFEWHPFSITSAPGDDCVSVHVQTRGDWTQELKRIFVDNYFTPCVPRRAAFGDLGAVDHKTKSPPRLLVDGPYGAPAQDFRNYDVLLLVGLGIGATPFISILRDLLNNIKLADELMDLAMETGRAEDSASNLSASTASGGNKRRAYRTTCAHFYWVTREPGSFEWFKGVMNEVAEMDKKGVIELHNYLTSVYEERDARTTLLSMVQALNHAKHGVDIVSGTRVRTHFARPNWKEVFTRIASKHPNSTVGVFYCGRPTLAKELKKLSLDMSHRTGTRFDFHKEYF

SEQ ID NO: 31022 - protein, 425 aa, Zea mays subsp. mays
  peptide (1)..(425): Ceres Seq. ID no. 12406598
  misc_feature (1)..(424): Pfam Name: Pfam Description:  Ferric reductase like transmembrane component
  misc_feature (1)..(425): NCBI GI NO: 15221979 NR Description: respiratory burst oxidase protein, putative
  misc_feature (1)..(425): NCBI GI NO: 3242787 NR Description: respiratory burst oxidase protein E
  misc_feature (1)..(425): NCBI GI NO: 17384016 NR Description: NADPH oxidase [Nicotiana tabacum]
  misc_feature (1)..(425): NCBI GI NO: 28268678 NR Description: respiratory burst oxidase homolog
  misc_feature (1)..(425): NCBI GI NO: 4585142 NR Description: NADPH oxidase; gp91; phox homolog
  misc_feature (1)..(425): NCBI GI NO: 16549087 NR Description: respiratory burst oxidase homolog
  misc_feature (1)..(425): NCBI GI NO: 7489460 NR Description: cytochrome b245 beta chain homolog rbohA - rice
  misc_feature (1)..(425): NCBI GI NO: 7489461 NR Description: cytochrome b245 beta chain homolog rbohA - rice
  misc_feature (1)..(425): NCBI GI NO: 18407959 NR Description: cytochrome b245 beta chain homolog RbohAp108
  misc_feature (1)..(425): NCBI GI NO: 3242456 NR Description: Atrboh F [Arabidopsis thaliana]
MVTLMAVSFTLATRPFRKREEASRDKKKAAACRGVPLAGFNAFWYSHHLLIVVYLLLLVHGWFMFLVDKWYQRTTWMYISVPLALYVGERTLRAFRSKAYAVKILKVCLLPGNVLTVTMSKPYGFRYRSGQYIFLQCPTISPFEWHPFSITSAPGDDCVSVHVQTRGDWTQELKRIFVDNYFTPCVPRRAAFGDLGAVDHKTKSPPRLLVDGPYGAPAQDFRNYDVLLLVGLGIGATPFISILRDLLNNIKLADELMDLAMETGRAEDSASNLSASTASGGNKRRAYRTTCAHFYWVTREPGSFEWFKGVMNEVAEMDKKGVIELHNYLTSVYEERDARTTLLSMVQALNHAKHGVDIVSGTRVRTHFARPNWKEVFTRIASKHPNSTVGVFYCGRPTLAKELKKLSLDMSHRTGTRFDFHKEYF

SEQ ID NO: 31023 - protein, 421 aa, Zea mays subsp. mays
  peptide (1)..(421): Ceres Seq. ID no. 12406599
  misc_feature (1)..(420): Pfam Name: Pfam Description:  Ferric reductase like transmembrane component
  misc_feature (1)..(421): NCBI GI NO: 15221979 NR Description: respiratory burst oxidase protein, putative
  misc_feature (1)..(421): NCBI GI NO: 3242787 NR Description: respiratory burst oxidase protein E
  misc_feature (1)..(421): NCBI GI NO: 17384016 NR Description: NADPH oxidase [Nicotiana tabacum]
  misc_feature (1)..(421): NCBI GI NO: 28268678 NR Description: respiratory burst oxidase homolog
  misc_feature (1)..(421): NCBI GI NO: 4585142 NR Description: NADPH oxidase; gp91; phox homolog
  misc_feature (1)..(421): NCBI GI NO: 16549087 NR Description: respiratory burst oxidase homolog
  misc_feature (1)..(421): NCBI GI NO: 7489460 NR Description: cytochrome b245 beta chain homolog rbohA - rice
  misc_feature (1)..(421): NCBI GI NO: 7489461 NR Description: cytochrome b245 beta chain homolog rbohA - rice
  misc_feature (1)..(421): NCBI GI NO: 18407959 NR Description: cytochrome b245 beta chain homolog RbohAp108
  misc_feature (1)..(421): NCBI GI NO: 3242456 NR Description: Atrboh F [Arabidopsis thaliana]
MAVSFTLATRPFRKREEASRDKKKAAACRGVPLAGFNAFWYSHHLLIVVYLLLLVHGWFMFLVDKWYQRTTWMYISVPLALYVGERTLRAFRSKAYAVKILKVCLLPGNVLTVTMSKPYGFRYRSGQYIFLQCPTISPFEWHPFSITSAPGDDCVSVHVQTRGDWTQELKRIFVDNYFTPCVPRRAAFGDLGAVDHKTKSPPRLLVDGPYGAPAQDFRNYDVLLLVGLGIGATPFISILRDLLNNIKLADELMDLAMETGRAEDSASNLSASTASGGNKRRAYRTTCAHFYWVTREPGSFEWFKGVMNEVAEMDKKGVIELHNYLTSVYEERDARTTLLSMVQALNHAKHGVDIVSGTRVRTHFARPNWKEVFTRIASKHPNSTVGVFYCGRPTLAKELKKLSLDMSHRTGTRFDFHKEYF

SEQ ID NO: 31024 - DNA, 1841 bp, Zea mays subsp. mays
  misc_feature (1)..(1841): Ceres Seq. ID no. 12384170
aagttgcaacggccagaaagccacgttagcctagccgagctcctctgctcctctcgtggccgaacaggcagagcgaccagtctccagagcgctccccatggcgtcaggagctgcggcccctgtcgttcagaccctggtgctgaaggtggccatccactgccatggctgcaagaagaaggtccggaaggtgctcaggagcgtcgaaggcgtgcagaacgtgacggtggacgcctcgcagaacaaggtgactgtggtcggcaccgtggacgccgacacgctcatccagaggttgtacaagtccggcaagaagggagagccctggcagtgccacccgcccatcaagaagagcgagcccgcgccggaggccccgccgactccgcagcctgccggtggcggcggcaaggacgccgctactgctgcggccgcggtggacaagaagccggaggagccggtgaagaagccgcagggcgacagctccgaggagaagaagaagaagccggaggaggcggcgaaggagccgcagagcgagaagaagaagccggaggaggcggcgaaggagccatagcgagaagaagaagccggaggaggtggtgaaggcgccgcagaacgagaaggaggagccgcagagcgagaagaagaagaagccggaggaggcggccgagagctccaaggagaaggagaagaaaccagaggaggcagtgaaggagccaaaggccgagagctccaaggacgagaagaagaagaagccggaggaggccgtgaaggagccgcagggtgagagctccgaggagaagaagaagaagccggagcaggagggcggggccgcagagaagaagcccgaagcagagtcaaagaagaaggacggcggtgacagcaagggagctgagacgaaggccaagggctcagcagagccggcaaaggaagctgccgccgtccccgcccccgcccccgcccccgctgtcaatgacaaggccgaggcaaagaagagcgagaagcccaaggacgccggtaaggcggcggagccagccgccgtgacgacggagaggtcgctgcctgcgccgccggcgccggcgccaatgcccgcgtacgagcaggagttccgccacccctactacgccccgcagccggtggtgagctaccacgcgtcgcagccgagctcgagcgtgtcgtacacgtacttcgcgccgcagacgcagccggcgtactccattcaacagccacagccgcacccacaggcggcggtctcctactccgtgcagccgacaccgccggcgtactactccgcgcaggagctgcagccgcagcagccggcgaagcagtggtcgccgtcgtacctgtacatgccgtacccgcacgcgcaggcggcgccggagccttactaccagcagcaggactactacagcccgcccgggacgcacgcgtcgccgatgcacgacccataccgcatcttcgacgacgagaaccccaactcctgcagcgtcatgtgagaggcgcgagctggtcggcgcggcccggacgccgccggccgccgtgggcagcgagtagtttgggggggagacggcgccgcgcgctaccgcaacatcagagagagagacgtctctgtggctgtataggtagagtagcctgttactgtttaccacccctctaccctcttccttccatcctatttccacctagtatagaggtcaaacctcttctccgtgtagtgacggaaccttttcttaatttccatctttttactgttctgaatcaagtgattagaaagaacatgtaaattgtaacgagatacgttcatgttcaccgcgtctgtatatgccggctactagaactttgaatgagcg

SEQ ID NO: 31025 - protein, 197 aa, Zea mays subsp. mays
  peptide (1)..(197): Ceres Seq. ID no. 12384171
  misc_feature (15)..(197): NCBI GI NO: 5821151 NR Description: RNA binding protein [Homo sapiens]
  misc_feature (6)..(197): NCBI GI NO: 28972153 NR Description: mKIAA0324 protein [Mus musculus]
  misc_feature (15)..(197): NCBI GI NO: 6634015 NR Description: KIAA0324 protein [Homo sapiens]
  misc_feature (15)..(197): NCBI GI NO: 7512967 NR Description: hypothetical protein KIAA0324 - human (fragment)
  misc_feature (59)..(197): NCBI GI NO: 5821145 NR Description: RNA binding protein [Homo sapiens]
  misc_feature (6)..(197): NCBI GI NO: 30424862 NR Description: RIKEN cDNA 5033413A03 [Mus musculus]
  misc_feature (59)..(197): NCBI GI NO: 5821143 NR Description: RNA binding protein [Homo sapiens]
  misc_feature (167)..(197): NCBI GI NO: 25143299 NR Description: pre-mRNA splicing SR protein related RSR-1 (68
  misc_feature (59)..(197): NCBI GI NO: 6649242 NR Description: splicing coactivator subunit SRm300 [Homo sapiens]
  misc_feature (59)..(197): NCBI GI NO: 19923466 NR Description: splicing coactivator subunit SRm300
KLQRPESHVSLAELLCSSRGRTGRATSLQSAPHGVRSCGPCRSDPGAEGGHPLPWLQEEGPEGAQERRRRAERDGGRLAEQGDCGRHRGRRHAHPEVVQVRQEGRALAVPPAHQEERARAGGPADSAACRWRRQGRRYCCGRGGQEAGGAGEEAAGRQLRGEEEEAGGGGEGAAEREEEAGGGGEGAIARRRSRRRW

SEQ ID NO: 31026 - protein, 155 aa, Zea mays subsp. mays
  peptide (1)..(155): Ceres Seq. ID no. 12384172
  misc_feature (101)..(155): Pfam Name: Pfam Description:  Caldesmon
  misc_feature (76)..(155): NCBI GI NO: 30685162 NR Description: leucine-rich repeat extensin family
  misc_feature (76)..(155): NCBI GI NO: 20259488 NR Description: unknown protein [Arabidopsis thaliana]
  misc_feature (11)..(155): NCBI GI NO: 12083536 NR Description: hypothetical protein [Oryza sativa]
  misc_feature (1)..(119): NCBI GI NO: 18404283 NR Description: expressed protein; protein id: At2g36950
  misc_feature (10)..(75): NCBI GI NO: 18397481 NR Description: expressed protein; protein id: At3g06130
  misc_feature (1)..(147): NCBI GI NO: 18404283 NR Description: expressed protein; protein id: At2g36950
  misc_feature (1)..(155): NCBI GI NO: 33146848 NR Description: copper chaperone
MASGAAAPVVQTLVLKVAIHCHGCKKKVRKVLRSVEGVQNVTVDASQNKVTVVGTVDADTLIQRLYKSGKKGEPWQCHPPIKKSEPAPEAPPTPQPAGGGGKDAATAAAAVDKKPEEPVKKPQGDSSEEKKKKPEEAAKEPQSEKKKPEEAAKEP

SEQ ID NO: 31027 - protein, 136 aa, Zea mays subsp. mays
  peptide (1)..(136): Ceres Seq. ID no. 12384173
  misc_feature (1)..(54): Pfam Name: Pfam Description:  Protein of unknown function, DUF612
  misc_feature (1)..(98): NCBI GI NO: 33146848 NR Description: copper chaperone
  misc_feature (1)..(121): NCBI GI NO: 30685162 NR Description: leucine-rich repeat extensin family
  misc_feature (1)..(115): NCBI GI NO: 20259488 NR Description: unknown protein [Arabidopsis thaliana]
  misc_feature (1)..(100): NCBI GI NO: 24020878 NR Description: heavy neurofilament protein [Canis familiaris]
  misc_feature (1)..(120): NCBI GI NO: 2133786 NR Description: NF-180 - sea lamprey
  misc_feature (1)..(121): NCBI GI NO: 5821145 NR Description: RNA binding protein [Homo sapiens]
  misc_feature (1)..(121): NCBI GI NO: 5821143 NR Description: RNA binding protein [Homo sapiens]
  misc_feature (1)..(85): NCBI GI NO: 15889177 NR Description: AGR_C_3445p [Agrobacterium tumefaciens]
  misc_feature (1)..(121): NCBI GI NO: 6649242 NR Description: splicing coactivator subunit SRm300 [Homo sapiens]
  misc_feature (1)..(121): NCBI GI NO: 19923466 NR Description: splicing coactivator subunit SRm300
MPAYEQEFRHPYYAPQPVVSYHASQPSSSVSYTYFAPQTQPAYSIQQPQPHPQAAVSYSVQPTPPAYYSAQELQPQQPAKQWSPSYLYMPYPHAQAAPEPYYQQQDYYSPPGTHASPMHDPYRIFDDENPNSCSVM

SEQ ID NO: 31028 - DNA, 1306 bp, Zea mays subsp. mays
  misc_feature (1)..(1306): Ceres Seq. ID no. 12412486
gcacgagaccattacctagaacatcctaatcgaaaacttcttttcgtttttgtttgtttttggaagaacagacagacttgaaagttgagatatctcactaatctccaaaatgtccctataaaactgatgatctgctgataagacatcccactcgccggccgtccttgaagagcgagcagcaatggcgcaggagatcgagcacacccacatccccatccgcggcctcaacctccacgtcgcacaagtaggcacaggtgaactgggcacggtggtgttcctgcacggcttcccggagatatggtactcgtggcgccaccagatgcgggccgtggccgcggcggggtaccgcgccatcgcgccggactgccgcgggtacggcctgtcggagcagccgccggagcacgaggaggtgtcccttgacgacctcatcgccgacgtgctcggcatcctcgacgccctcagcgtcccgaaggcgttcttggtgggcaaggacttcggcgccatgccgggcgtacgagttcgcgctgcagcacccgggccgcaccctcggcgtggtgtgcctgggcatccccttcaacccggcccccatgtccttcgacgccatcatgcccgaaggattctacatcctgcgctggcgcgagccgggcagggcggaggccgacttcggccggttcgacgtgaggcgtggtgcgcaccatctacgtgctcttcgccggcgccgagatcccgattgccaaggaagggcaggagatcatggacctggccgacctgtccacgcccctcccggagtggttcaccgaggaggacctggacgcctacgccaagctctacgagaagtccggcttcgggtacccgctcaagatgccgtacagatctatgcacaagctcccgaaccggctggacgccaagttccaggtgccggtgttcatggtgatgggggagaaggactacgcgttcaagttcccggggttcgagaccgccatgcgcggcggggtcatggacaacttcatgccggacctcaagatcacctacatccctgaggggagccacttcgtgcaggagcagctcccagagcaggtcaacgacctgctcctcggcttcctcagggaccatccctccgccgcataagcagtgggtgagaccgtcagaataatggaatgcttcctgagcaacggtttctctactctattgccgttgcctggatccatgaccgtgttaattaattaattagtgcatatacttcctactcaaatcagatgtacgttttttttatctgcaataaaaatcatcgtcgctgcattactcg

SEQ ID NO: 31029 - protein, 250 aa, Zea mays subsp. mays
  peptide (1)..(250): Ceres Seq. ID no. 12412487
  misc_feature (55)..(109): Pfam Name: Pfam Description:  alpha/beta hydrolase fold
  misc_feature (1)..(109): NCBI GI NO: 37535728 NR Description: putative epoxide hydrolase
  misc_feature (1)..(135): NCBI GI NO: 37535724 NR Description: putative epoxide hydrolase
  misc_feature (1)..(128): NCBI GI NO: 37535732 NR Description: putative epoxide hydrolase
  misc_feature (1)..(118): NCBI GI NO: 37535722 NR Description: putative epoxide hydrolase
  misc_feature (3)..(107): NCBI GI NO: 1354849 NR Description: epoxide hydrolase [Nicotiana tabacum]
  misc_feature (1)..(110): NCBI GI NO: 15230367 NR Description: epoxide hydrolase-like protein
  misc_feature (5)..(107): NCBI GI NO: 25044843 NR Description: epoxide hydrolase [Ananas comosus]
  misc_feature (3)..(108): NCBI GI NO: 18411917 NR Description: coded for by A
  misc_feature (5)..(108): NCBI GI NO: 30683476 NR Description: epoxide hydrolase, putative [Arabidopsis thaliana]
  misc_feature (5)..(108): NCBI GI NO: 25407540 NR Description: probable epoxide hydrolase
MAQEIEHTHIPIRGLNLHVAQVGTGELGTVVFLHGFPEIWYSWRHQMRAVAAAGYRAIAPDCRGYGLSEQPPEHEEVSLDDLIADVLGILDALSVPKAFLVGKDFGAMPGVRVRAAAPGPHPRRGVPGHPLQPGPHVLRRHHARRILHPALARAGQGGGRLRPVRREAWCAPSTCSSPAPRSRLPRKGRRSWTWPTCPRPSRSGSPRRTWTPTPSSTRSPASGTRSRCRTDLCTSSRTGWTPSSRCRCSW

SEQ ID NO: 31030 - protein, 204 aa, Zea mays subsp. mays
  peptide (1)..(204): Ceres Seq. ID no. 12412488
  misc_feature (9)..(63): Pfam Name: Pfam Description:  alpha/beta hydrolase fold
  misc_feature (1)..(63): NCBI GI NO: 37535728 NR Description: putative epoxide hydrolase
  misc_feature (1)..(89): NCBI GI NO: 37535724 NR Description: putative epoxide hydrolase
  misc_feature (1)..(82): NCBI GI NO: 37535732 NR Description: putative epoxide hydrolase
  misc_feature (1)..(72): NCBI GI NO: 37535722 NR Description: putative epoxide hydrolase
  misc_feature (1)..(61): NCBI GI NO: 1354849 NR Description: epoxide hydrolase [Nicotiana tabacum]
  misc_feature (1)..(64): NCBI GI NO: 15230367 NR Description: epoxide hydrolase-like protein
  misc_feature (1)..(61): NCBI GI NO: 25044843 NR Description: epoxide hydrolase [Ananas comosus]
  misc_feature (1)..(62): NCBI GI NO: 18411917 NR Description: coded for by A
  misc_feature (1)..(62): NCBI GI NO: 30683476 NR Description: epoxide hydrolase, putative [Arabidopsis thaliana]
  misc_feature (1)..(62): NCBI GI NO: 25407540 NR Description: probable epoxide hydrolase
MRAVAAAGYRAIAPDCRGYGLSEQPPEHEEVSLDDLIADVLGILDALSVPKAFLVGKDFGAMPGVRVRAAAPGPHPRRGVPGHPLQPGPHVLRRHHARRILHPALARAGQGGGRLRPVRREAWCAPSTCSSPAPRSRLPRKGRRSWTWPTCPRPSRSGSPRRTWTPTPSSTRSPASGTRSRCRTDLCTSSRTGWTPSSRCRCSW

SEQ ID NO: 31031 - protein, 150 aa, Zea mays subsp. mays
  peptide (1)..(150): Ceres Seq. ID no. 12412489
  misc_feature (1)..(33): NCBI GI NO: 37535728 NR Description: putative epoxide hydrolase
  misc_feature (1)..(33): NCBI GI NO: 37535722 NR Description: putative epoxide hydrolase
  misc_feature (1)..(32): NCBI GI NO: 1354849 NR Description: epoxide hydrolase [Nicotiana tabacum]
  misc_feature (1)..(33): NCBI GI NO: 37535724 NR Description: putative epoxide hydrolase
  misc_feature (1)..(33): NCBI GI NO: 37535732 NR Description: putative epoxide hydrolase
  misc_feature (1)..(30): NCBI GI NO: 15230367 NR Description: epoxide hydrolase-like protein
  misc_feature (1)..(65): NCBI GI NO: 18411917 NR Description: coded for by A
MSFDAIMPEGFYILRWREPGRAEADFGRFDVRRGAHHLRALRRRRDPDCQGRAGDHGPGRPVHAPPGVVHRGGPGRLRQALREVRLRVPAQDAVQIYAQAPEPAGRQVPGAGVHGDGGEGLRVQVPGVRDRHARRGHGQLHAGPQDHLHP

SEQ ID NO: 31032 - DNA, 1462 bp, Zea mays subsp. mays
  misc_feature (1)..(1462): Ceres Seq. ID no. 12566755
aaaaagttcagcaacaacaacaacacaaatcatcggttccgttccgtcgcagaaatagaaaaaaggctttcttgtcccacagggcagggagaccgagagagcagtctagtgattagttgatcaccagacgtccagacaccatgagctcccgcatggctggagcagcgcttctgcgccacctaggcccgcgcctgttcgcggccgggcctgcggtgtccgggctcaccgcgaggggcggcatgcccgcggccgcgaggcttctccccgcgcggatggccagcaccgccgcggaggctgccagagaggacgccggtgcaaataaacggcacggcggcaccgagaagcatgagggaggaggcagcaggcgggcagagcaagaaggccgtcgtcagctactggggcatcgacacgcccaagctcgtgaaggaagacggcacggagtggaagtggaccagcttccggccgtgggacgcgtacacgtcggacacgtccatcgacatagggaagcaccacgcgccgacgacgctgcccgacaaggcggcgtacctgatcgtcaagtcgctgcacgtgccccatggacctcttcttccagcgccggcacgccagccacgcgctgctgctcgagacggtggcggccgtgccgggcatggtgggcggcatgctcctccacctgcgctcgctccgccgcttcgagcacagcggcggctggatccgcgcgctgctcgaggaggccgagaacgagcgcatgcacctcatgacgttcctcgaggtcacgcagccgcgctggtgggagcgcgcgctcgtgctcaccgcgcagggcgtcttcttcaacgcctacttcgtcggctacctcctctcccccaagttcgcgcaccgcgtcgtcggctacctccgaggaggaggcagtgcactcgtacaccgagtacctcaaggacctcgaggccggcatcatcgacaacaccccggcgccggccatcgccatcgactactggcgcctccccgccgacgccaagctcaaggacgtcgtcaccgtcgtgcgcgccgacgaggcgcaccaccgcgacgtcaaccacttcgcgtcggtacgcactctgcaccttgcaacaggattcattgctgtgagcaatctccagcagttctagctaattcattggtttatgtttgcttaatggagtacattattttgcaggacatccattaccaggggatgaagctcaaggacacgcccgcaccgctcagttatcactgacaagtaggcgttgcctgcctgctgctcaattcagagttcttacacgttagactgtcattggtcttaatatgttgttgtgctagccaaagttgcttagcagatcaagactggtttgctactcggaggtgaactagttgcctatatggtttgtacgtaccagtatattgtagatatttgaaataacaaatataagaatccggtgtgatgttactt

SEQ ID NO: 31033 - protein, 258 aa, Zea mays subsp. mays
  peptide (1)..(258): Ceres Seq. ID no. 12566756
  misc_feature (3)..(76): Pfam Name: Pfam Description:  Alternative oxidase
  misc_feature (1)..(76): NCBI GI NO: 25989201 NR Description: alternative oxidase AOX3 precursor [Zea mays]
  misc_feature (5)..(76): NCBI GI NO: 3218543 NR Description: alternative oxidase
  misc_feature (1)..(76): NCBI GI NO: 19912727 NR Description: alternative oxidase [Triticum aestivum]
  misc_feature (1)..(76): NCBI GI NO: 25989199 NR Description: alternative oxidase AOX2 precursor [Zea mays]
  misc_feature (1)..(76): NCBI GI NO: 3218544 NR Description: alternative oxidase
  misc_feature (1)..(76): NCBI GI NO: 19912725 NR Description: alternative oxidase [Triticum aestivum]
  misc_feature (2)..(76): NCBI GI NO: 5802557 NR Description: alternative oxidase [Triticum aestivum]
  misc_feature (1)..(76): NCBI GI NO: 113982 NR Description: Alternative oxidase, mitochondrial precursor
  misc_feature (1)..(76): NCBI GI NO: 25989197 NR Description: alternative oxidase AOX1 precursor [Zea mays]
  misc_feature (1)..(76): NCBI GI NO: 419792 NR Description: alternative respiratory pathway oxidase (EC 1
MREEAAGGQSKKAVVSYWGIDTPKLVKEDGTEWKWTSFRPWDAYTSDTSIDIGKHHAPTTLPDKAAYLIVKSLHVPHGPLLPAPARQPRAAARDGGGRAGHGGRHAPPPALAPPLRAQRRLDPRAARGGRERAHAPHDVPRGHAAALVGARARAHRAGRLLQRLLRRLPPLPQVRAPRRRLPPRRRQCTRTPSTSRTSRPASSTTPRRRPSPSTTGASPPTPSSRTSSPSCAPTRRTTATSTTSRRYALCTLQQDSLL

SEQ ID NO: 31034 - protein, 224 aa, Zea mays subsp. mays
  peptide (1)..(224): Ceres Seq. ID no. 12566757
  misc_feature (1)..(106): Pfam Name: Pfam Description:  Alternative oxidase
  misc_feature (1)..(106): NCBI GI NO: 25989201 NR Description: alternative oxidase AOX3 precursor [Zea mays]
  misc_feature (206)..(224): NCBI GI NO: 25989201 NR Description: alternative oxidase AOX3 precursor [Zea mays]
  misc_feature (1)..(106): NCBI GI NO: 3218543 NR Description: alternative oxidase
  misc_feature (206)..(224): NCBI GI NO: 3218543 NR Description: alternative oxidase
  misc_feature (1)..(106): NCBI GI NO: 19912727 NR Description: alternative oxidase [Triticum aestivum]
  misc_feature (206)..(224): NCBI GI NO: 19912727 NR Description: alternative oxidase [Triticum aestivum]
  misc_feature (1)..(106): NCBI GI NO: 25989199 NR Description: alternative oxidase AOX2 precursor [Zea mays]
  misc_feature (206)..(224): NCBI GI NO: 25989199 NR Description: alternative oxidase AOX2 precursor [Zea mays]
  misc_feature (1)..(106): NCBI GI NO: 3218544 NR Description: alternative oxidase
  misc_feature (206)..(224): NCBI GI NO: 3218544 NR Description: alternative oxidase
MDLFFQRRHASHALLLETVAAVPGMVGGMLLHLRSLRRFEHSGGWIRALLEEAENERMHLMTFLEVTQPRWWERALVLTAQGVFFNAYFVGYLLSPKFAHRVVGYLRGGGSALVHRVPQGPRGRHHRQHPGAGHRHRLLAPPRRRQAQGRRHRRARRRGAPPRRQPLRVGTHSAPCNRIHCCEQSPAVLANSLVYVCLMEYIILQDIHYQGMKLKDTPAPLSYH

SEQ ID NO: 31035 - protein, 205 aa, Zea mays subsp. mays
  peptide (1)..(205): Ceres Seq. ID no. 12566758
  misc_feature (1)..(68): NCBI GI NO: 3218543 NR Description: alternative oxidase
  misc_feature (1)..(77): NCBI GI NO: 25989201 NR Description: alternative oxidase AOX3 precursor [Zea mays]
  misc_feature (1)..(61): NCBI GI NO: 19912727 NR Description: alternative oxidase [Triticum aestivum]
  misc_feature (1)..(81): NCBI GI NO: 25989197 NR Description: alternative oxidase AOX1 precursor [Zea mays]
MSSRMAGAALLRHLGPRLFAAGPAVSGLTARGGMPAAARLLPARMASTAAEAAREDAGANKRHGGTEKHEGGGSRRAEQEGRRQLLGHRHAQAREGRRHGVEVDQLPAVGRVHVGHVHRHREAPRADDAARQGGVPDRQVAARAPWTSSSSAGTPATRCCSRRWRPCRAWWAACSSTCARSAASSTAAAGSARCSRRPRTSACTS

SEQ ID NO: 31036 - DNA, 1610 bp, Zea mays subsp. mays
  misc_feature (1)..(1610): Ceres Seq. ID no. 12413404
atcagacaagagacacacacacaccacacgcagtcacgcacagcctcggcctccgcagctgcaggcgcctgctgctcttcgacaagaccccaagaactcgccaacctaacctaggtcagccacccttccttctaccttctgcgacaatgcaggccgccgccgcctccgtcaagtcctccaccaccgcggccgcggccgcggccacctgcaaggcgggcttcaagcccctgcacctccctcccctccccgccgccggctccaggccgctgtccctctccgtctccgcgcgtccgctgtaccgccaagaccatgtcctcgcgacaaccgtggcgatggcggcggcgggccgcagcgaccgcgccgcgtcccccgcgcctccgtccgccacagcggacggcgcccggccggtggtggaggtcgccgcgccggcggagaccgcgcgccgcgccaagatcggggtgtacttcgccacgtggtgggcgctgaacgtgatcttcaacatctacaacaagaaggtgctgaacgcgttcccgtacccgtggctcacgtcgacgctgtccctcgccgccggctccgccatcatgctcgcgtcctgggccaccaggatcgccgaggcgccccagacggacctcgacttctggaaggcgctcactcccgttgcgatcgcgcacacgatcgggcacgtcgcggcgacggtgagcatggccaaggtggccgtgtcgttcacgcacatcatcaagagcggggagccggcattcagcgtgctcgtctccaggttcttcctcggcgagcacttcccggcgccggtctacttctccctcctcccgatcatcggtgggtgcgcgctcgccgccgtcaccgagctcaacttcaacatggttgggttcatgggggcaatgatctcgaacctggcgttcgtcgtccggaccatcttctccaagaaggggatgaagggcaagtccgtgagcgggatgaactactacgcctgcctctccatcatgtcgctggtgatcctcctccccttcgccgtcgccatggagggacccaagctctgggcggcgggctggcagcaagcagtcgccgagatcggccccaacttcgtctggtgggtggctgcgcagagcgtgttctaccacctgtacaaccaggtgtcgtacatgtcgctggacgagatctcgccgctcacgttctccatcggcaacaccatgaagaggatctccgtcatcgtcgcctccatcatcatcttccagacgcccgtccagcccatcaacgcgctcggagccgccatcgccatcctcggaaccttcatctactcccaggcaaagcagtaacgccttgcattaattggcgtctagatggcctgccctcatcagttcaccgcggatcagctcggtgctcgaagatgacagcttatgacctttgagaatgtctactaagaatcgccctttgtataatactactagatcctctcttttttgtattttctttcctaggactagcttccagtgttactgggctcatttcgtggtgtttctattatgactaagattagagagagaatgagagatggatccatctaaataaaggttccagattttttttcccctccc

SEQ ID NO: 31037 - protein, 442 aa, Zea mays subsp. mays
  peptide (1)..(442): Ceres Seq. ID no. 12413405
  misc_feature (160)..(285): Pfam Name: Pfam Description:  Integral membrane protein DUF6
  misc_feature (49)..(442): NCBI GI NO: 28564755 NR Description: putative glucose-6-phosphate/phosphate-translocator precursor
  misc_feature (78)..(441): NCBI GI NO: 7489744 NR Description: glucose-6-phosphate/ phosphate-translocatorprecursor
  misc_feature (130)..(442): NCBI GI NO: 18407336 NR Description: glucose-6-phosphate/ phosphate-translocatorprecursor
  misc_feature (87)..(442): NCBI GI NO: 14150753 NR Description: glucose-6-phosphate/phosphate translocator
  misc_feature (142)..(442): NCBI GI NO: 7488807 NR Description: glucose-6-phosphate/ phosphate-translocatorprecursor
  misc_feature (130)..(442): NCBI GI NO: 14596173 NR Description: Similar to glucose-6-phosphate/phosphate-translocator
  misc_feature (130)..(442): NCBI GI NO: 9295277 NR Description: glucose-6P/phosphate translocator precursor
  misc_feature (130)..(442): NCBI GI NO: 7484980 NR Description: glucose-6-phosphate/ phosphate translocatorprecursor
  misc_feature (80)..(441): NCBI GI NO: 18423670 NR Description: glucose-6-phosphate/phosphate translocator
  misc_feature (141)..(442): NCBI GI NO: 7489258 NR Description: probable glucose-6-phosphate/phosphate-translocatorprecursor - potato
QTRDTHTPHAVTHSLGLRSCRRLLLFDKTPRTRQPNLGQPPFLLPSATMQAAAASVKSSTTAAAAAATCKAGFKPLHLPPLPAAGSRPLSLSVSARPLYRQDHVLATTVAMAAAGRSDRAASPAPPSATADGARPVVEVAAPAETARRAKIGVYFATWWALNVIFNIYNKKVLNAFPYPWLTSTLSLAAGSAIMLASWATRIAEAPQTDLDFWKALTPVAIAHTIGHVAATVSMAKVAVSFTHIIKSGEPAFSVLVSRFFLGEHFPAPVYFSLLPIIGGCALAAVTELNFNMVGFMGAMISNLAFVVRTIFSKKGMKGKSVSGMNYYACLSIMSLVILLPFAVAMEGPKLWAAGWQQAVAEIGPNFVWWVAAQSVFYHLYNQVSYMSLDEISPLTFSIGNTMKRISVIVASIIIFQTPVQPINALGAAIAILGTFIYSQAKQ

SEQ ID NO: 31038 - protein, 394 aa, Zea mays subsp. mays
  peptide (1)..(394): Ceres Seq. ID no. 12413406
  misc_feature (112)..(237): Pfam Name: Pfam Description:  Integral membrane protein DUF6
  misc_feature (1)..(394): NCBI GI NO: 28564755 NR Description: putative glucose-6-phosphate/phosphate-translocator precursor
  misc_feature (30)..(393): NCBI GI NO: 7489744 NR Description: glucose-6-phosphate/ phosphate-translocatorprecursor
  misc_feature (82)..(394): NCBI GI NO: 18407336 NR Description: glucose-6-phosphate/ phosphate-translocatorprecursor
  misc_feature (39)..(394): NCBI GI NO: 14150753 NR Description: glucose-6-phosphate/phosphate translocator
  misc_feature (94)..(394): NCBI GI NO: 7488807 NR Description: glucose-6-phosphate/ phosphate-translocatorprecursor
  misc_feature (82)..(394): NCBI GI NO: 14596173 NR Description: Similar to glucose-6-phosphate/phosphate-translocator
  misc_feature (82)..(394): NCBI GI NO: 9295277 NR Description: glucose-6P/phosphate translocator precursor
  misc_feature (82)..(394): NCBI GI NO: 7484980 NR Description: glucose-6-phosphate/ phosphate translocatorprecursor
  misc_feature (32)..(393): NCBI GI NO: 18423670 NR Description: glucose-6-phosphate/phosphate translocator
  misc_feature (93)..(394): NCBI GI NO: 7489258 NR Description: probable glucose-6-phosphate/phosphate-translocatorprecursor - potato
MQAAAASVKSSTTAAAAAATCKAGFKPLHLPPLPAAGSRPLSLSVSARPLYRQDHVLATTVAMAAAGRSDRAASPAPPSATADGARPVVEVAAPAETARRAKIGVYFATWWALNVIFNIYNKKVLNAFPYPWLTSTLSLAAGSAIMLASWATRIAEAPQTDLDFWKALTPVAIAHTIGHVAATVSMAKVAVSFTHIIKSGEPAFSVLVSRFFLGEHFPAPVYFSLLPIIGGCALAAVTELNFNMVGFMGAMISNLAFVVRTIFSKKGMKGKSVSGMNYYACLSIMSLVILLPFAVAMEGPKLWAAGWQQAVAEIGPNFVWWVAAQSVFYHLYNQVSYMSLDEISPLTFSIGNTMKRISVIVASIIIFQTPVQPINALGAAIAILGTFIYSQAKQ

SEQ ID NO: 31039 - protein, 332 aa, Zea mays subsp. mays
  peptide (1)..(332): Ceres Seq. ID no. 12413407
  misc_feature (50)..(175): Pfam Name: Pfam Description:  Integral membrane protein DUF6
  misc_feature (1)..(332): NCBI GI NO: 28564755 NR Description: putative glucose-6-phosphate/phosphate-translocator precursor
  misc_feature (1)..(331): NCBI GI NO: 7489744 NR Description: glucose-6-phosphate/ phosphate-translocatorprecursor
  misc_feature (20)..(332): NCBI GI NO: 18407336 NR Description: glucose-6-phosphate/ phosphate-translocatorprecursor
  misc_feature (1)..(332): NCBI GI NO: 14150753 NR Description: glucose-6-phosphate/phosphate translocator
  misc_feature (32)..(332): NCBI GI NO: 7488807 NR Description: glucose-6-phosphate/ phosphate-translocatorprecursor
  misc_feature (20)..(332): NCBI GI NO: 14596173 NR Description: Similar to glucose-6-phosphate/phosphate-translocator
  misc_feature (20)..(332): NCBI GI NO: 9295277 NR Description: glucose-6P/phosphate translocator precursor
  misc_feature (20)..(332): NCBI GI NO: 7484980 NR Description: glucose-6-phosphate/ phosphate translocatorprecursor
  misc_feature (1)..(331): NCBI GI NO: 18423670 NR Description: glucose-6-phosphate/phosphate translocator
  misc_feature (31)..(332): NCBI GI NO: 7489258 NR Description: probable glucose-6-phosphate/phosphate-translocatorprecursor - potato
MAAAGRSDRAASPAPPSATADGARPVVEVAAPAETARRAKIGVYFATWWALNVIFNIYNKKVLNAFPYPWLTSTLSLAAGSAIMLASWATRIAEAPQTDLDFWKALTPVAIAHTIGHVAATVSMAKVAVSFTHIIKSGEPAFSVLVSRFFLGEHFPAPVYFSLLPIIGGCALAAVTELNFNMVGFMGAMISNLAFVVRTIFSKKGMKGKSVSGMNYYACLSIMSLVILLPFAVAMEGPKLWAAGWQQAVAEIGPNFVWWVAAQSVFYHLYNQVSYMSLDEISPLTFSIGNTMKRISVIVASIIIFQTPVQPINALGAAIAILGTFIYSQAKQ

SEQ ID NO: 31040 - DNA, 1154 bp, Zea mays subsp. mays
  misc_feature (1)..(1154): Ceres Seq. ID no. 12362323
atcatcccgattcccgacacgcttgtgttgtcgcgattggcaagctcggcggctcgtggcagcgggaacttacgaggcgaaggagagcgagggcgaccgcgcggatcgcatcgcagctctgggcggaggtggggccttgcgcggagatgctagcggtgttcgatcgggctgtggcgccgagcccggaggggctgcggcagccgggcgccgcggggggcggctgcgcggcgggcctcgcggaccggttcagagaggcgcggcccgacgcggtcaccgtcaaccttggcgggtccggcgccctggcgtactcctcgagcaaccagaaccccctcctccccaggttgtttggcgcggtggacggcgtattctgcatgttccagggaacaattgcgaacgttgctgtgctgaagcagcagtatgggttgagcaaaggcgctaatgaggtcagcatcatcatcgaggcttacaggaccttgagggacaggggcccttatcctgcagatcaggttgtgagggacataagtgggaaatttgcatttgtcctgtatgattgctccactaagtcggtcttcatggctgctatgcagctgttcagttattcccgaagacatatatctgatcacaggctactgctacgacgtacaatggtaccactggtattgaccggcaactgataggtagctcagctcgtgttcgtaacctcataacaggacaccgatggaaatgttccgttctactggggcgtggacaccgacgggcgtcttgtggtctctgacgacgccgaactcgtgaagagtgcctgtgggaaatcctgtgccccgttccccaaaggcttcttcttcacgacgtccggagggctgaggagctacgagcaccccatgcacgaggtgaagccggtgccgagggtggacagcaagggcgaggtgtgcggcacgacgtacacggtcgacgcaagcgccaggaaggagaccaccatcccaagggtcggcagcgccgccgactggtcttcgcagtactaaaattcgttatctttctctgtgtgtgttgaacgggttcgagcgcaggtagcagggcgtcgcacgggcgtggcccgtgtttgttcgcatggaaaccctagctgtctggtgtttatctgaatgaatagactgttctct

SEQ ID NO: 31041 - protein, 223 aa, Zea mays subsp. mays
  peptide (1)..(223): Ceres Seq. ID no. 12362324
  misc_feature (18)..(193): NCBI GI NO: 30017570 NR Description: unknown protein
  misc_feature (49)..(193): NCBI GI NO: 32352176 NR Description: hypothetical protein
  misc_feature (49)..(192): NCBI GI NO: 15228883 NR Description: unknown protein; protein id: At3g22850
  misc_feature (49)..(193): NCBI GI NO: 20340249 NR Description: aluminum-induced protein-like protein
  misc_feature (49)..(193): NCBI GI NO: 15239993 NR Description: aluminum-induced protein-like
  misc_feature (49)..(192): NCBI GI NO: 542200 NR Description: hypothetical protein - garden asparagus
  misc_feature (49)..(192): NCBI GI NO: 18400774 NR Description: expressed protein; protein id: At3g15450
  misc_feature (49)..(196): NCBI GI NO: 15239658 NR Description: aluminium-induced protein - like
  misc_feature (49)..(202): NCBI GI NO: 7486256 NR Description: hypothetical protein F27G19
  misc_feature (49)..(192): NCBI GI NO: 18416995 NR Description: putative protein; protein id: At4g27450
HPDSRHACVVAIGKLGGSWQRELTRRRRARATARIASQLWAEVGPCAEMLAVFDRAVAPSPEGLRQPGAAGGGCAAGLADRFREARPDAVTVNLGGSGALAYSSSNQNPLLPRLFGAVDGVFCMFQGTIANVAVLKQQYGLSKGANEVSIIIEAYRTLRDRGPYPADQVVRDISGKFAFVLYDCSTKSVFMAAMQLFSYSRRHISDHRLLLRRTMVPLVLTGN

SEQ ID NO: 31042 - protein, 175 aa, Zea mays subsp. mays
  peptide (1)..(175): Ceres Seq. ID no. 12362325
  misc_feature (1)..(145): NCBI GI NO: 30017570 NR Description: unknown protein
  misc_feature (1)..(145): NCBI GI NO: 32352176 NR Description: hypothetical protein
  misc_feature (1)..(144): NCBI GI NO: 15228883 NR Description: unknown protein; protein id: At3g22850
  misc_feature (1)..(145): NCBI GI NO: 20340249 NR Description: aluminum-induced protein-like protein
  misc_feature (1)..(145): NCBI GI NO: 15239993 NR Description: aluminum-induced protein-like
  misc_feature (1)..(144): NCBI GI NO: 542200 NR Description: hypothetical protein - garden asparagus
  misc_feature (1)..(144): NCBI GI NO: 18400774 NR Description: expressed protein; protein id: At3g15450
  misc_feature (1)..(148): NCBI GI NO: 15239658 NR Description: aluminium-induced protein - like
  misc_feature (1)..(154): NCBI GI NO: 7486256 NR Description: hypothetical protein F27G19
  misc_feature (1)..(144): NCBI GI NO: 18416995 NR Description: putative protein; protein id: At4g27450
MLAVFDRAVAPSPEGLRQPGAAGGGCAAGLADRFREARPDAVTVNLGGSGALAYSSSNQNPLLPRLFGAVDGVFCMFQGTIANVAVLKQQYGLSKGANEVSIIIEAYRTLRDRGPYPADQVVRDISGKFAFVLYDCSTKSVFMAAMQLFSYSRRHISDHRLLLRRTMVPLVLTGN

SEQ ID NO: 31043 - protein, 145 aa, Zea mays subsp. mays
  peptide (1)..(145): Ceres Seq. ID no. 12362326
SSRFPTRLCCRDWQARRLVAAGTYEAKESEGDRADRIAALGGGGALRGDASGVRSGCGAEPGGAAAAGRRGGRLRGGPRGPVQRGAARRGHRQPWRVRRPGVLLEQPEPPPPQVVWRGGRRILHVPGNNCERCCAEAAVWVEQRR

SEQ ID NO: 31044 - DNA, 779 bp, Zea mays subsp. mays
  misc_feature (1)..(779): Ceres Seq. ID no. 12348111
cagagccatctcctttgcttgctgtccacttggttgacattctgtacagttactgcttcacacttcggctctacaacggtgattggcactcagatcctttgggtgcttgcactgtcgccctgtcgatgtcgaaagtcatgggccaggatgctaaacctgagactgtacctgaagcactcgcagcctgcatcgaggagacatgctcaccagcttacaggcatactggtggtttcaggtttgctattggactcgtggacgatatcatcgccattctctccttgggacagaacgcacttatttgtgccttatgcgacttccatcgactcattgaagttggtaagagcatgctcaaggtggagaaagtgggcaagacggagagggcacagaactctccgaagcttcgtagtgcagctaggaagctattcttcatgacttgttgggtccatgagcagccagatgaggcgtggccatctttagctcacatcgtccaggtgcagaaagcatctatggaggagttggagaccgggaattggaaggcggatagaaagagcaaaccacaatccgcggttcttatcgaggagctgtaggcatatggatgtaccactggaaattggatcgcgaggctatgtacccttgtgtatcgctcaggatgaatccaacgagagaccgtccttgtaatgcagttagttgcttctgtgtacacttttttttgaaaaaaattgtatttgtatacgagtttgaaatcctagttgaagcgatcctgctttactttgcttgtc

SEQ ID NO: 31045 - protein, 194 aa, Zea mays subsp. mays
  peptide (1)..(194): Ceres Seq. ID no. 12348112
  misc_feature (2)..(194): NCBI GI NO: 15237537 NR Description: unknown protein; protein id: At5g63830.1
  misc_feature (53)..(194): NCBI GI NO: 37536148 NR Description: hypothetical protein
EPSPLLAVHLVDILYSYCFTLRLYNGDWHSDPLGACTVALSMSKVMGQDAKPETVPEALAACIEETCSPAYRHTGGFRFAIGLVDDIIAILSLGQNALICALCDFHRLIEVGKSMLKVEKVGKTERAQNSPKLRSAARKLFFMTCWVHEQPDEAWPSLAHIVQVQKASMEELETGNWKADRKSKPQSAVLIEEL

SEQ ID NO: 31046 - protein, 153 aa, Zea mays subsp. mays
  peptide (1)..(153): Ceres Seq. ID no. 12348113
  misc_feature (1)..(153): NCBI GI NO: 15237537 NR Description: unknown protein; protein id: At5g63830.1
  misc_feature (12)..(153): NCBI GI NO: 37536148 NR Description: hypothetical protein
MSKVMGQDAKPETVPEALAACIEETCSPAYRHTGGFRFAIGLVDDIIAILSLGQNALICALCDFHRLIEVGKSMLKVEKVGKTERAQNSPKLRSAARKLFFMTCWVHEQPDEAWPSLAHIVQVQKASMEELETGNWKADRKSKPQSAVLIEEL

SEQ ID NO: 31047 - protein, 149 aa, Zea mays subsp. mays
  peptide (1)..(149): Ceres Seq. ID no. 12348114
  misc_feature (1)..(149): NCBI GI NO: 15237537 NR Description: unknown protein; protein id: At5g63830.1
  misc_feature (8)..(149): NCBI GI NO: 37536148 NR Description: hypothetical protein
MGQDAKPETVPEALAACIEETCSPAYRHTGGFRFAIGLVDDIIAILSLGQNALICALCDFHRLIEVGKSMLKVEKVGKTERAQNSPKLRSAARKLFFMTCWVHEQPDEAWPSLAHIVQVQKASMEELETGNWKADRKSKPQSAVLIEEL

SEQ ID NO: 31048 - DNA, 991 bp, Zea mays subsp. mays
  misc_feature (1)..(991): Ceres Seq. ID no. 12407059
  misc_feature (981)..(981): n is a, c, t, g, unknown, or other
  misc_feature (962)..(962): n is a, c, t, g, unknown, or other
  misc_feature (961)..(961): n is a, c, t, g, unknown, or other
ccccctcctccactcgcctgtgtgtgtctgtctgtccatccatccatcccgctgccagtcctcgcgccgcccaccccgaaataaccggaaattgcaacccggtccacgggtcggatcccccaaaccgaaccctcccgagctcgcccggcgatggggatctcgagcatgccggagccgcgggacagcctgctggggtacctggtgtacaacgcggtggtgtcgatcgcggcgctggcggggctggtgcgggcggcgctggtgttcctggacctgcaggccgcgcagctgcccgggggcgcgggcgcgggtgcggacgacgacggcggggaccgtctcgcggcgtcgggcccgggcctgggcctggcggagcggttcctgagggccttccggccggcgctgtacggggtgctggtgtccacggcgtgcggcgcggcggaggcggccgcgggcgacgacgactgcagcgtgtgcctggccgggttcgaggcggaggccgtggtgaaccggctcccctgcggccacctcttccaccgcgcctgcctcgagacctggctccggtacgagcgcgccacgtgcccgctctgccgcgcccacgtgcccctccccgccgacgagacgccggtgctccgctacccggagctcgagtgatccgggcctcggcggccgtcgcgcgcctcggctgtgtgctgcaagctccgtgtggccttccgtgtgcgcgtagcaaaaggaaaaaaggagtataggagctgtagtagtagagttgctgttgctttccctttctcgttttgtgttttgcggttgccctgcccccatgctcttgttgtttccgcgctgtcgctgtagcgtgtaaatactccggttcgcccttggcagcagagagtagtagagtgctcccgtggctgggccgatggtgtagcaccttttacgagctcagctcgtgtgtgtacatttgcatgctttnnattcagtttcccgagccanaatatcgagg

SEQ ID NO: 31049 - protein, 246 aa, Zea mays subsp. mays
  peptide (1)..(246): Ceres Seq. ID no. 12407060
  misc_feature (14)..(214): Pfam Name: Pfam Description:  GATA-type transcription activator, N-terminal
  misc_feature (18)..(195): NCBI GI NO: 7494125 NR Description: myosin-IA - Acanthamoeba castellanii
  misc_feature (17)..(212): NCBI GI NO: 21222037 NR Description: putative serine-threonine protein kinase
  misc_feature (56)..(166): NCBI GI NO: 9625624 NR Description: nuclear antigen EBNA1 [Human herpesvirus 4]
  misc_feature (28)..(166): NCBI GI NO: 7106228 NR Description: flagelliform silk protein
  misc_feature (49)..(173): NCBI GI NO: 9625624 NR Description: nuclear antigen EBNA1 [Human herpesvirus 4]
  misc_feature (22)..(204): NCBI GI NO: 39594379 NR Description: Hypothetical protein CBG19026
  misc_feature (48)..(228): NCBI GI NO: 320926 NR Description: antigen 5401 - Eimeria tenella (fragment)
  misc_feature (33)..(181): NCBI GI NO: 71608 NR Description: myosin heavy chain IB - Acanthamoeba castellanii
  misc_feature (33)..(181): NCBI GI NO: 1171093 NR Description: Myosin heavy chain IB (Myosin heavy chain IL)
  misc_feature (56)..(213): NCBI GI NO: 775215 NR Description: EBNA1 [Herpesvirus papio]
PSSTRLCVSVCPSIHPAASPRAAHPEITGNCNPVHGSDPPNRTLPSSPGDGDLEHAGAAGQPAGVPGVQRGGVDRGAGGAGAGGAGVPGPAGRAAARGRGRGCGRRRRGPSRGVGPGPGPGGAVPEGLPAGAVRGAGVHGVRRGGGGRGRRRLQRVPGRVRGGGRGEPAPLRPPLPPRLPRDLAPVRARHVPALPRPRAPPRRRDAGAPLPGARVIRASAAVARLGCVLQAPCGLPCARSKRKKGV

SEQ ID NO: 31050 - protein, 165 aa, Zea mays subsp. mays
  peptide (1)..(165): Ceres Seq. ID no. 12407061
  misc_feature (104)..(145): Pfam Name: RING finger Pfam Description: Zinc finger, C3HC4 type
  misc_feature (1)..(146): NCBI GI NO: 20340241 NR Description: putative RING zinc finger protein-like protein
  misc_feature (1)..(154): NCBI GI NO: 15228108 NR Description: putative RING zinc finger protein
  misc_feature (14)..(158): NCBI GI NO: 34899858 NR Description: OJ1714_H10.11
  misc_feature (55)..(159): NCBI GI NO: 34899852 NR Description: OJ1714_H10.8
  misc_feature (93)..(149): NCBI GI NO: 37534730 NR Description: putative RING zinc finger protein
  misc_feature (1)..(157): NCBI GI NO: 7489432 NR Description: probable ring finger protein - barley
  misc_feature (27)..(165): NCBI GI NO: 34913258 NR Description: P0519E12.4
  misc_feature (104)..(156): NCBI GI NO: 15233696 NR Description: putative protein; protein id: At4g38140.1
  misc_feature (91)..(149): NCBI GI NO: 22324426 NR Description: hypothetical protein~predicted by FGENESH etc.
  misc_feature (101)..(157): NCBI GI NO: 15224210 NR Description: putative RING zinc finger protein
MGISSMPEPRDSLLGYLVYNAVVSIAALAGLVRAALVFLDLQAAQLPGGAGAGADDDGGDRLAASGPGLGLAERFLRAFRPALYGVLVSTACGAAEAAAGDDDCSVCLAGFEAEAVVNRLPCGHLFHRACLETWLRYERATCPLCRAHVPLPADETPVLRYPELE

SEQ ID NO: 31051 - protein, 160 aa, Zea mays subsp. mays
  peptide (1)..(160): Ceres Seq. ID no. 12407062
  misc_feature (99)..(140): Pfam Name: RING finger Pfam Description: Zinc finger, C3HC4 type
  misc_feature (1)..(141): NCBI GI NO: 20340241 NR Description: putative RING zinc finger protein-like protein
  misc_feature (1)..(149): NCBI GI NO: 15228108 NR Description: putative RING zinc finger protein
  misc_feature (9)..(153): NCBI GI NO: 34899858 NR Description: OJ1714_H10.11
  misc_feature (50)..(154): NCBI GI NO: 34899852 NR Description: OJ1714_H10.8
  misc_feature (88)..(144): NCBI GI NO: 37534730 NR Description: putative RING zinc finger protein
  misc_feature (1)..(152): NCBI GI NO: 7489432 NR Description: probable ring finger protein - barley
  misc_feature (22)..(160): NCBI GI NO: 34913258 NR Description: P0519E12.4
  misc_feature (99)..(151): NCBI GI NO: 15233696 NR Description: putative protein; protein id: At4g38140.1
  misc_feature (86)..(144): NCBI GI NO: 22324426 NR Description: hypothetical protein~predicted by FGENESH etc.
  misc_feature (96)..(152): NCBI GI NO: 15224210 NR Description: putative RING zinc finger protein
MPEPRDSLLGYLVYNAVVSIAALAGLVRAALVFLDLQAAQLPGGAGAGADDDGGDRLAASGPGLGLAERFLRAFRPALYGVLVSTACGAAEAAAGDDDCSVCLAGFEAEAVVNRLPCGHLFHRACLETWLRYERATCPLCRAHVPLPADETPVLRYPELE

SEQ ID NO: 31052 - DNA, 918 bp, Zea mays subsp. mays
  misc_feature (1)..(918): Ceres Seq. ID no. 12355344
tacatttattctcttcttcttgagcccctggcctccccctcctgccaggctgcgcattctttctccagctctctgataagctagccagcgtcgtcgtcgtgtcttgttagttattagctctatctcgccgccctgcagctgctgatcgagtgagggaattcagcagcagcagcagcaggtagcatagcatagatatgacggcggcggaggtggaggccgccaaggacatcgccgaggagaaggccgtcgtgccgttgccaccgtcgcccgccaagccggccgacgacgactccaaggccatcgtcgctcttgtcgtcaaggacgctgctgctgggaaaccttctacagctattattggaggctcaactgaaagagatgcttacctcgccaagatcgtgtccgagaagaggctgagtctgatcaccgcctgggaggagagccagaaggcgagagccgacaacagggctgccaagaagcttgccttcatcacgtcctgggagaacgccaagaaagcggagatggaggcggagctcagaaagattgaggagcaactggagaagaagaaggcggcgtacgaggagaagctcaagaacaagctggcgatgctgcacaggacggcggaggagaggagggcgcagacggaggccaggcgcggcgaggagaccatcctggcggaggagatggccgccaagtaccgcgccaagggcgagggccccaccaagctctttggcctcttgaaagcgtgacctcttgctatggagaatgccctgtttcgtgcgtgtatttcgtattcccaattgcacttggtgtgtgtgtgtacgtgttgtttgttgttttctcttgtattcgatggcttgcttgacatctgttgtattgtatttgtatagaagtgcagtgcagtgcagtgctattctttct

SEQ ID NO: 31053 - protein, 183 aa, Zea mays subsp. mays
  peptide (1)..(183): Ceres Seq. ID no. 12355345
  misc_feature (70)..(178): Pfam Name: Pfam Description:  Remorin, C-terminal region
  misc_feature (1)..(180): NCBI GI NO: 4731573 NR Description: remorin 1 [Lycopersicon esculentum]
  misc_feature (6)..(180): NCBI GI NO: 34925093 NR Description: Remorin (pp34)
  misc_feature (8)..(181): NCBI GI NO: 15237822 NR Description: putative protein; protein id: At5g23750
  misc_feature (8)..(181): NCBI GI NO: 21555669 NR Description: remorin [Arabidopsis thaliana]
  misc_feature (6)..(179): NCBI GI NO: 15229057 NR Description: remorin -like protein; protein id: At3g48940.1
  misc_feature (2)..(179): NCBI GI NO: 15233068 NR Description: putative DNA-binding protein; protein id:At3g61260
  misc_feature (52)..(179): NCBI GI NO: 22758339 NR Description: putative remorin protein
  misc_feature (7)..(177): NCBI GI NO: 4883530 NR Description: remorin 2 [Lycopersicon esculentum]
  misc_feature (5)..(179): NCBI GI NO: 15225899 NR Description: remorin; protein id: At2g45820
  misc_feature (5)..(179): NCBI GI NO: 601843 NR Description: DNA-binding protein
MTAAEVEAAKDIAEEKAVVPLPPSPAKPADDDSKAIVALVVKDAAAGKPSTAIIGGSTERDAYLAKIVSEKRLSLITAWEESQKARADNRAAKKLAFITSWENAKKAEMEAELRKIEEQLEKKKAAYEEKLKNKLAMLHRTAEERRAQTEARRGEETILAEEMAAKYRAKGEGPTKLFGLLKA

SEQ ID NO: 31054 - DNA, 1877 bp, Zea mays subsp. mays
  misc_feature (1)..(1877): Ceres Seq. ID no. 12349351
agcagaatttagttatggcccatggctcattaaccactgggccaccggccaaccgcccaccagcataccggctccagtgatcgacgccgggtcgccggcgaaggaagaacagtcaggacgaggaaagaaaaaacaacagaaacgaggaagaaaaacggaaaaaatagagcggcggggcgagatctacgacgcggccgcgggaaggagaggactgcctctacgcaatcccgctatcctggcgacatccacgactccgatatccggtctctcttctctggataaccacaccaccaatcatgagggaatcaccttcaacacagggggggccatctacatcttctgcggttgatgatagttactcagctgacggtgttgaagattcacaactattcctctccgtgccagctttaaaccaagctgcatcttatcttgcccagacagcttcattcctcactcaatgcctccctgtacctggttttgtgggtctatctgaggagggccaagagttattaacactgccacctgcatcggcttcaggcagactttctgttcagacttcttcagtagagccttccggtaccaattcatcccttggtcagtcagattgtggtggaaacccctctcaagaaaacgctggacagatggtgccttcgcatgtttttcagaatggagcttcactgttccaaggccttgttgaacgtgctcggaaaacggtccgtggttcagcagatgatattggctggctccagcgagatcaaagcttacctacaactgaggatgggacagccagattcttagagattttggattctgtgagaaaaaatgaacacaagctatctgattcattggtttacttgttggttccaggtctgtttagtaaccacggacctctttactttgtcaaaacaaaggcatatttctccaagatgggtctggcttgccatattgccaaaattcatagtgagtcttcagtgagtaaaaatgcacgagagataaaggaatacatagaagaaatatactggggatcaaggaaacgtgtgctcctccttggtcacagcaagggtggtgttgatgcggctgcagccctctccctctactgaccacaactcaaagacaaagtcgcaggtttagcattagcccaaagtccatatggaggaagccccgttgcttcagatatcctgcgagaggggcagcttggtgactatgtcaggctgcgtaagatcatggagatcttggtatccaaggtccttaagggtgatctgcaggctctagaagatctgacttatgaaaggcggaaagaattcctgcgacggcacccgctacctcaggatgttcctatcgtttcgttccacacggaggcaagcatcactcccagcgtgctcacagcgctctctcacgttgcacacctggagctcccgattgctggcgatggcaattccactaggatcccagttgtgatgccactttcagccgcgatggcagcatgctcgcagttgctggtggcgaggtatggcgagaagagtgacggtctcgtgacgaggaaagatgctgaggttcctggttcagtggcggtccggccggagcggaagctagaccacgcgtggatggtgtattcgtcgctgaaagaagagtctggggatcaggcggacacgtcgcaggtatgcgaagccctgctgactctacttgtcgaggttgcacagaagaggaggcatgagatggcaatgaaagacgagtgaaagtagcttttggtgttggctggcgatagtgggatgtatcctcctgtaatcgtagactggcctgttgctggctgtacagagttgtgctgctcaaagtgctttgggacctgtttttgtttggttgacagaaacttgtgttgt

SEQ ID NO: 31055 - protein, 267 aa, Zea mays subsp. mays
  peptide (1)..(267): Ceres Seq. ID no. 12349352
  misc_feature (1)..(267): NCBI GI NO: 30689883 NR Description: expressed protein [Arabidopsis thaliana]
  misc_feature (1)..(267): NCBI GI NO: 18377628 NR Description: unknown protein [Arabidopsis thaliana]
  misc_feature (1)..(267): NCBI GI NO: 7486943 NR Description: hypothetical protein At2g44970
MRESPSTQGGPSTSSAVDDSYSADGVEDSQLFLSVPALNQAASYLAQTASFLTQCLPVPGFVGLSEEGQELLTLPPASASGRLSVQTSSVEPSGTNSSLGQSDCGGNPSQENAGQMVPSHVFQNGASLFQGLVERARKTVRGSADDIGWLQRDQSLPTTEDGTARFLEILDSVRKNEHKLSDSLVYLLVPGLFSNHGPLYFVKTKAYFSKMGLACHIAKIHSESSVSKNAREIKEYIEEIYWGSRKRVLLLGHSKGGVDAAAALSLY

SEQ ID NO: 31056 - protein, 170 aa, Zea mays subsp. mays
  peptide (1)..(170): Ceres Seq. ID no. 12349353
  misc_feature (1)..(168): NCBI GI NO: 30689883 NR Description: expressed protein [Arabidopsis thaliana]
  misc_feature (1)..(168): NCBI GI NO: 18377628 NR Description: unknown protein [Arabidopsis thaliana]
  misc_feature (1)..(168): NCBI GI NO: 7486943 NR Description: hypothetical protein At2g44970
MEILVSKVLKGDLQALEDLTYERRKEFLRRHPLPQDVPIVSFHTEASITPSVLTALSHVAHLELPIAGDGNSTRIPVVMPLSAAMAACSQLLVARYGEKSDGLVTRKDAEVPGSVAVRPERKLDHAWMVYSSLKEESGDQADTSQVCEALLTLLVEVAQKRRHEMAMKDE

SEQ ID NO: 31057 - protein, 152 aa, Zea mays subsp. mays
  peptide (1)..(152): Ceres Seq. ID no. 12349354
  misc_feature (1)..(152): NCBI GI NO: 30689883 NR Description: expressed protein [Arabidopsis thaliana]
  misc_feature (1)..(152): NCBI GI NO: 18377628 NR Description: unknown protein [Arabidopsis thaliana]
  misc_feature (1)..(152): NCBI GI NO: 7486943 NR Description: hypothetical protein At2g44970
MVPSHVFQNGASLFQGLVERARKTVRGSADDIGWLQRDQSLPTTEDGTARFLEILDSVRKNEHKLSDSLVYLLVPGLFSNHGPLYFVKTKAYFSKMGLACHIAKIHSESSVSKNAREIKEYIEEIYWGSRKRVLLLGHSKGGVDAAAALSLY

SEQ ID NO: 31058 - DNA, 1501 bp, Zea mays subsp. mays
  misc_feature (1)..(1501): Ceres Seq. ID no. 12362374
gatgatgatgaataggccgcaaccgcagcaagccggcccgctgcagctcctccgttcgctaggactaggcgtaggcggaggcggaggcgcccggcggggggccatgaagtcggccacgtcgctcctgctcggcgctgcgctcgccaccgccttcttccttctctacacctccctctgccgcgacctcggcagcgccgctgccgccgcgcccaggtcgggatcgtcgccgccgccgacgccgcggcgggagcaggagaccggcgacacggccgccgctcggcaggaggccgccacgggagagggcggggaagaacgtgtggctgcgagcagcgacggcggccgcagaggcggcggcgccaccgccgccacagcggaggagaatggtcagagcaaggaggaggagcagcggcggattgtgatgcctgccacgtcaacaacccacgaggccacctcccaccatagaccgcagccgaagcaacagaagaagaagaggagcccaccagcagcgtcccaggatctggcggacctgctccggcgagcggcgacggcggacaagacggtgctgatgacggcgatcaacgaggcgtgggcagcgccagggtcgttcctggacctgttcctggagagcttccgccagggcgaggacaccgcgggcctgccgcggcacctgctggtcgtggccatggacggcagggccctggagcggtgcaacgccgtgcaccccttctgctacctgttccgcgtcgacggcatggacttcgccgccgagcagaagtacatggagggcgactacctggagatgatgtggcgccggaaccggttccagcagagcgtgctggagctgggctacagcttcctcttcacggacgtggacatcctgtggttccggagcccgttcccgcgcctgccccgcgccgcgcaggtcgtcatgtcggccgacttcttcgtcggcgacgccgactcgcccaacaactaccccaacggcggcctcctctacgtccgctcctcgcccgccacggtgggcttctaccgccactggcaggcgtcgcgcgcgaggttcccgggccaccacgagcagtacgtcttcgacaagatcgtcaaggaagggtacggccggcgcccgggtgcagttcctggacacggccgtcttcgggggtttctgccagcacggcgacgacctgggcagggtggccaccatgcacgccaactgctgcgtggggctggacaacaagctcttcgacctcaagaacgtgctgcaggactggaagacctacagagcacgcgccgccgccggcaacgcgcagggtttctcgtggcgggtgcccggaaaatgcatacactgactctagactctggaggggttgagctcatttttcgattgttcgccagatagtacaacttaacagctacatctcatttttccccctaatgtatacatacatatattgtttatatatatatatttgtaaagctttttatggaatgtaaaaaaattattatt

SEQ ID NO: 31059 - protein, 463 aa, Zea mays subsp. mays
  peptide (1)..(463): Ceres Seq. ID no. 12362375
  misc_feature (36)..(376): NCBI GI NO: 34904674 NR Description: P0446G09.1
  misc_feature (155)..(368): NCBI GI NO: 34897442 NR Description: putative regulatory protein
  misc_feature (24)..(96): NCBI GI NO: 34897442 NR Description: putative regulatory protein
  misc_feature (107)..(373): NCBI GI NO: 19386737 NR Description: P0678F11.26
  misc_feature (36)..(368): NCBI GI NO: 34897440 NR Description: putative regulatory protein
  misc_feature (173)..(375): NCBI GI NO: 15223826 NR Description: hypothetical protein common family
  misc_feature (145)..(365): NCBI GI NO: 18395292 NR Description: unknown protein; protein id: At2g02060.1
  misc_feature (172)..(368): NCBI GI NO: 19386795 NR Description: OJ1485_B09.3
  misc_feature (172)..(368): NCBI GI NO: 19386738 NR Description: P0678F11.28
  misc_feature (172)..(368): NCBI GI NO: 19386742 NR Description: P0678F11.32
MMMNRPQPQQAGPLQLLRSLGLGVGGGGGARRGAMKSATSLLLGAALATAFFLLYTSLCRDLGSAAAAAPRSGSSPPPTPRREQETGDTAAARQEAATGEGGEERVAASSDGGRRGGGATAATAEENGQSKEEEQRRIVMPATSTTHEATSHHRPQPKQQKKKRSPPAASQDLADLLRRAATADKTVLMTAINEAWAAPGSFLDLFLESFRQGEDTAGLPRHLLVVAMDGRALERCNAVHPFCYLFRVDGMDFAAEQKYMEGDYLEMMWRRNRFQQSVLELGYSFLFTDVDILWFRSPFPRLPRAAQVVMSADFFVGDADSPNNYPNGGLLYVRSSPATVGFYRHWQASRARFPGHHEQYVFDKIVKEGYGRRPGAVPGHGRLRGFLPARRRPGQGGHHARQLLRGAGQQALRPQERAAGLEDLQSTRRRRQRAGFLVAGARKMHTLTLDSGGVELIFRLFAR

SEQ ID NO: 31060 - protein, 462 aa, Zea mays subsp. mays
  peptide (1)..(462): Ceres Seq. ID no. 12362376
  misc_feature (35)..(375): NCBI GI NO: 34904674 NR Description: P0446G09.1
  misc_feature (154)..(367): NCBI GI NO: 34897442 NR Description: putative regulatory protein
  misc_feature (23)..(95): NCBI GI NO: 34897442 NR Description: putative regulatory protein
  misc_feature (106)..(372): NCBI GI NO: 19386737 NR Description: P0678F11.26
  misc_feature (35)..(367): NCBI GI NO: 34897440 NR Description: putative regulatory protein
  misc_feature (172)..(374): NCBI GI NO: 15223826 NR Description: hypothetical protein common family
  misc_feature (144)..(364): NCBI GI NO: 18395292 NR Description: unknown protein; protein id: At2g02060.1
  misc_feature (171)..(367): NCBI GI NO: 19386795 NR Description: OJ1485_B09.3
  misc_feature (171)..(367): NCBI GI NO: 19386738 NR Description: P0678F11.28
  misc_feature (171)..(367): NCBI GI NO: 19386742 NR Description: P0678F11.32
MMNRPQPQQAGPLQLLRSLGLGVGGGGGARRGAMKSATSLLLGAALATAFFLLYTSLCRDLGSAAAAAPRSGSSPPPTPRREQETGDTAAARQEAATGEGGEERVAASSDGGRRGGGATAATAEENGQSKEEEQRRIVMPATSTTHEATSHHRPQPKQQKKKRSPPAASQDLADLLRRAATADKTVLMTAINEAWAAPGSFLDLFLESFRQGEDTAGLPRHLLVVAMDGRALERCNAVHPFCYLFRVDGMDFAAEQKYMEGDYLEMMWRRNRFQQSVLELGYSFLFTDVDILWFRSPFPRLPRAAQVVMSADFFVGDADSPNNYPNGGLLYVRSSPATVGFYRHWQASRARFPGHHEQYVFDKIVKEGYGRRPGAVPGHGRLRGFLPARRRPGQGGHHARQLLRGAGQQALRPQERAAGLEDLQSTRRRRQRAGFLVAGARKMHTLTLDSGGVELIFRLFAR

SEQ ID NO: 31061 - protein, 461 aa, Zea mays subsp. mays
  peptide (1)..(461): Ceres Seq. ID no. 12362377
  misc_feature (34)..(374): NCBI GI NO: 34904674 NR Description: P0446G09.1
  misc_feature (153)..(366): NCBI GI NO: 34897442 NR Description: putative regulatory protein
  misc_feature (22)..(94): NCBI GI NO: 34897442 NR Description: putative regulatory protein
  misc_feature (105)..(371): NCBI GI NO: 19386737 NR Description: P0678F11.26
  misc_feature (34)..(366): NCBI GI NO: 34897440 NR Description: putative regulatory protein
  misc_feature (171)..(373): NCBI GI NO: 15223826 NR Description: hypothetical protein common family
  misc_feature (143)..(363): NCBI GI NO: 18395292 NR Description: unknown protein; protein id: At2g02060.1
  misc_feature (170)..(366): NCBI GI NO: 19386795 NR Description: OJ1485_B09.3
  misc_feature (170)..(366): NCBI GI NO: 19386738 NR Description: P0678F11.28
  misc_feature (170)..(366): NCBI GI NO: 19386742 NR Description: P0678F11.32
MNRPQPQQAGPLQLLRSLGLGVGGGGGARRGAMKSATSLLLGAALATAFFLLYTSLCRDLGSAAAAAPRSGSSPPPTPRREQETGDTAAARQEAATGEGGEERVAASSDGGRRGGGATAATAEENGQSKEEEQRRIVMPATSTTHEATSHHRPQPKQQKKKRSPPAASQDLADLLRRAATADKTVLMTAINEAWAAPGSFLDLFLESFRQGEDTAGLPRHLLVVAMDGRALERCNAVHPFCYLFRVDGMDFAAEQKYMEGDYLEMMWRRNRFQQSVLELGYSFLFTDVDILWFRSPFPRLPRAAQVVMSADFFVGDADSPNNYPNGGLLYVRSSPATVGFYRHWQASRARFPGHHEQYVFDKIVKEGYGRRPGAVPGHGRLRGFLPARRRPGQGGHHARQLLRGAGQQALRPQERAAGLEDLQSTRRRRQRAGFLVAGARKMHTLTLDSGGVELIFRLFAR

SEQ ID NO: 31062 - DNA, 1523 bp, Zea mays subsp. mays
  misc_feature (1)..(1523): Ceres Seq. ID no. 12367639
gatctgccatggcctcgctccagtcctttctcgccgtcaaaccggccgccggctgggccgctccgtcccgccgcgcgcgcgtcgcggccttcctcgctccgccgcccccgaccaccgcggccgccgtgggggcggcgcggcgggagctgtcggccgcgagcctggccgtcgtggacggcgaggcgcggtacctcgtcggcacctacaagcggtcccgcgtcgtcttcgagcacggccgcgggtgcaagctctacgataccgacggccgcgagtacctcgacatggccgccggcatcgccgtcacggcgctcgggccacgcggacccagacgtgtgcgccaccatcgcggagcaggccggtaaggtcgtccacgtcagcaacgtcttctacaccaaaccccaggtggagctagccaagcggctcgttgaggtgtcgttcgcggaccgcgccttcttcgccagcactggcacggaggccaacgaggcggccatcaaattctcccgcaagttccagcgggccgcacacccggagagcggcgacccgcccacggagttcctggcgttcagcagcagcttccacggccggaccatgggcgccgtcgcgctcaccagcaagtcgcagtaccgggagcccttcgcgcccgtcatgcctggggtgaccttcgtggattacggcgatctggaggcggccaagaagttcgtacggtccggcagggtcgctgctgtcttcgtcgagcccgtgcagggtgagggtggcattcacagtgccaccagggagttcttgcaggggctgcgggacgcctgtgacgaggcgggagccctcttggtctttgatgaggtgcagtgtggtttcgggcgcacaggccacctctgggcgcatgaggcgtacggagtggaaccagacataatgaccttagcgaagccactggccaacggcattcccatcggcgttgtcctggtgaaggagaagatcgccgcagccataaactacggcgaccacggcacgacgtttggcggcgggcctctcgcctgccagaccgcgataacggtgttcgacaagatcacgagacccggtttcctggccgaggtgtcgaggaaaggggagagcttcaagcagctgctccgcgccaagctgagcgggaacccgcacgtgagggaggtccgcggggtcggccttctcgtcggcgtcgagctggacgtgccagctggtcctctggtcgacgcgtgcttggacgccggcgtcgtcgtgctgactgccggtaagggcaatgtggtgaggctggtgccgccgctcatcgtctcggagaaggagctggagcatgccgcggatgtcataagggactgtctaccggcgctcgatgtcgttgctgctgccctatgtatatggtggtgcaataggtccggatatgaaacctgattccaaattttggaatcgaataaatttcatgtcgggccaatgttgttgtgttcattgaaacaaactcttttttttttggaatcgaataattattacatgtcagaccg

SEQ ID NO: 31063 - protein, 471 aa, Zea mays subsp. mays
  peptide (1)..(471): Ceres Seq. ID no. 12367640
  misc_feature (105)..(453): Pfam Name: Pfam Description:  Aminotransferase class-III
  misc_feature (105)..(453): NCBI GI NO: 2811029 NR Description: Acetylornithine aminotransferase
  misc_feature (105)..(453): NCBI GI NO: 15220176 NR Description: putative acetylornithine transaminase
  misc_feature (105)..(453): NCBI GI NO: 21554043 NR Description: putative acetylornithine transaminase
  misc_feature (186)..(426): NCBI GI NO: 34394063 NR Description: putative acetylornithine aminotransferase
  misc_feature (105)..(451): NCBI GI NO: 22972847 NR Description: hypothetical protein [Chloroflexus aurantiacus]
  misc_feature (105)..(437): NCBI GI NO: 15668902 NR Description: acetylornithine aminotransferase (argD)
  misc_feature (105)..(452): NCBI GI NO: 15644529 NR Description: acetylornithine aminotransferase
  misc_feature (106)..(445): NCBI GI NO: 23021780 NR Description: hypothetical protein
  misc_feature (105)..(456): NCBI GI NO: 27262344 NR Description: Acetylornithine aminotransferase
  misc_feature (105)..(445): NCBI GI NO: 15679337 NR Description: N-acetylornithine aminotransferase
DLPWPRSSPFSPSNRPPAGPLRPAARASRPSSLRRPRPPRPPWGRRGGSCRPRAWPSWTARRGTSSAPTSGPASSSSTAAGASSTIPTAASTSTWPPASPSRRSGHADPDVCATIAEQAGKVVHVSNVFYTKPQVELAKRLVEVSFADRAFFASTGTEANEAAIKFSRKFQRAAHPESGDPPTEFLAFSSSFHGRTMGAVALTSKSQYREPFAPVMPGVTFVDYGDLEAAKKFVRSGRVAAVFVEPVQGEGGIHSATREFLQGLRDACDEAGALLVFDEVQCGFGRTGHLWAHEAYGVEPDIMTLAKPLANGIPIGVVLVKEKIAAAINYGDHGTTFGGGPLACQTAITVFDKITRPGFLAEVSRKGESFKQLLRAKLSGNPHVREVRGVGLLVGVELDVPAGPLVDACLDAGVVVLTAGKGNVVRLVPPLIVSEKELEHAADVIRDCLPALDVVAAALCIWWCNRSGYET

SEQ ID NO: 31064 - protein, 275 aa, Zea mays subsp. mays
  peptide (1)..(275): Ceres Seq. ID no. 12367641
  misc_feature (1)..(257): Pfam Name: Pfam Description:  Aminotransferase class-III
  misc_feature (1)..(257): NCBI GI NO: 2811029 NR Description: Acetylornithine aminotransferase
  misc_feature (1)..(257): NCBI GI NO: 15220176 NR Description: putative acetylornithine transaminase
  misc_feature (1)..(257): NCBI GI NO: 21554043 NR Description: putative acetylornithine transaminase
  misc_feature (1)..(230): NCBI GI NO: 34394063 NR Description: putative acetylornithine aminotransferase
  misc_feature (1)..(255): NCBI GI NO: 22972847 NR Description: hypothetical protein [Chloroflexus aurantiacus]
  misc_feature (1)..(241): NCBI GI NO: 15668902 NR Description: acetylornithine aminotransferase (argD)
  misc_feature (1)..(256): NCBI GI NO: 15644529 NR Description: acetylornithine aminotransferase
  misc_feature (1)..(249): NCBI GI NO: 23021780 NR Description: hypothetical protein
  misc_feature (1)..(260): NCBI GI NO: 27262344 NR Description: Acetylornithine aminotransferase
  misc_feature (1)..(249): NCBI GI NO: 15679337 NR Description: N-acetylornithine aminotransferase
MGAVALTSKSQYREPFAPVMPGVTFVDYGDLEAAKKFVRSGRVAAVFVEPVQGEGGIHSATREFLQGLRDACDEAGALLVFDEVQCGFGRTGHLWAHEAYGVEPDIMTLAKPLANGIPIGVVLVKEKIAAAINYGDHGTTFGGGPLACQTAITVFDKITRPGFLAEVSRKGESFKQLLRAKLSGNPHVREVRGVGLLVGVELDVPAGPLVDACLDAGVVVLTAGKGNVVRLVPPLIVSEKELEHAADVIRDCLPALDVVAAALCIWWCNRSGYET

SEQ ID NO: 31065 - protein, 256 aa, Zea mays subsp. mays
  peptide (1)..(256): Ceres Seq. ID no. 12367642
  misc_feature (1)..(238): Pfam Name: Pfam Description:  Aminotransferase class-III
  misc_feature (1)..(238): NCBI GI NO: 2811029 NR Description: Acetylornithine aminotransferase
  misc_feature (1)..(238): NCBI GI NO: 15220176 NR Description: putative acetylornithine transaminase
  misc_feature (1)..(238): NCBI GI NO: 21554043 NR Description: putative acetylornithine transaminase
  misc_feature (1)..(211): NCBI GI NO: 34394063 NR Description: putative acetylornithine aminotransferase
  misc_feature (1)..(236): NCBI GI NO: 22972847 NR Description: hypothetical protein [Chloroflexus aurantiacus]
  misc_feature (1)..(222): NCBI GI NO: 15668902 NR Description: acetylornithine aminotransferase (argD)
  misc_feature (1)..(237): NCBI GI NO: 15644529 NR Description: acetylornithine aminotransferase
  misc_feature (1)..(230): NCBI GI NO: 23021780 NR Description: hypothetical protein
  misc_feature (1)..(241): NCBI GI NO: 27262344 NR Description: Acetylornithine aminotransferase
  misc_feature (1)..(230): NCBI GI NO: 15679337 NR Description: N-acetylornithine aminotransferase
MPGVTFVDYGDLEAAKKFVRSGRVAAVFVEPVQGEGGIHSATREFLQGLRDACDEAGALLVFDEVQCGFGRTGHLWAHEAYGVEPDIMTLAKPLANGIPIGVVLVKEKIAAAINYGDHGTTFGGGPLACQTAITVFDKITRPGFLAEVSRKGESFKQLLRAKLSGNPHVREVRGVGLLVGVELDVPAGPLVDACLDAGVVVLTAGKGNVVRLVPPLIVSEKELEHAADVIRDCLPALDVVAAALCIWWCNRSGYET

SEQ ID NO: 31066 - DNA, 1997 bp, Zea mays subsp. mays
  misc_feature (1)..(1997): Ceres Seq. ID no. 12373118
agaggagagagtcgctctgcactgcacgactcctcccccatctaccactacctgtctacctacccagcccatcgactgcccctcgcaacgcaatggcgctcgccaccaactccgccgctgccgcagcagctgccgtatccggcggcgcggcatcccagccgcaccgcgcggccacgttcctcccgctgaagaggcgcaccatctccgccatccacgccgccgacccgtctaagaacaacgggcccgccgtccccgcggccgccgccgctaagtcatctgcctctgcggtggccacgccggagaagaatccggcggcgccggtaaagtgggcggtcgacagctggaagtcgaagaaggcgctgcagctcccagagtacccaaaccaggaggagctggacacggtgctcaagaccatcgagacgttcccgccggtggtgttcgccggagaggcgcgtcacctcgaggagcgcatggccgaggccgccatgggccgcgccttcatcctccagggcggcgactgcgccgagagcttcaaggagttccacgccaacaacatccgtgacaccttccgtattctgcttcagatgggcgccgtgctcatgttcggtggtcaggtgccggtcgtcaaggtggggaggatggctggccagtttgccaagccaaggtccgaaccgttggaggagagggacggcgtcaagctgccaagctacaggggcgacaacgtcaacggcgacgacttcaccgagaagagccgcgtgccagacccgcagaggatgatccgcgcctactcgcagtcggtggcgacgctcaacctgctccgcgcgttggcgaccggagggtacgctgccatgcagcgcgtcacacagtggaacctcgatttcatggatcacagcgagcaaggtgataggtaccgtgaattggcccatagggtggatgaggctcttgggttcatgactgcagcagggcttacagttgaccacccgataatgacgactactgacttctggacctcgcacgagtgccttctcttaccctacgagcagtctcttacccgtaaagactccaccagtggccttttctacgattgttcggcccacatgttgtgggttggtgagcgcactcgtcaactcgatggagcgcatgttgaattcctccgtggtgttgccaaccctcttggcataaaggtgagcgacaaaatgaaccccagtgacttggtgaagctgattgagattctgaacccttcaaacaaacctggaaggatcaccataattacaaggatgggggcagagaacatgagagtgaagttgcctcatctcatccgtgctgttcgcaatgctggattgattgtcacatggattactgatcctatgcatggaaacaccatcaaggccccttgtggcctgaagactcgtccattcgactcaattctggctgaagtgcgcgcattcttcgacgtgcatgatcaagaaggaagtcacccaggaggcatccaccttgaaatgactgggcagaacgtgaccgagtgcattggtggatcacggactgtgaccttcgatgaccttagcgaccgctaccacacccactgtgacccaaggctgaacgcctcccagtccctggagctcgccttcatcattgcagagaggctcaggaagaggaggatgcggtcggggctcaacaacagcctgcctctgccaccactggctttctaagtagccgaagctgaacagagaaggtagagggatagttgcagcgactcgaaagattacgcctgtttatttgttgatgcttggtgtggaggcctggtgggtgctcttggcacaagttacatgctggggagctataggagggtacctgttgcgttgtggaagacagtagctagtattatgtgttgtaattgtatgccttcgtttcatgttctgggtgcgtgacttgtcgactttgctgcttctggggttctgaccttggtaaggagagaataaagagataatataattgcg

SEQ ID NO: 31067 - protein, 568 aa, Zea mays subsp. mays
  peptide (1)..(568): Ceres Seq. ID no. 12373119
  misc_feature (108)..(545): Pfam Name: Pfam Description:  Class-II DAHP synthetase family
  misc_feature (31)..(568): NCBI GI NO: 34906844 NR Description: putative phospho-2-dehydro-3-deoxyheptonatealdolase 1
  misc_feature (67)..(555): NCBI GI NO: 2398679 NR Description: 3-deoxy-D-arabino-heptulosonate 7-phosphatesynthase
  misc_feature (67)..(555): NCBI GI NO: 584777 NR Description: Phospho-2-dehydro-3-deoxyheptonate aldolase 1
  misc_feature (67)..(555): NCBI GI NO: 24745903 NR Description: 3-deoxy-D-arabino-heptulosonate 7-phosphatesynthase
  misc_feature (67)..(555): NCBI GI NO: 584778 NR Description: Phospho-2-dehydro-3-deoxyheptonate aldolase 2
  misc_feature (67)..(555): NCBI GI NO: 114193 NR Description: Phospho-2-dehydro-3-deoxyheptonate aldolase 1
  misc_feature (67)..(555): NCBI GI NO: 7488957 NR Description: probable 2-dehydro-3-deoxy-phosphoheptonatealdolase
  misc_feature (31)..(555): NCBI GI NO: 2546988 NR Description: 2-dehydro-3-deoxyphosphoheptonate aldolase
  misc_feature (31)..(555): NCBI GI NO: 15219878 NR Description: 3-deoxy-D-arabino-heptulosonate 7-phosphate
  misc_feature (92)..(553): NCBI GI NO: 584779 NR Description: Phospho-2-dehydro-3-deoxyheptonate aldolase 2
RRESLCTARLLPHLPLPVYLPSPSTAPRNAMALATNSAAAAAAAVSGGAASQPHRAATFLPLKRRTISAIHAADPSKNNGPAVPAAAAAKSSASAVATPEKNPAAPVKWAVDSWKSKKALQLPEYPNQEELDTVLKTIETFPPVVFAGEARHLEERMAEAAMGRAFILQGGDCAESFKEFHANNIRDTFRILLQMGAVLMFGGQVPVVKVGRMAGQFAKPRSEPLEERDGVKLPSYRGDNVNGDDFTEKSRVPDPQRMIRAYSQSVATLNLLRALATGGYAAMQRVTQWNLDFMDHSEQGDRYRELAHRVDEALGFMTAAGLTVDHPIMTTTDFWTSHECLLLPYEQSLTRKDSTSGLFYDCSAHMLWVGERTRQLDGAHVEFLRGVANPLGIKVSDKMNPSDLVKLIEILNPSNKPGRITIITRMGAENMRVKLPHLIRAVRNAGLIVTWITDPMHGNTIKAPCGLKTRPFDSILAEVRAFFDVHDQEGSHPGGIHLEMTGQNVTECIGGSRTVTFDDLSDRYHTHCDPRLNASQSLELAFIIAERLRKRRMRSGLNNSLPLPPLAF

SEQ ID NO: 31068 - protein, 538 aa, Zea mays subsp. mays
  peptide (1)..(538): Ceres Seq. ID no. 12373120
  misc_feature (78)..(515): Pfam Name: Pfam Description:  Class-II DAHP synthetase family
  misc_feature (1)..(538): NCBI GI NO: 34906844 NR Description: putative phospho-2-dehydro-3-deoxyheptonatealdolase 1
  misc_feature (37)..(525): NCBI GI NO: 2398679 NR Description: 3-deoxy-D-arabino-heptulosonate 7-phosphatesynthase
  misc_feature (37)..(525): NCBI GI NO: 584777 NR Description: Phospho-2-dehydro-3-deoxyheptonate aldolase 1
  misc_feature (37)..(525): NCBI GI NO: 24745903 NR Description: 3-deoxy-D-arabino-heptulosonate 7-phosphatesynthase
  misc_feature (37)..(525): NCBI GI NO: 584778 NR Description: Phospho-2-dehydro-3-deoxyheptonate aldolase 2
  misc_feature (37)..(525): NCBI GI NO: 114193 NR Description: Phospho-2-dehydro-3-deoxyheptonate aldolase 1
  misc_feature (37)..(525): NCBI GI NO: 7488957 NR Description: probable 2-dehydro-3-deoxy-phosphoheptonatealdolase
  misc_feature (1)..(525): NCBI GI NO: 2546988 NR Description: 2-dehydro-3-deoxyphosphoheptonate aldolase
  misc_feature (1)..(525): NCBI GI NO: 15219878 NR Description: 3-deoxy-D-arabino-heptulosonate 7-phosphate
  misc_feature (62)..(523): NCBI GI NO: 584779 NR Description: Phospho-2-dehydro-3-deoxyheptonate aldolase 2
MALATNSAAAAAAAVSGGAASQPHRAATFLPLKRRTISAIHAADPSKNNGPAVPAAAAAKSSASAVATPEKNPAAPVKWAVDSWKSKKALQLPEYPNQEELDTVLKTIETFPPVVFAGEARHLEERMAEAAMGRAFILQGGDCAESFKEFHANNIRDTFRILLQMGAVLMFGGQVPVVKVGRMAGQFAKPRSEPLEERDGVKLPSYRGDNVNGDDFTEKSRVPDPQRMIRAYSQSVATLNLLRALATGGYAAMQRVTQWNLDFMDHSEQGDRYRELAHRVDEALGFMTAAGLTVDHPIMTTTDFWTSHECLLLPYEQSLTRKDSTSGLFYDCSAHMLWVGERTRQLDGAHVEFLRGVANPLGIKVSDKMNPSDLVKLIEILNPSNKPGRITIITRMGAENMRVKLPHLIRAVRNAGLIVTWITDPMHGNTIKAPCGLKTRPFDSILAEVRAFFDVHDQEGSHPGGIHLEMTGQNVTECIGGSRTVTFDDLSDRYHTHCDPRLNASQSLELAFIIAERLRKRRMRSGLNNSLPLPPLAF

SEQ ID NO: 31069 - protein, 412 aa, Zea mays subsp. mays
  peptide (1)..(412): Ceres Seq. ID no. 12373121
  misc_feature (1)..(389): Pfam Name: Pfam Description:  Class-II DAHP synthetase family
  misc_feature (1)..(412): NCBI GI NO: 34906844 NR Description: putative phospho-2-dehydro-3-deoxyheptonatealdolase 1
  misc_feature (1)..(399): NCBI GI NO: 2398679 NR Description: 3-deoxy-D-arabino-heptulosonate 7-phosphatesynthase
  misc_feature (1)..(399): NCBI GI NO: 584777 NR Description: Phospho-2-dehydro-3-deoxyheptonate aldolase 1
  misc_feature (1)..(399): NCBI GI NO: 24745903 NR Description: 3-deoxy-D-arabino-heptulosonate 7-phosphatesynthase
  misc_feature (1)..(399): NCBI GI NO: 584778 NR Description: Phospho-2-dehydro-3-deoxyheptonate aldolase 2
  misc_feature (1)..(399): NCBI GI NO: 114193 NR Description: Phospho-2-dehydro-3-deoxyheptonate aldolase 1
  misc_feature (1)..(399): NCBI GI NO: 7488957 NR Description: probable 2-dehydro-3-deoxy-phosphoheptonatealdolase
  misc_feature (1)..(399): NCBI GI NO: 2546988 NR Description: 2-dehydro-3-deoxyphosphoheptonate aldolase
  misc_feature (1)..(399): NCBI GI NO: 15219878 NR Description: 3-deoxy-D-arabino-heptulosonate 7-phosphate
  misc_feature (1)..(397): NCBI GI NO: 584779 NR Description: Phospho-2-dehydro-3-deoxyheptonate aldolase 2
MAEAAMGRAFILQGGDCAESFKEFHANNIRDTFRILLQMGAVLMFGGQVPVVKVGRMAGQFAKPRSEPLEERDGVKLPSYRGDNVNGDDFTEKSRVPDPQRMIRAYSQSVATLNLLRALATGGYAAMQRVTQWNLDFMDHSEQGDRYRELAHRVDEALGFMTAAGLTVDHPIMTTTDFWTSHECLLLPYEQSLTRKDSTSGLFYDCSAHMLWVGERTRQLDGAHVEFLRGVANPLGIKVSDKMNPSDLVKLIEILNPSNKPGRITIITRMGAENMRVKLPHLIRAVRNAGLIVTWITDPMHGNTIKAPCGLKTRPFDSILAEVRAFFDVHDQEGSHPGGIHLEMTGQNVTECIGGSRTVTFDDLSDRYHTHCDPRLNASQSLELAFIIAERLRKRRMRSGLNNSLPLPPLAF

SEQ ID NO: 31070 - DNA, 1023 bp, Zea mays subsp. mays
  misc_feature (1)..(1023): Ceres Seq. ID no. 12407620
aaaacacgtcgcggcctcgctaacgcgcccgcgctagcgcgagtggtggcacccacgcatactcttctcccccccagtccggaccccggaggagccaagccatggcgtccacctcctgctgcctcctccaccagtcaaccgcccgcctcggcgcgtcgccgcgcctggccgccgccccgccgcgcagcgcccagctgctcgtctgcaaggcccggaagcaggaagccgccgcggaccagagcgacgtctcgcgccgcgccacgctcgcgctcctcgccggcgtcacggccgccgccggcgccaaggtgggtcccgccgccgcggcatacggagaagcagccaacgtgttcggcaagcccaaggcgagcacggagtacatcgcgtacagcggcgacggcttcaagctgctgatcccgtccaagtggaaccccagcaaggagcgggagttccccgggcaggtgctccgctacgaggacaacttcgacgccaacagcaacgtgtccgtcatcatccagcccacgtccaagaagaccatcgccgactacggctctcccgaggagttcctctcccaggtcgactacctgctcggcaggcaggcctacggcggcaagaccgactccgagggcgggttcgagaccggcgccgtggccaccgccaacgtcctggagagctccacccccgtgatcgacggcaagcagtactacgccgtgtccgtgctcaccaggacggcggacggcgacgagggcggcaagcaccagctcatcgcggccaccgtctccgacggcaagctctacatctgcaaggcgcaggccggcgacaagaggtggttcaagggcgccaggaagggagtcgagaaggccgcctcctccttcagcgtcgcatgatgatgtaattttatttcttcgatgggatgggatgcacgcactacgtagagagcttggctaggccaggcctggctgagcacgcttgtgtgttccttcgactgtacatgagaacaaagactaaggagagctccattcccgt

SEQ ID NO: 31071 - protein, 260 aa, Zea mays subsp. mays
  peptide (1)..(260): Ceres Seq. ID no. 12407621
  misc_feature (57)..(260): Pfam Name: Pfam Description:  PsbP
  misc_feature (1)..(260): NCBI GI NO: 34899580 NR Description: probable photosystem II oxygen-evolving complexprotein 2 precursor
  misc_feature (1)..(260): NCBI GI NO: 131394 NR Description: Oxygen-evolving enhancer protein 2
  misc_feature (1)..(260): NCBI GI NO: 7443218 NR Description: photosystem II oxygen-evolving complex protein -rice
  misc_feature (1)..(260): NCBI GI NO: 11134156 NR Description: Oxygen-evolving enhancer protein 2
  misc_feature (1)..(260): NCBI GI NO: 131392 NR Description: Oxygen-evolving enhancer protein 2
  misc_feature (1)..(260): NCBI GI NO: 11134035 NR Description: Oxygen-evolving enhancer protein 2
  misc_feature (1)..(260): NCBI GI NO: 131390 NR Description: Oxygen-evolving enhancer protein 2
  misc_feature (1)..(260): NCBI GI NO: 266856 NR Description: Oxygen-evolving enhancer protein 2
  misc_feature (1)..(260): NCBI GI NO: 20030 NR Description: 23-kDa polypeptide of photosystem II oxygen-evolving complex
  misc_feature (1)..(260): NCBI GI NO: 131393 NR Description: Oxygen-evolving enhancer protein 2
MASTSCCLLHQSTARLGASPRLAAAPPRSAQLLVCKARKQEAAADQSDVSRRATLALLAGVTAAAGAKVGPAAAAYGEAANVFGKPKASTEYIAYSGDGFKLLIPSKWNPSKEREFPGQVLRYEDNFDANSNVSVIIQPTSKKTIADYGSPEEFLSQVDYLLGRQAYGGKTDSEGGFETGAVATANVLESSTPVIDGKQYYAVSVLTRTADGDEGGKHQLIAATVSDGKLYICKAQAGDKRWFKGARKGVEKAASSFSVA

SEQ ID NO: 31072 - protein, 136 aa, Zea mays subsp. mays
  peptide (1)..(136): Ceres Seq. ID no. 12407622
  misc_feature (80)..(136): Pfam Name: Pfam Description:  Equine herpesvirus glycoprotein gp2
  misc_feature (10)..(136): NCBI GI NO: 27375632 NR Description: blr0521 [Bradyrhizobium japonicum]
  misc_feature (2)..(136): NCBI GI NO: 27375632 NR Description: blr0521 [Bradyrhizobium japonicum]
  misc_feature (17)..(136): NCBI GI NO: 25056007 NR Description: extensin-like protein [Zea mays]
  misc_feature (18)..(136): NCBI GI NO: 23017082 NR Description: hypothetical protein [Thermobifida fusca]
  misc_feature (9)..(136): NCBI GI NO: 27375632 NR Description: blr0521 [Bradyrhizobium japonicum]
  misc_feature (24)..(136): NCBI GI NO: 20138131 NR Description: Vegetative cell wall protein gp1 precursor
  misc_feature (18)..(136): NCBI GI NO: 188864 NR Description: mucin
  misc_feature (6)..(136): NCBI GI NO: 22962211 NR Description: hypothetical protein [Rhodopseudomonas palustris]
  misc_feature (7)..(136): NCBI GI NO: 13592175 NR Description: ppg3 [Leishmania major]
  misc_feature (7)..(136): NCBI GI NO: 13592175 NR Description: ppg3 [Leishmania major]
KTRRGLANAPALARVVAPTHTLLPPSPDPGGAKPWRPPPAASSTSQPPASARRRAWPPPRRAAPSCSSARPGSRKPPRTRATSRAAPRSRSSPASRPPPAPRWVPPPRHTEKQPTCSASPRRARSTSRTAATASSC

SEQ ID NO: 31073 - DNA, 1504 bp, Zea mays subsp. mays
  misc_feature (1)..(1504): Ceres Seq. ID no. 13498552
  misc_feature (517)..(517): n is a, c, t, g, unknown, or other
gcccacggagatgaagcgccggcgcctgccgcccgtcctcttcctcctcgcgctcgcgctcttgtccctcgccttccgccgccacctctccctccccctcggcgttccccagttcgccgccggtggcgtcagcggcgacgcgctcctccgcctcctcgcggccaccgacgtcggcggggaccagatcctggcggaggcggccgcgctgctggccaacgcgtcggtgtccaccttccccagcatcggcaaccaccaccgcctcctctacctccgcgtcccctaccgcatcaacgccacctccgcgccgcggcagcggacagtgtcccgtctccgcattcccttccacgacgtccccaacgacgacgccctcctcgccgccttccgcgcatccctccgcggcttcctcctcgcgcgccaccgccaccgccaccgccgaggcggcgacgacgtcgcgggcgccatggccgacctccccgccctcctcctcggccagcgccggcgccggcgcgccccgacntgcgccgtcgtcgggaacagcggcacccttctcggctccggccggggcgcgcagatcgacgcgcacgacctcgtgatccggctcaacaacgcccgcgtcgcggggttcgcggccgacgtcggcgccacgaccggcgtctcgttcgtgaactccaacatcctccaccactgcgccgtccgctccgccatcaccgccccgggctgcgcctgccacccctacgggcgcgcggtcccgctggccatgtacgtctgccagccggcgcacctcctggacgcgctcatctgcaacgccacggcgacgccggagtccccgttcccgctcctcgtcaccgacgcgcgcatcgacgcgctgtgcgcgcgcatcgccaagtactactcgatgcggcggttcgtggcggccacggggcagccggccagcaactggacccggaggcacgacgagaggtacttccactactcgtcgggcctgcaggcggtggtcatggcgctaggggcgtgcgatgaggtgagcgtgttcggtttcgggaaggcgccgggggccaagcaccattaccacaccaaccagaagaaggagctcgacctgcacgactacgaggccgagtaccagttctaccgcgacctccaggaacggccagaggcggtgccattcctcgacgaggcgccgggcttcaaggtgccaccggtgaagctctactggtgaccactgacgtcagtaacgtctggttggtagtaacttgtactgtaatatgtttgttgtacaattttttttatttttacattttcacctaaagaggtgtttaggcagagagagataagcgtgtagagaatgtagcgattgacagggagggaatgtgtttaaggatagggaaaatggagatcaaatttgtgattgatcaaatggatcaaattggttgtagttgttcatgtattctgtctgtgtagggcaactgtacacttcatcgattcttgttcatatatagacactttc

SEQ ID NO: 31074 - protein, 404 aa, Zea mays subsp. mays
  peptide (1)..(404): Ceres Seq. ID no. 13498553
  misc_feature (115)..(391): Pfam Name: sialyltransferase Pfam Description: Glycosyltransferase family 29
  misc_feature (115)..(403): NCBI GI NO: 34908454 NR Description: P0683F02.18
  misc_feature (172)..(403): NCBI GI NO: 15223174 NR Description: sialyltransferase family [Arabidopsis thaliana]
  misc_feature (289)..(403): NCBI GI NO: 28416597 NR Description: At1g08280 [Arabidopsis thaliana]
  misc_feature (172)..(172): Xaa is any aa, unknown or other
PTEMKRRRLPPVLFLLALALLSLAFRRHLSLPLGVPQFAAGGVSGDALLRLLAATDVGGDQILAEAAALLANASVSTFPSIGNHHRLLYLRVPYRINATSAPRQRTVSRLRIPFHDVPNDDALLAAFRASLRGFLLARHRHRHRRGGDDVAGAMADLPALLLGQRRRRRAPXCAVVGNSGTLLGSGRGAQIDAHDLVIRLNNARVAGFAADVGATTGVSFVNSNILHHCAVRSAITAPGCACHPYGRAVPLAMYVCQPAHLLDALICNATATPESPFPLLVTDARIDALCARIAKYYSMRRFVAATGQPASNWTRRHDERYFHYSSGLQAVVMALGACDEVSVFGFGKAPGAKHHYHTNQKKELDLHDYEAEYQFYRDLQERPEAVPFLDEAPGFKVPPVKLYW

SEQ ID NO: 31075 - protein, 401 aa, Zea mays subsp. mays
  peptide (1)..(401): Ceres Seq. ID no. 13498554
  misc_feature (112)..(388): Pfam Name: sialyltransferase Pfam Description: Glycosyltransferase family 29
  misc_feature (112)..(400): NCBI GI NO: 34908454 NR Description: P0683F02.18
  misc_feature (169)..(400): NCBI GI NO: 15223174 NR Description: sialyltransferase family [Arabidopsis thaliana]
  misc_feature (286)..(400): NCBI GI NO: 28416597 NR Description: At1g08280 [Arabidopsis thaliana]
  misc_feature (169)..(169): Xaa is any aa, unknown or other
MKRRRLPPVLFLLALALLSLAFRRHLSLPLGVPQFAAGGVSGDALLRLLAATDVGGDQILAEAAALLANASVSTFPSIGNHHRLLYLRVPYRINATSAPRQRTVSRLRIPFHDVPNDDALLAAFRASLRGFLLARHRHRHRRGGDDVAGAMADLPALLLGQRRRRRAPXCAVVGNSGTLLGSGRGAQIDAHDLVIRLNNARVAGFAADVGATTGVSFVNSNILHHCAVRSAITAPGCACHPYGRAVPLAMYVCQPAHLLDALICNATATPESPFPLLVTDARIDALCARIAKYYSMRRFVAATGQPASNWTRRHDERYFHYSSGLQAVVMALGACDEVSVFGFGKAPGAKHHYHTNQKKELDLHDYEAEYQFYRDLQERPEAVPFLDEAPGFKVPPVKLYW

SEQ ID NO: 31076 - protein, 339 aa, Zea mays subsp. mays
  peptide (1)..(339): Ceres Seq. ID no. 13498555
  misc_feature (7)..(211): Pfam Name: Pfam Description:  Formin Homology 2 Domain
  misc_feature (5)..(281): NCBI GI NO: 22962211 NR Description: hypothetical protein [Rhodopseudomonas palustris]
  misc_feature (1)..(339): NCBI GI NO: 29247944 NR Description: GLP_26_54603_52153 [Giardia lamblia ATCC 50803]
  misc_feature (1)..(339): NCBI GI NO: 29247944 NR Description: GLP_26_54603_52153 [Giardia lamblia ATCC 50803]
  misc_feature (6)..(204): NCBI GI NO: 20138131 NR Description: Vegetative cell wall protein gp1 precursor
  misc_feature (64)..(339): NCBI GI NO: 22962211 NR Description: hypothetical protein [Rhodopseudomonas palustris]
  misc_feature (23)..(339): NCBI GI NO: 27375632 NR Description: blr0521 [Bradyrhizobium japonicum]
  misc_feature (6)..(169): NCBI GI NO: 20138131 NR Description: Vegetative cell wall protein gp1 precursor
  misc_feature (6)..(210): NCBI GI NO: 20138131 NR Description: Vegetative cell wall protein gp1 precursor
  misc_feature (173)..(173): Xaa is any aa, unknown or other
AHGDEAPAPAARPLPPRARALVPRLPPPPLPPPRRSPVRRRWRQRRRAPPPPRGHRRRRGPDPGGGGRAAGQRVGVHLPQHRQPPPPPLPPRPLPHQRHLRAAAADSVPSPHSLPRRPQRRRPPRRLPRIPPRLPPRAPPPPPPPRRRRRRGRHGRPPRPPPRPAPAPARPDXRRRREQRHPSRLRPGRADRRARPRDPAQQRPRRGVRGRRRRHDRRLVRELQHPPPLRRPLRHHRPGLRLPPLRARGPAGHVRLPAGAPPGRAHLQRHGDAGVPVPAPRHRRAHRRAVRAHRQVLLDAAVRGGHGAAGQQLDPEARREVLPLLVGPAGGGHGARGVR

SEQ ID NO: 31077 - DNA, 2108 bp, Zea mays subsp. mays
  misc_feature (1)..(2108): Ceres Seq. ID no. 12358850
gcccgcagaaaagaaggctggtggtcgccgctgcacgcggcccagtccacccacgagtacaaacagcggcagctcgcctccacgcgagccaagcgcccgcaaaaccctagccccgcccgccccaaaccctaggcggctacggtctccgatcccggggtcacgtcctaatggcatcttcgccggacttgttccccaacgttaccttctccgacgtctccgaagccgcagcagggcctgcggccgagggggccaccgccgcgttcggtctcggcgccgccactggagccccgcgcctcagcctcgtgaaggccgaggcggagcccacggtcgagatcgacctcgccgacgcgcaggtatttaagttgggaccgacggagtggctgtgtgtgtgcgacgagtcggaggctaaggatggcgtggaagagaagtcattttcaagagcaattaaggttgttcttaggacagaagctgagagcaaagccttctctttagcttttcaacgatggcaacaccaagttattagtggaaaagctggtgaacggctggagaatggatcaataattgcttcgaaaaacaaattcgatacaaaaattgaggcatcatcagcaaagatgtatttccactactatggccagctattacatcagcaaaacatgttacaagattttgtgcggacaggaacatactatgctgctgtgatggaaaaccgttctgacttcgagggtcgagttgtggttgatgttggggctggaagcggtattctttcgttatttgctgtccaggctggtgccagacatgtatatgcagttgaggcatctgaaatggctgaacatgctcaacgtctaatctctgggaacccatctcttggacaccggatcacggtcatcaagggcaaggttgaggaagtagtgcttccagagaaagctgacatactgatttctgaacctatgggaactcttttggttaatgagaggatgctagagtcttatgtcatagctagagacagattacttgctccagatggtaaaatgtttccaacaaccggaaggattcatatggctccattttctgacgaatacctttatgttgaaatggcaaacaaggctctcttttggcagcagcacaatttttttggtgttgatctcacacctttacatggttctgcattccagggatacttttcacagcctgttgtggatgcatttgacccaagattattaatttctccaccaacatatcatacacttgattttactagcatgaaggaagaggagctttacgagattaatattcctctgagctttgtagcttctgttggcactagagtacatggattagcttgttggtttgatgtattgtttaatgggagcactgtgcaaaggtggcttaccactgctccaggatcccctacaactcactggtaccaactacgatgtgtgctttcacagccattgtatgtcatggccggccaagaaataactggccatcttcgtctcgtagcccatagtgctcaaagctacacaatatacttgacaatgtcagctaaaatgtggggtgtgggtgcggagcaaggcggtatcctacagacatctactgggaaacttgaactgaaggagccatactacaggttgtctcagccacaatcatgcacgttgccacaagatcagcaacagcagcaattgccatctttgcaggcacagggatcggagcagcagatgcaggaagggctcagcccagccttcacgatagaccaagattgcctcaactagacagcctggagtcgcgtatgctaggattccagcaacgagctgaggtctgtacaagcacaagagtttagagtagccgatattgtcaggcgttagctgccaaaggctaatatcacgatcgaggtgtaccgtgtacgagaccattcctgagttgcgcagctggcagctaaactgcggtcgcgccttctccgagggaatcgagaaaaaggaaattataaagtgtatttggtttcaggtaaagtgaagagcgaagggcacccctaacaaggacgggtgtatgttgtttgatatattatattcttgctaggaattaattattttcatgttaagtatgtttaattc

SEQ ID NO: 31078 - protein, 533 aa, Zea mays subsp. mays
  peptide (1)..(533): Ceres Seq. ID no. 12358851
  misc_feature (177)..(437): Pfam Name: Pfam Description:  Skb1 methyltransferase
  misc_feature (3)..(511): NCBI GI NO: 33146849 NR Description: putative protein arginine N-methyltransferase 4
  misc_feature (14)..(521): NCBI GI NO: 30680069 NR Description: protein arginine N-methyltransferase family
  misc_feature (14)..(511): NCBI GI NO: 30680066 NR Description: protein arginine N-methyltransferase family
  misc_feature (14)..(521): NCBI GI NO: 28393408 NR Description: putative arginine methyltransferase
  misc_feature (8)..(504): NCBI GI NO: 30695591 NR Description: protein arginine N-methyltransferase family
  misc_feature (93)..(504): NCBI GI NO: 27754675 NR Description: putative arginine methyltransferase
  misc_feature (149)..(511): NCBI GI NO: 6729000 NR Description: putative arginine methyltransferase
  misc_feature (8)..(419): NCBI GI NO: 10177192 NR Description: arginine methyltransferase-like protein
  misc_feature (108)..(513): NCBI GI NO: 24645553 NR Description: CG5358-PA [Drosophila melanogaster]
  misc_feature (135)..(513): NCBI GI NO: 28557603 NR Description: RE68504p [Drosophila melanogaster]
MASSPDLFPNVTFSDVSEAAAGPAAEGATAAFGLGAATGAPRLSLVKAEAEPTVEIDLADAQVFKLGPTEWLCVCDESEAKDGVEEKSFSRAIKVVLRTEAESKAFSLAFQRWQHQVISGKAGERLENGSIIASKNKFDTKIEASSAKMYFHYYGQLLHQQNMLQDFVRTGTYYAAVMENRSDFEGRVVVDVGAGSGILSLFAVQAGARHVYAVEASEMAEHAQRLISGNPSLGHRITVIKGKVEEVVLPEKADILISEPMGTLLVNERMLESYVIARDRLLAPDGKMFPTTGRIHMAPFSDEYLYVEMANKALFWQQHNFFGVDLTPLHGSAFQGYFSQPVVDAFDPRLLISPPTYHTLDFTSMKEEELYEINIPLSFVASVGTRVHGLACWFDVLFNGSTVQRWLTTAPGSPTTHWYQLRCVLSQPLYVMAGQEITGHLRLVAHSAQSYTIYLTMSAKMWGVGAEQGGILQTSTGKLELKEPYYRLSQPQSCTLPQDQQQQQLPSLQAQGSEQQMQEGLSPAFTIDQDCLN

SEQ ID NO: 31079 - protein, 385 aa, Zea mays subsp. mays
  peptide (1)..(385): Ceres Seq. ID no. 12358852
  misc_feature (29)..(289): Pfam Name: Pfam Description:  Skb1 methyltransferase
  misc_feature (1)..(363): NCBI GI NO: 33146849 NR Description: putative protein arginine N-methyltransferase 4
  misc_feature (1)..(373): NCBI GI NO: 30680069 NR Description: protein arginine N-methyltransferase family
  misc_feature (1)..(363): NCBI GI NO: 30680066 NR Description: protein arginine N-methyltransferase family
  misc_feature (1)..(373): NCBI GI NO: 28393408 NR Description: putative arginine methyltransferase
  misc_feature (1)..(356): NCBI GI NO: 30695591 NR Description: protein arginine N-methyltransferase family
  misc_feature (1)..(356): NCBI GI NO: 27754675 NR Description: putative arginine methyltransferase
  misc_feature (1)..(363): NCBI GI NO: 6729000 NR Description: putative arginine methyltransferase
  misc_feature (1)..(271): NCBI GI NO: 10177192 NR Description: arginine methyltransferase-like protein
  misc_feature (1)..(365): NCBI GI NO: 24645553 NR Description: CG5358-PA [Drosophila melanogaster]
  misc_feature (1)..(365): NCBI GI NO: 28557603 NR Description: RE68504p [Drosophila melanogaster]
MYFHYYGQLLHQQNMLQDFVRTGTYYAAVMENRSDFEGRVVVDVGAGSGILSLFAVQAGARHVYAVEASEMAEHAQRLISGNPSLGHRITVIKGKVEEVVLPEKADILISEPMGTLLVNERMLESYVIARDRLLAPDGKMFPTTGRIHMAPFSDEYLYVEMANKALFWQQHNFFGVDLTPLHGSAFQGYFSQPVVDAFDPRLLISPPTYHTLDFTSMKEEELYEINIPLSFVASVGTRVHGLACWFDVLFNGSTVQRWLTTAPGSPTTHWYQLRCVLSQPLYVMAGQEITGHLRLVAHSAQSYTIYLTMSAKMWGVGAEQGGILQTSTGKLELKEPYYRLSQPQSCTLPQDQQQQQLPSLQAQGSEQQMQEGLSPAFTIDQDCLN

SEQ ID NO: 31080 - protein, 371 aa, Zea mays subsp. mays
  peptide (1)..(371): Ceres Seq. ID no. 12358853
  misc_feature (15)..(275): Pfam Name: Pfam Description:  Skb1 methyltransferase
  misc_feature (1)..(349): NCBI GI NO: 33146849 NR Description: putative protein arginine N-methyltransferase 4
  misc_feature (1)..(359): NCBI GI NO: 30680069 NR Description: protein arginine N-methyltransferase family
  misc_feature (1)..(349): NCBI GI NO: 30680066 NR Description: protein arginine N-methyltransferase family
  misc_feature (1)..(359): NCBI GI NO: 28393408 NR Description: putative arginine methyltransferase
  misc_feature (1)..(342): NCBI GI NO: 30695591 NR Description: protein arginine N-methyltransferase family
  misc_feature (1)..(342): NCBI GI NO: 27754675 NR Description: putative arginine methyltransferase
  misc_feature (1)..(349): NCBI GI NO: 6729000 NR Description: putative arginine methyltransferase
  misc_feature (1)..(257): NCBI GI NO: 10177192 NR Description: arginine methyltransferase-like protein
  misc_feature (1)..(351): NCBI GI NO: 24645553 NR Description: CG5358-PA [Drosophila melanogaster]
  misc_feature (1)..(351): NCBI GI NO: 28557603 NR Description: RE68504p [Drosophila melanogaster]
MLQDFVRTGTYYAAVMENRSDFEGRVVVDVGAGSGILSLFAVQAGARHVYAVEASEMAEHAQRLISGNPSLGHRITVIKGKVEEVVLPEKADILISEPMGTLLVNERMLESYVIARDRLLAPDGKMFPTTGRIHMAPFSDEYLYVEMANKALFWQQHNFFGVDLTPLHGSAFQGYFSQPVVDAFDPRLLISPPTYHTLDFTSMKEEELYEINIPLSFVASVGTRVHGLACWFDVLFNGSTVQRWLTTAPGSPTTHWYQLRCVLSQPLYVMAGQEITGHLRLVAHSAQSYTIYLTMSAKMWGVGAEQGGILQTSTGKLELKEPYYRLSQPQSCTLPQDQQQQQLPSLQAQGSEQQMQEGLSPAFTIDQDCLN

SEQ ID NO: 31081 - DNA, 1980 bp, Zea mays subsp. mays
  misc_feature (1)..(1980): Ceres Seq. ID no. 12390151
gcacgagaccattacctagaacatcctaatcgaaaagaacccttcccgtctccaaccgtcgccatctccatccgcgatttaaccactcggccgccgctgagtcagagtcagtagcgagaagcagagcggctctgctcctctcggtcgcgcgccgcccacacaacgccgtccaaccatcagcaatgcctcctgcagttggactccttcccctcctcctcctcctcctcctcttccatctccccgtctccctctgctcccaccaccaccatcacagcaccccacccgcttctccgtccccgtccccgtccccagcaccctcctccgcgccgctagcggtgctcctggcctgcaacgccacccggttccatccggcctgcgtctccacgctctccggcgccgcgcccgatgcctccaccgccgacctcctcgacgcgacgctctcggcgctccgcgtccgcctcccgcccgccgtctccacggccaaatccgtgctggcgtcctcctccaacgtgaacctctccaacgccgccaccaactgcctcacgttcctcgcgctctcctcccgccgcctctcgccgtccccctcggcgccgccgctgctctccgcctccacggcgctgctccacctctacgactgctggtccgcgtacaagtacgtcaacttctcccgcaccatctccgacgccatggcctacctcgacgacaccatcaccgtgaacagcaactacatctccatgctcgccgcgcggcagcgctacggcgacgagacgtccctctggcggcccccgcagacggagcgcgacgggtactggccgccgcccgccgcgagctcgggggccgacgtcgacgcgctcggcgtgcccaagggcctgccggcgaacgcgacggtgtgcggcgccgggtgcgactacaggacggtgcgggaggcggtggcggccgcgccggactacggcgacggcgcgttcgtggtgcacgtgaaggagggggcgtacagggagacggtgagcgtgccgtgggagaagaccaacgtggtcctcgttggcgacggcatggggaagacggtcatcactggcgatctcaacgctgacacgtccggcgtgtccaccttcaacaccgccaccgtaggcgtgctggcggacgggttcatggcgcgtgacctgacgatcgcgaacacggcgggccccgacgcgcaccaggccgtggcgttccggtccacgggcgaccgcacggtgctggacggcgtggagctgctggggcaccaggacacgctgtacgcgcacgccatgcgccagttctacacccggtgccgcgtggcgggcaccgtcgacttcgtcttcggcaactccgccgcggtgctccacgacaccgccctcgtcgtgctgccgcggcagctgcggccggagaagggcgagaacgacgccgtcacggcgcagggccgcaccgacccggcccagcccacggggatcgtgctcagccgctgctccgtcaacggcagcgaggagtacatggcgctgtaccgcgagaggcccggcgtgcaccacgtgtacctgggccgcccgtggaaggagtactcccgcaccgtgtacgtcgggtgcatgctcgcggagatcgtgcagccgcaggggtggatgccgtggaacggggacttcgcgctccagacgctctactacggcgagtacgacagcgccggccccggcggcgccgcgggccagagggtggcgtggagcagccaggttcccaaggtccacgtcgacgcgtacagcgtcgccagcttcatacaggggcacgagtggatacccagagtgtagtgcagtaccgcgtaataactgtagagagtgtatttaccaacaatcgtgtcccacaattgacacggtgtccctgatgttgagcttgagcattgcagttactcctaataatacggagagagcaagtcaaagacatggaaataataaacctaccgcgataacgatcgcaacgggc

SEQ ID NO: 31082 - protein, 541 aa, Zea mays subsp. mays
  peptide (1)..(541): Ceres Seq. ID no. 12390152
  misc_feature (233)..(534): Pfam Name: Pfam Description:  Pectinesterase
  misc_feature (8)..(541): NCBI GI NO: 34907404 NR Description: putative pectin methylesterase
  misc_feature (7)..(537): NCBI GI NO: 9759007 NR Description: pectin methylesterase-like protein
  misc_feature (7)..(537): NCBI GI NO: 15242495 NR Description: pectin methylesterase - like protein
  misc_feature (25)..(537): NCBI GI NO: 22328058 NR Description: pectinesterase family; protein id: At5g64640.1
  misc_feature (143)..(537): NCBI GI NO: 22135882 NR Description: pectin methylesterase-like protein
  misc_feature (166)..(538): NCBI GI NO: 1552379 NR Description: pectin methylesterase
  misc_feature (94)..(538): NCBI GI NO: 38344075 NR Description: OSJNBa0006B20.19
  misc_feature (322)..(537): NCBI GI NO: 21554293 NR Description: pectin methylesterase-like protein
  misc_feature (205)..(538): NCBI GI NO: 6689892 NR Description: pectin methyl esterase [Solanum tuberosum]
  misc_feature (56)..(538): NCBI GI NO: 6689890 NR Description: pectin methyl esterase [Solanum tuberosum]
MPPAVGLLPLLLLLLLFHLPVSLCSHHHHHSTPPASPSPSPSPAPSSAPLAVLLACNATRFHPACVSTLSGAAPDASTADLLDATLSALRVRLPPAVSTAKSVLASSSNVNLSNAATNCLTFLALSSRRLSPSPSAPPLLSASTALLHLYDCWSAYKYVNFSRTISDAMAYLDDTITVNSNYISMLAARQRYGDETSLWRPPQTERDGYWPPPAASSGADVDALGVPKGLPANATVCGAGCDYRTVREAVAAAPDYGDGAFVVHVKEGAYRETVSVPWEKTNVVLVGDGMGKTVITGDLNADTSGVSTFNTATVGVLADGFMARDLTIANTAGPDAHQAVAFRSTGDRTVLDGVELLGHQDTLYAHAMRQFYTRCRVAGTVDFVFGNSAAVLHDTALVVLPRQLRPEKGENDAVTAQGRTDPAQPTGIVLSRCSVNGSEEYMALYRERPGVHHVYLGRPWKEYSRTVYVGCMLAEIVQPQGWMPWNGDFALQTLYYGEYDSAGPGGAAGQRVAWSSQVPKVHVDAYSVASFIQGHEWIPRV

SEQ ID NO: 31083 - protein, 373 aa, Zea mays subsp. mays
  peptide (1)..(373): Ceres Seq. ID no. 12390153
  misc_feature (65)..(366): Pfam Name: Pfam Description:  Pectinesterase
  misc_feature (1)..(373): NCBI GI NO: 34907404 NR Description: putative pectin methylesterase
  misc_feature (1)..(369): NCBI GI NO: 9759007 NR Description: pectin methylesterase-like protein
  misc_feature (1)..(369): NCBI GI NO: 15242495 NR Description: pectin methylesterase - like protein
  misc_feature (1)..(369): NCBI GI NO: 22328058 NR Description: pectinesterase family; protein id: At5g64640.1
  misc_feature (1)..(369): NCBI GI NO: 22135882 NR Description: pectin methylesterase-like protein
  misc_feature (1)..(370): NCBI GI NO: 1552379 NR Description: pectin methylesterase
  misc_feature (1)..(370): NCBI GI NO: 38344075 NR Description: OSJNBa0006B20.19
  misc_feature (154)..(369): NCBI GI NO: 21554293 NR Description: pectin methylesterase-like protein
  misc_feature (37)..(370): NCBI GI NO: 6689892 NR Description: pectin methyl esterase [Solanum tuberosum]
  misc_feature (1)..(370): NCBI GI NO: 6689890 NR Description: pectin methyl esterase [Solanum tuberosum]
MAYLDDTITVNSNYISMLAARQRYGDETSLWRPPQTERDGYWPPPAASSGADVDALGVPKGLPANATVCGAGCDYRTVREAVAAAPDYGDGAFVVHVKEGAYRETVSVPWEKTNVVLVGDGMGKTVITGDLNADTSGVSTFNTATVGVLADGFMARDLTIANTAGPDAHQAVAFRSTGDRTVLDGVELLGHQDTLYAHAMRQFYTRCRVAGTVDFVFGNSAAVLHDTALVVLPRQLRPEKGENDAVTAQGRTDPAQPTGIVLSRCSVNGSEEYMALYRERPGVHHVYLGRPWKEYSRTVYVGCMLAEIVQPQGWMPWNGDFALQTLYYGEYDSAGPGGAAGQRVAWSSQVPKVHVDAYSVASFIQGHEWIPRV

SEQ ID NO: 31084 - protein, 357 aa, Zea mays subsp. mays
  peptide (1)..(357): Ceres Seq. ID no. 12390154
  misc_feature (49)..(350): Pfam Name: Pfam Description:  Pectinesterase
  misc_feature (1)..(357): NCBI GI NO: 34907404 NR Description: putative pectin methylesterase
  misc_feature (1)..(353): NCBI GI NO: 9759007 NR Description: pectin methylesterase-like protein
  misc_feature (1)..(353): NCBI GI NO: 15242495 NR Description: pectin methylesterase - like protein
  misc_feature (1)..(353): NCBI GI NO: 22328058 NR Description: pectinesterase family; protein id: At5g64640.1
  misc_feature (1)..(353): NCBI GI NO: 22135882 NR Description: pectin methylesterase-like protein
  misc_feature (1)..(354): NCBI GI NO: 1552379 NR Description: pectin methylesterase
  misc_feature (1)..(354): NCBI GI NO: 38344075 NR Description: OSJNBa0006B20.19
  misc_feature (138)..(353): NCBI GI NO: 21554293 NR Description: pectin methylesterase-like protein
  misc_feature (21)..(354): NCBI GI NO: 6689892 NR Description: pectin methyl esterase [Solanum tuberosum]
  misc_feature (1)..(354): NCBI GI NO: 6689890 NR Description: pectin methyl esterase [Solanum tuberosum]
MLAARQRYGDETSLWRPPQTERDGYWPPPAASSGADVDALGVPKGLPANATVCGAGCDYRTVREAVAAAPDYGDGAFVVHVKEGAYRETVSVPWEKTNVVLVGDGMGKTVITGDLNADTSGVSTFNTATVGVLADGFMARDLTIANTAGPDAHQAVAFRSTGDRTVLDGVELLGHQDTLYAHAMRQFYTRCRVAGTVDFVFGNSAAVLHDTALVVLPRQLRPEKGENDAVTAQGRTDPAQPTGIVLSRCSVNGSEEYMALYRERPGVHHVYLGRPWKEYSRTVYVGCMLAEIVQPQGWMPWNGDFALQTLYYGEYDSAGPGGAAGQRVAWSSQVPKVHVDAYSVASFIQGHEWIPRV

SEQ ID NO: 31085 - DNA, 1619 bp, Zea mays subsp. mays
  misc_feature (1)..(1619): Ceres Seq. ID no. 12365892
gcacgagaccattacctagaacatcctaatcgaaaaagtagacacctaaactttgccacatagccaataacggatcggatcgccttcgtacttttcctacttgctatctccagcgctaggctatcagctagcactagcagcgccgtcactgttcgaagagatcagcgcagcgaactcgcagccgagagatcgatcgaggccggccggggccgagatgggcagcgtcggcgtcggttgcggctcgccggacgaggagcagcagaccgagggcagtggccctctgccgccgccggctgtctgcgtcacggggtccaccggctacgtcggctcctggctcgtccgcacgctgctgcggcgaggctaccgcgtccacgccaccgccagggacacaggcaaggccttgcaggtgctcgccgtcgtggaagaagggagggaccggctcagggtgttcagggccgacatgggcgaggaagggagcttcgacgccgccgtcacgggatgcgtggcgctcttccacgtcgcggcctccatggacctccacgtatcacccgcccatcaggacaacctcgaggagcacgtgaggtcaagcatgctggagccggccacgaggggaaccatcaacgtgctgcggtcctgcgtccgcgccgggaccgtgcgccgggtcgtcttcacgtcctccgtcagcacgttgacggcggtggacgcggtggggcggcggaaggccgtgctcgacgagtcttgcctcagagccctcgacgacgtgtggcgcaccaagcccgtcggctgggtctacatcctgtccaagcggctgactgaggaggcggcgttcaggttcgcacgggagaacggcgtccacctcgtgtccctcgttctgccaaccgtcgccgggccgttcctcacgacaagcgtccctacgagcatccagctcctgctgtcacccatcacaggtgacccgaagctctactcggtgctggcctcagtgcacgccaggttcgggtgcgtcccgctggcgcacgtccaggacgtgtgtgacgcgcacgtcttactgatggaggcgccgcgcgccgaggggcggtacctgtgcgccgcgggcgggtacgcggcggcgcagctcgcgcggctcctcgcttcgcgctaccttccggccggtgacaggctgagcaaagatttcgacgacgtctcctgctcgccgccggtggtttcgtccaggaggctgttggatctggggttcaggttccggcacgacgtcgaggacgtggtgaaagacagtgttgcgcagtgtcttgcccatgggttcctggagcatcctgagacctgaatgcggcagagctgcaattcctagttggtttcaggcgttcagcaaatcagcggcgatctgaaggagaaggatgaatgcatggttgggctggggcctgggcccttaggctatccacatgttactctatatttactctacagactataccactattcctagcttaatcaccaaaattccttactctaaattactcaccaaaatttgtagcctcatatacctctatatatcaactactactacatagtctattttattctatttcattctaactacttttttctctatataatacaagattttg

SEQ ID NO: 31086 - protein, 367 aa, Zea mays subsp. mays
  peptide (1)..(367): Ceres Seq. ID no. 12365893
  misc_feature (28)..(157): Pfam Name: Pfam Description:  NAD dependent epimerase/dehydratase family
  misc_feature (29)..(353): NCBI GI NO: 30687527 NR Description: dihydroflavonol 4-reductase
  misc_feature (74)..(353): NCBI GI NO: 7486807 NR Description: hypothetical protein M4I22
  misc_feature (29)..(60): NCBI GI NO: 7486807 NR Description: hypothetical protein M4I22
  misc_feature (25)..(367): NCBI GI NO: 12248378 NR Description: dihydroflavonol 4-reductase [Torenia hybrida]
  misc_feature (27)..(365): NCBI GI NO: 5852933 NR Description: dihydroflavonol-4-reductase DFR1 [Glycine max]
  misc_feature (25)..(364): NCBI GI NO: 3894317 NR Description: Dihydrofravonol 4-reductase [Ipomoea batatas]
  misc_feature (25)..(364): NCBI GI NO: 40056990 NR Description: dihydroflavonol 4-reductase [Ipomoea batatas]
  misc_feature (28)..(362): NCBI GI NO: 27465024 NR Description: dihydroflavonol reductase [Populus tremuloides]
  misc_feature (24)..(362): NCBI GI NO: 1944199 NR Description: dihydroflavonol 4-reductase [Perilla frutescens]
  misc_feature (22)..(364): NCBI GI NO: 1695134 NR Description: dihydroflavonol reductase [Forsythia x intermedia]
MGSVGVGCGSPDEEQQTEGSGPLPPPAVCVTGSTGYVGSWLVRTLLRRGYRVHATARDTGKALQVLAVVEEGRDRLRVFRADMGEEGSFDAAVTGCVALFHVAASMDLHVSPAHQDNLEEHVRSSMLEPATRGTINVLRSCVRAGTVRRVVFTSSVSTLTAVDAVGRRKAVLDESCLRALDDVWRTKPVGWVYILSKRLTEEAAFRFARENGVHLVSLVLPTVAGPFLTTSVPTSIQLLLSPITGDPKLYSVLASVHARFGCVPLAHVQDVCDAHVLLMEAPRAEGRYLCAAGGYAAAQLARLLASRYLPAGDRLSKDFDDVSCSPPVVSSRRLLDLGFRFRHDVEDVVKDSVAQCLAHGFLEHPET

SEQ ID NO: 31087 - protein, 285 aa, Zea mays subsp. mays
  peptide (1)..(285): Ceres Seq. ID no. 12365894
  misc_feature (1)..(75): Pfam Name: Pfam Description:  NAD dependent epimerase/dehydratase family
  misc_feature (1)..(271): NCBI GI NO: 30687527 NR Description: dihydroflavonol 4-reductase
  misc_feature (1)..(271): NCBI GI NO: 7486807 NR Description: hypothetical protein M4I22
  misc_feature (1)..(285): NCBI GI NO: 12248378 NR Description: dihydroflavonol 4-reductase [Torenia hybrida]
  misc_feature (1)..(283): NCBI GI NO: 5852933 NR Description: dihydroflavonol-4-reductase DFR1 [Glycine max]
  misc_feature (1)..(282): NCBI GI NO: 3894317 NR Description: Dihydrofravonol 4-reductase [Ipomoea batatas]
  misc_feature (1)..(282): NCBI GI NO: 40056990 NR Description: dihydroflavonol 4-reductase [Ipomoea batatas]
  misc_feature (1)..(280): NCBI GI NO: 27465024 NR Description: dihydroflavonol reductase [Populus tremuloides]
  misc_feature (1)..(280): NCBI GI NO: 1944199 NR Description: dihydroflavonol 4-reductase [Perilla frutescens]
  misc_feature (1)..(282): NCBI GI NO: 1695134 NR Description: dihydroflavonol reductase [Forsythia x intermedia]
  misc_feature (1)..(275): NCBI GI NO: 13537528 NR Description: dihydroflavonol 4-reductase
MGEEGSFDAAVTGCVALFHVAASMDLHVSPAHQDNLEEHVRSSMLEPATRGTINVLRSCVRAGTVRRVVFTSSVSTLTAVDAVGRRKAVLDESCLRALDDVWRTKPVGWVYILSKRLTEEAAFRFARENGVHLVSLVLPTVAGPFLTTSVPTSIQLLLSPITGDPKLYSVLASVHARFGCVPLAHVQDVCDAHVLLMEAPRAEGRYLCAAGGYAAAQLARLLASRYLPAGDRLSKDFDDVSCSPPVVSSRRLLDLGFRFRHDVEDVVKDSVAQCLAHGFLEHPET

SEQ ID NO: 31088 - protein, 262 aa, Zea mays subsp. mays
  peptide (1)..(262): Ceres Seq. ID no. 12365895
  misc_feature (1)..(52): Pfam Name: Pfam Description:  NAD dependent epimerase/dehydratase family
  misc_feature (1)..(248): NCBI GI NO: 30687527 NR Description: dihydroflavonol 4-reductase
  misc_feature (1)..(248): NCBI GI NO: 7486807 NR Description: hypothetical protein M4I22
  misc_feature (1)..(262): NCBI GI NO: 12248378 NR Description: dihydroflavonol 4-reductase [Torenia hybrida]
  misc_feature (1)..(260): NCBI GI NO: 5852933 NR Description: dihydroflavonol-4-reductase DFR1 [Glycine max]
  misc_feature (1)..(259): NCBI GI NO: 3894317 NR Description: Dihydrofravonol 4-reductase [Ipomoea batatas]
  misc_feature (1)..(259): NCBI GI NO: 40056990 NR Description: dihydroflavonol 4-reductase [Ipomoea batatas]
  misc_feature (1)..(257): NCBI GI NO: 27465024 NR Description: dihydroflavonol reductase [Populus tremuloides]
  misc_feature (1)..(257): NCBI GI NO: 1944199 NR Description: dihydroflavonol 4-reductase [Perilla frutescens]
  misc_feature (1)..(259): NCBI GI NO: 1695134 NR Description: dihydroflavonol reductase [Forsythia x intermedia]
  misc_feature (1)..(252): NCBI GI NO: 13537528 NR Description: dihydroflavonol 4-reductase
MDLHVSPAHQDNLEEHVRSSMLEPATRGTINVLRSCVRAGTVRRVVFTSSVSTLTAVDAVGRRKAVLDESCLRALDDVWRTKPVGWVYILSKRLTEEAAFRFARENGVHLVSLVLPTVAGPFLTTSVPTSIQLLLSPITGDPKLYSVLASVHARFGCVPLAHVQDVCDAHVLLMEAPRAEGRYLCAAGGYAAAQLARLLASRYLPAGDRLSKDFDDVSCSPPVVSSRRLLDLGFRFRHDVEDVVKDSVAQCLAHGFLEHPET

SEQ ID NO: 31089 - DNA, 1408 bp, Zea mays subsp. mays
  misc_feature (1)..(1408): Ceres Seq. ID no. 12555162
aaacccaatccatccaaacccatttccctcgctcccatcccgtcccgccccttgtctcttccgcttccgcccgaccccgcgcgccgcggaccagcagccatgtcgtgctcccacctctccaccgcctggtcctcctcggcgctcgccagcagcgcctccaccacccgtcggcgctcccccccgcgctcgggtctcctggtgcggtgttccctccgtgagctccgcacccgcatcgactccgtcaggaacacgcagaagatcacggaggccatgaagctggtggccgccgccaaggtccggcgcgcgcaggaggccgtcgtctcctctcgccctttctcggaggcgctggtggaggtgctctacaacatgaaccaggagatccagacggaggacatcgacctgcccctcacccgcacccgccccgtcaagaaggtggccctcgtggtcctgaccggcgagcgcggcctctgcgggagcttcaacaacaacgtgctcaagaaggcggaaacccgcatcgatgagctcaagcagctgggcctccagtacaccgtcgtcagcgtggggaagaagggcaacgcctacttccagcgccgcccctacatcccgttggagcgcgatctggaggtgagcagcgtgcccaccgtcaaggactcgcaggccatctgcgacctcgtctactcgctcttcgtctccgaggaggtggacaaggtggagctgctctactccaagttcgtgtcgctggtgcgctccgaccccatcatccagacgctgctccccatgtcgcccaagggcgagatctgcgacgtcaacggcgtctgcgtggacgccacggaggacgagctcttccgcctcaccaccaaggaggggaagctcaccgtggagcgcgagaaggtgaagatcgagacgcagcccttctcccccgtggtgcagttcgagcaggaccccgtgcagatcctggacgcgctgctcccgctctacctcaacagccagatcctccgtgccctgcaggagtcgctcgccagcgagctcgccgcccggatgagcgccatgagcagcgccaccgacaacgccatcgagctccgcaagaacctctccatcgcctacaaccgacagcgccaggccaagatcaccggggagatcctcgagatcgtcgccggtgccgacgccctcgctggctgagcctgagtccccttggtggtgcggtgctcctgctatatataattctttttcctcattttctccactctgcctgtaattcctgataatagcacaaacgcaacggagttctgtgttccttgcgacacacaagaatttcaatccagagatgccaaaatgtataatcttgccgcaactgagacgtcgaagctcagtgtatttttatgcccaagtcttccaaatgtttggcacg

SEQ ID NO: 31090 - protein, 392 aa, Zea mays subsp. mays
  peptide (1)..(392): Ceres Seq. ID no. 12555163
  misc_feature (69)..(390): Pfam Name: Pfam Description:  ATP synthase
  misc_feature (34)..(391): NCBI GI NO: 27818005 NR Description: OSJNBb0041J06.11
  misc_feature (34)..(389): NCBI GI NO: 18412632 NR Description: coded for by A
  misc_feature (31)..(390): NCBI GI NO: 231610 NR Description: ATP synthase gamma chain, chloroplast precursor
  misc_feature (34)..(389): NCBI GI NO: 114643 NR Description: ATP synthase gamma chain, chloroplast precursor
  misc_feature (67)..(389): NCBI GI NO: 755801 NR Description: ATP synthase [Spinacia oleracea]
  misc_feature (31)..(386): NCBI GI NO: 114640 NR Description: ATP synthase gamma chain, chloroplast precursor
  misc_feature (91)..(389): NCBI GI NO: 5708095 NR Description: ATP synthase gamma chain, chloroplast precursor
  misc_feature (58)..(390): NCBI GI NO: 15218281 NR Description: ATP synthase gamma-subunit, putative
  misc_feature (62)..(392): NCBI GI NO: 114638 NR Description: ATP synthase gamma chain, chloroplast precursor
  misc_feature (62)..(392): NCBI GI NO: 228698 NR Description: CF1 ATP synthase:SUBUNIT=gamma
KPNPSKPISLAPIPSRPLSLPLPPDPARRGPAAMSCSHLSTAWSSSALASSASTTRRRSPPRSGLLVRCSLRELRTRIDSVRNTQKITEAMKLVAAAKVRRAQEAVVSSRPFSEALVEVLYNMNQEIQTEDIDLPLTRTRPVKKVALVVLTGERGLCGSFNNNVLKKAETRIDELKQLGLQYTVVSVGKKGNAYFQRRPYIPLERDLEVSSVPTVKDSQAICDLVYSLFVSEEVDKVELLYSKFVSLVRSDPIIQTLLPMSPKGEICDVNGVCVDATEDELFRLTTKEGKLTVEREKVKIETQPFSPVVQFEQDPVQILDALLPLYLNSQILRALQESLASELAARMSAMSSATDNAIELRKNLSIAYNRQRQAKITGEILEIVAGADALAG

SEQ ID NO: 31091 - protein, 359 aa, Zea mays subsp. mays
  peptide (1)..(359): Ceres Seq. ID no. 12555164
  misc_feature (36)..(357): Pfam Name: Pfam Description:  ATP synthase
  misc_feature (1)..(358): NCBI GI NO: 27818005 NR Description: OSJNBb0041J06.11
  misc_feature (1)..(356): NCBI GI NO: 18412632 NR Description: coded for by A
  misc_feature (1)..(357): NCBI GI NO: 231610 NR Description: ATP synthase gamma chain, chloroplast precursor
  misc_feature (1)..(356): NCBI GI NO: 114643 NR Description: ATP synthase gamma chain, chloroplast precursor
  misc_feature (34)..(356): NCBI GI NO: 755801 NR Description: ATP synthase [Spinacia oleracea]
  misc_feature (1)..(353): NCBI GI NO: 114640 NR Description: ATP synthase gamma chain, chloroplast precursor
  misc_feature (58)..(356): NCBI GI NO: 5708095 NR Description: ATP synthase gamma chain, chloroplast precursor
  misc_feature (25)..(357): NCBI GI NO: 15218281 NR Description: ATP synthase gamma-subunit, putative
  misc_feature (29)..(359): NCBI GI NO: 114638 NR Description: ATP synthase gamma chain, chloroplast precursor
  misc_feature (29)..(359): NCBI GI NO: 228698 NR Description: CF1 ATP synthase:SUBUNIT=gamma
MSCSHLSTAWSSSALASSASTTRRRSPPRSGLLVRCSLRELRTRIDSVRNTQKITEAMKLVAAAKVRRAQEAVVSSRPFSEALVEVLYNMNQEIQTEDIDLPLTRTRPVKKVALVVLTGERGLCGSFNNNVLKKAETRIDELKQLGLQYTVVSVGKKGNAYFQRRPYIPLERDLEVSSVPTVKDSQAICDLVYSLFVSEEVDKVELLYSKFVSLVRSDPIIQTLLPMSPKGEICDVNGVCVDATEDELFRLTTKEGKLTVEREKVKIETQPFSPVVQFEQDPVQILDALLPLYLNSQILRALQESLASELAARMSAMSSATDNAIELRKNLSIAYNRQRQAKITGEILEIVAGADALAG

SEQ ID NO: 31092 - protein, 302 aa, Zea mays subsp. mays
  peptide (1)..(302): Ceres Seq. ID no. 12555165
  misc_feature (1)..(300): Pfam Name: Pfam Description:  ATP synthase
  misc_feature (1)..(301): NCBI GI NO: 27818005 NR Description: OSJNBb0041J06.11
  misc_feature (1)..(299): NCBI GI NO: 18412632 NR Description: coded for by A
  misc_feature (1)..(300): NCBI GI NO: 231610 NR Description: ATP synthase gamma chain, chloroplast precursor
  misc_feature (1)..(299): NCBI GI NO: 114643 NR Description: ATP synthase gamma chain, chloroplast precursor
  misc_feature (1)..(299): NCBI GI NO: 755801 NR Description: ATP synthase [Spinacia oleracea]
  misc_feature (1)..(296): NCBI GI NO: 114640 NR Description: ATP synthase gamma chain, chloroplast precursor
  misc_feature (1)..(299): NCBI GI NO: 5708095 NR Description: ATP synthase gamma chain, chloroplast precursor
  misc_feature (1)..(300): NCBI GI NO: 15218281 NR Description: ATP synthase gamma-subunit, putative
  misc_feature (1)..(302): NCBI GI NO: 114638 NR Description: ATP synthase gamma chain, chloroplast precursor
  misc_feature (1)..(302): NCBI GI NO: 228698 NR Description: CF1 ATP synthase:SUBUNIT=gamma
MKLVAAAKVRRAQEAVVSSRPFSEALVEVLYNMNQEIQTEDIDLPLTRTRPVKKVALVVLTGERGLCGSFNNNVLKKAETRIDELKQLGLQYTVVSVGKKGNAYFQRRPYIPLERDLEVSSVPTVKDSQAICDLVYSLFVSEEVDKVELLYSKFVSLVRSDPIIQTLLPMSPKGEICDVNGVCVDATEDELFRLTTKEGKLTVEREKVKIETQPFSPVVQFEQDPVQILDALLPLYLNSQILRALQESLASELAARMSAMSSATDNAIELRKNLSIAYNRQRQAKITGEILEIVAGADALAG

SEQ ID NO: 31093 - DNA, 965 bp, Zea mays subsp. mays
  misc_feature (1)..(965): Ceres Seq. ID no. 12415225
  misc_feature (831)..(831): n is a, c, t, g, unknown, or other
  misc_feature (144)..(144): n is a, c, t, g, unknown, or other
  misc_feature (616)..(616): n is a, c, t, g, unknown, or other
  misc_feature (615)..(615): n is a, c, t, g, unknown, or other
  misc_feature (590)..(590): n is a, c, t, g, unknown, or other
  misc_feature (196)..(196): n is a, c, t, g, unknown, or other
accaccagcagagagcagacccgccgtctccgctatcagcacgcgtgtagccctgcagcgaggaatcaccacacacacacacacgcagagagacagagaagaggagggagatgtcgccgcagtctcagcagcagacggcgatantcggggaggagtactgcgagggcgaggacagggagctgacggtgcgcaagangacgctcttcaccccgggggacgggctggaggcgtacgaccaccgcacgggcgcgctggcgttccgcgtcgagacgtacggccgcggcggggcgtgcgggggcggggccgccaggggggacctcgcgctgctgggcgcccagggggagcccgtcctcacggtgcgccgccgccgccccagcctgcacaaccgctgggacggcttcctcggcgacggcgccgcgcacggccagaagaagcccgtcttctccgcgcgccgctcctccatcctcggcgccggcacgggcgccgccgccgtcctcgtcgacctcctcgcccccggcgccgccggggagttccgcgtcgacggctccttcccgcgccgctgctgccgcgtcgtggcctccgccagggcntgggccgcgcccgtcgccaaggagnnggaggaggaggaggaggaggacgtggtggtggcggaggtcaggcggaaggtggacgaggacgcgcacgtcatgatgggccgggacgtcttcgtgctctgggtgcgcgccggcttcgacgccgccttcgccatggggatcgtgctcgtgctcgaccggatcaccggggatgacgtcgacggcgactgcgggaggacctgctcgaggccgctacatnccgccggcgtaagcacgcgggaccgacctcccgctcgcgtggggcgtggcttcagtacaattccacaaacaattttctcatggttcttcgatccgatgtactttaccttcgagcatgatgtgaattatcttctc

SEQ ID NO: 31094 - protein, 285 aa, Zea mays subsp. mays
  peptide (1)..(285): Ceres Seq. ID no. 12415226
  misc_feature (10)..(218): Pfam Name: DUF567 Pfam Description: Protein of unknown function
  misc_feature (10)..(239): NCBI GI NO: 34909922 NR Description: P0665A11.21
  misc_feature (14)..(170): NCBI GI NO: 15220064 NR Description: hypothetical protein; protein id: At1g80120.1
  misc_feature (11)..(187): NCBI GI NO: 18400907 NR Description: expressed protein; protein id: At3g15810
  misc_feature (11)..(187): NCBI GI NO: 21554362 NR Description: unknown [Arabidopsis thaliana]
  misc_feature (24)..(222): NCBI GI NO: 27542769 NR Description: hypothetical protein-like protein
  misc_feature (9)..(222): NCBI GI NO: 27542765 NR Description: hypothetical protein-like protein
  misc_feature (124)..(227): NCBI GI NO: 15220064 NR Description: hypothetical protein; protein id: At1g80120.1
  misc_feature (179)..(226): NCBI GI NO: 18400907 NR Description: expressed protein; protein id: At3g15810
  misc_feature (179)..(226): NCBI GI NO: 21554362 NR Description: unknown [Arabidopsis thaliana]
  misc_feature (12)..(12): Xaa is any aa, unknown or other
  misc_feature (29)..(29): Xaa is any aa, unknown or other
  misc_feature (160)..(160): Xaa is any aa, unknown or other
  misc_feature (169)..(169): Xaa is any aa, unknown or other
  misc_feature (241)..(241): Xaa is any aa, unknown or other
MSPQSQQQTAIXGEEYCEGEDRELTVRKXTLFTPGDGLEAYDHRTGALAFRVETYGRGGACGGGAARGDLALLGAQGEPVLTVRRRRPSLHNRWDGFLGDGAAHGQKKPVFSARRSSILGAGTGAAAVLVDLLAPGAAGEFRVDGSFPRRCCRVVASARXWAAPVAKEXEEEEEEDVVVAEVRRKVDEDAHVMMGRDVFVLWVRAGFDAAFAMGIVLVLDRITGDDVDGDCGRTCSRPLHXAGVSTRDRPPARVGRGFSTIPQTIFSWFFDPMYFTFEHDVNYLL

SEQ ID NO: 31095 - protein, 261 aa, Zea mays subsp. mays
  peptide (1)..(261): Ceres Seq. ID no. 12415227
  misc_feature (43)..(233): NCBI GI NO: 29829093 NR Description: putative translation initiation factor IF-2
  misc_feature (42)..(260): NCBI GI NO: 23104656 NR Description: hypothetical protein [Azotobacter vinelandii]
  misc_feature (29)..(244): NCBI GI NO: 34915038 NR Description: putative multi resistance protein ABC transporter
  misc_feature (92)..(261): NCBI GI NO: 13633918 NR Description: U1 small nuclear ribonucleoprotein 70 kDa
  misc_feature (71)..(261): NCBI GI NO: 23018055 NR Description: hypothetical protein [Thermobifida fusca]
  misc_feature (62)..(258): NCBI GI NO: 23019271 NR Description: hypothetical protein [Thermobifida fusca]
  misc_feature (194)..(260): NCBI GI NO: 24641772 NR Description: CG1987-PA [Drosophila melanogaster]
  misc_feature (24)..(261): NCBI GI NO: 30424862 NR Description: RIKEN cDNA 5033413A03 [Mus musculus]
  misc_feature (13)..(261): NCBI GI NO: 22960097 NR Description: hypothetical protein [Rhodobacter sphaeroides]
  misc_feature (28)..(258): NCBI GI NO: 19553189 NR Description: translation initiation factor 2
  misc_feature (48)..(48): Xaa is any aa, unknown or other
  misc_feature (65)..(65): Xaa is any aa, unknown or other
  misc_feature (197)..(197): Xaa is any aa, unknown or other
  misc_feature (205)..(205): Xaa is any aa, unknown or other
PPAESRPAVSAISTRVALQRGITTHTHTQRDREEEGDVAAVSAADGDXRGGVLRGRGQGADGAQXDALHPGGRAGGVRPPHGRAGVPRRDVRPRRGVRGRGRQGGPRAAGRPGGARPHGAPPPPQPAQPLGRLPRRRRRARPEEARLLRAPLLHPRRRHGRRRRPRRPPRPRRRRGVPRRRLLPAPLLPRRGLRQGXGRARRQGXGGGGGGGRGGGGGQAEGGRGRARHDGPGRLRALGARRLRRRLRHGDRARARPDHRG

SEQ ID NO: 31096 - DNA, 960 bp, Zea mays subsp. mays
  misc_feature (1)..(960): Ceres Seq. ID no. 12369133
gaacctgagaacctgacgcggcatcatgcaaacaaaaccgatcagagagatggcggccgtctcctccaccgccaccgcctcctcgcagccggagctgccgacctccaccgcccaccctaccgccaatgccgccgccatcagcaggctggcgcggcggccacggcggaacaacagcttcgtgatggtggaggaggcgtcctatgccagcggcggcggcgacggcggggtggccaggacgaagagcctcacggaggacgacctggaggagctcaagggctgcgtcgacctcggcttcggcttcgcgtacagcgagatacccgagctctgcgggacgctgcccgcgctcgagctctgctactccatgacccggaggttcctcgacgagcagagggcgccgggacaggatgaggaggaggaggagcctgcgtcgccgccgctcccaaattggaggatctttgcaccgggtgacgatccggaggaagtgaaggccaggttgaagtattgggctcaagcagtagcatgcactgtcaagctctgcagctgaaccagaggctggttttaactgctgtctgttctgttagcgtatgctgcgacgggccgaaccgagggcctgttggaggttgaacagtctggttgtatgtgttttgggattcgggggagcgaagaactctcttcataggtttcttctctggctgcttctgcaagaacttgggagggcggaggagggatcatgatccgggacagcgacagaccccgattgagatccatggtttgagggttctacgccgcaagcctttgcaaaatgcaggacctgctgtttcgttgttaataataataatgatgatgatgatcactaggtgttctaactgtcgtagtcctgtaataattaatgatgcactgaatggaagtttcgagttttggctactaatccaagggttgattagctccaatttttgatct

SEQ ID NO: 31097 - protein, 172 aa, Zea mays subsp. mays
  peptide (1)..(172): Ceres Seq. ID no. 12369134
  misc_feature (9)..(147): NCBI GI NO: 34907664 NR Description: P0506A10.18
  misc_feature (43)..(172): NCBI GI NO: 30684991 NR Description: expressed protein [Arabidopsis thaliana]
  misc_feature (43)..(172): NCBI GI NO: 25406874 NR Description: hypothetical protein
  misc_feature (43)..(172): NCBI GI NO: 30689349 NR Description: expressed protein [Arabidopsis thaliana]
  misc_feature (43)..(169): NCBI GI NO: 25408860 NR Description: hypothetical protein At2g43340
  misc_feature (43)..(165): NCBI GI NO: 15221309 NR Description: unknown protein; protein id: At1g05870.1
  misc_feature (43)..(148): NCBI GI NO: 25408168 NR Description: hypothetical protein At2g31560
  misc_feature (74)..(168): NCBI GI NO: 15228829 NR Description: hypothetical protein; protein id: At3g22690.1
  misc_feature (4)..(168): NCBI GI NO: 15229330 NR Description: hypothetical protein; protein id: At3g04700.1
  misc_feature (13)..(168): NCBI GI NO: 15241882 NR Description: putative protein; protein id: At5g28690.1
MQTKPIREMAAVSSTATASSQPELPTSTAHPTANAAAISRLARRPRRNNSFVMVEEASYASGGGDGGVARTKSLTEDDLEELKGCVDLGFGFAYSEIPELCGTLPALELCYSMTRRFLDEQRAPGQDEEEEEPASPPLPNWRIFAPGDDPEEVKARLKYWAQAVACTVKLCS

SEQ ID NO: 31098 - protein, 164 aa, Zea mays subsp. mays
  peptide (1)..(164): Ceres Seq. ID no. 12369135
  misc_feature (1)..(139): NCBI GI NO: 34907664 NR Description: P0506A10.18
  misc_feature (35)..(164): NCBI GI NO: 30684991 NR Description: expressed protein [Arabidopsis thaliana]
  misc_feature (35)..(164): NCBI GI NO: 25406874 NR Description: hypothetical protein
  misc_feature (35)..(164): NCBI GI NO: 30689349 NR Description: expressed protein [Arabidopsis thaliana]
  misc_feature (35)..(161): NCBI GI NO: 25408860 NR Description: hypothetical protein At2g43340
  misc_feature (35)..(157): NCBI GI NO: 15221309 NR Description: unknown protein; protein id: At1g05870.1
  misc_feature (35)..(140): NCBI GI NO: 25408168 NR Description: hypothetical protein At2g31560
  misc_feature (66)..(160): NCBI GI NO: 15228829 NR Description: hypothetical protein; protein id: At3g22690.1
  misc_feature (1)..(160): NCBI GI NO: 15229330 NR Description: hypothetical protein; protein id: At3g04700.1
  misc_feature (5)..(160): NCBI GI NO: 15241882 NR Description: putative protein; protein id: At5g28690.1
MAAVSSTATASSQPELPTSTAHPTANAAAISRLARRPRRNNSFVMVEEASYASGGGDGGVARTKSLTEDDLEELKGCVDLGFGFAYSEIPELCGTLPALELCYSMTRRFLDEQRAPGQDEEEEEPASPPLPNWRIFAPGDDPEEVKARLKYWAQAVACTVKLCS

SEQ ID NO: 31099 - protein, 135 aa, Zea mays subsp. mays
  peptide (1)..(135): Ceres Seq. ID no. 12369136
EPENLTRHHANKTDQRDGGRLLHRHRLLAAGAADLHRPPYRQCRRHQQAGAAATAEQQLRDGGGGVLCQRRRRRRGGQDEEPHGGRPGGAQGLRRPRLRLRVQRDTRALRDAARARALLLHDPEVPRRAEGAGTG

SEQ ID NO: 31100 - DNA, 1016 bp, Zea mays subsp. mays
  misc_feature (1)..(1016): Ceres Seq. ID no. 13499183
acacagacacagcagccgtttccactgacagtttctcagaaccacagcctcgatccatcgggggagaggatgggagagcctacgcggcaggagctggcggaggcggcgctcgccggggagtcggcggagcagcgcaaccgcttcctggtgctgcggctgtacgaggcgctcggctcccgcgacgcgcgccgggcgcggaagctgctggcgcccgacctcgagtggtggttccacgggccccccacgcgccagcacatgatgcgcctcctcaccggcgcggaccaccagcgccacatgagcggcggcgggttcgccttctccccgcgctccgtcgacgccttcgggtccaccgtcgtcgcggagggcggcgctgacgacgcgcgccagctctactgggtgcacgcctggaccgtggggcccgacggggtcatcacacagctcagggagtacttcaacaccgacctcactgtcaccctcctcgccggcgctgcctccgccaagaaagctgctccgcctaagcagcagcaggacgctgcctcttcttctacctcctcctcctcacccccctcggctgcgtcgtcgtctgcagctgcagggtccaggtgcctgtggcagagccgccgcgccgacagcgcgcacaagtcgctgccgggcctcgtcctcgccatctgagactagagacagcaagatccatctaccctccattataagtttataaccttattacaaaagatcctaaaattcgaaactgttattgcataaataatctggaactgcactagttgtatgtactcggagtcggagtcagtcagtgaagacgtaatgacgatgcgcgtatggactgaactgctcgatcctccgtgttgtgacttgtgaggttcaggtaccagttccttgcttagctcgtgtcgtgtgtgctgctactaggctgtaaggatcgactgttattgtccgagtctgctggatcatggatgtgatgtgatggtatatcgtggtggttaaataaaagttgcatg

SEQ ID NO: 31101 - protein, 223 aa, Zea mays subsp. mays
  peptide (1)..(223): Ceres Seq. ID no. 13499184
  misc_feature (40)..(160): NCBI GI NO: 34898184 NR Description: P0034A04.2
  misc_feature (26)..(172): NCBI GI NO: 15228414 NR Description: expressed protein [Arabidopsis thaliana]
  misc_feature (43)..(158): NCBI GI NO: 15241041 NR Description: expressed protein [Arabidopsis thaliana]
  misc_feature (87)..(223): NCBI GI NO: 4574320 NR Description: wound-induced protein WI12
  misc_feature (87)..(172): NCBI GI NO: 15028339 NR Description: unknown protein [Arabidopsis thaliana]
  misc_feature (87)..(158): NCBI GI NO: 139780 NR Description: WOUND-INDUCED PROTEIN 1
  misc_feature (104)..(158): NCBI GI NO: 10241935 NR Description: elicitor inducible protein [Nicotiana tabacum]
  misc_feature (86)..(160): NCBI GI NO: 33146884 NR Description: unknown protein
TQTQQPFPLTVSQNHSLDPSGERMGEPTRQELAEAALAGESAEQRNRFLVLRLYEALGSRDARRARKLLAPDLEWWFHGPPTRQHMMRLLTGADHQRHMSGGGFAFSPRSVDAFGSTVVAEGGADDARQLYWVHAWTVGPDGVITQLREYFNTDLTVTLLAGAASAKKAAPPKQQQDAASSSTSSSSPPSAASSSAAAGSRCLWQSRRADSAHKSLPGLVLAI

SEQ ID NO: 31102 - protein, 200 aa, Zea mays subsp. mays
  peptide (1)..(200): Ceres Seq. ID no. 13499185
  misc_feature (17)..(137): NCBI GI NO: 34898184 NR Description: P0034A04.2
  misc_feature (3)..(149): NCBI GI NO: 15228414 NR Description: expressed protein [Arabidopsis thaliana]
  misc_feature (20)..(135): NCBI GI NO: 15241041 NR Description: expressed protein [Arabidopsis thaliana]
  misc_feature (64)..(200): NCBI GI NO: 4574320 NR Description: wound-induced protein WI12
  misc_feature (64)..(149): NCBI GI NO: 15028339 NR Description: unknown protein [Arabidopsis thaliana]
  misc_feature (64)..(135): NCBI GI NO: 139780 NR Description: WOUND-INDUCED PROTEIN 1
  misc_feature (81)..(135): NCBI GI NO: 10241935 NR Description: elicitor inducible protein [Nicotiana tabacum]
  misc_feature (63)..(137): NCBI GI NO: 33146884 NR Description: unknown protein
MGEPTRQELAEAALAGESAEQRNRFLVLRLYEALGSRDARRARKLLAPDLEWWFHGPPTRQHMMRLLTGADHQRHMSGGGFAFSPRSVDAFGSTVVAEGGADDARQLYWVHAWTVGPDGVITQLREYFNTDLTVTLLAGAASAKKAAPPKQQQDAASSSTSSSSPPSAASSSAAAGSRCLWQSRRADSAHKSLPGLVLAI

SEQ ID NO: 31103 - protein, 138 aa, Zea mays subsp. mays
  peptide (1)..(138): Ceres Seq. ID no. 13499186
  misc_feature (1)..(75): NCBI GI NO: 34898184 NR Description: P0034A04.2
  misc_feature (1)..(87): NCBI GI NO: 15228414 NR Description: expressed protein [Arabidopsis thaliana]
  misc_feature (1)..(73): NCBI GI NO: 15241041 NR Description: expressed protein [Arabidopsis thaliana]
  misc_feature (2)..(138): NCBI GI NO: 4574320 NR Description: wound-induced protein WI12
  misc_feature (2)..(87): NCBI GI NO: 15028339 NR Description: unknown protein [Arabidopsis thaliana]
  misc_feature (2)..(73): NCBI GI NO: 139780 NR Description: WOUND-INDUCED PROTEIN 1
  misc_feature (19)..(73): NCBI GI NO: 10241935 NR Description: elicitor inducible protein [Nicotiana tabacum]
  misc_feature (1)..(75): NCBI GI NO: 33146884 NR Description: unknown protein
MMRLLTGADHQRHMSGGGFAFSPRSVDAFGSTVVAEGGADDARQLYWVHAWTVGPDGVITQLREYFNTDLTVTLLAGAASAKKAAPPKQQQDAASSSTSSSSPPSAASSSAAAGSRCLWQSRRADSAHKSLPGLVLAI

SEQ ID NO: 31104 - DNA, 1244 bp, Zea mays subsp. mays
  misc_feature (1)..(1244): Ceres Seq. ID no. 12354322
aagcaaaccctaatccgtcggccatgtcgtcctcccccgcggcgctgcgcttctactgccaccagtgcgaccgcaccgtctccctcgcccctcccgcatccccggacgccgacgtcttctgcccccgctgcggcggcggattcgtcgaggagcttcctcccaaccctagccccgcgcctccggccgccgccttctttgccccgccctccttcgacatccgccaccccagcgacctctccgctttcttcggccccgcctcccccgagccgctcgccccaggcctcttcgatccctccaacttccttcacgaccacttcggcggcctcctctccggcggcgccaccatccagatcgtcctcgagggtgggcccccgcccccaggcctcaactttgccgactacttcgtcggctcctccggcctcgagcagctcatccagcagctcgccgagaacgaccccaaccgctacggcaccccgcccgccgccaaggccgccgtcgcctcgctccctgacgtcgctgtctcggccgacatgatgcaggccgacggcggcgctcagtgtgccgtctgcatggacgacttccacctcggcgccgccgccaagcagctcccctgcaagcacgtcttccacaaggactgcatcgtcccatggctacctccacagctcctgcccggtctgccgcttcgagctgcccaccgacgaccctgactacaatcacacccatcagcagcacggtgattcgtctgcccctgctcccccttcccccgctcccgcggtctcctcccccagggtggccgagaggaggtttaggatttcgctgccctggcctctcagggccgcttttggcgctgctcaggcagagagcagcaatcccaccgatgatgacgtgcctccgtctggcagcgatgcagctggtggccctcagtctcagactggatatgatgatctcgactgaggcctcaatagccgatcttggaaacaaataggctatacaccaaagatgagagatgataccgtcgtgtaccaaattaataaatgtgcatcagaagtatggagtcctttaggaacctctgctgactgttgatggaatatggttggtttgttgacactgtcagtgcattgtttctgaagggatatgggcctgttaatttaaaatttgtattcactaatggttgggggaggaacggtggagaaactgagtcatgtatagttgttccttttgcaattgctgcatggtttttttct

SEQ ID NO: 31105 - protein, 234 aa, Zea mays subsp. mays
  peptide (1)..(234): Ceres Seq. ID no. 12354323
  misc_feature (186)..(217): Pfam Name: RING finger Pfam Description: Zinc finger, C3HC4 type
  misc_feature (71)..(217): NCBI GI NO: 37535546 NR Description: putative zinc finger protein
  misc_feature (4)..(87): NCBI GI NO: 37535546 NR Description: putative zinc finger protein
  misc_feature (77)..(217): NCBI GI NO: 11994207 NR Description: gene_id:MPN9.20~unknown protein
  misc_feature (77)..(217): NCBI GI NO: 15231003 NR Description: unknown protein; protein id: At3g19950
  misc_feature (127)..(217): NCBI GI NO: 34903272 NR Description: unnamed protein product
  misc_feature (17)..(51): NCBI GI NO: 34903272 NR Description: unnamed protein product
  misc_feature (114)..(217): NCBI GI NO: 18405411 NR Description: expressed protein; protein id: At1g55530
  misc_feature (126)..(217): NCBI GI NO: 15231238 NR Description: unknown protein; protein id: At3g13430.1
  misc_feature (126)..(217): NCBI GI NO: 38454178 NR Description: At3g13430 [Arabidopsis thaliana]
  misc_feature (1)..(234): NCBI GI NO: 14719329 NR Description: putative RING-H2 finger protein [Oryza sativa]
ANPNPSAMSSSPAALRFYCHQCDRTVSLAPPASPDADVFCPRCGGGFVEELPPNPSPAPPAAAFFAPPSFDIRHPSDLSAFFGPASPEPLAPGLFDPSNFLHDHFGGLLSGGATIQIVLEGGPPPPGLNFADYFVGSSGLEQLIQQLAENDPNRYGTPPAAKAAVASLPDVAVSADMMQADGGAQCAVCMDDFHLGAAAKQLPCKHVFHKDCIVPWLPPQLLPGLPLRAAHRRP

SEQ ID NO: 31106 - protein, 227 aa, Zea mays subsp. mays
  peptide (1)..(227): Ceres Seq. ID no. 12354324
  misc_feature (179)..(210): Pfam Name: RING finger Pfam Description: Zinc finger, C3HC4 type
  misc_feature (64)..(210): NCBI GI NO: 37535546 NR Description: putative zinc finger protein
  misc_feature (1)..(80): NCBI GI NO: 37535546 NR Description: putative zinc finger protein
  misc_feature (70)..(210): NCBI GI NO: 11994207 NR Description: gene_id:MPN9.20~unknown protein
  misc_feature (70)..(210): NCBI GI NO: 15231003 NR Description: unknown protein; protein id: At3g19950
  misc_feature (120)..(210): NCBI GI NO: 34903272 NR Description: unnamed protein product
  misc_feature (10)..(44): NCBI GI NO: 34903272 NR Description: unnamed protein product
  misc_feature (107)..(210): NCBI GI NO: 18405411 NR Description: expressed protein; protein id: At1g55530
  misc_feature (119)..(210): NCBI GI NO: 15231238 NR Description: unknown protein; protein id: At3g13430.1
  misc_feature (119)..(210): NCBI GI NO: 38454178 NR Description: At3g13430 [Arabidopsis thaliana]
  misc_feature (1)..(227): NCBI GI NO: 14719329 NR Description: putative RING-H2 finger protein [Oryza sativa]
MSSSPAALRFYCHQCDRTVSLAPPASPDADVFCPRCGGGFVEELPPNPSPAPPAAAFFAPPSFDIRHPSDLSAFFGPASPEPLAPGLFDPSNFLHDHFGGLLSGGATIQIVLEGGPPPPGLNFADYFVGSSGLEQLIQQLAENDPNRYGTPPAAKAAVASLPDVAVSADMMQADGGAQCAVCMDDFHLGAAAKQLPCKHVFHKDCIVPWLPPQLLPGLPLRAAHRRP

SEQ ID NO: 31107 - protein, 177 aa, Zea mays subsp. mays
  peptide (1)..(177): Ceres Seq. ID no. 12354325
  misc_feature (44)..(177): Pfam Name: Pfam Description:  Glycoprotein GG/GX
  misc_feature (11)..(177): NCBI GI NO: 188864 NR Description: mucin
  misc_feature (11)..(177): NCBI GI NO: 13592175 NR Description: ppg3 [Leishmania major]
  misc_feature (11)..(177): NCBI GI NO: 186396 NR Description: mucin
  misc_feature (13)..(177): NCBI GI NO: 13592175 NR Description: ppg3 [Leishmania major]
  misc_feature (11)..(177): NCBI GI NO: 13592175 NR Description: ppg3 [Leishmania major]
  misc_feature (8)..(177): NCBI GI NO: 20138131 NR Description: Vegetative cell wall protein gp1 precursor
  misc_feature (12)..(177): NCBI GI NO: 188864 NR Description: mucin
  misc_feature (11)..(177): NCBI GI NO: 13592175 NR Description: ppg3 [Leishmania major]
  misc_feature (17)..(177): NCBI GI NO: 13592175 NR Description: ppg3 [Leishmania major]
  misc_feature (11)..(177): NCBI GI NO: 2135765 NR Description: mucin 2 precursor, intestinal - human (fragments)
KQTLIRRPCRPPPRRCASTATSATAPSPSPLPHPRTPTSSAPAAAADSSRSFLPTLAPRLRPPPSLPRPPSTSATPATSPLSSAPPPPSRSPQASSIPPTSFTTTSAASSPAAPPSRSSSRVGPRPQASTLPTTSSAPPASSSSSSSSPRTTPTATAPRPPPRPPSPRSLTSLSRPT

SEQ ID NO: 31108 - DNA, 816 bp, Zea mays subsp. mays
  misc_feature (1)..(816): Ceres Seq. ID no. 12384239
acaggtaattctctcgtagttcagttgtagccgttgagacttgggaggcaggcgacatgggtggcgggaaggacgacggccacgatccctccaaggcggacaagggattccacggaggagggtacccggccgccggtggatactacggcggccagtaccccggcggcggctaccctgctccaccgggcggcggtgcgtaccctcccgggcctgggtacccggtaccacctggtgggtacccgcctccgggtggctaccctcagcctggcggatacccgccgtcgcacggggcgtacccggcgccgggtgcaggcgcgtatcctcccagcgggtacccccatcaaccggtctacccacagcctggctatccatcgatgcccggtcatggtggcatgtacggaggagggcacggcgcagggggttctgcaggccacggggcgatgctggccggaggtgccgcggcggcgtacggagctcacacggtgtcccactcccacgggatgtacggccacggccacggccacggcaagttcaagcatggcaagttcaagcacggcaagtttggcaagcacaagaagatgtttggcaagcacaagaatatgttcggtcgcaagtggaagtgattaacgtacagctttaatccgattctggacgagcagacgtatatatatacaccggagtccagaatgctaagttatgctattttgattgtgattcgaatacgggaggttgttagggttttcgaagtacgtactgacggctgcctgtaagctttgttggagctgttcttgccgtgttggcagtccgaattaattt

SEQ ID NO: 31109 - protein, 188 aa, Zea mays subsp. mays
  peptide (1)..(188): Ceres Seq. ID no. 12384240
  misc_feature (65)..(134): Pfam Name: Pfam Description:  Bindin
  misc_feature (3)..(188): NCBI GI NO: 29124113 NR Description: hypothetical protein
  misc_feature (1)..(188): NCBI GI NO: 13543234 NR Description: Unknown (protein for MGC:12025) [Mus musculus]
  misc_feature (1)..(188): NCBI GI NO: 33668156 NR Description: GPRP [Oryza sativa (indica cultivar-group)]
  misc_feature (6)..(188): NCBI GI NO: 15238005 NR Description: glycine/proline-rich protein; protein id:At5g17650
  misc_feature (8)..(188): NCBI GI NO: 18422542 NR Description: expressed protein; protein id: At5g45350
  misc_feature (1)..(181): NCBI GI NO: 6478148 NR Description: putative glycine and proline-rich protein
  misc_feature (8)..(185): NCBI GI NO: 6478148 NR Description: putative glycine and proline-rich protein
  misc_feature (34)..(184): NCBI GI NO: 15234178 NR Description: putative protein; protein id: At4g19200
  misc_feature (17)..(174): NCBI GI NO: 6478148 NR Description: putative glycine and proline-rich protein
  misc_feature (34)..(170): NCBI GI NO: 7487135 NR Description: hypothetical protein T18B16
MGGGKDDGHDPSKADKGFHGGGYPAAGGYYGGQYPGGGYPAPPGGGAYPPGPGYPVPPGGYPPPGGYPQPGGYPPSHGAYPAPGAGAYPPSGYPHQPVYPQPGYPSMPGHGGMYGGGHGAGGSAGHGAMLAGGAAAAYGAHTVSHSHGMYGHGHGHGKFKHGKFKHGKFGKHKKMFGKHKNMFGRKWK

SEQ ID NO: 31110 - DNA, 726 bp, Zea mays subsp. mays
  misc_feature (1)..(726): Ceres Seq. ID no. 12354125
ccactcatctatttcttttgaatcattgtatactagctagctagctagccagagcttgtatggccactgctcatcatgcggatgaccatcgtgcagggagaagaagcgaggccgtcggagagaactacatgaggggcctctacggcgacgatgactacaacgccacccactacggtcaccagcagcagcagcggccgccgcccgcgcccatggcggtggccaaggcgttagccacagccacggcagccttctccatgttgttgttgtcggggctggcggtgacgggcacggtgctggcgctcatcgtggcgacgccattgatggtgatcttcagccccgtgctggtgccggcggccatcacggtggcgctgctcacggtaggcatcgtttcgtcgggagggttcggcgtggctgcggtggctgtgctggcgtgggtgtaccgctaccttcagaccacgacctcgtcgtcgggtcagcagccgcacatcgtcaaggactgggcgcagcagcaccgtctggagcagacacgcgcgcactgaaataaaaaaaaaagcgtagtacccctccgtttctttttatttgttgctgtttagttcatatttgtcactgtttcgttaaaaatgaactagcgggataacgagaacgggaggtaatatagcttttcatttaatgtaatgtaacgtaatcttatgtttgcagcagtaataatgtgtattatatatttgc

SEQ ID NO: 31111 - protein, 159 aa, Zea mays subsp. mays
  peptide (1)..(159): Ceres Seq. ID no. 12354126
  misc_feature (53)..(141): Pfam Name: Pfam Description:  Oleosin
  misc_feature (5)..(130): NCBI GI NO: 3334281 NR Description: Oleosin 16 kDa
  misc_feature (35)..(130): NCBI GI NO: 5381321 NR Description: 15 kDa oleosin [Sesamum indicum]
  misc_feature (1)..(130): NCBI GI NO: 1362168 NR Description: oleosin 2 - barley
  misc_feature (26)..(157): NCBI GI NO: 3334474 NR Description: OLEOSIN ZM-I
  misc_feature (25)..(158): NCBI GI NO: 3334280 NR Description: OLEOSIN 16 KD (OSE701)
  misc_feature (26)..(157): NCBI GI NO: 82705 NR Description: lipid body-associated major protein L3 - maize
  misc_feature (38)..(141): NCBI GI NO: 2119749 NR Description: oleosin - almond
  misc_feature (38)..(141): NCBI GI NO: 3914199 NR Description: OLEOSIN 1
  misc_feature (25)..(158): NCBI GI NO: 38346165 NR Description: OSJNBa0079A21.12
  misc_feature (35)..(130): NCBI GI NO: 15225211 NR Description: oleosin; protein id: At2g25890.1
MATAHHADDHRAGRRSEAVGENYMRGLYGDDDYNATHYGHQQQQRPPPAPMAVAKALATATAAFSMLLLSGLAVTGTVLALIVATPLMVIFSPVLVPAAITVALLTVGIVSSGGFGVAAVAVLAWVYRYLQTTTSSSGQQPHIVKDWAQQHRLEQTRAH

SEQ ID NO: 31112 - protein, 136 aa, Zea mays subsp. mays
  peptide (1)..(136): Ceres Seq. ID no. 12354127
  misc_feature (30)..(118): Pfam Name: Pfam Description:  Oleosin
  misc_feature (1)..(107): NCBI GI NO: 3334281 NR Description: Oleosin 16 kDa
  misc_feature (12)..(107): NCBI GI NO: 5381321 NR Description: 15 kDa oleosin [Sesamum indicum]
  misc_feature (1)..(107): NCBI GI NO: 1362168 NR Description: oleosin 2 - barley
  misc_feature (3)..(134): NCBI GI NO: 3334474 NR Description: OLEOSIN ZM-I
  misc_feature (2)..(135): NCBI GI NO: 3334280 NR Description: OLEOSIN 16 KD (OSE701)
  misc_feature (3)..(134): NCBI GI NO: 82705 NR Description: lipid body-associated major protein L3 - maize
  misc_feature (15)..(118): NCBI GI NO: 2119749 NR Description: oleosin - almond
  misc_feature (15)..(118): NCBI GI NO: 3914199 NR Description: OLEOSIN 1
  misc_feature (2)..(135): NCBI GI NO: 38346165 NR Description: OSJNBa0079A21.12
  misc_feature (12)..(107): NCBI GI NO: 15225211 NR Description: oleosin; protein id: At2g25890.1
MRGLYGDDDYNATHYGHQQQQRPPPAPMAVAKALATATAAFSMLLLSGLAVTGTVLALIVATPLMVIFSPVLVPAAITVALLTVGIVSSGGFGVAAVAVLAWVYRYLQTTTSSSGQQPHIVKDWAQQHRLEQTRAH

SEQ ID NO: 31113 - protein, 109 aa, Zea mays subsp. mays
  peptide (1)..(109): Ceres Seq. ID no. 12354128
  misc_feature (3)..(91): Pfam Name: Pfam Description:  Oleosin
  misc_feature (1)..(80): NCBI GI NO: 3334281 NR Description: Oleosin 16 kDa
  misc_feature (1)..(80): NCBI GI NO: 5381321 NR Description: 15 kDa oleosin [Sesamum indicum]
  misc_feature (1)..(80): NCBI GI NO: 1362168 NR Description: oleosin 2 - barley
  misc_feature (1)..(107): NCBI GI NO: 3334474 NR Description: OLEOSIN ZM-I
  misc_feature (1)..(108): NCBI GI NO: 3334280 NR Description: OLEOSIN 16 KD (OSE701)
  misc_feature (1)..(107): NCBI GI NO: 82705 NR Description: lipid body-associated major protein L3 - maize
  misc_feature (1)..(91): NCBI GI NO: 2119749 NR Description: oleosin - almond
  misc_feature (1)..(91): NCBI GI NO: 3914199 NR Description: OLEOSIN 1
  misc_feature (1)..(108): NCBI GI NO: 38346165 NR Description: OSJNBa0079A21.12
  misc_feature (1)..(80): NCBI GI NO: 15225211 NR Description: oleosin; protein id: At2g25890.1
MAVAKALATATAAFSMLLLSGLAVTGTVLALIVATPLMVIFSPVLVPAAITVALLTVGIVSSGGFGVAAVAVLAWVYRYLQTTTSSSGQQPHIVKDWAQQHRLEQTRAH

SEQ ID NO: 31114 - DNA, 1141 bp, Zea mays subsp. mays
  misc_feature (1)..(1141): Ceres Seq. ID no. 12367647
gcgacacacaccacacacacacattttcaaatctagcttgttcgctaagctcaggctagctgagctgatctgagaaacgatcgctgcttcagtttcagcttgatcgctagctcgctacacagatcgatcgacctcttatttagcttgttcctccaaggaccgagatcggttgttgttgataaaccagccatggttgcggttgcggaggcagcggtgacgacgaccatgacgacgacgggcgggcggtacgcgctgctgatggcggcgcacgactcggagtacgtgctcaacaagtacggcgggtacctccacgtcttcgtggcggccttcggcgacgccggcgagacgtgggacctgtatcgggccatcgacagcgagctccctggccccggtgagcttgaggcctacgacgggttcgtgatcagcggcagcccccacgacgcgtacgccgacgagctgtggatcctgcggctgtgcctcctggtgcgggcgctgcacggcatgcgcaagcgggtcctcggcgtctgcttcggccaccaggtgatctgccgcgcgctgggaggccgcgtgggcaaggcccgcgccggctgggacgtcggcgtcagggaggtggccatcgccgaggcgccgccgcgcaggttcctcgacgcgctgcgggagcgggaccagctgccgctccgcgccaggatcaccgaggtccatcaggacgaggtgtgggaggtgccggagggcgcggaggttctggcctcctccgacaagaccggcgtcgagatgttctgcgtcggcgagcacgtgctgggcatccaggggcacccggagtacaccaaggacatcttcctcagcctcgtcgaccgcctcctcgccgccggatccatcaccattccctttgctgaggccgtgaacaggcagctggagatcactgcgccggaccgggagttctggctcatgctctgcaagagcttcctcaaggctcgtgaagaataagagtattaattagagtttgcacactgtgatgtcattgtcacttaattaccattaaaacggttgtaaatcttctatcacttcaacaaataaacctctctcgagtcaaatacttgaccatcttcttcaaatgagagaaaaaaaatggaagaccactttc

SEQ ID NO: 31115 - protein, 264 aa, Zea mays subsp. mays
  peptide (1)..(264): Ceres Seq. ID no. 12367648
  misc_feature (31)..(223): Pfam Name: Pfam Description:  Glutamine amidotransferase class-I
  misc_feature (1)..(262): NCBI GI NO: 13174241 NR Description: putative glutamine synthetase [Oryza sativa]
  misc_feature (19)..(260): NCBI GI NO: 15234767 NR Description: putative protein; protein id: At4g30550
  misc_feature (19)..(260): NCBI GI NO: 17381294 NR Description: AT4g30550/F17I23_110 [Arabidopsis thaliana]
  misc_feature (19)..(264): NCBI GI NO: 15224079 NR Description: unknown protein; protein id: At2g23970.1
  misc_feature (19)..(260): NCBI GI NO: 21555885 NR Description: unknown [Arabidopsis thaliana]
  misc_feature (19)..(262): NCBI GI NO: 15234765 NR Description: putative protein; protein id: At4g30540.1
  misc_feature (19)..(262): NCBI GI NO: 15234763 NR Description: putative protein; protein id: At4g30530
  misc_feature (19)..(262): NCBI GI NO: 21593315 NR Description: defense-related protein [Arabidopsis thaliana]
  misc_feature (19)..(262): NCBI GI NO: 14009290 NR Description: defense-related protein [Brassica carinata]
  misc_feature (19)..(233): NCBI GI NO: 15224078 NR Description: unknown protein; protein id: At2g23960.1
MVAVAEAAVTTTMTTTGGRYALLMAAHDSEYVLNKYGGYLHVFVAAFGDAGETWDLYRAIDSELPGPGELEAYDGFVISGSPHDAYADELWILRLCLLVRALHGMRKRVLGVCFGHQVICRALGGRVGKARAGWDVGVREVAIAEAPPRRFLDALRERDQLPLRARITEVHQDEVWEVPEGAEVLASSDKTGVEMFCVGEHVLGIQGHPEYTKDIFLSLVDRLLAAGSITIPFAEAVNRQLEITAPDREFWLMLCKSFLKAREE

SEQ ID NO: 31116 - protein, 252 aa, Zea mays subsp. mays
  peptide (1)..(252): Ceres Seq. ID no. 12367649
  misc_feature (19)..(211): Pfam Name: Pfam Description:  Glutamine amidotransferase class-I
  misc_feature (1)..(250): NCBI GI NO: 13174241 NR Description: putative glutamine synthetase [Oryza sativa]
  misc_feature (7)..(248): NCBI GI NO: 15234767 NR Description: putative protein; protein id: At4g30550
  misc_feature (7)..(248): NCBI GI NO: 17381294 NR Description: AT4g30550/F17I23_110 [Arabidopsis thaliana]
  misc_feature (7)..(252): NCBI GI NO: 15224079 NR Description: unknown protein; protein id: At2g23970.1
  misc_feature (7)..(248): NCBI GI NO: 21555885 NR Description: unknown [Arabidopsis thaliana]
  misc_feature (7)..(250): NCBI GI NO: 15234765 NR Description: putative protein; protein id: At4g30540.1
  misc_feature (7)..(250): NCBI GI NO: 15234763 NR Description: putative protein; protein id: At4g30530
  misc_feature (7)..(250): NCBI GI NO: 21593315 NR Description: defense-related protein [Arabidopsis thaliana]
  misc_feature (7)..(250): NCBI GI NO: 14009290 NR Description: defense-related protein [Brassica carinata]
  misc_feature (7)..(221): NCBI GI NO: 15224078 NR Description: unknown protein; protein id: At2g23960.1
MTTTGGRYALLMAAHDSEYVLNKYGGYLHVFVAAFGDAGETWDLYRAIDSELPGPGELEAYDGFVISGSPHDAYADELWILRLCLLVRALHGMRKRVLGVCFGHQVICRALGGRVGKARAGWDVGVREVAIAEAPPRRFLDALRERDQLPLRARITEVHQDEVWEVPEGAEVLASSDKTGVEMFCVGEHVLGIQGHPEYTKDIFLSLVDRLLAAGSITIPFAEAVNRQLEITAPDREFWLMLCKSFLKAREE

SEQ ID NO: 31117 - protein, 241 aa, Zea mays subsp. mays
  peptide (1)..(241): Ceres Seq. ID no. 12367650
  misc_feature (8)..(200): Pfam Name: Pfam Description:  Glutamine amidotransferase class-I
  misc_feature (1)..(239): NCBI GI NO: 13174241 NR Description: putative glutamine synthetase [Oryza sativa]
  misc_feature (1)..(237): NCBI GI NO: 15234767 NR Description: putative protein; protein id: At4g30550
  misc_feature (1)..(237): NCBI GI NO: 17381294 NR Description: AT4g30550/F17I23_110 [Arabidopsis thaliana]
  misc_feature (1)..(241): NCBI GI NO: 15224079 NR Description: unknown protein; protein id: At2g23970.1
  misc_feature (1)..(237): NCBI GI NO: 21555885 NR Description: unknown [Arabidopsis thaliana]
  misc_feature (1)..(239): NCBI GI NO: 15234765 NR Description: putative protein; protein id: At4g30540.1
  misc_feature (1)..(239): NCBI GI NO: 15234763 NR Description: putative protein; protein id: At4g30530
  misc_feature (1)..(239): NCBI GI NO: 21593315 NR Description: defense-related protein [Arabidopsis thaliana]
  misc_feature (1)..(239): NCBI GI NO: 14009290 NR Description: defense-related protein [Brassica carinata]
  misc_feature (1)..(210): NCBI GI NO: 15224078 NR Description: unknown protein; protein id: At2g23960.1
MAAHDSEYVLNKYGGYLHVFVAAFGDAGETWDLYRAIDSELPGPGELEAYDGFVISGSPHDAYADELWILRLCLLVRALHGMRKRVLGVCFGHQVICRALGGRVGKARAGWDVGVREVAIAEAPPRRFLDALRERDQLPLRARITEVHQDEVWEVPEGAEVLASSDKTGVEMFCVGEHVLGIQGHPEYTKDIFLSLVDRLLAAGSITIPFAEAVNRQLEITAPDREFWLMLCKSFLKAREE

SEQ ID NO: 31118 - DNA, 893 bp, Zea mays subsp. mays
  misc_feature (1)..(893): Ceres Seq. ID no. 12347530
ggcattccgaccgatcccaccgaatggacagccgcctcgccatcgccgcgctcctcctgctcgcctccgcctcctccgctgccgctgccgcggacggcgggaaggtggccgtggcgctgtactacgagtcgctgtgcccctactcggcgcgcttcgtggtcaaccacctcgccaaggtcttcgcggacggcctccgcgaggtcgtggacctcacgctcgtcccctacggcaacgcccggatccatcccggcggagagatctcgtgccagcatggtccgtacgagtgtctgctcaacaccgtggaagcttgcgccatcgacgcctggccggatctggatgtgcatttcagcttcatctactgcgtggaggacctggtggtgaagcggcagtacaaggactgggagtcctgcttcgagaagctgggcctcgacgccaagcccgtaacagaatgctacaaaagcgagcatggccacaagctcgagctcaagtacgcgaaccagaccgacgctctcgagccgccgcaccggtacgtgccctgggtggtcgtcgacgggcagcccctgcttgaggattacgagaatttcgaggcttacatctgcaaggcttacaagggcactccaccgaaggcctgccagggcctgggacgtctgcagatggccctcgagacagcggcggaggcgcgcaacggcgtcagctacaactccggtgtcagcaagcttgcgactgctgaagatgagggtggggagcataaggtgggagaatactagtacataattgactagcgacgtgccccttttttgggtcatgtgaagttgaaggaccgttccatctcgttgtccggttttttattgtacagtaatagctaatatgataatgataataattacatttcg

SEQ ID NO: 31119 - protein, 254 aa, Zea mays subsp. mays
  peptide (1)..(254): Ceres Seq. ID no. 12347531
  misc_feature (35)..(144): Pfam Name: GILT Pfam Description: Gamma interferon inducible lysosomal thiol reductase
  misc_feature (34)..(214): NCBI GI NO: 30793446 NR Description: 27K protein [Triticum aestivum]
  misc_feature (24)..(210): NCBI GI NO: 18390723 NR Description: expressed protein; protein id: At1g07080
  misc_feature (24)..(210): NCBI GI NO: 25406953 NR Description: hypothetical protein
  misc_feature (34)..(242): NCBI GI NO: 15241015 NR Description: putative protein; protein id: At5g01580.1
  misc_feature (15)..(221): NCBI GI NO: 15235523 NR Description: putative protein; protein id: At4g12900.1
  misc_feature (12)..(210): NCBI GI NO: 18413888 NR Description: putative protein; protein id: At4g12890
  misc_feature (12)..(210): NCBI GI NO: 21593076 NR Description: unknown [Arabidopsis thaliana]
  misc_feature (10)..(221): NCBI GI NO: 15235540 NR Description: putative protein; protein id: At4g12960
  misc_feature (10)..(221): NCBI GI NO: 21593852 NR Description: unknown [Arabidopsis thaliana]
  misc_feature (12)..(191): NCBI GI NO: 7487272 NR Description: hypothetical protein T20K18
HSDRSHRMDSRLAIAALLLLASASSAAAAADGGKVAVALYYESLCPYSARFVVNHLAKVFADGLREVVDLTLVPYGNARIHPGGEISCQHGPYECLLNTVEACAIDAWPDLDVHFSFIYCVEDLVVKRQYKDWESCFEKLGLDAKPVTECYKSEHGHKLELKYANQTDALEPPHRYVPWVVVDGQPLLEDYENFEAYICKAYKGTPPKACQGLGRLQMALETAAEARNGVSYNSGVSKLATAEDEGGEHKVGEY

SEQ ID NO: 31120 - protein, 247 aa, Zea mays subsp. mays
  peptide (1)..(247): Ceres Seq. ID no. 12347532
  misc_feature (28)..(137): Pfam Name: GILT Pfam Description: Gamma interferon inducible lysosomal thiol reductase
  misc_feature (27)..(207): NCBI GI NO: 30793446 NR Description: 27K protein [Triticum aestivum]
  misc_feature (17)..(203): NCBI GI NO: 18390723 NR Description: expressed protein; protein id: At1g07080
  misc_feature (17)..(203): NCBI GI NO: 25406953 NR Description: hypothetical protein
  misc_feature (27)..(235): NCBI GI NO: 15241015 NR Description: putative protein; protein id: At5g01580.1
  misc_feature (8)..(214): NCBI GI NO: 15235523 NR Description: putative protein; protein id: At4g12900.1
  misc_feature (5)..(203): NCBI GI NO: 18413888 NR Description: putative protein; protein id: At4g12890
  misc_feature (5)..(203): NCBI GI NO: 21593076 NR Description: unknown [Arabidopsis thaliana]
  misc_feature (3)..(214): NCBI GI NO: 15235540 NR Description: putative protein; protein id: At4g12960
  misc_feature (3)..(214): NCBI GI NO: 21593852 NR Description: unknown [Arabidopsis thaliana]
  misc_feature (5)..(184): NCBI GI NO: 7487272 NR Description: hypothetical protein T20K18
MDSRLAIAALLLLASASSAAAAADGGKVAVALYYESLCPYSARFVVNHLAKVFADGLREVVDLTLVPYGNARIHPGGEISCQHGPYECLLNTVEACAIDAWPDLDVHFSFIYCVEDLVVKRQYKDWESCFEKLGLDAKPVTECYKSEHGHKLELKYANQTDALEPPHRYVPWVVVDGQPLLEDYENFEAYICKAYKGTPPKACQGLGRLQMALETAAEARNGVSYNSGVSKLATAEDEGGEHKVGEY

SEQ ID NO: 31121 - protein, 188 aa, Zea mays subsp. mays
  peptide (1)..(188): Ceres Seq. ID no. 12347533
AFRPIPPNGQPPRHRRAPPARLRLLRCRCRGRREGGRGAVLRVAVPLLGALRGQPPRQGLRGRPPRGRGPHARPLRQRPDPSRRRDLVPAWSVRVSAQHRGSLRHRRLAGSGCAFQLHLLRGGPGGEAAVQGLGVLLREAGPRRQARNRMLQKRAWPQARAQVREPDRRSRAAAPVRALGGRRRAAPA

SEQ ID NO: 31122 - DNA, 1004 bp, Zea mays subsp. mays
  misc_feature (1)..(1004): Ceres Seq. ID no. 12354129
aggcaaacggttcacacgttcgaaccccatatggctgaacccaagtcaaataatggcggggcggacgcgacggcatcgatgatgctccacggccgcgtagccattgtcaccggtggtgccggcggcatcggctcggccgtgtcgaagcacctgtcgtcgctcggcgcgcgcgtcgtggtggggtacatcggcgacccggcacctgctctgacgctggtagccgccatcaactcctccgagcaccccggcgagagccagcagccgcgagccatcgcggtcgaggcggacgtgtccgacgcggcagccgtgaaggcgctgttcgacgcggccgccgcagccttcggcggggagctccacatcctggtaacgttggcggcggtgctggactactcctacccgccgctggcggagaccagcgaggcgacgttcgacgccgccttcagcgtcaacacacggggcaccttcctgtgctgccgcgaggcggccaggcggctggtgcgtgacggccgcggccgaatcgtgacgttctcttcgtcgggagttgggtctctgcgccctggctactcggcatacgcagcaagcaaggccgcggtggaggtgatgactaagatcctggcgcgcgagctgcgcggcacggggatcacggccaacgtggtggcgccagggtccacggggacacccatgatgtacaccggcaagacggaggatgacatggagcgatacatcgccgaggcgccgctgggccggctcggcatgcccgaggacatcgcgccgctcgtcagcttcctcgctagtgatgctggccactgggtcaacgcgcaggtcctgcgctgcaacggtggcaccatctagctagtactgcgtgcctactttttatggttgattagatgtattttcctcggagcataaatttaagcttgtggcgcagttatcgcttggcagttcattaatttatttaaagattgtgtcgtttattctattgtgtgtatttataatcaggctcc

SEQ ID NO: 31123 - protein, 283 aa, Zea mays subsp. mays
  peptide (1)..(283): Ceres Seq. ID no. 12354130
  misc_feature (21)..(283): NCBI GI NO: 18087667 NR Description: putative dehydrogenase [Oryza sativa]
  misc_feature (25)..(283): NCBI GI NO: 34393370 NR Description: putative short-chain dehydrogenase/reductase
  misc_feature (29)..(283): NCBI GI NO: 15229203 NR Description: putative short-chain type dehydrogenase/reductase
  misc_feature (23)..(283): NCBI GI NO: 15235621 NR Description: short-chain alcohol dehydrogenase like protein
  misc_feature (16)..(281): NCBI GI NO: 34395018 NR Description: putative short-chain dehydrogenase/reductase
  misc_feature (21)..(281): NCBI GI NO: 37534988 NR Description: putative short-chain alcohol dehydrogenase
  misc_feature (25)..(283): NCBI GI NO: 34395019 NR Description: putative short-chain dehydrogenase/reductase
  misc_feature (23)..(280): NCBI GI NO: 9758903 NR Description: Brn1-like protein [Arabidopsis thaliana]
  misc_feature (29)..(283): NCBI GI NO: 1711355 NR Description: SHORT-CHAIN TYPE DEHYDROGENASE/REDUCTASE
  misc_feature (27)..(283): NCBI GI NO: 30679011 NR Description: short-chain type dehydrogenase/reductase -related
RQTVHTFEPHMAEPKSNNGGADATASMMLHGRVAIVTGGAGGIGSAVSKHLSSLGARVVVGYIGDPAPALTLVAAINSSEHPGESQQPRAIAVEADVSDAAAVKALFDAAAAAFGGELHILVTLAAVLDYSYPPLAETSEATFDAAFSVNTRGTFLCCREAARRLVRDGRGRIVTFSSSGVGSLRPGYSAYAASKAAVEVMTKILARELRGTGITANVVAPGSTGTPMMYTGKTEDDMERYIAEAPLGRLGMPEDIAPLVSFLASDAGHWVNAQVLRCNGGTI

SEQ ID NO: 31124 - protein, 273 aa, Zea mays subsp. mays
  peptide (1)..(273): Ceres Seq. ID no. 12354131
  misc_feature (11)..(273): NCBI GI NO: 18087667 NR Description: putative dehydrogenase [Oryza sativa]
  misc_feature (15)..(273): NCBI GI NO: 34393370 NR Description: putative short-chain dehydrogenase/reductase
  misc_feature (19)..(273): NCBI GI NO: 15229203 NR Description: putative short-chain type dehydrogenase/reductase
  misc_feature (13)..(273): NCBI GI NO: 15235621 NR Description: short-chain alcohol dehydrogenase like protein
  misc_feature (6)..(271): NCBI GI NO: 34395018 NR Description: putative short-chain dehydrogenase/reductase
  misc_feature (11)..(271): NCBI GI NO: 37534988 NR Description: putative short-chain alcohol dehydrogenase
  misc_feature (15)..(273): NCBI GI NO: 34395019 NR Description: putative short-chain dehydrogenase/reductase
  misc_feature (13)..(270): NCBI GI NO: 9758903 NR Description: Brn1-like protein [Arabidopsis thaliana]
  misc_feature (19)..(273): NCBI GI NO: 1711355 NR Description: SHORT-CHAIN TYPE DEHYDROGENASE/REDUCTASE
  misc_feature (17)..(273): NCBI GI NO: 30679011 NR Description: short-chain type dehydrogenase/reductase -related
MAEPKSNNGGADATASMMLHGRVAIVTGGAGGIGSAVSKHLSSLGARVVVGYIGDPAPALTLVAAINSSEHPGESQQPRAIAVEADVSDAAAVKALFDAAAAAFGGELHILVTLAAVLDYSYPPLAETSEATFDAAFSVNTRGTFLCCREAARRLVRDGRGRIVTFSSSGVGSLRPGYSAYAASKAAVEVMTKILARELRGTGITANVVAPGSTGTPMMYTGKTEDDMERYIAEAPLGRLGMPEDIAPLVSFLASDAGHWVNAQVLRCNGGTI

SEQ ID NO: 31125 - protein, 257 aa, Zea mays subsp. mays
  peptide (1)..(257): Ceres Seq. ID no. 12354132
  misc_feature (1)..(257): NCBI GI NO: 18087667 NR Description: putative dehydrogenase [Oryza sativa]
  misc_feature (1)..(257): NCBI GI NO: 34393370 NR Description: putative short-chain dehydrogenase/reductase
  misc_feature (3)..(257): NCBI GI NO: 15229203 NR Description: putative short-chain type dehydrogenase/reductase
  misc_feature (1)..(257): NCBI GI NO: 15235621 NR Description: short-chain alcohol dehydrogenase like protein
  misc_feature (1)..(255): NCBI GI NO: 34395018 NR Description: putative short-chain dehydrogenase/reductase
  misc_feature (1)..(255): NCBI GI NO: 37534988 NR Description: putative short-chain alcohol dehydrogenase
  misc_feature (1)..(257): NCBI GI NO: 34395019 NR Description: putative short-chain dehydrogenase/reductase
  misc_feature (1)..(254): NCBI GI NO: 9758903 NR Description: Brn1-like protein [Arabidopsis thaliana]
  misc_feature (3)..(257): NCBI GI NO: 1711355 NR Description: SHORT-CHAIN TYPE DEHYDROGENASE/REDUCTASE
  misc_feature (1)..(257): NCBI GI NO: 30679011 NR Description: short-chain type dehydrogenase/reductase -related
MMLHGRVAIVTGGAGGIGSAVSKHLSSLGARVVVGYIGDPAPALTLVAAINSSEHPGESQQPRAIAVEADVSDAAAVKALFDAAAAAFGGELHILVTLAAVLDYSYPPLAETSEATFDAAFSVNTRGTFLCCREAARRLVRDGRGRIVTFSSSGVGSLRPGYSAYAASKAAVEVMTKILARELRGTGITANVVAPGSTGTPMMYTGKTEDDMERYIAEAPLGRLGMPEDIAPLVSFLASDAGHWVNAQVLRCNGGTI

SEQ ID NO: 31126 - DNA, 1120 bp, Zea mays subsp. mays
  misc_feature (1)..(1120): Ceres Seq. ID no. 12365896
ctttggagtttatagctaccattgcgtcatctatttggtgtgaaatgaatattcgcaaagagaggtttaaacaagaatgggatttggtgattgttaatgctttgactgcagcttgttgcaacttgatggttcttggacttttagcaccatgccgttcatatgcgagtacatctcgatttgacttccaaaatgcaattgagaaacttccgaacaacatatttgagaagagctatcctttgagagagtttgatctagcaaaacgaatcagtgcattcttttataaagctgctgagcttagtctggtcgggtttgtagctggctctgtgcaagggggtatgtcaatagtcttgtccgcaagaaaagaaaggaggttatcggtgactattccctctatcagcaccaatgctcttggttatggagctttcctaggactctatgctaacttgcgttatcaattgctatgtggagtagaccaatatatggtcaagcgcttcgatgttttgggtgtggcaatcttcttcagcacagcagcaagactgatcaatattcagattggtgaggcatcaaggaggacttggcttggcgaggaagctgatccacagtactcagatcgactgttgagagcatacaagagacctgtggaggttgacgcggaccaatcaaggtggtttatatccaaggatgcaattgtatctggccttggtcttctaggtatcaagcagggtggacctgaggcaacattttctaagtctcgtcgaaagagagtcatccgcaaaaaggtcacttcaggttgagtttagtggatttggatagcaatgctggaacaattttgcttctgttccactatgccagagggaggtctacccaaattatggtaaatgagaaaaaggtatcaagtcaaccagcacgtggtctgtcggcgaagggatcaaagggtttgttactgggaagggttagttaaaaggtgccaattactattttataatttaattgcagttatttaaggtaagaaaatatgttgttttcttgtattgctgtgaggcaaatagacacgtttagtggtagttttgtaagattgttaatgtactgactttacatgagaaatggattctgcattttt

SEQ ID NO: 31127 - protein, 263 aa, Zea mays subsp. mays
  peptide (1)..(263): Ceres Seq. ID no. 12365897
  misc_feature (1)..(262): NCBI GI NO: 9759209 NR Description: gb|AAD25674
  misc_feature (1)..(262): NCBI GI NO: 22327037 NR Description: putative protein; protein id: At5g24690
  misc_feature (12)..(192): NCBI GI NO: 15242979 NR Description: putative protein; protein id: At5g22790
  misc_feature (2)..(181): NCBI GI NO: 34395170 NR Description: chloroplast lumen common protein family-likeprotein
  misc_feature (2)..(181): NCBI GI NO: 6934300 NR Description: unknown [Euphorbia esula]
  misc_feature (14)..(181): NCBI GI NO: 30687286 NR Description: expressed protein [Arabidopsis thaliana]
LEFIATIASSIWCEMNIRKERFKQEWDLVIVNALTAACCNLMVLGLLAPCRSYASTSRFDFQNAIEKLPNNIFEKSYPLREFDLAKRISAFFYKAAELSLVGFVAGSVQGGMSIVLSARKERRLSVTIPSISTNALGYGAFLGLYANLRYQLLCGVDQYMVKRFDVLGVAIFFSTAARLINIQIGEASRRTWLGEEADPQYSDRLLRAYKRPVEVDADQSRWFISKDAIVSGLGLLGIKQGGPEATFSKSRRKRVIRKKVTSG

SEQ ID NO: 31128 - protein, 249 aa, Zea mays subsp. mays
  peptide (1)..(249): Ceres Seq. ID no. 12365898
  misc_feature (1)..(248): NCBI GI NO: 9759209 NR Description: gb|AAD25674
  misc_feature (1)..(248): NCBI GI NO: 22327037 NR Description: putative protein; protein id: At5g24690
  misc_feature (1)..(178): NCBI GI NO: 15242979 NR Description: putative protein; protein id: At5g22790
  misc_feature (1)..(167): NCBI GI NO: 34395170 NR Description: chloroplast lumen common protein family-likeprotein
  misc_feature (1)..(167): NCBI GI NO: 6934300 NR Description: unknown [Euphorbia esula]
  misc_feature (1)..(167): NCBI GI NO: 30687286 NR Description: expressed protein [Arabidopsis thaliana]
MNIRKERFKQEWDLVIVNALTAACCNLMVLGLLAPCRSYASTSRFDFQNAIEKLPNNIFEKSYPLREFDLAKRISAFFYKAAELSLVGFVAGSVQGGMSIVLSARKERRLSVTIPSISTNALGYGAFLGLYANLRYQLLCGVDQYMVKRFDVLGVAIFFSTAARLINIQIGEASRRTWLGEEADPQYSDRLLRAYKRPVEVDADQSRWFISKDAIVSGLGLLGIKQGGPEATFSKSRRKRVIRKKVTSG

SEQ ID NO: 31129 - protein, 222 aa, Zea mays subsp. mays
  peptide (1)..(222): Ceres Seq. ID no. 12365899
  misc_feature (1)..(221): NCBI GI NO: 9759209 NR Description: gb|AAD25674
  misc_feature (1)..(221): NCBI GI NO: 22327037 NR Description: putative protein; protein id: At5g24690
  misc_feature (1)..(151): NCBI GI NO: 15242979 NR Description: putative protein; protein id: At5g22790
  misc_feature (1)..(140): NCBI GI NO: 34395170 NR Description: chloroplast lumen common protein family-likeprotein
  misc_feature (1)..(140): NCBI GI NO: 6934300 NR Description: unknown [Euphorbia esula]
  misc_feature (1)..(140): NCBI GI NO: 30687286 NR Description: expressed protein [Arabidopsis thaliana]
MVLGLLAPCRSYASTSRFDFQNAIEKLPNNIFEKSYPLREFDLAKRISAFFYKAAELSLVGFVAGSVQGGMSIVLSARKERRLSVTIPSISTNALGYGAFLGLYANLRYQLLCGVDQYMVKRFDVLGVAIFFSTAARLINIQIGEASRRTWLGEEADPQYSDRLLRAYKRPVEVDADQSRWFISKDAIVSGLGLLGIKQGGPEATFSKSRRKRVIRKKVTSG

SEQ ID NO: 31130 - DNA, 1122 bp, Zea mays subsp. mays
  misc_feature (1)..(1122): Ceres Seq. ID no. 13495286
aaactcctcgctatcctcttccaatccgaaccacccggactcccggagcaagcggccgccggctaagcagacacgaacgcaggtccggcggcaatgcaacgcgccgcgctcgtcgggtcccctctcgtacctgtgggtccccttgctcagcttgccgtgcggcgccgctgccgcttccatggtggtgttcgcgtgaggtcctcaaccgggaaggacgggaccgggactgggaccgggggcggaagcgagggcggcgacggcgccggtgccgcagcgtcttggctgagctcggcggtcggggagaaagtggacgagcttctgcgccgcgaagagaaccgggccctgctcgagggcgtcgaggacgccgagcgccgcgttgagcgcgcgcgcgccgcgctcgccgacatcgagcgccaggaggccgccgcacgcctcgcccgcgaggaggtccgccgcctcgagaagcggcgcgatgagattgcagagtcccagcgggaattgcttcaagcaagagaaatgattgatgaagctcagcgatccttgtcttctagtcttgacgaaggaagctttggagatatgtcaagtggtgatgttgatgaagataacgagagaatagaatccgtaaaagctgctgcagtttcctctgtcgtcggtgttctggctagtttgcccatatctttctatgaagttgaagatcttccacaactattccttcggtcatcaattgttttcataagttgtgctttgtttggagtcacattccggtacgctgttagaagagatctggataatatccaactaaaaactggggctcctgcagcatttgcttttgttagaggccttgctctgctggaatctggtagaaccttcgagctgagtactgataccttaatatcagttactcttgatgctgcagtcagtgtggttgagaacattttcatatttctgcctgctgctgttgcactggactactgttttaagatgagatttttgagtccctttcctagaagaaaacaatagcttctgtgaagaatatgtatgatcaatagcaatcttgatagctcaaatggtcatatgtaacacaagtgatatcttagattcattaaaaaaacatttcccccc

SEQ ID NO: 31131 - protein, 308 aa, Zea mays subsp. mays
  peptide (1)..(308): Ceres Seq. ID no. 13495287
  misc_feature (33)..(304): NCBI GI NO: 30686406 NR Description: expressed protein [Arabidopsis thaliana]
  misc_feature (33)..(304): NCBI GI NO: 28393641 NR Description: unknown protein [Arabidopsis thaliana]
  misc_feature (33)..(304): NCBI GI NO: 7487177 NR Description: hypothetical protein T19F6
MQRAALVGSPLVPVGPLAQLAVRRRCRFHGGVRVRSSTGKDGTGTGTGGGSEGGDGAGAAASWLSSAVGEKVDELLRREENRALLEGVEDAERRVERARAALADIERQEAAARLAREEVRRLEKRRDEIAESQRELLQAREMIDEAQRSLSSSLDEGSFGDMSSGDVDEDNERIESVKAAAVSSVVGVLASLPISFYEVEDLPQLFLRSSIVFISCALFGVTFRYAVRRDLDNIQLKTGAPAAFAFVRGLALLESGRTFELSTDTLISVTLDAAVSVVENIFIFLPAAVALDYCFKMRFLSPFPRRKQ

SEQ ID NO: 31132 - protein, 167 aa, Zea mays subsp. mays
  peptide (1)..(167): Ceres Seq. ID no. 13495288
  misc_feature (1)..(163): NCBI GI NO: 30686406 NR Description: expressed protein [Arabidopsis thaliana]
  misc_feature (1)..(163): NCBI GI NO: 28393641 NR Description: unknown protein [Arabidopsis thaliana]
  misc_feature (1)..(163): NCBI GI NO: 7487177 NR Description: hypothetical protein T19F6
MIDEAQRSLSSSLDEGSFGDMSSGDVDEDNERIESVKAAAVSSVVGVLASLPISFYEVEDLPQLFLRSSIVFISCALFGVTFRYAVRRDLDNIQLKTGAPAAFAFVRGLALLESGRTFELSTDTLISVTLDAAVSVVENIFIFLPAAVALDYCFKMRFLSPFPRRKQ

SEQ ID NO: 31133 - DNA, 913 bp, Zea mays subsp. mays
  misc_feature (1)..(913): Ceres Seq. ID no. 12415447
  misc_feature (449)..(449): n is a, c, t, g, unknown, or other
gcacgagaccattacctagaacatcctaatcgaaaagtataaccagctagagtagcttggtagctaggctcggctcgctagcgagctcgtcgatccaatccatcgctcgttcgtccactataacaatcgacgacgtgtacgatggcagctgcggcggcgccgaggcccaagtcgccgcctgcctcgccggacccctgcggccgccaccgcctccagctcgccgtcgacgcgctccaccgggagatcggcttcctcgagggcgaaataagttccatcgagggggtccacgctgcctccagatgctgcaaagaggttgatgagttcgttggaaggaacccggatccgttcctaacgattcagcaagagagaggaagccacgatcaatctcagcagtttctgaagaagttccgaggaaagagctgcctgagctactacctctcgtggatctncggtggcgggtggtggtgcccgccgccgttgcagctcaagaggccaccggcgccgagctgctcctgcgcgccgcggctggggaagctctgctcctccaccgcctcctcctgctgcagctgttgctgctgccggttccgcgtcgtgtacgccgccgccggctgcgggtgctgcgcgccgtgcccgcgctgctcgtgcgactgcacctgcgcctgcccgcgctgctgctcctgcgcctgccccatgtgcagcgccgcgtgctgcgccccgcgctgctgcctgtgcctatgatggccatgagaaattttgcgtgcatgctagtagtagtagtacctggagatgatgatggatgactggcattttgcagcatggttttttttttgtttagtttcggcgacacgagtactgttgtaactggctgtacgtggctgatctggttagtgctggtgaatggtgtcgattccgc

SEQ ID NO: 31134 - protein, 198 aa, Zea mays subsp. mays
  peptide (1)..(198): Ceres Seq. ID no. 12415448
  misc_feature (122)..(197): Pfam Name: Pfam Description:  Keratin, high sulfur B2 protein
  misc_feature (1)..(57): NCBI GI NO: 30017557 NR Description: hypothetical protein
  misc_feature (120)..(197): NCBI GI NO: 21356647 NR Description: PFTAIRE-interacting factor 2
  misc_feature (121)..(197): NCBI GI NO: 21356647 NR Description: PFTAIRE-interacting factor 2
  misc_feature (120)..(197): NCBI GI NO: 21356647 NR Description: PFTAIRE-interacting factor 2
  misc_feature (125)..(197): NCBI GI NO: 21356647 NR Description: PFTAIRE-interacting factor 2
  misc_feature (128)..(197): NCBI GI NO: 39592063 NR Description: Hypothetical protein CBG23250
  misc_feature (140)..(197): NCBI GI NO: 17531545 NR Description: Putative protein, nematode specific (15.6 kD)
  misc_feature (114)..(197): NCBI GI NO: 17532099 NR Description: Putative secreted or extracellular protein familymember precursor
  misc_feature (141)..(197): NCBI GI NO: 17531545 NR Description: Putative protein, nematode specific (15.6 kD)
  misc_feature (114)..(197): NCBI GI NO: 17531493 NR Description: Putative protein, nematode specific
  misc_feature (103)..(103): Xaa is any aa, unknown or other
MAAAAAPRPKSPPASPDPCGRHRLQLAVDALHREIGFLEGEISSIEGVHAASRCCKEVDEFVGRNPDPFLTIQQERGSHDQSQQFLKKFRGKSCLSYYLSWIXGGGWWCPPPLQLKRPPAPSCSCAPRLGKLCSSTASSCCSCCCCRFRVVYAAAGCGCCAPCPRCSCDCTCACPRCCSCACPMCSAACCAPRCCLCL

SEQ ID NO: 31135 - DNA, 1176 bp, Zea mays subsp. mays
  misc_feature (1)..(1176): Ceres Seq. ID no. 12416015
cgcaattaaccctcactaaagggaacaaaagctggagctccaccgcggtggcggccgctctagaactagtggatcccccgggctgcaggaattcgcacgagaccattacctagaacatcctaatcgaaaaagattataaggcgaagagccgtcgtgatcaccagacgagttaccagaccaagccgcagcaggaatttctcagatgtctaaagccaagcttcctcacgtcgagacggattcttccggcgacgacgatgggccgaagccaaggctagtgttccgtagacgcatgcgcacaccagttaagctgctcggtggccggaaagtctcggacgtcctgctatggaggaacaggaacctgtcagcggggatcctcgcgggggcgacgctggtctggttcctgttcgacgtggcggagtacaacgtggtgacgctcctttgccacgtcgcgctgctcgggatggtcctgctcttcgtctggtccaacgccgcgcctctccttgacaggccgcctccacagatcccggaggtgatcgtttctgaacacgcgttcagagaagctgcgcggaccacccattacagactggctcactttgtatccgtcctctacgacgttgcgtgcgggaaggatctcaagaagttcctcatggtgattggttctctgtggatactggcgatacttggagacacatgcagcttcacgacgctgttatatggcgggcttttgtgtgctctgactttaccggcgctgtacgagagatacgaagccgaggtggaccatcttgtggccaagggacgcgaagacctcaagaaattctacaggaaggttgactccaacgtgctcaacaagataccaagaggccctgtcaagacaaaggctctctgatcaagatgtgtgctttgtcaaattgccggtgcacgccggcagtcccgtacataaaagaaaaacagtaaccagtgtcaccagaccatctcaaatcagtttttatggtatctgattgtacgtgctagactactgctgcaatgatccaccatactttaccgtgtcagcagtaaacaagcctaaaatctgaagtaatttattcgtaaaaaaacaaataggtactggaagattgtaagtgttgccaaaacggaaaagtggcgaataaaaatctgaggtcattcggtgtgggacct

SEQ ID NO: 31136 - protein, 227 aa, Zea mays subsp. mays
  peptide (1)..(227): Ceres Seq. ID no. 12416016
  misc_feature (25)..(225): NCBI GI NO: 34904202 NR Description: P0492F05.25
  misc_feature (23)..(225): NCBI GI NO: 34909318 NR Description: OSJNBb0021A09.5
  misc_feature (11)..(225): NCBI GI NO: 18401821 NR Description: expressed protein; protein id: At3g18260
  misc_feature (11)..(225): NCBI GI NO: 21592845 NR Description: unknown [Arabidopsis thaliana]
  misc_feature (10)..(225): NCBI GI NO: 15237093 NR Description: putative protein; protein id: At4g11220
  misc_feature (33)..(225): NCBI GI NO: 15236556 NR Description: putative protein; protein id: At4g23630
  misc_feature (1)..(226): NCBI GI NO: 18406991 NR Description: expressed protein; protein id: At2g46170
  misc_feature (11)..(220): NCBI GI NO: 15222616 NR Description: hypothetical protein; protein id: At1g64090
  misc_feature (1)..(225): NCBI GI NO: 15238125 NR Description: putative protein; protein id: At5g41600
  misc_feature (36)..(225): NCBI GI NO: 34899590 NR Description: hypothetical protein~similar to Oryza sativachromosome3
MSKAKLPHVETDSSGDDDGPKPRLVFRRRMRTPVKLLGGRKVSDVLLWRNRNLSAGILAGATLVWFLFDVAEYNVVTLLCHVALLGMVLLFVWSNAAPLLDRPPPQIPEVIVSEHAFREAARTTHYRLAHFVSVLYDVACGKDLKKFLMVIGSLWILAILGDTCSFTTLLYGGLLCALTLPALYERYEAEVDHLVAKGREDLKKFYRKVDSNVLNKIPRGPVKTKAL

SEQ ID NO: 31137 - protein, 198 aa, Zea mays subsp. mays
  peptide (1)..(198): Ceres Seq. ID no. 12416017
  misc_feature (1)..(196): NCBI GI NO: 34904202 NR Description: P0492F05.25
  misc_feature (1)..(196): NCBI GI NO: 34909318 NR Description: OSJNBb0021A09.5
  misc_feature (1)..(196): NCBI GI NO: 18401821 NR Description: expressed protein; protein id: At3g18260
  misc_feature (1)..(196): NCBI GI NO: 21592845 NR Description: unknown [Arabidopsis thaliana]
  misc_feature (1)..(196): NCBI GI NO: 15237093 NR Description: putative protein; protein id: At4g11220
  misc_feature (4)..(196): NCBI GI NO: 15236556 NR Description: putative protein; protein id: At4g23630
  misc_feature (1)..(197): NCBI GI NO: 18406991 NR Description: expressed protein; protein id: At2g46170
  misc_feature (1)..(191): NCBI GI NO: 15222616 NR Description: hypothetical protein; protein id: At1g64090
  misc_feature (1)..(196): NCBI GI NO: 15238125 NR Description: putative protein; protein id: At5g41600
  misc_feature (7)..(196): NCBI GI NO: 34899590 NR Description: hypothetical protein~similar to Oryza sativachromosome3
MRTPVKLLGGRKVSDVLLWRNRNLSAGILAGATLVWFLFDVAEYNVVTLLCHVALLGMVLLFVWSNAAPLLDRPPPQIPEVIVSEHAFREAARTTHYRLAHFVSVLYDVACGKDLKKFLMVIGSLWILAILGDTCSFTTLLYGGLLCALTLPALYERYEAEVDHLVAKGREDLKKFYRKVDSNVLNKIPRGPVKTKAL

SEQ ID NO: 31138 - protein, 141 aa, Zea mays subsp. mays
  peptide (1)..(141): Ceres Seq. ID no. 12416018
  misc_feature (1)..(139): NCBI GI NO: 34904202 NR Description: P0492F05.25
  misc_feature (1)..(139): NCBI GI NO: 34909318 NR Description: OSJNBb0021A09.5
  misc_feature (1)..(139): NCBI GI NO: 18401821 NR Description: expressed protein; protein id: At3g18260
  misc_feature (1)..(139): NCBI GI NO: 21592845 NR Description: unknown [Arabidopsis thaliana]
  misc_feature (1)..(139): NCBI GI NO: 15237093 NR Description: putative protein; protein id: At4g11220
  misc_feature (1)..(139): NCBI GI NO: 15236556 NR Description: putative protein; protein id: At4g23630
  misc_feature (1)..(140): NCBI GI NO: 18406991 NR Description: expressed protein; protein id: At2g46170
  misc_feature (1)..(134): NCBI GI NO: 15222616 NR Description: hypothetical protein; protein id: At1g64090
  misc_feature (1)..(139): NCBI GI NO: 15238125 NR Description: putative protein; protein id: At5g41600
  misc_feature (1)..(139): NCBI GI NO: 34899590 NR Description: hypothetical protein~similar to Oryza sativachromosome3
MVLLFVWSNAAPLLDRPPPQIPEVIVSEHAFREAARTTHYRLAHFVSVLYDVACGKDLKKFLMVIGSLWILAILGDTCSFTTLLYGGLLCALTLPALYERYEAEVDHLVAKGREDLKKFYRKVDSNVLNKIPRGPVKTKAL

SEQ ID NO: 31139 - DNA, 1284 bp, Zea mays subsp. mays
  misc_feature (1)..(1284): Ceres Seq. ID no. 12354326
ctagccagcggccagcccgtccgccagcgagaggtcaaaaactactacgagccaaaaactggagcccagggaaagcgacgagcaaaccaaacatggcggcgatcctcgcgcgcgccggcgtcatcgccaccgccggcaaaggtttctcgggccgccgccggggcaatggtatcgtcgtcgcggcggtcactaaaacgggggctgctgtgccacaggagggggcgctggaacggccggcgtggtccggcgagaccacgctgtcgcgtctggttggcgcgctcatcgcgttcaagccgctctactcggtattgaagctcgcctcccgcgaggtcatcatcaggacggcggagaagtcgaacatcccgtggagggagatgacgaaggaggtgctggagtcggacgtgtacgaggtgttcgagagaatccaagacccaaacctcgtgtaccctgactactatctcaacccgtttcatgcctacgacgaagggaatctatcatggctggctgcagcagaggccgagccggcaacaatgtcaatcgcaaagagggcaatacctgaggctacatcaatcgaagaggccaaccaaatcgtccgcggcaactggctgaatgtaattgaggagcatcatctgaagtactcggggaactgtcaggtaaacgacatcctggacattggctgctctgttggagtaagcaccagatacctcgccgagaagttcccatcagctcaagctgttgggctcgacctatcaccgtactttcttgctgtggcggcacaaaaggaagaaaaactgtcacgaccaaagcctattcgctgggttcatgccaatggtgaagcgaccgggctatcttcagattcatttgaccttgtctcccttgcttatgtgtgccatgagtgcccagcacgagcaataaccgcattggtgaaggaagcattcagggtccttcgcccaggaggaacaatcgccttaacagacaattcgccgaagtccaaagtacttcaggaactatccccagttttgttcactctgatgaagagtaccgagcctttcctggacgagtactacatgctggatttggaggagacgatgagaaaagtgggctttgttaacgtttgctccgtcctgacagaccccaggcacagaacagtcactgcaaccgtgccttactaattgggtcagaccatcaaatcccaagcccggccggtgtacaacaattgactatttgaaattttgtatccttactggtatggttgcaattgtataaagtagagcaatctgagtg

SEQ ID NO: 31140 - protein, 389 aa, Zea mays subsp. mays
  peptide (1)..(389): Ceres Seq. ID no. 12354327
  misc_feature (31)..(295): NCBI GI NO: 37531718 NR Description: unknown protein
  misc_feature (328)..(389): NCBI GI NO: 37531718 NR Description: unknown protein
  misc_feature (77)..(388): NCBI GI NO: 17230530 NR Description: hypothetical protein [Nostoc sp. PCC 7120]
  misc_feature (87)..(387): NCBI GI NO: 23039316 NR Description: hypothetical protein
  misc_feature (87)..(387): NCBI GI NO: 23129131 NR Description: hypothetical protein [Nostoc punctiforme]
  misc_feature (87)..(387): NCBI GI NO: 17229577 NR Description: hypothetical protein [Nostoc sp. PCC 7120]
  misc_feature (86)..(385): NCBI GI NO: 37523046 NR Description: hypothetical protein gll3477
  misc_feature (84)..(387): NCBI GI NO: 16332323 NR Description: unknown protein [Synechocystis sp. PCC 6803]
  misc_feature (76)..(383): NCBI GI NO: 33866811 NR Description: conserved hypothetical protein
  misc_feature (217)..(371): NCBI GI NO: 17231019 NR Description: similar to ubiquinone/menaquinone biosynthesismethyltransferase
SQRPARPPARGQKLLRAKNWSPGKATSKPNMAAILARAGVIATAGKGFSGRRRGNGIVVAAVTKTGAAVPQEGALERPAWSGETTLSRLVGALIAFKPLYSVLKLASREVIIRTAEKSNIPWREMTKEVLESDVYEVFERIQDPNLVYPDYYLNPFHAYDEGNLSWLAAAEAEPATMSIAKRAIPEATSIEEANQIVRGNWLNVIEEHHLKYSGNCQVNDILDIGCSVGVSTRYLAEKFPSAQAVGLDLSPYFLAVAAQKEEKLSRPKPIRWVHANGEATGLSSDSFDLVSLAYVCHECPARAITALVKEAFRVLRPGGTIALTDNSPKSKVLQELSPVLFTLMKSTEPFLDEYYMLDLEETMRKVGFVNVCSVLTDPRHRTVTATVPY

SEQ ID NO: 31141 - protein, 359 aa, Zea mays subsp. mays
  peptide (1)..(359): Ceres Seq. ID no. 12354328
  misc_feature (1)..(265): NCBI GI NO: 37531718 NR Description: unknown protein
  misc_feature (298)..(359): NCBI GI NO: 37531718 NR Description: unknown protein
  misc_feature (47)..(358): NCBI GI NO: 17230530 NR Description: hypothetical protein [Nostoc sp. PCC 7120]
  misc_feature (57)..(357): NCBI GI NO: 23039316 NR Description: hypothetical protein
  misc_feature (57)..(357): NCBI GI NO: 23129131 NR Description: hypothetical protein [Nostoc punctiforme]
  misc_feature (57)..(357): NCBI GI NO: 17229577 NR Description: hypothetical protein [Nostoc sp. PCC 7120]
  misc_feature (56)..(355): NCBI GI NO: 37523046 NR Description: hypothetical protein gll3477
  misc_feature (54)..(357): NCBI GI NO: 16332323 NR Description: unknown protein [Synechocystis sp. PCC 6803]
  misc_feature (46)..(353): NCBI GI NO: 33866811 NR Description: conserved hypothetical protein
  misc_feature (187)..(341): NCBI GI NO: 17231019 NR Description: similar to ubiquinone/menaquinone biosynthesismethyltransferase
MAAILARAGVIATAGKGFSGRRRGNGIVVAAVTKTGAAVPQEGALERPAWSGETTLSRLVGALIAFKPLYSVLKLASREVIIRTAEKSNIPWREMTKEVLESDVYEVFERIQDPNLVYPDYYLNPFHAYDEGNLSWLAAAEAEPATMSIAKRAIPEATSIEEANQIVRGNWLNVIEEHHLKYSGNCQVNDILDIGCSVGVSTRYLAEKFPSAQAVGLDLSPYFLAVAAQKEEKLSRPKPIRWVHANGEATGLSSDSFDLVSLAYVCHECPARAITALVKEAFRVLRPGGTIALTDNSPKSKVLQELSPVLFTLMKSTEPFLDEYYMLDLEETMRKVGFVNVCSVLTDPRHRTVTATVPY

SEQ ID NO: 31142 - protein, 265 aa, Zea mays subsp. mays
  peptide (1)..(265): Ceres Seq. ID no. 12354329
  misc_feature (1)..(171): NCBI GI NO: 37531718 NR Description: unknown protein
  misc_feature (204)..(265): NCBI GI NO: 37531718 NR Description: unknown protein
  misc_feature (1)..(264): NCBI GI NO: 17230530 NR Description: hypothetical protein [Nostoc sp. PCC 7120]
  misc_feature (1)..(263): NCBI GI NO: 23039316 NR Description: hypothetical protein
  misc_feature (1)..(263): NCBI GI NO: 23129131 NR Description: hypothetical protein [Nostoc punctiforme]
  misc_feature (1)..(263): NCBI GI NO: 17229577 NR Description: hypothetical protein [Nostoc sp. PCC 7120]
  misc_feature (1)..(261): NCBI GI NO: 37523046 NR Description: hypothetical protein gll3477
  misc_feature (1)..(263): NCBI GI NO: 16332323 NR Description: unknown protein [Synechocystis sp. PCC 6803]
  misc_feature (1)..(259): NCBI GI NO: 33866811 NR Description: conserved hypothetical protein
  misc_feature (93)..(247): NCBI GI NO: 17231019 NR Description: similar to ubiquinone/menaquinone biosynthesismethyltransferase
MTKEVLESDVYEVFERIQDPNLVYPDYYLNPFHAYDEGNLSWLAAAEAEPATMSIAKRAIPEATSIEEANQIVRGNWLNVIEEHHLKYSGNCQVNDILDIGCSVGVSTRYLAEKFPSAQAVGLDLSPYFLAVAAQKEEKLSRPKPIRWVHANGEATGLSSDSFDLVSLAYVCHECPARAITALVKEAFRVLRPGGTIALTDNSPKSKVLQELSPVLFTLMKSTEPFLDEYYMLDLEETMRKVGFVNVCSVLTDPRHRTVTATVPY

SEQ ID NO: 31143 - DNA, 843 bp, Zea mays subsp. mays
  misc_feature (1)..(843): Ceres Seq. ID no. 12415746
agttcttcttcctcggtgcatttgcaagcgttaggaaagggagaagagaaaggaattaatggaacgtgaagaggagctgccttcatcttcttcttccttgggttacatgatgcagtgcagggtctgccatgaggaagaggatcaagggcgtgcgaccatggagtctccttgtggatgctccggctctctcaagtacgctcacaggggatgtgtgcagagatggtgtgacgagaaggggagcaccctctgtgagatctgccttcagaatttcaagccaggctacacaatgcctcccaagaaaaccccggtggttgaaacggcggtcactatcagtgaacacgaggacatgcaacatttggaacctccggagggcttggttgacggtgcagattacaccaggtgctcctacgccgcagatcaatgcgccacatggtgccggtcgctggcgatcacgttcaccattgtgacgctcgcatggcatctggttgcagtggcgacggctgaagcagcagagcactgcgcgttcagtctcctcacaatgtacttacttcgtgctgctggtatcctgctgccgctctaccttgtcatgcgaatgattggcgtcgtccaaagtgggcagaggcagtaccggttgcagctgctggaggaacaaagaagaaatgcatcaactatatgaattatatgcgtgtccaggaagaggaccagctagtaattaatattcattagccaattcatttaaataaatcttatggaaggttgtattaatgggaaaactttcaaacagaacatcatttgtaaactttcagtatacatacagttggtgcagtgaaacagcagcatttt

SEQ ID NO: 31144 - protein, 205 aa, Zea mays subsp. mays
  peptide (1)..(205): Ceres Seq. ID no. 12415747
  misc_feature (20)..(67): Pfam Name: RING finger Pfam Description: Zinc finger, C3HC4 type
  misc_feature (1)..(203): NCBI GI NO: 34905532 NR Description: B1146F03.23
  misc_feature (19)..(204): NCBI GI NO: 25518349 NR Description: hypothetical protein T14P4
  misc_feature (19)..(203): NCBI GI NO: 18411826 NR Description: Expressed protein; protein id: At4g02075
  misc_feature (1)..(189): NCBI GI NO: 18424590 NR Description: expressed protein; protein id: At5g62460
  misc_feature (19)..(189): NCBI GI NO: 15227065 NR Description: unknown protein; protein id: At2g02960
  misc_feature (17)..(188): NCBI GI NO: 22325409 NR Description: similar to nucleoside triphosphatase, putative
  misc_feature (18)..(192): NCBI GI NO: 30692888 NR Description: expressed protein [Arabidopsis thaliana]
  misc_feature (2)..(189): NCBI GI NO: 21537046 NR Description: nucleoside triphosphatase, putative
  misc_feature (18)..(189): NCBI GI NO: 15232824 NR Description: putative protein; protein id: At3g47550.1
  misc_feature (2)..(189): NCBI GI NO: 15223693 NR Description: nucleoside triphosphatase, putative
MEREEELPSSSSSLGYMMQCRVCHEEEDQGRATMESPCGCSGSLKYAHRGCVQRWCDEKGSTLCEICLQNFKPGYTMPPKKTPVVETAVTISEHEDMQHLEPPEGLVDGADYTRCSYAADQCATWCRSLAITFTIVTLAWHLVAVATAEAAEHCAFSLLTMYLLRAAGILLPLYLVMRMIGVVQSGQRQYRLQLLEEQRRNASTI

SEQ ID NO: 31145 - protein, 189 aa, Zea mays subsp. mays
  peptide (1)..(189): Ceres Seq. ID no. 12415748
  misc_feature (4)..(51): Pfam Name: RING finger Pfam Description: Zinc finger, C3HC4 type
  misc_feature (1)..(187): NCBI GI NO: 34905532 NR Description: B1146F03.23
  misc_feature (3)..(188): NCBI GI NO: 25518349 NR Description: hypothetical protein T14P4
  misc_feature (3)..(187): NCBI GI NO: 18411826 NR Description: Expressed protein; protein id: At4g02075
  misc_feature (1)..(173): NCBI GI NO: 18424590 NR Description: expressed protein; protein id: At5g62460
  misc_feature (3)..(173): NCBI GI NO: 15227065 NR Description: unknown protein; protein id: At2g02960
  misc_feature (1)..(172): NCBI GI NO: 22325409 NR Description: similar to nucleoside triphosphatase, putative
  misc_feature (2)..(176): NCBI GI NO: 30692888 NR Description: expressed protein [Arabidopsis thaliana]
  misc_feature (1)..(173): NCBI GI NO: 21537046 NR Description: nucleoside triphosphatase, putative
  misc_feature (2)..(173): NCBI GI NO: 15232824 NR Description: putative protein; protein id: At3g47550.1
  misc_feature (1)..(173): NCBI GI NO: 15223693 NR Description: nucleoside triphosphatase, putative
MMQCRVCHEEEDQGRATMESPCGCSGSLKYAHRGCVQRWCDEKGSTLCEICLQNFKPGYTMPPKKTPVVETAVTISEHEDMQHLEPPEGLVDGADYTRCSYAADQCATWCRSLAITFTIVTLAWHLVAVATAEAAEHCAFSLLTMYLLRAAGILLPLYLVMRMIGVVQSGQRQYRLQLLEEQRRNASTI

SEQ ID NO: 31146 - protein, 188 aa, Zea mays subsp. mays
  peptide (1)..(188): Ceres Seq. ID no. 12415749
  misc_feature (3)..(50): Pfam Name: RING finger Pfam Description: Zinc finger, C3HC4 type
  misc_feature (1)..(186): NCBI GI NO: 34905532 NR Description: B1146F03.23
  misc_feature (2)..(187): NCBI GI NO: 25518349 NR Description: hypothetical protein T14P4
  misc_feature (2)..(186): NCBI GI NO: 18411826 NR Description: Expressed protein; protein id: At4g02075
  misc_feature (1)..(172): NCBI GI NO: 18424590 NR Description: expressed protein; protein id: At5g62460
  misc_feature (2)..(172): NCBI GI NO: 15227065 NR Description: unknown protein; protein id: At2g02960
  misc_feature (1)..(171): NCBI GI NO: 22325409 NR Description: similar to nucleoside triphosphatase, putative
  misc_feature (1)..(175): NCBI GI NO: 30692888 NR Description: expressed protein [Arabidopsis thaliana]
  misc_feature (1)..(172): NCBI GI NO: 21537046 NR Description: nucleoside triphosphatase, putative
  misc_feature (1)..(172): NCBI GI NO: 15232824 NR Description: putative protein; protein id: At3g47550.1
  misc_feature (1)..(172): NCBI GI NO: 15223693 NR Description: nucleoside triphosphatase, putative
MQCRVCHEEEDQGRATMESPCGCSGSLKYAHRGCVQRWCDEKGSTLCEICLQNFKPGYTMPPKKTPVVETAVTISEHEDMQHLEPPEGLVDGADYTRCSYAADQCATWCRSLAITFTIVTLAWHLVAVATAEAAEHCAFSLLTMYLLRAAGILLPLYLVMRMIGVVQSGQRQYRLQLLEEQRRNASTI

SEQ ID NO: 31147 - DNA, 818 bp, Zea mays subsp. mays
  misc_feature (1)..(818): Ceres Seq. ID no. 12350165
aatttttgaaattggtcgtgagccgctgccgcacacggcgagaggaatagggttgctccccccgttgccgactcgccgccgcatcgccgcgagcgtcatgaagaccttcccgctgtccaggggaagcaccatctccctagccctcttctccgacgtctccaacagccgggagctcctggacttgatgcagtcagggaagctggagccggcggtcgctctcctcaacgcgtcactggtgccggatgtgttccctatcctcgcggcagcgcttaaggcgctgttgtccaagactagggagtcactgaccacaaggactctgcactctgagctcgtctacaactactcggggtccaaacatataacagagtccctgaagcgctgtgggatctctgataatacaacttacatccttgctgcttgttttgatgcttccgacgaggagatgaaggcagtggagaagctcatcagtggcaccgagattgatctcacagaactggaaagaagagcaaaccagccacagatcttgaagcattacaagatacctccccaagaactatcgatatctacgttgccggacgcaattgtatgcaggattgctgctcgagatgctctctgaagtctcaataatcaccgtaagctatgtggtttcaggatgtaggtctctctctaccacatgtatggtgtgacattgacagcacaagtgcacaactagaattaggtatccgaaataccattgatgttcgcattccttgcaagcaacccagaagcacattgcgtggttaatttttcttgctaaactgtgctgcaaagcaacagtt

SEQ ID NO: 31148 - protein, 204 aa, Zea mays subsp. mays
  peptide (1)..(204): Ceres Seq. ID no. 12350166
  misc_feature (33)..(204): NCBI GI NO: 34895710 NR Description: P0019D06.12
  misc_feature (33)..(204): NCBI GI NO: 38454120 NR Description: At4g34412 [Arabidopsis thaliana]
  misc_feature (33)..(147): NCBI GI NO: 22329156 NR Description: hypothetical protein; protein id: At4g34412.1
  misc_feature (165)..(204): NCBI GI NO: 22329156 NR Description: hypothetical protein; protein id: At4g34412.1
  misc_feature (36)..(204): NCBI GI NO: 7705590 NR Description: CGI-121 protein [Homo sapiens]
  misc_feature (36)..(204): NCBI GI NO: 12001980 NR Description: My019 protein [Homo sapiens]
  misc_feature (36)..(202): NCBI GI NO: 17542786 NR Description: Putative cytoplasmic protein of eukaryotic origin
  misc_feature (36)..(202): NCBI GI NO: 39588478 NR Description: Hypothetical protein CBG20111
  misc_feature (44)..(204): NCBI GI NO: 27712192 NR Description: similar to RIKEN cDNA 1810034M08
  misc_feature (36)..(204): NCBI GI NO: 28849893 NR Description: CGI-121 protein [Mus musculus]
IFEIGREPLPHTARGIGLLPPLPTRRRIAASVMKTFPLSRGSTISLALFSDVSNSRELLDLMQSGKLEPAVALLNASLVPDVFPILAAALKALLSKTRESLTTRTLHSELVYNYSGSKHITESLKRCGISDNTTYILAACFDASDEEMKAVEKLISGTEIDLTELERRANQPQILKHYKIPPQELSISTLPDAIVCRIAARDAL

SEQ ID NO: 31149 - protein, 172 aa, Zea mays subsp. mays
  peptide (1)..(172): Ceres Seq. ID no. 12350167
  misc_feature (1)..(172): NCBI GI NO: 34895710 NR Description: P0019D06.12
  misc_feature (1)..(172): NCBI GI NO: 38454120 NR Description: At4g34412 [Arabidopsis thaliana]
  misc_feature (1)..(115): NCBI GI NO: 22329156 NR Description: hypothetical protein; protein id: At4g34412.1
  misc_feature (133)..(172): NCBI GI NO: 22329156 NR Description: hypothetical protein; protein id: At4g34412.1
  misc_feature (4)..(172): NCBI GI NO: 7705590 NR Description: CGI-121 protein [Homo sapiens]
  misc_feature (4)..(172): NCBI GI NO: 12001980 NR Description: My019 protein [Homo sapiens]
  misc_feature (4)..(170): NCBI GI NO: 17542786 NR Description: Putative cytoplasmic protein of eukaryotic origin
  misc_feature (4)..(170): NCBI GI NO: 39588478 NR Description: Hypothetical protein CBG20111
  misc_feature (12)..(172): NCBI GI NO: 27712192 NR Description: similar to RIKEN cDNA 1810034M08
  misc_feature (4)..(172): NCBI GI NO: 28849893 NR Description: CGI-121 protein [Mus musculus]
MKTFPLSRGSTISLALFSDVSNSRELLDLMQSGKLEPAVALLNASLVPDVFPILAAALKALLSKTRESLTTRTLHSELVYNYSGSKHITESLKRCGISDNTTYILAACFDASDEEMKAVEKLISGTEIDLTELERRANQPQILKHYKIPPQELSISTLPDAIVCRIAARDAL

SEQ ID NO: 31150 - protein, 143 aa, Zea mays subsp. mays
  peptide (1)..(143): Ceres Seq. ID no. 12350168
  misc_feature (1)..(143): NCBI GI NO: 34895710 NR Description: P0019D06.12
  misc_feature (1)..(143): NCBI GI NO: 38454120 NR Description: At4g34412 [Arabidopsis thaliana]
  misc_feature (1)..(86): NCBI GI NO: 22329156 NR Description: hypothetical protein; protein id: At4g34412.1
  misc_feature (104)..(143): NCBI GI NO: 22329156 NR Description: hypothetical protein; protein id: At4g34412.1
  misc_feature (1)..(143): NCBI GI NO: 7705590 NR Description: CGI-121 protein [Homo sapiens]
  misc_feature (1)..(143): NCBI GI NO: 12001980 NR Description: My019 protein [Homo sapiens]
  misc_feature (1)..(141): NCBI GI NO: 17542786 NR Description: Putative cytoplasmic protein of eukaryotic origin
  misc_feature (1)..(141): NCBI GI NO: 39588478 NR Description: Hypothetical protein CBG20111
  misc_feature (1)..(143): NCBI GI NO: 27712192 NR Description: similar to RIKEN cDNA 1810034M08
  misc_feature (1)..(143): NCBI GI NO: 28849893 NR Description: CGI-121 protein [Mus musculus]
MQSGKLEPAVALLNASLVPDVFPILAAALKALLSKTRESLTTRTLHSELVYNYSGSKHITESLKRCGISDNTTYILAACFDASDEEMKAVEKLISGTEIDLTELERRANQPQILKHYKIPPQELSISTLPDAIVCRIAARDAL

SEQ ID NO: 31151 - DNA, 1076 bp, Zea mays subsp. mays
  misc_feature (1)..(1076): Ceres Seq. ID no. 12355259
  misc_feature (794)..(794): n is a, c, t, g, unknown, or other
agtcctccacgcacgcacgcacgcacgaccagttgccacggcagaccaccccgcccagcggccagcttgctcgccacgaccacgatgggcttccccgtggggtactcggagtcggagatgctgctcccgcgcgtgctgctgcaggtgctcctcctcctcggccacttccaccgcttcctcctctgggccttccacgccgtggggctcggcgacctgatcgacctcggctgcaactacccgccgccgccgccctccgcgtccacggcgcacgagatgatggagcaccagcaccagcaccaggggcgcgacgacgtggcctccccgctgcagcaccagcgcccggagttccggcccgtcgcggcggcgctcatcgaggaggcgctccccgtggtgcggttcgacgagctgggcggcgcgccgtgcggcggcggcgactgcgcggtgtgcctgagcggcatcggcggcggcgacgaggtgcggcggctcggcaactgccgccacgccttccaccgggcctgcctggaccgctggatggcgcacgaccagcgcacctgcccgctctgccgcgcgccgctcatcccctgggccgccgacgccgactacgacatgtcctatccgtctcccctgccgcccacgccactgcggcggcctcacgagctgctgctgctgcttaccggcctgggcggcttccagtgatgcgcctgcgcgtgggcagcgtggctggcacttgggcaggccggccacgcgaatccgatccgtggcgaggcaaaccgcgtgctcatgtgcggcccagnacgcccggtcggtcaggcgggtgaccgccgccaaacctgctcagttgccagccgtacacgcttgccggcctcgtcttcggtcgtgtctccgactccgttggtttttttacagaggctcccagtcccaggtcaaacaaaaaaggaggcgaaacagacaaagcagtcggaaattaggcaggtactgtactaggttgatctgtaggccgattgggcgactccaaatctgtggagctgtgaatcctttggcagattaaactaaaaattgtctctatagatcagacc

SEQ ID NO: 31152 - protein, 271 aa, Zea mays subsp. mays
  peptide (1)..(271): Ceres Seq. ID no. 12355260
  misc_feature (11)..(271): NCBI GI NO: 29247944 NR Description: GLP_26_54603_52153 [Giardia lamblia ATCC 50803]
  misc_feature (45)..(270): NCBI GI NO: 38565531 NR Description: atherin [Oryctolagus cuniculus]
  misc_feature (264)..(264): Xaa is any aa, unknown or other
SSTHARTHDQLPRQTTPPSGQLARHDHDGLPRGVLGVGDAAPARAAAGAPPPRPLPPLPPLGLPRRGARRPDRPRLQLPAAAALRVHGARDDGAPAPAPGARRRGLPAAAPAPGVPARRGGAHRGGAPRGAVRRAGRRAVRRRRLRGVPERHRRRRRGAAARQLPPRLPPGLPGPLDGARPAHLPALPRAAHPLGRRRRLRHVLSVSPAAHATAAASRAAAAAYRPGRLPVMRLRVGSVAGTWAGRPRESDPWRGKPRAHVRPXTPGRSGG

SEQ ID NO: 31153 - protein, 231 aa, Zea mays subsp. mays
  peptide (1)..(231): Ceres Seq. ID no. 12355261
  misc_feature (146)..(188): Pfam Name: RING finger Pfam Description: Zinc finger, C3HC4 type
  misc_feature (29)..(193): NCBI GI NO: 21554155 NR Description: RING zinc finger protein-like
  misc_feature (29)..(193): NCBI GI NO: 15238072 NR Description: RING zinc finger protein-like
  misc_feature (114)..(194): NCBI GI NO: 15233117 NR Description: RING finger protein; protein id: At3g61460
  misc_feature (117)..(194): NCBI GI NO: 15222553 NR Description: putative RING zinc finger protein
  misc_feature (124)..(210): NCBI GI NO: 34897812 NR Description: P0514G12.26
  misc_feature (124)..(194): NCBI GI NO: 18411282 NR Description: similar to RING finger protein
  misc_feature (124)..(194): NCBI GI NO: 38345870 NR Description: OSJNBa0064M23.12
  misc_feature (119)..(198): NCBI GI NO: 15229284 NR Description: putative protein; protein id: At3g43430
  misc_feature (125)..(202): NCBI GI NO: 22324426 NR Description: hypothetical protein~predicted by FGENESH etc.
  misc_feature (94)..(192): NCBI GI NO: 37537088 NR Description: putative zinc finger protein
SPPRTHARTTSCHGRPPRPAASLLATTTMGFPVGYSESEMLLPRVLLQVLLLLGHFHRFLLWAFHAVGLGDLIDLGCNYPPPPPSASTAHEMMEHQHQHQGRDDVASPLQHQRPEFRPVAAALIEEALPVVRFDELGGAPCGGGDCAVCLSGIGGGDEVRRLGNCRHAFHRACLDRWMAHDQRTCPLCRAPLIPWAADADYDMSYPSPLPPTPLRRPHELLLLLTGLGGFQ

SEQ ID NO: 31154 - protein, 203 aa, Zea mays subsp. mays
  peptide (1)..(203): Ceres Seq. ID no. 12355262
  misc_feature (118)..(160): Pfam Name: RING finger Pfam Description: Zinc finger, C3HC4 type
  misc_feature (1)..(165): NCBI GI NO: 21554155 NR Description: RING zinc finger protein-like
  misc_feature (1)..(165): NCBI GI NO: 15238072 NR Description: RING zinc finger protein-like
  misc_feature (86)..(166): NCBI GI NO: 15233117 NR Description: RING finger protein; protein id: At3g61460
  misc_feature (89)..(166): NCBI GI NO: 15222553 NR Description: putative RING zinc finger protein
  misc_feature (96)..(182): NCBI GI NO: 34897812 NR Description: P0514G12.26
  misc_feature (96)..(166): NCBI GI NO: 18411282 NR Description: similar to RING finger protein
  misc_feature (96)..(166): NCBI GI NO: 38345870 NR Description: OSJNBa0064M23.12
  misc_feature (91)..(170): NCBI GI NO: 15229284 NR Description: putative protein; protein id: At3g43430
  misc_feature (97)..(174): NCBI GI NO: 22324426 NR Description: hypothetical protein~predicted by FGENESH etc.
  misc_feature (66)..(164): NCBI GI NO: 37537088 NR Description: putative zinc finger protein
MGFPVGYSESEMLLPRVLLQVLLLLGHFHRFLLWAFHAVGLGDLIDLGCNYPPPPPSASTAHEMMEHQHQHQGRDDVASPLQHQRPEFRPVAAALIEEALPVVRFDELGGAPCGGGDCAVCLSGIGGGDEVRRLGNCRHAFHRACLDRWMAHDQRTCPLCRAPLIPWAADADYDMSYPSPLPPTPLRRPHELLLLLTGLGGFQ

SEQ ID NO: 31155 - DNA, 656 bp, Zea mays subsp. mays
  misc_feature (1)..(656): Ceres Seq. ID no. 12347270
atcgactcatcctcttgcacagcggcgcacacggtggggttcgcgcactgcagcacgttctcggaccggatccagccgcagtcggtggacccgacaatgaacgcgacgtacgcggaggacctgcaggcggcgtgcccggcgggggtggaccccaacatcgcgctgcagctggaccccgtgacgccgcaggccttcgacaaccagtacttcgccaacctggtggacggccgggggctgttcgcctccgaccaggtgctcttctccgacgcgcggtcgcagcccaccgtggtggcgtgggcgcagaacgccaccgccttcgagcaggccttcgtcgacgccatcaccaggctcggccgcgtcggcgtcaagaccgacccgtcgctgggggacgtccgccgcgactgcgccttcctcaactgaaaaggatggacatggagagctggtttatatctcacacaagtgttcatacacaatctagagtaaagtttttttgttgttgttattattatcatgtcaggtatgagcacaaggttgaattaatggttaatgcgattgatatactgtaagtggcacttgcattggtaggccaagaccgagatgtattccttttccttgttgattttgttcggtctcggagcaatatttgtttcagtgtt

SEQ ID NO: 31156 - protein, 187 aa, Zea mays subsp. mays
  peptide (1)..(187): Ceres Seq. ID no. 12347271
RLILLHSGAHGGVRALQHVLGPDPAAVGGPDNERDVRGGPAGGVPGGGGPQHRAAAGPRDAAGLRQPVLRQPGGRPGAVRLRPGALLRRAVAAHRGGVGAERHRLRAGLRRRHHQARPRRRQDRPVAGGRPPRLRLPQLKRMDMESWFISHTSVHTQSRVKFFCCCYYYHVRYEHKVELMVNAIDIL

SEQ ID NO: 31157 - protein, 139 aa, Zea mays subsp. mays
  peptide (1)..(139): Ceres Seq. ID no. 12347272
  misc_feature (2)..(102): Pfam Name: Pfam Description:  Peroxidase
  misc_feature (2)..(138): NCBI GI NO: 17027274 NR Description: putative peroxidase
  misc_feature (2)..(139): NCBI GI NO: 34915320 NR Description: putative peroxidase
  misc_feature (2)..(139): NCBI GI NO: 15229646 NR Description: peroxidase, putative; protein id: At3g49960.1
  misc_feature (2)..(139): NCBI GI NO: 15240737 NR Description: peroxidase, putative; protein id: At5g67400.1
  misc_feature (2)..(139): NCBI GI NO: 28629828 NR Description: peroxidase 1 [Artemisia annua]
  misc_feature (2)..(139): NCBI GI NO: 14485511 NR Description: putative peroxidase [Solanum tuberosum]
  misc_feature (2)..(139): NCBI GI NO: 1546708 NR Description: peroxidase ATP9a [Arabidopsis thaliana]
  misc_feature (2)..(139): NCBI GI NO: 15235597 NR Description: peroxidase, putative; protein id: At4g37520
  misc_feature (2)..(139): NCBI GI NO: 21554605 NR Description: peroxidase, prxr2 [Arabidopsis thaliana]
  misc_feature (2)..(139): NCBI GI NO: 15235600 NR Description: peroxidase, putative; protein id: At4g37530
IDSSSCTAAHTVGFAHCSTFSDRIQPQSVDPTMNATYAEDLQAACPAGVDPNIALQLDPVTPQAFDNQYFANLVDGRGLFASDQVLFSDARSQPTVVAWAQNATAFEQAFVDAITRLGRVGVKTDPSLGDVRRDCAFLN

SEQ ID NO: 31158 - protein, 107 aa, Zea mays subsp. mays
  peptide (1)..(107): Ceres Seq. ID no. 12347273
  misc_feature (1)..(70): Pfam Name: Pfam Description:  Peroxidase
  misc_feature (1)..(106): NCBI GI NO: 17027274 NR Description: putative peroxidase
  misc_feature (1)..(107): NCBI GI NO: 34915320 NR Description: putative peroxidase
  misc_feature (1)..(107): NCBI GI NO: 15229646 NR Description: peroxidase, putative; protein id: At3g49960.1
  misc_feature (1)..(107): NCBI GI NO: 15240737 NR Description: peroxidase, putative; protein id: At5g67400.1
  misc_feature (1)..(107): NCBI GI NO: 28629828 NR Description: peroxidase 1 [Artemisia annua]
  misc_feature (1)..(107): NCBI GI NO: 14485511 NR Description: putative peroxidase [Solanum tuberosum]
  misc_feature (1)..(107): NCBI GI NO: 1546708 NR Description: peroxidase ATP9a [Arabidopsis thaliana]
  misc_feature (1)..(107): NCBI GI NO: 21554605 NR Description: peroxidase, prxr2 [Arabidopsis thaliana]
  misc_feature (1)..(107): NCBI GI NO: 15235597 NR Description: peroxidase, putative; protein id: At4g37520
  misc_feature (1)..(107): NCBI GI NO: 15235600 NR Description: peroxidase, putative; protein id: At4g37530
MNATYAEDLQAACPAGVDPNIALQLDPVTPQAFDNQYFANLVDGRGLFASDQVLFSDARSQPTVVAWAQNATAFEQAFVDAITRLGRVGVKTDPSLGDVRRDCAFLN

SEQ ID NO: 31159 - DNA, 1993 bp, Zea mays subsp. mays
  misc_feature (1)..(1993): Ceres Seq. ID no. 13586155
cttttttccttttcttttatcttatggttggctgtcccgtcccgtccatcagccgccacaccacaaacacccaccactctgctctcgcccgcttgctttctctcccccgctccagcttatggcggaggcggcgccagcagccggcggcggcatcggggacatcctcgccacgagcgatcgggacttcctcgtccgcaactccggcgagcaggtgaagatcagcagcgttgaggcgagccctgtggccatctacttctccgcctcatggtgcccgccatgcaggaggttcacgcccaagcttattgaagtatacgaaaaactggcctcacagggcaagagcttcgaggtcgtctttgcttcggccgatcgcaatgaggaagctttcaatgaatactttgcaaagatgccatggttggctgtccccttttctgacagtgaaggccgtgaggcccttgatggccagttcaaggtctctggtatcccacacctggtcatcctggatgcaaaaactggtgaagtttacactgaagatggtgttgaattcgtgagtgagtatggcgtggaggcttaccctttcacaccagatcggatcaatgaactgaaggaacaggaaaaggcagaaaaggagaatcaaactattcaaagcgtgcttgtcacatctactcgagactatctcatttcaaacaagggagacaaggtacccatctctgagcttgaggggaagtatgttggtctttgctttgtggtggatggctttccaccactcgctgaattcactgaggtgcttgctaagatctatgagaaactcaaagaagtgggagagaaatttgaagttgtagctgtatccttggacagtgaagagtcatcatttaatgagagttttgcaaagatgccttggcttgcaattcctcaaggtgacattaagtgtcagacgctggttcgttactttgagcttagttctcttccaacactagttctgattggccctgatgggaagacactgaacaacaatgtcgccgacataattgacgaccatggttttgaggcatgggagggcttccccttcagtgctgagaagctggaaattcttgctgagaaggcaaagattaaagctgcatcacagaccttggagtccattctaatcagtggtcatttagactttgtcattggaaaagatggtgcaaaggttcctgtatcagaacttgttgggaagactgtccttgtttacttctcaggaaaatggtgcccaccatgccgtgccttcctgcccacacttgtcaaggagtacaacaagatcaaagagaagaacagtgattttgagatcgtcttcatctctagtgacgaggatcagagctcattcgatgattttttctctgaaatgccatggcttgctgtaccctgggaagatgaaaggaaagcatcgctgaagaaaaccttcaagatccgtggaatcccttcacttgtcgccatcggacctactgggcagacagtcagcagggacgcaaagtcccagctgatgatccacggtgctgatgctttcccattcaccgaggagagacttgaggagctacagaagaagctggatgagatggcgaaggggtggcctcagaagctgaagcatgagctgcatgacgagcacgaacttgtcctgctgcgccgtggtacgtaccgctgtgatggttgtaacgagatgggcagcagctggtcctacaggtgcgacgagtgtgactttgacctgcaccccaagtgcgcgttgggtgaggaaaagatgggcgaggaagcccctgctgggtatgtgtgcgagggaggcgtgtgcaggaaggcctaatctgaatgctgtgaaggatgacaataatcgtgagatggctgtgttttgatgtaaggtttttcggccgttgatgtttgtgtgttaataaatagtagttgcaggagcaaatgtgtgtatgcaaaactatgtgagtattgtgtcagatcaaagtaatggttttgctgc

SEQ ID NO: 31160 - protein, 608 aa, Zea mays subsp. mays
  peptide (1)..(608): Ceres Seq. ID no. 13586156
  misc_feature (77)..(119): Pfam Name: Pfam Description:  Thioredoxin
  misc_feature (40)..(608): NCBI GI NO: 4056568 NR Description: PDI-like protein [Zea mays]
  misc_feature (40)..(608): NCBI GI NO: 18406743 NR Description: expressed protein [Arabidopsis thaliana]
  misc_feature (40)..(608): NCBI GI NO: 21592996 NR Description: PDI-like protein [Arabidopsis thaliana]
  misc_feature (54)..(532): NCBI GI NO: 23304737 NR Description: PDI-like protein [Quercus suber]
  misc_feature (209)..(590): NCBI GI NO: 18417767 NR Description: receptor kinase -related [Arabidopsis thaliana]
  misc_feature (63)..(485): NCBI GI NO: 38567893 NR Description: OSJNBa0060N03.13
  misc_feature (51)..(368): NCBI GI NO: 23304737 NR Description: PDI-like protein [Quercus suber]
  misc_feature (215)..(555): NCBI GI NO: 23304737 NR Description: PDI-like protein [Quercus suber]
  misc_feature (49)..(428): NCBI GI NO: 18417767 NR Description: receptor kinase -related [Arabidopsis thaliana]
  misc_feature (225)..(550): NCBI GI NO: 38567893 NR Description: OSJNBa0060N03.13
FFPFLLSYGWLSRPVHQPPHHKHPPLCSRPLAFSPPLQLMAEAAPAAGGGIGDILATSDRDFLVRNSGEQVKISSVEASPVAIYFSASWCPPCRRFTPKLIEVYEKLASQGKSFEVVFASADRNEEAFNEYFAKMPWLAVPFSDSEGREALDGQFKVSGIPHLVILDAKTGEVYTEDGVEFVSEYGVEAYPFTPDRINELKEQEKAEKENQTIQSVLVTSTRDYLISNKGDKVPISELEGKYVGLCFVVDGFPPLAEFTEVLAKIYEKLKEVGEKFEVVAVSLDSEESSFNESFAKMPWLAIPQGDIKCQTLVRYFELSSLPTLVLIGPDGKTLNNNVADIIDDHGFEAWEGFPFSAEKLEILAEKAKIKAASQTLESILISGHLDFVIGKDGAKVPVSELVGKTVLVYFSGKWCPPCRAFLPTLVKEYNKIKEKNSDFEIVFISSDEDQSSFDDFFSEMPWLAVPWEDERKASLKKTFKIRGIPSLVAIGPTGQTVSRDAKSQLMIHGADAFPFTEERLEELQKKLDEMAKGWPQKLKHELHDEHELVLLRRGTYRCDGCNEMGSSWSYRCDECDFDLHPKCALGEEKMGEEAPAGYVCEGGVCRKA

SEQ ID NO: 31161 - protein, 569 aa, Zea mays subsp. mays
  peptide (1)..(569): Ceres Seq. ID no. 13586157
  misc_feature (38)..(80): Pfam Name: Pfam Description:  Thioredoxin
  misc_feature (1)..(569): NCBI GI NO: 4056568 NR Description: PDI-like protein [Zea mays]
  misc_feature (1)..(569): NCBI GI NO: 18406743 NR Description: expressed protein [Arabidopsis thaliana]
  misc_feature (1)..(569): NCBI GI NO: 21592996 NR Description: PDI-like protein [Arabidopsis thaliana]
  misc_feature (15)..(493): NCBI GI NO: 23304737 NR Description: PDI-like protein [Quercus suber]
  misc_feature (170)..(551): NCBI GI NO: 18417767 NR Description: receptor kinase -related [Arabidopsis thaliana]
  misc_feature (24)..(446): NCBI GI NO: 38567893 NR Description: OSJNBa0060N03.13
  misc_feature (12)..(329): NCBI GI NO: 23304737 NR Description: PDI-like protein [Quercus suber]
  misc_feature (176)..(516): NCBI GI NO: 23304737 NR Description: PDI-like protein [Quercus suber]
  misc_feature (10)..(389): NCBI GI NO: 18417767 NR Description: receptor kinase -related [Arabidopsis thaliana]
  misc_feature (186)..(511): NCBI GI NO: 38567893 NR Description: OSJNBa0060N03.13
MAEAAPAAGGGIGDILATSDRDFLVRNSGEQVKISSVEASPVAIYFSASWCPPCRRFTPKLIEVYEKLASQGKSFEVVFASADRNEEAFNEYFAKMPWLAVPFSDSEGREALDGQFKVSGIPHLVILDAKTGEVYTEDGVEFVSEYGVEAYPFTPDRINELKEQEKAEKENQTIQSVLVTSTRDYLISNKGDKVPISELEGKYVGLCFVVDGFPPLAEFTEVLAKIYEKLKEVGEKFEVVAVSLDSEESSFNESFAKMPWLAIPQGDIKCQTLVRYFELSSLPTLVLIGPDGKTLNNNVADIIDDHGFEAWEGFPFSAEKLEILAEKAKIKAASQTLESILISGHLDFVIGKDGAKVPVSELVGKTVLVYFSGKWCPPCRAFLPTLVKEYNKIKEKNSDFEIVFISSDEDQSSFDDFFSEMPWLAVPWEDERKASLKKTFKIRGIPSLVAIGPTGQTVSRDAKSQLMIHGADAFPFTEERLEELQKKLDEMAKGWPQKLKHELHDEHELVLLRRGTYRCDGCNEMGSSWSYRCDECDFDLHPKCALGEEKMGEEAPAGYVCEGGVCRKA

SEQ ID NO: 31162 - protein, 474 aa, Zea mays subsp. mays
  peptide (1)..(474): Ceres Seq. ID no. 13586158
  misc_feature (422)..(450): Pfam Name: Pfam Description:  DC1 domain
  misc_feature (1)..(474): NCBI GI NO: 4056568 NR Description: PDI-like protein [Zea mays]
  misc_feature (1)..(474): NCBI GI NO: 18406743 NR Description: expressed protein [Arabidopsis thaliana]
  misc_feature (1)..(474): NCBI GI NO: 21592996 NR Description: PDI-like protein [Arabidopsis thaliana]
  misc_feature (1)..(398): NCBI GI NO: 23304737 NR Description: PDI-like protein [Quercus suber]
  misc_feature (75)..(456): NCBI GI NO: 18417767 NR Description: receptor kinase -related [Arabidopsis thaliana]
  misc_feature (1)..(351): NCBI GI NO: 38567893 NR Description: OSJNBa0060N03.13
  misc_feature (1)..(234): NCBI GI NO: 23304737 NR Description: PDI-like protein [Quercus suber]
  misc_feature (81)..(421): NCBI GI NO: 23304737 NR Description: PDI-like protein [Quercus suber]
  misc_feature (1)..(294): NCBI GI NO: 18417767 NR Description: receptor kinase -related [Arabidopsis thaliana]
  misc_feature (91)..(416): NCBI GI NO: 38567893 NR Description: OSJNBa0060N03.13
MPWLAVPFSDSEGREALDGQFKVSGIPHLVILDAKTGEVYTEDGVEFVSEYGVEAYPFTPDRINELKEQEKAEKENQTIQSVLVTSTRDYLISNKGDKVPISELEGKYVGLCFVVDGFPPLAEFTEVLAKIYEKLKEVGEKFEVVAVSLDSEESSFNESFAKMPWLAIPQGDIKCQTLVRYFELSSLPTLVLIGPDGKTLNNNVADIIDDHGFEAWEGFPFSAEKLEILAEKAKIKAASQTLESILISGHLDFVIGKDGAKVPVSELVGKTVLVYFSGKWCPPCRAFLPTLVKEYNKIKEKNSDFEIVFISSDEDQSSFDDFFSEMPWLAVPWEDERKASLKKTFKIRGIPSLVAIGPTGQTVSRDAKSQLMIHGADAFPFTEERLEELQKKLDEMAKGWPQKLKHELHDEHELVLLRRGTYRCDGCNEMGSSWSYRCDECDFDLHPKCALGEEKMGEEAPAGYVCEGGVCRKA

SEQ ID NO: 31163 - DNA, 793 bp, Zea mays subsp. mays
  misc_feature (1)..(793): Ceres Seq. ID no. 12415980
gagagagagagagcgcgcgcgcgctggcaatggcgggagccgacgacctgaaggtgctgggcctgtggacgagcccgttcgtgatccgggtccgcatcgtgctcaacctcaagggcctggcgtacgagtacgtggaggacgacctcggcaacaagagcgcgctcctgctcagctccaacccggtgcacaagaccgtgcccgtgctgctccacgcgggtcgccccgtaaacgagtcccagatcatcctgcagtacatcgacgaggtctgggcggggaccgggccggccgtgctgccgcgcgacccctatgagcgcgcggccgcgcggttctgggcggcctacatcgacgacaaggtgaagtccgcgtggctgggcatgctgttcgagtgcagggacgagggggagcgggcggaggcggtggcgcgggccggcgaggcgctcgggacgctggagggcgcgctcagggggaagcccttcttcggcggcgacggcgtcggcttcgtggacgccgtgctcggcgggtacctcggctggttcggggccgtcggcaggatcatcggccgcaggctgatcgacccgactaagacgccgctgctggccgcgtgggaggaccggttccgcgccgccgacgtggccaagggcgtcgtaccggacgacgtcgacaagatgctcgcgttcctggagaccctgctcgcgaactactactccaagtgactgtactgagagcgaactactgctccaagtgactaaataagaagggctgcttaattaataattacagtatataattgtgc

SEQ ID NO: 31164 - protein, 236 aa, Zea mays subsp. mays
  peptide (1)..(236): Ceres Seq. ID no. 12415981
  misc_feature (97)..(209): Pfam Name: Pfam Description:  Glutathione S-transferase, C-terminal domain
  misc_feature (12)..(236): NCBI GI NO: 11385501 NR Description: glutathione S-transferase GST 25 [Zea mays]
  misc_feature (10)..(236): NCBI GI NO: 11385511 NR Description: glutathione S-transferase GST 30 [Zea mays]
  misc_feature (10)..(231): NCBI GI NO: 20067421 NR Description: glutathione transferase [Triticum aestivum]
  misc_feature (10)..(230): NCBI GI NO: 37536360 NR Description: putative glutathione S-transferase
  misc_feature (10)..(236): NCBI GI NO: 37536368 NR Description: putative glutathione S-transferase
  misc_feature (8)..(230): NCBI GI NO: 11385527 NR Description: glutathione S-transferase GST 38 [Zea mays]
  misc_feature (10)..(231): NCBI GI NO: 11385535 NR Description: glutathione S-transferase GST 42 [Zea mays]
  misc_feature (10)..(225): NCBI GI NO: 21730248 NR Description: Chain A
  misc_feature (10)..(217): NCBI GI NO: 37536308 NR Description: putative glutathione S-transferase
  misc_feature (12)..(231): NCBI GI NO: 11385521 NR Description: glutathione S-transferase GST 35 [Zea mays]
ERESARALAMAGADDLKVLGLWTSPFVIRVRIVLNLKGLAYEYVEDDLGNKSALLLSSNPVHKTVPVLLHAGRPVNESQIILQYIDEVWAGTGPAVLPRDPYERAAARFWAAYIDDKVKSAWLGMLFECRDEGERAEAVARAGEALGTLEGALRGKPFFGGDGVGFVDAVLGGYLGWFGAVGRIIGRRLIDPTKTPLLAAWEDRFRAADVAKGVVPDDVDKMLAFLETLLANYYSK

SEQ ID NO: 31165 - protein, 227 aa, Zea mays subsp. mays
  peptide (1)..(227): Ceres Seq. ID no. 12415982
  misc_feature (88)..(200): Pfam Name: Pfam Description:  Glutathione S-transferase, C-terminal domain
  misc_feature (3)..(227): NCBI GI NO: 11385501 NR Description: glutathione S-transferase GST 25 [Zea mays]
  misc_feature (1)..(227): NCBI GI NO: 11385511 NR Description: glutathione S-transferase GST 30 [Zea mays]
  misc_feature (1)..(222): NCBI GI NO: 20067421 NR Description: glutathione transferase [Triticum aestivum]
  misc_feature (1)..(221): NCBI GI NO: 37536360 NR Description: putative glutathione S-transferase
  misc_feature (1)..(227): NCBI GI NO: 37536368 NR Description: putative glutathione S-transferase
  misc_feature (1)..(221): NCBI GI NO: 11385527 NR Description: glutathione S-transferase GST 38 [Zea mays]
  misc_feature (1)..(222): NCBI GI NO: 11385535 NR Description: glutathione S-transferase GST 42 [Zea mays]
  misc_feature (1)..(216): NCBI GI NO: 21730248 NR Description: Chain A
  misc_feature (1)..(208): NCBI GI NO: 37536308 NR Description: putative glutathione S-transferase
  misc_feature (3)..(222): NCBI GI NO: 11385521 NR Description: glutathione S-transferase GST 35 [Zea mays]
MAGADDLKVLGLWTSPFVIRVRIVLNLKGLAYEYVEDDLGNKSALLLSSNPVHKTVPVLLHAGRPVNESQIILQYIDEVWAGTGPAVLPRDPYERAAARFWAAYIDDKVKSAWLGMLFECRDEGERAEAVARAGEALGTLEGALRGKPFFGGDGVGFVDAVLGGYLGWFGAVGRIIGRRLIDPTKTPLLAAWEDRFRAADVAKGVVPDDVDKMLAFLETLLANYYSK

SEQ ID NO: 31166 - DNA, 897 bp, Zea mays subsp. mays
  misc_feature (1)..(897): Ceres Seq. ID no. 13493255
  misc_feature (479)..(479): n is a, c, t, g, unknown, or other
aatctatacacgattgacctgagctgagccgcctcccgtctcgagagggagggagagcgagagcgagagcgagagagctagcgcgcgcgatcgcaaagagatcggtgaagatgaaggtgcagtgcgacgtgtgcgcggccgaggcggcgtctgtgttctgctgcgccgacgaggccgcgctgtgcgaggcgtgcgaccgccgcgtgcaccgcgccaacaagctcgccggcaagcaccgccggctctcgctgctcggcccggcggcgccgtcctcgtcggcgcagcagacaccgccgcctccgctctgcgacatctgccaggagaagcgcgggctcctgttctgcaaggaggaccgggcgatcctgtgccgcgactgcgacgtgccggtgcacacggccagcgagctggccatgcgccacacccggttcctgctcacgggcgtgcgcctctccgcagagcccgccgcgcgcccgccgccntcggaggaggacgagaacgacagcagcggcagcagcatctccgagtacctgaccaagacgctgcccgggtggcatgtcgaggacttcctggtggacgagaccgccgccgccgcaactaccattggcgtctccacagacgtgtcgtatcaggcgggagggctagctcggacaggcgacggctactactccgcgtggatggcgccggagcagatcttctgcgagggcaagggcagcaggatgccgcagatggcgatgtgcagcagcagcaagagacccagagccacgtcctcctattcttactggtgaacaacccaacaggagacgaccgtgtcagagccgtcagccgtctgtctgtattattatttcgttcatgcatatgcctcggctggtgcattattcttaccgctagtctgcctgc
